United States Patent Application Publication US 2025/0084491 A1 - sequence listing, part 23

SEQ ID NO: 431357 - DNA, 75 bp, synthetic construct
  source 1..75: mol_type = other DNA
ctggaggacgacggtcagatcagcgccaaaatcaacgggcggattttcccgcttaacggcaagcgtaactatctc

SEQ ID NO: 431358 - DNA, 75 bp, synthetic construct
  source 1..75: mol_type = other DNA
tagcgcagggatgactcatcaaaacggctacaccatggcaaacctgtcagcacgcaaacagtttgatgaaggaac

SEQ ID NO: 431359 - DNA, 75 bp, synthetic construct
  source 1..75: mol_type = other DNA
cttgccgcagacaatccgcgggcaacgcaacaacagctcctgatgaatcaacccccgctgaattatcaccttatc

SEQ ID NO: 431360 - DNA, 75 bp, synthetic construct
  source 1..75: mol_type = other DNA
atacgttgtgccgggcaaaaagactggcagggcgcaactaaactaatggccagctctgaatctgcctgtcttcag

SEQ ID NO: 431361 - DNA, 75 bp, synthetic construct
  source 1..75: mol_type = other DNA
acgccatttgtcctgcatgtagcggcacgtaccgttgccacacatgcactctctatttttggcgatcattccgac

SEQ ID NO: 431362 - DNA, 75 bp, synthetic construct
  source 1..75: mol_type = other DNA
cgatatcggcttcggaggtctggatcatgtattaagcctgacggaaaacgtcaacattctggtgctggacacgca

SEQ ID NO: 431363 - DNA, 75 bp, synthetic construct
  source 1..75: mol_type = other DNA
catgtcttaagtctgacggaaaacgtcaacattctggtactggatacgcaatgttattccaataccggcggtcag

SEQ ID NO: 431364 - DNA, 75 bp, synthetic construct
  source 1..75: mol_type = other DNA
gacagtgccctggctgaattgcagggcgcaattgccaaaagctacagcagcaaaggtcaggatctggtggaacgc

SEQ ID NO: 431365 - DNA, 75 bp, synthetic construct
  source 1..75: mol_type = other DNA
cagtaactaagttcggcgagcacggcaaacgtaaagcgcgtaaagatcttggcatcagtatgatgatgtacggtc

SEQ ID NO: 431366 - DNA, 75 bp, synthetic construct
  source 1..75: mol_type = other DNA
ccgcaggaagttcaggccgtgttaaaccagaaaaaagcgcgcttctatgtgattaacgcggcgaaaatcgcccgt

SEQ ID NO: 431367 - DNA, 75 bp, synthetic construct
  source 1..75: mol_type = other DNA
gctatcgccggtgtggctacccatattgtcgtcgcacccgatgaaacctatatcactcatgcttttggtgactct

SEQ ID NO: 431368 - DNA, 75 bp, synthetic construct
  source 1..75: mol_type = other DNA
acaggcaatgagtgataccaacctggtgatcgtcacggataaacgtacctataacatcgtccttcatttcatcgg

SEQ ID NO: 431369 - DNA, 75 bp, synthetic construct
  source 1..75: mol_type = other DNA
cgtatctgacccggaatcgtttgtgcgaggtccggctgaaagacggagacagggaggttacggcaagtctggctt

SEQ ID NO: 431370 - DNA, 75 bp, synthetic construct
  source 1..75: mol_type = other DNA
tgcctgctctggttgtggagaaacgccgtatatcaaactgcttacccagttgtatggcgaccgaatgttgattgc

SEQ ID NO: 431371 - DNA, 75 bp, synthetic construct
  source 1..75: mol_type = other DNA
gcgcgatgttgtgtgcagcaaacgtccaggaagcgcaagactttgctctcatttcgcacatcgcgacgctgaaaa

SEQ ID NO: 431372 - DNA, 75 bp, synthetic construct
  source 1..75: mol_type = other DNA
cccggacacttacttccagtcacgtgaagccactaacccgtggtacaacgcggtttatgagcatgttgaacaggc

SEQ ID NO: 431373 - DNA, 75 bp, synthetic construct
  source 1..75: mol_type = other DNA
aatgaaactctgcgtgctgatgttgccgctggtcgtaagcgcctgcggatcaacgccacctgccccggtaccgtg

SEQ ID NO: 431374 - DNA, 75 bp, synthetic construct
  source 1..75: mol_type = other DNA
taccgtgataacgccatcgcctacaaagagcagcgtgataaaaaagtcagtgagctgaagcaggcgaccgccacc

SEQ ID NO: 431375 - DNA, 75 bp, synthetic construct
  source 1..75: mol_type = other DNA
ccgctttggttatttgcatcatcgtctgcctgtcatgggcggttaatcattaccgtgataacgccatcacctaca

SEQ ID NO: 431376 - DNA, 75 bp, synthetic construct
  source 1..75: mol_type = other DNA
cgaaacgttctcggtatccgggacggaatcatcagagaccagacagcactgagaacgcttcaggaatacatcaag

SEQ ID NO: 431377 - DNA, 75 bp, synthetic construct
  source 1..75: mol_type = other DNA
ttgctggacgaaacgttctcggtatccgggacggaatcatcagagaccagacagcactgagaacgcttcaggaat

SEQ ID NO: 431378 - DNA, 75 bp, synthetic construct
  source 1..75: mol_type = other DNA
gctgtgatattcgacctggaaggcaatcaaatagcagtgggacaggcggagtggcggcacctggcagtaccggac

SEQ ID NO: 431379 - DNA, 75 bp, synthetic construct
  source 1..75: mol_type = other DNA
attttttcatcaatggcagaaaccggagaacgcctggttcgctgggaacggacgcacacaccagacccggaaaag

SEQ ID NO: 431380 - DNA, 75 bp, synthetic construct
  source 1..75: mol_type = other DNA
ggctcaatggcactggcatgggcattcgcaaaatgcggtatgttcagccgtaaatcaggaggtatgggcggttat

SEQ ID NO: 431381 - DNA, 75 bp, synthetic construct
  source 1..75: mol_type = other DNA
ttattaccgtctccgaagtggaatcgacaggataaccgcacaggttaactacttgcaggagtacatcaggacgca

SEQ ID NO: 431382 - DNA, 75 bp, synthetic construct
  source 1..75: mol_type = other DNA
gttgtcggcgcgggtgactacacctggaaaggccgtaactatcaggtaaacgggacgggcgacgtgcttatcgac

SEQ ID NO: 431383 - DNA, 75 bp, synthetic construct
  source 1..75: mol_type = other DNA
ctcgggattacccgtcaatattccggtggtcaaagaagccactgcattaggatgtgccattgcagctggcgtcgg

SEQ ID NO: 431384 - DNA, 75 bp, synthetic construct
  source 1..75: mol_type = other DNA
atggcaacaccaaatcccctggcgccggtaaaaggtgccggtaccaccctgtgggtttataacggtcagggtgac

SEQ ID NO: 431385 - DNA, 75 bp, synthetic construct
  source 1..75: mol_type = other DNA
caacaaaaggtgctggtaccaccctatgggtttacaccggaaccggtgacccttatgccaacccgctttcagatg

SEQ ID NO: 431386 - DNA, 75 bp, synthetic construct
  source 1..75: mol_type = other DNA
ccgccgatccgtcaacgggaaccattgctgtgaaagatatggcgatcactgtgacgggggttaaggctggaaaag

SEQ ID NO: 431387 - DNA, 75 bp, synthetic construct
  source 1..75: mol_type = other DNA
gaccttgatggccgcttcctctgtatggcggagtgtcgcgccgcagtggcgtttggtgataccgaggctggtcgg

SEQ ID NO: 431388 - DNA, 75 bp, synthetic construct
  source 1..75: mol_type = other DNA
ggttaaggctggaaaagtgagtatccccgtgatttccggtaatggtcagtttgccacggtagctgaagtcaccgt

SEQ ID NO: 431389 - DNA, 75 bp, synthetic construct
  source 1..75: mol_type = other DNA
ggtgaaggtcaccaatgtgggccgtccgtcgatggcagaagatcgcagtacggtgacagcggcaaccggtatgac

SEQ ID NO: 431390 - DNA, 75 bp, synthetic construct
  source 1..75: mol_type = other DNA
cagatccctgttgtcaccggcaatggtgagtttgctgcagttgctgaaattaacgtcacggatggtgccgctggc

SEQ ID NO: 431391 - DNA, 75 bp, synthetic construct
  source 1..75: mol_type = other DNA
tgatcaggctttcgaacaaagctacagccaggctgtgatcacccgtttaactgaagaacaaatccgccagttcat

SEQ ID NO: 431392 - DNA, 75 bp, synthetic construct
  source 1..75: mol_type = other DNA
gaaaacgacaacccaggggcagaaatccgtcggtgatacttcggcgacgctggcctggcgtccgggtgacagcgg

SEQ ID NO: 431393 - DNA, 75 bp, synthetic construct
  source 1..75: mol_type = other DNA
tcgcgtgagcgacatggtgttcctcgatgacgctaatccattaaccggttttatgttgatcgacaccgccatctg

SEQ ID NO: 431394 - DNA, 75 bp, synthetic construct
  source 1..75: mol_type = other DNA
gtattaaacggattttggggatattctcatctcaggagaatgatgcaacctctgtaatgattgaggatatatcaa

SEQ ID NO: 431395 - DNA, 75 bp, synthetic construct
  source 1..75: mol_type = other DNA
atgaaagtattattgtcaattaacccagagcatgtagaaaaaatccttaatggaacaaagaaatttgaattccga

SEQ ID NO: 431396 - DNA, 75 bp, synthetic construct
  source 1..75: mol_type = other DNA
cctatttctatccgttaagagagcgttttgttagtgcgtggatcaaacagcgtgctgcatgccgctcaatgtcgt

SEQ ID NO: 431397 - DNA, 75 bp, synthetic construct
  source 1..75: mol_type = other DNA
cctcgttactatcaagctgtttttctggcactgttgcaaatagtcggtggtgataaacttatcatccccttttgc

SEQ ID NO: 431398 - DNA, 75 bp, synthetic construct
  source 1..75: mol_type = other DNA
gtatctcgaaattacggcaaccaaatatgattcaccaacaatgtatgtcgccataggtaatgctgccaacttact

SEQ ID NO: 431399 - DNA, 75 bp, synthetic construct
  source 1..75: mol_type = other DNA
ataaattagattttcagcacgaagccaggatattaaacggcatatggctcattaccgctttgggtttggtggcaa

SEQ ID NO: 431400 - DNA, 75 bp, synthetic construct
  source 1..75: mol_type = other DNA
gaatttaaagtaggagatattcttgctctatccccttcagaattgtgggataaaacgaaagctcatgcaggaatt

SEQ ID NO: 431401 - DNA, 75 bp, synthetic construct
  source 1..75: mol_type = other DNA
tcaccgcgatgatcgaaacgggtgttaccattccgtcaatgtgtctgtctgcccatcgccgttttccttttggca

SEQ ID NO: 431402 - DNA, 75 bp, synthetic construct
  source 1..75: mol_type = other DNA
aagggctggcgtgggctgttgaacaggcggcggcatcgcaagtgatgctggcggtggaaattatggacaccgcgt

SEQ ID NO: 431403 - DNA, 75 bp, synthetic construct
  source 1..75: mol_type = other DNA
gcttatgatgcaaaacttgcggatctggaaaataaaattattaagactgtcgctacgatcccacaggaaaagcgt

SEQ ID NO: 431404 - DNA, 75 bp, synthetic construct
  source 1..75: mol_type = other DNA
tgcgccagtatttaaaaggcgatcgacgcggtttcgaagcttatgcagttcgtgatgccgaaattgccgtgcgct

SEQ ID NO: 431405 - DNA, 75 bp, synthetic construct
  source 1..75: mol_type = other DNA
gtctattcgcgcgtacgactgaatagcgaaatcagccgtaaagatatgctgttgctggcgctgatgtcttcagaa

SEQ ID NO: 431406 - DNA, 75 bp, synthetic construct
  source 1..75: mol_type = other DNA
gccgggacgacgccgtgcgccagcgggcgcgggagattatgagtaaagcgattcgcctggcgcgcgatctcggca

SEQ ID NO: 431407 - DNA, 75 bp, synthetic construct
  source 1..75: mol_type = other DNA
tggcagcttatatagtgagatatctggaacaacaaaaaaatgttaatttatataatattattaaacggttactgt

SEQ ID NO: 431408 - DNA, 75 bp, synthetic construct
  source 1..75: mol_type = other DNA
ttgccggattacggtctgccggatctcagtctgatccatcagggtatggctgcgggtattcatggcctgatgcgt

SEQ ID NO: 431409 - DNA, 75 bp, synthetic construct
  source 1..75: mol_type = other DNA
tatgccggagggcagggtgttactgcgatatctgaagcaacagcagtttgtggataatgtgatgactttcagggg

SEQ ID NO: 431410 - DNA, 75 bp, synthetic construct
  source 1..75: mol_type = other DNA
gctggagttaaaccaggtcggtgaggaagagcaggttattctttcggtgctcgataacatgcagcgtattctgaa

SEQ ID NO: 431411 - DNA, 75 bp, synthetic construct
  source 1..75: mol_type = other DNA
ctctggtgcaacggggttatgttgaaccctacgacgatgaacgtgtggttcattactttattcccgggacatatt

SEQ ID NO: 431412 - DNA, 75 bp, synthetic construct
  source 1..75: mol_type = other DNA
accgggttaaaaaggagcgtgtctatgcaaaaatggttacggcacttaatgtctataacgacggcaatgactttt

SEQ ID NO: 431413 - DNA, 75 bp, synthetic construct
  source 1..75: mol_type = other DNA
ctgtatgccgcttttatctgcggcctagtacatgatgcagggaaggtatatgaccttgatatagttagtctcaac

SEQ ID NO: 431414 - DNA, 75 bp, synthetic construct
  source 1..75: mol_type = other DNA
tggcgtcaaacctcctgccgatattccacgcagtgactataacgactatatggtagatctttaccttaatcgttt

SEQ ID NO: 431415 - DNA, 75 bp, synthetic construct
  source 1..75: mol_type = other DNA
ttgagtttacacctgattctgaaatttcagaacgttgggaaaaacaatgggttaatattgatattgataaggaaa

SEQ ID NO: 431416 - DNA, 75 bp, synthetic construct
  source 1..75: mol_type = other DNA
cataatcattatcacgaagaatatctgtggcacagccattttcttacgccggattttttactgctacatttttcc

SEQ ID NO: 431417 - DNA, 75 bp, synthetic construct
  source 1..75: mol_type = other DNA
ttgccggattacggtctgccggatctcagtttgatccatcaggggatggctgcaggtattcatggcctgatgcgt

SEQ ID NO: 431418 - DNA, 75 bp, synthetic construct
  source 1..75: mol_type = other DNA
tctttcaaacgattacaccgcttcttgaaacgggtgtgattacaaaatggcccggtattattaatatatatgcgc

SEQ ID NO: 431419 - DNA, 75 bp, synthetic construct
  source 1..75: mol_type = other DNA
ctctgtaacactgcgaatgaagcgactgatggatatcatcgcccgtaaatatccgacattcggtcttcccgtgtg

SEQ ID NO: 431420 - DNA, 75 bp, synthetic construct
  source 1..75: mol_type = other DNA
gttttaaagcctatgatattcgcggaaaactaggcgaagaactgaatgaagatatcgcctggcgcattggtcgcg

SEQ ID NO: 431421 - DNA, 75 bp, synthetic construct
  source 1..75: mol_type = other DNA
tgaatgtggaatcgcgcggtaatatagcattaatgaatgaacaggttgaatttattacaaaatttttaaacggtg

SEQ ID NO: 431422 - DNA, 75 bp, synthetic construct
  source 1..75: mol_type = other DNA
cgcctgtcgatgaaacaacacgcggtagttatcagcaaatcaacctgcgcgacgcctacattgatcacctgttcg

SEQ ID NO: 431423 - DNA, 75 bp, synthetic construct
  source 1..75: mol_type = other DNA
acagttgccgggcattccgattgcaggcggcgatgactttggctccgtcaccgccgggctggcacgctgggcgga

SEQ ID NO: 431424 - DNA, 75 bp, synthetic construct
  source 1..75: mol_type = other DNA
acttccaggggctgggcggcgatgaagcaaacacccaggcgcaagggattctggaacgcgcggcgaagcgtgccg

SEQ ID NO: 431425 - DNA, 75 bp, synthetic construct
  source 1..75: mol_type = other DNA
cgaaccggaaaaagtggccctgctacagaaagtctggcgtcagcgtttaagctatcgcctggtgcgtagcgcaga

SEQ ID NO: 431426 - DNA, 75 bp, synthetic construct
  source 1..75: mol_type = other DNA
atataaaacttttcttcgttgtagaactcgctatgaactaaaaaattgtgttcagagcgatatacgttatgaggt

SEQ ID NO: 431427 - DNA, 75 bp, synthetic construct
  source 1..75: mol_type = other DNA
ctttgtggatttcatttctgataacgaagctaaaaaaataaaagaatatcttgtgagtaatctttctcgtgtact

SEQ ID NO: 431428 - DNA, 75 bp, synthetic construct
  source 1..75: mol_type = other DNA
aggaggcactatgccgcaattaactgcaacggaagccgccgtgcaggagaaccagcgagtgatggggatcctgac

SEQ ID NO: 431429 - DNA, 75 bp, synthetic construct
  source 1..75: mol_type = other DNA
gcaaactggcgcaacccgttgaggcgattaaccgcgtcgaacagcactttagccgcgaggcgctggcggtggatc

SEQ ID NO: 431430 - DNA, 75 bp, synthetic construct
  source 1..75: mol_type = other DNA
tgtcgaaaaccggacacgcctttattaaagaacggatgcgcaaggaagacgccatctacggtggcgaaatgagcg

SEQ ID NO: 431431 - DNA, 75 bp, synthetic construct
  source 1..75: mol_type = other DNA
ctttaaagccctcggcgcaccggtggaattaatcaaagtgcacaacacgccggacggcaatttccccaacggtat

SEQ ID NO: 431432 - DNA, 75 bp, synthetic construct
  source 1..75: mol_type = other DNA
aacgccctcagtcagccgctggcgcgaattctggaacaggtgcaactggcgctggataacgcccaggaaaaaccg

SEQ ID NO: 431433 - DNA, 75 bp, synthetic construct
  source 1..75: mol_type = other DNA
ctggcagccagcggcaccccggaaaatcagggaatatgccccgcagaaccgtgagcttcatcgtatctcggatgc

SEQ ID NO: 431434 - DNA, 75 bp, synthetic construct
  source 1..75: mol_type = other DNA
atgagcagaattatcaccaccactgtgtatacgctgaatgagttatcctccaccgcacaggaaacagcccgcgac

SEQ ID NO: 431435 - DNA, 75 bp, synthetic construct
  source 1..75: mol_type = other DNA
gtcaccggggacgctattgccatccgtacagcatggttatcactgtcacccggggcagtccggtcgggcaggaaa

SEQ ID NO: 431436 - DNA, 75 bp, synthetic construct
  source 1..75: mol_type = other DNA
gtacaaaatgaacaatcaagacctctgcctgatgtggctcagcgtctggtgcagcatcttgcagagcatggcatt

SEQ ID NO: 431437 - DNA, 75 bp, synthetic construct
  source 1..75: mol_type = other DNA
cgggtcctgtgattatcgacagtaatgaggtgacacagttttacccggaccatgaaagtggaggggaactcaccg

SEQ ID NO: 431438 - DNA, 75 bp, synthetic construct
  source 1..75: mol_type = other DNA
atgagcagaattatcacctccaccgtgtatacactgaatgagctatccgccaccgcacaggaaaaagcccgcgac

SEQ ID NO: 431439 - DNA, 75 bp, synthetic construct
  source 1..75: mol_type = other DNA
cggtctgcacgccggctgacctgtcatcgttaaactatcattcaccgattttctgtgaggactttatcgtgtcag

SEQ ID NO: 431440 - DNA, 75 bp, synthetic construct
  source 1..75: mol_type = other DNA
tgccataaagctgttctaccagcgtttgcttgccgccggaaaacccaaaaaacttgctctggtcgcctgcatgcg

SEQ ID NO: 431441 - DNA, 75 bp, synthetic construct
  source 1..75: mol_type = other DNA
gtgcgtagcgcagaagagtgcaaaattgctctttcaagcgtagcggaaacccgcgcctcactgccgtttatcagc

SEQ ID NO: 431442 - DNA, 75 bp, synthetic construct
  source 1..75: mol_type = other DNA
ccgcgccggcatcagaggcctgttcagcgatgcagatgcgtaccacctggaccaggcctttccgctgctgatgaa

SEQ ID NO: 431443 - DNA, 75 bp, synthetic construct
  source 1..75: mol_type = other DNA
gtaaccggttgcattaccttgtcgaccgcgccggcatcagaggcctgttcagcgatgcagatgcgtaccacctgg

SEQ ID NO: 431444 - DNA, 75 bp, synthetic construct
  source 1..75: mol_type = other DNA
tgggggctaccctgcaccgtgacgccctgtttcggggcacgtctggtgcaggagggcaatcagttgcattacctt

SEQ ID NO: 431445 - DNA, 75 bp, synthetic construct
  source 1..75: mol_type = other DNA
ccggcagcggtgcagggtggcgtgtcacagacgtcggcagacggtgatgcggacgtgaaaatgctcatggccatg

SEQ ID NO: 431446 - DNA, 75 bp, synthetic construct
  source 1..75: mol_type = other DNA
tttgctaacttcaaccgcccgttaaagctggttgtcaattcaggtaatggtgccgcaggtcatgccattgacgct

SEQ ID NO: 431447 - DNA, 75 bp, synthetic construct
  source 1..75: mol_type = other DNA
ttttgccgatgggttaacattagaatttattgattggagagttaatgttagatcttcaaatactgaacctgtatt

SEQ ID NO: 431448 - DNA, 75 bp, synthetic construct
  source 1..75: mol_type = other DNA
cagcggggataccggactgcgcgaggtccagcgtctggcagaagccaacgactttccccccgtcgatgaaaccaa

SEQ ID NO: 431449 - DNA, 75 bp, synthetic construct
  source 1..75: mol_type = other DNA
tcggggtcaggtaaggcagaaccggtctctgcatccacaaccgccctgtttgaacatttcatggcgaatcattca

SEQ ID NO: 431450 - DNA, 75 bp, synthetic construct
  source 1..75: mol_type = other DNA
cggcctgttggcagaagcattcctcgaaaaaaatcccggcgcgaagatcatccacgatccacgtctctcctggaa

SEQ ID NO: 431451 - DNA, 75 bp, synthetic construct
  source 1..75: mol_type = other DNA
atctcggtgtggatggcggcattgaagttaccgccagccataatccgatggattataacggcatgaaactcgtgc

SEQ ID NO: 431452 - DNA, 75 bp, synthetic construct
  source 1..75: mol_type = other DNA
cagcggcgataccggactgcgcgaagtccagcgtctggcagaagcaaacgactttccccccgtcgatgaaaccaa

SEQ ID NO: 431453 - DNA, 75 bp, synthetic construct
  source 1..75: mol_type = other DNA
cagcggagataccggactgcgcgaagtccagcgtctggcagaagccaacgactttccccccgtcgatgaaaccaa

SEQ ID NO: 431454 - DNA, 75 bp, synthetic construct
  source 1..75: mol_type = other DNA
ggcaccgaagagatttatttcgccacgttccatctcggcgtggatggcggcatggaagttacggccagccataag

SEQ ID NO: 431455 - DNA, 75 bp, synthetic construct
  source 1..75: mol_type = other DNA
cagcggcgataccggactgcgcgaggtccagcgtctggcagaagcgaacgactttccccccgtcgatgaaaccaa

SEQ ID NO: 431456 - DNA, 75 bp, synthetic construct
  source 1..75: mol_type = other DNA
cagcggcgataccggactgcgcgacgtccagcgtctggcagaagccaacgactttccccccgtcgatgaaaccaa

SEQ ID NO: 431457 - DNA, 75 bp, synthetic construct
  source 1..75: mol_type = other DNA
cagcggcgataccggactgcgcgatgtccagcgtctggcagaagctaacgactttccccccgtcgatgaaaccaa

SEQ ID NO: 431458 - DNA, 75 bp, synthetic construct
  source 1..75: mol_type = other DNA
gtcacgggaacagaggccgccgtttttgaaggtcagtccggcattgaggccgggctggcggatgaattaatcaat

SEQ ID NO: 431459 - DNA, 75 bp, synthetic construct
  source 1..75: mol_type = other DNA
cgtcgttaaaaaagccttgcacgtacagatggatggcttagaaaccgtgttggctgcgatgtgtgaaccgcaaat

SEQ ID NO: 431460 - DNA, 75 bp, synthetic construct
  source 1..75: mol_type = other DNA
gactggggatattatgaggtcaacttaatcggcggcgaacagcaaattgccgatttacagcagcaagataatctt

SEQ ID NO: 431461 - DNA, 75 bp, synthetic construct
  source 1..75: mol_type = other DNA
ctccgcattgaacagtgggcagcaaacgttaagaacgcatataataccaacacatacgaccctttccatattaac

SEQ ID NO: 431462 - DNA, 75 bp, synthetic construct
  source 1..75: mol_type = other DNA
gtgaccggcacgctggtgcaccggctgggggtagtgcggccattttccggaatgacaggctatgacggcattgtc

SEQ ID NO: 431463 - DNA, 75 bp, synthetic construct
  source 1..75: mol_type = other DNA
caatttctgaagggggagtagaatcctttcttctacaattattgccacaactaaatcgtcatcacaaatgttcct

SEQ ID NO: 431464 - DNA, 75 bp, synthetic construct
  source 1..75: mol_type = other DNA
cgtcgttaaaaaagccttgcacgtacaaatagatggcttagaaaccgtgttggctgcgatgtgtgaaccgcaaat

SEQ ID NO: 431465 - DNA, 75 bp, synthetic construct
  source 1..75: mol_type = other DNA
tgcgtgcgcatcaggcggacatgggtatcgcctttgacggcgacttcgaccgctgcttcctgttcgatgacgagg

SEQ ID NO: 431466 - DNA, 75 bp, synthetic construct
  source 1..75: mol_type = other DNA
cccgcgggctgatggacgccggcaccgacgtgctggatatcggcctgagcggcacggaagagatttacttcgcca

SEQ ID NO: 431467 - DNA, 75 bp, synthetic construct
  source 1..75: mol_type = other DNA
tttctgcgtccacaacagccatgtttgaacgcttcatggcgaaccattcaccgactgcgttgcagggcggtatgt

SEQ ID NO: 431468 - DNA, 75 bp, synthetic construct
  source 1..75: mol_type = other DNA
aagcgcattgcgatgctccacgcgctacgtgaccgtgggttgctgaaccgcgtcatgctgtcgatggatattccg

SEQ ID NO: 431469 - DNA, 75 bp, synthetic construct
  source 1..75: mol_type = other DNA
cattgaagttaccgccagccataacccgatggattataacggcatgaagctggtgcgtgagggggcccgcccgat

SEQ ID NO: 431470 - DNA, 75 bp, synthetic construct
  source 1..75: mol_type = other DNA
cgtgccgattgagttcgtaaaagttcacaacacgccggacggcaacttcccgaacgggatcccgaatccgctgct

SEQ ID NO: 431471 - DNA, 75 bp, synthetic construct
  source 1..75: mol_type = other DNA
ctgatggtccatggggcgtatggcgtcacactcaatcagctacccgccctttgagtacgactatagacctgaata

SEQ ID NO: 431472 - DNA, 75 bp, synthetic construct
  source 1..75: mol_type = other DNA
cagcaacgccaaaagcggtcaaggcagcaaatgacaacgcaaattcacgtctggcgaaaaatcagaacggtgcag

SEQ ID NO: 431473 - DNA, 75 bp, synthetic construct
  source 1..75: mol_type = other DNA
aaccgccgaaggaatgctcaccaacatgctcggagatattgcagcagaagctcagctttatgctgaaattgctga

SEQ ID NO: 431474 - DNA, 75 bp, synthetic construct
  source 1..75: mol_type = other DNA
ggtggaaaccagcgacggtgacggctatatctactgcgtgattgaacatcaaagttctgcagaaaagaatatggc

SEQ ID NO: 431475 - DNA, 75 bp, synthetic construct
  source 1..75: mol_type = other DNA
ttgcgcatgctggaacagggcattgatcgtgaccaggtgctcgcggccactcagctaagcgaagccgatctggca

SEQ ID NO: 431476 - DNA, 75 bp, synthetic construct
  source 1..75: mol_type = other DNA
atgaccgaatcaacaacctcctccccgcatgatgcggtgtttaaaacctttatgttcacacccgaaaccgcacgg

SEQ ID NO: 431477 - DNA, 75 bp, synthetic construct
  source 1..75: mol_type = other DNA
gtgaagtcgatggtgatgatccagcagtattcagaccaatacaaaaatacatcaatggcacatggtataacgttg

SEQ ID NO: 431478 - DNA, 75 bp, synthetic construct
  source 1..75: mol_type = other DNA
tcgccaataagtggaatggctctgatggtccgtggggcatatggcgtcacactcaatcagctacccgccctttga

SEQ ID NO: 431479 - DNA, 75 bp, synthetic construct
  source 1..75: mol_type = other DNA
gcacgatcacgacaagacgtgtgccaattatcgacgaagctcagacatgggcggcgaaacaaaccttcagcgccg

SEQ ID NO: 431480 - DNA, 75 bp, synthetic construct
  source 1..75: mol_type = other DNA
ttaatggcacatcaggagctgccgggaatcatgcccacacggtagatattggtgcacataatcatacggttggta

SEQ ID NO: 431481 - DNA, 75 bp, synthetic construct
  source 1..75: mol_type = other DNA
tgacgccacgctgacagaaaaaggttttactcagttaagcagtgcaacaaacagcaccagtgaaaagctggcggc

SEQ ID NO: 431482 - DNA, 75 bp, synthetic construct
  source 1..75: mol_type = other DNA
ccgccgtgggaacgtatatgttcgctgcctttctgctatatggaatgcacagaacccacagtgggagccgtggtc

SEQ ID NO: 431483 - DNA, 75 bp, synthetic construct
  source 1..75: mol_type = other DNA
aaagttctgcagaaaagaatatggcttttcgactaatgcgctatgccaccgccgccatgcagcgccatctggaca

SEQ ID NO: 431484 - DNA, 75 bp, synthetic construct
  source 1..75: mol_type = other DNA
taaggcaaccttcggtaaggactccagtgttgttaaatgggttgttctggctgaagttctggtcggtgcggtcat

SEQ ID NO: 431485 - DNA, 75 bp, synthetic construct
  source 1..75: mol_type = other DNA
gggcatctggcgtttgatattgatcgctccttattgttaatgctgctgggcaatttttatggtctggagtcgtct

SEQ ID NO: 431486 - DNA, 75 bp, synthetic construct
  source 1..75: mol_type = other DNA
ctgtgctcccggctgctgttctgatgatgttcttcccgcaactggcgatggcttccggtagtcaggacctgatgg

SEQ ID NO: 431487 - DNA, 75 bp, synthetic construct
  source 1..75: mol_type = other DNA
agcgggtaatttatgccggaacattcagcaaagcgctatttcctgcattgcgctgtgcgtggctggtggtgccgg

SEQ ID NO: 431488 - DNA, 75 bp, synthetic construct
  source 1..75: mol_type = other DNA
ctgaatatgcttcgcctggttcgtgcagtgatcccggctgctgttctgatgatgttcttcccgcaactggcactg

SEQ ID NO: 431489 - DNA, 75 bp, synthetic construct
  source 1..75: mol_type = other DNA
gcttctgctggtaaaggcacggacctgatggctaaaggtaacgatacggttaaggcgaccttcggtaaggactcc

SEQ ID NO: 431490 - DNA, 75 bp, synthetic construct
  source 1..75: mol_type = other DNA
gtacatgatgaccaaaaacgtcaagttcctggccggctttgccatcatctctgtatttattgctgtgggtatgac

SEQ ID NO: 431491 - DNA, 75 bp, synthetic construct
  source 1..75: mol_type = other DNA
ctgtgatcccggctgctgttctgatgatgttcttcccgcaactggcgatggtcgctggcagcagtggtcaggacc

SEQ ID NO: 431492 - DNA, 75 bp, synthetic construct
  source 1..75: mol_type = other DNA
gatgaccaaaaacgtcaagttcttggtcggctttgccatcatctctgtatttattgctgtgggtatgagcgtcgt

SEQ ID NO: 431493 - DNA, 75 bp, synthetic construct
  source 1..75: mol_type = other DNA
gtgcttctgcgcccgtcaaaaagaagtcgtttttttccaaattcactcgtctgaatatgcttcgcctggctcgcg

SEQ ID NO: 431494 - DNA, 75 bp, synthetic construct
  source 1..75: mol_type = other DNA
ctgaatatgcttcgcctggttcgcgctgtgatcccggctgctgttctgatgatgttcttcccgcaactggcgatg

SEQ ID NO: 431495 - DNA, 75 bp, synthetic construct
  source 1..75: mol_type = other DNA
gtgcttctgcgcccgtcaaaaagaaatcgtctttcttctctaaacttaacctgcttcgcctggtgcgtgcggttg

SEQ ID NO: 431496 - DNA, 75 bp, synthetic construct
  source 1..75: mol_type = other DNA
aaccaccattcctttttcagcacaacatccggacggcagtgaaatgatgaagttggtgggctgggcgcaaagcat

SEQ ID NO: 431497 - DNA, 75 bp, synthetic construct
  source 1..75: mol_type = other DNA
cctcaattatatggatgccgaaacgctggcacgtatccggtcagttaagcgcgtgagcggcgatatccagcgtaa

SEQ ID NO: 431498 - DNA, 75 bp, synthetic construct
  source 1..75: mol_type = other DNA
tctaaagccgttgcggaaatgtttcataacgctgcatggggagtgcgaacattgtggtttgaactcgtcacaaaa

SEQ ID NO: 431499 - DNA, 75 bp, synthetic construct
  source 1..75: mol_type = other DNA
accgctgaacgtattagcgactacatgactgaagcagttaatacagactctatagccgttgcggaaatgtttcat

SEQ ID NO: 431500 - DNA, 75 bp, synthetic construct
  source 1..75: mol_type = other DNA
gcttgtgcgtgaagaagaaacgctgaaagccttcctgatcaaagctctgaccacgtatcaggacagggcaggggt

SEQ ID NO: 431501 - DNA, 75 bp, synthetic construct
  source 1..75: mol_type = other DNA
tgccctctccatcaacccagcattgctgtggctggcaagcctgacgcctgccgggcgcagggggatgcaaagctt

SEQ ID NO: 431502 - DNA, 75 bp, synthetic construct
  source 1..75: mol_type = other DNA
ggagcagggcgtggatatcaacaccgtccgccagttggcaggccacagcgacatatccacgacgacgcgctatga

SEQ ID NO: 431503 - DNA, 75 bp, synthetic construct
  source 1..75: mol_type = other DNA
tctattgccgttgcggaaatgtttcataacgctgcatggggagtgcgaacattgtggtttgaactcgtcacaaaa

SEQ ID NO: 431504 - DNA, 75 bp, synthetic construct
  source 1..75: mol_type = other DNA
atagatatacataaaaagaacaggtatgcgagttatgatcttagaagggaaatcgaaatgcagcatgaagagttt

SEQ ID NO: 431505 - DNA, 75 bp, synthetic construct
  source 1..75: mol_type = other DNA
taacggtgaaacgtcaaatgtcactttgtaccctgacggggcaaaggttctgtatgacccggaaaccggcgcact

SEQ ID NO: 431506 - DNA, 75 bp, synthetic construct
  source 1..75: mol_type = other DNA
attgtggtttgaactcgtcacaaaaatagatatagatatacataaaaagaacaggtatgcgagttatgatcttag

SEQ ID NO: 431507 - DNA, 75 bp, synthetic construct
  source 1..75: mol_type = other DNA
tcttagaaggaaaatcgaaatgcagcatgaagagtttcagaaaatgacagagcgcgagcaagtgcctttattgaa

SEQ ID NO: 431508 - DNA, 75 bp, synthetic construct
  source 1..75: mol_type = other DNA
ataacgctgcatggggagtgcgaacattgtggtttgaactcgtcacaaaaatagatatggatatacataaaaaga

SEQ ID NO: 431509 - DNA, 75 bp, synthetic construct
  source 1..75: mol_type = other DNA
tttatcattatgttaacaaaagcatttttaacttactcaggttgtcaattcataattgcaactcattcaccacaa

SEQ ID NO: 431510 - DNA, 75 bp, synthetic construct
  source 1..75: mol_type = other DNA
caaagtccttctgctcagtgaacgtgatgaacaccctggatccggttttctggggatatgctcccggatggtggg

SEQ ID NO: 431511 - DNA, 75 bp, synthetic construct
  source 1..75: mol_type = other DNA
ctggtcaaggtcgcactcctaaagctattgccacagctattgaggctgggaaagctctggaagattttgcgatct

SEQ ID NO: 431512 - DNA, 75 bp, synthetic construct
  source 1..75: mol_type = other DNA
agctggtaactaggcttggaatagttccaggctctcttgggaaagctgtttttccaaaattaagtcatgcaagga

SEQ ID NO: 431513 - DNA, 75 bp, synthetic construct
  source 1..75: mol_type = other DNA
cctgccctaatttctggtcttttaataaatcgagtgttaattatcgatgaaatagaccacagcatgcatccacat

SEQ ID NO: 431514 - DNA, 75 bp, synthetic construct
  source 1..75: mol_type = other DNA
gccgatgatgaaaaacgcagcgaaaaccattaaaaaacggttatacggaatactgaatgcaatgcgtcatcgcgt

SEQ ID NO: 431515 - DNA, 75 bp, synthetic construct
  source 1..75: mol_type = other DNA
atgcaacagacaagccagtgctggacactgaaagagctggcaaaaaatatctgggatcgcccctggagcacagaa

SEQ ID NO: 431516 - DNA, 75 bp, synthetic construct
  source 1..75: mol_type = other DNA
gtgggtatccgtattgacgatgcggaaagcggaaaccttatgccactgaatgctatgggcaatgataacacggtt

SEQ ID NO: 431517 - DNA, 75 bp, synthetic construct
  source 1..75: mol_type = other DNA
tatccggtagcgaaatccgcttccacggtaagacgttgctggcgctggtagagaaagcgcaggcattgccagaag

SEQ ID NO: 431518 - DNA, 75 bp, synthetic construct
  source 1..75: mol_type = other DNA
aagttaagactgctaagttagtaacagatgataattggcgtgaattaaaacaactccaacttctccttgaaaacg

SEQ ID NO: 431519 - DNA, 75 bp, synthetic construct
  source 1..75: mol_type = other DNA
cggaggcgggggagtgtttctgcttaaaggcgatattattgaactgttaaatatctcaccaatatattacgccga

SEQ ID NO: 431520 - DNA, 75 bp, synthetic construct
  source 1..75: mol_type = other DNA
gtctactccgatgtttacgatgggaatatcgagcttgaagatacccatcgagcggtatacccactgaatgtgtca

SEQ ID NO: 431521 - DNA, 75 bp, synthetic construct
  source 1..75: mol_type = other DNA
ctgctgattttcttgcgctcgtatcggttacagatcacaccggcgatcttgtctactccgacgtttacgatggga

SEQ ID NO: 431522 - DNA, 75 bp, synthetic construct
  source 1..75: mol_type = other DNA
ggcattgtgccggatctacctgaaaccggatatggctatattcgtcgcggtgaagtgtcggcgggtgagcaggat

SEQ ID NO: 431523 - DNA, 75 bp, synthetic construct
  source 1..75: mol_type = other DNA
aatacgaacccgccactgggcgctggtatgtcaggggaatcaaatcaatggtcattgaggccgctgacaacatca

SEQ ID NO: 431524 - DNA, 75 bp, synthetic construct
  source 1..75: mol_type = other DNA
tgcgccttatcaccaacctgatccgcatcggcactgtaaccgaagtggaccgggaaaagtggctgtgcagggtaa

SEQ ID NO: 431525 - DNA, 75 bp, synthetic construct
  source 1..75: mol_type = other DNA
caaacaaggtggaaaataccagaccagcgccgtaaccagcggcgatttcgtcggtgcctgctttgttatcggtga

SEQ ID NO: 431526 - DNA, 75 bp, synthetic construct
  source 1..75: mol_type = other DNA
aggccttaccgcagccgatgcttaacctgatggacatgccgggttatcgtaaagcgtttaaagcgattaagtcgc

SEQ ID NO: 431527 - DNA, 75 bp, synthetic construct
  source 1..75: mol_type = other DNA
tttgaagtggcgcagtttgtcgaaaaaccgaatctggaaaccgcgcaggcctatgtggcaagcggcgaatattac

SEQ ID NO: 431528 - DNA, 75 bp, synthetic construct
  source 1..75: mol_type = other DNA
tgcgccttatcaccaatctgatccgcaccggaactgtaacggaagtggaccggaagaactggctatgccgggtga

SEQ ID NO: 431529 - DNA, 75 bp, synthetic construct
  source 1..75: mol_type = other DNA
gctgagtctgggcggaaatctggaaaccgcctttgcgttgcccgccatctattcgaatcagttcgcgccaccgtc

SEQ ID NO: 431530 - DNA, 75 bp, synthetic construct
  source 1..75: mol_type = other DNA
gttcagcctgggcggaaatatggaaacggcttttgcgcttcccgctatttactccaatgagttcccgccgccgtc

SEQ ID NO: 431531 - DNA, 75 bp, synthetic construct
  source 1..75: mol_type = other DNA
ggaggctgaccgcacgcgtattaatagtgaagtagtgatcaatggcggcgttacccagggcggcggtgcgatgag

SEQ ID NO: 431532 - DNA, 75 bp, synthetic construct
  source 1..75: mol_type = other DNA
cacaacttaccgaaatcatgcgccttatcaccaatctgatccgtaccggcactgtgaccgaagtggaccggaaaa

SEQ ID NO: 431533 - DNA, 75 bp, synthetic construct
  source 1..75: mol_type = other DNA
tgcgccttatcaccaacctgatccgcactggggtagtcaccgaagtggaccgggaaaactggctttgtcgggtga

SEQ ID NO: 431534 - DNA, 75 bp, synthetic construct
  source 1..75: mol_type = other DNA
aacggggttgtcatttgtggtattgactgtctcgaggttgacctgagcaatgctgaaacgaacaatagccgttgg

SEQ ID NO: 431535 - DNA, 75 bp, synthetic construct
  source 1..75: mol_type = other DNA
aatcaggctgcggcaaaaatggcgcgggcaggaatcctggtcattgatggtaaggtctggcgaacgtttgtttaa

SEQ ID NO: 431536 - DNA, 75 bp, synthetic construct
  source 1..75: mol_type = other DNA
attatctggagacgcacaagagcttctgtgcgcaggacgttgctgcggcaacaggtgtgacagtaacctgcataa

SEQ ID NO: 431537 - DNA, 75 bp, synthetic construct
  source 1..75: mol_type = other DNA
gcggatcaattaatcaatgcgtcggatgccatcagcgtgatggctggggcgctgaacacacatgatacaggaggc

SEQ ID NO: 431538 - DNA, 75 bp, synthetic construct
  source 1..75: mol_type = other DNA
ggtggcatccgcgcagagtgaagccgatcgcattatggcgtgtgaagaagcgaacggtcgtgaacaactggcggc

SEQ ID NO: 431539 - DNA, 75 bp, synthetic construct
  source 1..75: mol_type = other DNA
cagcagaagccggtctgggcactgtgtaatgacacggcctgttctgcagccatgctgctggcgtcggcctgctcc

SEQ ID NO: 431540 - DNA, 75 bp, synthetic construct
  source 1..75: mol_type = other DNA
gtgaaagaaatccacaataatgaacttaaacagcaactgattggtgagtccgcatttaatgagtgcttttcaacg

SEQ ID NO: 431541 - DNA, 75 bp, synthetic construct
  source 1..75: mol_type = other DNA
aaccgcttatccggaaaatggcgcagattatgtttatctgaaaaatgccggaagccgaccgctggctttcctctc

SEQ ID NO: 431542 - DNA, 75 bp, synthetic construct
  source 1..75: mol_type = other DNA
aaggtctggcgaacggtgtattacagattcgctaccagggaagaacgggaaggaaaggtgagcactaacctgatt

SEQ ID NO: 431543 - DNA, 75 bp, synthetic construct
  source 1..75: mol_type = other DNA
aaaaataagaaaggatatttaattaaaaacagaaagcagttgttagagctggcgcgggagatggacccggagaat

SEQ ID NO: 431544 - DNA, 75 bp, synthetic construct
  source 1..75: mol_type = other DNA
actcattcacgacggtttattaattaaaagtaagaaagggtatttaattaaaaacagaaagcagttgttagggct

SEQ ID NO: 431545 - DNA, 75 bp, synthetic construct
  source 1..75: mol_type = other DNA
cgggacggctggctgtgccgggtgaaaacgggcgagcttgaaaccaactggattagctggctgacatatcgggct

SEQ ID NO: 431546 - DNA, 75 bp, synthetic construct
  source 1..75: mol_type = other DNA
aaacgggcgagcttgaaactaactggatcagctggctgacgctgcgtgcagggaatgccaggacatggtggcgac

SEQ ID NO: 431547 - DNA, 75 bp, synthetic construct
  source 1..75: mol_type = other DNA
aaacgggcgaccttgaaaccaactggattaactggctgacgctgcgcgcgggtaatgcccgcacatggtggaaac

SEQ ID NO: 431548 - DNA, 75 bp, synthetic construct
  source 1..75: mol_type = other DNA
cgactggcttcagtggctgacccatcgcgccggtcgttcgcgcacgtggtgggcaccttccgagggggaacaggt

SEQ ID NO: 431549 - DNA, 75 bp, synthetic construct
  source 1..75: mol_type = other DNA
ggggcatcaaatcaatggtcattgagaccgctgacaagatcaccatgaaaaccagtgagtttgtactggaggctg

SEQ ID NO: 431550 - DNA, 75 bp, synthetic construct
  source 1..75: mol_type = other DNA
ggggcatcaaatcaatggtcattgagaccgctgacaacatcaccgtgaaaaccagtgagtttgtgctggaggctg

SEQ ID NO: 431551 - DNA, 75 bp, synthetic construct
  source 1..75: mol_type = other DNA
tgcgccttatcaccaatctgatccgcacaggtgtagtcaccgaagtggaccgggagaactggctttgccgggtga

SEQ ID NO: 431552 - DNA, 75 bp, synthetic construct
  source 1..75: mol_type = other DNA
ggcagaacgttttgcgcagaccgttaaggagattagtcacatccttacatgctcaattgatgacgggaaggatgg

SEQ ID NO: 431553 - DNA, 75 bp, synthetic construct
  source 1..75: mol_type = other DNA
aaaccggtgcagtactatccagggaaacatccgtgcgaaaaaccggcagaaatgctgcagcagataatcagcgca

SEQ ID NO: 431554 - DNA, 75 bp, synthetic construct
  source 1..75: mol_type = other DNA
agctgcagagtgaatataagcatctgcggcggtattttggtgtgacggcgcaggtgccgtacacggatgtgtgga

SEQ ID NO: 431555 - DNA, 75 bp, synthetic construct
  source 1..75: mol_type = other DNA
cagcgcggtgaactggaaaagccccaccaccagctggtggatacgtatacgtcactgaaccggcagtatgtggag

SEQ ID NO: 431556 - DNA, 75 bp, synthetic construct
  source 1..75: mol_type = other DNA
caggaaagaaaaacatggtgtcgcactggttcagtgccggtcagtggcagctgccgaacgaaagcgattatctga

SEQ ID NO: 431557 - DNA, 75 bp, synthetic construct
  source 1..75: mol_type = other DNA
cgtccgggtgacctggttgcagatttcttcatggggtccggttcgacagtcaaagcagcgatggcgctggggcgt

SEQ ID NO: 431558 - DNA, 75 bp, synthetic construct
  source 1..75: mol_type = other DNA
gaccgctgacaatatcaccctgaaaaccagtgagtttgtactggaggctgaccgcacgcgcattaacagcgaagt

SEQ ID NO: 431559 - DNA, 75 bp, synthetic construct
  source 1..75: mol_type = other DNA
catcaaatcaatggtcattgaggccgctgacaacatcaccctgaaaaccaatgagtttgtactggaggctgaccg

SEQ ID NO: 431560 - DNA, 75 bp, synthetic construct
  source 1..75: mol_type = other DNA
tgccacaccgccagcaggctggttaaagtgcgacgggcgcgcctttacaaaagaacaatatcctgttctggccag

SEQ ID NO: 431561 - DNA, 75 bp, synthetic construct
  source 1..75: mol_type = other DNA
acggggcgaatttatccgtggctgggatgacggacgaggtattgatgcaggacgagagatactttcatttcagga

SEQ ID NO: 431562 - DNA, 75 bp, synthetic construct
  source 1..75: mol_type = other DNA
atgaatgcacaactgaccgaaatcatgcgccttatcaccaacctgatccgcaccggcaccgtgaccgaagtggac

SEQ ID NO: 431563 - DNA, 75 bp, synthetic construct
  source 1..75: mol_type = other DNA
ttctaacgggatcgtggttgatgcgcatcagcatactggcgttctgaaaggcggtgacaccaccggaggcccggt

SEQ ID NO: 431564 - DNA, 75 bp, synthetic construct
  source 1..75: mol_type = other DNA
ttggttgttttttatccttttatcaatttgtaccatcgataccacaatttgcaagaagttataaacaagttttca

SEQ ID NO: 431565 - DNA, 75 bp, synthetic construct
  source 1..75: mol_type = other DNA
aatacgaacccgctaccgggcgctggtatgtcaggggaatcaaatccatggtcattgaagctgccgacaacatca

SEQ ID NO: 431566 - DNA, 75 bp, synthetic construct
  source 1..75: mol_type = other DNA
gcccgctgacaatatcaccgtgaaaaccagtgagtttgtactggaggctgaccgcacgcgaattaacagcgaagt

SEQ ID NO: 431567 - DNA, 75 bp, synthetic construct
  source 1..75: mol_type = other DNA
gcccgctgacaatatcaccatgaaaaccagtgagtttgtactggaggctgaccgcacgcggattaacagcgaagt

SEQ ID NO: 431568 - DNA, 75 bp, synthetic construct
  source 1..75: mol_type = other DNA
atgtaccccaaactggcaaaagcctaccccgcgaataaattaccggatttacggggtgagtttattcgtggctgg

SEQ ID NO: 431569 - DNA, 75 bp, synthetic construct
  source 1..75: mol_type = other DNA
agcacaacgtgatcgtcgacgtgaaaaaggttgcagatatggaccgttttgcacgccacatcgaggaattccgct

SEQ ID NO: 431570 - DNA, 75 bp, synthetic construct
  source 1..75: mol_type = other DNA
gcctgctgctggagccgaaggaattcgataagcgtttcatcgtggcgccacagttcaaccgacgcacaaatcagg

SEQ ID NO: 431571 - DNA, 75 bp, synthetic construct
  source 1..75: mol_type = other DNA
gaagaacagctcgctgaaatcgctggtggcggaccgccagaaggcgttccctgcgtcgggagagatcaaccgcaa

SEQ ID NO: 431572 - DNA, 75 bp, synthetic construct
  source 1..75: mol_type = other DNA
cggcggccagccggtgatgtcgaagacggggcatgcgttcatcaaggagcggatgcgtcaggaagacgctatcta

SEQ ID NO: 431573 - DNA, 75 bp, synthetic construct
  source 1..75: mol_type = other DNA
accgacgtgctggacatcggcctgagcggtaccgaagagatttactttgccaccttccaccttggggtagatggt

SEQ ID NO: 431574 - DNA, 75 bp, synthetic construct
  source 1..75: mol_type = other DNA
aattcaggtaacggcgcagcaggtccggtggttgatgctattgaagcccgttttaaggcattgggagtgccggtt

SEQ ID NO: 431575 - DNA, 75 bp, synthetic construct
  source 1..75: mol_type = other DNA
aatctagaggagatgtggccgcaactaaaaaatatacaggcttcatattagacttattaaattataaaaagtcaa

SEQ ID NO: 431576 - DNA, 75 bp, synthetic construct
  source 1..75: mol_type = other DNA
ctgaacgtggagtccagagcggatactgggttaatgaatgcaaaaaccgaagagattttagctcttctcaagtaa

SEQ ID NO: 431577 - DNA, 75 bp, synthetic construct
  source 1..75: mol_type = other DNA
acttccgtgattttgcttactgcgacagcggcatgatcccgtggctgctggtcgccgaactggtgtgcctgaaag

SEQ ID NO: 431578 - DNA, 75 bp, synthetic construct
  source 1..75: mol_type = other DNA
cgatgctggcaggacaacagggcatgagcgttgaacaggcccgggcgattctgaccgcggcagcaccacagcagc

SEQ ID NO: 431579 - DNA, 75 bp, synthetic construct
  source 1..75: mol_type = other DNA
gcgaaaggacgtgaacagcttgccacgatgctggcagggcaacagggcatgagcgttgaacaggcccgggcgatt

SEQ ID NO: 431580 - DNA, 75 bp, synthetic construct
  source 1..75: mol_type = other DNA
aagcccgatttaaagccctcggcgcaccggtggaattaatcaaagtacacaacacgccggacggcaatttcccca

SEQ ID NO: 431581 - DNA, 75 bp, synthetic construct
  source 1..75: mol_type = other DNA
tcccggcgcgaagatcatccacgatccacgtctctcctggaacaccgttgatgtggtgactgccgcaggcggcac

SEQ ID NO: 431582 - DNA, 75 bp, synthetic construct
  source 1..75: mol_type = other DNA
cgatgtgctggatattggtatgtccggcaccgaagagatctatttcgccacgttccatctcggcgtggatggcgg

SEQ ID NO: 431583 - DNA, 75 bp, synthetic construct
  source 1..75: mol_type = other DNA
agtggtgagatcaacagcaaactcacgcaccccgttgaggcgattaaccgcgtggaacagcattttagccgtgag

SEQ ID NO: 431584 - DNA, 75 bp, synthetic construct
  source 1..75: mol_type = other DNA
aactggtgtgcctgaaaggaaaaacgctgggcgaactggtgcgcgaccggatggcggcgtttccggcaagcggtg

SEQ ID NO: 431585 - DNA, 75 bp, synthetic construct
  source 1..75: mol_type = other DNA
tggatattggcatgtccggcaccgaagagatttatttcgccacgttccatctcggcgtggatggcggcattgaag

SEQ ID NO: 431586 - DNA, 75 bp, synthetic construct
  source 1..75: mol_type = other DNA
cggcgcggatatgggcattgcctttgatggcgattttgaccgctgtttcctgtttgacgaaaaagggcagtttat

SEQ ID NO: 431587 - DNA, 75 bp, synthetic construct
  source 1..75: mol_type = other DNA
ggcaccgaagagatttatttcgccacgttccatctcggcgtggatggcggcatcgaagttacagccagccataaa

SEQ ID NO: 431588 - DNA, 75 bp, synthetic construct
  source 1..75: mol_type = other DNA
ggcaccgaagagatttatttcgccacgttccatctcggcgtggatggcggcatagaagttaccgccagccataaa

SEQ ID NO: 431589 - DNA, 75 bp, synthetic construct
  source 1..75: mol_type = other DNA
ggcaccgaagagatttatttcgccacgttccatctcggcgtggatggcggcatagaagttacagccagccataac

SEQ ID NO: 431590 - DNA, 75 bp, synthetic construct
  source 1..75: mol_type = other DNA
gtcgtcaggtaaggctaatttcattaccagtaaagggctgttagaagatccctcttcagcgtttaacagtaagct

SEQ ID NO: 431591 - DNA, 75 bp, synthetic construct
  source 1..75: mol_type = other DNA
ggggatcactcagcacgaacatggtacccagaatgtacagcaactggtcaatctgctgttgatgaaaggtaacat

SEQ ID NO: 431592 - DNA, 75 bp, synthetic construct
  source 1..75: mol_type = other DNA
atgaagctgcctttctttatcagcttttttgctcgtgaatacgggagcaataacttccccgactgctccaacatg

SEQ ID NO: 431593 - DNA, 75 bp, synthetic construct
  source 1..75: mol_type = other DNA
actggtgcgcgaccgtatggcggcttttccggcaagcggtgagatcaacagcaaactggcacaacctgttgaggc

SEQ ID NO: 431594 - DNA, 75 bp, synthetic construct
  source 1..75: mol_type = other DNA
agccataacccgatggattataacggcatgaaactggtgcgcgaaggggctcgcccgatcagcggtgataccgga

SEQ ID NO: 431595 - DNA, 75 bp, synthetic construct
  source 1..75: mol_type = other DNA
cgaccggatggcggcattcccggcaagcggtgagatcaacagcaaactggcacaccccgttgaggcgattaaccg

SEQ ID NO: 431596 - DNA, 75 bp, synthetic construct
  source 1..75: mol_type = other DNA
gctggtcagtaaaacccgtgcgcttcagccttattccggcatgacgggttacaacgggatcattgctcgcctgca

SEQ ID NO: 431597 - DNA, 75 bp, synthetic construct
  source 1..75: mol_type = other DNA
ggagaacgcccgggctgtgctggctgcgggatcaggtaaggccgaaccggtctctgcatccacaaccgccttgtt

SEQ ID NO: 431598 - DNA, 75 bp, synthetic construct
  source 1..75: mol_type = other DNA
ccaccagggataaagcccccgcaacattgcgcctcaccggataattccggcttggtgtggatactacgactcaat

SEQ ID NO: 431599 - DNA, 75 bp, synthetic construct
  source 1..75: mol_type = other DNA
agcggtgcagggtggcgtgccacagacgtcagcagacggtgatgcggacgtgaaaatgctcatggccatgccatg

SEQ ID NO: 431600 - DNA, 75 bp, synthetic construct
  source 1..75: mol_type = other DNA
cagcggtacagggtggcgtggcacagacgtcagcagacggtgatgcggacgtgaaaatgctcatggccatgccat

SEQ ID NO: 431601 - DNA, 75 bp, synthetic construct
  source 1..75: mol_type = other DNA
tcaagattagcccccgttctgttgtcaggttttacctctcaacgtgcgggggttttctctttccagcaaccaatg

SEQ ID NO: 431602 - DNA, 75 bp, synthetic construct
  source 1..75: mol_type = other DNA
ttagcctggccctgatgctggctgtgccttttgcgcctcaggccgttgccaaaacggcagccgcgactacagctt

SEQ ID NO: 431603 - DNA, 75 bp, synthetic construct
  source 1..75: mol_type = other DNA
gttgctggcgctgatgtcttcagaaaaccgcgcggcggcaagccttgcacaccattatcccggtggttacaaagc

SEQ ID NO: 431604 - DNA, 75 bp, synthetic construct
  source 1..75: mol_type = other DNA
atcctggcggctgcaccactggcggatgccgggccctcacttcgtgatcagatcatggccctggatgaggcaaaa

SEQ ID NO: 431605 - DNA, 75 bp, synthetic construct
  source 1..75: mol_type = other DNA
aaaaagtggcgatgtatacggggctgtctgtggaagctgtcacggggacagaggctgccgtttttgaaggtcagt

SEQ ID NO: 431606 - DNA, 75 bp, synthetic construct
  source 1..75: mol_type = other DNA
accggcaccgctggctgcaggtaacctggcatctgatatccataaagaattacttaatacacctgaagctttacc

SEQ ID NO: 431607 - DNA, 75 bp, synthetic construct
  source 1..75: mol_type = other DNA
aatgaacaacacgcgctttgttgaacctaccggattgtcggtgcataacgtttcaaccgcccgtgacttaaccaa

SEQ ID NO: 431608 - DNA, 75 bp, synthetic construct
  source 1..75: mol_type = other DNA
accggcagcggtgcggggtggcgtgtcacagacgtcagcagacggtgatgcggacgtgaaaatgctcatggccat

SEQ ID NO: 431609 - DNA, 75 bp, synthetic construct
  source 1..75: mol_type = other DNA
aagccatgttgtatggctccatcgtgaccttcctcggctggacgctgtatggcctggtatcaccacgttttgaac

SEQ ID NO: 431610 - DNA, 75 bp, synthetic construct
  source 1..75: mol_type = other DNA
ccaatatcatcccgtatattctgtcgatggcggcactggtgatcattcagaaggcagctaatgttccggcagcta

SEQ ID NO: 431611 - DNA, 75 bp, synthetic construct
  source 1..75: mol_type = other DNA
gtcgcgattgctatttcggcggttggttacggcaccgaactgcttggcgcgagtttgtcgccagtgcagattggt

SEQ ID NO: 431612 - DNA, 75 bp, synthetic construct
  source 1..75: mol_type = other DNA
caccggcagcggtacaggggggcgtgtcacagacgtcagcagacggtgatgcggacgtgaaaatgctcatggcca

SEQ ID NO: 431613 - DNA, 75 bp, synthetic construct
  source 1..75: mol_type = other DNA
gatccccgccagtgacgataccgcaccctcggtggcagaagacacggccgccattctggatcagaaaagtggctc

SEQ ID NO: 431614 - DNA, 75 bp, synthetic construct
  source 1..75: mol_type = other DNA
cggctggttctggtttagcccgacgctttacgttgattcctggaatccgcatcatgcaccgttcttcagtgcggt

SEQ ID NO: 431615 - DNA, 75 bp, synthetic construct
  source 1..75: mol_type = other DNA
gggtgctgtggatttgtaccgtggctaactttggtggtgcgcgcattaccgggcaaatcagtagcattaccgtgt

SEQ ID NO: 431616 - DNA, 75 bp, synthetic construct
  source 1..75: mol_type = other DNA
ttgcaaaatgcggtatgtatagccgtaaaccaggtggtatggggggttatgccgaatatgccttcggtaaatccg

SEQ ID NO: 431617 - DNA, 75 bp, synthetic construct
  source 1..75: mol_type = other DNA
aagccatgctgtacggttccatcgtgaccttccttggttggacactgtatggtctggtatcaccacgctttgggt

SEQ ID NO: 431618 - DNA, 75 bp, synthetic construct
  source 1..75: mol_type = other DNA
cgtgtgcgaatgccgacgtggtggaaaacccggaacgtaacgtgccgatcgcggtactcggcggtacattaggtg

SEQ ID NO: 431619 - DNA, 75 bp, synthetic construct
  source 1..75: mol_type = other DNA
gtgctggttaacctggccgtggtgaccaatatcatcccgtatattctgtcaatggcggcattagtcattattcag

SEQ ID NO: 431620 - DNA, 75 bp, synthetic construct
  source 1..75: mol_type = other DNA
gcaccgaactgctcggcgcgagtttgtcgccagtgcagattggtcttgcgaccatcggagtgctgtggatttgta

SEQ ID NO: 431621 - DNA, 75 bp, synthetic construct
  source 1..75: mol_type = other DNA
ggggcatattagcggcaaagcaaattttgtgggcaggagaaaccttaactggcgcgacgcaggatgcaattgttg

SEQ ID NO: 431622 - DNA, 75 bp, synthetic construct
  source 1..75: mol_type = other DNA
tgaacaaaagatgctaagccgttactggcagcaagtgcaggcaacattgcttcaggtacctcccatggcagtaat

SEQ ID NO: 431623 - DNA, 75 bp, synthetic construct
  source 1..75: mol_type = other DNA
gtggcgactaccctccagtaaagttaaaagacgttatcaacttcagggatatcaatgggttgacacccctcatca

SEQ ID NO: 431624 - DNA, 75 bp, synthetic construct
  source 1..75: mol_type = other DNA
tgaattaccttatcccttttttagcattttcatttttgctgtcttctttcgccgctaacgcgggtattgctctgg

SEQ ID NO: 431625 - DNA, 75 bp, synthetic construct
  source 1..75: mol_type = other DNA
ggcgcgacgcaggatgcaattgttgagatcactgctactgacggcatgaccactcattacggtcaaattactcat

SEQ ID NO: 431626 - DNA, 75 bp, synthetic construct
  source 1..75: mol_type = other DNA
agtttatggctctctgccgctgcggtcgcggcactgattttttggtatcagtggtttccctgtcctgagtggcaa

SEQ ID NO: 431627 - DNA, 75 bp, synthetic construct
  source 1..75: mol_type = other DNA
cactggcctttacaaggtagcaacgataaaggaaataaccattcctgtgtggttaaggttgatgacgggacgaat

SEQ ID NO: 431628 - DNA, 75 bp, synthetic construct
  source 1..75: mol_type = other DNA
tttgtgggcaggagaaaccttaactggcgcgacgcaggatgcaattgttgagatcactgcaactgacggcatgac

SEQ ID NO: 431629 - DNA, 75 bp, synthetic construct
  source 1..75: mol_type = other DNA
atggccaacttaatgatggcggctttgatagccaatgccattgcccagcatcagccgctcaccggccgctttctg

SEQ ID NO: 431630 - DNA, 75 bp, synthetic construct
  source 1..75: mol_type = other DNA
tggcagcaaatgcaggcaacattacttcaggtacctcaccatggcagtaatacctcatcatcgttgccattaatt

SEQ ID NO: 431631 - DNA, 75 bp, synthetic construct
  source 1..75: mol_type = other DNA
caatttttcagcgcaaggctggcggattagcagcctcagggagcaaattttacctcgttggtatcatcagtggtt

SEQ ID NO: 431632 - DNA, 75 bp, synthetic construct
  source 1..75: mol_type = other DNA
gctacgctggcataatcttgaaccagaaggcgtcattttgagtcatgaacatctggatcatcggggagggctgga

SEQ ID NO: 431633 - DNA, 75 bp, synthetic construct
  source 1..75: mol_type = other DNA
cgtccgagagtaaagtcagctacagagtgatcaatgacttcggtgcatttagcgcaaaaatagaaaaatcgctac

SEQ ID NO: 431634 - DNA, 75 bp, synthetic construct
  source 1..75: mol_type = other DNA
tctttattttttctgtttttataaaaattgtcttcggaagataccccggagaagcgaagggatttaataaagaat

SEQ ID NO: 431635 - DNA, 75 bp, synthetic construct
  source 1..75: mol_type = other DNA
tggtactgtctgacactcgcggggcgtgccccagacgacgtcgccgacagggatcatctgcggttcaccgaaatg

SEQ ID NO: 431636 - DNA, 75 bp, synthetic construct
  source 1..75: mol_type = other DNA
tcctcgccggaattttcattggcgtgctgtactccgtctcctcggtgttgattaacgtttttgtcagcagcaaag

SEQ ID NO: 431637 - DNA, 75 bp, synthetic construct
  source 1..75: mol_type = other DNA
atggtaatccattaccgtttggtacagtgattacgcttgatggtgtatccagaggcaaggaaaacagtggtattg

SEQ ID NO: 431638 - DNA, 75 bp, synthetic construct
  source 1..75: mol_type = other DNA
catcagaccaccgttgatcatcatatccatgagtttatgaataaagggaagttaaagcccgaaaacggtggttca

SEQ ID NO: 431639 - DNA, 75 bp, synthetic construct
  source 1..75: mol_type = other DNA
gactcaagactcaagactcaagactcaagactcaagactcaagactcgttttccgttgatgataatgggtcaggt

SEQ ID NO: 431640 - DNA, 75 bp, synthetic construct
  source 1..75: mol_type = other DNA
atgtctgataccaaacgtaatacaatcggcaaattcggcttgctctcgctgacttttgccgccgtttacagcttt

SEQ ID NO: 431641 - DNA, 75 bp, synthetic construct
  source 1..75: mol_type = other DNA
tcagtgcgcaagatcctttattcagagaatcgagaatcagtcaggaaggttggcggattgggtcagggcgttgtt

SEQ ID NO: 431642 - DNA, 75 bp, synthetic construct
  source 1..75: mol_type = other DNA
ggattttgattgggatgctcccatttataatggttctgcgaaagatattgtctcattattatttgaaattaacca

SEQ ID NO: 431643 - DNA, 75 bp, synthetic construct
  source 1..75: mol_type = other DNA
ttccttggctttgcgtggtggaaatacagtaaatatataaagggattaacggctgaagagcgccatattgaagcg

SEQ ID NO: 431644 - DNA, 75 bp, synthetic construct
  source 1..75: mol_type = other DNA
attaacgtcttcgtcagcagcaaagagttgaaatttactggcggatcggtgcaggtattccacggcatggcggcg

SEQ ID NO: 431645 - DNA, 75 bp, synthetic construct
  source 1..75: mol_type = other DNA
ttcccgactggcgcgaatattctgaccatcatttttataacgtcggcggtattgttatcttcctcggctttgcgt

SEQ ID NO: 431646 - DNA, 75 bp, synthetic construct
  source 1..75: mol_type = other DNA
ggaaattaataggttgtattgatgttggacgagtcggaatcgcagaccgataccaggatcttgccatcctatgga

SEQ ID NO: 431647 - DNA, 75 bp, synthetic construct
  source 1..75: mol_type = other DNA
tctttagccccacaagttgagagaataattcttgtagataatggctcaaataatagtcatttgataaaaaatatc

SEQ ID NO: 431648 - DNA, 75 bp, synthetic construct
  source 1..75: mol_type = other DNA
taattgttacttacaacccggaaattattcgtttgacggaatgtattaactctttagccccacaagttgagagaa

SEQ ID NO: 431649 - DNA, 75 bp, synthetic construct
  source 1..75: mol_type = other DNA
aattgagaatcgctatgagcataatcttgcttcatcgcttctctggattatctggttcccagttattttctgggt

SEQ ID NO: 431650 - DNA, 75 bp, synthetic construct
  source 1..75: mol_type = other DNA
attacgggatgatggattgtggtttttgcaaaaagcccagcgcggcgcaaaaccgctggaaaaaccacttgcgta

SEQ ID NO: 431651 - DNA, 75 bp, synthetic construct
  source 1..75: mol_type = other DNA
atgttctcgatataatggaagacatacaaaagcagcaaccatcgcatttctatccttggatttctgatggtaaga

SEQ ID NO: 431652 - DNA, 75 bp, synthetic construct
  source 1..75: mol_type = other DNA
gctggaaggcgggtggaatcagtatgtatatgcttccatacatccaacctattctattgatccgctgggcttaat

SEQ ID NO: 431653 - DNA, 75 bp, synthetic construct
  source 1..75: mol_type = other DNA
atgcaggccatttttggctttcgggggaaccagctcgtggactgggatgcacatgtactctctcactttccactg

SEQ ID NO: 431654 - DNA, 75 bp, synthetic construct
  source 1..75: mol_type = other DNA
ggtccttcaactgcgcaatcgcggaactgactatcccgctatacgactggctgcctgccagttgctgcaggcagg

SEQ ID NO: 431655 - DNA, 75 bp, synthetic construct
  source 1..75: mol_type = other DNA
taatgtaccaggcggtacattacgagttagttgccagtgcctggcggtacagactggaaaatcgatcaatcctga

SEQ ID NO: 431656 - DNA, 75 bp, synthetic construct
  source 1..75: mol_type = other DNA
agctccccagttgaaagataatccgtctatctccattatcattccctgttttaatgaggagaaaaacgttgagga

SEQ ID NO: 431657 - DNA, 75 bp, synthetic construct
  source 1..75: mol_type = other DNA
atgctacgcaagatccactgtcgcgttattcagggatatttcttttcccgccccctacccgccgaagaaattcca

SEQ ID NO: 431658 - DNA, 75 bp, synthetic construct
  source 1..75: mol_type = other DNA
acatgtactctctcactttccactgattggtgagctcaatcatccatggcgctgggctaacgcaggggcgccgga

SEQ ID NO: 431659 - DNA, 75 bp, synthetic construct
  source 1..75: mol_type = other DNA
acgccacgtaattacgccaggtgaaaccaccggatcacaaccttatgtatggctgaagatcgtttctcctgtaga

SEQ ID NO: 431660 - DNA, 75 bp, synthetic construct
  source 1..75: mol_type = other DNA
tgcgttcagctctgaaatacgcggtactttgcggcggcggagcgaatcaccgtctggggctttctgatgccttcc

SEQ ID NO: 431661 - DNA, 75 bp, synthetic construct
  source 1..75: mol_type = other DNA
ttaattgttgcggcagtgggtaatgatggcgctgatatacgcaaactgagtgctcagcagagaatatggccagcg

SEQ ID NO: 431662 - DNA, 75 bp, synthetic construct
  source 1..75: mol_type = other DNA
catggcttcactcattgcctcacgtcatggggtttatggtgtttatcctcatgcactgatatccagcagaagggt

SEQ ID NO: 431663 - DNA, 75 bp, synthetic construct
  source 1..75: mol_type = other DNA
atggaacgctccatcgacgtgcagatttcgcgtctgcgccgcatggtggaagaagatccagcgcatccgcgttac

SEQ ID NO: 431664 - DNA, 75 bp, synthetic construct
  source 1..75: mol_type = other DNA
atttaggcggaacagtcgatgccaacaatgacattacggcaaaacttttaccggaaaattctcgctctcatgcca

SEQ ID NO: 431665 - DNA, 75 bp, synthetic construct
  source 1..75: mol_type = other DNA
gaggtgtttattcaactggcaggcgacgatgtcaccataatctggcatgtggatgacggcgatgtcatcaacgcc

SEQ ID NO: 431666 - DNA, 75 bp, synthetic construct
  source 1..75: mol_type = other DNA
ttgccatcgccacaatcggaattgaaaccaaaggtgtctcggttgaaagtctgagcattgacgctgctgccaata

SEQ ID NO: 431667 - DNA, 75 bp, synthetic construct
  source 1..75: mol_type = other DNA
ttaactggttgccaacaatattcatgacccaggggattaatttaaaagactcgattgttttaaggaaggtgcgaa

SEQ ID NO: 431668 - DNA, 75 bp, synthetic construct
  source 1..75: mol_type = other DNA
cattcacagggcgcgacgtcgcggtgtttttcgctattgcttgccctaacgcgaagccagcggatgaagattatt

SEQ ID NO: 431669 - DNA, 75 bp, synthetic construct
  source 1..75: mol_type = other DNA
cggtagtggaacctcggaagcaacagctatagtttccggcgttctggcagcgatggtctcatgtaatccccgtgc

SEQ ID NO: 431670 - DNA, 75 bp, synthetic construct
  source 1..75: mol_type = other DNA
ggcattagctcagtatactaaatctcagactccatcattacatagtggcggcattactggaagtcgttatggtaa

SEQ ID NO: 431671 - DNA, 75 bp, synthetic construct
  source 1..75: mol_type = other DNA
gttgcagcagttggaaacgatggagcagatattcgaacaataactcccgaacagagaatatggccggcagcatat

SEQ ID NO: 431672 - DNA, 75 bp, synthetic construct
  source 1..75: mol_type = other DNA
ggcgtcgcacgatgctgttacgttttcagagaatggaggccgcggaagaggtctaccatgaaatagagcggcagg

SEQ ID NO: 431673 - DNA, 75 bp, synthetic construct
  source 1..75: mol_type = other DNA
taaaggcaccattgatacagcaactttcaggttacagactggtactggtgcttttgccttagcatctcaagctac

SEQ ID NO: 431674 - DNA, 75 bp, synthetic construct
  source 1..75: mol_type = other DNA
acgggggacgggcttgccgcaggaagtgcacgggaaggagtaaacccaggaatactggctacatatggtgacggg

SEQ ID NO: 431675 - DNA, 75 bp, synthetic construct
  source 1..75: mol_type = other DNA
ccaacgggaaaatcctgcaatatggtcgtggtgcggttacgccgacattatcgacgcaaacaatgagaattacat

SEQ ID NO: 431676 - DNA, 75 bp, synthetic construct
  source 1..75: mol_type = other DNA
gttgtagctaacgatgggtatgacacaaaggatgaatgggagttggccacaattttcaaaaaaacatattcacaa

SEQ ID NO: 431677 - DNA, 75 bp, synthetic construct
  source 1..75: mol_type = other DNA
tctgtacgaagcgcgggaacaagtaaaacaagggattcgccagttgctgccacattcgaaagatgtcggcgtgcc

SEQ ID NO: 431678 - DNA, 75 bp, synthetic construct
  source 1..75: mol_type = other DNA
ttgcctgatttacgcggtgaatttattcgtggctgggatgatgggcgtagtgcggatgcggggagaacaatatta

SEQ ID NO: 431679 - DNA, 75 bp, synthetic construct
  source 1..75: mol_type = other DNA
atttaatttatcaaaccgatcgggtacgtggtgaaggcatccaatcaattaatgactattttttgcttgctgaac

SEQ ID NO: 431680 - DNA, 75 bp, synthetic construct
  source 1..75: mol_type = other DNA
ccgcagttttaaaagcaaaagatcgcattgatcttgaacggcactataatataaaaaatgaattgaaagactttg

SEQ ID NO: 431681 - DNA, 75 bp, synthetic construct
  source 1..75: mol_type = other DNA
tcgatatgtcaagggtggcaaataccgccaatgaaactcgcccggtgaacgttgcatttaactacattgtgaggg

SEQ ID NO: 431682 - DNA, 75 bp, synthetic construct
  source 1..75: mol_type = other DNA
ttgccagatttacgtggtgagtttattcgtggctgggatgacgggcgagggattgatgaggggcgcatacttctc

SEQ ID NO: 431683 - DNA, 75 bp, synthetic construct
  source 1..75: mol_type = other DNA
tttaatgcaggggcaacaggtgctttccgcactgacggtgagtttggatcgtatgccgctcaagtagatgttgct

SEQ ID NO: 431684 - DNA, 75 bp, synthetic construct
  source 1..75: mol_type = other DNA
ccgttctgaagaatgcctgcatatcatccctacacgagagaacgagggagaaaatggtgatatagggccattacg

SEQ ID NO: 431685 - DNA, 75 bp, synthetic construct
  source 1..75: mol_type = other DNA
ccggggagatgaaccgacgcctatggtgctttgtggcgatcgtctttatctgaaccgcatgtggtgtaatgagcg

SEQ ID NO: 431686 - DNA, 75 bp, synthetic construct
  source 1..75: mol_type = other DNA
cgccctgcgggaagggccatttggcgtggctggactgaatgagcgaattgagcagtttatgcaacagaagcgcaa

SEQ ID NO: 431687 - DNA, 75 bp, synthetic construct
  source 1..75: mol_type = other DNA
ttgattttaccgagccaacgcacgccggtagtaacacgagagctggtttacaccgcggtgacccgcgcgcgtcgc

SEQ ID NO: 431688 - DNA, 75 bp, synthetic construct
  source 1..75: mol_type = other DNA
tcctgatggtcttaagattcaggtgtttcgccggacgctcgcaaatttgactactgtcggtgtagtaaattctgt

SEQ ID NO: 431689 - DNA, 75 bp, synthetic construct
  source 1..75: mol_type = other DNA
acatatcagtaattcagcgtggcgtgtggcaaccagtgatatctcacagcaatacagattcagttatgtttcgat

SEQ ID NO: 431690 - DNA, 75 bp, synthetic construct
  source 1..75: mol_type = other DNA
tacagaagcggcgtccttgcgcgacagcctctgcttgctgcaaaaaagctaccgtttcggcagtgattctggcat

SEQ ID NO: 431691 - DNA, 75 bp, synthetic construct
  source 1..75: mol_type = other DNA
tttgcgctgcatgattattgatgatccggtagccgaaacgccattagtggtgccgctcggacgaacggcaccgtc

SEQ ID NO: 431692 - DNA, 75 bp, synthetic construct
  source 1..75: mol_type = other DNA
taaggccattcggcatcaacttaagaacaggaattgtgtttgttggtaatggtgccaggattgatggcgggctgg

SEQ ID NO: 431693 - DNA, 75 bp, synthetic construct
  source 1..75: mol_type = other DNA
cggctttcgtggtttttccagcgtagcgactgccgcaaatcctgtatcgggctgttatgttgctataggagggtg

SEQ ID NO: 431694 - DNA, 75 bp, synthetic construct
  source 1..75: mol_type = other DNA
ctgactgtagaaattcctgacggtcacttcacggcaattatcgggccaaacggctgtggaaaatccacgttgctg

SEQ ID NO: 431695 - DNA, 75 bp, synthetic construct
  source 1..75: mol_type = other DNA
atcaaccgctgtttacccgctggcgcaaagaagatgaagaagcggtaacgaaagcgatgcaggccacgggaataa

SEQ ID NO: 431696 - DNA, 75 bp, synthetic construct
  source 1..75: mol_type = other DNA
ctggtggcgcgtggacgttatccgcatcaaccgctgtttacccgctggcgcaaagaggatgaagaagcggtaacg

SEQ ID NO: 431697 - DNA, 75 bp, synthetic construct
  source 1..75: mol_type = other DNA
ttctgaaagcaacagcacgaaaaaaacctcccttgcgtgggctgcaggtgcacagtttaacctgaatgagagtgt

SEQ ID NO: 431698 - DNA, 75 bp, synthetic construct
  source 1..75: mol_type = other DNA
gcgggtctcagccagactggtgcaggacggaccaatgggcagacctttaatctacgcggctatgacaaaagcggg

SEQ ID NO: 431699 - DNA, 75 bp, synthetic construct
  source 1..75: mol_type = other DNA
ccgaaaagcatataaacagtattgccaatgaagtgggttataccagtacatcttattttattcgtaactttaaag

SEQ ID NO: 431700 - DNA, 75 bp, synthetic construct
  source 1..75: mol_type = other DNA
cttaaagacataaataaagataaagaaataagactaatcgaatctttattgtcatttgaaaacactccccaaata

SEQ ID NO: 431701 - DNA, 75 bp, synthetic construct
  source 1..75: mol_type = other DNA
cccccacaatggcagaaatgtacagggatgatgtacatttttaccgcaagggcaaacccaattactgggtaccta

SEQ ID NO: 431702 - DNA, 75 bp, synthetic construct
  source 1..75: mol_type = other DNA
gccagtggtgaccacagcacaggctcggggctcacctggttcggtaaaaccggaaaaacagatgcgctcctttct

SEQ ID NO: 431703 - DNA, 75 bp, synthetic construct
  source 1..75: mol_type = other DNA
gtgctgaactttcggcagcagccacgcatgtgaaaaaaggcgatccccatcaggctggctatgccgtacattcct

SEQ ID NO: 431704 - DNA, 75 bp, synthetic construct
  source 1..75: mol_type = other DNA
acgccctgttagctctcaaccagtacggcttagaacacggtgttgatagttccgtagaccaacgtcaagacaacc

SEQ ID NO: 431705 - DNA, 75 bp, synthetic construct
  source 1..75: mol_type = other DNA
gcacggaccgccagctgcgacaagctgccacattgagtggcagtgtgcctgagacacaaatgcgttaccgcgtgg

SEQ ID NO: 431706 - DNA, 75 bp, synthetic construct
  source 1..75: mol_type = other DNA
gcttgggcgtgaggagccaacctcctcttcggtgtcatggagtgcaacacgcacggaccgccagctgcgacaagc

SEQ ID NO: 431707 - DNA, 75 bp, synthetic construct
  source 1..75: mol_type = other DNA
atgaattttatcgctactgtaaacgcacccgcacatggcaatatcgctgtaacgttctctgacattgaaaaacga

SEQ ID NO: 431708 - DNA, 75 bp, synthetic construct
  source 1..75: mol_type = other DNA
agcatgaaaaccttgattcgtccggtatgtattataaggactcgtttgtaggtggtatggttgattggggtcgta

SEQ ID NO: 431709 - DNA, 75 bp, synthetic construct
  source 1..75: mol_type = other DNA
ccatcgttaagatgcaaaaggccaatgccacctatacacaagcggatctggacgctgccgaacgtctgcaagcgg

SEQ ID NO: 431710 - DNA, 75 bp, synthetic construct
  source 1..75: mol_type = other DNA
aacaggagtcatactctgatttttccgggagcccatcagttaagttatggcgctgaatattaccgtcagcagcag

SEQ ID NO: 431711 - DNA, 75 bp, synthetic construct
  source 1..75: mol_type = other DNA
tctggggcgatccttctgttctcgatccgcaaaaactgcctgacgggcagcgcgaaacattgcaatcaagaatgc

SEQ ID NO: 431712 - DNA, 75 bp, synthetic construct
  source 1..75: mol_type = other DNA
caactgcgtaaagcagatcctgctgtctggggcgatccttcggttctcgatccacaaaaactgcctgacacgcag

SEQ ID NO: 431713 - DNA, 75 bp, synthetic construct
  source 1..75: mol_type = other DNA
gccaaaaccaatcccggcacggttacttatccgcgcccaccagacttcacaggcacggcgtttctggaacagttg

SEQ ID NO: 431714 - DNA, 75 bp, synthetic construct
  source 1..75: mol_type = other DNA
tatgtgaaagatgttcgacttggttcacagcaatattatggagtgaacaactggcaaacatggaatttccagtgc

SEQ ID NO: 431715 - DNA, 75 bp, synthetic construct
  source 1..75: mol_type = other DNA
acagcacttgcatgggctgctggtgcacaatttaacctgaatgaaagtgttgctatggatgtcgcgtatgaaagc

SEQ ID NO: 431716 - DNA, 75 bp, synthetic construct
  source 1..75: mol_type = other DNA
cgaggggatgattggcaacgtgcatttcgtcaccattcctgccaacgcgaatgccagtgctgcggcgaaggtagt

SEQ ID NO: 431717 - DNA, 75 bp, synthetic construct
  source 1..75: mol_type = other DNA
accatcaggacggaaggtgaaagtaagactgcggagtggcgaaacaacagaacctccggcgttaatattgtcaac

SEQ ID NO: 431718 - DNA, 75 bp, synthetic construct
  source 1..75: mol_type = other DNA
tctgcgagaattaccgtctttttgtataaaggcaataagtgtagcaatctggatgcttgtagttgcatacctgat

SEQ ID NO: 431719 - DNA, 75 bp, synthetic construct
  source 1..75: mol_type = other DNA
gatgccagcagcagggaatggctgggctccggcaatcctgacacactcatcagtgacatcagtatacctgttggt

SEQ ID NO: 431720 - DNA, 75 bp, synthetic construct
  source 1..75: mol_type = other DNA
cccttgtggcaatatcttgatgcgctgcatccgtatttgtggcgcgaaggaaaggatttcccgccttcgcccgcg

SEQ ID NO: 431721 - DNA, 75 bp, synthetic construct
  source 1..75: mol_type = other DNA
attttgttgtttttactgatgacaacaattcaaagtacctcaatgtattaaatgactttttgtcttataatatta

SEQ ID NO: 431722 - DNA, 75 bp, synthetic construct
  source 1..75: mol_type = other DNA
acttggttgtttttaccgatgaaaacaattcaaagtatctcaatgtattaaatgacttcttgtcttataatataa

SEQ ID NO: 431723 - DNA, 75 bp, synthetic construct
  source 1..75: mol_type = other DNA
gctggcagtatggttgcctttgtccggcaccagttacggcattgccgggctgctgatgctggcggtcagccaccg

SEQ ID NO: 431724 - DNA, 75 bp, synthetic construct
  source 1..75: mol_type = other DNA
ggtatgaggggaatatcctgtttgcctttgcagttgcggcacaggtgctgacatggtgtgaaacgcgcagtgggt

SEQ ID NO: 431725 - DNA, 75 bp, synthetic construct
  source 1..75: mol_type = other DNA
gctgtttgccctggtgtgggggctgaatctgtcccgtcatgcgcatatccggcaggtggccattaaccggctgtg

SEQ ID NO: 431726 - DNA, 75 bp, synthetic construct
  source 1..75: mol_type = other DNA
ggatgtttctggccgggcgtggggcctttccgttgtttgcccttgtgtggggactgaatctgtcccgtcatgcgc

SEQ ID NO: 431727 - DNA, 75 bp, synthetic construct
  source 1..75: mol_type = other DNA
cttgtgatgacggtgctgaccgttggtctggtgtcgtgtgcaggaaaatcattaccccgtttctggcccggggat

SEQ ID NO: 431728 - DNA, 75 bp, synthetic construct
  source 1..75: mol_type = other DNA
ctgtttgcctttgcagtggcggcacaggtgctgacgtggtgtgaaacgcgcagtgggtggcgtacagcagcggcc

SEQ ID NO: 431729 - DNA, 75 bp, synthetic construct
  source 1..75: mol_type = other DNA
aagaggaagcgtatgcggcagagcgtctggcgaaaattcgccgtcagaaccggataaaggcagaacttcaggccg

SEQ ID NO: 431730 - DNA, 75 bp, synthetic construct
  source 1..75: mol_type = other DNA
ctgaatctgtcccgtcatgcgcatatccagcaggtggccattaaccggctgtggggatgggcagtgattgctcag

SEQ ID NO: 431731 - DNA, 75 bp, synthetic construct
  source 1..75: mol_type = other DNA
gtctggtcacccggacagcgggatatcatcaaaacggtggcactggtgctgatggtactggaccatgcaaaccgc

SEQ ID NO: 431732 - DNA, 75 bp, synthetic construct
  source 1..75: mol_type = other DNA
ggatgtttctgaccgggcgaggagcctttccgctttttgccctggtgtgggggctgaatctgtcccgtcatgcgc

SEQ ID NO: 431733 - DNA, 75 bp, synthetic construct
  source 1..75: mol_type = other DNA
tgcagtcgttgctggtctggtcacccggacagcgggatatcatcaaaacagtggcactggtgctgatggtgctgg

SEQ ID NO: 431734 - DNA, 75 bp, synthetic construct
  source 1..75: mol_type = other DNA
tgatgacggtgctgaccgttggtctggtgtcgtgtgcaggaaaatcattaccccgtttctggcccggagattttt

SEQ ID NO: 431735 - DNA, 75 bp, synthetic construct
  source 1..75: mol_type = other DNA
tggtcccccggacagcgggatatcatcaaaaccgtggcactggtgctgatggtgctggaccacatcaatctgata

SEQ ID NO: 431736 - DNA, 75 bp, synthetic construct
  source 1..75: mol_type = other DNA
agattgcacaaaagccaggtgcgcttcgcatcctgaaccactcgctgcgccttgctgccatgaccgcccacggta

SEQ ID NO: 431737 - DNA, 75 bp, synthetic construct
  source 1..75: mol_type = other DNA
cggtattggtgctcatacgcactctgttgcgattggctcacatggacacaccatcaccgttaacgctgctggtaa

SEQ ID NO: 431738 - DNA, 75 bp, synthetic construct
  source 1..75: mol_type = other DNA
tctcctgatggcactgtgggggcctttgtccggcaccagttacggtattgccgggctgctgatgctggcagtcag

SEQ ID NO: 431739 - DNA, 75 bp, synthetic construct
  source 1..75: mol_type = other DNA
tgcggatgcctggcagattaacggcgaaaaagaactggagttattacagcagattgcgcagaaaccaggtgcgct

SEQ ID NO: 431740 - DNA, 75 bp, synthetic construct
  source 1..75: mol_type = other DNA
aatgaagattatctgcgtcaggctttccgtgaattagacctggacgttgatatttcaaccctgctgcgcacgtaa

SEQ ID NO: 431741 - DNA, 75 bp, synthetic construct
  source 1..75: mol_type = other DNA
ggggctggtcattatcgacgaagctgatcatcttggcgcagaagttctggaagaactccgcctgttacaggaatc

SEQ ID NO: 431742 - DNA, 75 bp, synthetic construct
  source 1..75: mol_type = other DNA
atccacaaagaacaactgcaaaaaatgatcgcccgtaaaggtgaactgtctttttacgatatattcaccctcacc

SEQ ID NO: 431743 - DNA, 75 bp, synthetic construct
  source 1..75: mol_type = other DNA
cggtatccggtggcctgctgcccgtttctggcctgcagactttttcccggtattttatgtctgtcatctcgctgt

SEQ ID NO: 431744 - DNA, 75 bp, synthetic construct
  source 1..75: mol_type = other DNA
acttaaccttgcctccagtgatgtggcggctgtagctggtcttgtgatgacggtgctgaccgttggtctggtgtc

SEQ ID NO: 431745 - DNA, 75 bp, synthetic construct
  source 1..75: mol_type = other DNA
cggtgctgaccgttgcgctggtgtcctgtgcagggaaatcattaccccgtttctggcccggggatgttttccctg

SEQ ID NO: 431746 - DNA, 75 bp, synthetic construct
  source 1..75: mol_type = other DNA
gccaccagtgatgcggcggctgtagccggccttgtgatgacggtgctgaccgttggtctggtgtcgtgtgcaggg

SEQ ID NO: 431747 - DNA, 75 bp, synthetic construct
  source 1..75: mol_type = other DNA
gcagtaatgttacaatctgaaacattggtggactctgtctggcttctggtggtgttgtttatcctgcttaacggt

SEQ ID NO: 431748 - DNA, 75 bp, synthetic construct
  source 1..75: mol_type = other DNA
agagcggaacgtctggcgctgttggcctgcctgctggcggttattccggcacttaaccttgcccccagtgatgca

SEQ ID NO: 431749 - DNA, 75 bp, synthetic construct
  source 1..75: mol_type = other DNA
gaaaagttacaggccgcgtggcagtggtttaaaaacctgattgccccggtcaaagccacccaggacaccctgaac

SEQ ID NO: 431750 - DNA, 75 bp, synthetic construct
  source 1..75: mol_type = other DNA
gcaggtgtaagtcttgaacaggcagcggccatgacaggtgtgctgcatgacaataacatcagggggtcaatggcg

SEQ ID NO: 431751 - DNA, 75 bp, synthetic construct
  source 1..75: mol_type = other DNA
ccatgtgggcgacgtgttgtcggcaacgatgaataagtcggcggctgattttcagggactcagtgatgcactgac

SEQ ID NO: 431752 - DNA, 75 bp, synthetic construct
  source 1..75: mol_type = other DNA
gtgatgcactgacttacctcgggccggttgcgaggacggcaggtgtaagtcttgagcaggcagcagccatgacag

SEQ ID NO: 431753 - DNA, 75 bp, synthetic construct
  source 1..75: mol_type = other DNA
agaccagagtaaaaacgaatatcacatcagcctgacgggtggtactgagccggggacacagcttgaccgccagtt

SEQ ID NO: 431754 - DNA, 75 bp, synthetic construct
  source 1..75: mol_type = other DNA
tcacgcagacggccacaaagtatgtgttaaaactcgacggctggatacagaaaaacaaatcactggcgtcaacca

SEQ ID NO: 431755 - DNA, 75 bp, synthetic construct
  source 1..75: mol_type = other DNA
tgattaaagaaatcaaagagcgcataggtagcctggatgtgagagacaatattgagcgccgtgcttatgaaattg

SEQ ID NO: 431756 - DNA, 75 bp, synthetic construct
  source 1..75: mol_type = other DNA
ttgagcgacggcactttatcgtggttagggaacgccttgttctggatgccgctacccgaaccgctgcaggaggtg

SEQ ID NO: 431757 - DNA, 75 bp, synthetic construct
  source 1..75: mol_type = other DNA
ctgcatacgctacaggctggaacgattgccgcgaagccatgcttcagtccggaaactttcgggaaaataaagatt

SEQ ID NO: 431758 - DNA, 75 bp, synthetic construct
  source 1..75: mol_type = other DNA
ggtacagcgccagcgtcaggaactgagtcaggcgggtattaatacccgtaatctggcgcatgatgaacgagggct

SEQ ID NO: 431759 - DNA, 75 bp, synthetic construct
  source 1..75: mol_type = other DNA
tctcaagcagaagttagtggaatgcaatcgctataactactgtgcagatgcagttaaaggcgtagaggatgcctg

SEQ ID NO: 431760 - DNA, 75 bp, synthetic construct
  source 1..75: mol_type = other DNA
tccggtaactccggatggttggataagctgtagtgagcgaatgccggataccaaaacagccgttcttgttgccag

SEQ ID NO: 431761 - DNA, 75 bp, synthetic construct
  source 1..75: mol_type = other DNA
acttgaccagactgccgccagaactcatgccgccacgtatggcaccggtgattatattccggcgaccagctctta

SEQ ID NO: 431762 - DNA, 75 bp, synthetic construct
  source 1..75: mol_type = other DNA
ggtgcgtttccgctgtttgccctggtatgggggctgaatctgtctcgtcatgcacatatccgtcagtccgccgtt

SEQ ID NO: 431763 - DNA, 75 bp, synthetic construct
  source 1..75: mol_type = other DNA
ggtcgcgaattacaggtcaaatggttcgcatataacttcccggcaagaaccggttgtgatttaacccctgacctg

SEQ ID NO: 431764 - DNA, 75 bp, synthetic construct
  source 1..75: mol_type = other DNA
acaacgaaagcagccagccgtgcatctggcgttgcagatgatgttgcgaaagcctctgactttgctgaagatctt

SEQ ID NO: 431765 - DNA, 75 bp, synthetic construct
  source 1..75: mol_type = other DNA
agagcggaacgtctggcgctgttggcctgcctgctggccgttattccggcccttaaccttgccaccagtgatgca

SEQ ID NO: 431766 - DNA, 75 bp, synthetic construct
  source 1..75: mol_type = other DNA
agagcggaacgtctggcgctgttggcctgcctgctggctgttattccggctcttaaccttgcccccagtgatgca

SEQ ID NO: 431767 - DNA, 75 bp, synthetic construct
  source 1..75: mol_type = other DNA
agagcggaacgtctggcgctgttggcctgcctgctggcagttattccggcgcttaaccttgcccccagtgatgca

SEQ ID NO: 431768 - DNA, 75 bp, synthetic construct
  source 1..75: mol_type = other DNA
gaagggcagattggtggatttctcctgggtggggagagagttagagtttcttatatactagatacaggccgtttt

SEQ ID NO: 431769 - DNA, 75 bp, synthetic construct
  source 1..75: mol_type = other DNA
agaagttagtggaatgcaatcgctataactactgcgcagatgcagtgaagaacgttgaggatgcctgccacgctg

SEQ ID NO: 431770 - DNA, 75 bp, synthetic construct
  source 1..75: mol_type = other DNA
atcgctgggatgatggcactgaatatccggatccgcactcagttacgcactggcgtgaaatgccagcagcaccgc

SEQ ID NO: 431771 - DNA, 75 bp, synthetic construct
  source 1..75: mol_type = other DNA
taacgatggttaattccgcttcggagagtacgaccggcgcttccagtgcagttgccgcatctgctttatcaattg

SEQ ID NO: 431772 - DNA, 75 bp, synthetic construct
  source 1..75: mol_type = other DNA
gtacctttactgttgatattgaaaaacttcactgtactggtgaggtgcttcaatgtccaattacactggagcagc

SEQ ID NO: 431773 - DNA, 75 bp, synthetic construct
  source 1..75: mol_type = other DNA
gggtttatgcagaattattgaatattgcttttaatgatggagttaatgcgctcagaaacaggatattaagcgcgc

SEQ ID NO: 431774 - DNA, 75 bp, synthetic construct
  source 1..75: mol_type = other DNA
gctattgctcatcacggtcgcaaacataaagaagatatggaagcgcgccacgaacagttaaccaaaggcggtacc

SEQ ID NO: 431775 - DNA, 75 bp, synthetic construct
  source 1..75: mol_type = other DNA
gtgctgatatttatttggagagtgagatgggatactcccctatggatttggctattttgatgggggataagagaa

SEQ ID NO: 431776 - DNA, 75 bp, synthetic construct
  source 1..75: mol_type = other DNA
ttacgcgaagttaactgcccatgaagaagcccgcatcaacgccatgctggagggattagcacagaaaaaggattt

SEQ ID NO: 431777 - DNA, 75 bp, synthetic construct
  source 1..75: mol_type = other DNA
gcaatcgctcatcacggacgcaagcataaagaagatatggaggcgcgccacgaacaattaaccaaaggcggcacc

SEQ ID NO: 431778 - DNA, 75 bp, synthetic construct
  source 1..75: mol_type = other DNA
gtcatctgatgatggcttttcggtaattgattatcaacaggtcgccagtgaagcgggggagtggcaggatattca

SEQ ID NO: 431779 - DNA, 75 bp, synthetic construct
  source 1..75: mol_type = other DNA
tttggctgtagcacctattgttaatgcagccgtttcccttgaccgtactcgagccgtttttaacggtgaggaaaa

SEQ ID NO: 431780 - DNA, 75 bp, synthetic construct
  source 1..75: mol_type = other DNA
agaccaaaatcaagctgttttaccgcccgaaagccattgaggcaaaacccaatgcagtctggcaggaccagctgg

SEQ ID NO: 431781 - DNA, 75 bp, synthetic construct
  source 1..75: mol_type = other DNA
cacagcagtgtttgtaggattaaatgcgcctttcgactgggggtttgtgaactactattttctgaaatatctaga

SEQ ID NO: 431782 - DNA, 75 bp, synthetic construct
  source 1..75: mol_type = other DNA
ccccttatctgtcttatattaacgactatggtggtcgcccggtactgtcgtttatctgtaatggcagtcgttgct

SEQ ID NO: 431783 - DNA, 75 bp, synthetic construct
  source 1..75: mol_type = other DNA
ccccttatctgtcttatattaacgactatggtggccgcccggtactgtcgtttatctgtaatggcagccgttgct

SEQ ID NO: 431784 - DNA, 75 bp, synthetic construct
  source 1..75: mol_type = other DNA
ggagtgagaagtcaatgacgcttgatatctccaatgataacaaacaactgccctatcttgctcaggcatggatag

SEQ ID NO: 431785 - DNA, 75 bp, synthetic construct
  source 1..75: mol_type = other DNA
cgtcatcgattaccgggaagccgtatattgtgaagatccccggtaagagcgatgagaacgcacagcttttttaca

SEQ ID NO: 431786 - DNA, 75 bp, synthetic construct
  source 1..75: mol_type = other DNA
aacattttgcccaaaaatcctgtcgatgcagacaaattgctggctgcctctcgtggggagttcgttgaaggcatc

SEQ ID NO: 431787 - DNA, 75 bp, synthetic construct
  source 1..75: mol_type = other DNA
accgctatgaaaaaggcggtaacgatggcatcaccatgatggctatccccttcgatgacaacatcaacggtgaag

SEQ ID NO: 431788 - DNA, 75 bp, synthetic construct
  source 1..75: mol_type = other DNA
gaacaacgaaataacgtgatccgtatggagatggacacagaagacagttaccttcagagcctgcttactgctgtg

SEQ ID NO: 431789 - DNA, 75 bp, synthetic construct
  source 1..75: mol_type = other DNA
atcgcctcaacgtggagccggccgtgttccgcggttttaccacgccggagctgggactggccgcactgaccggtg

SEQ ID NO: 431790 - DNA, 75 bp, synthetic construct
  source 1..75: mol_type = other DNA
atatgctctaaataggtatggaaatcctgggagtaggatttttggcggcggaggattacaacctggagaattatc

SEQ ID NO: 431791 - DNA, 75 bp, synthetic construct
  source 1..75: mol_type = other DNA
aacgagccaggcagtgatacgtccggcgatgacgccaattctgagccagtaactctcgactggaaaagacagctc

SEQ ID NO: 431792 - DNA, 75 bp, synthetic construct
  source 1..75: mol_type = other DNA
ctactggttgaagacaagcttaaagctactactgaactactccagtcagaaggctttgaagtgagcttagacagc

SEQ ID NO: 431793 - DNA, 75 bp, synthetic construct
  source 1..75: mol_type = other DNA
agtctacccgaccctccgtcttcccgatttgcgcggtgagtttatccgtggatgggacgacgggcgcaagattga

SEQ ID NO: 431794 - DNA, 75 bp, synthetic construct
  source 1..75: mol_type = other DNA
aaattactggctgcttctcacggagaatttgttgaagggattagcgacccgaatgatccgaaatgggtgaagggg

SEQ ID NO: 431795 - DNA, 75 bp, synthetic construct
  source 1..75: mol_type = other DNA
aggaatttcttacggaagacgcttccctgcctgaaaaatcagggaatgccatatttatttttctgatgacagaac

SEQ ID NO: 431796 - DNA, 75 bp, synthetic construct
  source 1..75: mol_type = other DNA
atgaaccgcgttctgtgtgtggtcattattgccttgctggtggcctgtggtgcgcttagtctggggctgaatcat

SEQ ID NO: 431797 - DNA, 75 bp, synthetic construct
  source 1..75: mol_type = other DNA
attggtattcaggcctttatttacaacctcagcattttcagtcaattgatttgcatcatagtttcatgcttgcca

SEQ ID NO: 431798 - DNA, 75 bp, synthetic construct
  source 1..75: mol_type = other DNA
cgttgcttcttacatcggtcgctgtactggctgatgtgcagattagcatcaggggaaatgtttatatccccccat

SEQ ID NO: 431799 - DNA, 75 bp, synthetic construct
  source 1..75: mol_type = other DNA
caatggctgggcagactaatgtactgtctacaaatataaccagttttggtatagcgctgtaccagggaaaaggaa

SEQ ID NO: 431800 - DNA, 75 bp, synthetic construct
  source 1..75: mol_type = other DNA
agtattatattaaagcagtgctggaaaatttatgcagagataagattattagtgttgagtttaaaaaaataacaa

SEQ ID NO: 431801 - DNA, 75 bp, synthetic construct
  source 1..75: mol_type = other DNA
atggacatctttataattttttgatcctgtgtgctattaacagaatatcaccgcttctgtcctcctttattaatg

SEQ ID NO: 431802 - DNA, 75 bp, synthetic construct
  source 1..75: mol_type = other DNA
cagagatttattctgatattgaattctacaaaaataaacttaaagcatacagatatacagaacgaacagtatccg

SEQ ID NO: 431803 - DNA, 75 bp, synthetic construct
  source 1..75: mol_type = other DNA
aacatttattctgttgtcttgttatgttttaaaaacgcatgttaccatctgtgttgcccggaagctgtttctgaa

SEQ ID NO: 431804 - DNA, 75 bp, synthetic construct
  source 1..75: mol_type = other DNA
gtggtggtgcgtctgcctccacggggacggccattcaggctgcggcggcgaacttccatttcgcgaccgggggat

SEQ ID NO: 431805 - DNA, 75 bp, synthetic construct
  source 1..75: mol_type = other DNA
gactgcgcacgcttgtagaaagcgaaaaaacaacttatgcgcaaatcgcccgcgaatctggagttgccgcaggaa

SEQ ID NO: 431806 - DNA, 75 bp, synthetic construct
  source 1..75: mol_type = other DNA
aaattataaaagtagccagtcgttatccttgcccaggacctcgttttaaaagattggggcccgcttctggtgagg

SEQ ID NO: 431807 - DNA, 75 bp, synthetic construct
  source 1..75: mol_type = other DNA
aagcgcagataacatgaacaatgccgcaggcattctgcaatactgcgcgaagcaaaagctggcttcggtaaccga

SEQ ID NO: 431808 - DNA, 75 bp, synthetic construct
  source 1..75: mol_type = other DNA
aatgcagcgttatgaacaactgagtagcacggggctgacaactggaaaatccagccgggagcaccgttatatgat

SEQ ID NO: 431809 - DNA, 75 bp, synthetic construct
  source 1..75: mol_type = other DNA
gtaaattccgcgaagatctcttctaccgacttaatgttatcccgataactctgccaccgctgcgtgaacgtcagg

SEQ ID NO: 431810 - DNA, 75 bp, synthetic construct
  source 1..75: mol_type = other DNA
tcaatgcccatcactatcgccatatatgggtcgttggtgatattcatggtgaatatcagttattacaatcccgtt

SEQ ID NO: 431811 - DNA, 75 bp, synthetic construct
  source 1..75: mol_type = other DNA
ctggtagcggaacgtaacggcattcgcgagccgattctcggccttgatgtgctacaaaccgccacgcggggtgaa

SEQ ID NO: 431812 - DNA, 75 bp, synthetic construct
  source 1..75: mol_type = other DNA
gtggggggcgggggaggggaacgtaacggcttgggggagccgattctcggccttgatgtgctacaaaccgccacg

SEQ ID NO: 431813 - DNA, 75 bp, synthetic construct
  source 1..75: mol_type = other DNA
ccggacgaagaaagctatctgcacgcggcggtggaactggcggaagcgcgcggtttgcccgtcgtggcgaccaac

SEQ ID NO: 431814 - DNA, 75 bp, synthetic construct
  source 1..75: mol_type = other DNA
gaagagcgtctggcctttttattccctgatgaggaagaacgtgttaagcgccgcccggaatatgacgaacgtctg

SEQ ID NO: 431815 - DNA, 75 bp, synthetic construct
  source 1..75: mol_type = other DNA
gaatatcagttattacaatcccgtttacatcaactctctttttaccctgaaaccgacggtgatgctgccaactta

SEQ ID NO: 431816 - DNA, 75 bp, synthetic construct
  source 1..75: mol_type = other DNA
gggttttcatcccggaatttaatcgcgcagttcgtgaggcgttctacaaccgaccggtagaacagcgtgacgcgt

SEQ ID NO: 431817 - DNA, 75 bp, synthetic construct
  source 1..75: mol_type = other DNA
ggataaatttgctgatttattagggaagccaaagacagccgtcagtgaaatggtgaaggcaaataaattaccaat

SEQ ID NO: 431818 - DNA, 75 bp, synthetic construct
  source 1..75: mol_type = other DNA
atggagggagtggttagccaagaacaagccggacaccgcgccagtaaaaacaacagattcgtgcttttcttcagc

SEQ ID NO: 431819 - DNA, 75 bp, synthetic construct
  source 1..75: mol_type = other DNA
acgctgcgtctggaagctggcatgaatttgtatagtcaggagatggacgaaaccatctctcctttagccgccaac

SEQ ID NO: 431820 - DNA, 75 bp, synthetic construct
  source 1..75: mol_type = other DNA
aatgaaaaagcggccgatttctggcgcgcgctggtggaagctggcgttaagcatgtggcctgggcgcgcgtgaca

SEQ ID NO: 431821 - DNA, 75 bp, synthetic construct
  source 1..75: mol_type = other DNA
acgctgcgtctggaagcgggcatgaatctttatggtcaggagatggacgaaaccatctcgccgctggcagccaac

SEQ ID NO: 431822 - DNA, 75 bp, synthetic construct
  source 1..75: mol_type = other DNA
gtcggcatcgacgctaccgacgcagtgcgttgctcggcaaaaacaggtgttggtgtgcaggatgtactggaacgt

SEQ ID NO: 431823 - DNA, 75 bp, synthetic construct
  source 1..75: mol_type = other DNA
gtagtgccggtactgaacaagattgacctgccggcagccgatcctgaacgcgtggcggaagaaattgaagatatc

SEQ ID NO: 431824 - DNA, 75 bp, synthetic construct
  source 1..75: mol_type = other DNA
gtggtcgatgcagggcagggcgtagaagcgcaaaccctggcaaactgctacaccgcgatggaaatggacctcgag

SEQ ID NO: 431825 - DNA, 75 bp, synthetic construct
  source 1..75: mol_type = other DNA
cagcctgaatgatgcctcactgttctatgagccggaaagctccagcgcgctgggctttggtttccgctgcggctt

SEQ ID NO: 431826 - DNA, 75 bp, synthetic construct
  source 1..75: mol_type = other DNA
acgttttaatcaacggtgaacgtgttgatgcgctggcgttgatcacccaccgtgataattcgcaaaaccgtggtc

SEQ ID NO: 431827 - DNA, 75 bp, synthetic construct
  source 1..75: mol_type = other DNA
actacgtcaagagaagttatttacgtcgacagtccatccaagctgccagcggtaaataacatctacgaactgcgc

SEQ ID NO: 431828 - DNA, 75 bp, synthetic construct
  source 1..75: mol_type = other DNA
ccggtaagttccgacgactatgaagccttccgtgacgcgctgggtaaactcagcctgaacgatgcttcactgttc

SEQ ID NO: 431829 - DNA, 75 bp, synthetic construct
  source 1..75: mol_type = other DNA
aaatcgttgagaaaggcaaaacggcaccgcgcgttacgccagaccatatcgaaggcattattcttgcggaaacgt

SEQ ID NO: 431830 - DNA, 75 bp, synthetic construct
  source 1..75: mol_type = other DNA
gcggggatgatttcctcaacacatttgttgcagagcattcttccattcgcgtggtgcagctgctcaacgacagcg

SEQ ID NO: 431831 - DNA, 75 bp, synthetic construct
  source 1..75: mol_type = other DNA
tgacgctggactataaagcgtccgatggcgaaacctatcaacttaactttatcgacaccccgggtcatgtggact

SEQ ID NO: 431832 - DNA, 75 bp, synthetic construct
  source 1..75: mol_type = other DNA
gctaaatgttatggcggcgatatcagccgtaagaaaaagctgctacagaagcagaaagaaggtaagaaacgcatg

SEQ ID NO: 431833 - DNA, 75 bp, synthetic construct
  source 1..75: mol_type = other DNA
aaggcgatccggaaggcccgttacaggcactcattatcgactcctggttcgacaactacctgggcgttgtttcac

SEQ ID NO: 431834 - DNA, 75 bp, synthetic construct
  source 1..75: mol_type = other DNA
gatggagggcttcagtgtggatggcgtgacaacgaaagtgcgtattgacgctggtgttgcgccagttgatcaccg

SEQ ID NO: 431835 - DNA, 75 bp, synthetic construct
  source 1..75: mol_type = other DNA
ctgattgagagcatcaatctcgacagctcatcggcggaaaatgtgggctttgccattgccgaccgaatgatgcgt

SEQ ID NO: 431836 - DNA, 75 bp, synthetic construct
  source 1..75: mol_type = other DNA
cttcgggctggcgcttgactgctacagcggtacaccacaacggctggaagccgcgccggctgccggagggacgca

SEQ ID NO: 431837 - DNA, 75 bp, synthetic construct
  source 1..75: mol_type = other DNA
acgccgtcatgccgtgaactgatggagaacgatgcccgccgtcgtaaggatgcgggggaactgctcgaccgcgtg

SEQ ID NO: 431838 - DNA, 75 bp, synthetic construct
  source 1..75: mol_type = other DNA
tctgccggagtttgccgctatctataagaccttcaacaccccactaccggcactaacgcaggggatcatgacgct

SEQ ID NO: 431839 - DNA, 75 bp, synthetic construct
  source 1..75: mol_type = other DNA
tgtgcctgcgttaccagggcgtcttgctggatgccagcgaagaggtggttcatgttgcggtggtcgatgcgccct

SEQ ID NO: 431840 - DNA, 75 bp, synthetic construct
  source 1..75: mol_type = other DNA
tgttacagcaggtgggtcaggcactggatgtcaacacgcttggaatgcagccgttacaactggcggactttgctc

SEQ ID NO: 431841 - DNA, 75 bp, synthetic construct
  source 1..75: mol_type = other DNA
atcaatgatgatctgaatatgctgaccgatgtcccgatgaaactgggccgtgcggcgaaatccactattgccgat

SEQ ID NO: 431842 - DNA, 75 bp, synthetic construct
  source 1..75: mol_type = other DNA
gcttcagtgctctgcgtcaggtgcgtgaaggggcggaatataaatacgtcaccaccggagataaacaggccacta

SEQ ID NO: 431843 - DNA, 75 bp, synthetic construct
  source 1..75: mol_type = other DNA
aaacgtactggagagcgcagcaatggacgtggcatcgctggataaagcccgccagttgatgcgcgttcagaaaga

SEQ ID NO: 431844 - DNA, 75 bp, synthetic construct
  source 1..75: mol_type = other DNA
aaatccggtgaccgtacagggccgggataactggctggtacgtctggacctggtggcggatgagtattttcatgc

SEQ ID NO: 431845 - DNA, 75 bp, synthetic construct
  source 1..75: mol_type = other DNA
atgccggccgggtcgcccgcagaagtggctgaaaggccgaatcaaaccacttgaggacgcggaaggcacaaacct

SEQ ID NO: 431846 - DNA, 75 bp, synthetic construct
  source 1..75: mol_type = other DNA
ttcatcctgtggaaggcacaaacctgtgctggatcgacacgtccaacattgtgcatatcggtgccgataggcagt

SEQ ID NO: 431847 - DNA, 75 bp, synthetic construct
  source 1..75: mol_type = other DNA
acagtgtgcgccgtagcgtcgagatttgtcagttcacgcaacagacacgctacctgtgcgcgattccggcggctc

SEQ ID NO: 431848 - DNA, 75 bp, synthetic construct
  source 1..75: mol_type = other DNA
ggaatgattaccccgccgaaatcacaggcaaaaaacaccattacaggcgaccaggagcgcattaacggcattaaa

SEQ ID NO: 431849 - DNA, 75 bp, synthetic construct
  source 1..75: mol_type = other DNA
ggatggatgggaaagaatgccttaagcacggttttgctgatgaattgttgccatccgtcagagcaatggcgcgaa

SEQ ID NO: 431850 - DNA, 75 bp, synthetic construct
  source 1..75: mol_type = other DNA
tgatgattatataataaaaacatggacacattttcgtaaattgatgtcagaggggataaatttaggcgtgttaac

SEQ ID NO: 431851 - DNA, 75 bp, synthetic construct
  source 1..75: mol_type = other DNA
ggcgtggaagatcgcggcgtgatggcgacgtttatgcaggcattggggtttacggcacaaaagggcggctgggag

SEQ ID NO: 431852 - DNA, 75 bp, synthetic construct
  source 1..75: mol_type = other DNA
agatagcctgattactcgtattaacctgattctgaaagatgaaaaggacactactgcgcgcctgcgcctgattgt

SEQ ID NO: 431853 - DNA, 75 bp, synthetic construct
  source 1..75: mol_type = other DNA
caggcgatgcgattcgccaagggctttattcccgtcttgggtatgagcgtcctgagcggggaaatccttacgcga

SEQ ID NO: 431854 - DNA, 75 bp, synthetic construct
  source 1..75: mol_type = other DNA
ccagaaggttcgataaccaagaagtccggcacgctgatattccagggtcatccagttattcatgctggaacgacg

SEQ ID NO: 431855 - DNA, 75 bp, synthetic construct
  source 1..75: mol_type = other DNA
aaataaatcagctatcacaatcagcgataaaaatgcttacattgataatcttgcagggaaaaatattactaataa

SEQ ID NO: 431856 - DNA, 75 bp, synthetic construct
  source 1..75: mol_type = other DNA
gcctggagctggagaaatcagcgttcgggaaatataacgtggacaatgcgataaacgccaacttccgttattctt

SEQ ID NO: 431857 - DNA, 75 bp, synthetic construct
  source 1..75: mol_type = other DNA
caccggtagacctgtattatgacagttctaccaagaactattacatcctgaaagcgagctcatattcaccgtttt

SEQ ID NO: 431858 - DNA, 75 bp, synthetic construct
  source 1..75: mol_type = other DNA
cacagcaggtaaatccggataatatttcgtggggataccgtggcggacgtctggatctgaatggtaataacctga

SEQ ID NO: 431859 - DNA, 75 bp, synthetic construct
  source 1..75: mol_type = other DNA
aaacccgtcagtttacgctggaaaaactgaaactcgatgcggcaacattccatctgtccagaaacggcaagatgc

SEQ ID NO: 431860 - DNA, 75 bp, synthetic construct
  source 1..75: mol_type = other DNA
atcactggttgatcgtggtatcactgtgagtggttttattaatcgctcgcaggttgttaatgcggcttttacaca

SEQ ID NO: 431861 - DNA, 75 bp, synthetic construct
  source 1..75: mol_type = other DNA
ccgcaaggggaagtcggacgcctgatgacgcgcggtccgtacaccttccgcggctattacaaaagcccgcagcac

SEQ ID NO: 431862 - DNA, 75 bp, synthetic construct
  source 1..75: mol_type = other DNA
atgaacgaccagcaaatcgaaaaagaaatcgttgagaaaggcaaaacggcatcgcgcgttacgcctcaatatatc

SEQ ID NO: 431863 - DNA, 75 bp, synthetic construct
  source 1..75: mol_type = other DNA
tggtcacagtaaactactatatgacaaccatagctggaatgtttcaatttgcaacagataatggttatacctcag

SEQ ID NO: 431864 - DNA, 75 bp, synthetic construct
  source 1..75: mol_type = other DNA
gccgaatttaaattaccggatcgcgtggagtgtgtggattcacttccgctgacggcggtcgggaaagtcgataaa

SEQ ID NO: 431865 - DNA, 75 bp, synthetic construct
  source 1..75: mol_type = other DNA
tcgctgaaactgttacaggtcggcggcgcacgtctttctgccacgcttgcggcgcgtattcccgcagagattggc

SEQ ID NO: 431866 - DNA, 75 bp, synthetic construct
  source 1..75: mol_type = other DNA
gcgagcacaatttgcaggatgcgtttaaccatcaggcagaggattttactgccacgccgtcacccgctgatgaag

SEQ ID NO: 431867 - DNA, 75 bp, synthetic construct
  source 1..75: mol_type = other DNA
gccaccgtccgaaagccagcgcaaaaagtaattcgtggttccgcatgcaggccagcaataacagtgaggccgaca

SEQ ID NO: 431868 - DNA, 75 bp, synthetic construct
  source 1..75: mol_type = other DNA
cggaggaaatgcgcacttatgccgaacgtctggacaaacttgagtcggttatggtgccggtatatgcgcagaaaa

SEQ ID NO: 431869 - DNA, 75 bp, synthetic construct
  source 1..75: mol_type = other DNA
tgcgctggccacatacggtaatattttttctgttacccgtcaggccattatcaacgatgacctgacccagttaac

SEQ ID NO: 431870 - DNA, 75 bp, synthetic construct
  source 1..75: mol_type = other DNA
acggatttgctgaccaggtgacacccgctgttgaggcaatggcatgtattcagtcaaaacgtacagaggaattta

SEQ ID NO: 431871 - DNA, 75 bp, synthetic construct
  source 1..75: mol_type = other DNA
catacatcgatcagcaggaaggcttcaccactgatggtatcgccacgaaagtgcgtattgatgctggcgtggcgc

SEQ ID NO: 431872 - DNA, 75 bp, synthetic construct
  source 1..75: mol_type = other DNA
cgtacatatcgacggtctggcggcctccatggcctcggtgattgcgatggtaggcaatccggtcatcatgcctga

SEQ ID NO: 431873 - DNA, 75 bp, synthetic construct
  source 1..75: mol_type = other DNA
cttgcgttaaatgacggacaagaaataactctggaagagctgctggcgacgggttcgctctatattttactggaa

SEQ ID NO: 431874 - DNA, 75 bp, synthetic construct
  source 1..75: mol_type = other DNA
cgatattaaagctcgaggtggtataccagcacagaatattcttgaaataggctatgttcctgtcagtgatgttat

SEQ ID NO: 431875 - DNA, 75 bp, synthetic construct
  source 1..75: mol_type = other DNA
tggcagtctgcacaggctgaccttgcagaacgttaccgccaggtgacccacgcctggtcgctggggcttaaaaaa

SEQ ID NO: 431876 - DNA, 75 bp, synthetic construct
  source 1..75: mol_type = other DNA
atgaaaagcgggctcacaattcgggaagacaattacagtgtcgttctggatgcgctgaaacaactgtcaggcact

SEQ ID NO: 431877 - DNA, 75 bp, synthetic construct
  source 1..75: mol_type = other DNA
aggcatggcgctggatgggcaattctcagctgcagagaatgagctggaaaaggccgggttggttgcctcaaacgg

SEQ ID NO: 431878 - DNA, 75 bp, synthetic construct
  source 1..75: mol_type = other DNA
ctgataacgccgtggctgttctggaatccctccgccagctatccggaatggatgtgctggtgggaatacctgagg

SEQ ID NO: 431879 - DNA, 75 bp, synthetic construct
  source 1..75: mol_type = other DNA
gaacctgcagaaggcggagtacacacgaagcatgaatgaacggttttcggaatacaccggcctgtcggtgtcggt

SEQ ID NO: 431880 - DNA, 75 bp, synthetic construct
  source 1..75: mol_type = other DNA
ggctcgtgaccataaattaccgattcgtgttttcaatatgaacaaaccgggtgcgctgcgccgtgtggtaatggg

SEQ ID NO: 431881 - DNA, 75 bp, synthetic construct
  source 1..75: mol_type = other DNA
gcgggggccgggtttgagcagacgctgaccggaatgacagtggggatcgacagccctaatgatattcctgagggg

SEQ ID NO: 431882 - DNA, 75 bp, synthetic construct
  source 1..75: mol_type = other DNA
cccctgatgtacaggttgtgttgctcgacgggccacagcaactgcaggatgcttttttcggcccgttgccggctg

SEQ ID NO: 431883 - DNA, 75 bp, synthetic construct
  source 1..75: mol_type = other DNA
accgggaagtggtttatggcacaactgatgtagcgcgggctcaggcactacggctgcaggcaggaggtggtcagt

SEQ ID NO: 431884 - DNA, 75 bp, synthetic construct
  source 1..75: mol_type = other DNA
gtcgtacaccactactgcgctgccatcgtcagtatctggttaacctcgcgcatttacaggagattcgtctggaag

SEQ ID NO: 431885 - DNA, 75 bp, synthetic construct
  source 1..75: mol_type = other DNA
tcactatccagaaacgcagagagcgcgggtacgcaggcattaagccgctgtatgaccatggctatctgcttcgct

SEQ ID NO: 431886 - DNA, 75 bp, synthetic construct
  source 1..75: mol_type = other DNA
ctgacgggaaggtctggatgtctccttctttgtctcctatcgtttttcagagaaagcaggttgtttctttgtctg

SEQ ID NO: 431887 - DNA, 75 bp, synthetic construct
  source 1..75: mol_type = other DNA
gcattcttgaacaggtgcagttggcgctggaaaacagcagtgaaaagccggacgttatctatttaaccggcggca

SEQ ID NO: 431888 - DNA, 75 bp, synthetic construct
  source 1..75: mol_type = other DNA
gctcaagcagtacatcgacgatccggaagaggtgtactttgttaagtcgcctaaatccttcctcggcgctagcgg

SEQ ID NO: 431889 - DNA, 75 bp, synthetic construct
  source 1..75: mol_type = other DNA
tgacgcaaacgacaccggttctaccgaagttcaggtagcactgctgactgcacagatcaaccacctgcagggcca

SEQ ID NO: 431890 - DNA, 75 bp, synthetic construct
  source 1..75: mol_type = other DNA
aagggctggcgtgggcggtcgaacaggcggcggcatcacaagtcatgctggcagtggagattatggatactgcgt

SEQ ID NO: 431891 - DNA, 75 bp, synthetic construct
  source 1..75: mol_type = other DNA
aagggctggcgtgggcggtcgaacaggcggcggcatcacaagtcatgctggcagtggagattatggacaccgcgt

SEQ ID NO: 431892 - DNA, 75 bp, synthetic construct
  source 1..75: mol_type = other DNA
tcggtgccagaggattactcgccacttcgtggctcgccctgcgggccgttgctggcgcaacgttctctcgcttcg

SEQ ID NO: 431893 - DNA, 75 bp, synthetic construct
  source 1..75: mol_type = other DNA
ttcaaggtcaaggatttgtcggagcagaacagcttgatgatgctgaaaagaaaatgctttggcaaaataatgaga

SEQ ID NO: 431894 - DNA, 75 bp, synthetic construct
  source 1..75: mol_type = other DNA
gtttcagagatttggtcactcccgccggagaaacaatcactctacatcaggaagtaatcaaatctaaaggttcag

SEQ ID NO: 431895 - DNA, 75 bp, synthetic construct
  source 1..75: mol_type = other DNA
cccgcagaaagccaaaacctggtgccggagtcgatccgtgcaacctccgttgcagtagcaatatcaggttttggt

SEQ ID NO: 431896 - DNA, 75 bp, synthetic construct
  source 1..75: mol_type = other DNA
catgctatattttaccgacagtgtcaattcgttctgctaaaaattaagtcgtttatcgggaagtttttaaaatga

SEQ ID NO: 431897 - DNA, 75 bp, synthetic construct
  source 1..75: mol_type = other DNA
cggcatcggttcgccctttcgaccctatcttatccgtccagcattcacgccagaacatcattaccggcgcagact

SEQ ID NO: 431898 - DNA, 75 bp, synthetic construct
  source 1..75: mol_type = other DNA
tgaaatttatcccttgtaccggacacagtcggatttatttgttgcaaatgaaagatgtggcgtttgtcagcagcc

SEQ ID NO: 431899 - DNA, 75 bp, synthetic construct
  source 1..75: mol_type = other DNA
aggtttgtcggtacagatgcattatcatcgcgcggaacactgggtggttgtcgcgggaacggcaaaagtcactat

SEQ ID NO: 431900 - DNA, 75 bp, synthetic construct
  source 1..75: mol_type = other DNA
gggcttgtcggtacagatgcaccatcaccgcgcggaacactgggtggtggtcgcgggaacggcaaaagtcaccat

SEQ ID NO: 431901 - DNA, 75 bp, synthetic construct
  source 1..75: mol_type = other DNA
aggtttgtcggtacagatgcatcatcaccgcgcggaacactgggtggttgtcgcgggaacggcaaaagtcactat

SEQ ID NO: 431902 - DNA, 75 bp, synthetic construct
  source 1..75: mol_type = other DNA
agggtacaacggcagatatgatccataaaatcgttccgctgattgcttatatgagcaagttttttaccctcaagc

SEQ ID NO: 431903 - DNA, 75 bp, synthetic construct
  source 1..75: mol_type = other DNA
atgggaaaaagctaaagggtttgataactcttgcccactgtccgggtttattcccgctgcagagttcactggcga

SEQ ID NO: 431904 - DNA, 75 bp, synthetic construct
  source 1..75: mol_type = other DNA
atctcgaagaactgaaaaagtatcgtccggatattctcgatgcctgtgaaaaagcgatgagcgccgtcgatccgg

SEQ ID NO: 431905 - DNA, 75 bp, synthetic construct
  source 1..75: mol_type = other DNA
cttcagatgcagtagtcgttccgatggatgctggttggtctgatgttggatcttggctatcgttatgggagcttt

SEQ ID NO: 431906 - DNA, 75 bp, synthetic construct
  source 1..75: mol_type = other DNA
cgattcatgccttagaaaatccaggagaaataatgctggagcttattgaggtgcaatcgggaatatgcttggatg

SEQ ID NO: 431907 - DNA, 75 bp, synthetic construct
  source 1..75: mol_type = other DNA
acgacgcaaccattggttatttgtaatgaagatcaccgatttttagttgctgaacagttacgttatttaggtaaa

SEQ ID NO: 431908 - DNA, 75 bp, synthetic construct
  source 1..75: mol_type = other DNA
gggcaaatatcgcccggatattcttcgcgcctgcgaaaaagcgatggacgtcaccgacccggatctcgactttat

SEQ ID NO: 431909 - DNA, 75 bp, synthetic construct
  source 1..75: mol_type = other DNA
tatggctagagaattagcattatctggaaagttagttacttttggtattataggtaataagcccgaaacagggta

SEQ ID NO: 431910 - DNA, 75 bp, synthetic construct
  source 1..75: mol_type = other DNA
agagttggaaaaatttcgcccggatatcatgcaggcctgcctggatgctataaacaacgctgaactcgataacga

SEQ ID NO: 431911 - DNA, 75 bp, synthetic construct
  source 1..75: mol_type = other DNA
tgtactttcctgtaacgatgctccaggcggtgaagcctgtaagcgaggagaagcagtcaataaagcgtatgccgg

SEQ ID NO: 431912 - DNA, 75 bp, synthetic construct
  source 1..75: mol_type = other DNA
atgtacaggttatgaatatggatatccgggagagggaaaacgcggctcatgatgttcgtgaggaaacatccggcg

SEQ ID NO: 431913 - DNA, 75 bp, synthetic construct
  source 1..75: mol_type = other DNA
gcctgttgagcatgttgatgctggcagagtaattctgatgcccccctcagtggcaaaagacatggttaggagcgg

SEQ ID NO: 431914 - DNA, 75 bp, synthetic construct
  source 1..75: mol_type = other DNA
ggtgttgatgatgtcgttcatgagcaggcatacaggaacaccgatgaggatgccttaggtattctggaacgtatc

SEQ ID NO: 431915 - DNA, 75 bp, synthetic construct
  source 1..75: mol_type = other DNA
atgattaaggtgttaattgtcgatgatgaaccgcttgcacgggagaacctgcgcatatttttgcaggagcagagc

SEQ ID NO: 431916 - DNA, 75 bp, synthetic construct
  source 1..75: mol_type = other DNA
gatattgaaattgtcggcgagtgctcaaacgccgtggaagggattggcgcggtgcataaactgcgcccggatgtg

SEQ ID NO: 431917 - DNA, 75 bp, synthetic construct
  source 1..75: mol_type = other DNA
tatgggaccgccaataatacgaaaatcaatcctggcggagaacagcatattaaagaatttggtgtaagtagtaat

SEQ ID NO: 431918 - DNA, 75 bp, synthetic construct
  source 1..75: mol_type = other DNA
tcgcagaccggacgggccctcagatatcctgaggcctggctgcagggctggtgtggcggtacgctggtgagtgac

SEQ ID NO: 431919 - DNA, 75 bp, synthetic construct
  source 1..75: mol_type = other DNA
atgtctaatcaatttagtgatacacgtatcgatgacgacctgacgttactgagtgaaacactggaagaggtgcta

SEQ ID NO: 431920 - DNA, 75 bp, synthetic construct
  source 1..75: mol_type = other DNA
accgttgggtggaatgcggcaggtggtgcgctgggtaactggattgacgacaaagatccattgtcaggtgccctt

SEQ ID NO: 431921 - DNA, 75 bp, synthetic construct
  source 1..75: mol_type = other DNA
attaattttctgcacaacctgccgttttacggtcgtgcggtgatgtgtgttgatgatccggtgatccgcgaattg

SEQ ID NO: 431922 - DNA, 75 bp, synthetic construct
  source 1..75: mol_type = other DNA
cgggtgtgcacgcgcgtttaggtcatggtcgttatctgattgccgaagccgatgaaagcgatgcgtcgttcctgc

SEQ ID NO: 431923 - DNA, 75 bp, synthetic construct
  source 1..75: mol_type = other DNA
ctgcgatggtttccagcatctacgcagaagcggggctcgacccaaccttcgttaacggcgggctggtaaaagcgg

SEQ ID NO: 431924 - DNA, 75 bp, synthetic construct
  source 1..75: mol_type = other DNA
atgctggcagcgtgggaatggggacagcttagcggttttaccactcgttcgcagcgagtatggttggcggtgtta

SEQ ID NO: 431925 - DNA, 75 bp, synthetic construct
  source 1..75: mol_type = other DNA
aactggtccgaaaacccaaaatcagtaatgggcgcgatcgccgcctggcttctggcgaagaacgccgactctccc

SEQ ID NO: 431926 - DNA, 75 bp, synthetic construct
  source 1..75: mol_type = other DNA
ctccacgcgatgttccgctatccaggaaagcccgtaattacctgcaaatgctgccgacacagcttaacggtaata

SEQ ID NO: 431927 - DNA, 75 bp, synthetic construct
  source 1..75: mol_type = other DNA
gtattttggatcgtattgatagcctgacggctgctgtaccggtctttgcttgcctgctgttgctggtattcagga

SEQ ID NO: 431928 - DNA, 75 bp, synthetic construct
  source 1..75: mol_type = other DNA
gtgttaatacccgtcgtcatcgcggcgttgtttctgttgccgccggtggggttcgccattgtaacgctggtggtc

SEQ ID NO: 431929 - DNA, 75 bp, synthetic construct
  source 1..75: mol_type = other DNA
gctgttttacccaggttccgcagcaatctggcgtaactctaaaacattgcgccttatttttggcgtgctaaccat

SEQ ID NO: 431930 - DNA, 75 bp, synthetic construct
  source 1..75: mol_type = other DNA
tggggaacatgccgcgataaccccgttgaactggtgcgtaagccccgtgtctctccggggcgggaacgacgtctg

SEQ ID NO: 431931 - DNA, 75 bp, synthetic construct
  source 1..75: mol_type = other DNA
ttaagaatcattggtgaagtagatggcgatgatgaagccatcttcagaccaatacaaaaatacatcaatggcaca

SEQ ID NO: 431932 - DNA, 75 bp, synthetic construct
  source 1..75: mol_type = other DNA
attttcatgacctccgtcatgaggctatcagccgatttttcgaacttggtacattgaatgtcattgaagttgccg

SEQ ID NO: 431933 - DNA, 75 bp, synthetic construct
  source 1..75: mol_type = other DNA
tgctcagcggggtgaacgcgtccccacaccaggcgagctacccgcaaacattgatgaacgggtcatgatttgtcc

SEQ ID NO: 431934 - DNA, 75 bp, synthetic construct
  source 1..75: mol_type = other DNA
ttaccgacagtttctgaaggagcattaggttattgggcgttaacgccaaatattgatctgtggggaatgtggcgt

SEQ ID NO: 431935 - DNA, 75 bp, synthetic construct
  source 1..75: mol_type = other DNA
taaccactataacggtcaggaggggcttaaggtcctcaccaagggttacgagtggcttaagtccaacaaggtcga

SEQ ID NO: 431936 - DNA, 75 bp, synthetic construct
  source 1..75: mol_type = other DNA
ggtcatttaattccaggacacggcggtattttagatcgtattgatagcctgacggctgcggtgccggtctttgct

SEQ ID NO: 431937 - DNA, 75 bp, synthetic construct
  source 1..75: mol_type = other DNA
tacgctggtaatagcccagcgtctggtacgcaaactttgcccgcattgtcgccggcagcaaggggagcccatcca

SEQ ID NO: 431938 - DNA, 75 bp, synthetic construct
  source 1..75: mol_type = other DNA
tcgtattgcgaccttagcatgtcggggtggtgaaaaggtggtattaaggttgttacagcaggtgaaccaggcact

SEQ ID NO: 431939 - DNA, 75 bp, synthetic construct
  source 1..75: mol_type = other DNA
tattccagaccaatgtatggccatcgccgctgccccactggcaggcacccggttgtgtacattgctaccacggtt

SEQ ID NO: 431940 - DNA, 75 bp, synthetic construct
  source 1..75: mol_type = other DNA
acgaccagtgaacagcagatacgcaaactggcacagaagcacgcgcagatagagattaaaggccccttgctggta

SEQ ID NO: 431941 - DNA, 75 bp, synthetic construct
  source 1..75: mol_type = other DNA
tgtgaaaacatggggttgcggaggttttttgaatgagacgaacatttacagcagaggaaaaagcctctgtttttg

SEQ ID NO: 431942 - DNA, 75 bp, synthetic construct
  source 1..75: mol_type = other DNA
ctgaaattctgcaactgcgtaaggcgttaaatgaagctcgccttgagcgagatatattaaaaaaagcaactgtag

SEQ ID NO: 431943 - DNA, 75 bp, synthetic construct
  source 1..75: mol_type = other DNA
cgcctcacgacccgcgaaaggatttcgcgaaccgttcaccgttttttcaatatgattctgtctgctttggtcgat

SEQ ID NO: 431944 - DNA, 75 bp, synthetic construct
  source 1..75: mol_type = other DNA
atggccagcacagaagaaaaattactcacgctcctgttatcggtggagcatctgcaacataccgcaatggagcaa

SEQ ID NO: 431945 - DNA, 75 bp, synthetic construct
  source 1..75: mol_type = other DNA
agaatcattacagtggcgcgatatggctgctctatgtcatgatcctggtctggggagccgactctggcgcatata

SEQ ID NO: 431946 - DNA, 75 bp, synthetic construct
  source 1..75: mol_type = other DNA
atgaatattccacagctcaccgccctgtgtctgcgttatcagggagtcttgctggatgccagcgaagaggtggtt

SEQ ID NO: 431947 - DNA, 75 bp, synthetic construct
  source 1..75: mol_type = other DNA
aacttggtttacgcgcgctggcggcggcgacactttctaacctgatgagtgctactattgcaggattctttattg

SEQ ID NO: 431948 - DNA, 75 bp, synthetic construct
  source 1..75: mol_type = other DNA
tcagtggcctttctggttatgttcagtgtgctcggatgggggatgaaaacaattctcgacaggaactacaacgcc

SEQ ID NO: 431949 - DNA, 75 bp, synthetic construct
  source 1..75: mol_type = other DNA
ggaaatcgcaggaaataacattctgcttactggcaggtatcctgatgatcgtagcaatgatgcttgccggacgcg

SEQ ID NO: 431950 - DNA, 75 bp, synthetic construct
  source 1..75: mol_type = other DNA
tgaattggatatgccattagccatcgtcaggcttgatactctggtttcttcttatcttggtgaaactgctgctaa

SEQ ID NO: 431951 - DNA, 75 bp, synthetic construct
  source 1..75: mol_type = other DNA
gttcacctacgttgccgccggcaccggtagacaaagaaagggggctgccactgttggatctacggcagccacagc

SEQ ID NO: 431952 - DNA, 75 bp, synthetic construct
  source 1..75: mol_type = other DNA
tgagctggacatgccgctggcaattgtccgccttgatgtactggtatcctcatttctgggtgaaacagccgccaa

SEQ ID NO: 431953 - DNA, 75 bp, synthetic construct
  source 1..75: mol_type = other DNA
gatctttcttggcgaccgtgatcaactggcctctgttgaggctggggctgttcttggcgatatttgcgcttatgc

SEQ ID NO: 431954 - DNA, 75 bp, synthetic construct
  source 1..75: mol_type = other DNA
gcatattaagtgcggcaatcgccacgcgcaccgagcggcgcagtggtctggcggcgttgtttagttcacgggaat

SEQ ID NO: 431955 - DNA, 75 bp, synthetic construct
  source 1..75: mol_type = other DNA
aagctctactggcgcaaaccctggacaaactttttccagtaagcgatgaaattaactggcaaaaagttgcagcgg

SEQ ID NO: 431956 - DNA, 75 bp, synthetic construct
  source 1..75: mol_type = other DNA
agtggtgatggatggatgaaattacccaacgggaaaatcctgcaatatggtcgtggtgcggttacgccgacatta

SEQ ID NO: 431957 - DNA, 75 bp, synthetic construct
  source 1..75: mol_type = other DNA
cctgttggcaccaatgtaagacacataactttcccccggtcgtttacaacaacgaactattccatctcaattaac

SEQ ID NO: 431958 - DNA, 75 bp, synthetic construct
  source 1..75: mol_type = other DNA
agacgctgactcatttgagtggaaaggatgttgccggtcttctcgcataccttggtttgggagaagcggctaaaa

SEQ ID NO: 431959 - DNA, 75 bp, synthetic construct
  source 1..75: mol_type = other DNA
gtaaacaaggctggtaacgccgtccaaaagacaggcgatatcttgtccggtgggcttacttttgaaaacgactca

SEQ ID NO: 431960 - DNA, 75 bp, synthetic construct
  source 1..75: mol_type = other DNA
ttttgtgaaatcggcgattgcggcaatggtgggttctgcacctgcggcactggatacactgaacgaactggcggc

SEQ ID NO: 431961 - DNA, 75 bp, synthetic construct
  source 1..75: mol_type = other DNA
ggtttgggagaagcggcgaaacggggggttggaacaggggaaaatcagataccggacatggcctcttttgccagt

SEQ ID NO: 431962 - DNA, 75 bp, synthetic construct
  source 1..75: mol_type = other DNA
ttgcccgcaatgacagcgcccttgggttgtttaatggtgatattggtattgcactggatcgcgggcaaggaacgc

SEQ ID NO: 431963 - DNA, 75 bp, synthetic construct
  source 1..75: mol_type = other DNA
gcgccgacgctggcagagcgcaagcaggcggttgacgataaccgccgggcgctggacgacgccgctgtactgaac

SEQ ID NO: 431964 - DNA, 75 bp, synthetic construct
  source 1..75: mol_type = other DNA
atccaacagatcgctcgccagcttagcgccagcaatatggacgtttccgggttgtgccgcagcacctactacact

SEQ ID NO: 431965 - DNA, 75 bp, synthetic construct
  source 1..75: mol_type = other DNA
cagcagagcggcagcttcctgccgcctgacattgaaccgtgaagataaatgtcatgctattaacgaagagatgat

SEQ ID NO: 431966 - DNA, 75 bp, synthetic construct
  source 1..75: mol_type = other DNA
cctccaatgggcgaaagcacggttaaattgccttctgatgcaggaagcaatattacttaccgaacaataaatgat

SEQ ID NO: 431967 - DNA, 75 bp, synthetic construct
  source 1..75: mol_type = other DNA
atttattcagtatcaataccgcaacactgggctataaaacgccgctacccgccattattgatgcctgcgccgcac

SEQ ID NO: 431968 - DNA, 75 bp, synthetic construct
  source 1..75: mol_type = other DNA
attgaactggaaatattctcaccgtattggtggcagcaagatattgacagcacactggatattagcgtcgatcgc

SEQ ID NO: 431969 - DNA, 75 bp, synthetic construct
  source 1..75: mol_type = other DNA
acccgctgcatcttgatgtgctggtggtggatgaagcgtcaatgatcgatctccccatgatgtcgcgcctgatcg

SEQ ID NO: 431970 - DNA, 75 bp, synthetic construct
  source 1..75: mol_type = other DNA
gtattttgagtgcggcaatcgccactcgtaccgagcgacgtagcgggctggcagcgttgtttggtgcgcgggagt

SEQ ID NO: 431971 - DNA, 75 bp, synthetic construct
  source 1..75: mol_type = other DNA
tcttgcgggttatggacgttatctggatctgctgcaagcgcgtgccgagccggatttaatcattcaggcgttcaa

SEQ ID NO: 431972 - DNA, 75 bp, synthetic construct
  source 1..75: mol_type = other DNA
gcacctactacaccgcaccgacgctggcggagcgcaaactggcgattgacgataaccgccgggcgctggacgacg

SEQ ID NO: 431973 - DNA, 75 bp, synthetic construct
  source 1..75: mol_type = other DNA
ctgccaacaacatgagcgtttccggtttgtgtcgtagcacctactacaccgcgccgacgctggcggagcgcaagc

SEQ ID NO: 431974 - DNA, 75 bp, synthetic construct
  source 1..75: mol_type = other DNA
ttgtataaccgcgcacgcgcgattatacaattgcctcctggtcagggcttcgccccgacaccccgtaaggagcct

SEQ ID NO: 431975 - DNA, 75 bp, synthetic construct
  source 1..75: mol_type = other DNA
cagcatagggaatgtgactttacaggtgttacattgcccagggcatacgccgggtcatgtggtcttctttgataa

SEQ ID NO: 431976 - DNA, 75 bp, synthetic construct
  source 1..75: mol_type = other DNA
atgatgtgacgtttattccagggcacgggccgttatccaccctcggctatgaacggttgcataaccccttcctgc

SEQ ID NO: 431977 - DNA, 75 bp, synthetic construct
  source 1..75: mol_type = other DNA
tggcaacgcttgccgagcaactgaaccagcaattgcgcgagcgtgacggcgaaagcaaaaccattctcagcgccc

SEQ ID NO: 431978 - DNA, 75 bp, synthetic construct
  source 1..75: mol_type = other DNA
caaaggatattgagcgactatctaagactcttgccctcaatggtgctaagtatctgactcaaatgttggaacccg

SEQ ID NO: 431979 - DNA, 75 bp, synthetic construct
  source 1..75: mol_type = other DNA
acgcgaggtactgaaccttcactcagtgtggctcggcagatagctgcaattgaaggggttactatcgaatggata

SEQ ID NO: 431980 - DNA, 75 bp, synthetic construct
  source 1..75: mol_type = other DNA
aaaatcaagatctaatccgcttagaaggaaggaaaagaatagctgcattacagcttgaaggtatgtctgacgaac

SEQ ID NO: 431981 - DNA, 75 bp, synthetic construct
  source 1..75: mol_type = other DNA
cgcttgggatcatggtggaagtgccgtcggtgtgctacatcatcgaccacttctgcgatgaggtcgatttcttca

SEQ ID NO: 431982 - DNA, 75 bp, synthetic construct
  source 1..75: mol_type = other DNA
ttgctgcatatcacctggccggaactgaagccgcgcaacaatctggtgctggaaaaaccgactattctggtggcc

SEQ ID NO: 431983 - DNA, 75 bp, synthetic construct
  source 1..75: mol_type = other DNA
ccagcaactgcgtgagcgtgacggcgaaagtaaaaccattcttagcgcccatttgtcgctgattcaggatgaaga

SEQ ID NO: 431984 - DNA, 75 bp, synthetic construct
  source 1..75: mol_type = other DNA
gtcggcgtgggtacgctgaccctgttacaaagcgacagcctcgacagttaccgggcgatccccgccagtgcgcaa

SEQ ID NO: 431985 - DNA, 75 bp, synthetic construct
  source 1..75: mol_type = other DNA
gtgcttgacgcccagtgcggcgtgctggcgattaacccgaatgacgcggtgagcggttattatcaggtcgcgcag

SEQ ID NO: 431986 - DNA, 75 bp, synthetic construct
  source 1..75: mol_type = other DNA
gtatggaaatgtgctggcgagcggtatcggcattggtacactgaccttattacagagcgataatctcgacagtta

SEQ ID NO: 431987 - DNA, 75 bp, synthetic construct
  source 1..75: mol_type = other DNA
gaatatatatcgtaaaaaactcaagcttaatattttgagcagtatatattactggtgtaattattctttttacgc

SEQ ID NO: 431988 - DNA, 75 bp, synthetic construct
  source 1..75: mol_type = other DNA
cctgctggttgattttatgcaaaaaccagaaaacggaaatctgaatgttgaactggtcagtgcaccagatggcac

SEQ ID NO: 431989 - DNA, 75 bp, synthetic construct
  source 1..75: mol_type = other DNA
tgagagcagcagttattttgggaacgtgacactgaataaccactcattactggatattggtaataaatttacagg

SEQ ID NO: 431990 - DNA, 75 bp, synthetic construct
  source 1..75: mol_type = other DNA
gggcggtattttcagcaccggggctgtggacgtcaaagaaaatgcctccctgaccctgacggggataccttctgc

SEQ ID NO: 431991 - DNA, 75 bp, synthetic construct
  source 1..75: mol_type = other DNA
gaaattaaggataatatgcgttttggcctggagctggagaaatcagcgttcgggaaatataacgtggacaatgcg

SEQ ID NO: 431992 - DNA, 75 bp, synthetic construct
  source 1..75: mol_type = other DNA
ccaaatccgtggggggagggttgtacgcttcagcactctttgattccggggcttattttgacctgattggtaaat

SEQ ID NO: 431993 - DNA, 75 bp, synthetic construct
  source 1..75: mol_type = other DNA
taactacactcacgttcagattggtgccgacagaaagcatgagctggacggtgtggatttgttcacgggtgcatt

SEQ ID NO: 431994 - DNA, 75 bp, synthetic construct
  source 1..75: mol_type = other DNA
ccagtttgacctgctggcgaacggagaaacggtcttgcgtgatgcttccggcgagaaacgttttgaaggagaaaa

SEQ ID NO: 431995 - DNA, 75 bp, synthetic construct
  source 1..75: mol_type = other DNA
tcggatattcatgcaggagccacggcggcaaccattaatctgggagacagtgatgctgtcgggaagacagattct

SEQ ID NO: 431996 - DNA, 75 bp, synthetic construct
  source 1..75: mol_type = other DNA
tccgttaatcagggggccgggtatctgcaatttgccggcaattacagggtgtccgccctgaacggccagacatgg

SEQ ID NO: 431997 - DNA, 75 bp, synthetic construct
  source 1..75: mol_type = other DNA
cggctcccccctgtttgcttatgattcctggcaaaaaaaatgggtgctgattggtgtcacctcctcaaagacagc

SEQ ID NO: 431998 - DNA, 75 bp, synthetic construct
  source 1..75: mol_type = other DNA
tggagctggtttacggttctgtgtcaggaaaatcctttaactgggaagaccggggaatggccctgagcatgaaag

SEQ ID NO: 431999 - DNA, 75 bp, synthetic construct
  source 1..75: mol_type = other DNA
cttcggatacaccaaaaacacctatactgcggtgggtacaaataataatagcggtctggatattaaaacccgccg

SEQ ID NO: 432000 - DNA, 75 bp, synthetic construct
  source 1..75: mol_type = other DNA
tcaggcatgtgaatgccgcagcgcgcaggagattgaagcgttactcaccgcctttacgccggaagaagacgttcg

SEQ ID NO: 432001 - DNA, 75 bp, synthetic construct
  source 1..75: mol_type = other DNA
tatttgcagcatcaataacagactcattcttgaaaggttacaaaggattatcgattcgtacctcaatagaatagc

SEQ ID NO: 432002 - DNA, 75 bp, synthetic construct
  source 1..75: mol_type = other DNA
aaagtcttcagaattgcgtgattcttattttcagtgtcaatagcaggtctgttcttgaagattacaaaatcctct

SEQ ID NO: 432003 - DNA, 75 bp, synthetic construct
  source 1..75: mol_type = other DNA
aaactatttaatggttattaatgaatatccttaccgtaatactcattttttattgctgataacaatgagtatcaa

SEQ ID NO: 432004 - DNA, 75 bp, synthetic construct
  source 1..75: mol_type = other DNA
aagaatctggaaacattaagccagacgcacaaggtcgaacgtctggctctgtttgatcagttcccctacacgcac

SEQ ID NO: 432005 - DNA, 75 bp, synthetic construct
  source 1..75: mol_type = other DNA
agcgtgtcgaaagcgcggccacgactgaggaaaccactgcattacgccaagagatagaggatcagaaaaaccaga

SEQ ID NO: 432006 - DNA, 75 bp, synthetic construct
  source 1..75: mol_type = other DNA
agttattacaacaaaggggactggcctttgatgagcgaaacaaaatccagggacgactggatgagatatccgaac

SEQ ID NO: 432007 - DNA, 75 bp, synthetic construct
  source 1..75: mol_type = other DNA
aagaacttgcacgcaagaaagaagaagaacgtaaagcggcaatgctgaacatgtttgatccatctttgcttgaga

SEQ ID NO: 432008 - DNA, 75 bp, synthetic construct
  source 1..75: mol_type = other DNA
aagaaattgctcgtaagaaagaggaagaacgtaacgctgctttggttgatagttttttcgacgcttcattattac

SEQ ID NO: 432009 - DNA, 75 bp, synthetic construct
  source 1..75: mol_type = other DNA
ttgctcgaaaaatggcgggctgtatatcaggaacagttgagcttggtcgatcacgggttgacaacttctttgtgg

SEQ ID NO: 432010 - DNA, 75 bp, synthetic construct
  source 1..75: mol_type = other DNA
gtgcttataaaaaattttaagcgaaccattacatcctggaaaacatctacattcgaaatatataagctggctttt

SEQ ID NO: 432011 - DNA, 75 bp, synthetic construct
  source 1..75: mol_type = other DNA
tgcttactggaaaaagctaaagatacaaaaacttaaagattccgtaaagctagcaaaatattacgaaacgataga

SEQ ID NO: 432012 - DNA, 75 bp, synthetic construct
  source 1..75: mol_type = other DNA
agaaatacgatgttaccaagaagttatgatcgtttttctgatgttgattatatgattgtatttaaaaatgtaata

SEQ ID NO: 432013 - DNA, 75 bp, synthetic construct
  source 1..75: mol_type = other DNA
gacgtaaaaacccgaaccgcaaaccgtggacacctaacctgaatttctcaatggttgatttccacgagcgcaaac

SEQ ID NO: 432014 - DNA, 75 bp, synthetic construct
  source 1..75: mol_type = other DNA
gcgcattaagccgtaatcagccgcagtatccggcacgagcacaggcattgcgcattgaagggcaggttaaagtta

SEQ ID NO: 432015 - DNA, 75 bp, synthetic construct
  source 1..75: mol_type = other DNA
tatgataattttagtttccagttgtttgagtatgacaccgataacattgaaaaaaatattgagataataaaatca

SEQ ID NO: 432016 - DNA, 75 bp, synthetic construct
  source 1..75: mol_type = other DNA
cagtacaaaacgctgaaatttactccgggtaacggcgtggctgaagccccccgctatttgtcagggcagtaccat

SEQ ID NO: 432017 - DNA, 75 bp, synthetic construct
  source 1..75: mol_type = other DNA
tgaaaaagagttgctccaggaatacgccactgacattaacgaagtggcgctgcgctttgtgggtgagctgttcac

SEQ ID NO: 432018 - DNA, 75 bp, synthetic construct
  source 1..75: mol_type = other DNA
aaagtgaaatttgatgtcacgcctgatggtcgtgtggataacgtacagatcctttccgctaaacctgccaacatg

SEQ ID NO: 432019 - DNA, 75 bp, synthetic construct
  source 1..75: mol_type = other DNA
aggttattgaactacctgcgcccgcgcagccgatttctgtcaccatggttgcgccagcggatctcgaaccgccac

SEQ ID NO: 432020 - DNA, 75 bp, synthetic construct
  source 1..75: mol_type = other DNA
aagctttattcactatcccgacggcagcgtacagcgccgttccggcaaatatcaaacctctgccagaacaaagga

SEQ ID NO: 432021 - DNA, 75 bp, synthetic construct
  source 1..75: mol_type = other DNA
tcctgacgtcggtgtccggttggtttcatttgcggtccactgggttaaatctgaaatccatgaatatgtcttacg

SEQ ID NO: 432022 - DNA, 75 bp, synthetic construct
  source 1..75: mol_type = other DNA
ccgcaaggagcagtaattacagttagcacaaatagggggatcgctcatcttcgttatagacgtttgagcaatcgc

SEQ ID NO: 432023 - DNA, 75 bp, synthetic construct
  source 1..75: mol_type = other DNA
ttcacgccggaaggggccgagtacgtggagcatttctgcgggctggagggcactgttgcaaatagtcggtggtga

SEQ ID NO: 432024 - DNA, 75 bp, synthetic construct
  source 1..75: mol_type = other DNA
agaagaaagcgggcagaattgacggcatccgtatgaatgaaattgatgatcagcgtcgtgcatatgttgatggct

SEQ ID NO: 432025 - DNA, 75 bp, synthetic construct
  source 1..75: mol_type = other DNA
atccgtctgaacgaacccgcacatctggatgctgctgaggctgcgctggtgaaaattaaaatttccccaaaagag

SEQ ID NO: 432026 - DNA, 75 bp, synthetic construct
  source 1..75: mol_type = other DNA
tcctgaaccgtaatcagcctgctttctactgtgtacccgcagagctgtacgaaaagatgctcgatgccctggacg

SEQ ID NO: 432027 - DNA, 75 bp, synthetic construct
  source 1..75: mol_type = other DNA
ctcgccagcataatctccgccattctggttatcgttggtcagcaaagcatcgccaccggaatcgccatcgcgttg

SEQ ID NO: 432028 - DNA, 75 bp, synthetic construct
  source 1..75: mol_type = other DNA
atgcggcattgccgaaatgatcatcgcccagacccagcgcgaaggataagcgaggaagcggcgcggcagaaagtc

SEQ ID NO: 432029 - DNA, 75 bp, synthetic construct
  source 1..75: mol_type = other DNA
ggatgatgatgatgagatagatcctaactatctgctgaagatgtataccagacaacatgagacgggaggggatgc

SEQ ID NO: 432030 - DNA, 75 bp, synthetic construct
  source 1..75: mol_type = other DNA
gtgactgtttcgaaagagatgggacaggatgcaatcgaggctgctgaactctattttgagcgctgggaacagcta

SEQ ID NO: 432031 - DNA, 75 bp, synthetic construct
  source 1..75: mol_type = other DNA
ctaatcagattgaaagtgaaagaactaaagcaagacatgctgcagtatttgaatggaaacgccctgattcttttc

SEQ ID NO: 432032 - DNA, 75 bp, synthetic construct
  source 1..75: mol_type = other DNA
gttagtgagtacttagtatctgaattaataaaagaaagaaccgaggttctgaagctttataatgagttacaagcc

SEQ ID NO: 432033 - DNA, 75 bp, synthetic construct
  source 1..75: mol_type = other DNA
tattgtttgatgtggttgagaataatgattatacaaaatcaaatgaaattgccctgcttgaaaaatatacaactt

SEQ ID NO: 432034 - DNA, 75 bp, synthetic construct
  source 1..75: mol_type = other DNA
gcaggaaacggtgcaggtgaaggcgctcacgaagctggaactggcggtttgcgccgctccgggtaaaggtagctg

SEQ ID NO: 432035 - DNA, 75 bp, synthetic construct
  source 1..75: mol_type = other DNA
gcgctggtcgccactggcagtccgtttaatccagtggtatggaaagataaaatctaccctatcgcccagtgtaac

SEQ ID NO: 432036 - DNA, 75 bp, synthetic construct
  source 1..75: mol_type = other DNA
caatgtaaaaccagatattctgattggcgtctcaggacagaccgggctgtttacggaagagatcatccgtgagat

SEQ ID NO: 432037 - DNA, 75 bp, synthetic construct
  source 1..75: mol_type = other DNA
gcagaaagtctttatggtcgatcgctttggcctgctgaccgacaagatgccgaacctgctgcctttccagaccaa

SEQ ID NO: 432038 - DNA, 75 bp, synthetic construct
  source 1..75: mol_type = other DNA
gcaatgaaaaagaattaaaagattgtaatcttcttggcaagagagataagagacgagcaaaaatattagcatcaa

SEQ ID NO: 432039 - DNA, 75 bp, synthetic construct
  source 1..75: mol_type = other DNA
attcgtgaactgctggcattattgttgtgcttgttttccggcgggttagcgatgtacggctacttgcgctggtta

SEQ ID NO: 432040 - DNA, 75 bp, synthetic construct
  source 1..75: mol_type = other DNA
ggaaaatggaggttttgccgtaaatatgaatgtgcgactggaagaatcctcacctgaggaccagaccgggccaca

SEQ ID NO: 432041 - DNA, 75 bp, synthetic construct
  source 1..75: mol_type = other DNA
cctgcttgaagatttaatggaagccggaccactcaaagccgccccgtcgctgtcctttctcgggctggccgtgat

SEQ ID NO: 432042 - DNA, 75 bp, synthetic construct
  source 1..75: mol_type = other DNA
cgccaggttgctggggtttggctaccagcgattaatgccttcttttgctggcgtacgcttcgaaatgggtaacga

SEQ ID NO: 432043 - DNA, 75 bp, synthetic construct
  source 1..75: mol_type = other DNA
cgttactgtttgccgccaccagcgacagccagttaagtaagacggagatcagtagcattacgattaataacgaaa

SEQ ID NO: 432044 - DNA, 75 bp, synthetic construct
  source 1..75: mol_type = other DNA
ctgttcgaccgccgtctgccggagctgatgtctctgctgcgcgatgacgacatcctgatcctcactgctgaccac

SEQ ID NO: 432045 - DNA, 75 bp, synthetic construct
  source 1..75: mol_type = other DNA
taacggtgatattttcgttcagaaagctcctgcggcaacaattcaaacattagccattgcacttaaggaattgct

SEQ ID NO: 432046 - DNA, 75 bp, synthetic construct
  source 1..75: mol_type = other DNA
gtgatgtcagagattaccgtagtattttgaatgcgactcgcggtgttgattttatatatcatgcagcggcactta

SEQ ID NO: 432047 - DNA, 75 bp, synthetic construct
  source 1..75: mol_type = other DNA
taatggcgatattttcgtacaaaaagcaccagcagctaccattgaaactttagcaattgcactcaaggaactatt

SEQ ID NO: 432048 - DNA, 75 bp, synthetic construct
  source 1..75: mol_type = other DNA
tgatggtatggttgctttgctgcgtaaactcgaatttatccgcaaagtggaagctggtcatgatgcaaatccaga

SEQ ID NO: 432049 - DNA, 75 bp, synthetic construct
  source 1..75: mol_type = other DNA
cccaatggaagctgtaaaaacgaatgttttaggtacggaaaacgtactggaagcggcaatagctaatggagttag

SEQ ID NO: 432050 - DNA, 75 bp, synthetic construct
  source 1..75: mol_type = other DNA
atgaaaaaattactgctaaaacttccttttatccgggcaattcgttctggtgaagattatgagttggattcataa

SEQ ID NO: 432051 - DNA, 75 bp, synthetic construct
  source 1..75: mol_type = other DNA
gcaggaggcagtgcaggtgaaggcgctgacgaaactggagctggcagtctgtaccgctccgggaaaagggacata

SEQ ID NO: 432052 - DNA, 75 bp, synthetic construct
  source 1..75: mol_type = other DNA
cctgacggtcgaagagttgcatccgccgatccctggctatgaatgcccgccgaaccatcaactggttgaagtggt

SEQ ID NO: 432053 - DNA, 75 bp, synthetic construct
  source 1..75: mol_type = other DNA
ggacattctttttcctgtttgcctgcctgttggcttacatcggttgttctatgaatgggaaacactatgggacat

SEQ ID NO: 432054 - DNA, 75 bp, synthetic construct
  source 1..75: mol_type = other DNA
cagctgggaaaaatatgatgtgaaggtggtgagcccgtccaaagcggccgcctacgtcggctgggcatcggaccc

SEQ ID NO: 432055 - DNA, 75 bp, synthetic construct
  source 1..75: mol_type = other DNA
ggtgaatattttgttagcattaccgttaataataaccaaataagtaacgggcaaaaaattagctggcaaaaaagc

SEQ ID NO: 432056 - DNA, 75 bp, synthetic construct
  source 1..75: mol_type = other DNA
aagatggctcctcctgtttattattatcgtggagatcatacgtttatcatacggatagtaattgattcacttttg

SEQ ID NO: 432057 - DNA, 75 bp, synthetic construct
  source 1..75: mol_type = other DNA
tctggcgactgccgatgaagaaaccagtatggccggagcgcgttattttgccgaaactaccgccctgcgcccgga

SEQ ID NO: 432058 - DNA, 75 bp, synthetic construct
  source 1..75: mol_type = other DNA
caaaacgatgataatgagatcatagtgtctgccagccgcagcaatcgaactgtagcggagatggcgcaaaccacc

SEQ ID NO: 432059 - DNA, 75 bp, synthetic construct
  source 1..75: mol_type = other DNA
atgatgcgcaaaaagtatatgccccgggctcttggtccgctgcttcttgtcgtgctgtcaccagctgtcgcccag

SEQ ID NO: 432060 - DNA, 75 bp, synthetic construct
  source 1..75: mol_type = other DNA
tacggcccagcgtcactgtacgactacaaaggcaggggccgaacctttggtctgaactactctgtgctgttctga

SEQ ID NO: 432061 - DNA, 75 bp, synthetic construct
  source 1..75: mol_type = other DNA
agcgtggtggacgacaaacgccgcatttacggcgtggaaggtgcggtggactacctgattccagataccgactgg

SEQ ID NO: 432062 - DNA, 75 bp, synthetic construct
  source 1..75: mol_type = other DNA
acaccatacgtcagtaaggggctgaattctgaccgtattcccggcactgagcggcatttgatcagcttgcagtac

SEQ ID NO: 432063 - DNA, 75 bp, synthetic construct
  source 1..75: mol_type = other DNA
gtgaccaaaaaaggccagccgaaaaccatgatggagtttgaggctggcgcaaaaagtggctttaacagcagtaaa

SEQ ID NO: 432064 - DNA, 75 bp, synthetic construct
  source 1..75: mol_type = other DNA
ctacgctgtcagggataaccttttcataacaccagaatcacggacaaaatttttcgatttcgtcataccagtaat

SEQ ID NO: 432065 - DNA, 75 bp, synthetic construct
  source 1..75: mol_type = other DNA
caaacgtctgacatcagcacaactgaccgatcgtgcatatgagataagcaaggataaaactttaattagtcgcca

SEQ ID NO: 432066 - DNA, 75 bp, synthetic construct
  source 1..75: mol_type = other DNA
tctatatcggataaggagattaagccatctaaccaatcagtaataatagatgctgaatcgcgcgtgattaattct

SEQ ID NO: 432067 - DNA, 75 bp, synthetic construct
  source 1..75: mol_type = other DNA
aaaatggcatgggggttggctaatggaatggttactgcaattcgtcgtggtgtattaactcctgtgtggattgaa

SEQ ID NO: 432068 - DNA, 75 bp, synthetic construct
  source 1..75: mol_type = other DNA
atctgggctgaacatcgtgcggagttctgcgctaacgctcacctgaaaggatggaagccgcctcatgaacgcgaa

SEQ ID NO: 432069 - DNA, 75 bp, synthetic construct
  source 1..75: mol_type = other DNA
atgcatcaggatatcaaagagtacagagccggaaatcgttgcgcggcgtattcgctgggtgcatccagagcagaa

SEQ ID NO: 432070 - DNA, 75 bp, synthetic construct
  source 1..75: mol_type = other DNA
gttctaatgttgctagggctgtgaatctgattttaaggcctgaacatctgaagcgtattggtagaagaccaaaaa

SEQ ID NO: 432071 - DNA, 75 bp, synthetic construct
  source 1..75: mol_type = other DNA
atgagtaaaaaatcggccaaaaagcgccagccagtgaagcccgtggtggcgaaagaacctgctcgcaccgccaaa

SEQ ID NO: 432072 - DNA, 75 bp, synthetic construct
  source 1..75: mol_type = other DNA
gagatcggtttgctggtggtaatcgccattctttatctggtcttctccctgaacgcgcctggctttatctcattg

SEQ ID NO: 432073 - DNA, 75 bp, synthetic construct
  source 1..75: mol_type = other DNA
ggtgccgcaaacggtctggagtttgacgtcatcgccgcggtcgtggtcggcggtacggcgctttccggcggtcgc

SEQ ID NO: 432074 - DNA, 75 bp, synthetic construct
  source 1..75: mol_type = other DNA
gttataccagtccacccacgttagtgtggccagttccacttctgtccggtttttccagctcttacggtgtattac

SEQ ID NO: 432075 - DNA, 75 bp, synthetic construct
  source 1..75: mol_type = other DNA
gaaccttaacacacgaagaacagatcgcgactattgcgaaggttaatcctgatgttgaagttataggcgaaattg

SEQ ID NO: 432076 - DNA, 75 bp, synthetic construct
  source 1..75: mol_type = other DNA
gaaagaacctgctcgcaccgccaaaaattttggctatgaagagatgttgagcgagctggaagccatcgtcgcgga

SEQ ID NO: 432077 - DNA, 75 bp, synthetic construct
  source 1..75: mol_type = other DNA
tcagagaacaactaaaagagaaagacgcacagatcactggcctacaggactacatcaaaactcagtgtttacgca

SEQ ID NO: 432078 - DNA, 75 bp, synthetic construct
  source 1..75: mol_type = other DNA
taataggtagcggagtattgggattggttgcagtgaaaatccttcaggttactggtggtcattattatggtatgg

SEQ ID NO: 432079 - DNA, 75 bp, synthetic construct
  source 1..75: mol_type = other DNA
gtacattcgcgatgtttaccgtaattgtattagcttatgggaaagctaataatctggatgctaatattttaatgg

SEQ ID NO: 432080 - DNA, 75 bp, synthetic construct
  source 1..75: mol_type = other DNA
tcaacaaatatcatgccagcgcatccgcaaatgtgcagaacagaaaggtcagctttcttaaaaagttgttctctt

SEQ ID NO: 432081 - DNA, 75 bp, synthetic construct
  source 1..75: mol_type = other DNA
cgaaattcgagcactagcagcgcatctattcgatcagcagggtatcgatccacaaggacgaatggcgcacagcga

SEQ ID NO: 432082 - DNA, 75 bp, synthetic construct
  source 1..75: mol_type = other DNA
tcgccgttgttgtttgcattattgccgggctgaccgccgtaacgtgttattaccagagtgaggcggcaaggttac

SEQ ID NO: 432083 - DNA, 75 bp, synthetic construct
  source 1..75: mol_type = other DNA
gaattacattttaaagagatactcagtcgttttatttggttgataaataaaacattgaaatggcttccttttaat

SEQ ID NO: 432084 - DNA, 75 bp, synthetic construct
  source 1..75: mol_type = other DNA
atcggtcgctgatagctttcgataaccagccgcaagccgaagaatgccagaagcgcgagtataaaacgatatatg

SEQ ID NO: 432085 - DNA, 75 bp, synthetic construct
  source 1..75: mol_type = other DNA
tcgagaaactgaaaaactatccagaagacgaacccttactcatggttatgtggcacaaagaagatattgctgaag

SEQ ID NO: 432086 - DNA, 75 bp, synthetic construct
  source 1..75: mol_type = other DNA
ccgtggagttcacggcagcagataagaaggcgatgacccatgcggcatacgcccagtgtttcttcattctggccc

SEQ ID NO: 432087 - DNA, 75 bp, synthetic construct
  source 1..75: mol_type = other DNA
agcagcctcacggcccttatgtgctggcgggttggtcgtatggcgcgtttcttgcggcgggcgccgcacagcgcc

SEQ ID NO: 432088 - DNA, 75 bp, synthetic construct
  source 1..75: mol_type = other DNA
cgctcagtcgactaagatttacactcaaaaccacattaattggattgtcgttccacacggggaaatcaaaactgg

SEQ ID NO: 432089 - DNA, 75 bp, synthetic construct
  source 1..75: mol_type = other DNA
gctagcagctaccgcccacaggatggtagcaacagcactaacctgaacgcctacggtaccgctggaattaacgcc

SEQ ID NO: 432090 - DNA, 75 bp, synthetic construct
  source 1..75: mol_type = other DNA
ctcttgtctatcgtgaagcggactttgatattctggaatggcgcgtggatcactttgccgacctcacctgtgtgg

SEQ ID NO: 432091 - DNA, 75 bp, synthetic construct
  source 1..75: mol_type = other DNA
ctctcgtctatcgtgaagcagactttgatattctggagtggcgcgtggaccactttgccgacctctcctgcgtag

SEQ ID NO: 432092 - DNA, 75 bp, synthetic construct
  source 1..75: mol_type = other DNA
tcgaattcaacctgaatgttctcgataaatcaatgcgcgaccgcattgatatttcattattaaaggaaaaaggag

SEQ ID NO: 432093 - DNA, 75 bp, synthetic construct
  source 1..75: mol_type = other DNA
gtgaacatgaatgacttacccgacggcgtaacagtggcagaaaacgttatcaaagaaacgtggattgaaggcgcg

SEQ ID NO: 432094 - DNA, 75 bp, synthetic construct
  source 1..75: mol_type = other DNA
attgctcccggtgaatattttgtcagcattgcggtaaataataaccaaatcagtaatgggcaaaaaattaactgg

SEQ ID NO: 432095 - DNA, 75 bp, synthetic construct
  source 1..75: mol_type = other DNA
tcttttcaacgcgtggtagttcaacaacgtatgatgttgtttctatacgtggatttactacagccagtacagtaa

SEQ ID NO: 432096 - DNA, 75 bp, synthetic construct
  source 1..75: mol_type = other DNA
tgatgcaaaatcgacaaaaatttatacccagaatcatgttgaatgggttgaagtaccacatgcagaaataaaaat

SEQ ID NO: 432097 - DNA, 75 bp, synthetic construct
  source 1..75: mol_type = other DNA
cgcagtaaagaggtttcgcacccaactcaagttgcaccagattatttgagtcggtcattctcttccgtgcgagac

SEQ ID NO: 432098 - DNA, 75 bp, synthetic construct
  source 1..75: mol_type = other DNA
agtctgtcatggcagcggcaaaaatcctccgtgagatcatgccagaaaaaccattgctgtttaccttccgtagcg

SEQ ID NO: 432099 - DNA, 75 bp, synthetic construct
  source 1..75: mol_type = other DNA
gcgtaatttctcgtctggctggtgaagtatttggctcggcggcaacttttggtgcggtaaaaaaagcctctgcgc

SEQ ID NO: 432100 - DNA, 75 bp, synthetic construct
  source 1..75: mol_type = other DNA
atcagcagttcacctggagaggtggtattaattatctgttcgataatggtatttcaccttatttcagttatagcg

SEQ ID NO: 432101 - DNA, 75 bp, synthetic construct
  source 1..75: mol_type = other DNA
gctgcttaaaaataagcgagcctcggttatgtattttgctgaccatgggcttgaacgcgatccaacggcaaaaca

SEQ ID NO: 432102 - DNA, 75 bp, synthetic construct
  source 1..75: mol_type = other DNA
agtgatgtgtatgtgatttatcttgtaacgtctgagcgacatgcgtttcttctggattactgggatgagccagca

SEQ ID NO: 432103 - DNA, 75 bp, synthetic construct
  source 1..75: mol_type = other DNA
aaggcggtgaacccactctggctggcctggattttttccgtaaagttattcactatcaacaacgctatgcaggcc

SEQ ID NO: 432104 - DNA, 75 bp, synthetic construct
  source 1..75: mol_type = other DNA
ggtagtcaccattgtggcgatgggttgcttctacagcctgaacgagaagatgtatgtccgcattgtggaagagat

SEQ ID NO: 432105 - DNA, 75 bp, synthetic construct
  source 1..75: mol_type = other DNA
tattgttaccatgagcgaaaaaggcgcattatggatgacccgtgatcaggaagtccatgttcctgcattcaaagt

SEQ ID NO: 432106 - DNA, 75 bp, synthetic construct
  source 1..75: mol_type = other DNA
tgcaaatgtgatttctttatcccgaatgaaacagaactggaaatattaaccggcatgtcggttgatacttatgat

SEQ ID NO: 432107 - DNA, 75 bp, synthetic construct
  source 1..75: mol_type = other DNA
tggttaagcggtgttgctgaaaatcaacaatttaccgtgatctggggtgacaaacaacgttgcattattcatcta

SEQ ID NO: 432108 - DNA, 75 bp, synthetic construct
  source 1..75: mol_type = other DNA
atgagcctggctgaagtattttacctgccgaagagtgaacctgttgaacaggagcgaagagtggctgatatcgat

SEQ ID NO: 432109 - DNA, 75 bp, synthetic construct
  source 1..75: mol_type = other DNA
ttacatgattattccgtaagaaaatttcctgtgctttctgattttattgtgtcatttatgttagggattaataaa

SEQ ID NO: 432110 - DNA, 75 bp, synthetic construct
  source 1..75: mol_type = other DNA
gccgaaaaaacgccagtacgccagcgcatcgtagtcagcgccaggttgctggggtttggctaccagcgattaatg

SEQ ID NO: 432111 - DNA, 75 bp, synthetic construct
  source 1..75: mol_type = other DNA
tcaccgggaaggaattttcaaaagtgcggctgattgccggttacgacagtatcgcgccggaggtggcggcaagcg

SEQ ID NO: 432112 - DNA, 75 bp, synthetic construct
  source 1..75: mol_type = other DNA
gtgggcagatcaccgatcagaacacggacggaaatatcacactcagcggcaccacggcgcagcctgccagcatcg

SEQ ID NO: 432113 - DNA, 75 bp, synthetic construct
  source 1..75: mol_type = other DNA
ttgaaaaaccgcagtgatcttcatcctgcagaactgcaacttattgaaaagttaattcaccaacgcagtgaggca

SEQ ID NO: 432114 - DNA, 75 bp, synthetic construct
  source 1..75: mol_type = other DNA
atggacattgcagttattggttccaatatggtggatctcattacttacactaatcagatgcctaaagaaggagaa

SEQ ID NO: 432115 - DNA, 75 bp, synthetic construct
  source 1..75: mol_type = other DNA
ttaagtaatgaaggtcaggatgccacgacgttacgcgcatctgttattcggacgaccagaaaaatattttccggt

SEQ ID NO: 432116 - DNA, 75 bp, synthetic construct
  source 1..75: mol_type = other DNA
aatatcgagtcaacgttctgtaaaccaacagaaaatgagtttttcatagaacctatcgcgttgtactcagaaatt

SEQ ID NO: 432117 - DNA, 75 bp, synthetic construct
  source 1..75: mol_type = other DNA
agaaagactgcctttctatgaggacacttggagtgatgtttgccgtacgcgcttttttcacagtctgtatgcgtt

SEQ ID NO: 432118 - DNA, 75 bp, synthetic construct
  source 1..75: mol_type = other DNA
tgatggcgtcgagttcgtgtattcggacaagatggtcagaatgcagggggcgaaagttgactgccctgagtggat

SEQ ID NO: 432119 - DNA, 75 bp, synthetic construct
  source 1..75: mol_type = other DNA
tcatgatgttttcagcctcagcaatggcaaagatcggctatgtagatgagcatcaaaaaaagatagatctggaag

SEQ ID NO: 432120 - DNA, 75 bp, synthetic construct
  source 1..75: mol_type = other DNA
gtggtggttcctccggctgttcctggaggccgttttcgaacggtggagacgcgacgcgttcaggggctggagttt

SEQ ID NO: 432121 - DNA, 75 bp, synthetic construct
  source 1..75: mol_type = other DNA
caacttgctaatgaatgtcctaacatcgataaaagatttgcctattataaacagaaataccccgagttgattgat

SEQ ID NO: 432122 - DNA, 75 bp, synthetic construct
  source 1..75: mol_type = other DNA
gcgtttggcgcgaacagagcacttgataacataaatcccaaattattgagggcacttttagctcgcacttacgat

SEQ ID NO: 432123 - DNA, 75 bp, synthetic construct
  source 1..75: mol_type = other DNA
ccgcgaacatctcttttcctggctttccgaacaacacgtccttccctggacacccctgatactgaaaaaggtccg

SEQ ID NO: 432124 - DNA, 75 bp, synthetic construct
  source 1..75: mol_type = other DNA
cccaaaatggcaactggcaaccaacgagcgtgatgaattctctcactggatgagcggaaccggtgatccaggctt

SEQ ID NO: 432125 - DNA, 75 bp, synthetic construct
  source 1..75: mol_type = other DNA
tgagttagatgaaattctcttgcattcccccctggctattcctggtccacctatgtctactttatggcggcttct

SEQ ID NO: 432126 - DNA, 75 bp, synthetic construct
  source 1..75: mol_type = other DNA
aagttatattctcgtcgaacgacctctgcattcacagtcgtagggatgataacgcgtacatcaacgtctgaaggt

SEQ ID NO: 432127 - DNA, 75 bp, synthetic construct
  source 1..75: mol_type = other DNA
tcgggctgtgataacgctaaagtcactgtcacgccagagcagaagccgattacctctaagcaactgcacgacatg

SEQ ID NO: 432128 - DNA, 75 bp, synthetic construct
  source 1..75: mol_type = other DNA
ttttttcaacagcacacccttatgagtataactaccaggggccgaaagccattcagtcaaattgcccccgagagt

SEQ ID NO: 432129 - DNA, 75 bp, synthetic construct
  source 1..75: mol_type = other DNA
ttgacgccggaaggggtctattatggcgaatatgcacaggatggatatacgttgtggttggggaatatccctaac

SEQ ID NO: 432130 - DNA, 75 bp, synthetic construct
  source 1..75: mol_type = other DNA
tgtttattatcttgatgttctcactcccgagtccgtcaaccacggtagctataaaccaccagatggttatggggt

SEQ ID NO: 432131 - DNA, 75 bp, synthetic construct
  source 1..75: mol_type = other DNA
cgcaaaggacgatctggacgtgttatgagatgcaaattgaagtctggaaagaagacactaacgttcatggctgcc

SEQ ID NO: 432132 - DNA, 75 bp, synthetic construct
  source 1..75: mol_type = other DNA
atggctcgcaaatgaatgaagagggcgcttactgtcgctgggttgcgcaaatgatcacgttttcatcatcaggct

SEQ ID NO: 432133 - DNA, 75 bp, synthetic construct
  source 1..75: mol_type = other DNA
catttgccgctatttcaatttccgggccggtatcgcggatcaccgatgaccgcgtgactgagtttggcgcaatgg

SEQ ID NO: 432134 - DNA, 75 bp, synthetic construct
  source 1..75: mol_type = other DNA
atggtcgcccccattcccgcaaaacgcggcagaaaccccgccgttgccaccacacctgcgactggacaggttcag

SEQ ID NO: 432135 - DNA, 75 bp, synthetic construct
  source 1..75: mol_type = other DNA
tcctgtgtccactattggtgggtaagatcactcagcaacgtatcaaaagtctgtaaaatcatgggcgtttcgcgt

SEQ ID NO: 432136 - DNA, 75 bp, synthetic construct
  source 1..75: mol_type = other DNA
gcagcaacagggctttgtccgtcaggttggcgaactgggtcactgggcggtgggcgcacatgcctttgtggttgg

SEQ ID NO: 432137 - DNA, 75 bp, synthetic construct
  source 1..75: mol_type = other DNA
ttatcgaccaggtacagtgtacccacctgatgcgaatgtccgcgcctatcggcggtaaattgccgatgcacgctt

SEQ ID NO: 432138 - DNA, 75 bp, synthetic construct
  source 1..75: mol_type = other DNA
gccgatttcacgtataaccgacgaccgcgtgaccgagtttggcgcgatggtgattaaagcggcgaaggaagtgac

SEQ ID NO: 432139 - DNA, 75 bp, synthetic construct
  source 1..75: mol_type = other DNA
ccccaaggcgttatgcatggtgtgtatcagaactctggccttatgttgaaagtaggttatctgcaagagcttagc

SEQ ID NO: 432140 - DNA, 75 bp, synthetic construct
  source 1..75: mol_type = other DNA
taaggttaaattgtatgtgccgctggcacgtcctggactggcgttatggcatcgtctgcgtggtctgttttttat

SEQ ID NO: 432141 - DNA, 75 bp, synthetic construct
  source 1..75: mol_type = other DNA
aaataggatccacattaggttctacgcagggagcaaaccttgcttggtcagatgcttccgtaaaaaacaagtatg

SEQ ID NO: 432142 - DNA, 75 bp, synthetic construct
  source 1..75: mol_type = other DNA
aaagaggctttatctgaaaacagcgttaagatgtttacacaagcaaataccagaataaatgaggccaagaaaaac

SEQ ID NO: 432143 - DNA, 75 bp, synthetic construct
  source 1..75: mol_type = other DNA
cgcagtgctggttgccacatggattcatgattatgcacctgcaattcgcgggctggtgctggcttctccggcctt

SEQ ID NO: 432144 - DNA, 75 bp, synthetic construct
  source 1..75: mol_type = other DNA
gttatccatatctgatgctcaggggaataaagtttcaaaccaatcatatgacgttaaacagatgaaagtggctga

SEQ ID NO: 432145 - DNA, 75 bp, synthetic construct
  source 1..75: mol_type = other DNA
cgtctgttaccgccatgcgggtgattgcctctattaacccggaatttgcgcgtgagctgaaattaccgccgcata

SEQ ID NO: 432146 - DNA, 75 bp, synthetic construct
  source 1..75: mol_type = other DNA
ggctgttgacgctgatggtgttgagcctgacggctcaggcacagacatttcagatgtatacccctatgggtgtac

SEQ ID NO: 432147 - DNA, 75 bp, synthetic construct
  source 1..75: mol_type = other DNA
ggggtatatacaggtacatatcaatcgagtaaaccgcctctgcttgtggttggcaacttaaccttgcttagctgg

SEQ ID NO: 432148 - DNA, 75 bp, synthetic construct
  source 1..75: mol_type = other DNA
cccgacggtgttatgcatggtgtgtataagaactccaccaccacgttgcaagtgggttatctggaaaatattagc

SEQ ID NO: 432149 - DNA, 75 bp, synthetic construct
  source 1..75: mol_type = other DNA
tgatcctcgcggggctaattgccgttttgtttcgcagatgatcacctttacagcatcaggatgcgatgatgccaa

SEQ ID NO: 432150 - DNA, 75 bp, synthetic construct
  source 1..75: mol_type = other DNA
gcttcctgacactgctgttatttagcctgggtgcccacgccgaggattttatgatgtataccccgatgggagtcc

SEQ ID NO: 432151 - DNA, 75 bp, synthetic construct
  source 1..75: mol_type = other DNA
aatacggtgattcataaaaaaacattgaatctgaaatcaacagacgccgtagggggaatcatcgagaaaaccctg

SEQ ID NO: 432152 - DNA, 75 bp, synthetic construct
  source 1..75: mol_type = other DNA
tcgtcaactggcgttcaacatgctgccgttattgccggacagggaaggtagtgtgcgcgaagagcgtcgtatcgt

SEQ ID NO: 432153 - DNA, 75 bp, synthetic construct
  source 1..75: mol_type = other DNA
cgggattaactcctttttccagcaggtggtgcgcggcgtcatcatcgtggtggcggtgctggcgaatatcttgct

SEQ ID NO: 432154 - DNA, 75 bp, synthetic construct
  source 1..75: mol_type = other DNA
tgctggtgttgctgttaggcgcgctgatgggaacgctcgccggggtgctgcgcggcgtgtttaacgtgccaagtt

SEQ ID NO: 432155 - DNA, 75 bp, synthetic construct
  source 1..75: mol_type = other DNA
gctgggggggcaatttctcggcgtgccggtatccgcgctgatcatgatggtgttgtttgcgctgtttgtgttcat

SEQ ID NO: 432156 - DNA, 75 bp, synthetic construct
  source 1..75: mol_type = other DNA
tggcaactttgatgattcgagagaatggcctgtctacgctcctgttcagaaatatattaatggtcattggtacaa

SEQ ID NO: 432157 - DNA, 75 bp, synthetic construct
  source 1..75: mol_type = other DNA
cgccctgcgcgggatgggcttgtttatgacgaacgccctgccagtgcccattgatgaaaacgaggtgctggactg

SEQ ID NO: 432158 - DNA, 75 bp, synthetic construct
  source 1..75: mol_type = other DNA
ggctcgcctcggttccggtaacgcaggcgccgcaaacggtctggagtttgatgtcattgctgcggtcgtggtcgg

SEQ ID NO: 432159 - DNA, 75 bp, synthetic construct
  source 1..75: mol_type = other DNA
gtatggggcggtgaatcgcggctgttttatcacggtattcaaccgttgaaagcggggtttcatccactcaccacc

SEQ ID NO: 432160 - DNA, 75 bp, synthetic construct
  source 1..75: mol_type = other DNA
tatgtgaaagatgttcgacttgggtcacagcaatattatggagtgaacaactggcaaacatggaatttccagtgc

SEQ ID NO: 432161 - DNA, 75 bp, synthetic construct
  source 1..75: mol_type = other DNA
ttcgatggttcggctgacattaatatcaatactctggtatcacgcggtcgagtaactgctctggcgtcgaatgcg

SEQ ID NO: 432162 - DNA, 75 bp, synthetic construct
  source 1..75: mol_type = other DNA
agattttcaacggagggatcaccggggcactgacagggaacgccgacaccgcgacgaaattgaaaacagcacgca

SEQ ID NO: 432163 - DNA, 75 bp, synthetic construct
  source 1..75: mol_type = other DNA
ctggtatcacgcggtcgagtaactgctctggcgtcgaatgcgcaggggacatccgggattcagctgtatgaggca

SEQ ID NO: 432164 - DNA, 75 bp, synthetic construct
  source 1..75: mol_type = other DNA
cagaaactctgccgataatattgcaggtgtttattacaggccagttcaaaagtatataaatggtacctggtataa

SEQ ID NO: 432165 - DNA, 75 bp, synthetic construct
  source 1..75: mol_type = other DNA
cgaactcgcagaagaactccagaacagcatacagacacgctttgaagcggaaagtggcaccagacaggatgcaga

SEQ ID NO: 432166 - DNA, 75 bp, synthetic construct
  source 1..75: mol_type = other DNA
gcaactggcattttttgtcgcaggcaaagaagcgaccgctgcctgggttgaagaagcgaccaacgcgggttgtct

SEQ ID NO: 432167 - DNA, 75 bp, synthetic construct
  source 1..75: mol_type = other DNA
gtgagaagctgcacgaactcgcggaagaactccagaacagcatacagacacgctttgaagtagaaaatagcacag

SEQ ID NO: 432168 - DNA, 75 bp, synthetic construct
  source 1..75: mol_type = other DNA
cgctttatcccgattgctcgcaagactctgaaagagcagggcaccccggaaatccgtattgctacggtaactaac

SEQ ID NO: 432169 - DNA, 75 bp, synthetic construct
  source 1..75: mol_type = other DNA
gaagcattacgtccgctggcggcagaagaagcgcgtgatgcgttttcccaaagcgaagatattgtgctttctgaa

SEQ ID NO: 432170 - DNA, 75 bp, synthetic construct
  source 1..75: mol_type = other DNA
gcgtgcgcgaagaacgccgtatcgtcgatgaagtgcgcaaaatcatgcaggacgaaggactgatgatctcggcaa

SEQ ID NO: 432171 - DNA, 75 bp, synthetic construct
  source 1..75: mol_type = other DNA
ggtgatcgacagcagcggattgtttgctctcgaacccgacgtaccgctggtggtgccggaagtaaacccgtttgt

SEQ ID NO: 432172 - DNA, 75 bp, synthetic construct
  source 1..75: mol_type = other DNA
ggcaatcgcctacggtgccgatgaagttgacgtggtgttcccgtaccgtgcgctgatggcgggtaacgagcaggt

SEQ ID NO: 432173 - DNA, 75 bp, synthetic construct
  source 1..75: mol_type = other DNA
ccagagcctgacgctgctcgaaaaactggacgcacttgatgctgacgaacaggccgccatgtgtgagaagctgca

SEQ ID NO: 432174 - DNA, 75 bp, synthetic construct
  source 1..75: mol_type = other DNA
aatccgtatcgctacggtaaccaacttcccacacggtaacgacgacatcgacatcgcgctggcagaaacccgtgc

SEQ ID NO: 432175 - DNA, 75 bp, synthetic construct
  source 1..75: mol_type = other DNA
gttgacgtggtgttcccgtaccgcgcgctgatggcgggtaacgagcaggttggttttgacctggtgaaagcctgt

SEQ ID NO: 432176 - DNA, 75 bp, synthetic construct
  source 1..75: mol_type = other DNA
atccgcaaagcatctgaaatctccatcaaagcgggcgctgactttatcaaaacctctaccggtaaagtcgcagtg

SEQ ID NO: 432177 - DNA, 75 bp, synthetic construct
  source 1..75: mol_type = other DNA
ccgacccggcgggaaaccgcctgccggacccggagctacacccggacagcacgctcacggcgtggccggataacc

SEQ ID NO: 432178 - DNA, 75 bp, synthetic construct
  source 1..75: mol_type = other DNA
gcgcagcttcggcagcatggcaggcagtaatgccgcatatgaactgaccagcacatacacccccgcaggccagtt

SEQ ID NO: 432179 - DNA, 75 bp, synthetic construct
  source 1..75: mol_type = other DNA
aagttacagcaggaagggagcgaagacggtcacggtgtggtgttcccggctgaactggtggggctgctggacagg

SEQ ID NO: 432180 - DNA, 75 bp, synthetic construct
  source 1..75: mol_type = other DNA
gcaaaaaattagctggcaaaaaagcggtgataaaaccattccgtgtatcaatgaatcactggtggataaattcgg

SEQ ID NO: 432181 - DNA, 75 bp, synthetic construct
  source 1..75: mol_type = other DNA
ctggtgcggctgctggacagactggaggaagaaatccgggcagaccgcgtgagtgacgaaagccgggcgtggctt

SEQ ID NO: 432182 - DNA, 75 bp, synthetic construct
  source 1..75: mol_type = other DNA
tacggacggacgacgagcggacccaccactaccactacgacagccagcaccgcctggtgttctacacgcggatac

SEQ ID NO: 432183 - DNA, 75 bp, synthetic construct
  source 1..75: mol_type = other DNA
ggattgatgcgattgcgcagagctggtctgtattgtccggcgccgcgagcccgggacggtgcgcaaaggccatgc

SEQ ID NO: 432184 - DNA, 75 bp, synthetic construct
  source 1..75: mol_type = other DNA
gcggtgcatttggttttcgcgatcagctgcaggatacgctggctctgagccacgctgctccggaccggatgcgtg

SEQ ID NO: 432185 - DNA, 75 bp, synthetic construct
  source 1..75: mol_type = other DNA
cagaacgcccggcggctgcgggatacttgcgaataacttttatggtgataatggtggcggccgaactgcattttt

SEQ ID NO: 432186 - DNA, 75 bp, synthetic construct
  source 1..75: mol_type = other DNA
gacgcggcgggacggcggacagagtatggtctgaatgtggtatccggcgatatcacggacatcaccacaccggac

SEQ ID NO: 432187 - DNA, 75 bp, synthetic construct
  source 1..75: mol_type = other DNA
cgcaattcgtcagcgttgcagacatgccggcccaccttttaccggatcacattaaatacgtcattaccctggaca

SEQ ID NO: 432188 - DNA, 75 bp, synthetic construct
  source 1..75: mol_type = other DNA
tctgggcagtgatggcctttgcccgaatggggaatgccgaacgagcctggcaactctggtcaatgctcagcccta

SEQ ID NO: 432189 - DNA, 75 bp, synthetic construct
  source 1..75: mol_type = other DNA
accggtgtgaacttcaatgtgctgaaaaccgagtcgaaagtgaacggtcaatggcaaaaatatgacgtgaaggaa

SEQ ID NO: 432190 - DNA, 75 bp, synthetic construct
  source 1..75: mol_type = other DNA
gcgtcaggcgttactggataaaatttatcaagggctgaacccgggcggtgcgctggtgctttcagaaaaattcag

SEQ ID NO: 432191 - DNA, 75 bp, synthetic construct
  source 1..75: mol_type = other DNA
tattcgcgatatcgccattgaaaacgcatcgatggtggtactgaattttaccctgcaattcctggaaccttccga

SEQ ID NO: 432192 - DNA, 75 bp, synthetic construct
  source 1..75: mol_type = other DNA
ctgcccctatcgccagactgggcgactggacctttgatgaacgggtagccgaagtcttcccggatatgatccagc

SEQ ID NO: 432193 - DNA, 75 bp, synthetic construct
  source 1..75: mol_type = other DNA
gcagcttcaactgataacgcagtactataaaagtcagggggacgacaattacgggcttaatctcgggaaaggctt

SEQ ID NO: 432194 - DNA, 75 bp, synthetic construct
  source 1..75: mol_type = other DNA
ccgcgtgaaacgcttgttgcatttgaagtaaagccggagctatcagcagtcctgctggacgttgatttagctgag

SEQ ID NO: 432195 - DNA, 75 bp, synthetic construct
  source 1..75: mol_type = other DNA
gaacatagcgagctatggttccagtgctttaactttggttcgctggtggcattaaaagcagaggacgctgcatga

SEQ ID NO: 432196 - DNA, 75 bp, synthetic construct
  source 1..75: mol_type = other DNA
acggctggaggccgagctggcagcgcggcgggcattggcggaaaagctgatccacaccgaggaggacacgcgcaa

SEQ ID NO: 432197 - DNA, 75 bp, synthetic construct
  source 1..75: mol_type = other DNA
actggcagcgtctgacgttgctgttagcctcagtaacagcagcttcattgctgaatacagccatgctaacccctt

SEQ ID NO: 432198 - DNA, 75 bp, synthetic construct
  source 1..75: mol_type = other DNA
gccatcagtcgccagcaacatctggcgctaaacctgcaccattaccgacaacggctggaggccgagctggcagcg

SEQ ID NO: 432199 - DNA, 75 bp, synthetic construct
  source 1..75: mol_type = other DNA
acctcatttaccggcggcgtattgttgacgccgtttgtctatcttatctttgagtttctgcgccagcagcatcgc

SEQ ID NO: 432200 - DNA, 75 bp, synthetic construct
  source 1..75: mol_type = other DNA
agctcgcccgccgcattcatctctccacccgccagttgctgcgccagttgcggcctcccgcgcttgatgaactga

SEQ ID NO: 432201 - DNA, 75 bp, synthetic construct
  source 1..75: mol_type = other DNA
ttcagatccagtcgcaactggtgaagcgggcgcgcgatccggcgcaaattcaatccgcagccagccaaatcaatg

SEQ ID NO: 432202 - DNA, 75 bp, synthetic construct
  source 1..75: mol_type = other DNA
ctggtgctcctgacgctcagtaactcttcgggacggacacgtcaactttccgtcacaggctatgtagagtggacg

SEQ ID NO: 432203 - DNA, 75 bp, synthetic construct
  source 1..75: mol_type = other DNA
ttcacagcctcagctaatgcgcaagcctcaaaggtgcttaagtcgggtaatgctttacggaagttttctgtgaat

SEQ ID NO: 432204 - DNA, 75 bp, synthetic construct
  source 1..75: mol_type = other DNA
ggaactgtatagctactcagcatctgagctatctgatgaagcgctaagggtccgtagcaattgctctaaaaatgt

SEQ ID NO: 432205 - DNA, 75 bp, synthetic construct
  source 1..75: mol_type = other DNA
gaaggaagcttattattaactcgtcagggtcaattagtagaaaacttcatcgacactcttgaaaactggcgtgac

SEQ ID NO: 432206 - DNA, 75 bp, synthetic construct
  source 1..75: mol_type = other DNA
gtcttcgtattcagatgaccttccaaggtgtagaatttcgttcaatcgtaggtcaaacggatatttcggctgcca

SEQ ID NO: 432207 - DNA, 75 bp, synthetic construct
  source 1..75: mol_type = other DNA
aggtgtagaatttcgttcaatcgtagggcaaactgatatttcatctgctactggcaaaacggctaccacaaatga

SEQ ID NO: 432208 - DNA, 75 bp, synthetic construct
  source 1..75: mol_type = other DNA
actcaggcaaagatggcatctatttccacttaagagataatgtagatgccttcttaactttatcagcaactgaga

SEQ ID NO: 432209 - DNA, 75 bp, synthetic construct
  source 1..75: mol_type = other DNA
gcagtgacaaaattaccgttgatgggaaagtctctgcacaagactattgaaaaaaatgaagtgaaaacggcaaaa

SEQ ID NO: 432210 - DNA, 75 bp, synthetic construct
  source 1..75: mol_type = other DNA
tcgctcgtctgacgctgttttgcgcggcgtggattgccaccgccgaatacaaagacgacccgagaatgccgggga

SEQ ID NO: 432211 - DNA, 75 bp, synthetic construct
  source 1..75: mol_type = other DNA
ggcatcccatcccatgctattacagaatatcttcgacaaaattctgcaaaacatcagcgatccgacgctggccgc

SEQ ID NO: 432212 - DNA, 75 bp, synthetic construct
  source 1..75: mol_type = other DNA
ctcagtaattacacagttcaaagcttctaaagagcataccattgctaacggtcttcgtattcagatgaccttcca

SEQ ID NO: 432213 - DNA, 75 bp, synthetic construct
  source 1..75: mol_type = other DNA
acagggaacactacaacaagtttaggtaatggtatgttgctgtgtcaggagctatataatcgctctacgagtgaa

SEQ ID NO: 432214 - DNA, 75 bp, synthetic construct
  source 1..75: mol_type = other DNA
ggggtgggcggttaacacgctgtctcaaatagcgaatatcacaatggggcagtctccagccggggagtcttataa

SEQ ID NO: 432215 - DNA, 75 bp, synthetic construct
  source 1..75: mol_type = other DNA
gctaattcaggtgctgcaaaggtactcaaggcgggtaatgctctacggaaatactctgtgaaccctaacaagcgc

SEQ ID NO: 432216 - DNA, 75 bp, synthetic construct
  source 1..75: mol_type = other DNA
tttcttactggaaattactcgacaatctgcgtcgcagcctggtcgccccctctttagtggtattgctctacttca

SEQ ID NO: 432217 - DNA, 75 bp, synthetic construct
  source 1..75: mol_type = other DNA
cgctctctccgcaggcgcttttcagcgaactgaaaagcatgcgcacccagtgcaaccatctgaccagcgcatgtc

SEQ ID NO: 432218 - DNA, 75 bp, synthetic construct
  source 1..75: mol_type = other DNA
ttgaccgggccgcgcgttccggaggtggaaaccggacggcaaccgacccggggctcagacaggcgcttgagcagg

SEQ ID NO: 432219 - DNA, 75 bp, synthetic construct
  source 1..75: mol_type = other DNA
ggagccctgataccagtcagttatgccatttcaatgggtacggtggattttctcaggatgggcgggagtatcaga

SEQ ID NO: 432220 - DNA, 75 bp, synthetic construct
  source 1..75: mol_type = other DNA
atagtgctgctgagtataaccagcgaggaaagtatcacctcagtgaccacactgattcaggcacaccgttactgg

SEQ ID NO: 432221 - DNA, 75 bp, synthetic construct
  source 1..75: mol_type = other DNA
tttgaaacggacagggcaaggtttattggacgtggcagaaaccctgcgaatgcacaggcaatagagacgggaggg

SEQ ID NO: 432222 - DNA, 75 bp, synthetic construct
  source 1..75: mol_type = other DNA
tcagatgccgctaatgagcaggcttcaaaagtgcttagtaatgctggtacaggtagtactttgaagaagtttagt

SEQ ID NO: 432223 - DNA, 75 bp, synthetic construct
  source 1..75: mol_type = other DNA
atgatttacactaatcagcttcgttacactggcaaagatggcgtttactttcatctacaaggccagccagataat

SEQ ID NO: 432224 - DNA, 75 bp, synthetic construct
  source 1..75: mol_type = other DNA
gtatcaattgtggtaaaagtgtcaaagttgagaacggaaaaagcaccttctcagatgccgctaatgagcaagctt

SEQ ID NO: 432225 - DNA, 75 bp, synthetic construct
  source 1..75: mol_type = other DNA
gcgggcgcgcgatccggcgcaaattcaatccgcagccagccaaatcaatgagctcgcccgccgcattcatctctc

SEQ ID NO: 432226 - DNA, 75 bp, synthetic construct
  source 1..75: mol_type = other DNA
cccgaaatacaaccgcgtagccggtgcgcctgctcaggctgctggtaacaacgatctcgacaacgaactggacta

SEQ ID NO: 432227 - DNA, 75 bp, synthetic construct
  source 1..75: mol_type = other DNA
tggtgcaggtatcgcactggcaatccctctggccgctgcgggtcaggtactgaccatcatcgttcgtactattac

SEQ ID NO: 432228 - DNA, 75 bp, synthetic construct
  source 1..75: mol_type = other DNA
tacccagaaaaagaacgccgtgaaataatttattctctacgatatgtagatgatgtgtttcttgaggaatcatta

SEQ ID NO: 432229 - DNA, 75 bp, synthetic construct
  source 1..75: mol_type = other DNA
gatatttttaaagaattgtgtagtgtgatttacttgccaaggacacagggcgtatctacaacaaaagttattaca

SEQ ID NO: 432230 - DNA, 75 bp, synthetic construct
  source 1..75: mol_type = other DNA
tgaagaacgcctggacgactgggatggcgacagcgatatcgactgcgaaatcaacggcggcgtactgaccattac

SEQ ID NO: 432231 - DNA, 75 bp, synthetic construct
  source 1..75: mol_type = other DNA
cctggcgaagagtaccagtacaccagcggtgcgataatcgaaacaccgatgggcaccatgcagggtcactacgaa

SEQ ID NO: 432232 - DNA, 75 bp, synthetic construct
  source 1..75: mol_type = other DNA
atgatcgatgaaaatggcgttccttttagtatcgacattcccgtattccgactcgccgttcccacactcattcat

SEQ ID NO: 432233 - DNA, 75 bp, synthetic construct
  source 1..75: mol_type = other DNA
ggttggcgtccagccacttatcgcgcctggcgaagagtaccagtacaccagcggtgcaatcattgaaaccccgct

SEQ ID NO: 432234 - DNA, 75 bp, synthetic construct
  source 1..75: mol_type = other DNA
atgcgtacagtcataacctttggaacatttgatgttttacatattggccacattaaaattttagaaagagcaaag

SEQ ID NO: 432235 - DNA, 75 bp, synthetic construct
  source 1..75: mol_type = other DNA
gatgaatataaggaattatgtgaagtatcatatctgccaagaactgttggtatttcaacgacagaactaatttct

SEQ ID NO: 432236 - DNA, 75 bp, synthetic construct
  source 1..75: mol_type = other DNA
gggagatgattggctagggcgatttgatgaatataaggaattatgtgaagtatcatatctgccaagaactgttgg

SEQ ID NO: 432237 - DNA, 75 bp, synthetic construct
  source 1..75: mol_type = other DNA
atgaacgacagtgaatttcatcgcctggctgatcaactgtggctgaccattgaagaacgtctggacgactgggat

SEQ ID NO: 432238 - DNA, 75 bp, synthetic construct
  source 1..75: mol_type = other DNA
ttgcaactgaacaatcaacctatttcgagattcctgctgaagactcctggctttttatcgctgacggatctgata

SEQ ID NO: 432239 - DNA, 75 bp, synthetic construct
  source 1..75: mol_type = other DNA
gaggttatttatttaccaaggacggaaggcatttctactacaaaacttataacggagattaaaaaatatggttga

SEQ ID NO: 432240 - DNA, 75 bp, synthetic construct
  source 1..75: mol_type = other DNA
gtgagcggcgcgcgacctggggtttaggaaccgttttctcgttgcgcatgctgggcatgtttatggttctgccgg

SEQ ID NO: 432241 - DNA, 75 bp, synthetic construct
  source 1..75: mol_type = other DNA
ctggaaaaagcatttggcgccccccttggacgcgcctgtggcgtgattgttggtgccccagcagcgattggtgtg

SEQ ID NO: 432242 - DNA, 75 bp, synthetic construct
  source 1..75: mol_type = other DNA
gcgtgcttcttatcgtaagatctgtatctaaatacaacttcacattctttgcgaaaaaaaagggcactaaagaat

SEQ ID NO: 432243 - DNA, 75 bp, synthetic construct
  source 1..75: mol_type = other DNA
aatcaactatacatcttagcccctatgctgacacacgttgcccggagtcaatgaggaaacactgggatgtattgc

SEQ ID NO: 432244 - DNA, 75 bp, synthetic construct
  source 1..75: mol_type = other DNA
tttcgtcatgagcagtcggcaggctatgccgctgcagcaagcggttttcttacccaaaaaccagggatctgcctg

SEQ ID NO: 432245 - DNA, 75 bp, synthetic construct
  source 1..75: mol_type = other DNA
gacggcaataaaaccgcacagtgcacagtcactgttagggaggcacctaaaagcgtaagcgccgtcagtgttgaa

SEQ ID NO: 432246 - DNA, 75 bp, synthetic construct
  source 1..75: mol_type = other DNA
agatcatgacacaggtgatcgcccgcatggcgaaacctgaaagcaatgttattcctgctccctcccattcaacgc

SEQ ID NO: 432247 - DNA, 75 bp, synthetic construct
  source 1..75: mol_type = other DNA
atctgggggatcattctgggtcgggcgttacaaggctccggtgcgattgccgccgccgttatggcgctgctttcc

SEQ ID NO: 432248 - DNA, 75 bp, synthetic construct
  source 1..75: mol_type = other DNA
tgactcaggccgtttttcagattccgtttggcctgctctcagaccgtattggtcgcaaaccattaattgtcggcg

SEQ ID NO: 432249 - DNA, 75 bp, synthetic construct
  source 1..75: mol_type = other DNA
aacgcctggtgtcaaagatgtactgctggcgaagttagaacattgcgtctatgtgaaagtagacagtaaaatcac

SEQ ID NO: 432250 - DNA, 75 bp, synthetic construct
  source 1..75: mol_type = other DNA
aatctcgactacaccaaccattttggtattgcggtagtgccgctaatttccagttaccaaccttccaccgtggca

SEQ ID NO: 432251 - DNA, 75 bp, synthetic construct
  source 1..75: mol_type = other DNA
gtggcgattggcggttcgctgggcggctggattgacggcatgtttgacggtcagggcgtatttctcgctggcgca

SEQ ID NO: 432252 - DNA, 75 bp, synthetic construct
  source 1..75: mol_type = other DNA
ggggttcccggcggctgaacactggaaggtctacctggcaacgatgttaatcgcctttggctcggtcgtgccttt

SEQ ID NO: 432253 - DNA, 75 bp, synthetic construct
  source 1..75: mol_type = other DNA
atcggagatatcgtcaagggatattccttcgaacctcatgatggcacgctccatattacgaaccacaagtatgga

SEQ ID NO: 432254 - DNA, 75 bp, synthetic construct
  source 1..75: mol_type = other DNA
cagcatatcctggaatttccgatgaaaacattcagtcaggtaatgtcacaaatgcaacaacactggccacagata

SEQ ID NO: 432255 - DNA, 75 bp, synthetic construct
  source 1..75: mol_type = other DNA
ctgcccttgctgtggccaccaacttctatggcggcgttatcgagctgaccggcagtgatgcctttaagcaaaaag

SEQ ID NO: 432256 - DNA, 75 bp, synthetic construct
  source 1..75: mol_type = other DNA
aagaaaatgcctctgccaccaccgctgacaaccagagcacgcaggcagaagaacatccccggagtaaagacacac

SEQ ID NO: 432257 - DNA, 75 bp, synthetic construct
  source 1..75: mol_type = other DNA
ctcgcctggcagcgtcagccgcaggagttctggcaggttcgcctgggaggaagaaccggtaaaaaaacgccacgg

SEQ ID NO: 432258 - DNA, 75 bp, synthetic construct
  source 1..75: mol_type = other DNA
ttctgtctgcaacggataccagtgaaaagagtgcctctgccgtccccgataacaaccgtgacgcaccgcctgagg

SEQ ID NO: 432259 - DNA, 75 bp, synthetic construct
  source 1..75: mol_type = other DNA
tctgccaccaccgctgacaaccagagcgtacaggcagaagagctctccccaggtgacgacacaccggaaacctcc

SEQ ID NO: 432260 - DNA, 75 bp, synthetic construct
  source 1..75: mol_type = other DNA
atgggcaagggatgggacgcttcgctgaaacagggacgacgtgaccggctgcggcaggaagttcttcaccgaatg

SEQ ID NO: 432261 - DNA, 75 bp, synthetic construct
  source 1..75: mol_type = other DNA
cctatgaatggagtaattataggttatgtttggatagacttaatcagtataaaggtaatattgagaatatttgtg

SEQ ID NO: 432262 - DNA, 75 bp, synthetic construct
  source 1..75: mol_type = other DNA
tcgaaaggggggatctcacactgtacggcaggcggcaaatttgtctgtaatgatggttctattagtgcatcgaaa

SEQ ID NO: 432263 - DNA, 75 bp, synthetic construct
  source 1..75: mol_type = other DNA
ctaccgctggcgaccaggaagacctcaatacagacgccacaggtacagacaccgctcacaacagcgacacagcag

SEQ ID NO: 432264 - DNA, 75 bp, synthetic construct
  source 1..75: mol_type = other DNA
tcagttgaatcttctgctggtccacagcgcagatgatcatctgccccacctcccctgtctcaccggaagcggata

SEQ ID NO: 432265 - DNA, 75 bp, synthetic construct
  source 1..75: mol_type = other DNA
ccttcaagcatctgacggaagaaatgcgccgtactctacaggatatttcaagattgtcagatcgaaattcccgaa

SEQ ID NO: 432266 - DNA, 75 bp, synthetic construct
  source 1..75: mol_type = other DNA
tgataagggggggtatctgcgcttcaaagagcgtgtactacgcgacgtacagctaaaccctgaagccatggttgc

SEQ ID NO: 432267 - DNA, 75 bp, synthetic construct
  source 1..75: mol_type = other DNA
gttacgggaaggaatcagggtggccagatgtctccaggatttccggggcggttcatgtaattccatacttagatg

SEQ ID NO: 432268 - DNA, 75 bp, synthetic construct
  source 1..75: mol_type = other DNA
cagcacttgagggtgatatcagcttcagggcactgggcaatttggccggaagactggacagcatcgacctgagcg

SEQ ID NO: 432269 - DNA, 75 bp, synthetic construct
  source 1..75: mol_type = other DNA
cgccgcttgagggtgatatcagcctcagaacgctgggaaaactggccgggcggctggataacatcgacctgagcg

SEQ ID NO: 432270 - DNA, 75 bp, synthetic construct
  source 1..75: mol_type = other DNA
gacaagaacgattggtggtattgaaacccgcattagcacactggattcgtcaaccagtgaatcgcttaatgaggt

SEQ ID NO: 432271 - DNA, 75 bp, synthetic construct
  source 1..75: mol_type = other DNA
tgttcatgaacgacgtgttcctgaagcgactgtttgcggtgagtatcacgtcatccggcaatcccccgacgtttt

SEQ ID NO: 432272 - DNA, 75 bp, synthetic construct
  source 1..75: mol_type = other DNA
gaggaggctgcaaagtcaccggtggtggaagagctgcgtaaggaaataaagaatgctcaggggcaggcagtaaag

SEQ ID NO: 432273 - DNA, 75 bp, synthetic construct
  source 1..75: mol_type = other DNA
ggaaataatccggcgctttggctttggtgaagtggaattaatcgaaggactgggcggattacagtatgacggacg

SEQ ID NO: 432274 - DNA, 75 bp, synthetic construct
  source 1..75: mol_type = other DNA
cgccgctggaaggcgacatccgcttcaggtcactgggcagactgaccgggcgcctgaaccttatcgacctgagca

SEQ ID NO: 432275 - DNA, 75 bp, synthetic construct
  source 1..75: mol_type = other DNA
atcagcaactaaatatcaccattccgcaagcctggctggcgtggcactcagaaaactggaccccaccctccacat

SEQ ID NO: 432276 - DNA, 75 bp, synthetic construct
  source 1..75: mol_type = other DNA
cctggagtatcagtctgtcgccattcgctacaacaacaccgtcaactatgacggcagctataaccacgggagcag

SEQ ID NO: 432277 - DNA, 75 bp, synthetic construct
  source 1..75: mol_type = other DNA
tgatgaccaccgtttccggtgtcgaaatgtctcgtgacctggcgtatgccaaagtgtatgtgactttcctcaacg

SEQ ID NO: 432278 - DNA, 75 bp, synthetic construct
  source 1..75: mol_type = other DNA
gcgatggctgggagctggcggaatcggacgatgttcgccgcatgcttataaaagcagccatcgaactgcaccggt

SEQ ID NO: 432279 - DNA, 75 bp, synthetic construct
  source 1..75: mol_type = other DNA
cgctgccgcaagtcgggtgctggctggcgcagagccgattacgttgcggttgtttgtgggtcgaaccctgctggg

SEQ ID NO: 432280 - DNA, 75 bp, synthetic construct
  source 1..75: mol_type = other DNA
atgaatctacaaaacattctaaaaaaactatctccaaagaaacacgctttcgaaatcgaaggtgaaactatctat

SEQ ID NO: 432281 - DNA, 75 bp, synthetic construct
  source 1..75: mol_type = other DNA
atgccgaacaccatcaactggtctgcaaaggcgcattgcaggagatcctcaatgtgtgttcgcaagtgcgtcaca

SEQ ID NO: 432282 - DNA, 75 bp, synthetic construct
  source 1..75: mol_type = other DNA
ggcatttgcgttgaccggatgtatcacctgggggttggtttccaataccgcaagccgtccacatgcccagcaatg

SEQ ID NO: 432283 - DNA, 75 bp, synthetic construct
  source 1..75: mol_type = other DNA
ggttaccaggttgtggaaatcttcctgcgtcatatgcgccggaagctgggcgagaaagagaacaaagaggagtaa

SEQ ID NO: 432284 - DNA, 75 bp, synthetic construct
  source 1..75: mol_type = other DNA
ttgacccactggccattgccggcgcaggcactgcaatgggcgttgccggttaccagattgtggaaatcttcctgc

SEQ ID NO: 432285 - DNA, 75 bp, synthetic construct
  source 1..75: mol_type = other DNA
atggaaaaaaataatgaagtcattcagactcatccgctcgtagggtgggacatcagcaccgttgatagctatgat

SEQ ID NO: 432286 - DNA, 75 bp, synthetic construct
  source 1..75: mol_type = other DNA
gcgtcacggtaagcgcagtcacgaccgctggtggaatgcaaacagtagatataacgctggtggctggcccggcag

SEQ ID NO: 432287 - DNA, 75 bp, synthetic construct
  source 1..75: mol_type = other DNA
gggagcgtcactgtaagcacagtcacaagcgcaggtggaatgcaaacagtagatatatcgctagtggcaggccca

SEQ ID NO: 432288 - DNA, 75 bp, synthetic construct
  source 1..75: mol_type = other DNA
aacgagccgaacgcctttcaacaagggatcagccgcgtcagcatattgctgattcgctttatgctggtgatgacg

SEQ ID NO: 432289 - DNA, 75 bp, synthetic construct
  source 1..75: mol_type = other DNA
atatttctgttatccccgattacaggcaagcctggaaagtggaacataaattgccagatattctatctgttaact

SEQ ID NO: 432290 - DNA, 75 bp, synthetic construct
  source 1..75: mol_type = other DNA
acgccaactatctggatcacaaatacaacgacaacgatgcacaagacgaaaaacagacgatcagcttatcagtag

SEQ ID NO: 432291 - DNA, 75 bp, synthetic construct
  source 1..75: mol_type = other DNA
cgaaaggctatgtttttgttggcgaatcgctggactacctgttgaccaccggcggcggtgaggtggttaaaatgc

SEQ ID NO: 432292 - DNA, 75 bp, synthetic construct
  source 1..75: mol_type = other DNA
gccgctgcatcatcgtcccgtgaggcgtcagttaaagcggaggaggcctcagccagtgccaccgccgccggaaaa

SEQ ID NO: 432293 - DNA, 75 bp, synthetic construct
  source 1..75: mol_type = other DNA
taccacaccgaccacctccactggtggtggaacaactaacgcccagtttacctatattaatcacggaacagatta

SEQ ID NO: 432294 - DNA, 75 bp, synthetic construct
  source 1..75: mol_type = other DNA
atgaataacatacaaataagaaactatcagcctggcgattttcagcaactatgcgctattttcattagagcggtt

SEQ ID NO: 432295 - DNA, 75 bp, synthetic construct
  source 1..75: mol_type = other DNA
ccgtccacagggcagtagcagcaacaccaacctgaacgcttacggtactgccggtattaacatgggtgcatggcg

SEQ ID NO: 432296 - DNA, 75 bp, synthetic construct
  source 1..75: mol_type = other DNA
acaaatctgcatacccgaaacttgcagcggcttatccgtcaggcgtgatccctgatatgcgtggctggacgatta

SEQ ID NO: 432297 - DNA, 75 bp, synthetic construct
  source 1..75: mol_type = other DNA
agacatccgaaacgaacgcgaaagcgtcggaaaccagtgcagaatcctcaaaaacggcagctgcatcgtccgcca

SEQ ID NO: 432298 - DNA, 75 bp, synthetic construct
  source 1..75: mol_type = other DNA
tgtatcagccggttataacgctgcgttaggtactggtaccacgtcgagcgcaggagagcatgctcacaatgtata

SEQ ID NO: 432299 - DNA, 75 bp, synthetic construct
  source 1..75: mol_type = other DNA
ttaaagcagcctgtttatgttctttagcattcgcgttgaccggatgtctaaccgctggactggttttcaataccg

SEQ ID NO: 432300 - DNA, 75 bp, synthetic construct
  source 1..75: mol_type = other DNA
cgcgaccaacagcacgtctgaaacgcttgccgcgacaccaaaggcagtaaaagcagccaatgacaatgctgagaa

SEQ ID NO: 432301 - DNA, 75 bp, synthetic construct
  source 1..75: mol_type = other DNA
aacccatgcgactgatgctgcagattcagcacgtgcagccagcacgtcagccggacaggccgcgacgtcggctca

SEQ ID NO: 432302 - DNA, 75 bp, synthetic construct
  source 1..75: mol_type = other DNA
aacgccaaaagccgttaaggccgcgtatgacctggctaacgggaaatacaccgcacaggatgcaacgacagcaca

SEQ ID NO: 432303 - DNA, 75 bp, synthetic construct
  source 1..75: mol_type = other DNA
gtaacctgatcgaaggtctcactgtgtacttcgccttaaaaaacggctccaccacattaacgtcattaacagcgg

SEQ ID NO: 432304 - DNA, 75 bp, synthetic construct
  source 1..75: mol_type = other DNA
gagcatcaaaattacttcggtaaaaaccccacgctggggcataccgaaattcttggtacgtcaaacgtgggtaaa

SEQ ID NO: 432305 - DNA, 75 bp, synthetic construct
  source 1..75: mol_type = other DNA
ccgaaatggaaagcttccataatttctttacgggcaaggagaaaggaaatacctggggtaacaaccttatcaccc

SEQ ID NO: 432306 - DNA, 75 bp, synthetic construct
  source 1..75: mol_type = other DNA
atttactgcaatggacagacaggcggcaataaaattgctggatgatcagatcgacaaactggaaatgactgatga

SEQ ID NO: 432307 - DNA, 75 bp, synthetic construct
  source 1..75: mol_type = other DNA
gctgacacgccggaacgcttggtgaaagatacgaatatcgttactacgaccttagaagacctggggctgattgtt

SEQ ID NO: 432308 - DNA, 75 bp, synthetic construct
  source 1..75: mol_type = other DNA
ccccctctcggtgccgatattcagcagaatggcagcggaatcagtgtaggtatggttagcgaggaaggccatgcc

SEQ ID NO: 432309 - DNA, 75 bp, synthetic construct
  source 1..75: mol_type = other DNA
cagtaaactacggcctcttatccaggagccggatgatactgaaaccaaacgtcatggacttaaagcccgtcttaa

SEQ ID NO: 432310 - DNA, 75 bp, synthetic construct
  source 1..75: mol_type = other DNA
tagataagatgtttacacagggtttagaacgttgtaaacagtctcattacattatagaaacaattcttgaattgt

SEQ ID NO: 432311 - DNA, 75 bp, synthetic construct
  source 1..75: mol_type = other DNA
ttgccgaaatggaaagcttccataatttctttacgggcaaggagaaaggaaatacctggggtaacaaccttatca

SEQ ID NO: 432312 - DNA, 75 bp, synthetic construct
  source 1..75: mol_type = other DNA
gatgaagcggatctagccttgcttactgaccagctcaatacgctgatacgtagttttgatgggaaacccgttacc

SEQ ID NO: 432313 - DNA, 75 bp, synthetic construct
  source 1..75: mol_type = other DNA
tatcctcatcgtatcaggtgtaaaaagggcgtcagaccagtatttaacagtaaaattccttttgtgaacagagta

SEQ ID NO: 432314 - DNA, 75 bp, synthetic construct
  source 1..75: mol_type = other DNA
ccgttcagcgctgaagataaagtgacgcattttctttcaaggaaaaagggtaataaaaatatcttcgaagaaccc

SEQ ID NO: 432315 - DNA, 75 bp, synthetic construct
  source 1..75: mol_type = other DNA
cgcgccctgctttaataagggggctgggcgttccgctctacccctttcttggaatgtgcattatttgtgttctgc

SEQ ID NO: 432316 - DNA, 75 bp, synthetic construct
  source 1..75: mol_type = other DNA
gagccggatgatactgaaactaagcgacatgggcttaaagctcgactgagagcgtggaagcaggggggcgagtat

SEQ ID NO: 432317 - DNA, 75 bp, synthetic construct
  source 1..75: mol_type = other DNA
tgacgactaccagaaccgcctgatttctgatgccgttgagcgccttatgcaaaggtcagatcgctcttatccgat

SEQ ID NO: 432318 - DNA, 75 bp, synthetic construct
  source 1..75: mol_type = other DNA
aagacaccaatatcgtgacttccactctggaagatttggggctgattgtcacttattcaacactgagtcttggcg

SEQ ID NO: 432319 - DNA, 75 bp, synthetic construct
  source 1..75: mol_type = other DNA
gctgacacgccggaacgcctggtgaaagacaccaatatcgtgacgactactctggaggatttggggcttatcgtc

SEQ ID NO: 432320 - DNA, 75 bp, synthetic construct
  source 1..75: mol_type = other DNA
ggcgtaacaatacagacacagacaaccgtgaaagtcactggcaactcaagcaccgcccatgttgctagctttatc

SEQ ID NO: 432321 - DNA, 75 bp, synthetic construct
  source 1..75: mol_type = other DNA
ttcgccgcttcgctcccgctgcgccggccttcccaattgccacgctggacatggctcgctacctgctcacacgca

SEQ ID NO: 432322 - DNA, 75 bp, synthetic construct
  source 1..75: mol_type = other DNA
gagcgcatccagcgccttcgcgccgaccgctggatcggctatccgcgcgcagtcgaggcgctgaaccggctggaa

SEQ ID NO: 432323 - DNA, 75 bp, synthetic construct
  source 1..75: mol_type = other DNA
atgcgggagccgattctcggccttgatgtgctacaaaccgccacgcggggtgaatggtataagggcgattttttt

SEQ ID NO: 432324 - DNA, 75 bp, synthetic construct
  source 1..75: mol_type = other DNA
tgccagcgaagaaaatatgtgtggtgggtatcagcgggctgatggattttcaggcgcatcttgcggcagcttcgt

SEQ ID NO: 432325 - DNA, 75 bp, synthetic construct
  source 1..75: mol_type = other DNA
tgccagcgaagaaaatatgtgtggtgggaattagcggcctgatggattttcaggcgcatcttgcggcggcttcgt

SEQ ID NO: 432326 - DNA, 75 bp, synthetic construct
  source 1..75: mol_type = other DNA
tcgacaaactggaaatgacggatgacgcggctcaatccttactgactgatttaaaagttgctctcgacatggtgt

SEQ ID NO: 432327 - DNA, 75 bp, synthetic construct
  source 1..75: mol_type = other DNA
gacgggcttgcggcgttattgtcggcgctccggctgctgtgggtgttctgatggccgacaccgcgctgaagtccg

SEQ ID NO: 432328 - DNA, 75 bp, synthetic construct
  source 1..75: mol_type = other DNA
gtaaaaatggcgtggtgaatgaaatctggactcgtaatcacgccgacatcccgctgcgtccacgtttcgcggttc

SEQ ID NO: 432329 - DNA, 75 bp, synthetic construct
  source 1..75: mol_type = other DNA
tattaaaatagacttaaatacgctattgtattcggctgtgtggcttttgttttttagttttttatttctcggcgc

SEQ ID NO: 432330 - DNA, 75 bp, synthetic construct
  source 1..75: mol_type = other DNA
caaacattattgcaaaaagggggcattcgaacccccgccgatctcgattatctccggcagttcgacagggagtgt

SEQ ID NO: 432331 - DNA, 75 bp, synthetic construct
  source 1..75: mol_type = other DNA
agccgcgtgcgcaaatttaaaccgggggatcgggtaaatatcgaacctggcgttccttgcggtcactgtcgttac

SEQ ID NO: 432332 - DNA, 75 bp, synthetic construct
  source 1..75: mol_type = other DNA
atgcctttgcggcatcgggcaatgcgtgtcggatgccgcatgaacgccttatccgacctacagttctgctccagc

SEQ ID NO: 432333 - DNA, 75 bp, synthetic construct
  source 1..75: mol_type = other DNA
attttactgaccacgcacggtatgaaaccgcagcagaataccgggaaagaattcgtctggatgctgtaaaaatga

SEQ ID NO: 432334 - DNA, 75 bp, synthetic construct
  source 1..75: mol_type = other DNA
cgatagaggaattaaaaaaactcggttatgacatgttcttcaccctgtgtaagttcacagagatattgcaattgc

SEQ ID NO: 432335 - DNA, 75 bp, synthetic construct
  source 1..75: mol_type = other DNA
ggttcttatacttacaccgatgcggaatacactaccgatactacctacaaaggcaatacgcctgcacaggtgcca

SEQ ID NO: 432336 - DNA, 75 bp, synthetic construct
  source 1..75: mol_type = other DNA
tacaaaggaaatacgcctgcacaggtgccaaaacacatggcttcgctgtgggctgactataccttctttgacggt

SEQ ID NO: 432337 - DNA, 75 bp, synthetic construct
  source 1..75: mol_type = other DNA
tacgcctgcacaggtgccaaaacacatggcttcgctgtgggctgactataccttctttgacggtccgctttcagg

SEQ ID NO: 432338 - DNA, 75 bp, synthetic construct
  source 1..75: mol_type = other DNA
ggcgcaggttgtattggtttaatgacgttgcaagcatgtaaatgtctcggggcaacggaaattgtcgtggtggat

SEQ ID NO: 432339 - DNA, 75 bp, synthetic construct
  source 1..75: mol_type = other DNA
cctcaaaatcaatcgcgaagtcactatccagacggtattccgctatgccaatcgttatccggtcacgattgaagc

SEQ ID NO: 432340 - DNA, 75 bp, synthetic construct
  source 1..75: mol_type = other DNA
aatatgtcggtatttgtggttcagatgtacatggtttcgaatcaggcccgtttattccgcctaaagacccaaatc

SEQ ID NO: 432341 - DNA, 75 bp, synthetic construct
  source 1..75: mol_type = other DNA
atgtcacttaattactttggacaagctttcaaactggcgtttgaagtatcgcccattcttttagttgatggcata

SEQ ID NO: 432342 - DNA, 75 bp, synthetic construct
  source 1..75: mol_type = other DNA
actttgccaaagcacgggatctggctgggataattccaccagcaggaaaaactccgccaacatttcatgaacaac

SEQ ID NO: 432343 - DNA, 75 bp, synthetic construct
  source 1..75: mol_type = other DNA
ggaatgcgtctggcgttaccgcttacgctacgctgtgatgccattgggatatcgctaaaagaagtgattgatgga

SEQ ID NO: 432344 - DNA, 75 bp, synthetic construct
  source 1..75: mol_type = other DNA
tctgatgccattctatttcaggaaggagtgtccgttaaactcaggctacctcaggaagttcctcctggatggaat

SEQ ID NO: 432345 - DNA, 75 bp, synthetic construct
  source 1..75: mol_type = other DNA
ttgaaattaacaaggctgtagctatttcagttggatttcaatgttattacggggatggaagctacacaaacaacc

SEQ ID NO: 432346 - DNA, 75 bp, synthetic construct
  source 1..75: mol_type = other DNA
cgatacaaaaacattactgggacataaagtccaggcaaccaccgatcgctataacgatacccgaggtcaggaatg

SEQ ID NO: 432347 - DNA, 75 bp, synthetic construct
  source 1..75: mol_type = other DNA
cgctacgatgcgatgaaattggggtatcgttaaaagaagttattgatggatgcagggacagaatgttgagtccat

SEQ ID NO: 432348 - DNA, 75 bp, synthetic construct
  source 1..75: mol_type = other DNA
gacaacgttagtccagcaggatatttgcaacctgaatttctataaccaggtaacggcagcgaatgcgaccgtcag

SEQ ID NO: 432349 - DNA, 75 bp, synthetic construct
  source 1..75: mol_type = other DNA
cggtcgtttatcgatacatccggtttctctgagcagaacaagcaggttcagcacacctggcagattgagtttgag

SEQ ID NO: 432350 - DNA, 75 bp, synthetic construct
  source 1..75: mol_type = other DNA
gttgttacaccgtaatgacgccatctttcatctacacgcgctgtctgatgcggtcgtttatcgataccggaaaac

SEQ ID NO: 432351 - DNA, 75 bp, synthetic construct
  source 1..75: mol_type = other DNA
ctgggaaaccacccattgaaagaactggaagtaagagactttgcattaatactggatgagtggctggataaagac

SEQ ID NO: 432352 - DNA, 75 bp, synthetic construct
  source 1..75: mol_type = other DNA
atatttcatgcgcaaaattgatgaaagtccgtcagcaacaaaacgtcggggtatcagattaaaggcatgggttga

SEQ ID NO: 432353 - DNA, 75 bp, synthetic construct
  source 1..75: mol_type = other DNA
tgcaacctgaatttctataaccaggtaacggcagcgaatgcgaccgtcaggaagcctaaccgggtagtcatgcag

SEQ ID NO: 432354 - DNA, 75 bp, synthetic construct
  source 1..75: mol_type = other DNA
ttacctggcgtggtggtgttaactacctgtttgataatggtgtaacaccatacttcagctatagcgaatcgtttg

SEQ ID NO: 432355 - DNA, 75 bp, synthetic construct
  source 1..75: mol_type = other DNA
tcgtatcgagatgcgtatcaacggtctgctctatccggttgccacactgtcgagagacgaaggcatcagctggct

SEQ ID NO: 432356 - DNA, 75 bp, synthetic construct
  source 1..75: mol_type = other DNA
aaatatttgatcaagtgcggaaagatttaaactgtgatcggttttactctgaactaaaacgccacaatgtctcac

SEQ ID NO: 432357 - DNA, 75 bp, synthetic construct
  source 1..75: mol_type = other DNA
ttggtggtaaagaaaacatcactaacctcgacgcatgtattactcgtctgcgcgtcagcgtcgctgatgtgtcca

SEQ ID NO: 432358 - DNA, 75 bp, synthetic construct
  source 1..75: mol_type = other DNA
gacgtttactatgatggttatgtaggctggaataactatgccgctgatagttattacaacggcgatatctatccg

SEQ ID NO: 432359 - DNA, 75 bp, synthetic construct
  source 1..75: mol_type = other DNA
ctggttcatggtctgatgaaggtactactggttggttcggtaatacaggtaatgccagcgattatagtggtaaat

SEQ ID NO: 432360 - DNA, 75 bp, synthetic construct
  source 1..75: mol_type = other DNA
ctgctctatccggttgccacactgtcgagagacgaaggcatcagctggctgatgaccatctatcagtccatgtca

SEQ ID NO: 432361 - DNA, 75 bp, synthetic construct
  source 1..75: mol_type = other DNA
gttacgggcgcagtctatcaattgacgaaaacaaataacctgacagcagacccaacaaacccattagcgcaagtc

SEQ ID NO: 432362 - DNA, 75 bp, synthetic construct
  source 1..75: mol_type = other DNA
cgggagctcgaaaaggccgctccggactttatgacggagcgcgaggacattgtcaacgacgaaggacgatttagc

SEQ ID NO: 432363 - DNA, 75 bp, synthetic construct
  source 1..75: mol_type = other DNA
atgagaaccgtatcgatatttaaaaatggcaacaaccgcgccatccgtctgccccgtgatctggattttgagggg

SEQ ID NO: 432364 - DNA, 75 bp, synthetic construct
  source 1..75: mol_type = other DNA
tgtattctgctggggatgcgtgatggcacctcgttctcgcacggtctgatcgactttatcgttctttctggcaac

SEQ ID NO: 432365 - DNA, 75 bp, synthetic construct
  source 1..75: mol_type = other DNA
acggcgacattccgcgttatatggcgggtgacccgactgcgggtaaactgtctggtggcttcctgttcaaaatgt

SEQ ID NO: 432366 - DNA, 75 bp, synthetic construct
  source 1..75: mol_type = other DNA
gttaaatgccaatattaacttgacggcttcttatacctacaccgatgcggaatacaccaaagacaccaatctcaa

SEQ ID NO: 432367 - DNA, 75 bp, synthetic construct
  source 1..75: mol_type = other DNA
cgacggtatttctaccaataccaacgccaatagtctgacaatcaaaaacagcactattcacggtatgattacctc

SEQ ID NO: 432368 - DNA, 75 bp, synthetic construct
  source 1..75: mol_type = other DNA
cagcaacaaaacgtcggggtatcagattaaaggcatgggttgatcgatatctgaaaatacaggacacgcgactga

SEQ ID NO: 432369 - DNA, 75 bp, synthetic construct
  source 1..75: mol_type = other DNA
aaaactgcgtgttacgttcgtcctggactgttgcgatcgtgaagccatagactggaccgcaagctcgggaggtta

SEQ ID NO: 432370 - DNA, 75 bp, synthetic construct
  source 1..75: mol_type = other DNA
ggcggacgagccgactggcgctctggattcgcaatccgggctagaagtgttagccatcctgagtgagcttaatcg

SEQ ID NO: 432371 - DNA, 75 bp, synthetic construct
  source 1..75: mol_type = other DNA
aaagagcgtatatggctacggcatgtgctcggatccgctgtataccaaagacgacgatgcactcaaggcgagtcc

SEQ ID NO: 432372 - DNA, 75 bp, synthetic construct
  source 1..75: mol_type = other DNA
acctttactgtgcgtcagaacctgcgctttgcgcaaaataaagtctcgcaaaagagcgtatatggctacggcatg

SEQ ID NO: 432373 - DNA, 75 bp, synthetic construct
  source 1..75: mol_type = other DNA
gatgcagttatcgatccgtatatgctggagcgcgccgaaatcatgcgtggtccggtatccgtgctgtacgggaaa

SEQ ID NO: 432374 - DNA, 75 bp, synthetic construct
  source 1..75: mol_type = other DNA
aacctgagcgactactttgccaaagcacgggatctggctgggataattccaccagcaggaaaaactccgccaaca

SEQ ID NO: 432375 - DNA, 75 bp, synthetic construct
  source 1..75: mol_type = other DNA
acaaaccaacgccaccgtcaccgtgagtcactcagggcgagttatttaccagaaaaaagtcccaccaggtccgtt

SEQ ID NO: 432376 - DNA, 75 bp, synthetic construct
  source 1..75: mol_type = other DNA
agtgggataccaccaaaacttctctgattgatactctgagcatcaacagtggttcaactgttaatgttgctgatt

SEQ ID NO: 432377 - DNA, 75 bp, synthetic construct
  source 1..75: mol_type = other DNA
tcgcccgatgagctggccagaacgcgccgggaacatattggctttatcttccagcgataccatttgattcctgat

SEQ ID NO: 432378 - DNA, 75 bp, synthetic construct
  source 1..75: mol_type = other DNA
gcaaagctattggaaaacactgctcgatcgaacgcgtgaatcgatgcaaatggcgctaaaagcgatgaagacgca

SEQ ID NO: 432379 - DNA, 75 bp, synthetic construct
  source 1..75: mol_type = other DNA
acgctgatgcactagcgaaacaaggatttgtcgacagcgtaagtccggaagttagcacatcagataatattcgtt

SEQ ID NO: 432380 - DNA, 75 bp, synthetic construct
  source 1..75: mol_type = other DNA
gacaacggccaggtccgcgcgccgcaggtcaaggtcggcgacaaggtgctgttcggcaagtacagcggcaccgaa

SEQ ID NO: 432381 - DNA, 75 bp, synthetic construct
  source 1..75: mol_type = other DNA
accccatcagccgacaacagtcagctggttatcaatgcgctgaccgacaaaggtttacgctttgcaggttatggt

SEQ ID NO: 432382 - DNA, 75 bp, synthetic construct
  source 1..75: mol_type = other DNA
gcaacggccagccggtgctgtttgccgagggctatgccactgccgcctccctgcacgaagccacaggccttccgg

SEQ ID NO: 432383 - DNA, 75 bp, synthetic construct
  source 1..75: mol_type = other DNA
tcttgaactcagagaatctgcagtcagttaatgcacatctgacccgcaatgttgaacttgatacctttctggcca

SEQ ID NO: 432384 - DNA, 75 bp, synthetic construct
  source 1..75: mol_type = other DNA
gtcccattcgtccgtgattaccagttgtatgtggaaaatcagttcgctcctgagccagcagtgctacgtccggtt

SEQ ID NO: 432385 - DNA, 75 bp, synthetic construct
  source 1..75: mol_type = other DNA
gtgaagtattcattagaccgtcagcaattaataattacgggtggtaatatgaatcttctaactcaagtacagaaa

SEQ ID NO: 432386 - DNA, 75 bp, synthetic construct
  source 1..75: mol_type = other DNA
gttatgcctgtcactgataccgctgaagaaaatgcctctgccaccaccgctgacaaccagagcgcacaggcagaa

SEQ ID NO: 432387 - DNA, 75 bp, synthetic construct
  source 1..75: mol_type = other DNA
tgataccagccatcgcctctgccgataaggacaatcgtcagttgaatcttctgctggtccacagcgcagatgatc

SEQ ID NO: 432388 - DNA, 75 bp, synthetic construct
  source 1..75: mol_type = other DNA
gggatccagaaaaaaaactctggtatgcccgggcgggtaccgaactttcactgctggagcgctggttaccccggc

SEQ ID NO: 432389 - DNA, 75 bp, synthetic construct
  source 1..75: mol_type = other DNA
ggcgcatgatgccatcgtcacccacagacccacgccggaactcaaccgcctgtcaccggaagagacaacaatggc

SEQ ID NO: 432390 - DNA, 75 bp, synthetic construct
  source 1..75: mol_type = other DNA
ggagaagaacgttgcgtctgccgctgagaccggtgcagagcattcctctgacatcaccgatgacaacaggaacgc

SEQ ID NO: 432391 - DNA, 75 bp, synthetic construct
  source 1..75: mol_type = other DNA
agttgcggaagacctcaatgctgatgttactgtgatgaccacagctcaccacaccgatacagcagaaacagcctc

SEQ ID NO: 432392 - DNA, 75 bp, synthetic construct
  source 1..75: mol_type = other DNA
gccaaccggacataaggccagtattctcaaatcattttgcgcaatatttagtaatccacctttgctggtattgtg

SEQ ID NO: 432393 - DNA, 75 bp, synthetic construct
  source 1..75: mol_type = other DNA
ggggtaggtagcgtttctaaaattaaatataacaccatcaatgactttggatcgtcagcggaaatgatcactaaa

SEQ ID NO: 432394 - DNA, 75 bp, synthetic construct
  source 1..75: mol_type = other DNA
ttcaagctcgatcccgaaaagaacaatattctgcgtattgttaatattacgcccagcctgccgcaggatcgcgaa

SEQ ID NO: 432395 - DNA, 75 bp, synthetic construct
  source 1..75: mol_type = other DNA
gaattccttatccagtcatgggttgatgatgttgctggcaacaaaaaaacaccttttatcattactccaccatta

SEQ ID NO: 432396 - DNA, 75 bp, synthetic construct
  source 1..75: mol_type = other DNA
atgtgctacaaaccgctacgcggggtgaatggtataagggcgatttttttgcgccgcagccgtggcagcagttcg

SEQ ID NO: 432397 - DNA, 75 bp, synthetic construct
  source 1..75: mol_type = other DNA
gatcctgatgcccgcctgcttcggcctggccgatgacaaactgtggcgttggttgaatgaaaaactaccttgttc

SEQ ID NO: 432398 - DNA, 75 bp, synthetic construct
  source 1..75: mol_type = other DNA
ccattccgtctaaaagcgatgacagcgaaaacaaaaatgttttacagattgctgttcgcacccgcatcaaactat

SEQ ID NO: 432399 - DNA, 75 bp, synthetic construct
  source 1..75: mol_type = other DNA
ttctgtttataccggttataccttctttcgtaaaatttcagccgcacttgctggcttcttgccaggcattatgct

SEQ ID NO: 432400 - DNA, 75 bp, synthetic construct
  source 1..75: mol_type = other DNA
gctgcattgacgatgggattcttttacacactcaatgaaaaacggtttgcattgattattgaggaaatcaaccaa

SEQ ID NO: 432401 - DNA, 75 bp, synthetic construct
  source 1..75: mol_type = other DNA
ttctggtggcgaagttttttaccgcgtttaccgatatgctcaccggatttttactcgactcgcggaaaaatattg

SEQ ID NO: 432402 - DNA, 75 bp, synthetic construct
  source 1..75: mol_type = other DNA
ggcgatgaagtgaaaaaagtgacctgtaaaaatggcgtagtgaatgaaatctggacgcgcaatcacgccgatatc

SEQ ID NO: 432403 - DNA, 75 bp, synthetic construct
  source 1..75: mol_type = other DNA
gtaatcagttactgaccgaattagtgatggaggttaagaatggcaatctgcgacgctgtgaagcattcggtctga

SEQ ID NO: 432404 - DNA, 75 bp, synthetic construct
  source 1..75: mol_type = other DNA
ggcacttatgttctccattggcggctttatttttatgatgctgtgctacagaggcgtcaaagagcattatgtgga

SEQ ID NO: 432405 - DNA, 75 bp, synthetic construct
  source 1..75: mol_type = other DNA
cacagcagtgaacatgaaccggcaccttctctgcctcctgcaccgcctgaagtgcaaccgtcactctccggtaac

SEQ ID NO: 432406 - DNA, 75 bp, synthetic construct
  source 1..75: mol_type = other DNA
gagcactcattcgtcaattacatttccctaacgacttaagagcgaacatttcattattgaaatatcccgtatgta

SEQ ID NO: 432407 - DNA, 75 bp, synthetic construct
  source 1..75: mol_type = other DNA
cttatcagatcgtcatttaattcatgtgatgaatggtttgatagtttaacgttggaatgtaaattacagttatcc

SEQ ID NO: 432408 - DNA, 75 bp, synthetic construct
  source 1..75: mol_type = other DNA
tgatataagtctgctaaaaaacattatggaggtatcttcagaaaaaaaatcagagaacatcactctgaaggataa

SEQ ID NO: 432409 - DNA, 75 bp, synthetic construct
  source 1..75: mol_type = other DNA
gtgacgacattcatcaacgaagaagaagacaagaacggcacaattgatgtcccgaatgaacacggaacaacagat

SEQ ID NO: 432410 - DNA, 75 bp, synthetic construct
  source 1..75: mol_type = other DNA
aagagcgctgtttctttatcagaaaatgctcactacttcccctgataaaggtttcattctttcagatatgggtcg

SEQ ID NO: 432411 - DNA, 75 bp, synthetic construct
  source 1..75: mol_type = other DNA
cttgaactccttctggatgaaatgattcacgatctgaatactcatggtatgccagaagcgccagtgacacattaa

SEQ ID NO: 432412 - DNA, 75 bp, synthetic construct
  source 1..75: mol_type = other DNA
atagaggcatcttcagaaaacaaatcagcgagcatcaatccgaaagatgatttcgaagaacaaaccagacgcaat

SEQ ID NO: 432413 - DNA, 75 bp, synthetic construct
  source 1..75: mol_type = other DNA
atgacacaggcaggcgggaggataaatgcccgtctgcccgtgcaggaaaaagaccgcgcgccggtggcgctgaaa

SEQ ID NO: 432414 - DNA, 75 bp, synthetic construct
  source 1..75: mol_type = other DNA
caaccacagctttattctgccggggttgattggtgtgagcgtatcgtgcgtcttcggctggatcttcgctgcgat

SEQ ID NO: 432415 - DNA, 75 bp, synthetic construct
  source 1..75: mol_type = other DNA
gtaactggctggcaatgtggatcttcctcgcggcaatcgccgtggtcgctctgctcggtgcagattctgacctgc

SEQ ID NO: 432416 - DNA, 75 bp, synthetic construct
  source 1..75: mol_type = other DNA
caaccacagttttattctgccggggttgattggtgtgagcgtatcgtgcgtcttcggctggatcttcgccgcgat

SEQ ID NO: 432417 - DNA, 75 bp, synthetic construct
  source 1..75: mol_type = other DNA
aagacgaagttatatggcagtacagcgtggataaagaaggcgtatcgtgtagcgttgcaggaggttaacagtgag

SEQ ID NO: 432418 - DNA, 75 bp, synthetic construct
  source 1..75: mol_type = other DNA
ggcatgaaacactgtctggttgttaccggtcgtctaaatcactggttgattattataaaaaatattctgcttcgc

SEQ ID NO: 432419 - DNA, 75 bp, synthetic construct
  source 1..75: mol_type = other DNA
ttattaactaccaaagaagaagttctcttgcaaggaaaattgttgattctgttcctgaattgagtcatttgacgc

SEQ ID NO: 432420 - DNA, 75 bp, synthetic construct
  source 1..75: mol_type = other DNA
cacactaacgcagcagctgatgagatctctagcaggatagataatctaagtatagaggtagatagagtttggtgc

SEQ ID NO: 432421 - DNA, 75 bp, synthetic construct
  source 1..75: mol_type = other DNA
atgaacttcacgataaaatcccgtaaaaccggcgaaattttcagtttttacgcacccgagagtggcggttatgtc

SEQ ID NO: 432422 - DNA, 75 bp, synthetic construct
  source 1..75: mol_type = other DNA
cgcacccgacagtggtggctatgttcacctggagtctcagggacactctggtaactcaggtgctcagatttgccg

SEQ ID NO: 432423 - DNA, 75 bp, synthetic construct
  source 1..75: mol_type = other DNA
ctgcatctgcgtgatagctggcgttattcacctaatctgctgtatgcactgatctgcagtcgatctggaaaattg

SEQ ID NO: 432424 - DNA, 75 bp, synthetic construct
  source 1..75: mol_type = other DNA
ttctggcgaatacccgaccatgagcagtcttgagatggtggattacattaatgctgatcggaaatccaaagcgga

SEQ ID NO: 432425 - DNA, 75 bp, synthetic construct
  source 1..75: mol_type = other DNA
atggcactgacgaaaaaacaacgtgcagaattgcgcatgaagtttggcggtcgctgtgcttattgcggctgtgaa

SEQ ID NO: 432426 - DNA, 75 bp, synthetic construct
  source 1..75: mol_type = other DNA
atggcactgacgaaaaaacaacgtgcagaattacgcatgaagttcggcggtcgctgtgcttattgcggctgcgaa

SEQ ID NO: 432427 - DNA, 75 bp, synthetic construct
  source 1..75: mol_type = other DNA
tttacccgatcacacggcagatgccagaaagaaaaaactaaatgaatgtcctgcggctgatgcaggtacagtaag

SEQ ID NO: 432428 - DNA, 75 bp, synthetic construct
  source 1..75: mol_type = other DNA
atgtgcgagtatagtgacttgtttaacacactgcatatggtgtttttattcataatttatatctgcacgattaaa

SEQ ID NO: 432429 - DNA, 75 bp, synthetic construct
  source 1..75: mol_type = other DNA
atgaacaaatcattaaccgttcttccttctggcaaatacccgaccatgagcagtcttgagatggtggattacatt

SEQ ID NO: 432430 - DNA, 75 bp, synthetic construct
  source 1..75: mol_type = other DNA
gttggtctggagagtgttgtagccggttataataaaggtgaacgtctgcggctggaggataaaggtacagagaaa

SEQ ID NO: 432431 - DNA, 75 bp, synthetic construct
  source 1..75: mol_type = other DNA
caacgtttgcatgaatggccacagcgagctatggagcttaagtacattgataaggctaacagtgatttccgaaaa

SEQ ID NO: 432432 - DNA, 75 bp, synthetic construct
  source 1..75: mol_type = other DNA
tttgctgcaacatgccgattgaaaaattttggtgtggcaattgccgaacccttttcaaactacaatcctttttaa

SEQ ID NO: 432433 - DNA, 75 bp, synthetic construct
  source 1..75: mol_type = other DNA
ctgatgatcgaacgctatctgaacgagatgtctatatgacattccaaaatagtatgcagaacgccataaaactaa

SEQ ID NO: 432434 - DNA, 75 bp, synthetic construct
  source 1..75: mol_type = other DNA
cataaaccaaaaatataatctgatttctccccgagagcgtgtcagagtcaatccaaagaatgtgtctgatatttt

SEQ ID NO: 432435 - DNA, 75 bp, synthetic construct
  source 1..75: mol_type = other DNA
atacctgataatgatcaggagcgttatgtttcaattacacattcgtattttgaggatgatatttctgttgatgtg

SEQ ID NO: 432436 - DNA, 75 bp, synthetic construct
  source 1..75: mol_type = other DNA
tggcgaacgggatctcgatgaaattattgctattgccgggcaagaactgaatgaaaaaggcttccgttccgatga

SEQ ID NO: 432437 - DNA, 75 bp, synthetic construct
  source 1..75: mol_type = other DNA
tgaagccaaaacgcgggccgatgtggtggtggtcagcattttcgttaacccgatgcagttcgatcgcccggaaga

SEQ ID NO: 432438 - DNA, 75 bp, synthetic construct
  source 1..75: mol_type = other DNA
ttgctggaagtctctgaaaacagcaaacgcgcggtgattctggtagccgcctggcttggcgatgctcgcctgatc

SEQ ID NO: 432439 - DNA, 75 bp, synthetic construct
  source 1..75: mol_type = other DNA
ataaactaagccaggcgttaagcgacatcgaagttccatgttcggtgctggagtgtgaaggtgagccgtgcctgt

SEQ ID NO: 432440 - DNA, 75 bp, synthetic construct
  source 1..75: mol_type = other DNA
aacgggcagtaattctggtagccgcctggcttggcgatgctcgcctgatcgacaacaaaatcgtcgagctggcgt

SEQ ID NO: 432441 - DNA, 75 bp, synthetic construct
  source 1..75: mol_type = other DNA
tctgaccgcagaacaacgtaaaattgcaccgggtctgtacaaagttttaagttcgattgccgacaaattgcaggc

SEQ ID NO: 432442 - DNA, 75 bp, synthetic construct
  source 1..75: mol_type = other DNA
atatccgccagcaactgctgactcaactggtccagcgtcgcgatccgatcacgccgacgctctcgccgggttttg

SEQ ID NO: 432443 - DNA, 75 bp, synthetic construct
  source 1..75: mol_type = other DNA
cttcgcgtaccagcgcatttacagcgatgacggcgatccggcatgccggaggttttgtcagcttcgatcccaata

SEQ ID NO: 432444 - DNA, 75 bp, synthetic construct
  source 1..75: mol_type = other DNA
cataaaaaatcccgacaacagcggccaggcgctcccgctcacgtatgtctgttgccgggagcaggcagaggacgg

SEQ ID NO: 432445 - DNA, 75 bp, synthetic construct
  source 1..75: mol_type = other DNA
cgacgccttgtgtcactggcctcttctctcgctcagcatgcaggtctttctattgtgaaatcatcccagtccact

SEQ ID NO: 432446 - DNA, 75 bp, synthetic construct
  source 1..75: mol_type = other DNA
aattaaaagaagagcaggacaaggttaacgttgatcttgcagcgtccggcgttgcgtacaaagagagccttaatc

SEQ ID NO: 432447 - DNA, 75 bp, synthetic construct
  source 1..75: mol_type = other DNA
gtgaacaaaatccgctccggctcacactcaaaagcctctgcgggaagtccgctgtatcagaacgtcaccattggc

SEQ ID NO: 432448 - DNA, 75 bp, synthetic construct
  source 1..75: mol_type = other DNA
atgaccacactgaaactggacacgctcagcgatcgcattaaagcgcacaaaaatgcgctggtgcatattgtgaaa

SEQ ID NO: 432449 - DNA, 75 bp, synthetic construct
  source 1..75: mol_type = other DNA
tcatttaccacattctggggctgggttttgaaggccgctacagtgtacggcctgacggacgtaaacaactggacg

SEQ ID NO: 432450 - DNA, 75 bp, synthetic construct
  source 1..75: mol_type = other DNA
cccgacgggcgcaagcaactggacgatatccgccagcaactgctgactcaactggtccagcgccgcgatccggtc

SEQ ID NO: 432451 - DNA, 75 bp, synthetic construct
  source 1..75: mol_type = other DNA
cgcgctccgcccggtgattgataaggccgcgcgcgagattgcgcgagtggggggcgcagtgacggtgactggtca

SEQ ID NO: 432452 - DNA, 75 bp, synthetic construct
  source 1..75: mol_type = other DNA
cctgataccttacaaatcatagttatagagaataaagaaccgccggtatcaatcatgaataaagttcattacgaa

SEQ ID NO: 432453 - DNA, 75 bp, synthetic construct
  source 1..75: mol_type = other DNA
gtaccggtggccgataacagcactaaaaccggacgggcgcagaaccgtcgggtggaaattctggtggtggagtga

SEQ ID NO: 432454 - DNA, 75 bp, synthetic construct
  source 1..75: mol_type = other DNA
aacgcggtggtgaatcaggacggcgagctggatgtgagcggcggcggtcacggtattgatatcaccggcgacagc

SEQ ID NO: 432455 - DNA, 75 bp, synthetic construct
  source 1..75: mol_type = other DNA
tggaagctgccggagcgcatcgtcagcaacttgaggaacaggcaatggcatctgttgagcttataaatctcaaac

SEQ ID NO: 432456 - DNA, 75 bp, synthetic construct
  source 1..75: mol_type = other DNA
aagtcggtgctgccggagcaccatccgctgccgtggagcttcgtcctgtcgccggggtttttacccattggcggg

SEQ ID NO: 432457 - DNA, 75 bp, synthetic construct
  source 1..75: mol_type = other DNA
tagccactttattaccgaacatattgcgccattctatgaacgtcgctggggtggttttttgcgtgactttaaaca

SEQ ID NO: 432458 - DNA, 75 bp, synthetic construct
  source 1..75: mol_type = other DNA
tgccgtggagttttgtgctgtcgccgggatttctccccattggcgggcgcgatgagtggctgaccggggtgctga

SEQ ID NO: 432459 - DNA, 75 bp, synthetic construct
  source 1..75: mol_type = other DNA
gtgtaccgcagcgcagccgggaactcaccgggctgccggacgtgccggtagtggaactgcccggtgtgcgccacc

SEQ ID NO: 432460 - DNA, 75 bp, synthetic construct
  source 1..75: mol_type = other DNA
ttaccagcgtgccgggcgggaatggctggaagagagcctggatgacacacagggctggctgtactggctggcgcg

SEQ ID NO: 432461 - DNA, 75 bp, synthetic construct
  source 1..75: mol_type = other DNA
tacagcccatgaacgcacaggaatatgaagatatccgtgctgcgggaagcgatatgcgccgtaatctcactcacg

SEQ ID NO: 432462 - DNA, 75 bp, synthetic construct
  source 1..75: mol_type = other DNA
ctgccaaatcccagcggtttaagtcgcgtttcactggagaaactggttgaagcgtatcgcgagctggaccaggcg

SEQ ID NO: 432463 - DNA, 75 bp, synthetic construct
  source 1..75: mol_type = other DNA
cggtttaagtcgcgtttcactagagaaactggttgaagcgtatcgcgagctggaccaggcgctggtagtgcgtgg

SEQ ID NO: 432464 - DNA, 75 bp, synthetic construct
  source 1..75: mol_type = other DNA
aggcggtgaatcgctgatattatcggaagtcgcagagccgccagcacaaatgattgattcactcaccaccttatt

SEQ ID NO: 432465 - DNA, 75 bp, synthetic construct
  source 1..75: mol_type = other DNA
atgaaaactgaactgactctgaatgcattgcataccatgaacgcacaggaatatgaagatatccgtgctgcggga

SEQ ID NO: 432466 - DNA, 75 bp, synthetic construct
  source 1..75: mol_type = other DNA
tccagaccatgaacgcacaggaatatgaagatatccgtgctgcgggaagcgatatgcgccgtaatctcactcacg

SEQ ID NO: 432467 - DNA, 75 bp, synthetic construct
  source 1..75: mol_type = other DNA
aaaacggaggtgccggaacaccatccgctaccgtggagctttgtattatcgccgggatttctacccattggtggg

SEQ ID NO: 432468 - DNA, 75 bp, synthetic construct
  source 1..75: mol_type = other DNA
tcatcgatccggattcgattggcattcagatcgacggcgacaaggcggtcgtgaacaacgacggtgacaatgcca

SEQ ID NO: 432469 - DNA, 75 bp, synthetic construct
  source 1..75: mol_type = other DNA
atgaaaattgattatgacgagatagccagaatatttgatgtattcctggaggccgacactgcattcattcgactg

SEQ ID NO: 432470 - DNA, 75 bp, synthetic construct
  source 1..75: mol_type = other DNA
actgattgatgcggctatggcttccattagtctgattcagctgaaattgcaggccgggcggaagctgacgcaggc

SEQ ID NO: 432471 - DNA, 75 bp, synthetic construct
  source 1..75: mol_type = other DNA
gacggcgacaaggcggttgtcaataacgacggtgacaacgccatcagcaacggcggcaccggcacgcaggttaac

SEQ ID NO: 432472 - DNA, 75 bp, synthetic construct
  source 1..75: mol_type = other DNA
tcagatcgacggcgacaaggcggttgtcaacaacgacggtgacaacacgatccttgatggcggcaccggaacccg

SEQ ID NO: 432473 - DNA, 75 bp, synthetic construct
  source 1..75: mol_type = other DNA
gatccggattccatcggtattcagatcgacggcgacaaggcggttgtcaataacgacggtgacagtgccatcagt

SEQ ID NO: 432474 - DNA, 75 bp, synthetic construct
  source 1..75: mol_type = other DNA
gacgctcctgttacatctaaggctggttatacaatttgccgttctgtggatttaaaatcatgggaatatgtgtca

SEQ ID NO: 432475 - DNA, 75 bp, synthetic construct
  source 1..75: mol_type = other DNA
ctggattacattgacgcggtgactgcaacagataccagcaccgcgccggatgtcatctggcctgaactgccggag

SEQ ID NO: 432476 - DNA, 75 bp, synthetic construct
  source 1..75: mol_type = other DNA
ggaaccagagtcagggttccgcaggtgcgcgcactctggcagatacgcagattcaaaatggcatcccgatgagcc

SEQ ID NO: 432477 - DNA, 75 bp, synthetic construct
  source 1..75: mol_type = other DNA
gattgatgctgcaatggcttccattagtctgattcagctgaaattacgggccggacggaatctgacgcaggcaga

SEQ ID NO: 432478 - DNA, 75 bp, synthetic construct
  source 1..75: mol_type = other DNA
aatcacagctctgggtgattaccccgaaaatacaaccactatcgcccctttatctccatacgataaatgggatgg

SEQ ID NO: 432479 - DNA, 75 bp, synthetic construct
  source 1..75: mol_type = other DNA
ccggacgtaaactgacgcaggcagaaacaaccagccttaacgctgtactggattacattgacgcggtgacggcaa

SEQ ID NO: 432480 - DNA, 75 bp, synthetic construct
  source 1..75: mol_type = other DNA
tgcgcggaaacagcgttcaagacgcttatgttgatttctataagggtgcgaatattctagcaggggaatctgata

SEQ ID NO: 432481 - DNA, 75 bp, synthetic construct
  source 1..75: mol_type = other DNA
actggcgggctgttgtagccatcgccgccaaaaacgcgaggctgtgctgggcatcgttgcattacggtgatgatt

SEQ ID NO: 432482 - DNA, 75 bp, synthetic construct
  source 1..75: mol_type = other DNA
atgccggtatcccggccattatccagaacatccgggccgcgcaacgccgcgttagttgtgatgacctcacagcac

SEQ ID NO: 432483 - DNA, 75 bp, synthetic construct
  source 1..75: mol_type = other DNA
gggtgatcgcatggcgcaggggctgggcgtctcggtactccgcacgcgaacattcaccctgcttgcgatcgcgtt

SEQ ID NO: 432484 - DNA, 75 bp, synthetic construct
  source 1..75: mol_type = other DNA
tgtttgaccggatagaggagaagcgtgatgccatgcagtcgctgctcttaccgccaccggcacgccaggcgctgg

SEQ ID NO: 432485 - DNA, 75 bp, synthetic construct
  source 1..75: mol_type = other DNA
gaaactgatgttggtagacagtgcgcgtggcggcggcctggcacgcgcggtcacgtttatcggcgtggcaattct

SEQ ID NO: 432486 - DNA, 75 bp, synthetic construct
  source 1..75: mol_type = other DNA
atgtcaataattaattccacgccagtgcgtgttattgccattgtgggttgtgatggttcaggtaaatcgactctc

SEQ ID NO: 432487 - DNA, 75 bp, synthetic construct
  source 1..75: mol_type = other DNA
acggcaagcctggtaaatgaactggcagcaagaatgccaacagaacacatttatctcgggcaatcgtccgggcga

SEQ ID NO: 432488 - DNA, 75 bp, synthetic construct
  source 1..75: mol_type = other DNA
caccgtatcagacagggttttatcgaagaggaaacagcaacatataaccgattgagaggtttgatatcggaattc

SEQ ID NO: 432489 - DNA, 75 bp, synthetic construct
  source 1..75: mol_type = other DNA
cttatgggatctcatcgcctaaagagttcaataacgagcgtccttatgaaatagcccccgtaagggggcttattg

SEQ ID NO: 432490 - DNA, 75 bp, synthetic construct
  source 1..75: mol_type = other DNA
gggatggaggcatgctccggagctcactactgggcaaggttatttcggcagtatggtcacgaaccacgcctgatg

SEQ ID NO: 432491 - DNA, 75 bp, synthetic construct
  source 1..75: mol_type = other DNA
gttatctgcggggtaaagcggcacatgtgcatgaaaaggcgtcaacgccgcctggcaatattaccgcactggtta

SEQ ID NO: 432492 - DNA, 75 bp, synthetic construct
  source 1..75: mol_type = other DNA
tgctagtaccgcagattgtccggcgtctggtatcagcggatctgcgcgttctgctccctctttcagcttgtgtcg

SEQ ID NO: 432493 - DNA, 75 bp, synthetic construct
  source 1..75: mol_type = other DNA
gtttgaccggatagaggagatgcgtgatgccatgcagtcgctgattctgccgccaccggcacgccaggcgctggc

SEQ ID NO: 432494 - DNA, 75 bp, synthetic construct
  source 1..75: mol_type = other DNA
atcgctacgagcacaggagaaaggtaagcagattattgatggcgtgctgttgtttgcatcgccgctggtcggttt

SEQ ID NO: 432495 - DNA, 75 bp, synthetic construct
  source 1..75: mol_type = other DNA
gcgcgctgggttacggcggtttctatctggcgttagcatggcttgcattgcgtcgctatccctctttggggaggc

SEQ ID NO: 432496 - DNA, 75 bp, synthetic construct
  source 1..75: mol_type = other DNA
tgtctatcgccagtgggctaaagcgggctggatatgcacaacgcctggcgactgcattgattacgaccggatcag

SEQ ID NO: 432497 - DNA, 75 bp, synthetic construct
  source 1..75: mol_type = other DNA
ggatgcctgtgcactcgattatgccgaagaagatctggtcgggatggagtgttacgccggatttgacctgtcctc

SEQ ID NO: 432498 - DNA, 75 bp, synthetic construct
  source 1..75: mol_type = other DNA
ctcgatgtggagccgttcccgcaaacctatctgaaattcagtccggtagcgaaatcttttgaggtttttgttaac

SEQ ID NO: 432499 - DNA, 75 bp, synthetic construct
  source 1..75: mol_type = other DNA
tgaagtcgtctacagcaaaacttattattccatcggcggcggttttatcgtcgatgaagaacactttggtcagga

SEQ ID NO: 432500 - DNA, 75 bp, synthetic construct
  source 1..75: mol_type = other DNA
gatgcagaacgaactggcactgcacagcaaaaaagagattgatgagtatttcgcccatgtctggcagaccatgca

SEQ ID NO: 432501 - DNA, 75 bp, synthetic construct
  source 1..75: mol_type = other DNA
gggtaaacatgtttgcgctggcagttaacgaagaaaacgccgccggtggtcgtgtggtaactgcgccaaccaacg

SEQ ID NO: 432502 - DNA, 75 bp, synthetic construct
  source 1..75: mol_type = other DNA
tcgcgcatgtctggcaaaccatgcaggcatgtatcgatcgcgggatgaacaccgaaggcgtactgccaggcccgc

SEQ ID NO: 432503 - DNA, 75 bp, synthetic construct
  source 1..75: mol_type = other DNA
gcgacaacgggatgcgttttcataacggcaacctgccgctgcatgaaaacggtatgcaaatccacgcctataacg

SEQ ID NO: 432504 - DNA, 75 bp, synthetic construct
  source 1..75: mol_type = other DNA
acaactggcagcctggctggggctaacgccatcgcaatatagtagcggcggaaaatcaaagcttggcaggataac

SEQ ID NO: 432505 - DNA, 75 bp, synthetic construct
  source 1..75: mol_type = other DNA
cgacaacatccatcgcgccgctgaccggcagaaaatcctgctggtttgcaaaacaccagccgatttcctgacgct

SEQ ID NO: 432506 - DNA, 75 bp, synthetic construct
  source 1..75: mol_type = other DNA
gtttctggacgctgcaaaaagttatcgacaacattcatcgcgccgccgatcgacagaaaattcctgctggtttgt

SEQ ID NO: 432507 - DNA, 75 bp, synthetic construct
  source 1..75: mol_type = other DNA
ccgtaccgggacggcaccacgcacgtcattttcgaaccattggatttcattgcaaggctggccgccctggtaccg

SEQ ID NO: 432508 - DNA, 75 bp, synthetic construct
  source 1..75: mol_type = other DNA
tcaaccacagcaagtacagtctccaaactctataccgcagcgcaagaggcatacacttattatacggttgcaatg

SEQ ID NO: 432509 - DNA, 75 bp, synthetic construct
  source 1..75: mol_type = other DNA
gtgcgctaccagctcaagacgccgtaccgggacggcaccacgcacgtcattttcgaaccattggatttcattgca

SEQ ID NO: 432510 - DNA, 75 bp, synthetic construct
  source 1..75: mol_type = other DNA
ctggtttgtaaaacacccgccgatttcctgacgctggtgaaaggtggcgttccggtgaatcgcattaacgttggc

SEQ ID NO: 432511 - DNA, 75 bp, synthetic construct
  source 1..75: mol_type = other DNA
cacctgccggagccaaaaccccgcctgccctcttccgaaggcgactggtcgcatgtattccaggatgtgacgtgg

SEQ ID NO: 432512 - DNA, 75 bp, synthetic construct
  source 1..75: mol_type = other DNA
tggatgaggaatttttggggcgtttgagtgcagaagagcaggagctgtttatgcagctggtgcgcaagatgatga

SEQ ID NO: 432513 - DNA, 75 bp, synthetic construct
  source 1..75: mol_type = other DNA
tggtatgacccaatgaaaccggataccaaatttgataaacccggaaaatcgccctttatggatatggacctggtg

SEQ ID NO: 432514 - DNA, 75 bp, synthetic construct
  source 1..75: mol_type = other DNA
gtgggtgctgggcatcgtttaccgcgtcattgccacgcacctggtcaagaaagcgggccatacccaccaagtggc

SEQ ID NO: 432515 - DNA, 75 bp, synthetic construct
  source 1..75: mol_type = other DNA
ttcattgcaaggctggccgccctggtaccgaagcccagagtcaacctaacccgcttccacggggtgttcgcaccc

SEQ ID NO: 432516 - DNA, 75 bp, synthetic construct
  source 1..75: mol_type = other DNA
gcggttatgcaatcgtggttcgccgcgatgagaaaataatcccccagcacgtcgtaatgaaagaagccaatgagc

SEQ ID NO: 432517 - DNA, 75 bp, synthetic construct
  source 1..75: mol_type = other DNA
ttcagaccgtgcgtcttgacagtatgtcgctgtttgacgtcggacaggcccgcctgaaagacggctcgacaaaag

SEQ ID NO: 432518 - DNA, 75 bp, synthetic construct
  source 1..75: mol_type = other DNA
caggccggcaggtaaatgtactgatgatgctgctttatggcagtaacggaacagagggggcacgatatcttggca

SEQ ID NO: 432519 - DNA, 75 bp, synthetic construct
  source 1..75: mol_type = other DNA
ttcgtaaacgatgacggcagccgcccagtgctggaagagctgaaaaaacacggtgttaaatatatcgccctgcgc

SEQ ID NO: 432520 - DNA, 75 bp, synthetic construct
  source 1..75: mol_type = other DNA
gatgcgtcttggtcgcctgcagaaacatctgtttgtggaaggaaaacgcacgggagataaagagtatgcagaggt

SEQ ID NO: 432521 - DNA, 75 bp, synthetic construct
  source 1..75: mol_type = other DNA
acggattaacgcacaaaggatttatttgtaacccttacccggtaaatgacgtttacctggtaatgctgccggagg

SEQ ID NO: 432522 - DNA, 75 bp, synthetic construct
  source 1..75: mol_type = other DNA
gtggttacccgccgtcatgagcagttggttgtcgaattgggtttagaggaaactgcggcaagaagacttctcgat

SEQ ID NO: 432523 - DNA, 75 bp, synthetic construct
  source 1..75: mol_type = other DNA
tgtctataactgttatgcttacgagctttattattaaatcacttgtcgtattggtaaagttcaaattacttcgtg

SEQ ID NO: 432524 - DNA, 75 bp, synthetic construct
  source 1..75: mol_type = other DNA
ttgtttctagaccttaatatcgcgttgccctactacaaaagggtatacgaggcgatgtcccagcgttataacctc

SEQ ID NO: 432525 - DNA, 75 bp, synthetic construct
  source 1..75: mol_type = other DNA
atcaatcgagttgcctatatcgcaattgattcgagaggtggttaatcgtaacctcccggtattctggctggcgac

SEQ ID NO: 432526 - DNA, 75 bp, synthetic construct
  source 1..75: mol_type = other DNA
tttctgcgttgttctgattgccagtaacaacggtagtgaaattttacagggcttgaagtccagagctagtaacgt

SEQ ID NO: 432527 - DNA, 75 bp, synthetic construct
  source 1..75: mol_type = other DNA
gttattttatttgttactgatattttttataaattaaatgttttttattctttgttctttgggtgttgtacaggt

SEQ ID NO: 432528 - DNA, 75 bp, synthetic construct
  source 1..75: mol_type = other DNA
gggcatgtgcgcggcgaaactgaaacggaagtgcgatatagcaaagacctcaaaccaattcatatgattgaagtc

SEQ ID NO: 432529 - DNA, 75 bp, synthetic construct
  source 1..75: mol_type = other DNA
ctgctgagtgatgttctggcagacgacggcgtctattatttgaaccttgaaagcgataatgaaagcggaaagaaa

SEQ ID NO: 432530 - DNA, 75 bp, synthetic construct
  source 1..75: mol_type = other DNA
aatttcggacgccagccgggggatttctttgcccgtacggtgtttgtgctgctgcacaatctgtgtccggattgt

SEQ ID NO: 432531 - DNA, 75 bp, synthetic construct
  source 1..75: mol_type = other DNA
tatccccggatgactggtcagcactggaagaggctgaacatcagctttactggctgcgggcacttgccggtggac

SEQ ID NO: 432532 - DNA, 75 bp, synthetic construct
  source 1..75: mol_type = other DNA
tttctgtccggtcaggggcgacagttatccccggatgactggtcagcactggaagaggctgaacatcagctttac

SEQ ID NO: 432533 - DNA, 75 bp, synthetic construct
  source 1..75: mol_type = other DNA
gcttgcgcgtcgtgttttgcggtattaaccctggtaagtcatcagcccatacgggatttcattttgcccatcccg

SEQ ID NO: 432534 - DNA, 75 bp, synthetic construct
  source 1..75: mol_type = other DNA
atgaacctggttgatgcatttgtcactaaagtgatatccggaccgtatgaagaatacggaaaatggtgggtggat

SEQ ID NO: 432535 - DNA, 75 bp, synthetic construct
  source 1..75: mol_type = other DNA
cagcttttgctgacggtgggcgaggtgcgggtacaagtaacgcagccgggtctcacgcaattggagccgtcgctg

SEQ ID NO: 432536 - DNA, 75 bp, synthetic construct
  source 1..75: mol_type = other DNA
aatcacaattgaagcgaaccagactgctgattttgaagacaatgacttcagcggcaaacgctccctgatggagtc

SEQ ID NO: 432537 - DNA, 75 bp, synthetic construct
  source 1..75: mol_type = other DNA
ggttgctttcttttactgcggcattaaccgattacaaaatttatttgctgacgatccgtagcaatatggatgttc

SEQ ID NO: 432538 - DNA, 75 bp, synthetic construct
  source 1..75: mol_type = other DNA
acgattcgtagcaatatggatgttctgactggattacctggtcgtcgggttcttgatgaatcctttgatcatcaa

SEQ ID NO: 432539 - DNA, 75 bp, synthetic construct
  source 1..75: mol_type = other DNA
ggccgactaccttgtgggctttgatgctaatggtgacaccattcaggcaacaaaagcggctgcggcggtccgtaa

SEQ ID NO: 432540 - DNA, 75 bp, synthetic construct
  source 1..75: mol_type = other DNA
ttctgctcagggtgttaatgaaatcatcagtaagattggtgccgatgctgtggcattgcctgagaatttccgcat

SEQ ID NO: 432541 - DNA, 75 bp, synthetic construct
  source 1..75: mol_type = other DNA
aacggcgagcgtaactcccagaaatcactggcagaatggattgaagactgggccgactaccttgtgggctttgat

SEQ ID NO: 432542 - DNA, 75 bp, synthetic construct
  source 1..75: mol_type = other DNA
gctgtggcaaaacagatccagcagtaccagacgcagctgcagcagtatgaaaatatgctcaaaaatacagtcgca

SEQ ID NO: 432543 - DNA, 75 bp, synthetic construct
  source 1..75: mol_type = other DNA
cagtacgtgcagacagtgtgtggccgttaatgacgctggattacatgcaggatctggatggtggatggcagcctg

SEQ ID NO: 432544 - DNA, 75 bp, synthetic construct
  source 1..75: mol_type = other DNA
gtgaaggaagagcggttgtcactgattgcggagggtaagtggtatcctttgtcctaccggcagtgggtggagcaa

SEQ ID NO: 432545 - DNA, 75 bp, synthetic construct
  source 1..75: mol_type = other DNA
atgctgcctgccgtcggcgcaaggcgtatatccgtgtgcagttccgggatccacaattgcgtaagctgcattacc

SEQ ID NO: 432546 - DNA, 75 bp, synthetic construct
  source 1..75: mol_type = other DNA
ccattcatcagtggggtggcctgcctggtatgccaccgggaccggcggccattggcgcacgtccgtatatgggct

SEQ ID NO: 432547 - DNA, 75 bp, synthetic construct
  source 1..75: mol_type = other DNA
agcagtatccacccggatttgacgttatccagggctgagccgcaggcagggccatttgagattgcaggtgcagat

SEQ ID NO: 432548 - DNA, 75 bp, synthetic construct
  source 1..75: mol_type = other DNA
gtgaagcctgaatgtcgttacaatccggaacttgctgccagtgatgaagtggagcctggcttccgacgcgatcct

SEQ ID NO: 432549 - DNA, 75 bp, synthetic construct
  source 1..75: mol_type = other DNA
gctaaccagcttgccagtgctcaaacgaaccagttgctgcaaatccgctcgcttctggtatcccaacaaaacgct

SEQ ID NO: 432550 - DNA, 75 bp, synthetic construct
  source 1..75: mol_type = other DNA
acctggcagacttacaaagccaggcaaccggcgcacaaggtcaaatggaagcaattcaggcggccaatcaacttg

SEQ ID NO: 432551 - DNA, 75 bp, synthetic construct
  source 1..75: mol_type = other DNA
acctggcagatttgcaaactcaggcaaccggcgcgcaagggcaaatggaagctattcaggcggccaaccagctcg

SEQ ID NO: 432552 - DNA, 75 bp, synthetic construct
  source 1..75: mol_type = other DNA
gcaaatccgctcgcttctggtatcccagcaaaacgctgcagcaacactggcacaggctgaggctgataaagaagc

SEQ ID NO: 432553 - DNA, 75 bp, synthetic construct
  source 1..75: mol_type = other DNA
ccaattcgaccatcaacaaattattgcaggcacaggacactcttaattactacaaaaatcaggccgggagtctcg

SEQ ID NO: 432554 - DNA, 75 bp, synthetic construct
  source 1..75: mol_type = other DNA
cattacaaagagggattttagccgctaaaaaagctttaatagttcctttcgtggcgtccgtcatggcattaccgg

SEQ ID NO: 432555 - DNA, 75 bp, synthetic construct
  source 1..75: mol_type = other DNA
atgccatcttgttagatcttaataaagctatcgatgcccattaccagtggctggtaaatatgtttcacagcgtcg

SEQ ID NO: 432556 - DNA, 75 bp, synthetic construct
  source 1..75: mol_type = other DNA
acaaaccgtgacagcatgacagagcaggcaatgccgcaactgtaccgcacactttcttccctgcgttataccctc

SEQ ID NO: 432557 - DNA, 75 bp, synthetic construct
  source 1..75: mol_type = other DNA
caggaagaaatggctaacgaatttcgtgatctgcttgttgagaaattcaaggacagcaaagtagaaacctttatt

SEQ ID NO: 432558 - DNA, 75 bp, synthetic construct
  source 1..75: mol_type = other DNA
tgccgtcagtgtgcttaacctgggtactattgatgaaccaggtcacgcagataacactgccactctcaaactgaa

SEQ ID NO: 432559 - DNA, 75 bp, synthetic construct
  source 1..75: mol_type = other DNA
aagacattatgccagtggcatttgaatttaaatgcgttccgtttgaaggtctgaaagaacgtccgtttaaattac

SEQ ID NO: 432560 - DNA, 75 bp, synthetic construct
  source 1..75: mol_type = other DNA
aagacattatgccagtagcatttgagtttaaatgcgttccatttgaaggcctgaaagaacgcccgtttaaattac

SEQ ID NO: 432561 - DNA, 75 bp, synthetic construct
  source 1..75: mol_type = other DNA
ctttcagacggctggacagtgatttcagacggcctgcatgatgtgcaggccatgaccgacaccatcagcgataaa

SEQ ID NO: 432562 - DNA, 75 bp, synthetic construct
  source 1..75: mol_type = other DNA
tcaaatgggcttacccgcactcgatctctttcctcgtgaactgtgggcgcgggtaatgggacgtcgcctgcgcac

SEQ ID NO: 432563 - DNA, 75 bp, synthetic construct
  source 1..75: mol_type = other DNA
tggattactgctctcgtttactaatatcgttaacgaaggtatggcgcgacaggtagcacaacaattacgtaaagc

SEQ ID NO: 432564 - DNA, 75 bp, synthetic construct
  source 1..75: mol_type = other DNA
ctctttccgcgagagctgtgggcgcgggtgatggggcgtcgccttcgtacccagacgcgctttgatttggcgtta

SEQ ID NO: 432565 - DNA, 75 bp, synthetic construct
  source 1..75: mol_type = other DNA
gccggtggtacccagatgggcttcagggcagattctttcgcccccatcgcatacgtgcagccgggctcctttggt

SEQ ID NO: 432566 - DNA, 75 bp, synthetic construct
  source 1..75: mol_type = other DNA
agcagtacaggaagaaatggctaacgaatttcgtaatctgcttgttgaaaaattcaaagacagcaaagtagaaac

SEQ ID NO: 432567 - DNA, 75 bp, synthetic construct
  source 1..75: mol_type = other DNA
cgttgcgcgtggctggtggtgccggtggaacagattgcccaattccggcagcaggcgtcactggcgccgtgtgct

SEQ ID NO: 432568 - DNA, 75 bp, synthetic construct
  source 1..75: mol_type = other DNA
gcggcaagtgctgcagcattgctgcgcgatttctccacctatgagaaaccgaaggaaaccgctgcgccgctggac

SEQ ID NO: 432569 - DNA, 75 bp, synthetic construct
  source 1..75: mol_type = other DNA
tgctaatggtgacaccattcaggcaaccaaagcggctgcggcagtccgtaaaatcacaattgaagcaaaccagac

SEQ ID NO: 432570 - DNA, 75 bp, synthetic construct
  source 1..75: mol_type = other DNA
tattcagctggaagcggtgcaggaagatatggctaacgaatgtcacgaacggtgcaatagtgatccacacccaac

SEQ ID NO: 432571 - DNA, 75 bp, synthetic construct
  source 1..75: mol_type = other DNA
caattaatcaaatccatgctcttatttctgctcagggtgttaatgaaattatcagtaagattggtgccgatgctg

SEQ ID NO: 432572 - DNA, 75 bp, synthetic construct
  source 1..75: mol_type = other DNA
gcgcatttcgacgcttttcaggaagggttgctttcttttactgcggcattaaccgattacaaaatttatttgctg

SEQ ID NO: 432573 - DNA, 75 bp, synthetic construct
  source 1..75: mol_type = other DNA
tattacgcaccctggcaacttacttagccagttggacgcgtgattacgaaacggtttatcgctacgggggcgaag

SEQ ID NO: 432574 - DNA, 75 bp, synthetic construct
  source 1..75: mol_type = other DNA
taatgatgaagaggcatgccgtgccggagttcgtatttgccagttagtcgataaccacgcaattgcacattctga

SEQ ID NO: 432575 - DNA, 75 bp, synthetic construct
  source 1..75: mol_type = other DNA
atgtcgacatcagtgcgggaggtgggaaatgattcagtatctgaacgtcttttttacgatatctacccgtacatt

SEQ ID NO: 432576 - DNA, 75 bp, synthetic construct
  source 1..75: mol_type = other DNA
gaccgctgattttgaagacaatgacttcagcggcaaacgctccctgatggagtctgtcgaagcgaagaccaaaga

SEQ ID NO: 432577 - DNA, 75 bp, synthetic construct
  source 1..75: mol_type = other DNA
aacgctttggcctcaatgcgcaggatagggtgttcgggctgtcatcattgagctttgacctgtcggtttacgatg

SEQ ID NO: 432578 - DNA, 75 bp, synthetic construct
  source 1..75: mol_type = other DNA
ctgtggtcgaacttgttccatatcggtattctggggatcttcttcggtcatctgttcggcatgttaacgccgcac

SEQ ID NO: 432579 - DNA, 75 bp, synthetic construct
  source 1..75: mol_type = other DNA
cgtcacgttccagggcggcgcatccacgcatcttgatggcgtcgcctttatcttccgtgttcatctggtgctggg

SEQ ID NO: 432580 - DNA, 75 bp, synthetic construct
  source 1..75: mol_type = other DNA
acacctggcgcgcctcctcaagtcaaatgctcgataaacgcgggatggtgatatggtcgaatctgttccatatcg

SEQ ID NO: 432581 - DNA, 75 bp, synthetic construct
  source 1..75: mol_type = other DNA
ttcggcgctgacaggtctgacgctttccagcattttcattgtctacaccgccgcctctatcgccagtactttcgt

SEQ ID NO: 432582 - DNA, 75 bp, synthetic construct
  source 1..75: mol_type = other DNA
ttcactaaccgtgtctttttaatcggtctgatcatcgcgcaattagcattggttattgtgttatcagcgatgatt

SEQ ID NO: 432583 - DNA, 75 bp, synthetic construct
  source 1..75: mol_type = other DNA
taatcggtttgataatcgcgcaattagctctggttatcgtgttatcagcgatgattcaaaaactcagcgcgggcg

SEQ ID NO: 432584 - DNA, 75 bp, synthetic construct
  source 1..75: mol_type = other DNA
tatcattataaaactgtttagaatgttttttaatgatgctaaaggatatcattttctatggactgctgatgctga

SEQ ID NO: 432585 - DNA, 75 bp, synthetic construct
  source 1..75: mol_type = other DNA
taatgcagttacatgcaatagaagctcattatgccaaaatgagtttaataaacagtataactggaaagctttaat

SEQ ID NO: 432586 - DNA, 75 bp, synthetic construct
  source 1..75: mol_type = other DNA
ttactcatgatttaacaaagcctgttggtatgagaagaaaacttgttgatattaccttgctgagtgagtttggtt

SEQ ID NO: 432587 - DNA, 75 bp, synthetic construct
  source 1..75: mol_type = other DNA
agcgcgatttaagcggcttcggcaatatgctgtttatggcgttaatcggcattgtcatcgcctcgttggtgaact

SEQ ID NO: 432588 - DNA, 75 bp, synthetic construct
  source 1..75: mol_type = other DNA
ctggtgacaactgagcccgcgtttcatatcgtaatttctctgtgcaaaaatcatcctccccgggatcggagaatc

SEQ ID NO: 432589 - DNA, 75 bp, synthetic construct
  source 1..75: mol_type = other DNA
cgcccaggtgtcgtttatgcttattggatacccgtggtattccgggaatattctgtttgcctttgccgtcacggg

SEQ ID NO: 432590 - DNA, 75 bp, synthetic construct
  source 1..75: mol_type = other DNA
tacaaccccgggctggcttgcaaacttatatggcgcaagtctatggctggatgaccgttggcttgttgctgaccg

SEQ ID NO: 432591 - DNA, 75 bp, synthetic construct
  source 1..75: mol_type = other DNA
accctcgaacactatccggggatgactgaaaaagcactggcagaaattgtcgatgaagcgcgtaaccgctggccg

SEQ ID NO: 432592 - DNA, 75 bp, synthetic construct
  source 1..75: mol_type = other DNA
attgtctttgtgggcctgaccgcctatgacactcagaaactgaaaaacatgggtgagcagattgatacccgcgat

SEQ ID NO: 432593 - DNA, 75 bp, synthetic construct
  source 1..75: mol_type = other DNA
tcactggcactggcggcgtcactggacgcgcaggggtacagcgtcagtgacatcatccatatcctgatggcggaa

SEQ ID NO: 432594 - DNA, 75 bp, synthetic construct
  source 1..75: mol_type = other DNA
gattccgaaagagggggcgatggcattctttgatgtattcgccatgcctgccgatgccaaaaataaagacgaagc

SEQ ID NO: 432595 - DNA, 75 bp, synthetic construct
  source 1..75: mol_type = other DNA
caataaagcagccacgccgctggtgagtgcggaagtccgtgataacccgggtatttatccgcctgcggatgttcg

SEQ ID NO: 432596 - DNA, 75 bp, synthetic construct
  source 1..75: mol_type = other DNA
gcgtcaaaccgcgcgaaggaagcgaagaatggcgtgaatgtctcgttctcgattccaaaagaaggggcgatggcg

SEQ ID NO: 432597 - DNA, 75 bp, synthetic construct
  source 1..75: mol_type = other DNA
caaactggtagatcgtccaacggtgcaagccaatgaagtttcaaagcaggagctacacgcaggcgggcgtaagct

SEQ ID NO: 432598 - DNA, 75 bp, synthetic construct
  source 1..75: mol_type = other DNA
agctgcacgcaggcgggcgtaagctgattgaaaaaattgaggattatcaaccacaagcgttggcgatcctcggca

SEQ ID NO: 432599 - DNA, 75 bp, synthetic construct
  source 1..75: mol_type = other DNA
tatggcgtgctggggatgagtattcccgtgcgtactatgcagcaatttttaagaaacgccatcgataaaaacctc

SEQ ID NO: 432600 - DNA, 75 bp, synthetic construct
  source 1..75: mol_type = other DNA
atgaagatatccgggctgccggaagtgatgaacgccgtgatgcgggaactggatgcgccggacaactggacgatg

SEQ ID NO: 432601 - DNA, 75 bp, synthetic construct
  source 1..75: mol_type = other DNA
acggcaaaactaagcagcaactggtgcgcgagatgatggcgctgagcgacaaaatcgaactgcatactttcggta

SEQ ID NO: 432602 - DNA, 75 bp, synthetic construct
  source 1..75: mol_type = other DNA
cgtaatgatgccgatacaaaaattattgtctggtacaattccgtaatagaaaaaaatgtgtttctcagagaggtt

SEQ ID NO: 432603 - DNA, 75 bp, synthetic construct
  source 1..75: mol_type = other DNA
tgtgggcgacgaccgggattggctataacgtcgataaagttaaagcggtgctgggcgaaaacgcgcccgtcgata

SEQ ID NO: 432604 - DNA, 75 bp, synthetic construct
  source 1..75: mol_type = other DNA
ggaagaatctcgacccggagctgctgaagttggtcgccaaacacgatcccgacaataaatttgctatgccctata

SEQ ID NO: 432605 - DNA, 75 bp, synthetic construct
  source 1..75: mol_type = other DNA
aaagagactggtatcaaagtcgtctacgatgtttttgattctaacgaagtgctggaaggcaaattaatggcgggg

SEQ ID NO: 432606 - DNA, 75 bp, synthetic construct
  source 1..75: mol_type = other DNA
gcatgacggacagttggctgcaacgccttttgacctggactcccggacagacggatatgattaaaaccgtcgctc

SEQ ID NO: 432607 - DNA, 75 bp, synthetic construct
  source 1..75: mol_type = other DNA
aacggtacagaaacccacacctatgtcgatgttccaggcctttccaccatgctggaaggtgccagccgtccagga

SEQ ID NO: 432608 - DNA, 75 bp, synthetic construct
  source 1..75: mol_type = other DNA
tctggctcgctacccacgcaccttgcaggaagactgcgagaagctaaacaaacgtaaagtggatctggttttcgc

SEQ ID NO: 432609 - DNA, 75 bp, synthetic construct
  source 1..75: mol_type = other DNA
cgcggcggaaatcgccatggagcataacctcggtctgacgtgtgacccggttgctggacaggtgcaggtaccgtg

SEQ ID NO: 432610 - DNA, 75 bp, synthetic construct
  source 1..75: mol_type = other DNA
ggcccacgacagtatgagcgtaatgttggtaagttaccgacgccagtacaaggggataggagttatctatcccca

SEQ ID NO: 432611 - DNA, 75 bp, synthetic construct
  source 1..75: mol_type = other DNA
ttgctggaggtctctgaaaacagcaaacgtgcagtgattctggtagccgcctggcttggcgatgcccgcctgatc

SEQ ID NO: 432612 - DNA, 75 bp, synthetic construct
  source 1..75: mol_type = other DNA
aacgtgcagtgattctggtagccgcctggcttggcgatgcccgcctgatcgacaacaaaatcgtcgaactggcgt

SEQ ID NO: 432613 - DNA, 75 bp, synthetic construct
  source 1..75: mol_type = other DNA
cattggcattaatggtcatattgttcttccggcaaaagacacaagcctggtttatggcgatacctattcctattt

SEQ ID NO: 432614 - DNA, 75 bp, synthetic construct
  source 1..75: mol_type = other DNA
aatattccgttactgatgcaactcggaaacatttatggagcacagaagggattaagtacaaatacggcggtatac

SEQ ID NO: 432615 - DNA, 75 bp, synthetic construct
  source 1..75: mol_type = other DNA
attttaaggctaattttagtcgtgaaagaggtatatcacccggtgatgtattgtatcttcattgtgattttacga

SEQ ID NO: 432616 - DNA, 75 bp, synthetic construct
  source 1..75: mol_type = other DNA
gaactgctgaaaatgtgtgattacaacggcctgtctatatctggcctgatgatgcacaacgagctagcgctgcgc

SEQ ID NO: 432617 - DNA, 75 bp, synthetic construct
  source 1..75: mol_type = other DNA
cagcgggcggctgccagtggcatctggtgcgcatattgttgattttcctgtagcaaagaacattatcttccatcc

SEQ ID NO: 432618 - DNA, 75 bp, synthetic construct
  source 1..75: mol_type = other DNA
tttggacaacaagacctgccaagaagatccgctggaactatatcgaactttgggctttattgaagaggtattgtt

SEQ ID NO: 432619 - DNA, 75 bp, synthetic construct
  source 1..75: mol_type = other DNA
ggcaggaaggtatgcatgaacaagccattaaaattgctttgcgcatgctggaacagggcattgatcgtgaccagg

SEQ ID NO: 432620 - DNA, 75 bp, synthetic construct
  source 1..75: mol_type = other DNA
ttttaattctgtgcttgagttgttataccgcgagtgctggcactgatgataacgtaggatatattgttgggaata

SEQ ID NO: 432621 - DNA, 75 bp, synthetic construct
  source 1..75: mol_type = other DNA
atgcccgtgtcatcattgttgctaacaagataggccaggtaaaaacaggcgtattcaaatacgttaaacagtatt

SEQ ID NO: 432622 - DNA, 75 bp, synthetic construct
  source 1..75: mol_type = other DNA
tatgaggttactggtaaaggtgtatggactgtagtaccgaagggctttcgtctgggaagtgaagaagctctcgcc

SEQ ID NO: 432623 - DNA, 75 bp, synthetic construct
  source 1..75: mol_type = other DNA
atgaaaaagcacatgccaacgatattaaaaagcgctttgccaatcagaatgtcactaccggccagatcgtgctgt

SEQ ID NO: 432624 - DNA, 75 bp, synthetic construct
  source 1..75: mol_type = other DNA
ccagttaatttcggccatcatcattcttgccacggcagcatggatgttctggcgtacctggcgcggtgagaagct

SEQ ID NO: 432625 - DNA, 75 bp, synthetic construct
  source 1..75: mol_type = other DNA
ccatcgtgggcatgtacacgattatgatgtggagtttcgcgagcatgagcacggtcacgaccatgaccacgatca

SEQ ID NO: 432626 - DNA, 75 bp, synthetic construct
  source 1..75: mol_type = other DNA
gccgagggcgacggcggacgctctggtcagagaataccgtcgccagtatcgcgggctggggattatttaccctgc

SEQ ID NO: 432627 - DNA, 75 bp, synthetic construct
  source 1..75: mol_type = other DNA
agagtactgcagaaaaaaacatggcctttcgactgatgcgttatgccactgccgtcatgcagcgccatctggaca

SEQ ID NO: 432628 - DNA, 75 bp, synthetic construct
  source 1..75: mol_type = other DNA
cgcatgatgcggtatttaaaacctttatgttctcgcccgatacggcgcgagattttctcgaaatacatctgccag

SEQ ID NO: 432629 - DNA, 75 bp, synthetic construct
  source 1..75: mol_type = other DNA
acgctcttccttaatgccaaactgccaaccggtaaagaatttatgccgcgtgaaatcagtttgttgattggtgaa

SEQ ID NO: 432630 - DNA, 75 bp, synthetic construct
  source 1..75: mol_type = other DNA
atggaatctctattcatttatttttttgttacgatagtgttaattgtttttacgtatttttttaaacataataat

SEQ ID NO: 432631 - DNA, 75 bp, synthetic construct
  source 1..75: mol_type = other DNA
tacagaagtcagacgctttgcccgtaccaaagtcgggcgctaccttatgggaccgaaaagtggtcgcataaagaa

SEQ ID NO: 432632 - DNA, 75 bp, synthetic construct
  source 1..75: mol_type = other DNA
atgttgaagcgcctactaaaaagaccctctttgaatttactcgcctggctattgttggccgctttttatatctct

SEQ ID NO: 432633 - DNA, 75 bp, synthetic construct
  source 1..75: mol_type = other DNA
ggacctggacatccgcatcccgtatgccaccgacccggcgggaaaccggctgccggacccggagctacacccgga

SEQ ID NO: 432634 - DNA, 75 bp, synthetic construct
  source 1..75: mol_type = other DNA
tccgctgacacacgaagaactgatgcaccatgtaccgagtattttcggtgaagaccggcatacctcccgcagcga

SEQ ID NO: 432635 - DNA, 75 bp, synthetic construct
  source 1..75: mol_type = other DNA
tcaaaactgggtctgattgaaccctttatgggggaaatctacggcaatccgcaggccacccagaaaatgctcgat

SEQ ID NO: 432636 - DNA, 75 bp, synthetic construct
  source 1..75: mol_type = other DNA
agatccagacctgtagcaaagagcaactggtgaacacttacgacaacacgctggtttacgtcgactatattgttg

SEQ ID NO: 432637 - DNA, 75 bp, synthetic construct
  source 1..75: mol_type = other DNA
tcagcgtgattaatattgtcctgacactaagctctttcttatggcttaatcgaccactggcctgcctgtttattc

SEQ ID NO: 432638 - DNA, 75 bp, synthetic construct
  source 1..75: mol_type = other DNA
aacggctgcgtctgtggtcagtctctgggggaagtgcgtgttccgcaccggggaaatgtcgtggaaacagtcatt

SEQ ID NO: 432639 - DNA, 75 bp, synthetic construct
  source 1..75: mol_type = other DNA
aacggctgcgtctgtggacagtctctgggggaagtgcgtgttccgcaccggggaaatgtcgtggatacagtcatt

SEQ ID NO: 432640 - DNA, 75 bp, synthetic construct
  source 1..75: mol_type = other DNA
tcaggagaatatgctgaaaggcggaatttcaggtcgcagtgcaaaaggaaaacgtatccacccccgtgccattca

SEQ ID NO: 432641 - DNA, 75 bp, synthetic construct
  source 1..75: mol_type = other DNA
gaaggggcttacgaggtggtgggggtatttgaccggatagaggacaagcgtgatgccatgcagtcgctgctactg

SEQ ID NO: 432642 - DNA, 75 bp, synthetic construct
  source 1..75: mol_type = other DNA
gaaggggcttacgaggtggtgggcgtgtttgaccggatggaggacaagcgtgatgccatgcagtcgctgctactg

SEQ ID NO: 432643 - DNA, 75 bp, synthetic construct
  source 1..75: mol_type = other DNA
aacggctgcgtctgtgggcagtctctgggggaagtgcgtgttccgcaccggggaaatgtcgtggagacagttatt

SEQ ID NO: 432644 - DNA, 75 bp, synthetic construct
  source 1..75: mol_type = other DNA
ctgatttacaccctgcgtaaggcgcaccgcagcggcgcgaagttcatgatgaacaacagcagcctgtttgccatt

SEQ ID NO: 432645 - DNA, 75 bp, synthetic construct
  source 1..75: mol_type = other DNA
ccaccgtaggcgaaatgctttcagaagagtttttaaagccgttgaatatcactcaggcagagctggcgcaggtta

SEQ ID NO: 432646 - DNA, 75 bp, synthetic construct
  source 1..75: mol_type = other DNA
ccaatgaaattgaaaacttcgagctgtttattgctcgctgccgggcggcggccgtaactcctgttgatgctgcca

SEQ ID NO: 432647 - DNA, 75 bp, synthetic construct
  source 1..75: mol_type = other DNA
ctgatttacacgctgcgtaaggcacaccgcaccggcgcgaagttcatgatgaacaacaacagcctgtttgccatt

SEQ ID NO: 432648 - DNA, 75 bp, synthetic construct
  source 1..75: mol_type = other DNA
tgccattccggaagaactggatcgcaccattctgacgctgctgaaagatgaggtggtgatgcgccaggaagccac

SEQ ID NO: 432649 - DNA, 75 bp, synthetic construct
  source 1..75: mol_type = other DNA
tgccggatattgccaccgatgcaaaagccattgcgtttggtaacttcaaacgtggctataccatcgttgatcgca

SEQ ID NO: 432650 - DNA, 75 bp, synthetic construct
  source 1..75: mol_type = other DNA
cggagtacttccggactccactggcgacagcggttacgggcggcgatcgcatttctaatagtgaaagcccaattc

SEQ ID NO: 432651 - DNA, 75 bp, synthetic construct
  source 1..75: mol_type = other DNA
ctctcatgggggaaatctacggcaacccgcaggctacccagaaaatgctggacgatgccttcttcaacgtggagg

SEQ ID NO: 432652 - DNA, 75 bp, synthetic construct
  source 1..75: mol_type = other DNA
ctgatttacacgctgcgtaaggcacaccgcactggcgcgaaattcatgatgaacaacaacagcctgtttgccatc

SEQ ID NO: 432653 - DNA, 75 bp, synthetic construct
  source 1..75: mol_type = other DNA
cgaatttgccgaacaggaagaaattgcctttaccaccggcgatggtaccaagaagccgaaagggttcctggcgta

SEQ ID NO: 432654 - DNA, 75 bp, synthetic construct
  source 1..75: mol_type = other DNA
gcaggtggaaaccctgaacgggaaactcagcgagctggaaaatctcaaaagcgatcttgaaaaagagctgcttga

SEQ ID NO: 432655 - DNA, 75 bp, synthetic construct
  source 1..75: mol_type = other DNA
aataaagttgccagtgaacacaaagaagcgtttatcggatttatgcgcaaggggcgtgaagacggtctgcgtgag

SEQ ID NO: 432656 - DNA, 75 bp, synthetic construct
  source 1..75: mol_type = other DNA
atggctgacattaaagatgtggagcaggtcgcgcaggagctgcaggcgaaattcgacgattttaaggaaaaaaac

SEQ ID NO: 432657 - DNA, 75 bp, synthetic construct
  source 1..75: mol_type = other DNA
ggggcttacgaagtggtggggtttttgaccggattgaggaaaagcgtgatgccatgcagtcgctggtcctgccgc

SEQ ID NO: 432658 - DNA, 75 bp, synthetic construct
  source 1..75: mol_type = other DNA
acaacatcgtttcccgcgaaacactgctggaagcaaaaaaacatcctgatcagtatcgcgatctggtggtacgtg

SEQ ID NO: 432659 - DNA, 75 bp, synthetic construct
  source 1..75: mol_type = other DNA
cattgagcgagcgaaaagtattaagcaaggcggcgcgaaatatgactgggtttctggcttacaggtcggtattgc

SEQ ID NO: 432660 - DNA, 75 bp, synthetic construct
  source 1..75: mol_type = other DNA
aaccaggcaagcgaagttcgcgccgcgccgatcttcccggaatataccgtctcgtggatcgaaaaagagattgat

SEQ ID NO: 432661 - DNA, 75 bp, synthetic construct
  source 1..75: mol_type = other DNA
cgcctgcgttccactcagcctaacctcagcgtgcgttaccatgcaggaatgagcaacgatttcctcgacgcctgc

SEQ ID NO: 432662 - DNA, 75 bp, synthetic construct
  source 1..75: mol_type = other DNA
tgggtaaactgcctacggcagcgattctcggcggcgtgttgctcaaccagaaactgaatccggcaacgctggaga

SEQ ID NO: 432663 - DNA, 75 bp, synthetic construct
  source 1..75: mol_type = other DNA
gtgctacttcatccagttgattttgcagattgaatctaacggtcactcggtgtcgtttggtcgtatggaccagta

SEQ ID NO: 432664 - DNA, 75 bp, synthetic construct
  source 1..75: mol_type = other DNA
cgccggggatacacaaaacatatgctgcgtctgcggcgggccggagagataaacggagagcatgtccctgaaatt

SEQ ID NO: 432665 - DNA, 75 bp, synthetic construct
  source 1..75: mol_type = other DNA
tcagccgttcttcgcctgccagacccgtgtgcgcgaccagagccgccgggaatataccaaacacatgctgcgtct

SEQ ID NO: 432666 - DNA, 75 bp, synthetic construct
  source 1..75: mol_type = other DNA
ccagacccgcgtgcgcgacccgggccgccggggatacacaaaacacatgctgcgtctgcgccgtgacggggagat

SEQ ID NO: 432667 - DNA, 75 bp, synthetic construct
  source 1..75: mol_type = other DNA
gggcgtgtttgaccggatagaggagatgcgtgatgccatgcagtcgctgattctgccgccaccggcacgccaggc

SEQ ID NO: 432668 - DNA, 75 bp, synthetic construct
  source 1..75: mol_type = other DNA
tgagcgcaaagccagtctggaagctcgtgcgctggaagcgttaagcaagaacgttaatccgtcgttgattaacga

SEQ ID NO: 432669 - DNA, 75 bp, synthetic construct
  source 1..75: mol_type = other DNA
gccgacattctgacaccacgacgccgggaggattacggtcaggacctgtggagtgcttatcagaccattcaggag

SEQ ID NO: 432670 - DNA, 75 bp, synthetic construct
  source 1..75: mol_type = other DNA
agacctatatcgacgaactgaagcaataccacaacccgcgctatggtcgtggtccggttggtggcaactattacg

SEQ ID NO: 432671 - DNA, 75 bp, synthetic construct
  source 1..75: mol_type = other DNA
aacgccgcagaaccttatcgcattaaaacggtgcgtaacaaaggctatctttttgcgcctcatgcatgggaataa

SEQ ID NO: 432672 - DNA, 75 bp, synthetic construct
  source 1..75: mol_type = other DNA
ataacgccacggagccttatcgcataaaaactgtgcgtaacaaaggctatctctttgcgcctcatgcgtgggaat

SEQ ID NO: 432673 - DNA, 75 bp, synthetic construct
  source 1..75: mol_type = other DNA
aaacggagaacatgtccctgaaatcattctgctcaactcccatgacggtacctcctgctaccagatgctgccggg

SEQ ID NO: 432674 - DNA, 75 bp, synthetic construct
  source 1..75: mol_type = other DNA
gcactgacttaccgttatggtgacgaacatcagcccgtcaccaccgccgacattctgacaccacgacgcagggag

SEQ ID NO: 432675 - DNA, 75 bp, synthetic construct
  source 1..75: mol_type = other DNA
atgctgaaaggcgggctttccggtcgcagtgcaaaaggaaaacgtatccacacccgtgccattcacagcatcgat

SEQ ID NO: 432676 - DNA, 75 bp, synthetic construct
  source 1..75: mol_type = other DNA
tggtgacgaacatcagccagtcaccaccgctgacattctgacaccacgacgcagggaggattacggtaagaacct

SEQ ID NO: 432677 - DNA, 75 bp, synthetic construct
  source 1..75: mol_type = other DNA
tcggggaggtgcgtgtcccgcataaaggcaacgtagtagagaaggtcattgaaggggcttacgaagtgctgggga

SEQ ID NO: 432678 - DNA, 75 bp, synthetic construct
  source 1..75: mol_type = other DNA
ccatacccgggccattcacagcattgataccgatattaagctcaaccgcgcattgtgggtaatggcagaaacgct

SEQ ID NO: 432679 - DNA, 75 bp, synthetic construct
  source 1..75: mol_type = other DNA
gttgaactgaaccagacactggatcgcgaacacgccatcgagatgctgcatagctgctggttgaaattgctggaa

SEQ ID NO: 432680 - DNA, 75 bp, synthetic construct
  source 1..75: mol_type = other DNA
atgcgattagcaagtcgttttggttatgcgaaccagatacgtcgtgaccgtccactgacacacgaagaactgatg

SEQ ID NO: 432681 - DNA, 75 bp, synthetic construct
  source 1..75: mol_type = other DNA
accgctgacattctgacaccacgacgcagggaggattacggtaaagacctgtggagcgcatatcagaccatccag

SEQ ID NO: 432682 - DNA, 75 bp, synthetic construct
  source 1..75: mol_type = other DNA
tggtgacgaacatcagccagtcaccaccgctgacattctgacaccacgacgcagggaggattacggtaaagacct

SEQ ID NO: 432683 - DNA, 75 bp, synthetic construct
  source 1..75: mol_type = other DNA
gttaggcggtgatgtccgtctcaccagcgaaaccttaaaactggcgctggcaaaaggtttacaggatgcgggcgt

SEQ ID NO: 432684 - DNA, 75 bp, synthetic construct
  source 1..75: mol_type = other DNA
gaatatgccgatatacggcaggtagagtcatcgacggcggtgttgtacttgtttagcgagcgatttatgacctat

SEQ ID NO: 432685 - DNA, 75 bp, synthetic construct
  source 1..75: mol_type = other DNA
atgctgatgcaagcgccatattacttccaggaagcgcagattgaagccgcgatcgccgcaatggatgttgcacct

SEQ ID NO: 432686 - DNA, 75 bp, synthetic construct
  source 1..75: mol_type = other DNA
acgcggtcgctatcagcaaatcaacctgcgtgatgcatacgttgatcacctgttcggttatatcaatgtcaaaaa

SEQ ID NO: 432687 - DNA, 75 bp, synthetic construct
  source 1..75: mol_type = other DNA
gaattgatcaaagtgcacaacacgccggacggcaatttccccaacggtattcctaacccgctactgccagaatgc

SEQ ID NO: 432688 - DNA, 75 bp, synthetic construct
  source 1..75: mol_type = other DNA
cagcgggatgatcccgtggctgctggtaagcgaactgttgtgcctgaaaggaaaaacgctgggcgaactggtgcg

SEQ ID NO: 432689 - DNA, 75 bp, synthetic construct
  source 1..75: mol_type = other DNA
gccgtaacggagttcgaacagcgtcgtgacgatcacgcctggcaaatcgaactcaaccgacgacgcaccctgcca

SEQ ID NO: 432690 - DNA, 75 bp, synthetic construct
  source 1..75: mol_type = other DNA
gaatttgtcacccaaccctggtttatcggtcattcacaacgagaaaaccgtcaacgtgcggtgcgttggtttacc

SEQ ID NO: 432691 - DNA, 75 bp, synthetic construct
  source 1..75: mol_type = other DNA
acgctaagcgaaggcgtgcgcggcgatttcggcagtatcagcattgcattaaccctgctgtgggcgctctttacc

SEQ ID NO: 432692 - DNA, 75 bp, synthetic construct
  source 1..75: mol_type = other DNA
gtgatttaactaccggcccaacccaaagtgcaaaaattatattttcggggacccctgtcacagggaaaacaaatg

SEQ ID NO: 432693 - DNA, 75 bp, synthetic construct
  source 1..75: mol_type = other DNA
attgattatcaggcacaaggccgtgaggcgcgcgtgagtgcggtttcctctgcgggtgaattgttgctggcgcgt

SEQ ID NO: 432694 - DNA, 75 bp, synthetic construct
  source 1..75: mol_type = other DNA
gcctatatctccagccagcgtaatcatctggaaaacgtagccaacgcgctcgataagcatctgcagtataacgtc

SEQ ID NO: 432695 - DNA, 75 bp, synthetic construct
  source 1..75: mol_type = other DNA
tgcttcctgttcgacgagaaagggcagttcatcgagggctattacattgtcggcctgctggcggaagcgttcctc

SEQ ID NO: 432696 - DNA, 75 bp, synthetic construct
  source 1..75: mol_type = other DNA
agtcatcatcaaagctgtgttcctggctgcgcttattaagacaaaagggaacgtggtgcaaattttcaagataac

SEQ ID NO: 432697 - DNA, 75 bp, synthetic construct
  source 1..75: mol_type = other DNA
atgtcccgcgtgtcgcaggccaggaacctgggtaaatatttcctgctcatcgataatatgctggtcgtgctgggg

SEQ ID NO: 432698 - DNA, 75 bp, synthetic construct
  source 1..75: mol_type = other DNA
cagcatcaatggtcgggctggatgccggcatggctgaacttgccacgctgtcagatggggcacagtctttgagcc

SEQ ID NO: 432699 - DNA, 75 bp, synthetic construct
  source 1..75: mol_type = other DNA
tcttgtccggcggacttacttttgaaaacgactcaatccttgcctggattcgaaatactgactgggcgaagattg

SEQ ID NO: 432700 - DNA, 75 bp, synthetic construct
  source 1..75: mol_type = other DNA
gacagcacgtactattaacggtgtctcgtttgatggttctaaaaacattgagctaacggcggaagatttaaatct

SEQ ID NO: 432701 - DNA, 75 bp, synthetic construct
  source 1..75: mol_type = other DNA
cttgccgcggttattaaaacacgcggtaacgttgttcagattttcaaaatatcgaggtctaaacatggagattaa

SEQ ID NO: 432702 - DNA, 75 bp, synthetic construct
  source 1..75: mol_type = other DNA
cgatgtgctggatatcggcatgtccggcaccgaagagatctatttcgccacgttccatctcggcgtggatggcgg

SEQ ID NO: 432703 - DNA, 75 bp, synthetic construct
  source 1..75: mol_type = other DNA
tgcggatatgggcattgcttttgatggcgattttgaccgctgcttcctgtttgacgaaaaagggcagtttattga

SEQ ID NO: 432704 - DNA, 75 bp, synthetic construct
  source 1..75: mol_type = other DNA
cagcgggatgatcccgtggctgctggtgaccgaactgctgtgcctgaaaggtcagaccctgggcgagctggtgcg

SEQ ID NO: 432705 - DNA, 75 bp, synthetic construct
  source 1..75: mol_type = other DNA
tatcagacagaaagtgaagtatcaactccggttcacccttcagcatcaatggtcgggctggatgctggcgtggct

SEQ ID NO: 432706 - DNA, 75 bp, synthetic construct
  source 1..75: mol_type = other DNA
catcattttctgccaggacgacacgctgatcggtaaaggcgctggtggtaatgacctgatcatcgttacgaaccc

SEQ ID NO: 432707 - DNA, 75 bp, synthetic construct
  source 1..75: mol_type = other DNA
tgacttaccgaatttcttcccgctcgcaatacagctatctcgatactgatgcagcagatcgctggggctattctc

SEQ ID NO: 432708 - DNA, 75 bp, synthetic construct
  source 1..75: mol_type = other DNA
ttctgccaggcgcgagtctgacggaggctgcggaggtcgcagaacgtattcgcctgaagttaaatgaaaaagaga

SEQ ID NO: 432709 - DNA, 75 bp, synthetic construct
  source 1..75: mol_type = other DNA
cactggaaaatcataacaatctgttgacccaaaaagaggtattcgcactccacggtcagcaatacaccattctga

SEQ ID NO: 432710 - DNA, 75 bp, synthetic construct
  source 1..75: mol_type = other DNA
tttaccttatgattttgaaaccgaagaagacggaagtatttctttcgaaagtcacggagtgcatgttgctggcat

SEQ ID NO: 432711 - DNA, 75 bp, synthetic construct
  source 1..75: mol_type = other DNA
actagggttttcccatcgcccacaatttcaactactttgcaaatcatgtaatagtgccaaaaacaatcgtatgta

SEQ ID NO: 432712 - DNA, 75 bp, synthetic construct
  source 1..75: mol_type = other DNA
atcaacaaataaaagaaaaaacaaagatgaaaccagaagattatatcaaaaagttgattactaatattaaactca

SEQ ID NO: 432713 - DNA, 75 bp, synthetic construct
  source 1..75: mol_type = other DNA
ttttttgaaatgaatactgaaagttactacgcaaaatatacattagattttttggctgtttttatcattatgatt

SEQ ID NO: 432714 - DNA, 75 bp, synthetic construct
  source 1..75: mol_type = other DNA
ggaataacagcattgcagaaaacggtggcgctgctgccttgcgtggcggtaaacagcataaaaacgcaactgtat

SEQ ID NO: 432715 - DNA, 75 bp, synthetic construct
  source 1..75: mol_type = other DNA
attagcgcaactggctgatgaggcaaaacggatgcgcgagcgtattcaggctctggaatccattcttgatgctga

SEQ ID NO: 432716 - DNA, 75 bp, synthetic construct
  source 1..75: mol_type = other DNA
agaagccgaaagggttcctggcgtatgaatccactgatgaaaccgataaggtccgggcgttcggcaaacttcagc

SEQ ID NO: 432717 - DNA, 75 bp, synthetic construct
  source 1..75: mol_type = other DNA
agaaaatgctggacgatgccttcttcaacgtggaggcctggatcaacagcgagctggcaaccgaatttgccgaac

SEQ ID NO: 432718 - DNA, 75 bp, synthetic construct
  source 1..75: mol_type = other DNA
attctttgcggagaacgcgtttaatccaagtggctaaagatgtgtcgccatcggccttagctgcttcttctagct

SEQ ID NO: 432719 - DNA, 75 bp, synthetic construct
  source 1..75: mol_type = other DNA
tgggcaatgctatcagtctggttcagttcgttgccatacctgcaatgggcgcgtttccctgtactctttaaggaa

SEQ ID NO: 432720 - DNA, 75 bp, synthetic construct
  source 1..75: mol_type = other DNA
acagataacccgctgcgccgtttgtgtgtgtgatcccaaacataagcacggggatgatagccgctatcaggctgg

SEQ ID NO: 432721 - DNA, 75 bp, synthetic construct
  source 1..75: mol_type = other DNA
acctggcgcgaatgaagaaaatgcgggtagtggcagagtacgttgaaaacgaagagatccgcgaggcggtgctct

SEQ ID NO: 432722 - DNA, 75 bp, synthetic construct
  source 1..75: mol_type = other DNA
ggcggaattgccgccgtgtttgatgaaactgacagcattgattcgcatgtggaagacacaatgatagccggtgct

SEQ ID NO: 432723 - DNA, 75 bp, synthetic construct
  source 1..75: mol_type = other DNA
ctgtgtgcaatggttaatcgaccagggggtgttgtttgatacccacgttcaaccgaatggcgaagaaagctacca

SEQ ID NO: 432724 - DNA, 75 bp, synthetic construct
  source 1..75: mol_type = other DNA
aggtttatcagtacaccaccaatccggatatttcttctggcgatggcattgctatggcgtggcgcgcaggctgcc

SEQ ID NO: 432725 - DNA, 75 bp, synthetic construct
  source 1..75: mol_type = other DNA
cgaacctggttgcgggtgtggatgaggtcgggcgtgggccgttggttggcgcggttgttactgctgccgtgatcc

SEQ ID NO: 432726 - DNA, 75 bp, synthetic construct
  source 1..75: mol_type = other DNA
gtatgccttatgcccacggcgtcagtacgttaccgccgtgggatgaaagccgcgttgagaaccctgacgaacggg

SEQ ID NO: 432727 - DNA, 75 bp, synthetic construct
  source 1..75: mol_type = other DNA
accggtgccgattgtgcctgctgcacactatacctgcggtggtgtaatggttgatgatcatgggcgtacggacgt

SEQ ID NO: 432728 - DNA, 75 bp, synthetic construct
  source 1..75: mol_type = other DNA
gcgccattgccggggaaatagaaatcgcgatgaaggctattggtgtaccggttaagtggactaatggcgatgcag

SEQ ID NO: 432729 - DNA, 75 bp, synthetic construct
  source 1..75: mol_type = other DNA
gcgaggcagcggaacaggcaactcaagacgaatgggtagcatatattttgccgggtcataacggcatttatcctg

SEQ ID NO: 432730 - DNA, 75 bp, synthetic construct
  source 1..75: mol_type = other DNA
gatgtacaaaccaacagtgcgcatcgtggaagttaatgtgccacgcgccgctggcattcgcatcaaaggaggtga

SEQ ID NO: 432731 - DNA, 75 bp, synthetic construct
  source 1..75: mol_type = other DNA
ctgcgcggcgaaggcgcttatctcaagcgcccggatggcacgcgttttatgcccgattttgatgagcgcggcgaa

SEQ ID NO: 432732 - DNA, 75 bp, synthetic construct
  source 1..75: mol_type = other DNA
tgtatcacccacaggcacgcaatttcctgttaacggaagcactgcgcggcgaaggcgcttatctcaagcgcccgg

SEQ ID NO: 432733 - DNA, 75 bp, synthetic construct
  source 1..75: mol_type = other DNA
gtgagttatacgggcttacatggtgctaaccgcatggcctctaactccttgctggagtgtctggtctatggttgg

SEQ ID NO: 432734 - DNA, 75 bp, synthetic construct
  source 1..75: mol_type = other DNA
gtggacggtgtaccaacgtttgcaagaaaatttaattaaagggggattatccggtaggaatgctaaaggtaaacg

SEQ ID NO: 432735 - DNA, 75 bp, synthetic construct
  source 1..75: mol_type = other DNA
gggggaggtggtgagtcaggtgattgaaggcgcgtatgaggtgctggggatttttgaccgggtggaggagaaacg

SEQ ID NO: 432736 - DNA, 75 bp, synthetic construct
  source 1..75: mol_type = other DNA
gtgggggtttttgaccggatagaggagaagcgtgatgccatgcagtcgctggtcctgccgccaccggcacgccag

SEQ ID NO: 432737 - DNA, 75 bp, synthetic construct
  source 1..75: mol_type = other DNA
tgttgcgtttgcgtcgggagggacagattaccggtaaacaggtcccggaaatcattctgctcaactcgcatgacg

SEQ ID NO: 432738 - DNA, 75 bp, synthetic construct
  source 1..75: mol_type = other DNA
cggaccacaaagcatcgctggagcccgttgaactggaggcaatgattgccgctattcatcagatagaaaaagcgc

SEQ ID NO: 432739 - DNA, 75 bp, synthetic construct
  source 1..75: mol_type = other DNA
tgatattgttgggcagcttatcgagggagcgtatgaagtactcggtgtctttgataaggtcactgataatatgga

SEQ ID NO: 432740 - DNA, 75 bp, synthetic construct
  source 1..75: mol_type = other DNA
actgtgcgtcagttactcaacctgcgcccgtcaccggagtttgaacgctggctggaaagcatgggcattatggca

SEQ ID NO: 432741 - DNA, 75 bp, synthetic construct
  source 1..75: mol_type = other DNA
gggaagtgcgtgttccgcaccggggaaatgtggtggagaaagttattgaaggggcttacgaggtggtgggggttt

SEQ ID NO: 432742 - DNA, 75 bp, synthetic construct
  source 1..75: mol_type = other DNA
atgtaaaccagatccgccgtgaccgtccgctgacacatgaagaactgatgcactatgtacccagtatttttgggg

SEQ ID NO: 432743 - DNA, 75 bp, synthetic construct
  source 1..75: mol_type = other DNA
atggctatggcggacaaaatatagttccgttcggggagcgggggggtattgttgcgttatgttgccagataagtg

SEQ ID NO: 432744 - DNA, 75 bp, synthetic construct
  source 1..75: mol_type = other DNA
atatctggctgcagtgctccgcctgcaacgttcacaaatccggaaacatcgaggcataccgcgccgccctgattg

SEQ ID NO: 432745 - DNA, 75 bp, synthetic construct
  source 1..75: mol_type = other DNA
tttttgaccagattgaggaaaagcgtgatgccatgcagtcactgattctgccgccaccggcacgccaggcgctgg

SEQ ID NO: 432746 - DNA, 75 bp, synthetic construct
  source 1..75: mol_type = other DNA
atccaggagaatatgctgaaaggcgggatttccggtcgcagtgcaaaaggaaaacgtatccatacccgggccatt

SEQ ID NO: 432747 - DNA, 75 bp, synthetic construct
  source 1..75: mol_type = other DNA
ccacacccgtgccattcacaacatcgacaccgatattaagctcaaccgcgcattgtgggtgatggcagaaacgct

SEQ ID NO: 432748 - DNA, 75 bp, synthetic construct
  source 1..75: mol_type = other DNA
tccgctgacacatgaagagctgatgcaccatgtgccggggattttcggggaagagaaacacacgtcccgaagcca

SEQ ID NO: 432749 - DNA, 75 bp, synthetic construct
  source 1..75: mol_type = other DNA
tttccggttgaagctcaggtcgtggaatttattccacctactgaaggtaaacctgctcgtttggcatggcacgga

SEQ ID NO: 432750 - DNA, 75 bp, synthetic construct
  source 1..75: mol_type = other DNA
aaatgtggtggagaaagttattgaaggggcttacgaggtggtgggtgtgtttgaccggatggaggaaaagcgtga

SEQ ID NO: 432751 - DNA, 75 bp, synthetic construct
  source 1..75: mol_type = other DNA
aaatgtggtggagaaagttatagaaggggcttacgaggtggtgggtgtgtttgaccggattgaggaaaagcgtga

SEQ ID NO: 432752 - DNA, 75 bp, synthetic construct
  source 1..75: mol_type = other DNA
gtggtggacagagtcattgaaggggcttacgaggtggtgggcgtgtttgaccggatagaggagaagcatgatgcc

SEQ ID NO: 432753 - DNA, 75 bp, synthetic construct
  source 1..75: mol_type = other DNA
ccgaaagtggctatgagcgggaaattgaaactgcgctttaccccggtagcattgaggtgaaaatgcacccgctgt

SEQ ID NO: 432754 - DNA, 75 bp, synthetic construct
  source 1..75: mol_type = other DNA
cgggagatctaccgtgagctggggatctctctctattccaacgaagctgccgaagaggcaggtctgcgttgggcg

SEQ ID NO: 432755 - DNA, 75 bp, synthetic construct
  source 1..75: mol_type = other DNA
cgtattcgcctggcgaccgagatgatgagcgagcaggatggctacctggcagaatcgatcaataaagatatcgag

SEQ ID NO: 432756 - DNA, 75 bp, synthetic construct
  source 1..75: mol_type = other DNA
gccgggaggattacggtcaggacctgtggagtgcttatcagaccatccaggagaatatgctgaaaggcgggattt

SEQ ID NO: 432757 - DNA, 75 bp, synthetic construct
  source 1..75: mol_type = other DNA
cggctgacggtcaaccggcctcgatggagtctttctgtatcgcagtggcaaagcgcatcgggctacctggattcg

SEQ ID NO: 432758 - DNA, 75 bp, synthetic construct
  source 1..75: mol_type = other DNA
cgctcaatccacaggatggtcagcggtatggtttagcacacggcgatatcgtgcgtatcaccacccctggtggtc

SEQ ID NO: 432759 - DNA, 75 bp, synthetic construct
  source 1..75: mol_type = other DNA
tcccgaccgttacgaaagcgggtaaatattcaggcacacaaggtgatacacccgaaaaccaacagcctgttaaag

SEQ ID NO: 432760 - DNA, 75 bp, synthetic construct
  source 1..75: mol_type = other DNA
tggtgacgaacatcagccagtcaccaccgctgacattctgaccccacgacgccgggaggattacggtgaggacct

SEQ ID NO: 432761 - DNA, 75 bp, synthetic construct
  source 1..75: mol_type = other DNA
tactgaattgaaattcaataagtatatgatttatggattttgtatatttgtaataattagagttttcattgatct

SEQ ID NO: 432762 - DNA, 75 bp, synthetic construct
  source 1..75: mol_type = other DNA
gccgggaggattacggtaaggacctgtggagtgcttatcagatcattcaggagaatatgctgaaaggcgggattt

SEQ ID NO: 432763 - DNA, 75 bp, synthetic construct
  source 1..75: mol_type = other DNA
tggtgacgaacatcagcccgtcaccaccgctgacattctgaccccccgacgcggggaggattacggtgaggacct

SEQ ID NO: 432764 - DNA, 75 bp, synthetic construct
  source 1..75: mol_type = other DNA
tggtgacgaacatcagcctgtcaccaccgctgacattctgaccccgcgacgctgggaggattacggtgaggacct

SEQ ID NO: 432765 - DNA, 75 bp, synthetic construct
  source 1..75: mol_type = other DNA
tggtgacgaacatcagcctgtcaccaccgctgacattctgacccctcgacgcagggaggattacggtgaggacct

SEQ ID NO: 432766 - DNA, 75 bp, synthetic construct
  source 1..75: mol_type = other DNA
aaaaatcatccaacaagatagacccgagcgttgcggctctgatggcgtttggcacattccaggcagagcatgagg

SEQ ID NO: 432767 - DNA, 75 bp, synthetic construct
  source 1..75: mol_type = other DNA
acatcggggagcaacgttgtttcagcctgtaaacaacactatgactattgctgccagatactggatggtgaagag

SEQ ID NO: 432768 - DNA, 75 bp, synthetic construct
  source 1..75: mol_type = other DNA
gtgatcaggcgcggatcgtgtttgatgatgcgcgtcagatgtgccttttatcccgaccgttacgaaagcgggtaa

SEQ ID NO: 432769 - DNA, 75 bp, synthetic construct
  source 1..75: mol_type = other DNA
cagcgggaaggttttcagccattctttgcctgccagacccgcgtacgtgacccgggccgccgggggtataccaaa

SEQ ID NO: 432770 - DNA, 75 bp, synthetic construct
  source 1..75: mol_type = other DNA
aacgtttgttaatgcctgccaggaacatgatgacaacagcttaaaattatttgcttcgctgttaatttcaatttc

SEQ ID NO: 432771 - DNA, 75 bp, synthetic construct
  source 1..75: mol_type = other DNA
aaagccccctttacacgttcgatcgtgaggttgtggagcggtttattgccttttccagggtgtgcccgcacgtaa

SEQ ID NO: 432772 - DNA, 75 bp, synthetic construct
  source 1..75: mol_type = other DNA
ccaccacttttcaccatcagggtaaacagtggtatttgtgggcgcaaaaagcaccggatatcgccgggaactcca

SEQ ID NO: 432773 - DNA, 75 bp, synthetic construct
  source 1..75: mol_type = other DNA
cataccttcgtttcagtccggcggcgaaatcgttcgaagtttttgttaaccggaaggtgattgtgcatcgtggtg

SEQ ID NO: 432774 - DNA, 75 bp, synthetic construct
  source 1..75: mol_type = other DNA
actgcattgattacgaccggatacgtgatgacatcatgcaggacgcggaaaaatttaatatcaggctggtgggct

SEQ ID NO: 432775 - DNA, 75 bp, synthetic construct
  source 1..75: mol_type = other DNA
gcgcctttatcgaagtgccgcgcaaaaatgcgaaatccacgaccgccgcgattctggctaactggtttctgatta

SEQ ID NO: 432776 - DNA, 75 bp, synthetic construct
  source 1..75: mol_type = other DNA
ggaggtcgtggagcggtttattgccttttccagggtgtgtccgcacgtaaaaggcgcaatgcgcggtagccccat

SEQ ID NO: 432777 - DNA, 75 bp, synthetic construct
  source 1..75: mol_type = other DNA
ccgtcgatcgtgaaaaactggcctcaaccatccagaaagcgcggggtattccgtcgcagtgggtggagatgatga

SEQ ID NO: 432778 - DNA, 75 bp, synthetic construct
  source 1..75: mol_type = other DNA
gttaaacggtacttttcggaccttaaaagccccctttacacgttcgatcgtgaggttgtggagcggtttattgcc

SEQ ID NO: 432779 - DNA, 75 bp, synthetic construct
  source 1..75: mol_type = other DNA
tcagcaaaccccgcatgactcaacgggaccggtgggtaaaacgtccggcaacagcggcatattgggcttttaaag

SEQ ID NO: 432780 - DNA, 75 bp, synthetic construct
  source 1..75: mol_type = other DNA
gctggagccagaagaagcgcgcgcaacttaacggccaggctcatcagcagaaaccggataaagacaacctggaaa

SEQ ID NO: 432781 - DNA, 75 bp, synthetic construct
  source 1..75: mol_type = other DNA
atgcgattaaccagtcgttttggttatgcaaaccagatacgccgtgaccgtccgctgacacatgaagaactgatg

SEQ ID NO: 432782 - DNA, 75 bp, synthetic construct
  source 1..75: mol_type = other DNA
agcattgataccgacattaagctcaaccgtgcattgtgggtgatggcagaaacgatgctggagagcctgcgctga

SEQ ID NO: 432783 - DNA, 75 bp, synthetic construct
  source 1..75: mol_type = other DNA
cgataaagaggcggaaataaagcaatcagataaaaatgaagaaaataaaaagcaatattgccgggaattattcag

SEQ ID NO: 432784 - DNA, 75 bp, synthetic construct
  source 1..75: mol_type = other DNA
tacctatagatgtagtatatacatgggtaaatcacaatgacaatatctggaaaaataaatatttatcatgtaaga

SEQ ID NO: 432785 - DNA, 75 bp, synthetic construct
  source 1..75: mol_type = other DNA
atgacgagtcgcttacgattagcaagtcgttttggtcatgtaaaccagatacgccgtgaccgcccgctgacacat

SEQ ID NO: 432786 - DNA, 75 bp, synthetic construct
  source 1..75: mol_type = other DNA
gggttacttcaggttcgtctgccagaatggctgcgtctgcggtcagtctctgggggaagtgcgtgttccacaccg

SEQ ID NO: 432787 - DNA, 75 bp, synthetic construct
  source 1..75: mol_type = other DNA
cagcccgtcaccaccgctgacattctgacaccgcgacgcagggaggattacggtaaggacctgtggagtacttat

SEQ ID NO: 432788 - DNA, 75 bp, synthetic construct
  source 1..75: mol_type = other DNA
aaggctttcagccgttcttcgcctgccagacccgcgtgcgcgaccagagccgccgggaatataccaaacacatgc

SEQ ID NO: 432789 - DNA, 75 bp, synthetic construct
  source 1..75: mol_type = other DNA
aggcggcgctgacttaccgttatggtgacgaacatcagcccgtcaccaccgccgacattctgacgccacgacgcc

SEQ ID NO: 432790 - DNA, 75 bp, synthetic construct
  source 1..75: mol_type = other DNA
aagttatcgaaggggcttacgaagtggtgggggtttttgaccggattgaggaaaagcgtgatgccatgcagtcgc

SEQ ID NO: 432791 - DNA, 75 bp, synthetic construct
  source 1..75: mol_type = other DNA
cgtattggttttatcggcggcgaagacgaaccgggcaaagcggatattcgcgaggcagcgtttgtcgagtatggt

SEQ ID NO: 432792 - DNA, 75 bp, synthetic construct
  source 1..75: mol_type = other DNA
catctcaagcacgttgtgcgcgaagaggatatctggcgcggcggtttttccagctcgtcaggctatgaactggca

SEQ ID NO: 432793 - DNA, 75 bp, synthetic construct
  source 1..75: mol_type = other DNA
agtgcccgtaaactccagacaggtgcagtcaaccaacaccatattctggctatctacagctaccaacaggagctg

SEQ ID NO: 432794 - DNA, 75 bp, synthetic construct
  source 1..75: mol_type = other DNA
ggcctggtctgcggtcagtcgctgggagaagtccgggtgccacaccggggaaacgtggtggacagtgtgattgaa

SEQ ID NO: 432795 - DNA, 75 bp, synthetic construct
  source 1..75: mol_type = other DNA
cacaggcggcactgacttaccgttatggtgacgaacatcagcggccacaacagcggacatcctcacgcaacgacg

SEQ ID NO: 432796 - DNA, 75 bp, synthetic construct
  source 1..75: mol_type = other DNA
cgggccattcacagcattgataccgacattaagctcaaccgtgcattgtgggtgatggcagaaacgatgctggag

SEQ ID NO: 432797 - DNA, 75 bp, synthetic construct
  source 1..75: mol_type = other DNA
gggaggattacggtaaggacctgtggagcgcatatcagaccatccaggagaatatgctgaaaggcggaatttccg

SEQ ID NO: 432798 - DNA, 75 bp, synthetic construct
  source 1..75: mol_type = other DNA
gttgaaagaaaatcatccacaactgctggaacgcgcgcacgcctggctctttatttcgtcgctgattaaccaccg

SEQ ID NO: 432799 - DNA, 75 bp, synthetic construct
  source 1..75: mol_type = other DNA
atgtaaatcagatccgtcgggagcgcccactgacaagcgaagaactgatgtaccacgtcccgagtatttttggag

SEQ ID NO: 432800 - DNA, 75 bp, synthetic construct
  source 1..75: mol_type = other DNA
attgatggcgtgatcaccgcgtttgatctgcgcgcgggaatgaatatcgccaaagataacgtggtcgcgaaaatt

SEQ ID NO: 432801 - DNA, 75 bp, synthetic construct
  source 1..75: mol_type = other DNA
ccagatgctggatatccagcaacgcgatttcagtccgcaaattttacaagccaccggtattccacgccgactctt

SEQ ID NO: 432802 - DNA, 75 bp, synthetic construct
  source 1..75: mol_type = other DNA
atgttatccggctatattgcagaagcgattatgaaacaagaagttatcctggtactcgactgtggcgcgaccaat

SEQ ID NO: 432803 - DNA, 75 bp, synthetic construct
  source 1..75: mol_type = other DNA
cggtaatggacaatattgaacggttgatctccgcacagcagttgcaggctatttctggcatcggagcctttagtt

SEQ ID NO: 432804 - DNA, 75 bp, synthetic construct
  source 1..75: mol_type = other DNA
aggcggcgctgacttaccgttatggtgatgaacatcagcccgtcaccactgccgacattctgacgccacgacgcc

SEQ ID NO: 432805 - DNA, 75 bp, synthetic construct
  source 1..75: mol_type = other DNA
ccgctgacacacgaagaactgatgcactatgtgccggggattttcggggaagataaacacacgtcccgaagccag

SEQ ID NO: 432806 - DNA, 75 bp, synthetic construct
  source 1..75: mol_type = other DNA
gagtgcttatcagaccattcaggagaatatgctgaaaggcggaatttcaggtcgcagcgctaaaggaaaacgtat

SEQ ID NO: 432807 - DNA, 75 bp, synthetic construct
  source 1..75: mol_type = other DNA
ctgattccgtcacaggcgctgatcgacaccggcagcgaacagcgggtgattaccgttgatgccgacgggcgtttt

SEQ ID NO: 432808 - DNA, 75 bp, synthetic construct
  source 1..75: mol_type = other DNA
cggatctctccgatgtgcaggttattattaaaaccagctatcccggtcaggcaccacaaatcgttgaaaatcagg

SEQ ID NO: 432809 - DNA, 75 bp, synthetic construct
  source 1..75: mol_type = other DNA
gctgcgcgaaaccggcggtacggcgacccagactgaaggcattcttgagcggctgcgactggcgggaatgccgga

SEQ ID NO: 432810 - DNA, 75 bp, synthetic construct
  source 1..75: mol_type = other DNA
accgtcctggaaaatctgcagcgggaaggctttcagccgttcttcgcctgccagacccgcgtacgtgacccgggc

SEQ ID NO: 432811 - DNA, 75 bp, synthetic construct
  source 1..75: mol_type = other DNA
gacgaacgacgaaaggtaggcgtgctcaaacccgtgcggtcaaaggtatcgatggagacgtaaagcttaatcgcg

SEQ ID NO: 432812 - DNA, 75 bp, synthetic construct
  source 1..75: mol_type = other DNA
aaggctttcagccattctttgcctgccagacccgagtgcgcgaccagagcaagcgcgagcacactaaacacatgc

SEQ ID NO: 432813 - DNA, 75 bp, synthetic construct
  source 1..75: mol_type = other DNA
ggcttaaagtcggccttgccgtaggtggcatggtgacttttggcctgagttatcgggatgtggcaaagcgcgcga

SEQ ID NO: 432814 - DNA, 75 bp, synthetic construct
  source 1..75: mol_type = other DNA
tgaaggagcttacgaagtgctcggggtgtttgacagggtggatgaaaagcgcgatgcgatgcaatcgctggcgct

SEQ ID NO: 432815 - DNA, 75 bp, synthetic construct
  source 1..75: mol_type = other DNA
cagtatgtccccagcgtattcggggaaaataagcacgaatcacgcagcgaacgctatacctatattcccaccatt

SEQ ID NO: 432816 - DNA, 75 bp, synthetic construct
  source 1..75: mol_type = other DNA
ggtctggtctgcggcgagtcgtttggcgaggtgcgggtgccacacaagggggacgtggtgagccaggttattgag

SEQ ID NO: 432817 - DNA, 75 bp, synthetic construct
  source 1..75: mol_type = other DNA
ggtgcttacgaagtggtgggcgtgtttgacctgattgaggaaaagcgtgatgccatgcagtcgctggttctgccg

SEQ ID NO: 432818 - DNA, 75 bp, synthetic construct
  source 1..75: mol_type = other DNA
tttgccaacgcgctcatccccgaagccaacgcccggcctcactggcagcaaaacccgcagcaggtgatctcgatg

SEQ ID NO: 432819 - DNA, 75 bp, synthetic construct
  source 1..75: mol_type = other DNA
aaatgtggtggagaaagttatcgaaggggcttacgaggtggtgggtgtgtttgaccggatagaggataagcgtga

SEQ ID NO: 432820 - DNA, 75 bp, synthetic construct
  source 1..75: mol_type = other DNA
gtggaccacgtaccagcgtattcaggagaacctgattaagggcgggctcagtggccgtaatgccaaaggaggacg

SEQ ID NO: 432821 - DNA, 75 bp, synthetic construct
  source 1..75: mol_type = other DNA
ggtaaacgtgagcatacaaaacacatgctgcgtctgcgccgggaagaccagatcaatcgcaaccaggtgccggaa

SEQ ID NO: 432822 - DNA, 75 bp, synthetic construct
  source 1..75: mol_type = other DNA
gggaaaataagcacgaatcacgcagcgaacgctatacctatattcccaccattaccctgctcgataacctccagc

SEQ ID NO: 432823 - DNA, 75 bp, synthetic construct
  source 1..75: mol_type = other DNA
gtgcagtcaaccttgttcgtcgtgaccgcccgttaactcgcgacgaactggcccattatgtgcccagtgtcttca

SEQ ID NO: 432824 - DNA, 75 bp, synthetic construct
  source 1..75: mol_type = other DNA
ggcactgacttaccgttatggtgacgaacatcagcccgtcaccaccgccgacattctgacgccgcgacgccggga

SEQ ID NO: 432825 - DNA, 75 bp, synthetic construct
  source 1..75: mol_type = other DNA
ggagaatatgctgaaaggcgggatttccggtcgcagtgccagaggaaaacgtatccatacccgtaccattcacag

SEQ ID NO: 432826 - DNA, 75 bp, synthetic construct
  source 1..75: mol_type = other DNA
ggtgcgtctgtggtcagtctctgggggaagtgcgtgttccgcaccggggaaatgtagtggagaaagttatcgaag

SEQ ID NO: 432827 - DNA, 75 bp, synthetic construct
  source 1..75: mol_type = other DNA
ccacacccgtgccattcacagcatcgacaccgatattaagctcaaccgcgcattgtgggtgatggcggaaacgct

SEQ ID NO: 432828 - DNA, 75 bp, synthetic construct
  source 1..75: mol_type = other DNA
ccagtcaccaccgctgacattctgacaccacgacgcagggaggattacggtaaagacctgtggagcgcatatcag

SEQ ID NO: 432829 - DNA, 75 bp, synthetic construct
  source 1..75: mol_type = other DNA
gccattcacagcatagacaccgacattaagctcaaccgggcgttgtgggtgatggcagaaacactactggagagt

SEQ ID NO: 432830 - DNA, 75 bp, synthetic construct
  source 1..75: mol_type = other DNA
gtggactacttatcagcgcattcaggaaaacctgattaaaggcggactatcggggagaacaaccaaaggaaagcg

SEQ ID NO: 432831 - DNA, 75 bp, synthetic construct
  source 1..75: mol_type = other DNA
atgacccgtttagccagccgctttggtgcggtgaatctcgttcgccgtgaccgtccgttaacccgcgacgaactg

SEQ ID NO: 432832 - DNA, 75 bp, synthetic construct
  source 1..75: mol_type = other DNA
aggcaacgtagtagagaaagtcatcgaaggggcctacgaagtactgggaatatttgaccgcgtagaagagaaacg

SEQ ID NO: 432833 - DNA, 75 bp, synthetic construct
  source 1..75: mol_type = other DNA
acaaagaaaaggagctcatctgttaaatgatgaaagaaataagttagtactggaatattccagactggtaaatga

SEQ ID NO: 432834 - DNA, 75 bp, synthetic construct
  source 1..75: mol_type = other DNA
agtttgagcagcaaatggaagtcgttaaagccactgaagccatgcagcgtgcacaacaggctgtaacgacctcta

SEQ ID NO: 432835 - DNA, 75 bp, synthetic construct
  source 1..75: mol_type = other DNA
ttgaccggattgaggaaaagcgtgatgccatgcagtctctggttctgccgctaccggcacgtcaggcgctggcac

SEQ ID NO: 432836 - DNA, 75 bp, synthetic construct
  source 1..75: mol_type = other DNA
tcaggaaacgtgctgcgggtttggcggcacattctctgtaaaaatggcggagatctctggtgaaatggtgaaaga

SEQ ID NO: 432837 - DNA, 75 bp, synthetic construct
  source 1..75: mol_type = other DNA
atgtgaaaattgagctgctggatctgtccaaagacgatctgcgccaggattttgaggatgcgccggaaattattc

SEQ ID NO: 432838 - DNA, 75 bp, synthetic construct
  source 1..75: mol_type = other DNA
gaaatttttcctcaaagattcgatggaggaagtggcggccatcaaagacattggtaactacttcgaccgtgcgga

SEQ ID NO: 432839 - DNA, 75 bp, synthetic construct
  source 1..75: mol_type = other DNA
cggtaaggttatcgtggaagatattgaggacaagccgggcatctggaaacgcagtatcagcaggaaaagcggctt

SEQ ID NO: 432840 - DNA, 75 bp, synthetic construct
  source 1..75: mol_type = other DNA
aaagacaatcacggttgaaggagagggcgttgttgccggagacagcgatatgctccgacgtgctttcagtaacct

SEQ ID NO: 432841 - DNA, 75 bp, synthetic construct
  source 1..75: mol_type = other DNA
cagctcaccgaagagtttcttaaaacagagacgttcaggaacaaaacggatattaagtcattatcagaaaaaata

SEQ ID NO: 432842 - DNA, 75 bp, synthetic construct
  source 1..75: mol_type = other DNA
gcgcagcagaacttaagcgaaatcaccggggaatttacctctgatgatttgctggggcggattttctccagcttc

SEQ ID NO: 432843 - DNA, 75 bp, synthetic construct
  source 1..75: mol_type = other DNA
gagccagaacatgtggaaatttgcagtttactcaggacttcgtcacggggaactggcagctctggcgtgggagga

SEQ ID NO: 432844 - DNA, 75 bp, synthetic construct
  source 1..75: mol_type = other DNA
aaaaacaaatgccgggatccgaacagtaacactactgcagcctgctcttgaagcactgaaggagcaatacaaact

SEQ ID NO: 432845 - DNA, 75 bp, synthetic construct
  source 1..75: mol_type = other DNA
tttgccgtttactcaggacttcgtcacggggaactggcagctctggcgtgggaggatgtggatctcgaaaaggga

SEQ ID NO: 432846 - DNA, 75 bp, synthetic construct
  source 1..75: mol_type = other DNA
atggaagaggtggctgccatcaaggatattggcaaccattttgagtcgcgccgagtacatcaagtggaacgcttt

SEQ ID NO: 432847 - DNA, 75 bp, synthetic construct
  source 1..75: mol_type = other DNA
tggtgcgcagttttgtcaccaacggctggtgtgttcagatccgtgggcctcaggccggtggtgcggtgcaggatt

SEQ ID NO: 432848 - DNA, 75 bp, synthetic construct
  source 1..75: mol_type = other DNA
tattttcctgctgtcccgcgttgcgcattacctgaagatgattcagcgggaaaatatcggtaccaccaaagatcg

SEQ ID NO: 432849 - DNA, 75 bp, synthetic construct
  source 1..75: mol_type = other DNA
gatgcagacgcagtttgcactggctaaggaaagggatgtttcgcattaccgcgaaattttattcgctaacctgga

SEQ ID NO: 432850 - DNA, 75 bp, synthetic construct
  source 1..75: mol_type = other DNA
atggttgagaatatgctcgatcaggcattcaaaaagcttaatcctcacgagcatcctgttctgcactctgaccag

SEQ ID NO: 432851 - DNA, 75 bp, synthetic construct
  source 1..75: mol_type = other DNA
atgaccagcaatatcatcagcgccattctgaaccttgtattcctggaagtgggtgtaatagcgatttatctgctt

SEQ ID NO: 432852 - DNA, 75 bp, synthetic construct
  source 1..75: mol_type = other DNA
aatgattcggccgatgctcatggtaatggggtttatttttgcttcactggccatcgtagctttgggaacggcgtt

SEQ ID NO: 432853 - DNA, 75 bp, synthetic construct
  source 1..75: mol_type = other DNA
tgactactacaacagcagaagaattagcctgaaattaaaaggtctgagtccaattgaatatcgaacccagaccta

SEQ ID NO: 432854 - DNA, 75 bp, synthetic construct
  source 1..75: mol_type = other DNA
taaagtcggagtgtttttatcttgatgagttcagtaatataagcgaactgaaggatgctgttacggaatatattg

SEQ ID NO: 432855 - DNA, 75 bp, synthetic construct
  source 1..75: mol_type = other DNA
acggaatatattgaatactacaacagcagaagaattagcctgaaattaaaaggtctgactccaattgaatatcgg

SEQ ID NO: 432856 - DNA, 75 bp, synthetic construct
  source 1..75: mol_type = other DNA
ccaggcgaaattattcaacgaaacgattgtgagtggttttataaacttaccaaaattcggcttctttcttttgag

SEQ ID NO: 432857 - DNA, 75 bp, synthetic construct
  source 1..75: mol_type = other DNA
tgatggcgaacgaatgggctaaacacaacattaatgttaatgcgatagctccgggttacatggcgaccaacaata

SEQ ID NO: 432858 - DNA, 75 bp, synthetic construct
  source 1..75: mol_type = other DNA
caattacaaggtcgatcattcatgctcacggcggcgagctgtcagcagaacagcaggggcgtgaaattgtgttca

SEQ ID NO: 432859 - DNA, 75 bp, synthetic construct
  source 1..75: mol_type = other DNA
gcttctgtggctaaaggaatgttcgaaatgaacttgtgcgctcttggtgtcaatcaagggttagctcagatggag

SEQ ID NO: 432860 - DNA, 75 bp, synthetic construct
  source 1..75: mol_type = other DNA
ggtggcgcagtggccgatctgccgatccatctttacgatctcggcaccggcaatcaggtcaaaattccgtccgaa

SEQ ID NO: 432861 - DNA, 75 bp, synthetic construct
  source 1..75: mol_type = other DNA
aagaagtcaaaggcccggatcacgaaaaatacctctggacaaacgcctcgttcgcctttgccgccaatatggtga

SEQ ID NO: 432862 - DNA, 75 bp, synthetic construct
  source 1..75: mol_type = other DNA
agggaattgtgaatgtcagaagaaacctgacgatacttgatatgttcggtcccccaaaaacaaatgccgggatcc

SEQ ID NO: 432863 - DNA, 75 bp, synthetic construct
  source 1..75: mol_type = other DNA
ccggagcagctcgcccagccaggttttaagttcaccgccaaatccctctcctgggcggtttctggtttttctaat

SEQ ID NO: 432864 - DNA, 75 bp, synthetic construct
  source 1..75: mol_type = other DNA
atggtgggtatatccatcatcgccatactctctccctggctgctgttcagcccggagcagctcgctcagccaggc

SEQ ID NO: 432865 - DNA, 75 bp, synthetic construct
  source 1..75: mol_type = other DNA
cgcagaatttaactataatcttagccagtatatcccatttaaattaaaggctctaaatgactggcttgaatgttt

SEQ ID NO: 432866 - DNA, 75 bp, synthetic construct
  source 1..75: mol_type = other DNA
atatggtagaacaagactttctctcactcggcctaagcgatatctcagcaaaagttgatccttacagacttatta

SEQ ID NO: 432867 - DNA, 75 bp, synthetic construct
  source 1..75: mol_type = other DNA
ctgtgaatgtcagctcattaaatattccgttctcatcatcaagaatgccagcgctttactttataggtgacgagc

SEQ ID NO: 432868 - DNA, 75 bp, synthetic construct
  source 1..75: mol_type = other DNA
gattactggcgactgggggcaatttttgggctgatattcctcgtgttgctggtgattaccggcttactgtggatg

SEQ ID NO: 432869 - DNA, 75 bp, synthetic construct
  source 1..75: mol_type = other DNA
cgacgacgacccgcaggcatccaacgaaaaaatcctcgaagcgattttgttggtctggcttgacgaggccgagta

SEQ ID NO: 432870 - DNA, 75 bp, synthetic construct
  source 1..75: mol_type = other DNA
ctctatcggtgttgtcgttggggcgttctcggctatttcgccaaaacgtgcgcccgaaatcgctcagcttggttt

SEQ ID NO: 432871 - DNA, 75 bp, synthetic construct
  source 1..75: mol_type = other DNA
atcaacggcattatcggcggaattggcggctggtttggttttgccaatgcctctctggaaagtatttttggctat

SEQ ID NO: 432872 - DNA, 75 bp, synthetic construct
  source 1..75: mol_type = other DNA
aggactggattaattttgggggaagaacgaacgcatagagctgtatccctgaaggggcgcagaatgtataaagta

SEQ ID NO: 432873 - DNA, 75 bp, synthetic construct
  source 1..75: mol_type = other DNA
agtgggattttaatgaatgggtttggattgttccaagaaataacagtaaaagtaataaaaagattattcggccaa

SEQ ID NO: 432874 - DNA, 75 bp, synthetic construct
  source 1..75: mol_type = other DNA
gggattttcagtcatggatttggacggttcctaaagaacacagcaaaactcgtgaaaaaatagttcgtccaattc

SEQ ID NO: 432875 - DNA, 75 bp, synthetic construct
  source 1..75: mol_type = other DNA
actggcgcgtcttgcgcaggacatttccggtattcttgacagtattccactgtatatgcagagacaattccctga

SEQ ID NO: 432876 - DNA, 75 bp, synthetic construct
  source 1..75: mol_type = other DNA
attgccggaacacgcccacgcggtcgtcgcgccgatggttcactggacagagacctcgacagccgcattgaactg

SEQ ID NO: 432877 - DNA, 75 bp, synthetic construct
  source 1..75: mol_type = other DNA
ccgcgcctgtatgaatatgggaacgttaagtggtgcgccgaaagtacgcgctatgcagttaattgccgaggcgga

SEQ ID NO: 432878 - DNA, 75 bp, synthetic construct
  source 1..75: mol_type = other DNA
tctcgcccgtaacgacctcgcgcgcatttgcacccccggcagccgctacgtagccgacctcaccaaagttgaccg

SEQ ID NO: 432879 - DNA, 75 bp, synthetic construct
  source 1..75: mol_type = other DNA
atgaagaaaacgaaatcacaattaaaaacactcagaataataatttgtgaaagtaccccgatatcacatattcgt

SEQ ID NO: 432880 - DNA, 75 bp, synthetic construct
  source 1..75: mol_type = other DNA
ggcaggagcgaacccggcatttatagccagccagatggggcatgaaactgcgcagatggtgtatgaaatttacgg

SEQ ID NO: 432881 - DNA, 75 bp, synthetic construct
  source 1..75: mol_type = other DNA
ttcgctcaagtatgacgccaccagccgccagattgagatctacccgattgccggaacacgtccacgcggtcgtcg

SEQ ID NO: 432882 - DNA, 75 bp, synthetic construct
  source 1..75: mol_type = other DNA
ttgaccatcagaaaaaaagcacccgtattcaggccagcctgtttgctccgaatgaagaagaaaaacaacgtctca

SEQ ID NO: 432883 - DNA, 75 bp, synthetic construct
  source 1..75: mol_type = other DNA
gcaggcagatgcgcaggaactgaaaaatgcccgtgaagacggagtagtgctggaaactgaattgtttaccttcat

SEQ ID NO: 432884 - DNA, 75 bp, synthetic construct
  source 1..75: mol_type = other DNA
gtgaccaccgtggaccatgctgatatttatggtggctatcagtgcgaagcggcgtttggcgaggcactgaaactg

SEQ ID NO: 432885 - DNA, 75 bp, synthetic construct
  source 1..75: mol_type = other DNA
ggaaaatgaacaatcaccaaactgccgcgtactgctcttcccgcctgtcagtccactgctggatgaagacgcccg

SEQ ID NO: 432886 - DNA, 75 bp, synthetic construct
  source 1..75: mol_type = other DNA
gcaactcaccgaaatcgcgccgccactgccagtggtttccgtgccgcatatgcgttgtgaatgtaatcagagcga

SEQ ID NO: 432887 - DNA, 75 bp, synthetic construct
  source 1..75: mol_type = other DNA
ctaccggtggtttctgtgccgcatatgcgttgtgagtgtaatcaaagtgatgaagagttcggcggtgtcgttcgt

SEQ ID NO: 432888 - DNA, 75 bp, synthetic construct
  source 1..75: mol_type = other DNA
aaatggagaagcaaacaaagtaccacaacaaaagatctgatgacgctgaaatgggatgcactaaatattcttgtt

SEQ ID NO: 432889 - DNA, 75 bp, synthetic construct
  source 1..75: mol_type = other DNA
taacggttattgttccaactcaggattataccgtcggtcaaacaacatataagtggggagcaactaatcccgcga

SEQ ID NO: 432890 - DNA, 75 bp, synthetic construct
  source 1..75: mol_type = other DNA
tatttcaaccagcaatgaaatgtcgactgcagatgcaaaagaagatttgatcaaaaaagcggatgaaaaaggggc

SEQ ID NO: 432891 - DNA, 75 bp, synthetic construct
  source 1..75: mol_type = other DNA
gaaaactttgtactggcgaagcggcatatttccccggcattaatggaattactgctccaggaggcgccggaaaaa

SEQ ID NO: 432892 - DNA, 75 bp, synthetic construct
  source 1..75: mol_type = other DNA
ttttaccgcaataaagccgcctggctggtaggcaaactgatcacgccttccggcacattgccatttttgctgccg

SEQ ID NO: 432893 - DNA, 75 bp, synthetic construct
  source 1..75: mol_type = other DNA
gctgaatgcatcaccagtgagcgctgctatggaaagaggcattgttcattcgaacagacctgatttacctcctgt

SEQ ID NO: 432894 - DNA, 75 bp, synthetic construct
  source 1..75: mol_type = other DNA
aagcggcgaagtatagcaccgacatcctggttgactggaaacagcgctttattgatgcctacgacattgagttcc

SEQ ID NO: 432895 - DNA, 75 bp, synthetic construct
  source 1..75: mol_type = other DNA
aaagccgaaacagaaacgctcggtaatgactccaacttattgatagtgttttatgttcagataatgcccgatgac

SEQ ID NO: 432896 - DNA, 75 bp, synthetic construct
  source 1..75: mol_type = other DNA
ctattatagtcgccatcatgtccctcggtctgacgggttgtgatgataaaaaagccgaaacagaaacgctcggta

SEQ ID NO: 432897 - DNA, 75 bp, synthetic construct
  source 1..75: mol_type = other DNA
gtcagcttgggaagaaatgacctgcttattcgcaccttccttagcgttagccgttaccaatgtctatgccgctga

SEQ ID NO: 432898 - DNA, 75 bp, synthetic construct
  source 1..75: mol_type = other DNA
gtgattatatggactttgcgcagaacaaggggatatttcaggccggcgcaacaaatatagaaatagagaagaaag

SEQ ID NO: 432899 - DNA, 75 bp, synthetic construct
  source 1..75: mol_type = other DNA
ggctgccacgtctgctgcttgagctgagccaggccaaggtagatggcagttacgccagactgttgggtcaactgg

SEQ ID NO: 432900 - DNA, 75 bp, synthetic construct
  source 1..75: mol_type = other DNA
ttgctcaaaccattttgcaaggcttcgatgctcagtatggtcgattcctcgaagtgacctccggtgcgcagcagc

SEQ ID NO: 432901 - DNA, 75 bp, synthetic construct
  source 1..75: mol_type = other DNA
acctcttattccagccggtgatagtcgccttgccgcagcaattaaccaattaggcaacattgactgggtgaggag

SEQ ID NO: 432902 - DNA, 75 bp, synthetic construct
  source 1..75: mol_type = other DNA
aatccttgaatactactttggtttttcggggaaaagtgaaacccttcaccgggcgcttgaaacactggctagcgg

SEQ ID NO: 432903 - DNA, 75 bp, synthetic construct
  source 1..75: mol_type = other DNA
tctttttaatattccatcattaccagcacaagctgagcaggctatttacgatatgtttgatagactggagcaaaa

SEQ ID NO: 432904 - DNA, 75 bp, synthetic construct
  source 1..75: mol_type = other DNA
gagccgattttcaatgagcgtgaggtaaagggggaaaaatataccattgtggaagagtggtgttttggttatatg

SEQ ID NO: 432905 - DNA, 75 bp, synthetic construct
  source 1..75: mol_type = other DNA
tgattgaccgggaaatcgactggctggaagaggtgttgctgaaatacggcaatgatgactctgtgctctgtttct

SEQ ID NO: 432906 - DNA, 75 bp, synthetic construct
  source 1..75: mol_type = other DNA
tttggggaggaggcgattatcatccgaaatggtcatctgagagagagatggagcgttttgtcagtctgtgttttc

SEQ ID NO: 432907 - DNA, 75 bp, synthetic construct
  source 1..75: mol_type = other DNA
agcattacacccggctgttgccggactacccgcgtttcgagattgcggagagcttttttaactccgtgtactgtc

SEQ ID NO: 432908 - DNA, 75 bp, synthetic construct
  source 1..75: mol_type = other DNA
ccgcgtattgggccactgtttgaagagatgcacgccgacctgttccgcgccgactactggcgcgcgctacaaaac

SEQ ID NO: 432909 - DNA, 75 bp, synthetic construct
  source 1..75: mol_type = other DNA
atgccgcgtggcctggaattactgattgcacaaaccattttgcaaggtttcgacgctcagtatggtcgattcctc

SEQ ID NO: 432910 - DNA, 75 bp, synthetic construct
  source 1..75: mol_type = other DNA
gttgaattcatcgccagtgaatatggctatggaaagaggaagtgttcattcgaacagacctgatttacctcctgt

SEQ ID NO: 432911 - DNA, 75 bp, synthetic construct
  source 1..75: mol_type = other DNA
aagtgaatttccgcgacatcccgccgccgcgctacccggaagacgaacttgccagcgaaccgtggtacagcgtct

SEQ ID NO: 432912 - DNA, 75 bp, synthetic construct
  source 1..75: mol_type = other DNA
ttcacgctgccaggttttgaccgggtgttcaaagtgattaaagacaagttcgcgccgcagaaagagatgtctgcc

SEQ ID NO: 432913 - DNA, 75 bp, synthetic construct
  source 1..75: mol_type = other DNA
tcccacgataagaagagcattcgctttctgagcgcctttctggtggggattacatggccaatgagttttccggtg

SEQ ID NO: 432914 - DNA, 75 bp, synthetic construct
  source 1..75: mol_type = other DNA
acgtccggcaagccacgttgaaacgctgtgtaatactttttcatcacaaattgagtggcataacctgcgcaccga

SEQ ID NO: 432915 - DNA, 75 bp, synthetic construct
  source 1..75: mol_type = other DNA
caaacccgttgattatctgaacattcccgcagaggcaaacccgttcctcggttatcgcgccgtgcgtatttatga

SEQ ID NO: 432916 - DNA, 75 bp, synthetic construct
  source 1..75: mol_type = other DNA
ttctggaagcgcaccgatccctggctggcgatacttccctgcgcgaacatttactggcaggcgtcagcgagggat

SEQ ID NO: 432917 - DNA, 75 bp, synthetic construct
  source 1..75: mol_type = other DNA
ttagcctgctttttcagggcgatgattgcctttgaatgcccatttggtaattcagaattacctcggaatatgcac

SEQ ID NO: 432918 - DNA, 75 bp, synthetic construct
  source 1..75: mol_type = other DNA
aaaagttgttaggtcataaatccagaaaaatgaccgaccgatacaatgatgatcgtggtaaagactgggttatcg

SEQ ID NO: 432919 - DNA, 75 bp, synthetic construct
  source 1..75: mol_type = other DNA
gattatctgaacattccggcagaagctaacccgttcctcggttatcgcgcggtgcgtatttatgaagaatacgcc

SEQ ID NO: 432920 - DNA, 75 bp, synthetic construct
  source 1..75: mol_type = other DNA
agttctgatagtgaagttggtcagctaatggcggctaaagccgcgctgattagtgaattgttcaaagcagaagct

SEQ ID NO: 432921 - DNA, 75 bp, synthetic construct
  source 1..75: mol_type = other DNA
ttgattgtcgcatttggtacggctcctgttaatcagttagaagatccagcctcagcggtaaataaacctatcatt

SEQ ID NO: 432922 - DNA, 75 bp, synthetic construct
  source 1..75: mol_type = other DNA
gaccagggatggcagtatcgtatgagaaggtatcaaaacatccttaaagaacaaggcattacacagagcatgtcc

SEQ ID NO: 432923 - DNA, 75 bp, synthetic construct
  source 1..75: mol_type = other DNA
tggtgggcgataactgccagttactgatttccggggccgacgaacaggaagcgcaccagcgtttaagccaatggc

SEQ ID NO: 432924 - DNA, 75 bp, synthetic construct
  source 1..75: mol_type = other DNA
ctccgctcacggcagcctgaaaatcatgatcccgatgatctcctcaatggaagagatcttatgggtgaaagaaaa

SEQ ID NO: 432925 - DNA, 75 bp, synthetic construct
  source 1..75: mol_type = other DNA
ataacggatgcgccgaccgataaatctactatcagtgattactcggctgttcctgaatggaaacagaacaataat

SEQ ID NO: 432926 - DNA, 75 bp, synthetic construct
  source 1..75: mol_type = other DNA
cccaggcaaccccaccgggacgcggtggtgtgggcatcctgcgcatctccggcctcaaagcccgtgaagttgctg

SEQ ID NO: 432927 - DNA, 75 bp, synthetic construct
  source 1..75: mol_type = other DNA
agagatgtttacgctgtttggacctcaatttgtacgcgaacttcaacagcgtggttttgatatcttcctcgacct

SEQ ID NO: 432928 - DNA, 75 bp, synthetic construct
  source 1..75: mol_type = other DNA
tcgcgccaggctataccgatgatgaactttatgagtggatgcgcgggaagatacgcgccattaatgacctgaagc

SEQ ID NO: 432929 - DNA, 75 bp, synthetic construct
  source 1..75: mol_type = other DNA
gttggcgatgccggcctcgttgccgatcctaatgatatagacgcgattagcgcacaaattttgcagagcctgcag

SEQ ID NO: 432930 - DNA, 75 bp, synthetic construct
  source 1..75: mol_type = other DNA
aagcaggctgaaaatctgtccgctctggagcaggatatcaccaatctggaaaaagcagcggcattaagcattgcc

SEQ ID NO: 432931 - DNA, 75 bp, synthetic construct
  source 1..75: mol_type = other DNA
tggcaaagatgcaccgcttttgattgctgtgacagtgttgaccagcatggaagccagcgacctggccgatcttgg

SEQ ID NO: 432932 - DNA, 75 bp, synthetic construct
  source 1..75: mol_type = other DNA
tcatcttcttcccgcgctgttacgaattctcctgtcgttgttgcccttgattaccataatcgtgacgccgcgctg

SEQ ID NO: 432933 - DNA, 75 bp, synthetic construct
  source 1..75: mol_type = other DNA
agatgacccctggagactgtgggcaggggaacatggaatacaacgtgccagtcaattttcttgggaaaggtgtgc

SEQ ID NO: 432934 - DNA, 75 bp, synthetic construct
  source 1..75: mol_type = other DNA
gaacatctacaacagggcaaagcgcaactgttgggagcctgggcaggtgaactgctggcggaagagttgcgcctg

SEQ ID NO: 432935 - DNA, 75 bp, synthetic construct
  source 1..75: mol_type = other DNA
gctgcgtaaccatctcaaacagagcatgggctttgacaccaacatggaaggcggcttcctggcgcgtcgtcgcca

SEQ ID NO: 432936 - DNA, 75 bp, synthetic construct
  source 1..75: mol_type = other DNA
ctgcagaaatatcagctggcgtggcaggcctacgcgctatatatcggcaccatggagccacgtaaaaatatccga

SEQ ID NO: 432937 - DNA, 75 bp, synthetic construct
  source 1..75: mol_type = other DNA
caatgtcacctctttgcctgaggttgttggcgatgccggcctcgttgccgatcctaatgatatagacgcgattag

SEQ ID NO: 432938 - DNA, 75 bp, synthetic construct
  source 1..75: mol_type = other DNA
gcatgtagcagggattatcgaccttattcctactttgaagctactgaaactttacgcaaatacaatcttagtttt

SEQ ID NO: 432939 - DNA, 75 bp, synthetic construct
  source 1..75: mol_type = other DNA
atttggccaggtggcattgatttaccgtaatggccggttgcaagagacacgaagcgagccaatgcacgagctgtg

SEQ ID NO: 432940 - DNA, 75 bp, synthetic construct
  source 1..75: mol_type = other DNA
gaaaatcgaacctataaccttactcctgataaaccttatccacgtccttttccgaaaaaaccagattgccttacg

SEQ ID NO: 432941 - DNA, 75 bp, synthetic construct
  source 1..75: mol_type = other DNA
gaatgttcctggattcgtggctggattgaatctcaggatgaatttttaagtaagttggcggaggtttccggtgtg

SEQ ID NO: 432942 - DNA, 75 bp, synthetic construct
  source 1..75: mol_type = other DNA
atggaaaacaacaacgagcgaagctctatggaaatcttcgaaaaagatcaaaaaatcgcttttgttgactcgttc

SEQ ID NO: 432943 - DNA, 75 bp, synthetic construct
  source 1..75: mol_type = other DNA
gcgtacagggtgtttattctcctttggttcctgattcagaagtttgcacccgtctggttaagtggcaaaaggttg

SEQ ID NO: 432944 - DNA, 75 bp, synthetic construct
  source 1..75: mol_type = other DNA
atgactcctgtcgccaatggccaacatcacgccgtcgatacctggcggcgtgaaacgttcgcaccgggtacacct

SEQ ID NO: 432945 - DNA, 75 bp, synthetic construct
  source 1..75: mol_type = other DNA
cgacgctgttctctaaccacattcctgattatcgtaatttgatgaccagttatgacaccttaacgaaacagaaat

SEQ ID NO: 432946 - DNA, 75 bp, synthetic construct
  source 1..75: mol_type = other DNA
atgttcgcctttctgcaccaggctcttttgcccattaagattaattttcctgttgaaacgccctgttttcagatt

SEQ ID NO: 432947 - DNA, 75 bp, synthetic construct
  source 1..75: mol_type = other DNA
taacatagagaattcgggtttccatactgtgacagtaaacacactggatgccactaatactgctgtgattatgcg

SEQ ID NO: 432948 - DNA, 75 bp, synthetic construct
  source 1..75: mol_type = other DNA
cgctggcaggcggctggctgctgtttgcgtttatcggcacgggcagcagttttctcgcttttgctgcgctggcgg

SEQ ID NO: 432949 - DNA, 75 bp, synthetic construct
  source 1..75: mol_type = other DNA
gtgttagaccgccatcttcatccgcgaattaaaccgttgttgcatcagtgcgtgcgggttcttgatagacccggt

SEQ ID NO: 432950 - DNA, 75 bp, synthetic construct
  source 1..75: mol_type = other DNA
cgaagcacccgattgataatccgggctatgcacataaatcgttttactatctgggcggactaacagaaggcagcg

SEQ ID NO: 432951 - DNA, 75 bp, synthetic construct
  source 1..75: mol_type = other DNA
tttttgggatgttggcaatctcgacaatttacggcttagcgcatgcttttattgcgaaatctctatcagaaaaaa

SEQ ID NO: 432952 - DNA, 75 bp, synthetic construct
  source 1..75: mol_type = other DNA
ctgatacaccgccagattggcggtgtaaattagcaattaaaatagctaaaattgcctgtggtgacataagcttaa

SEQ ID NO: 432953 - DNA, 75 bp, synthetic construct
  source 1..75: mol_type = other DNA
aggaacaacaggctgaattactggagcgccagattaacgcggcaaggggaaagcattgcggtgtttctgcgctgg

SEQ ID NO: 432954 - DNA, 75 bp, synthetic construct
  source 1..75: mol_type = other DNA
atgtttaacattagtgggatttgccatcggcgtgctggcacttgcctttctggcgctgggctggtatctggcggc

SEQ ID NO: 432955 - DNA, 75 bp, synthetic construct
  source 1..75: mol_type = other DNA
ccgatgatacgctatttcgtcttcagagattagcactcaaagatactcgaataaaaattattagcctgccacaaa

SEQ ID NO: 432956 - DNA, 75 bp, synthetic construct
  source 1..75: mol_type = other DNA
gcgatggcacattcaggcgttaagaaataaagaaagtctttacataggaaattctgatttcactaataaaaatcg

SEQ ID NO: 432957 - DNA, 75 bp, synthetic construct
  source 1..75: mol_type = other DNA
tgtcccttagacttgtatacagctcttcaattaagaatcgggttaactcaaaaagctatatcaacactcgctcag

SEQ ID NO: 432958 - DNA, 75 bp, synthetic construct
  source 1..75: mol_type = other DNA
tggacggttatttggtgacaaactgttcagtaacccggattcgaaaatctttcgtcgcagttatcttgataagac

SEQ ID NO: 432959 - DNA, 75 bp, synthetic construct
  source 1..75: mol_type = other DNA
cagaagcgagagcgatggcaccacgtttgttgctacatgcagagatgttgacgattacccatccggcgtatggca

SEQ ID NO: 432960 - DNA, 75 bp, synthetic construct
  source 1..75: mol_type = other DNA
cagaagcgagagcaatggcaccgcgtttgttgctacatgcagagatgttgacgattacccatccggcgtatggca

SEQ ID NO: 432961 - DNA, 75 bp, synthetic construct
  source 1..75: mol_type = other DNA
caaaaagactattctgctgccataaaggaccaggaaagcactgtaaataaacgttacaatacggaatataagtcc

SEQ ID NO: 432962 - DNA, 75 bp, synthetic construct
  source 1..75: mol_type = other DNA
tgttggcattatttttgtttcaatattgcctggggttttcgaatttattcgtcacaaacgcgctgcggcacgcgc

SEQ ID NO: 432963 - DNA, 75 bp, synthetic construct
  source 1..75: mol_type = other DNA
tatttcttcggcacgctccccttcattcagagcaaccttaagctgatgattgttggcattatttttgtttcaata

SEQ ID NO: 432964 - DNA, 75 bp, synthetic construct
  source 1..75: mol_type = other DNA
tgacgttttcatcggtcgtccgttttcaaagccggcgggttttatgacgagtgatgtgacagccggttttaatct

SEQ ID NO: 432965 - DNA, 75 bp, synthetic construct
  source 1..75: mol_type = other DNA
gccgaagggtaagcaaaagaaaggcctggtcgaagtcaacatggccgcgcttaccattcaggcgttaagcgaatg

SEQ ID NO: 432966 - DNA, 75 bp, synthetic construct
  source 1..75: mol_type = other DNA
tttcactgtctgctgatggtgcaaccttcttggtttaaagggaagaactacgttaagcacgaacgttgggtagaa

SEQ ID NO: 432967 - DNA, 75 bp, synthetic construct
  source 1..75: mol_type = other DNA
cttcttatgtaggaagaggctgtattatattaagtcaactcttttttactaaaaacattatctatgccatcaaag

SEQ ID NO: 432968 - DNA, 75 bp, synthetic construct
  source 1..75: mol_type = other DNA
tccaccagaacaacaatacgatggttatttaattggcaatgaaaaaattatattgaacggcctgttaccttctaa

SEQ ID NO: 432969 - DNA, 75 bp, synthetic construct
  source 1..75: mol_type = other DNA
tgacgacctgctcaatcatcaccgccgccagcagcggccaacagaatttatccgtatccgctgggcgctggaata

SEQ ID NO: 432970 - DNA, 75 bp, synthetic construct
  source 1..75: mol_type = other DNA
acccaggacgaagtgacaaaaagctggcggctttttgctctcaataaaaaagggattgccgttttcattgaaaaa

SEQ ID NO: 432971 - DNA, 75 bp, synthetic construct
  source 1..75: mol_type = other DNA
ccgcaggcgacactaccaatctgtatattgaggtgaaggataattacggcaacggagtaccccagcaggaggtaa

SEQ ID NO: 432972 - DNA, 75 bp, synthetic construct
  source 1..75: mol_type = other DNA
ctcacgccattctgggcggcgcagtggcggcaatgcagggtaataatgtcgctgccggtgcagcaggcgcagcaa

SEQ ID NO: 432973 - DNA, 75 bp, synthetic construct
  source 1..75: mol_type = other DNA
aaagctgattctgcgtctttgtcggacattctgcttgggttactacgcgaatatgcggcttatatcgaagatgaa

SEQ ID NO: 432974 - DNA, 75 bp, synthetic construct
  source 1..75: mol_type = other DNA
gctatgcgaaacgcgatgacacgctgactcatccgcgctgtgtgtggaacctgctgaaagcgcacgtttcccgct

SEQ ID NO: 432975 - DNA, 75 bp, synthetic construct
  source 1..75: mol_type = other DNA
gctgcctgagcaagctgaagtacatggtggttatcgatccgctggtgactgaaacctctaccttctggcagaacc

SEQ ID NO: 432976 - DNA, 75 bp, synthetic construct
  source 1..75: mol_type = other DNA
ctgaaagtgtgtgaagtgctggcctccaccagcgcgccggatcgcacaaccaccttcctgtacgcgctgggctgg

SEQ ID NO: 432977 - DNA, 75 bp, synthetic construct
  source 1..75: mol_type = other DNA
aattcttctactgatgctataagaaatctttatctcgataaaatgaaggtggatgggaaagtgttagttgcgaaa

SEQ ID NO: 432978 - DNA, 75 bp, synthetic construct
  source 1..75: mol_type = other DNA
ggcagagcagcccttcagttattccttccggtatcagcgccagctgagcaataccccgctgactccacaggaaca

SEQ ID NO: 432979 - DNA, 75 bp, synthetic construct
  source 1..75: mol_type = other DNA
tcaacgctgaaattcgcgataatcttcgcttcggtcttgagtttgagaaatcggcatttggtaaatacaacgtgg

SEQ ID NO: 432980 - DNA, 75 bp, synthetic construct
  source 1..75: mol_type = other DNA
agacctcgacagccgcatcgaactggaaatgcgtaccgatcataaagagctttctgaacatctgatgctggtgga

SEQ ID NO: 432981 - DNA, 75 bp, synthetic construct
  source 1..75: mol_type = other DNA
ttgactgggaaattatgttgcaggaacgagagggctgaggaacaaagcgtattccggcgctgtccgtccttgctg

SEQ ID NO: 432982 - DNA, 75 bp, synthetic construct
  source 1..75: mol_type = other DNA
atgtctgttttattatcgcctttatctcttcaggcagcggatatccggcgtagtggagaggatacatttatcatt

SEQ ID NO: 432983 - DNA, 75 bp, synthetic construct
  source 1..75: mol_type = other DNA
aaaacggtgctgacttacgatgttcaggcccgcaggtcgcgtaactacattaatgatacggaaatccaggtccag

SEQ ID NO: 432984 - DNA, 75 bp, synthetic construct
  source 1..75: mol_type = other DNA
atcgcaatgagttgtttacagcgatttgtagcgggatggcctcaattgccggttcgacaatgattggttacgccg

SEQ ID NO: 432985 - DNA, 75 bp, synthetic construct
  source 1..75: mol_type = other DNA
taaagcggttgtggatacagagacttatcatgttgcaacaacgacgtttcttgcactgggtggcgatggttttct

SEQ ID NO: 432986 - DNA, 75 bp, synthetic construct
  source 1..75: mol_type = other DNA
gcgtgggatcgcatgtcgcaagctggtgcgcaattgatgacatggttcggcgtggcgtgcgagctgcatcgcgac

SEQ ID NO: 432987 - DNA, 75 bp, synthetic construct
  source 1..75: mol_type = other DNA
acggcgagtcgaacgatgtcgatcctgcgtctattcagactgaagtattccgtctgccttcgacctgctttgctg

SEQ ID NO: 432988 - DNA, 75 bp, synthetic construct
  source 1..75: mol_type = other DNA
gtcgtgccgatggttcactggatagagacctcgacagccgcatcgaactggagatgcgtaccgatcataaagagc

SEQ ID NO: 432989 - DNA, 75 bp, synthetic construct
  source 1..75: mol_type = other DNA
aaggactgtaatggtggtgatcgtgcacgctggcagggatacagcgagggtaaaaaggcaacactgcatcatggt

SEQ ID NO: 432990 - DNA, 75 bp, synthetic construct
  source 1..75: mol_type = other DNA
ccgggaccggacttacggcggtcttgaccgtattgcttccgcgaaccagataacgaccggtgtcacatctcgcgt

SEQ ID NO: 432991 - DNA, 75 bp, synthetic construct
  source 1..75: mol_type = other DNA
tggcaacattatgtgggagaacgagttccgttatctcactcaggctggcactggcttgatggaacttgactatct

SEQ ID NO: 432992 - DNA, 75 bp, synthetic construct
  source 1..75: mol_type = other DNA
gcccgctttaaagtcggtccggtgccgattttttacagcccctatttgcagttgccagtgggtgataaacgtcgc

SEQ ID NO: 432993 - DNA, 75 bp, synthetic construct
  source 1..75: mol_type = other DNA
ccgtggcaaacgcctggtaaactgggacccgaaactgcgcaccgctatctccgacctggaagtggaaaaccgcga

SEQ ID NO: 432994 - DNA, 75 bp, synthetic construct
  source 1..75: mol_type = other DNA
agttcaaggtagacggtagaatggtcttcgagcgtgatatggaaatgctggcgccgggctatacccagacactgg

SEQ ID NO: 432995 - DNA, 75 bp, synthetic construct
  source 1..75: mol_type = other DNA
aacgcgatatggaaatgctggctccgggttatacccaaacgctggaaccgcgcgcgcagtatttgtacgtgccgt

SEQ ID NO: 432996 - DNA, 75 bp, synthetic construct
  source 1..75: mol_type = other DNA
ctccggggtcatggatcaggtgtggcgtttcaacgtcgactacaccaaggtcagcgatcctagctacttcaatga

SEQ ID NO: 432997 - DNA, 75 bp, synthetic construct
  source 1..75: mol_type = other DNA
gttgccagtgggtgacaaacgtcgctctggtttcttgatcccgaacgccaagtacaccaccaccaactactttga

SEQ ID NO: 432998 - DNA, 75 bp, synthetic construct
  source 1..75: mol_type = other DNA
aaaaccgctataccattctggataacggtagctttacctcctgtctgccgggttctgacacctggagcgtggtag

SEQ ID NO: 432999 - DNA, 75 bp, synthetic construct
  source 1..75: mol_type = other DNA
ccgggaccggacttacggcggtcttgaccgtattgcctccgctaaccaggtgacgaccggtgtcacatctcgcat

SEQ ID NO: 433000 - DNA, 75 bp, synthetic construct
  source 1..75: mol_type = other DNA
actgacggctacgcaacgcaaaaattcagcgttggctatgcagtgcagaactttgacgccacgctttcgcataaa

SEQ ID NO: 433001 - DNA, 75 bp, synthetic construct
  source 1..75: mol_type = other DNA
gacaaaacgggctcactggtatgggcaggcgatacctactggcgtatctccgagcgctgggggttgcgtggcggg

SEQ ID NO: 433002 - DNA, 75 bp, synthetic construct
  source 1..75: mol_type = other DNA
aaaccatctggcagcgcgtgaaagtgctttgcggcatcactgctgacaccatcatgctgcaaccgttcccgcagt

SEQ ID NO: 433003 - DNA, 75 bp, synthetic construct
  source 1..75: mol_type = other DNA
ccaggaaaatgggcggtagagcaggcggcattaggcgttcataaagtgatgtcttacagtgatgccggtagtgcc

SEQ ID NO: 433004 - DNA, 75 bp, synthetic construct
  source 1..75: mol_type = other DNA
gcaatttgtagcgggatggcgtccattgctggttcgatgatgattggttatgccggaatgggcgtaccaattgac

SEQ ID NO: 433005 - DNA, 75 bp, synthetic construct
  source 1..75: mol_type = other DNA
cgctatttataccgactgtttccgaaaggtccggctaagcaagccaccaaaattgctggcctgccaaaaccggta

SEQ ID NO: 433006 - DNA, 75 bp, synthetic construct
  source 1..75: mol_type = other DNA
aagcattattgaagctgcggcgaacggtgcaatgaccgggctgaaaatcgccgccggtgtggcgacggtggtaat

SEQ ID NO: 433007 - DNA, 75 bp, synthetic construct
  source 1..75: mol_type = other DNA
ttgccggttcgatgatgattggttacgccggaatgggcgtgccaattgactatctgttagcggcatcgctgatgg

SEQ ID NO: 433008 - DNA, 75 bp, synthetic construct
  source 1..75: mol_type = other DNA
aagctttatcgaagcagcggcgagcggtgcgatgaccgggctgaaaatcgccgctggtgtggcgacggtggtaat

SEQ ID NO: 433009 - DNA, 75 bp, synthetic construct
  source 1..75: mol_type = other DNA
ggcgctggctgacaccgagtggctgaaacaggcgatcattgcggtgcgtaacatccgcgcggaaatgaacatcgc

SEQ ID NO: 433010 - DNA, 75 bp, synthetic construct
  source 1..75: mol_type = other DNA
cgctatccgctggctgacggtgcgaaaaccgcagacggtaaagattatctggtggtcgcgactacccgtccggaa

SEQ ID NO: 433011 - DNA, 75 bp, synthetic construct
  source 1..75: mol_type = other DNA
ctgaccgaccagtggtacgtgcgtgccgatgtactggcgaaaccggcggttgaagcggttgagaacggcgacatt

SEQ ID NO: 433012 - DNA, 75 bp, synthetic construct
  source 1..75: mol_type = other DNA
attaccgggcggcaccatcacacgcattttctcgctgagtattaccaccaactggctgggctatattttattagc

SEQ ID NO: 433013 - DNA, 75 bp, synthetic construct
  source 1..75: mol_type = other DNA
ctggatcgcgcggtagctgagtttggtcatattgatatcctggtgaataacgccggattgattcgccgcgaagac

SEQ ID NO: 433014 - DNA, 75 bp, synthetic construct
  source 1..75: mol_type = other DNA
ggagctgaccaagccggtaatgaacggtggaaccgaagccgaactgcgcggtactcgccatacgctggtgactgt

SEQ ID NO: 433015 - DNA, 75 bp, synthetic construct
  source 1..75: mol_type = other DNA
cgattgtgaagccctttatcgatcggctgaatcgcaatgaattatttacagcgatttgtagcggcatggcctcga

SEQ ID NO: 433016 - DNA, 75 bp, synthetic construct
  source 1..75: mol_type = other DNA
tttcaattcattagcacaggtcccttttgctagtatacagtcacgtggttatgctaaaatcactgcatatataca

SEQ ID NO: 433017 - DNA, 75 bp, synthetic construct
  source 1..75: mol_type = other DNA
ttgatgtatgcgataataggcttagttctagcaaggtttttatgttttattttggcttttataatttgtcacgat

SEQ ID NO: 433018 - DNA, 75 bp, synthetic construct
  source 1..75: mol_type = other DNA
gtgaatagcaccacacattacgaaaacgccaatttcctgcgcgagctggccgaaaacctgactcgtattttgcca

SEQ ID NO: 433019 - DNA, 75 bp, synthetic construct
  source 1..75: mol_type = other DNA
gttgctgctcggcaacatgggtatggctggtggcggcgtgaacgcactgcgtggtcactccaacattcagggtct

SEQ ID NO: 433020 - DNA, 75 bp, synthetic construct
  source 1..75: mol_type = other DNA
aaacatattttcgaacagcagttacagacaaacagtcttcttctgcaaattgccaacgaccaggcatccggtgtc

SEQ ID NO: 433021 - DNA, 75 bp, synthetic construct
  source 1..75: mol_type = other DNA
acagacaaaccaacatcttgtacaactgctggcaaaggatcaggatgccggtattacactgaccccggaacaaaa

SEQ ID NO: 433022 - DNA, 75 bp, synthetic construct
  source 1..75: mol_type = other DNA
gccggcctgctgtcgtaaggcgattcagatggtccgtctgttccggcagggtgtgcgtaattaccggcaactgaa

SEQ ID NO: 433023 - DNA, 75 bp, synthetic construct
  source 1..75: mol_type = other DNA
tcgcttgtcgacgagtcagggcgggttatttttgccgattttaacccatcgaaacgaccgtggtcggtggcttga

SEQ ID NO: 433024 - DNA, 75 bp, synthetic construct
  source 1..75: mol_type = other DNA
tgatcgtccgggtaaaaaatgtatctcttttacgctacgtatcaacggcaaagatcacgatttgttagcggtaga

SEQ ID NO: 433025 - DNA, 75 bp, synthetic construct
  source 1..75: mol_type = other DNA
gcacggacattatccggtggcaaccagcaaaaaatcctcattgccaaatgcctggaagcctcgccgcaagtattg

SEQ ID NO: 433026 - DNA, 75 bp, synthetic construct
  source 1..75: mol_type = other DNA
atgcatcagggcgaaattgcccactctgcactgaccgggcgcgatattaatgtcgagactattatgcgcgttgcc

SEQ ID NO: 433027 - DNA, 75 bp, synthetic construct
  source 1..75: mol_type = other DNA
gggcctggctgggctggtgggggccggacgcacagaactggccgagacgctctatggtctgcgtacttgcgtggc

SEQ ID NO: 433028 - DNA, 75 bp, synthetic construct
  source 1..75: mol_type = other DNA
aacgccgctgggaactaacccgctgcatccaaacgttatctcgaacccggctgcacgtatctttaaagacgacgc

SEQ ID NO: 433029 - DNA, 75 bp, synthetic construct
  source 1..75: mol_type = other DNA
ggcttctttggaggcattatttctaaagtgacgtcgtttattataaccgcactaattttaggattagccgcatat

SEQ ID NO: 433030 - DNA, 75 bp, synthetic construct
  source 1..75: mol_type = other DNA
caacagagcaagttgagcgcattgccgcgatcgttgctagggaagttgttggcaaattaggtaaagagctacgag

SEQ ID NO: 433031 - DNA, 75 bp, synthetic construct
  source 1..75: mol_type = other DNA
gtgatgatagtccggactcgttggaagatgttttgaaattttccccttcggatgatcttaagtgtgaacttggaa

SEQ ID NO: 433032 - DNA, 75 bp, synthetic construct
  source 1..75: mol_type = other DNA
ttcctcgggcaaaacgaaattccggcgatcgtgaagccatttattgatcgtctgaatcgcaatgaattatttacg

SEQ ID NO: 433033 - DNA, 75 bp, synthetic construct
  source 1..75: mol_type = other DNA
tttatcttcggttctctggtcggaccgaaaatggacaccttatttgatggcgcaggatttatctttggtttcagg

SEQ ID NO: 433034 - DNA, 75 bp, synthetic construct
  source 1..75: mol_type = other DNA
gaacctgaagggacagtctcaactagagaatgctgctgagaccgtagggagatctgttcgcaatgtaatgatttc

SEQ ID NO: 433035 - DNA, 75 bp, synthetic construct
  source 1..75: mol_type = other DNA
gaccaagcacgcattgctcaacgcaattgctcagccgggtaatgactccaacttattgatagtgttttatgttca

SEQ ID NO: 433036 - DNA, 75 bp, synthetic construct
  source 1..75: mol_type = other DNA
atacgccggaggttgtggaaaacatctgcggtacgccgaaagctgacttcctgaaagtgtgcgaagtgctggcct

SEQ ID NO: 433037 - DNA, 75 bp, synthetic construct
  source 1..75: mol_type = other DNA
cgtgatgattttgctttcgaagacggcctgttcagcggttatgacgctgaaaaacgccagtacgataaatcgtcc

SEQ ID NO: 433038 - DNA, 75 bp, synthetic construct
  source 1..75: mol_type = other DNA
gagcatcttttcagtgatgataattattcttttttttcagttactgctctgttttttatggacagggtaaaacta

SEQ ID NO: 433039 - DNA, 75 bp, synthetic construct
  source 1..75: mol_type = other DNA
gtgatgatgatccaggctcatctgaagatcatttgaattttgttccttcagaggatcttaagtatgagcttggaa

SEQ ID NO: 433040 - DNA, 75 bp, synthetic construct
  source 1..75: mol_type = other DNA
ttaagtatgagcttggcatgttattatcgtcccgtccttcatatcttgaaacagatgaacttcctttagttaacg

SEQ ID NO: 433041 - DNA, 75 bp, synthetic construct
  source 1..75: mol_type = other DNA
atgaaatatgattttgatgagtacgtaagcagagagaaaacagacagtcttaccgtggacggctggcgggaatac

SEQ ID NO: 433042 - DNA, 75 bp, synthetic construct
  source 1..75: mol_type = other DNA
atggcatttaagatctggcaaattggtttgcatttacaacagcaagaagcggtagcggtagcggttgcgatcgtg

SEQ ID NO: 433043 - DNA, 75 bp, synthetic construct
  source 1..75: mol_type = other DNA
tgttaccgtggagtcgtgaactgccacaccgtcatcacattatgttggcatttcccgctagccgaacgttacaaa

SEQ ID NO: 433044 - DNA, 75 bp, synthetic construct
  source 1..75: mol_type = other DNA
atgagtctgcttctgtgggggtgcacttttggtcacagcgaagcacgtttacagacgttgcaggccgatttcgtg

SEQ ID NO: 433045 - DNA, 75 bp, synthetic construct
  source 1..75: mol_type = other DNA
actggagcgcaaaatcggcacgccgctgcggctgtacagtggctatagcgacagtaatcaggacaacccgctgct

SEQ ID NO: 433046 - DNA, 75 bp, synthetic construct
  source 1..75: mol_type = other DNA
caaggccaaggccaaattcatcctcgccacagatggaaaagacttcgaagctgaagacctcatcagcggccagac

SEQ ID NO: 433047 - DNA, 75 bp, synthetic construct
  source 1..75: mol_type = other DNA
ctacatgttggcaatctggattggaccaaaatcaacccagacatattcggctcgatgattcaggccattaccgaa

SEQ ID NO: 433048 - DNA, 75 bp, synthetic construct
  source 1..75: mol_type = other DNA
gggtgcatgggatgaccgtgaaaatgcccgtctggggctggcggcagccacgctgcagtcggatatggaaaaagc

SEQ ID NO: 433049 - DNA, 75 bp, synthetic construct
  source 1..75: mol_type = other DNA
aataaagaagcgttcaagaaggggggctgggatattgaggacgaacattatctctttgctgagcagttaggatac

SEQ ID NO: 433050 - DNA, 75 bp, synthetic construct
  source 1..75: mol_type = other DNA
gatgaaaaagatgtggttaatttcgattgtctgcgtaagtttatggattcagaaccgtgtaaatcacggttatct

SEQ ID NO: 433051 - DNA, 75 bp, synthetic construct
  source 1..75: mol_type = other DNA
cgtcgtcatgacatgaataagttcatggcgcgtctaatattctgtttttttgctgaagatactgacatattcata

SEQ ID NO: 433052 - DNA, 75 bp, synthetic construct
  source 1..75: mol_type = other DNA
ccacagacccgacgtcgggactgacagcgatggcacgtcagttccataacgtgacggcggagcagattgcgtatg

SEQ ID NO: 433053 - DNA, 75 bp, synthetic construct
  source 1..75: mol_type = other DNA
gtcagccggggagcgtcaggaagaccgggcgcatgcagccatgctggcgcttgaaactgagctcaggacgctgga

SEQ ID NO: 433054 - DNA, 75 bp, synthetic construct
  source 1..75: mol_type = other DNA
ccgtttcgatgagcagatgacccgcgtaaggcgtcatttttcaggactggagactgacgccagaaaaaccgccac

SEQ ID NO: 433055 - DNA, 75 bp, synthetic construct
  source 1..75: mol_type = other DNA
cggaagaacagcggttgcgtgaggtgtatggcgacaatccgcaggcgctggcgaaggcaaccggtgcgctgaaac

SEQ ID NO: 433056 - DNA, 75 bp, synthetic construct
  source 1..75: mol_type = other DNA
atggaaagcggaaaatcagtatgtggtcctgaaagaggccgccacgaaacggcagttatctgagcaggaaaaatc

SEQ ID NO: 433057 - DNA, 75 bp, synthetic construct
  source 1..75: mol_type = other DNA
gtatgacatggcccgcaagggggcgcaggatgagattcaggcgcagatgcgtgatggcggcgtcttttccggagg

SEQ ID NO: 433058 - DNA, 75 bp, synthetic construct
  source 1..75: mol_type = other DNA
cagaacaacaacgtggtgattcagaacgacggtacgaatggtctgccaggtccacagatgatgaaggcagtgtat

SEQ ID NO: 433059 - DNA, 75 bp, synthetic construct
  source 1..75: mol_type = other DNA
gcggtttgaacagcagcaaagcgcgaagcaggcggcaatcagcgcaaaagcccgcggcctcaccgaccgtcaggc

SEQ ID NO: 433060 - DNA, 75 bp, synthetic construct
  source 1..75: mol_type = other DNA
ttggtgtggcttttgcacatgcgattttctggtcgattacggcgtctctggcgatccgtatggctccggccggga

SEQ ID NO: 433061 - DNA, 75 bp, synthetic construct
  source 1..75: mol_type = other DNA
aagacctcctctttccgtgccaaccttcagggtgcatgggatgaccgtgaaaatgcccgtctggggctggcggca

SEQ ID NO: 433062 - DNA, 75 bp, synthetic construct
  source 1..75: mol_type = other DNA
ggactggagtttgagaaatccgcctttggtaagtacaacgttgataatgcagtcaacgctaacttccgttactcg

SEQ ID NO: 433063 - DNA, 75 bp, synthetic construct
  source 1..75: mol_type = other DNA
cgaaaggaaaagcgcgtgcagcagccggacaacaccgcgccggacggggccaccgtatcggcggagagcctgaaa

SEQ ID NO: 433064 - DNA, 75 bp, synthetic construct
  source 1..75: mol_type = other DNA
attcctgaaccctggcatcttaactggcatatcgggttaatgagtattgtcgtgggtgataaacatagtttcttg

SEQ ID NO: 433065 - DNA, 75 bp, synthetic construct
  source 1..75: mol_type = other DNA
ggccgtttgaaatttataagacccgattttctctccagttctctaatattgcgggtaatccatttagcgaaatcg

SEQ ID NO: 433066 - DNA, 75 bp, synthetic construct
  source 1..75: mol_type = other DNA
ggtgtatgagatggcccgcaagggggcacaggatgaactccggctgcagttgcgtgatggcggtatgttatcagg

SEQ ID NO: 433067 - DNA, 75 bp, synthetic construct
  source 1..75: mol_type = other DNA
taagctggctgggaatgttgttaatagcggaacgctttccggtgatcaaattacggtatcaagcggtcttctgga

SEQ ID NO: 433068 - DNA, 75 bp, synthetic construct
  source 1..75: mol_type = other DNA
cgttttattctcattacagacgcacctaagttgcggggcctataccagtttgggtgatgctgccaacttactgat

SEQ ID NO: 433069 - DNA, 75 bp, synthetic construct
  source 1..75: mol_type = other DNA
ggtatatttttctgccaaagtttacccaaactgggcagcaacacacagtggacgtcggcggaaaggggaaacacg

SEQ ID NO: 433070 - DNA, 75 bp, synthetic construct
  source 1..75: mol_type = other DNA
atgtcggagatgtattcttttactggtatatgccagcgggttattttagcgctgttttcctgaccggttatctca

SEQ ID NO: 433071 - DNA, 75 bp, synthetic construct
  source 1..75: mol_type = other DNA
atatcgaaatggccgcatccttgaggacggaagaattgaatcccgcgatccgttttatcgtgaagatttcacggt

SEQ ID NO: 433072 - DNA, 75 bp, synthetic construct
  source 1..75: mol_type = other DNA
gctggattattcctttttattttgttcccttgagcttttgtttgcccgcgatgatgacaagccttgcgttaatcg

SEQ ID NO: 433073 - DNA, 75 bp, synthetic construct
  source 1..75: mol_type = other DNA
cgttggctgggcaggtatgagtctggtggctgatatgtttatcatgacctgctggcttcttccttttttgttttc

SEQ ID NO: 433074 - DNA, 75 bp, synthetic construct
  source 1..75: mol_type = other DNA
aaaggcctgaaaaagaaaaagagcaagagatggtgattgaagcagccgcttacgctgcagctatggcaactgctg

SEQ ID NO: 433075 - DNA, 75 bp, synthetic construct
  source 1..75: mol_type = other DNA
agggcgtgtcccctataaatactaaacatgctgaacatgtggtgaaaaatatttacccgaaaattaaacatgatt

SEQ ID NO: 433076 - DNA, 75 bp, synthetic construct
  source 1..75: mol_type = other DNA
cggtgagcgccaggaagaccgggcacatgcagccatgctggcgcttgaaaccgagctcaggacgctggaaaagca

SEQ ID NO: 433077 - DNA, 75 bp, synthetic construct
  source 1..75: mol_type = other DNA
ggatgcatctggtgaaaaacgcatcaaaggtgaaaaggacagccgtatgctgatgtccgttggcctgaatgcaga

SEQ ID NO: 433078 - DNA, 75 bp, synthetic construct
  source 1..75: mol_type = other DNA
accaacctgaaaacaggtgagggtcttgtcattcttggcgctgaaaaaacattcaataatatctacataaccagt

SEQ ID NO: 433079 - DNA, 75 bp, synthetic construct
  source 1..75: mol_type = other DNA
acagggaaggcgttcaaatcgatgtgggatgccattctggatattggtcgtccggaatcctcagcggatatgctt

SEQ ID NO: 433080 - DNA, 75 bp, synthetic construct
  source 1..75: mol_type = other DNA
aaagttgcgacgtttaacccgtctgccaaaaacgttaagaaagtgatggataataactttatccagtcgtgctgg

SEQ ID NO: 433081 - DNA, 75 bp, synthetic construct
  source 1..75: mol_type = other DNA
tgtggttcctgacggtacccgtatgaacgataacgcctgggttagctttgtaaaagcaataagcactgcaaccgg

SEQ ID NO: 433082 - DNA, 75 bp, synthetic construct
  source 1..75: mol_type = other DNA
ctgtagttttaactgtgaccgtatctgtagcacacgctattccaaatatgtggggcagtggcttcacgatgggcg

SEQ ID NO: 433083 - DNA, 75 bp, synthetic construct
  source 1..75: mol_type = other DNA
gataaatgacaccattagtcagcagcgtcaggagctgtggcgtcaacagtcccggtttacagttctggaagaagc

SEQ ID NO: 433084 - DNA, 75 bp, synthetic construct
  source 1..75: mol_type = other DNA
tcccgatgggcatggtatggaaggtcagtcagcgcgaccgggaaatcttcagggagtttaacggacgtaaccacc

SEQ ID NO: 433085 - DNA, 75 bp, synthetic construct
  source 1..75: mol_type = other DNA
gttaagcgggtaagaaaagaagaactggatcggatgcagggcaagctatttgctgatgaacccgatgcagatacg

SEQ ID NO: 433086 - DNA, 75 bp, synthetic construct
  source 1..75: mol_type = other DNA
ataccgacgccagaaaaaccgccggtgccgttgagcagagtctgaaccgtcaggcgctggccgcacaaaaagccg

SEQ ID NO: 433087 - DNA, 75 bp, synthetic construct
  source 1..75: mol_type = other DNA
gtgtagccacgcagacctttgacggtattgcacagaatatggcggcaatgctgaccggcagtgagcaggactggc

SEQ ID NO: 433088 - DNA, 75 bp, synthetic construct
  source 1..75: mol_type = other DNA
gatcgcatgctgactctatccagagccggacaggcagcagggctgacgtttaatcaggcgagtgagtcactggca

SEQ ID NO: 433089 - DNA, 75 bp, synthetic construct
  source 1..75: mol_type = other DNA
cggtgagcgccaggaagaccgggcgcatgcagccatgctggcgcttgaaaccgagctcaggacgctggaaaaaca

SEQ ID NO: 433090 - DNA, 75 bp, synthetic construct
  source 1..75: mol_type = other DNA
ccacgaaacggcagttatctgagcaggaaaaatccctgctgacccatgagaaagagacgctggagtacaaacgcc

SEQ ID NO: 433091 - DNA, 75 bp, synthetic construct
  source 1..75: mol_type = other DNA
tacgcgctgattattggcggcgcactgggcaacctgttcgaccgcctgtggcacggctttgtggtcgatatgatc

SEQ ID NO: 433092 - DNA, 75 bp, synthetic construct
  source 1..75: mol_type = other DNA
gggcggcaacaaaaccgaagccgcccgtcagttagggatcacgcgtaaaacgctattggcaaaactgtcgcgtta

SEQ ID NO: 433093 - DNA, 75 bp, synthetic construct
  source 1..75: mol_type = other DNA
atcttgccgcagaggtaaaggccgggcgttttcgccaggatctctactatcgcctgaacgtggtggcaattgaag

SEQ ID NO: 433094 - DNA, 75 bp, synthetic construct
  source 1..75: mol_type = other DNA
tcatgtaaaaattgctaatacactacgggaaattcaactaccttgggttgtgtcttatgacaatgtgcctgaaat

SEQ ID NO: 433095 - DNA, 75 bp, synthetic construct
  source 1..75: mol_type = other DNA
gttcccgttgcttaatctgcattatgcgcgtaactatggcgcggcgtttagtttccttgccgatagcggcggctg

SEQ ID NO: 433096 - DNA, 75 bp, synthetic construct
  source 1..75: mol_type = other DNA
atgagtcaatcgatctgttcaacaggactacgctggctgtggctggtagtcgtcgtgctgattatcgatctgggc

SEQ ID NO: 433097 - DNA, 75 bp, synthetic construct
  source 1..75: mol_type = other DNA
acgctggaaaaacacagcggtgcgaatgagaaaatcagccagcagcgtcgcgatttatggaaagcggaaagtcag

SEQ ID NO: 433098 - DNA, 75 bp, synthetic construct
  source 1..75: mol_type = other DNA
agtttgttttcacgaaggaggcaaccagccggataggcgtggggaatctttaccgtctgatgcgcggctatgcgg

SEQ ID NO: 433099 - DNA, 75 bp, synthetic construct
  source 1..75: mol_type = other DNA
aataaaaccctggttctttccggtaatcagtccggactgactgccgatcgcatgctgacgctcaccagagccgga

SEQ ID NO: 433100 - DNA, 75 bp, synthetic construct
  source 1..75: mol_type = other DNA
gccggtgagcgtcaggaagaccaggcgcatgctgccctgctggcgcttgaaaccgagctccggacgctggaaaaa

SEQ ID NO: 433101 - DNA, 75 bp, synthetic construct
  source 1..75: mol_type = other DNA
ccgtttttctgaagaggctgcacgggtaaagaaagaactgggtgaagccagtgaccttgcggatttgatggccgt

SEQ ID NO: 433102 - DNA, 75 bp, synthetic construct
  source 1..75: mol_type = other DNA
gaataccagaaacggctgaatgagctggcaaatcaggctgtgcggtttgaacagcagcagagtgcgaagcaggct

SEQ ID NO: 433103 - DNA, 75 bp, synthetic construct
  source 1..75: mol_type = other DNA
gcagccacgaaacggcagttatctgagcaggaaaaatccctgctggcccatgagaaagagacgctggagtacaaa

SEQ ID NO: 433104 - DNA, 75 bp, synthetic construct
  source 1..75: mol_type = other DNA
gtatggcgacaatccgcaggcgctggcgaaggcaaccggtgcgctgaaacagacatgggcttctgaagaccagtt

SEQ ID NO: 433105 - DNA, 75 bp, synthetic construct
  source 1..75: mol_type = other DNA
cattgccagcagcaatgcacaggcggcgctatgggccagcgccgttgcgcagactcagttgcagaaaaaggggct

SEQ ID NO: 433106 - DNA, 75 bp, synthetic construct
  source 1..75: mol_type = other DNA
ctaccgcaggctctggactgaagatgcagatcgtcgataaccaggacatgacgatatcggtctgggtttttcccg

SEQ ID NO: 433107 - DNA, 75 bp, synthetic construct
  source 1..75: mol_type = other DNA
gcgtaaaggtgaccgatatgtcaatgatgaggctcgcgcccgattctggaatgaccgcgaaacggccaggcttgc

SEQ ID NO: 433108 - DNA, 75 bp, synthetic construct
  source 1..75: mol_type = other DNA
gcgaccggaggatttacgggaaccggtggcaaatacgaacctgccggtattgtccaccgcggggagtttgtcttc

SEQ ID NO: 433109 - DNA, 75 bp, synthetic construct
  source 1..75: mol_type = other DNA
gccggagcgatcaccctgccgatgttcggggtcacctcgctggcggtggcgacaggtgcgctggcgtatgcctgg

SEQ ID NO: 433110 - DNA, 75 bp, synthetic construct
  source 1..75: mol_type = other DNA
aacatggggacactggagacctgggcggataaaacagggaaggcattcaaatcgatgtgggatgccattctggat

SEQ ID NO: 433111 - DNA, 75 bp, synthetic construct
  source 1..75: mol_type = other DNA
ggtgacctgtgccgcctggtcatcacggattcgcatgctgcgggttgaattcagtgccgagtttaagcaggtggt

SEQ ID NO: 433112 - DNA, 75 bp, synthetic construct
  source 1..75: mol_type = other DNA
ctggcgcttgaaactgagctccggacgctggagaagcacagcggtgcgaatgagaaaatcagccggcagcgccgt

SEQ ID NO: 433113 - DNA, 75 bp, synthetic construct
  source 1..75: mol_type = other DNA
ttcgcaggttaaaaacgcggccacgcagacctttgacggtattgcacagaatatggcagcgatgctgaccggcag

SEQ ID NO: 433114 - DNA, 75 bp, synthetic construct
  source 1..75: mol_type = other DNA
gaagcatgccggagcgaatgagaaaatcagccagcagcgtcgcgatttatggaaagcggaaaatcagtatgcggt

SEQ ID NO: 433115 - DNA, 75 bp, synthetic construct
  source 1..75: mol_type = other DNA
gggattgttcaccgtggtgaatttgtcttcacgaaggaggcaaccagccggattggtgtcggcaacctgtatcgt

SEQ ID NO: 433116 - DNA, 75 bp, synthetic construct
  source 1..75: mol_type = other DNA
ctaactaccacgctaccaagccactcttttttgaccatatagatctgagcacccgcccgctgattgatgtgtcca

SEQ ID NO: 433117 - DNA, 75 bp, synthetic construct
  source 1..75: mol_type = other DNA
tagcacatatcaatgatgtgctggagtccaaaaattatattgaaactaatgctgatggggttgtaaccatcggaa

SEQ ID NO: 433118 - DNA, 75 bp, synthetic construct
  source 1..75: mol_type = other DNA
acgatatcggtctgggtattccctgagactgatatttctgatgtgtcactcgaactgatagccgctatcaaacag

SEQ ID NO: 433119 - DNA, 75 bp, synthetic construct
  source 1..75: mol_type = other DNA
caacagcaggatccgggctgcgaatgcagatagtcgataaccaggacatgacgatatcggtctgggtctttcctg

SEQ ID NO: 433120 - DNA, 75 bp, synthetic construct
  source 1..75: mol_type = other DNA
ggcagcggcaccagcaaaacggtactgacccgttatgcgacggtgcttaatcgggttttgccagtgccgacgcaa

SEQ ID NO: 433121 - DNA, 75 bp, synthetic construct
  source 1..75: mol_type = other DNA
tctctgcctcccatccttgacgctgcgactgcaggttcaggcctgaagatgcagatcgtcgacaaccaggacatg

SEQ ID NO: 433122 - DNA, 75 bp, synthetic construct
  source 1..75: mol_type = other DNA
atcagaacaacaatgtggtgattcagaatgatgccacgaacggcagtatcggtccgcaggcactggcgctggttt

SEQ ID NO: 433123 - DNA, 75 bp, synthetic construct
  source 1..75: mol_type = other DNA
gacaagattgaacaccagaaacggctgaatgagctggcacagcaggcggcgcggtttgaacagcagcagagcgcg

SEQ ID NO: 433124 - DNA, 75 bp, synthetic construct
  source 1..75: mol_type = other DNA
cgcgggtatgcggaaggtggttatgtcggcggtgccggaagtccggcgcagatgcggcgggcggaaggtatccgg

SEQ ID NO: 433125 - DNA, 75 bp, synthetic construct
  source 1..75: mol_type = other DNA
tctgctgctgcccgcatgatgttggatgcgacggcgctggcacgacctcacccggtgaaacgatgaaacgcgaaa

SEQ ID NO: 433126 - DNA, 75 bp, synthetic construct
  source 1..75: mol_type = other DNA
agaattgtcagtctaagtacgaaaattgctactacgacaatgttgaacagagttggatcccggtcgtttctggat

SEQ ID NO: 433127 - DNA, 75 bp, synthetic construct
  source 1..75: mol_type = other DNA
aacagcggcggttcctcttttgcttcgcgccccgtctggcgcaacacttccggtgattactcctggcgctccggt

SEQ ID NO: 433128 - DNA, 75 bp, synthetic construct
  source 1..75: mol_type = other DNA
caacgccaaagcggcgttttatgccgatgttccgaagaatatgactcagcagaattgtcagtctaagtatgaaaa

SEQ ID NO: 433129 - DNA, 75 bp, synthetic construct
  source 1..75: mol_type = other DNA
cattatcacatgctgttgctggttaatcgggaggtattcaggaacaccatgctgaacacggagaattcagcacaa

SEQ ID NO: 433130 - DNA, 75 bp, synthetic construct
  source 1..75: mol_type = other DNA
ctaccgtcataaaccgctgcgtagtttagaagaggtcgcaaccgacatcatcaacctagaacaaaaagccgaagg

SEQ ID NO: 433131 - DNA, 75 bp, synthetic construct
  source 1..75: mol_type = other DNA
ttagaagaggtcgcaaccgacatcatcaacctagaacaaaaagccgaaggtctcattgcgcagatattgggtgtt

SEQ ID NO: 433132 - DNA, 75 bp, synthetic construct
  source 1..75: mol_type = other DNA
tcaggattgatgacgctggtggcgtggcgttatcagcttatcggcccaactcccgtagggctgcgggttcgcttg

SEQ ID NO: 433133 - DNA, 75 bp, synthetic construct
  source 1..75: mol_type = other DNA
ccgttgcgctttatctgggaagtgcctggcggtgggcggctaattccgccgctaaagattcaacggaatgaagtg

SEQ ID NO: 433134 - DNA, 75 bp, synthetic construct
  source 1..75: mol_type = other DNA
gaaactttgcgatatatatgggaagtgcctggcggaggacggttaattccgctgctgaaggtgcaacgtaatgaa

SEQ ID NO: 433135 - DNA, 75 bp, synthetic construct
  source 1..75: mol_type = other DNA
gattgtattgatgacggtaataatgccgacatttgcgcgcgtggctggaataacgccaaagcggcgttttatgcc

SEQ ID NO: 433136 - DNA, 75 bp, synthetic construct
  source 1..75: mol_type = other DNA
gcttgcaagaatatttgcagggtcgccatctgccgctgccgacttatctggtcgtccaggtacgtggcgaagcgc

SEQ ID NO: 433137 - DNA, 75 bp, synthetic construct
  source 1..75: mol_type = other DNA
gcaaacataacgagcgtttagaatttttaggagactctattctgagctacgttatcgccaacgcgctttatcacc

SEQ ID NO: 433138 - DNA, 75 bp, synthetic construct
  source 1..75: mol_type = other DNA
tcatattaaatccgttcccggtaattaaaaacatttacgagaacaaagagaaagatgaacgttataacgcactag

SEQ ID NO: 433139 - DNA, 75 bp, synthetic construct
  source 1..75: mol_type = other DNA
atcgaaaggttcgatgtggcacatccgctatccgctggctgacggtgcgaaaaccgcagacggtaaagattatct

SEQ ID NO: 433140 - DNA, 75 bp, synthetic construct
  source 1..75: mol_type = other DNA
acgatgcatctcaggttgatgaagccgcactggccgacaccgagtggctgaaacaggcgatcgttgcggtacgta

SEQ ID NO: 433141 - DNA, 75 bp, synthetic construct
  source 1..75: mol_type = other DNA
ccgcatgatcatgatgactatgcacttcatcaaagatgaaaatggcaaaccgcaggtgccgttccacactgttta

SEQ ID NO: 433142 - DNA, 75 bp, synthetic construct
  source 1..75: mol_type = other DNA
ggcactggctgacaccgagtggctgaagcaggcgatcgttgcggtacgtaatattcgcgcggaaatgaacatcgc

SEQ ID NO: 433143 - DNA, 75 bp, synthetic construct
  source 1..75: mol_type = other DNA
gcttcggtgccaccgttcattaccggcttggtcagctcgagataccagtcacagaactggttccaggtgaactca

SEQ ID NO: 433144 - DNA, 75 bp, synthetic construct
  source 1..75: mol_type = other DNA
tggcgaacgaaggctttgtcgcccgtgcaccggaagcggtcatcgcgaaagagcgtgagaagctggaaggctatg

SEQ ID NO: 433145 - DNA, 75 bp, synthetic construct
  source 1..75: mol_type = other DNA
agcgcacgtagcgaaaaaccgctggtaacgctcaactgcgcggcgctcaacgaatccttgctggagtctgaattg

SEQ ID NO: 433146 - DNA, 75 bp, synthetic construct
  source 1..75: mol_type = other DNA
ttgataattgtgcacctgaaggattgaaaaaggtaacacgtgcttattatgaaatgaaatatagcccacatagag

SEQ ID NO: 433147 - DNA, 75 bp, synthetic construct
  source 1..75: mol_type = other DNA
atctttatttgatgtgtattctgataaatttagtaagtcggcagcaaaaggcattgacagaatcaatggcatgca

SEQ ID NO: 433148 - DNA, 75 bp, synthetic construct
  source 1..75: mol_type = other DNA
ggcagttgaagcggttgagaatggcgacattcagttcgtaccgaagcagtacgaaaatatgtatttctcctggat

SEQ ID NO: 433149 - DNA, 75 bp, synthetic construct
  source 1..75: mol_type = other DNA
atgacaaaggaccggtttccgttactaagatcgtcgacggcgcagagttgctgatcccgatggcaggcctcatca

SEQ ID NO: 433150 - DNA, 75 bp, synthetic construct
  source 1..75: mol_type = other DNA
agaccatctcggttgatgtccggctgattgcggcgactcatcgcgatcttgccgcagaggtgaatgccgggcgtt

SEQ ID NO: 433151 - DNA, 75 bp, synthetic construct
  source 1..75: mol_type = other DNA
ccaatatcagactgcagttagctttttgcagtccatgctcgaacgcgctaaggataaagatgcaagtaaagcact

SEQ ID NO: 433152 - DNA, 75 bp, synthetic construct
  source 1..75: mol_type = other DNA
cggtaaaagcaccacgctctacgccattctttcggcgcttaatacccctggccgtaatattctgacggtagaaga

SEQ ID NO: 433153 - DNA, 75 bp, synthetic construct
  source 1..75: mol_type = other DNA
accagcttgtcacaggctgattttgaagcccggctggaagcggtgttccatcagaataccggtgagtcgcaacag

SEQ ID NO: 433154 - DNA, 75 bp, synthetic construct
  source 1..75: mol_type = other DNA
tgaggctattaaagaaaccgcctccgacatccacattgaaacctatgaaaaaacaatgtcgatccgttttcgcat

SEQ ID NO: 433155 - DNA, 75 bp, synthetic construct
  source 1..75: mol_type = other DNA
acaagatggcgaagagcgataagcctttcttcctctattacggcactcgcggctgtcacttcgataactacccaa

SEQ ID NO: 433156 - DNA, 75 bp, synthetic construct
  source 1..75: mol_type = other DNA
tgtacgggcaaccgggcggtctgcaagggttaaccacgctgccgcagttgctgcacgatcagggctacgtcactc

SEQ ID NO: 433157 - DNA, 75 bp, synthetic construct
  source 1..75: mol_type = other DNA
tgatatcgccgaaaaacgtattccacaggatggaagaattagtttgcgtatcgggcgacgtaacatagatgtccg

SEQ ID NO: 433158 - DNA, 75 bp, synthetic construct
  source 1..75: mol_type = other DNA
gataatccggtcaaaacgtcaatctcctgcttcagcctgagagatcccctcataatttccccaaagcgtaaccat

SEQ ID NO: 433159 - DNA, 75 bp, synthetic construct
  source 1..75: mol_type = other DNA
gcgcgcgtgaatcgacctataccattaccatagaacgcctgccggtgctggataatccggtcaaaacgtcaatct

SEQ ID NO: 433160 - DNA, 75 bp, synthetic construct
  source 1..75: mol_type = other DNA
accccgttcaggcgcgtgaatttgccgaggcaaccggaattgattccctggcggtcgccatcggcacggctcacg

SEQ ID NO: 433161 - DNA, 75 bp, synthetic construct
  source 1..75: mol_type = other DNA
gctcgcggcctgcgcgccatacttcgccaggacccggatgtcgtcatggtgggggaaattcgtgatacagaaacc

SEQ ID NO: 433162 - DNA, 75 bp, synthetic construct
  source 1..75: mol_type = other DNA
cgacggcgttttgcggacaattttacagccaaacaaaaaactggcggcactgcttatctcccgaattaaggtcat

SEQ ID NO: 433163 - DNA, 75 bp, synthetic construct
  source 1..75: mol_type = other DNA
tgtcggtttcttcaagaaatttagaacgtttttgctgattaaagatggagttcttgtgttcaagaaaggattttc

SEQ ID NO: 433164 - DNA, 75 bp, synthetic construct
  source 1..75: mol_type = other DNA
ggcggcgttcgcgtaccgactttcgtttactggaaagggatgatccaaccgcgtaaatctgacggtattgtcgat

SEQ ID NO: 433165 - DNA, 75 bp, synthetic construct
  source 1..75: mol_type = other DNA
gcaactacgcgaacatcatcctctattgatatcctaaaaaaatacgccaaagaaataggttttatttttatactt

SEQ ID NO: 433166 - DNA, 75 bp, synthetic construct
  source 1..75: mol_type = other DNA
aaacggccagttggataacacgctgattgtctttacttccgataacggaccagaagccgaagtaccgccgcacgg

SEQ ID NO: 433167 - DNA, 75 bp, synthetic construct
  source 1..75: mol_type = other DNA
cccaaatcaatatctggttaaaccggcaaccacaattgccgacaacatgatgccggtgatgcagcatcctgcaca

SEQ ID NO: 433168 - DNA, 75 bp, synthetic construct
  source 1..75: mol_type = other DNA
gggtcgtgattattctcctcactgctgtcgtgcccaaaattaccgaacagttcgtgcatatgaagcagcaactgc

SEQ ID NO: 433169 - DNA, 75 bp, synthetic construct
  source 1..75: mol_type = other DNA
ccgatgatgctctacatggtggcctctggcgaaaaaagcgggcagctcggcacattaatggtcagagccgcagat

SEQ ID NO: 433170 - DNA, 75 bp, synthetic construct
  source 1..75: mol_type = other DNA
atgaattatcgctatcgcgccatgacccaggatggtcaaaaattgcaagggatcattgatgctaacgatgaacgt

SEQ ID NO: 433171 - DNA, 75 bp, synthetic construct
  source 1..75: mol_type = other DNA
agaaaccgaacgtggttgttttcttgctggatgatgtgggctggatggatgttggctttaacggcggcggcgtgg

SEQ ID NO: 433172 - DNA, 75 bp, synthetic construct
  source 1..75: mol_type = other DNA
cgcagaacgttggctttgatgatttccgcggctttaactcggtgtccgatatgtataccgaatggcgtgatgttc

SEQ ID NO: 433173 - DNA, 75 bp, synthetic construct
  source 1..75: mol_type = other DNA
atggaaatttctttttcacccaaacttcttgttattgctgttgccactgctattccccttatggccagtgcagca

SEQ ID NO: 433174 - DNA, 75 bp, synthetic construct
  source 1..75: mol_type = other DNA
aaccgtaaggccgagcactacttcctcaacggtaaactcgctgctgtgcgtatggatgagttcaaatatcatgtt

SEQ ID NO: 433175 - DNA, 75 bp, synthetic construct
  source 1..75: mol_type = other DNA
tgggtgtaccgctacagaccgaaatgcacgcgtatatggagatcctgaaaaaatatccaccacgcgcgcagatta

SEQ ID NO: 433176 - DNA, 75 bp, synthetic construct
  source 1..75: mol_type = other DNA
cattctcaccggacaatactccatccaccacggcattctgatgccgccaatgtacgggcaaccgggaggtctgca

SEQ ID NO: 433177 - DNA, 75 bp, synthetic construct
  source 1..75: mol_type = other DNA
tgcggtacgacggcggaatctggagaaacgtatcaacaggcatgcaccactgtttgcggatgaactgatagcccg

SEQ ID NO: 433178 - DNA, 75 bp, synthetic construct
  source 1..75: mol_type = other DNA
tgtcctggcgagcatgaactggtttcagaagtggtggaggcggggcagcctgcaccggcatccgttatgtcacgc

SEQ ID NO: 433179 - DNA, 75 bp, synthetic construct
  source 1..75: mol_type = other DNA
aaacgtatacacaggactgtcccgttgtttgcggatgaactgatcgcgcgggaactgacagcgcgtcctgattat

SEQ ID NO: 433180 - DNA, 75 bp, synthetic construct
  source 1..75: mol_type = other DNA
aaggtactaaatagagcaattaaagctggcttcatcatcaaacacgaaatgcctggggtaaaacaaaaaataacg

SEQ ID NO: 433181 - DNA, 75 bp, synthetic construct
  source 1..75: mol_type = other DNA
gaaaaaaagcctctgctgacaaaatgctctcccttctaaactttctgaaagaagaaacttattctgattttaaca

SEQ ID NO: 433182 - DNA, 75 bp, synthetic construct
  source 1..75: mol_type = other DNA
ggaataataaaacaaccaactggcgcaatcatggctattgaaacagaacgaacaatgaaaactcgtgctcgctat

SEQ ID NO: 433183 - DNA, 75 bp, synthetic construct
  source 1..75: mol_type = other DNA
caccttttgagaacggcaatgaccaggaaggattcctgatcgtcacggcagctgcggatgagggactgctggaca

SEQ ID NO: 433184 - DNA, 75 bp, synthetic construct
  source 1..75: mol_type = other DNA
ccgtttttctgaagaggctgcacgggtaaagaaagaactgggggaaaccagtgaccttgcggatttgatggccgg

SEQ ID NO: 433185 - DNA, 75 bp, synthetic construct
  source 1..75: mol_type = other DNA
caccggggcactgaaacagacatgggcggatgaagacatgctgcgcggtgactggctggccgggctgaagtccgg

SEQ ID NO: 433186 - DNA, 75 bp, synthetic construct
  source 1..75: mol_type = other DNA
acttcccccttcagcaccaacggaagagataccgcagcccgattttcagtcggtcatgaaaaacttgcttaagcg

SEQ ID NO: 433187 - DNA, 75 bp, synthetic construct
  source 1..75: mol_type = other DNA
atgctaggcagcctgatgacaaagctaaaagttgctttgattacgctggctgccgttcttttcgttctggtcggc

SEQ ID NO: 433188 - DNA, 75 bp, synthetic construct
  source 1..75: mol_type = other DNA
gtgatggcgaaagatattgcagccagcgccagcgtgccggaaggtcaactggttgttatcaacaacatcattgac

SEQ ID NO: 433189 - DNA, 75 bp, synthetic construct
  source 1..75: mol_type = other DNA
gaaataaaattgctactaaaaagatgtcaaccctccttcactttttaaaagaagaaacatattcggactttaata

SEQ ID NO: 433190 - DNA, 75 bp, synthetic construct
  source 1..75: mol_type = other DNA
tgtgcagctccatcagcaaaaggggatgataagtttatcaccaccgactatttgcaacagtgccccatcagggac

SEQ ID NO: 433191 - DNA, 75 bp, synthetic construct
  source 1..75: mol_type = other DNA
gtgaaattaaattggacgctggctatactcaagccaaccagttgatcaatctttgcgaacgtctcggacttgttg

SEQ ID NO: 433192 - DNA, 75 bp, synthetic construct
  source 1..75: mol_type = other DNA
tcactggaaaaactggtttatctggttaaatccattaaagctggtaaatgtgtttattccgtcgctgatatgtct

SEQ ID NO: 433193 - DNA, 75 bp, synthetic construct
  source 1..75: mol_type = other DNA
cctccccgggacccttcagttaagaggctgaaattcacaggtaatgtcccggatacaacgatctggcaacacggc

SEQ ID NO: 433194 - DNA, 75 bp, synthetic construct
  source 1..75: mol_type = other DNA
cggttcaccatggccacaatccgatcctccttataacgcggcaccaaaactctttgatgtgcagtacaacgagaa

SEQ ID NO: 433195 - DNA, 75 bp, synthetic construct
  source 1..75: mol_type = other DNA
catcagcggcaccgcccccctgccgggactgtcaccggcagctcaggaggctgcagcccttgactcgccgctgac

SEQ ID NO: 433196 - DNA, 75 bp, synthetic construct
  source 1..75: mol_type = other DNA
gccgggttgtagtcggttatgtgctgggaatcatgcttggctggggtgtggttggtgtctggatgggaatgtttg

SEQ ID NO: 433197 - DNA, 75 bp, synthetic construct
  source 1..75: mol_type = other DNA
cctttggcgtaagctgtgcattggcagaactgacagatgcgttgccgcaagcagccaactaccgtgcggcaccgc

SEQ ID NO: 433198 - DNA, 75 bp, synthetic construct
  source 1..75: mol_type = other DNA
ggcagatccccatggacgcggggggggttctgcgcgacaggcggttaaaaacccgcgacgggctgtacgtttgcc

SEQ ID NO: 433199 - DNA, 75 bp, synthetic construct
  source 1..75: mol_type = other DNA
ccgcgaagcaatgactaatagttattcactggaaaaattggtttatctggttaaatccattaagtctggtaaatg

SEQ ID NO: 433200 - DNA, 75 bp, synthetic construct
  source 1..75: mol_type = other DNA
tgtagaagacgaaaaattatgctctgttttctactatgcgattaaagcaagcaaacaagcgccagaagtattttt

SEQ ID NO: 433201 - DNA, 75 bp, synthetic construct
  source 1..75: mol_type = other DNA
gttttctactatgcgatcaaagcaagcaaacaagcgccagaagtatttttccgtgatgcaatgactaatagttat

SEQ ID NO: 433202 - DNA, 75 bp, synthetic construct
  source 1..75: mol_type = other DNA
ccactttttcctggttatctttttatccaggctgactttgatgaagtccatacgaccactatcaccgggcttccc

SEQ ID NO: 433203 - DNA, 75 bp, synthetic construct
  source 1..75: mol_type = other DNA
tcactccgcgtggtggatgaacgtgactctaccgaaacaccggcaacttatgccagccctcaccagttgctgtaa

SEQ ID NO: 433204 - DNA, 75 bp, synthetic construct
  source 1..75: mol_type = other DNA
tgtcgttgacgtcgatggtgttaatctcgctgaactgattaacaaggtcgctgaaaacggtgattcactccgcgt

SEQ ID NO: 433205 - DNA, 75 bp, synthetic construct
  source 1..75: mol_type = other DNA
ccgaaagcgtccggtatggatacgctgtatgcgcgctgtcagcagttcgcgacccgcgtgtatgggccactgttt

SEQ ID NO: 433206 - DNA, 75 bp, synthetic construct
  source 1..75: mol_type = other DNA
cggagaaatattcttcatgggtgagttactacgaagggataaagctgaatccactggcattacgtaaaccggatg

SEQ ID NO: 433207 - DNA, 75 bp, synthetic construct
  source 1..75: mol_type = other DNA
aaccgtgtttttgctggcctgcgtgcaacgtgggaatcagtaaaagccaccgggaatgccaaacactttgatgtc

SEQ ID NO: 433208 - DNA, 75 bp, synthetic construct
  source 1..75: mol_type = other DNA
gtcagccacggtgagacgaccttactgagcgaaaagggcaaactgaaattgcagtcgcatcttgatcgtgaagag

SEQ ID NO: 433209 - DNA, 75 bp, synthetic construct
  source 1..75: mol_type = other DNA
atgggcattctgtcatggattatttttgggcttattgccggtattctggcgaagtggatcatgccaggtaaagat

SEQ ID NO: 433210 - DNA, 75 bp, synthetic construct
  source 1..75: mol_type = other DNA
gtggcgatgtcgataacgacggcgacggaacgttttacgcgacagtgcaggattgtattgatgacggtaataatg

SEQ ID NO: 433211 - DNA, 75 bp, synthetic construct
  source 1..75: mol_type = other DNA
ggttttggcaaagtcgatggctttaactttggtagttttgttgttgccgtgattggtgcgcttgtcgtgttgttt

SEQ ID NO: 433212 - DNA, 75 bp, synthetic construct
  source 1..75: mol_type = other DNA
gaacatggggcgaattgtcgttgacgtcgatggtattgaccccgctgagttgaataataaggtcgctgaaaacgg

SEQ ID NO: 433213 - DNA, 75 bp, synthetic construct
  source 1..75: mol_type = other DNA
cctgacacgctcaccacgccattagggagtttgtggaaactgtatgtttacgcctggctggaggatacccatcaa

SEQ ID NO: 433214 - DNA, 75 bp, synthetic construct
  source 1..75: mol_type = other DNA
atgggcttcctgcaactgcttattggtcgcgataaatacagtatatctgcgtcaacagttggcgatgaaccatta

SEQ ID NO: 433215 - DNA, 75 bp, synthetic construct
  source 1..75: mol_type = other DNA
tcaggcgcagcgggagtcggaagagcagcgccttcgtgacgtgtacggtgataatccggatgcgctggcgaaggc

SEQ ID NO: 433216 - DNA, 75 bp, synthetic construct
  source 1..75: mol_type = other DNA
aaaaccctggttctttccggtaatcagtccggactgactgccgatcgcatgctgacgctctcaagagccgggcag

SEQ ID NO: 433217 - DNA, 75 bp, synthetic construct
  source 1..75: mol_type = other DNA
gcgacatgatgtcgttagttgccgaaaaagtggaacgtggagacatcggcgtacgtagcggtcagggattttacc

SEQ ID NO: 433218 - DNA, 75 bp, synthetic construct
  source 1..75: mol_type = other DNA
tattgcacagaatatggcagcgatgctgaccggcagcgaacagagctggcgtggtttcacccgttctgtgctctc

SEQ ID NO: 433219 - DNA, 75 bp, synthetic construct
  source 1..75: mol_type = other DNA
ccttatcagggttgggcgctgattaatcctatggatatggttggtcaggatgtgtgggtttcctttatgcagctt

SEQ ID NO: 433220 - DNA, 75 bp, synthetic construct
  source 1..75: mol_type = other DNA
actgatcgataccgatcgtttccttgagatgaaccgtcaacgttctctcgacgatggctttatgcatgcagtgtt

SEQ ID NO: 433221 - DNA, 75 bp, synthetic construct
  source 1..75: mol_type = other DNA
ggttaaagggatgcacccggttcaccgcgcggtgttcctgacgggcgtgatgtcttatctttccgcaccgctgtg

SEQ ID NO: 433222 - DNA, 75 bp, synthetic construct
  source 1..75: mol_type = other DNA
agcaccggcaattggtcaatgactatgccactcgcgcgaagatttatccggcgcaattatggcgtcaggtcaggc

SEQ ID NO: 433223 - DNA, 75 bp, synthetic construct
  source 1..75: mol_type = other DNA
catctgcactgaagaacacctggtctgcggaggagcagcttcgtggaagctggatggccgggatgaagtccggct

SEQ ID NO: 433224 - DNA, 75 bp, synthetic construct
  source 1..75: mol_type = other DNA
aaaaagccgtccggtgtgaaggtgtctgccggtgagcgccaggaagaccaggcgcatgcagccctgctggcgctt

SEQ ID NO: 433225 - DNA, 75 bp, synthetic construct
  source 1..75: mol_type = other DNA
aggcattaggttttgctgggttaattaaattattaagaccaagtgataaaacacaattgcccgcattaagaaatg

SEQ ID NO: 433226 - DNA, 75 bp, synthetic construct
  source 1..75: mol_type = other DNA
ggagcgctcgccaccgcaggagggtgcgcggtgttagccgggaatttactgctcggtcatttacttgaccaggcg

SEQ ID NO: 433227 - DNA, 75 bp, synthetic construct
  source 1..75: mol_type = other DNA
agtggcggttaatgagttcgaattcatgaacgtcaaccaacaaggccagcagcaaggccagcagcagaaagcgcc

SEQ ID NO: 433228 - DNA, 75 bp, synthetic construct
  source 1..75: mol_type = other DNA
tgtttgctgaagttctcttccttagaggtcaagataaagcttttccaacagtgttacttcttgaagaagcgcatc

SEQ ID NO: 433229 - DNA, 75 bp, synthetic construct
  source 1..75: mol_type = other DNA
atgcgcttaatgctataaatagtgttcatttttccgatgattctttctttcttaaggataatgggggaagggtat

SEQ ID NO: 433230 - DNA, 75 bp, synthetic construct
  source 1..75: mol_type = other DNA
gcaagaatagtaatttttgatattaatggcgagtattctcaggcttttgaaggtgttgctaatgttaaacatact

SEQ ID NO: 433231 - DNA, 75 bp, synthetic construct
  source 1..75: mol_type = other DNA
gagcgctgcgctgcgctcccagcgcatggaactttacggacgcggtctggagacgatggcgcaggcaaaggtagt

SEQ ID NO: 433232 - DNA, 75 bp, synthetic construct
  source 1..75: mol_type = other DNA
tcaccgagtcgcgtgtttataggctttggtgacaatatcgcgcagggtgccgccattggcctgcaacggaccact

SEQ ID NO: 433233 - DNA, 75 bp, synthetic construct
  source 1..75: mol_type = other DNA
agcagcaccataaaggttgtgggcgcattactcgctttcaggatggccactatcggtctcaagtttgggctgaat

SEQ ID NO: 433234 - DNA, 75 bp, synthetic construct
  source 1..75: mol_type = other DNA
aacgcactgttaaaggggcattactgactaacctgctgtttgttttggggatattcctaagccagtgggcagcat

SEQ ID NO: 433235 - DNA, 75 bp, synthetic construct
  source 1..75: mol_type = other DNA
cctgaccgtatcggaccgctacgcggcatgcaaaaaggggtcattacccagcaagagatgaaacgggcgctcatt

SEQ ID NO: 433236 - DNA, 75 bp, synthetic construct
  source 1..75: mol_type = other DNA
acgcgcggtgacactatcaagaaatatgaaaaagcgggcgtgaaatatgatgcctccatgcaggattatgttgcc

SEQ ID NO: 433237 - DNA, 75 bp, synthetic construct
  source 1..75: mol_type = other DNA
aggaatagcgaatgttaaacatactattttggggatgagtcctgaaggtataccaccgcgacctccatttgtgcg

SEQ ID NO: 433238 - DNA, 75 bp, synthetic construct
  source 1..75: mol_type = other DNA
gcccgtagctggcatgaagacagttctgactaacagcggcgtgttgtacatcaccgatgatggtaaacatatcat

SEQ ID NO: 433239 - DNA, 75 bp, synthetic construct
  source 1..75: mol_type = other DNA
atacatcgacatgctgatcccgcgcggtggcgctggtttgcataagctgtgccgcgagcagtcaacgatcccggt

SEQ ID NO: 433240 - DNA, 75 bp, synthetic construct
  source 1..75: mol_type = other DNA
agccagcagtaattgtcagcaaggctactttcgaagcctacaaaaaagcggcgctggatgctgaatttgcatccc

SEQ ID NO: 433241 - DNA, 75 bp, synthetic construct
  source 1..75: mol_type = other DNA
tggggatcaccgtgcgttatctcgcgttcccgcgtcaggggctggaaagccaggcggagcaacaaatgaaagcca

SEQ ID NO: 433242 - DNA, 75 bp, synthetic construct
  source 1..75: mol_type = other DNA
cgttgttggcggcgttttcaggctttgctcaggcggatgacgcggcaattcaacaaacgttagccaaaatgggca

SEQ ID NO: 433243 - DNA, 75 bp, synthetic construct
  source 1..75: mol_type = other DNA
ataagatgctgttaaagcagttgaatgcgcttgaaaaagagatgatcgtttataaagcgccgcaggaaaaacacg

SEQ ID NO: 433244 - DNA, 75 bp, synthetic construct
  source 1..75: mol_type = other DNA
aacgcccagcgttttgttaacgaagtggattcctccgctgtttacgttaacgcctctacgcgttttaccgacggc

SEQ ID NO: 433245 - DNA, 75 bp, synthetic construct
  source 1..75: mol_type = other DNA
atacatcgacatgctgatcccgcgtggtggcgctggtttgcataaactgtgccgtgaacagtcgacaatcccggt

SEQ ID NO: 433246 - DNA, 75 bp, synthetic construct
  source 1..75: mol_type = other DNA
tgaccgcgacagtccgggatgcaaaaggcaacctgctcaatgacgtcaaggtcaccttcaatgttaattcagcag

SEQ ID NO: 433247 - DNA, 75 bp, synthetic construct
  source 1..75: mol_type = other DNA
tgctgtcaattggctcatttattgctggaaatgtctggtgtgaaagagaatggcaaacgaaatgggctgagcggg

SEQ ID NO: 433248 - DNA, 75 bp, synthetic construct
  source 1..75: mol_type = other DNA
tcagtgaaatgctgcgtatggataaatacatcgacatgctgatcccgcgtggtggcgctggcttgcataagctgt

SEQ ID NO: 433249 - DNA, 75 bp, synthetic construct
  source 1..75: mol_type = other DNA
catatttatgttgatgaaagtgtagagattgctgaagcattaaaagtgatcgtcaacgcgaaaactcagcgtccg

SEQ ID NO: 433250 - DNA, 75 bp, synthetic construct
  source 1..75: mol_type = other DNA
ggctgcgctgaaatatctcggcgttgatctgccggcgaaattcaccgacttcggtggtcatcttattgacgggtt

SEQ ID NO: 433251 - DNA, 75 bp, synthetic construct
  source 1..75: mol_type = other DNA
atgtaacactcaatggtaaggctcatgttgataaggttactgccggtaccgggaagaacaccttcaccattaaag

SEQ ID NO: 433252 - DNA, 75 bp, synthetic construct
  source 1..75: mol_type = other DNA
ggtgatgattcagtcacccgtgccgctggtgcgacgttgtcaggatccaaaaacattcatgttcttaatggcggc

SEQ ID NO: 433253 - DNA, 75 bp, synthetic construct
  source 1..75: mol_type = other DNA
gtctatggaaaggactctgccattcataataccggaagcggtgttatggatgtgtccactgaaaactcaacatta

SEQ ID NO: 433254 - DNA, 75 bp, synthetic construct
  source 1..75: mol_type = other DNA
tgcgcgtagcattctggaacgtgacgtacgcatcaacagcaacgaagaactggcgctgccgaaagagaagttgca

SEQ ID NO: 433255 - DNA, 75 bp, synthetic construct
  source 1..75: mol_type = other DNA
tcttaacggtaatggcgtagagattatcgatatctcgccaatgggctgccgcaccggtttttatatgagtctgat

SEQ ID NO: 433256 - DNA, 75 bp, synthetic construct
  source 1..75: mol_type = other DNA
attaatgttcgtccatttaaagtcgcagccgtcaatccatacggtataaacacggctatgctcgttgctggcggt

SEQ ID NO: 433257 - DNA, 75 bp, synthetic construct
  source 1..75: mol_type = other DNA
accgcaaacaggtctatagcagcagttttcgcgtggcaaactacatcaaaccccattttgagattggtttagctc

SEQ ID NO: 433258 - DNA, 75 bp, synthetic construct
  source 1..75: mol_type = other DNA
gccgggggaacattctttttgctcgctgacagcagttttagcagcagtgaagaggcgaaagtgcgactggaagca

SEQ ID NO: 433259 - DNA, 75 bp, synthetic construct
  source 1..75: mol_type = other DNA
ggtgttcatacagccgaagccacactgcctaacggcaacaacgatacgaagatagtcaatattgcgcccgatgcc

SEQ ID NO: 433260 - DNA, 75 bp, synthetic construct
  source 1..75: mol_type = other DNA
gagattggtttagctctcgacaaaaaagagttcaaaactggcgaagcggtcagcggcaaactgcaactgctttac

SEQ ID NO: 433261 - DNA, 75 bp, synthetic construct
  source 1..75: mol_type = other DNA
gggcgacgacggtggtgtttgtttccgataccgtggcgcttagcaaagtgtcaggtaacgagcttctggtgtgga

SEQ ID NO: 433262 - DNA, 75 bp, synthetic construct
  source 1..75: mol_type = other DNA
cggcttaattctcgctgggttaagtcatgccgtcagcggtaagggcagcacggcgcatactggtacggtagatat

SEQ ID NO: 433263 - DNA, 75 bp, synthetic construct
  source 1..75: mol_type = other DNA
agaacagaaaagccggctccccgctggttccgcctcagcaacggcaggcaggttaacctggccgactggaaggtg

SEQ ID NO: 433264 - DNA, 75 bp, synthetic construct
  source 1..75: mol_type = other DNA
atgtgcagatggcttctgtcagtaattttttgtgtgggtaccgtttttcaggctacggcatcgccggcatttcct

SEQ ID NO: 433265 - DNA, 75 bp, synthetic construct
  source 1..75: mol_type = other DNA
taacatttttctggtgctcggccgctcaggctgctcaggctccttccttcccgccgccggggatgtccctgccgg

SEQ ID NO: 433266 - DNA, 75 bp, synthetic construct
  source 1..75: mol_type = other DNA
aaggtataaatctgcagattatggataattacggatatccggcgagagcaggaaaaagcatgccacctttaattc

SEQ ID NO: 433267 - DNA, 75 bp, synthetic construct
  source 1..75: mol_type = other DNA
ggctgcgggatattgccgtgaccggggatctggacagtaaacaggaagcggcgatcgataacgccatccgtcagg

SEQ ID NO: 433268 - DNA, 75 bp, synthetic construct
  source 1..75: mol_type = other DNA
cacttctgcgctgaaactgagcctgcacgaactggagaagatgatggagcggattatggcgcgtcgtgaacgccg

SEQ ID NO: 433269 - DNA, 75 bp, synthetic construct
  source 1..75: mol_type = other DNA
gctcgcggcaaacccggagatggtcgcgacggttgccaaactactcgctggatttattgcctttaaagcggcaac

SEQ ID NO: 433270 - DNA, 75 bp, synthetic construct
  source 1..75: mol_type = other DNA
gttatcggcgggttgatggtgccggtatttggcctgatcgcgatgggcaagggcagctttatgcagggcattgag

SEQ ID NO: 433271 - DNA, 75 bp, synthetic construct
  source 1..75: mol_type = other DNA
gcgccacgccgttcaccttcaaagatgcgtttgcggtggacatgaaaccgtggagaaacgtcaagatcgcgtcaa

SEQ ID NO: 433272 - DNA, 75 bp, synthetic construct
  source 1..75: mol_type = other DNA
ctggtgatcggttttatcaaaccgcgcgccacgccgttcaccttcaaagatgcgtttgcggtggacatgaaaccg

SEQ ID NO: 433273 - DNA, 75 bp, synthetic construct
  source 1..75: mol_type = other DNA
gggcaggtcatcgccccagcctgtacgctggcgatggaggatgcatatcaggaaatcgatatgggtacgactccg

SEQ ID NO: 433274 - DNA, 75 bp, synthetic construct
  source 1..75: mol_type = other DNA
aaattctcgctgaccggtcgggcagaaggtatcaatctgcagatactggataaccagggctatccggcccgtgtc

SEQ ID NO: 433275 - DNA, 75 bp, synthetic construct
  source 1..75: mol_type = other DNA
taacgatattctggagttcagtattatatgctacctcctcattacctttccctcctccggggatgacactgccgg

SEQ ID NO: 433276 - DNA, 75 bp, synthetic construct
  source 1..75: mol_type = other DNA
gtcggtgatgtgggaaaaaaagcagaagtgagcgagcgcgtactaacaaacaaggagcttggggaattactccgc

SEQ ID NO: 433277 - DNA, 75 bp, synthetic construct
  source 1..75: mol_type = other DNA
tgcgagctacggcactggttggcatgttttgaccagatggcaaagcgaagcccagtatctgccggatttttgcta

SEQ ID NO: 433278 - DNA, 75 bp, synthetic construct
  source 1..75: mol_type = other DNA
ggatcaatacacacataatcagccatattggtgctatgccgctggaaaaatgcgagctacgccactggctgacct

SEQ ID NO: 433279 - DNA, 75 bp, synthetic construct
  source 1..75: mol_type = other DNA
tctgccgtaggcggcgctatgcaatcagcaacgttctggacgatctgaacgtggcggacgttgggaaaaaaccgg

SEQ ID NO: 433280 - DNA, 75 bp, synthetic construct
  source 1..75: mol_type = other DNA
cgctgggtaataacaataccagtgattcgcagccggtaacgtttgtggcggacaaaacctcggctcaggttgtcc

SEQ ID NO: 433281 - DNA, 75 bp, synthetic construct
  source 1..75: mol_type = other DNA
ggctggctgagggtaaaaacccccgttatgagttgtgcgccacagtacaggaagcactaaaacccgttacggtga

SEQ ID NO: 433282 - DNA, 75 bp, synthetic construct
  source 1..75: mol_type = other DNA
gtgggaaaagcactaaacaaactgagcgattcgacgttaaaaaaattggcggctgtccaggcagaaaaagagcgt

SEQ ID NO: 433283 - DNA, 75 bp, synthetic construct
  source 1..75: mol_type = other DNA
atgagcagggcacttaacaaactgagcgacacgcagctaagaaaaatcaacggcacaccagcccaaaaaaccacc

SEQ ID NO: 433284 - DNA, 75 bp, synthetic construct
  source 1..75: mol_type = other DNA
tcccgatctgagcctgaaagcagccagggaaaaagcagcacagtgtcgcgcctggctggctgaggggaaaaatcc

SEQ ID NO: 433285 - DNA, 75 bp, synthetic construct
  source 1..75: mol_type = other DNA
gttaacctggtatttcacttacagggccggaactggtaggcaggtatcaccggaacgtctgagactgggcaatta

SEQ ID NO: 433286 - DNA, 75 bp, synthetic construct
  source 1..75: mol_type = other DNA
gagatcagactttcagagatcaaagaatgggacctgaaagaaatgttgtggacagtgccaaaagagcacagcaaa

SEQ ID NO: 433287 - DNA, 75 bp, synthetic construct
  source 1..75: mol_type = other DNA
cactgacggcggcgtgtcgagcgtggaggctgtaccggagccggaaaaccctgatgatgcaatgtggacagtgaa

SEQ ID NO: 433288 - DNA, 75 bp, synthetic construct
  source 1..75: mol_type = other DNA
tgaggtggatattctgcgcaatgatatttgcgatatcagcatagacctgcagctgacggagcgcgttgtggtcag

SEQ ID NO: 433289 - DNA, 75 bp, synthetic construct
  source 1..75: mol_type = other DNA
tcctgatctgagcctgaaatcagccagggaaaaagccgcccagtgtcgcgcatggctggctgaggggaaaaatcc

SEQ ID NO: 433290 - DNA, 75 bp, synthetic construct
  source 1..75: mol_type = other DNA
aactgacggagcgtgtgctggtcagcactgacgggagtgtgtcgagtgttgaagcggtagcggaacccgatgaac

SEQ ID NO: 433291 - DNA, 75 bp, synthetic construct
  source 1..75: mol_type = other DNA
tgtccgcaataacccggacaaattgcatctgtttgtggataacggttctctggttgccacgggggccagctccat

SEQ ID NO: 433292 - DNA, 75 bp, synthetic construct
  source 1..75: mol_type = other DNA
cactgacggcagtgtgtcgagtgttgaagctgtagcggaacccgatgaacctgaagaaatgtggacggtgaaacg

SEQ ID NO: 433293 - DNA, 75 bp, synthetic construct
  source 1..75: mol_type = other DNA
gcgatacacagctaagaaaaatcaacggcacaccagccccaaaaaccacatttcttaatgacgggggaaacctga

SEQ ID NO: 433294 - DNA, 75 bp, synthetic construct
  source 1..75: mol_type = other DNA
acatgtggacagagcggttagagatactggcggggactcacgaaaacgtaaccacactgccaatagccagagaaa

SEQ ID NO: 433295 - DNA, 75 bp, synthetic construct
  source 1..75: mol_type = other DNA
gcgctatgaacttaatcatgctgtacaggacgcgttagcccccgtgacggttaaggaagcgctcacttactggct

SEQ ID NO: 433296 - DNA, 75 bp, synthetic construct
  source 1..75: mol_type = other DNA
ttggcgatgcgcttacctactggcttgagtcttacgtaaaggaaaaccgcgtggattatgccgccctgaaaaagc

SEQ ID NO: 433297 - DNA, 75 bp, synthetic construct
  source 1..75: mol_type = other DNA
acgagtctataaccattcccgttatctggatgcgaaacgtgacgcgctggatatgtggacggagcggttagggat

SEQ ID NO: 433298 - DNA, 75 bp, synthetic construct
  source 1..75: mol_type = other DNA
gttttgatcgggtggcaaagcaagcccctgtttccgccgggttcctgctacagacatgcaagcaggcgcttaagt

SEQ ID NO: 433299 - DNA, 75 bp, synthetic construct
  source 1..75: mol_type = other DNA
tatgacactaaaacgcaaccagcgatgcctgccaatatggagctcaccgacggcggtcagcgcatcaagttaaaa

SEQ ID NO: 433300 - DNA, 75 bp, synthetic construct
  source 1..75: mol_type = other DNA
gtcaccgtgctttaaactcaattatcattttgacatcagcgatatggcgcagttgatgcaaaatgccggaaaaac

SEQ ID NO: 433301 - DNA, 75 bp, synthetic construct
  source 1..75: mol_type = other DNA
catttctgtattagcgatatggcgcagttgatgcagaatgccgggaaaattggctggctgtatagtgtgatagcg

SEQ ID NO: 433302 - DNA, 75 bp, synthetic construct
  source 1..75: mol_type = other DNA
aggcaaacccagcgcaattgccaaaatccaggttgatggtgagttgatgctgacggagctggggctggaaggtga

SEQ ID NO: 433303 - DNA, 75 bp, synthetic construct
  source 1..75: mol_type = other DNA
tcattcatgggaattgaagcaaaagccaattataaaaatacagttctggctgatgtgctcccggttacgatgtta

SEQ ID NO: 433304 - DNA, 75 bp, synthetic construct
  source 1..75: mol_type = other DNA
ccgcactggggtacacagcagtttatgtcctggccgttctatactgactcatattgcaagataataataataatg

SEQ ID NO: 433305 - DNA, 75 bp, synthetic construct
  source 1..75: mol_type = other DNA
agttgatgcaaaacgccggtaaagttggctggctgtatagcgtgattgcgccggggctggtatctgcggatgcgc

SEQ ID NO: 433306 - DNA, 75 bp, synthetic construct
  source 1..75: mol_type = other DNA
ctggacgaccagtaccgcctgagcgaaattacctacagccagaatggcaaaaactggaaggttgtttatggtggt

SEQ ID NO: 433307 - DNA, 75 bp, synthetic construct
  source 1..75: mol_type = other DNA
tttcaggctttgctcaggctgatgacgcggcaattcaacaaacgttagccaaaatgggcatcaaaagcagcgata

SEQ ID NO: 433308 - DNA, 75 bp, synthetic construct
  source 1..75: mol_type = other DNA
ctttgttgacggcgttttctggctttgctcaggctgatgacacggcaattcaacaaacgctagccaaaatgggca

SEQ ID NO: 433309 - DNA, 75 bp, synthetic construct
  source 1..75: mol_type = other DNA
accgctacagtcgttgataataatggctttccggtgaaaggtgtgactgtgaacttcaccagcaacgcagcgaca

SEQ ID NO: 433310 - DNA, 75 bp, synthetic construct
  source 1..75: mol_type = other DNA
atcgcattgaagagcaggcatggtcacgccactaccagcaaatcgttcgcgaagaaaaagaaacggcgctggcgg

SEQ ID NO: 433311 - DNA, 75 bp, synthetic construct
  source 1..75: mol_type = other DNA
ccattaaatgctgatatatttttgcatacatgggataagatccaagtttggagcggagaggctcgtaagtctgga

SEQ ID NO: 433312 - DNA, 75 bp, synthetic construct
  source 1..75: mol_type = other DNA
ttgagtttaatagaatgaaccgagaattaattgacgaaattgagaagtttataaaatcaaaactgagcgaaatga

SEQ ID NO: 433313 - DNA, 75 bp, synthetic construct
  source 1..75: mol_type = other DNA
ccttgccgaaggcgaagaagctctcagcttcagtgagtttaaacaggcactcagaataagaatgtgctctcacaa

SEQ ID NO: 433314 - DNA, 75 bp, synthetic construct
  source 1..75: mol_type = other DNA
ggtgcgcaggtcagtcgtgaagaggcgcgacagtggcgtgcccggcacccgcttgccgttgatgtgccggagaga

SEQ ID NO: 433315 - DNA, 75 bp, synthetic construct
  source 1..75: mol_type = other DNA
atttaccgttattacaaaaaagtgagccgaccattaaacaaccggtaagatggaagaacgcactcggcgaactaa

SEQ ID NO: 433316 - DNA, 75 bp, synthetic construct
  source 1..75: mol_type = other DNA
ggtgtgcaggtcagtcgtgaagaagcgcgccagtggcgtgtgcagcacccgcttgccgttgatgtgccggagaga

SEQ ID NO: 433317 - DNA, 75 bp, synthetic construct
  source 1..75: mol_type = other DNA
cagagggtgttattgcacagccatcacaacctgaacatccagttattaaagggttggatttgcccctatatttcc

SEQ ID NO: 433318 - DNA, 75 bp, synthetic construct
  source 1..75: mol_type = other DNA
atggctttattaccggcgtggaaaatctgcaaaatatacggtaatgaagatgctgtcggtgaagccgttcgtgaa

SEQ ID NO: 433319 - DNA, 75 bp, synthetic construct
  source 1..75: mol_type = other DNA
ttgcccaaccagaggcgctggcaaccatgaagtattataacgtgcagcctgaagcatgggctccgttaggtggtg

SEQ ID NO: 433320 - DNA, 75 bp, synthetic construct
  source 1..75: mol_type = other DNA
cagcagggaagagcgtgaggcgctggaggcaagacaacagaccatgatggcagagcagcaggagggcggacatgt

SEQ ID NO: 433321 - DNA, 75 bp, synthetic construct
  source 1..75: mol_type = other DNA
tctctttaccccggcttgatattacgggaatgtgggtattttccctgggtgtctggtttcatatcgtcgcccgtc

SEQ ID NO: 433322 - DNA, 75 bp, synthetic construct
  source 1..75: mol_type = other DNA
tgaaagcgattggtgtttccaatttctatcctcatgtattaacaaacttttgtgagacagtcagaataaaaccaa

SEQ ID NO: 433323 - DNA, 75 bp, synthetic construct
  source 1..75: mol_type = other DNA
ttcgtgaggccatttcggaaggtctttgtacccgtgaggagttatttattacgtcaaaactgtgggtgcaggata

SEQ ID NO: 433324 - DNA, 75 bp, synthetic construct
  source 1..75: mol_type = other DNA
gttgcggaagaatcggcagaaggcttacgcgagcatttttactggcaaaaatcacgtaaaccagaagcgggtcag

SEQ ID NO: 433325 - DNA, 75 bp, synthetic construct
  source 1..75: mol_type = other DNA
tcagctgcgtcatgaagcggacagcgatgaattgcgtgctgtggcggaagagtcggcggaaggtttgcgcgagca

SEQ ID NO: 433326 - DNA, 75 bp, synthetic construct
  source 1..75: mol_type = other DNA
aacgggacaatatctatgatgatcttgcttccggcggtcgtgatgatcgccttggcttgactgcctgcctcaagt

SEQ ID NO: 433327 - DNA, 75 bp, synthetic construct
  source 1..75: mol_type = other DNA
tactggatacgtggatagcccgggtcagcagggaagagcgtgaggcgctggaggcaagacaacagaccatgatgg

SEQ ID NO: 433328 - DNA, 75 bp, synthetic construct
  source 1..75: mol_type = other DNA
cgttaacgaccagtttggcaacccggttgcgcatcaacccgtgacattcagtgcagagccaccagagcacatgac

SEQ ID NO: 433329 - DNA, 75 bp, synthetic construct
  source 1..75: mol_type = other DNA
ccgggaagagcgtgaggcactggaagccaggcaacaggccatgatggaagagcagcaggagggtgaacatgtctc

SEQ ID NO: 433330 - DNA, 75 bp, synthetic construct
  source 1..75: mol_type = other DNA
aattttcgaagtgctactccacatggattcgcaaaggcagttttcgaagcgaataagggggtgctctatgagtaa

SEQ ID NO: 433331 - DNA, 75 bp, synthetic construct
  source 1..75: mol_type = other DNA
ccctcgttgttgcatctgttctggttttctctctcgctggctgtggtgacaaagaagaatcaaagaaatttagtg

SEQ ID NO: 433332 - DNA, 75 bp, synthetic construct
  source 1..75: mol_type = other DNA
tggtgttgttcatcaccggactgttgccatacaaaaaaggtctgtttccggtgtaaaaaccgctcctgcccgcac

SEQ ID NO: 433333 - DNA, 75 bp, synthetic construct
  source 1..75: mol_type = other DNA
tggtgctgttcgtcaccggactgttgccacacaaagaaggtctgcttccggtgtaaaagtcgctcctgcccgcac

SEQ ID NO: 433334 - DNA, 75 bp, synthetic construct
  source 1..75: mol_type = other DNA
agattttgcgcgttattgagaagtacaactcgagcaataacgccacccaggaatcaagggcagtgacagtaaaga

SEQ ID NO: 433335 - DNA, 75 bp, synthetic construct
  source 1..75: mol_type = other DNA
atgacaaatggttatgaagaaaaaaccgatgtaaaaagggaaaagctggatcggattattggccgaagcacaata

SEQ ID NO: 433336 - DNA, 75 bp, synthetic construct
  source 1..75: mol_type = other DNA
ttgtagcgtgcaggaaattatcgagctggcgctggtggcagctgtgccgcgtcagacagaagtgaaccgcgaaag

SEQ ID NO: 433337 - DNA, 75 bp, synthetic construct
  source 1..75: mol_type = other DNA
gattgcgtcactgattattggaccgttactgacaccgctagactggccccctgaatctccagacaaccaatatca

SEQ ID NO: 433338 - DNA, 75 bp, synthetic construct
  source 1..75: mol_type = other DNA
aatattggtgttaaagatagtggaaaactattaccaggacatggcggactccttgacaggattgactcattaatt

SEQ ID NO: 433339 - DNA, 75 bp, synthetic construct
  source 1..75: mol_type = other DNA
accgtgagcgccattttttggggctggataatgaccgttttcgccttgagtcatgccgcctggttgttaatgttg

SEQ ID NO: 433340 - DNA, 75 bp, synthetic construct
  source 1..75: mol_type = other DNA
cgctcgttagacgatttacaaggacttcaatcttctgattactctgtttatcagatttttgaaaaagatgactta

SEQ ID NO: 433341 - DNA, 75 bp, synthetic construct
  source 1..75: mol_type = other DNA
tatctttcttgtcacggggcttatcggtgatggtcccgcccggcaacatgaagaaagcggggggcgtcatatgtt

SEQ ID NO: 433342 - DNA, 75 bp, synthetic construct
  source 1..75: mol_type = other DNA
agcccgggaaaaacattggaaggtctgatgggcggcgtaatcaccaccatgattgcgtcactgattattggaccg

SEQ ID NO: 433343 - DNA, 75 bp, synthetic construct
  source 1..75: mol_type = other DNA
atggtcgtctttggcaatgatgtaatcatcatgtcagataaacttattaattataatattgaaattgacgaaaaa

SEQ ID NO: 433344 - DNA, 75 bp, synthetic construct
  source 1..75: mol_type = other DNA
cagtaccttcaacggctttctgaatagcgccagtacgttattcagtatgggtatttaccggcgcatcattaacca

SEQ ID NO: 433345 - DNA, 75 bp, synthetic construct
  source 1..75: mol_type = other DNA
tggatgaagcctcactcagcctgcgcgccggttccctgcgtaccattacgcacatcctgctgccgctgctgcgcc

SEQ ID NO: 433346 - DNA, 75 bp, synthetic construct
  source 1..75: mol_type = other DNA
ctggtgtggagcgtggtcgccatacttgcgatatggattgcctttaacgccctgctctatggcagcattttctac

SEQ ID NO: 433347 - DNA, 75 bp, synthetic construct
  source 1..75: mol_type = other DNA
gagcaatccgggaagtcatcgtaaaaatatggtcagcctgttgtatccgctggccgtcagtaacctggtgatagc

SEQ ID NO: 433348 - DNA, 75 bp, synthetic construct
  source 1..75: mol_type = other DNA
tgatcgcgatgggcaagggcagctttatgcagggcattgagcaacttaccaccgttcacgccgagaaattaaact

SEQ ID NO: 433349 - DNA, 75 bp, synthetic construct
  source 1..75: mol_type = other DNA
atgaattcgttacaaatcttgagttttgtcggttttacgctgctggtggcggtcatcacctggtggaaggtccgt

SEQ ID NO: 433350 - DNA, 75 bp, synthetic construct
  source 1..75: mol_type = other DNA
caaaaaactgctgtccatcgtgctaattggtcagccggaactggcgacaaaactgtctgaacgcaatatggaagt

SEQ ID NO: 433351 - DNA, 75 bp, synthetic construct
  source 1..75: mol_type = other DNA
caaactgcaacgtgccggtaagcagctggccgacatcatggacgccagcgcagtggaagccatccgcgcccgtct

SEQ ID NO: 433352 - DNA, 75 bp, synthetic construct
  source 1..75: mol_type = other DNA
caccgagtcctgaaggacagcagtcaggcgggtttcagccacgttctggtgattgaggaggcccacagccttccc

SEQ ID NO: 433353 - DNA, 75 bp, synthetic construct
  source 1..75: mol_type = other DNA
aaagaccatcgagttcaccaccatgttgtgctttgccgtaccgggtacagtggcgggtgtctcgtatattcttgc

SEQ ID NO: 433354 - DNA, 75 bp, synthetic construct
  source 1..75: mol_type = other DNA
atgtcacagacacttgcactccatcccgtgaaaaagcgggatgcgattttcctttgggttttgctgggctggctg

SEQ ID NO: 433355 - DNA, 75 bp, synthetic construct
  source 1..75: mol_type = other DNA
cgttgtttcgttttcgggctgcactgggtaaattacagaaagcaggctggcgcacttatgtctgcccatggcctg

SEQ ID NO: 433356 - DNA, 75 bp, synthetic construct
  source 1..75: mol_type = other DNA
attgttatcgagccatacatcatcgctatggaagacaacgatgtgaaagggaaaaccctgaaggcagcagctatt

SEQ ID NO: 433357 - DNA, 75 bp, synthetic construct
  source 1..75: mol_type = other DNA
tgaccgacaaaccgtccctgctgatgtgcaaaaccatcatcggtttcggctctccgaacaaagccggtactcatg

SEQ ID NO: 433358 - DNA, 75 bp, synthetic construct
  source 1..75: mol_type = other DNA
atgtcctcacgtaaagagcttgccaatgctattcgtgcgctgagcatggacgcagtacaaaaagccaaatccggt

SEQ ID NO: 433359 - DNA, 75 bp, synthetic construct
  source 1..75: mol_type = other DNA
atgcacacgatggcggggggataccataaaactgttctctacatgagacagagtggtggtgatgtgttgattatc

SEQ ID NO: 433360 - DNA, 75 bp, synthetic construct
  source 1..75: mol_type = other DNA
caaccagagatttcattgattacattcaagctagggaaaacttacttacaacttcagataagtacattaaaatat

SEQ ID NO: 433361 - DNA, 75 bp, synthetic construct
  source 1..75: mol_type = other DNA
gctcggggaattacctacacccgctactgcgatgacatgaccttttcaggtcacttcaatgcccgccaggttaaa

SEQ ID NO: 433362 - DNA, 75 bp, synthetic construct
  source 1..75: mol_type = other DNA
cagcaacgcgcagccacactgccaacagccgcagatcctgaaactcgatatcgaaaactttttcgatagcattag

SEQ ID NO: 433363 - DNA, 75 bp, synthetic construct
  source 1..75: mol_type = other DNA
aggcggggttcagccacgttctggtgattgaggaggcccacagtctgcccgttccgacactgaaacacctcaaac

SEQ ID NO: 433364 - DNA, 75 bp, synthetic construct
  source 1..75: mol_type = other DNA
attgttatcgagccatacatcatcgcgatggaagacaacgatgtgaaagggaaaaccctgaaggcagcagcgatt

SEQ ID NO: 433365 - DNA, 75 bp, synthetic construct
  source 1..75: mol_type = other DNA
tatcaaccgcgagaatgcgccggtgattgttatcgagccatacatcatcgctatggaagacaacgatgtgaaagg

SEQ ID NO: 433366 - DNA, 75 bp, synthetic construct
  source 1..75: mol_type = other DNA
atggcaatcatcatatatccaagacatggcatttggtacatagcttgggtcgggatttcaaatccgatccccgtt

SEQ ID NO: 433367 - DNA, 75 bp, synthetic construct
  source 1..75: mol_type = other DNA
ctgacggacattatggacgcctgcgcagtggatgccatacgtgcccgcctgagcaatccgggaagtcatcgtaaa

SEQ ID NO: 433368 - DNA, 75 bp, synthetic construct
  source 1..75: mol_type = other DNA
caaactgcaacgggccggtaaacaactgacggacattatggacgcctgcgcagtggatgccatacgtgcccgcct

SEQ ID NO: 433369 - DNA, 75 bp, synthetic construct
  source 1..75: mol_type = other DNA
ggtatagaacgctttattcagtcttacggcacacaagcggctgtggtctcgttcttcttgatgatcttacaggcc

SEQ ID NO: 433370 - DNA, 75 bp, synthetic construct
  source 1..75: mol_type = other DNA
atgatgaagatacaaccgcgtaaaatctggtattaccgtgccgccatcatcatcctgttgttcgccacgctgctc

SEQ ID NO: 433371 - DNA, 75 bp, synthetic construct
  source 1..75: mol_type = other DNA
gcccggcgttgggttttgccgattgcagcgtagtgccgcaaccaacggcggcgcaactggctgatatcgcgcttg

SEQ ID NO: 433372 - DNA, 75 bp, synthetic construct
  source 1..75: mol_type = other DNA
cgtagataactacgccatgctgaatctgaatgcggcgggagaatatgtactggcgaacctgacgacgtttagcgg

SEQ ID NO: 433373 - DNA, 75 bp, synthetic construct
  source 1..75: mol_type = other DNA
tacgagattgtctgggacgaagagcagacccacaaattcaaaaatatctccccgcatctgcaacgcattaaagcg

SEQ ID NO: 433374 - DNA, 75 bp, synthetic construct
  source 1..75: mol_type = other DNA
gtttggcgcattctggggcggcttgctgtcgtggaccagttcgatggcgggtgcggcgctgtgcttttttatcgc

SEQ ID NO: 433375 - DNA, 75 bp, synthetic construct
  source 1..75: mol_type = other DNA
gtcagccttacccggggttcgctggttgaaatgaacggcgcacaggggctgggaagtctggggaccgtcagcttt

SEQ ID NO: 433376 - DNA, 75 bp, synthetic construct
  source 1..75: mol_type = other DNA
agtggatgcatcaaaagcactgtcctttaccaatacaggtcagattaaagccgcgtccgctgccgggactgcaat

SEQ ID NO: 433377 - DNA, 75 bp, synthetic construct
  source 1..75: mol_type = other DNA
attaatgtggctgatggcattggtgtgcgtacttcagcttcgctggctaagaccaacagcggcactattaatgta

SEQ ID NO: 433378 - DNA, 75 bp, synthetic construct
  source 1..75: mol_type = other DNA
gccaggttgttggtgagacgggaagccataactacaacgatcttaatggcagtctgaacttgcgttacagttggt

SEQ ID NO: 433379 - DNA, 75 bp, synthetic construct
  source 1..75: mol_type = other DNA
gcaacagcctcagtggtagcggggaagtcagtaccgtgtgggatcttaccgtcagcggtgacaatgacagcttta

SEQ ID NO: 433380 - DNA, 75 bp, synthetic construct
  source 1..75: mol_type = other DNA
gtcagggaagtcactatgactggtatattcagccacagtcccagcttacgtggatgaatgtaagagccggcgaac

SEQ ID NO: 433381 - DNA, 75 bp, synthetic construct
  source 1..75: mol_type = other DNA
acgacagttcaccaaccgataaactggtcatctccggtgatacttcgggtaacacgacggtctatgttgctaacg

SEQ ID NO: 433382 - DNA, 75 bp, synthetic construct
  source 1..75: mol_type = other DNA
tacaggtgcatttaccgcagcacagtttgtttatgaccccgctggcaatcgccagtagtgggcgagagaaagcgg

SEQ ID NO: 433383 - DNA, 75 bp, synthetic construct
  source 1..75: mol_type = other DNA
atggcttttggcattggcggtaaatgctacatggtggttgctggcgatatttcagatgttaataacgcggtctct

SEQ ID NO: 433384 - DNA, 75 bp, synthetic construct
  source 1..75: mol_type = other DNA
cactgggcggcgaaacagctgtgcagcaagttctgatgtctctaccagccggtaaattgttcctcgcggcctatc

SEQ ID NO: 433385 - DNA, 75 bp, synthetic construct
  source 1..75: mol_type = other DNA
cagtgtactggacatggtgttaatgggactgactccaataatggggacgttttccgtccccggtaagcaagaacg

SEQ ID NO: 433386 - DNA, 75 bp, synthetic construct
  source 1..75: mol_type = other DNA
cgcccgtaatattctggagcgtggcgtgcgtatcaacagtaacgaagagctggcgctgccgaaagagaagttgca

SEQ ID NO: 433387 - DNA, 75 bp, synthetic construct
  source 1..75: mol_type = other DNA
cttctctcggcgctaccccatccttcgcctgatacaagaactgatcgatcctgccatagctgagtacatggattc

SEQ ID NO: 433388 - DNA, 75 bp, synthetic construct
  source 1..75: mol_type = other DNA
gccatttgccgaagtgaactggttgtacactagcggtgatgtttcagtttcgttcgatggtgcggagatgaaaca

SEQ ID NO: 433389 - DNA, 75 bp, synthetic construct
  source 1..75: mol_type = other DNA
cctgggcgtgatgattattttccttgcctcgcatatggatgcggtggcctacaccatggctgcgaccagtacgcg

SEQ ID NO: 433390 - DNA, 75 bp, synthetic construct
  source 1..75: mol_type = other DNA
aacattatctcccgcagacaccggttgaagccccgggaaaagcgccagtgcttcctgctggaaccgtattcaaag

SEQ ID NO: 433391 - DNA, 75 bp, synthetic construct
  source 1..75: mol_type = other DNA
ctcgcatatggatgcagtggcctacaccatggcggcgaccagtacgcgtaatctccaggaaggtgacgatcctga

SEQ ID NO: 433392 - DNA, 75 bp, synthetic construct
  source 1..75: mol_type = other DNA
cggagatggtgcaaccatcaatacgaaggttgcacagggaacgctgctggaagccagtgggcagcggtcagtgct

SEQ ID NO: 433393 - DNA, 75 bp, synthetic construct
  source 1..75: mol_type = other DNA
aaaaggccttgttcagctcagtagtgcgactaacagcacgtctgaaacgctcgccgcaacgccaaaagcagtaaa

SEQ ID NO: 433394 - DNA, 75 bp, synthetic construct
  source 1..75: mol_type = other DNA
tcaaaagcgtattcaatggcgctgggagcaagtagcgtcgcatctgaagaaaacgcaattgccctgggcgtagca

SEQ ID NO: 433395 - DNA, 75 bp, synthetic construct
  source 1..75: mol_type = other DNA
aatacaatcacacccgtattgtcaaacatatagctgacagaacctgccgctccgatattgccgccttttttattg

SEQ ID NO: 433396 - DNA, 75 bp, synthetic construct
  source 1..75: mol_type = other DNA
cagcgaataaaccaacaggcctgacagatggaactgtatatgtaatttacagttcgtacattaaaccgactgctg

SEQ ID NO: 433397 - DNA, 75 bp, synthetic construct
  source 1..75: mol_type = other DNA
gttcaggataccggctcaaactctgccgataacattggtggcgtatattacaggccggtgcagaaatacattaac

SEQ ID NO: 433398 - DNA, 75 bp, synthetic construct
  source 1..75: mol_type = other DNA
aacgccgaaagcggtaaaggccgcgtatgaccttgctaacgggaaatatactgcgcaggatgccaccacagcgcg

SEQ ID NO: 433399 - DNA, 75 bp, synthetic construct
  source 1..75: mol_type = other DNA
acaaatgtcgcaatatgaactcggttaatccgctaaaactggttaactgtgacgaactggattttcacaatagaa

SEQ ID NO: 433400 - DNA, 75 bp, synthetic construct
  source 1..75: mol_type = other DNA
tcaggaaccaaatggccggaagaccgtaaccacgcaacggtttgtccaggaactgaacaaggttaactggaactg

SEQ ID NO: 433401 - DNA, 75 bp, synthetic construct
  source 1..75: mol_type = other DNA
aaggatcaggtaaatttatggctgcaaattcataccggttcattgcagggtaatgactccaacttactgatagtg

SEQ ID NO: 433402 - DNA, 75 bp, synthetic construct
  source 1..75: mol_type = other DNA
atgaatagtctggaatggatgaaatatgcgctgtttgtgtcagcccctgaaaatcaagtggcagtggcttcatta

SEQ ID NO: 433403 - DNA, 75 bp, synthetic construct
  source 1..75: mol_type = other DNA
atgccgcgtcgttcagatattgagatcgccttcagggcctctattgtgcatgaaaggtcaggccgcaggattgtg

SEQ ID NO: 433404 - DNA, 75 bp, synthetic construct
  source 1..75: mol_type = other DNA
tggcagcctgagttcacagataaaatactctccaggaaacccggggcggttcagctcgtcgttttcgctgtcttc

SEQ ID NO: 433405 - DNA, 75 bp, synthetic construct
  source 1..75: mol_type = other DNA
gtgccggaaatgggaatccaaaaggtattactggtgcattatggcgacggacatcggttggatttactaattttg

SEQ ID NO: 433406 - DNA, 75 bp, synthetic construct
  source 1..75: mol_type = other DNA
ctggatggcagtattacacaaacgaatactggctcggttattaccaatgaggcagatatctcttcgccgctgaat

SEQ ID NO: 433407 - DNA, 75 bp, synthetic construct
  source 1..75: mol_type = other DNA
tggctgccggtgcaacacttgctactggtatactggatcagcaggatggcagtgtcctgagtatcaatcttggga

SEQ ID NO: 433408 - DNA, 75 bp, synthetic construct
  source 1..75: mol_type = other DNA
gcggaatccacatctgaggtgacgaatgcaatggttaccggggaaacggtagacgcttctgacagacaacatagt

SEQ ID NO: 433409 - DNA, 75 bp, synthetic construct
  source 1..75: mol_type = other DNA
ccactgatctgacgctttccggggataacagtaatttcagcggtgaattccgtgtgcagaaagatgctgctctgc

SEQ ID NO: 433410 - DNA, 75 bp, synthetic construct
  source 1..75: mol_type = other DNA
ggatacgctggtgcgcagcggcacattacagatggcaaatgataatgtacttggcgcaacaggtaatctgaacgt

SEQ ID NO: 433411 - DNA, 75 bp, synthetic construct
  source 1..75: mol_type = other DNA
aatgacagcggtgctgaaattcagggggttgtggctctgaacggcggtgataacacattcaccaataaaggcagt

SEQ ID NO: 433412 - DNA, 75 bp, synthetic construct
  source 1..75: mol_type = other DNA
gtcgattgcgcatggcaggatgaaacccaactacccacctggattatgagctggccggtggttcaaacgctgtaa

SEQ ID NO: 433413 - DNA, 75 bp, synthetic construct
  source 1..75: mol_type = other DNA
tacgctattcctggcgtgaatcttttaagcagtggagaaaaccgacgcgaaatagggtcactgttcggtgagtgg

SEQ ID NO: 433414 - DNA, 75 bp, synthetic construct
  source 1..75: mol_type = other DNA
cgttatctgctcaagcagtatcctccacattctggctgtacgaaagagtacactgctgcaaatcgacacacttat

SEQ ID NO: 433415 - DNA, 75 bp, synthetic construct
  source 1..75: mol_type = other DNA
gcagattagtgttcaattttatgaaacgcaccaacggcgaagcgttactaatagtgtttccagaatatgataatg

SEQ ID NO: 433416 - DNA, 75 bp, synthetic construct
  source 1..75: mol_type = other DNA
tgtacatagctgattacctggctgacaccatgcatttgtcagcagaggagcacggcgcgtatttgttgctgatgt

SEQ ID NO: 433417 - DNA, 75 bp, synthetic construct
  source 1..75: mol_type = other DNA
ccagggttttcacattgtcgactgtgcatggcaggatgaaacccagctccccacctggattatgagttggccggc

SEQ ID NO: 433418 - DNA, 75 bp, synthetic construct
  source 1..75: mol_type = other DNA
atgagcatactattgtggtgactgataacggctgcgaaattctgacactacgcaaggatgacaccatcccggcga

SEQ ID NO: 433419 - DNA, 75 bp, synthetic construct
  source 1..75: mol_type = other DNA
atggctatctcaatcaagaccccagaagatatcgaaaaaatgcgcgtcgctggccgactggctgccgaagtgctg

SEQ ID NO: 433420 - DNA, 75 bp, synthetic construct
  source 1..75: mol_type = other DNA
tgtatacacttttcgagaaatacttaatgaataattgggatgttagcaataagctaattgaacaacttctcacac

SEQ ID NO: 433421 - DNA, 75 bp, synthetic construct
  source 1..75: mol_type = other DNA
cggataaaggcgacaacgcaggaccaggaggcgctgaatacccagcttgctaaaaaacagcggctggagaagtgg

SEQ ID NO: 433422 - DNA, 75 bp, synthetic construct
  source 1..75: mol_type = other DNA
atcaaagatggtttccacggcgacacctcgaaaatgtttatcgtcggtaaaccgaccatcatgggcgaacgcctg

SEQ ID NO: 433423 - DNA, 75 bp, synthetic construct
  source 1..75: mol_type = other DNA
atgagcatactattgtggtgactgataacggctgcgaaattctgacgctacgcaaggatgacaccatcccagcga

SEQ ID NO: 433424 - DNA, 75 bp, synthetic construct
  source 1..75: mol_type = other DNA
atgcgaattctgaactgttatatggcgaatgacagcaagggccattttgttacggcgaaagacgcagcgaagcac

SEQ ID NO: 433425 - DNA, 75 bp, synthetic construct
  source 1..75: mol_type = other DNA
ttggattaaacggcatgttcggtaaaggcggctatatggatggccctggcggaggtatcacgccagtaaccatta

SEQ ID NO: 433426 - DNA, 75 bp, synthetic construct
  source 1..75: mol_type = other DNA
acgccagtaaacattaacggtacagtctggttccagggcgacggttgcaaagccaatacctgcggctgggacttt

SEQ ID NO: 433427 - DNA, 75 bp, synthetic construct
  source 1..75: mol_type = other DNA
cgaatgacagcaagggccattttgttacggcgaaagaagccgcgaagcacaaccgccaggacgttttgtgctgtg

SEQ ID NO: 433428 - DNA, 75 bp, synthetic construct
  source 1..75: mol_type = other DNA
tatatggcgaatgacagcaaggggcattttgttacggcgaaagaagcagcgaagcacaaccgccgggacattttg

SEQ ID NO: 433429 - DNA, 75 bp, synthetic construct
  source 1..75: mol_type = other DNA
gaaggagaaaagtgctgcccgcgttgtggtaccggggtatacagcagggagggggggctgcaggaaggcaactgg

SEQ ID NO: 433430 - DNA, 75 bp, synthetic construct
  source 1..75: mol_type = other DNA
agtggttaataccggacgagaaaacagacgaggaacagcgcgtatataacgaagaatataataaagcgtatcagg

SEQ ID NO: 433431 - DNA, 75 bp, synthetic construct
  source 1..75: mol_type = other DNA
tgaccggttatgaaaactttaaccgtgaagcatttcacaaggcggaagaggaactgaaacgggaagggcacaccg

SEQ ID NO: 433432 - DNA, 75 bp, synthetic construct
  source 1..75: mol_type = other DNA
cagtcaggacattgatcatgtgctggatgttttcatccgcacgaacagcggggggacaaaacttgagttctccga

SEQ ID NO: 433433 - DNA, 75 bp, synthetic construct
  source 1..75: mol_type = other DNA
agtataacttcaggttcctgaccgacaagcaatacactgattcacttacagacaacaaacatcactggttctgcc

SEQ ID NO: 433434 - DNA, 75 bp, synthetic construct
  source 1..75: mol_type = other DNA
gaagaagcactgaaacgggaagggcataccgttttaaacccggcagtacttccggacgggctgacacagccgcag

SEQ ID NO: 433435 - DNA, 75 bp, synthetic construct
  source 1..75: mol_type = other DNA
atgcgagcagcgttttgggtagggtgtgccgctttattgttgtctgcgtgtagtagtgaacctgttcagcaggcg

SEQ ID NO: 433436 - DNA, 75 bp, synthetic construct
  source 1..75: mol_type = other DNA
gtccgatgacgggatatgagaacttcaaccgtgaggcgtttcacaaggcggaagatgcgctgaaacgggaagggc

SEQ ID NO: 433437 - DNA, 75 bp, synthetic construct
  source 1..75: mol_type = other DNA
ctcgttattgcgtcggactatgctgaatatgtggcagaggcgcgttacagaagaaaattccctgagggggtgaac

SEQ ID NO: 433438 - DNA, 75 bp, synthetic construct
  source 1..75: mol_type = other DNA
cttagtattgcgtcggactatgcggaatatgttgcagaggcgcgttacagaagaaaattcccggaggtggtgagc

SEQ ID NO: 433439 - DNA, 75 bp, synthetic construct
  source 1..75: mol_type = other DNA
caaaagagggtgcggaaggggcggcgcgtgcgcatgtatcagtgacaaatctgtggggctctattacgtcgggac

SEQ ID NO: 433440 - DNA, 75 bp, synthetic construct
  source 1..75: mol_type = other DNA
cgattacaaattctatgaattcctgaaagaatactgtcagcgatttaatgaagaaaacccctgcgtagcaacaaa

SEQ ID NO: 433441 - DNA, 75 bp, synthetic construct
  source 1..75: mol_type = other DNA
agcacttgataacatcaggaattttattgataaacagcagttaacgaatagtgatactccgaagaaaagcacggt

SEQ ID NO: 433442 - DNA, 75 bp, synthetic construct
  source 1..75: mol_type = other DNA
ggccagccgtactggggattataaggattttggcaaaagcaatcctacgcaggatgacgacagaattatctacac

SEQ ID NO: 433443 - DNA, 75 bp, synthetic construct
  source 1..75: mol_type = other DNA
tctatcaggtcatccgatcaatgtttctgaagggctggaatttgtgcaatcaggtactaacgtgccctatgtgca

SEQ ID NO: 433444 - DNA, 75 bp, synthetic construct
  source 1..75: mol_type = other DNA
ccgccagcgccgactctgccagcgtacagtttgaaggcaaggtgcagcgtattgcctgtgttcaccattacggcc

SEQ ID NO: 433445 - DNA, 75 bp, synthetic construct
  source 1..75: mol_type = other DNA
gattttattcatcaactgcaacagggcgataccgaccaggtgcttgccttgttaaatcaaaccctcagctcataa

SEQ ID NO: 433446 - DNA, 75 bp, synthetic construct
  source 1..75: mol_type = other DNA
gtgtcgccgtgccgcacggtaaaagcgcctgtgttaaacaaccgttcgtattattcgctcgcaaagcgcaggcca

SEQ ID NO: 433447 - DNA, 75 bp, synthetic construct
  source 1..75: mol_type = other DNA
ttcagcaccccttttcgtgaaataaccgaaacactgcttgttgataccgttgatactgaacctcccggacatcac

SEQ ID NO: 433448 - DNA, 75 bp, synthetic construct
  source 1..75: mol_type = other DNA
atgcctgcctggatgccgaatatgccggaaaaggaaaacatccctcccggaaatatggcttctggcggacactga

SEQ ID NO: 433449 - DNA, 75 bp, synthetic construct
  source 1..75: mol_type = other DNA
agcagctatgaaccgcgcagggtaacagcacgcagcaaaaaggggcgcatcaaacgtcagatgtttacaaagctg

SEQ ID NO: 433450 - DNA, 75 bp, synthetic construct
  source 1..75: mol_type = other DNA
taaacccggccccggcatgccgccgcacggttggcgcacgcagttctgggtggttgatcaaaacaataaagtgct

SEQ ID NO: 433451 - DNA, 75 bp, synthetic construct
  source 1..75: mol_type = other DNA
ttgaagcacataatggccgcattattgccgcccattcgccttttggcggggtaagcattacagtagagttaccgc

SEQ ID NO: 433452 - DNA, 75 bp, synthetic construct
  source 1..75: mol_type = other DNA
gagacggtggcgtctttacaggcggaggtcggtacactgaccaaactggttgacgatctccatcagttgtcgatg

SEQ ID NO: 433453 - DNA, 75 bp, synthetic construct
  source 1..75: mol_type = other DNA
tatgtctattaagtatccatgtagaaagttgttgggagttaatgaacaattaatcattgacttagaaaaattatt

SEQ ID NO: 433454 - DNA, 75 bp, synthetic construct
  source 1..75: mol_type = other DNA
cccgacggcacacggcggcccattatggtcaatggtgcggaagttggcgcggtgatcgcctcccctgttgaacga

SEQ ID NO: 433455 - DNA, 75 bp, synthetic construct
  source 1..75: mol_type = other DNA
aggtcggtacactgaccaaactggtggatgacctgcatcaactgtcgatgtcagatgaaggtgctctcgcctatc

SEQ ID NO: 433456 - DNA, 75 bp, synthetic construct
  source 1..75: mol_type = other DNA
tctggaaccagccaagagaagcagcatgatgcgccagctggcgcaggaactgcgccggacacagcagcagaatat

SEQ ID NO: 433457 - DNA, 75 bp, synthetic construct
  source 1..75: mol_type = other DNA
accggaggtccgttacgcagagcgccgcctgctgggtcttaatggtgagtcttatgttctaactcttgatatatt

SEQ ID NO: 433458 - DNA, 75 bp, synthetic construct
  source 1..75: mol_type = other DNA
tctggagccagccgcaagaagccgtatgatgcgccagctggcgcaagaactgcgccggacacagcagcagaacat

SEQ ID NO: 433459 - DNA, 75 bp, synthetic construct
  source 1..75: mol_type = other DNA
caggatgcagcgcaaccctgatggcagcagttatgaaccgcgcaggctaacagcacgcagcaaaaaggggcgcat

SEQ ID NO: 433460 - DNA, 75 bp, synthetic construct
  source 1..75: mol_type = other DNA
ggcgatcgggtggcaggaaaagttttcttcgaaacgcaatcgacccacaaaatgctggcggcgttgtcgcaggca

SEQ ID NO: 433461 - DNA, 75 bp, synthetic construct
  source 1..75: mol_type = other DNA
cgggggtttcagcgttcctggtagccatgctggtggtggcccctcaggtatgggcagaaacctttactgcgaagg

SEQ ID NO: 433462 - DNA, 75 bp, synthetic construct
  source 1..75: mol_type = other DNA
atggcagcgcttgtggtaacctggtttaatccggtgaaagaggcgttttacatgcatctgccagcagccggaaaa

SEQ ID NO: 433463 - DNA, 75 bp, synthetic construct
  source 1..75: mol_type = other DNA
tgcgcgatcgcgtcagtcgcaaaggaccggaggtccgctatgcagagcgccgcctgctgggtgtaaatgatgatg

SEQ ID NO: 433464 - DNA, 75 bp, synthetic construct
  source 1..75: mol_type = other DNA
aaattattgggttttagttctgtatcagtaaatgtagtcaatgacattatatattcatggattactaatttagat

SEQ ID NO: 433465 - DNA, 75 bp, synthetic construct
  source 1..75: mol_type = other DNA
accggaggtccgttacgcagagcgtcgccttctgggcgtaaatgatgatgttgaggcaatgacccgcgacatgat

SEQ ID NO: 433466 - DNA, 75 bp, synthetic construct
  source 1..75: mol_type = other DNA
ccgccagcgccgattctgccagcgtgcagtttgaaggtaaggtgcagcgtattgcccgcgttcaccattacggcc

SEQ ID NO: 433467 - DNA, 75 bp, synthetic construct
  source 1..75: mol_type = other DNA
accggaggtccgttacgcagagcgtcgcctgctgggtgtaaatgatgatgtggaaactgtcattcaggatgcttt

SEQ ID NO: 433468 - DNA, 75 bp, synthetic construct
  source 1..75: mol_type = other DNA
actggctgagtgctttgctggcgaatctggaaccagccgcaagaagccgcatgatgcggcagctggcgcaggaac

SEQ ID NO: 433469 - DNA, 75 bp, synthetic construct
  source 1..75: mol_type = other DNA
gtgtttacgatcagataagtgcccgtcttacgcagtggcaacgttgttttggtgaagagacgcatcgtgacgcca

SEQ ID NO: 433470 - DNA, 75 bp, synthetic construct
  source 1..75: mol_type = other DNA
tcagtttgcggtgggtaagagcggtaaaatatcggtggttgcgtcactcgcacctgtcatgctggatgataaaaa

SEQ ID NO: 433471 - DNA, 75 bp, synthetic construct
  source 1..75: mol_type = other DNA
gctggctggagccccatgaagcacaaaggctgattgatgaatgtccggagccattaaagtctgttgttgaatttg

SEQ ID NO: 433472 - DNA, 75 bp, synthetic construct
  source 1..75: mol_type = other DNA
gcggcgctgagacgagctggtattgatgatttcagatttcacgacttgagacacacctgggcaagttggctggtt

SEQ ID NO: 433473 - DNA, 75 bp, synthetic construct
  source 1..75: mol_type = other DNA
actggctgtttttgtctgggcatggccggatggaccgcagttaatgaccgatcgtttaaaggagctggctaccgc

SEQ ID NO: 433474 - DNA, 75 bp, synthetic construct
  source 1..75: mol_type = other DNA
cagcgatctttgggtgcaaccaaaagttgatggtgttgcggtaactctggtctaccgtgagggaaaactgattaa

SEQ ID NO: 433475 - DNA, 75 bp, synthetic construct
  source 1..75: mol_type = other DNA
atgtcaatcaaactacgcggtggcacgtggcactgtgatttcgtcgcgccagatggatcaagagttagacgctct

SEQ ID NO: 433476 - DNA, 75 bp, synthetic construct
  source 1..75: mol_type = other DNA
agatggatcaagagttagacgctctcttgaaacatcggacaagaggcaagcgcaagaacttcacgatcgtctgaa

SEQ ID NO: 433477 - DNA, 75 bp, synthetic construct
  source 1..75: mol_type = other DNA
cttggtgaaattcctgatataacgttcgaggaagcgtgtgtcaggtggcttgaagagaaagcacataaaaaatca

SEQ ID NO: 433478 - DNA, 75 bp, synthetic construct
  source 1..75: mol_type = other DNA
tcaccttaccgaacacgcacggcaaatagactcgatcctgaacccatcggtcccaaatttgtcccagtcaaaaaa

SEQ ID NO: 433479 - DNA, 75 bp, synthetic construct
  source 1..75: mol_type = other DNA
cagaagcagaaaaagcttattatgcttccatcagaaacgatgatctggcagcctgagttcacagataaaacactc

SEQ ID NO: 433480 - DNA, 75 bp, synthetic construct
  source 1..75: mol_type = other DNA
cgcaagaacttcacgatcgtctgaaagcagaagcgtggagagtaaaaaatctcggggaatcaccgaaaaagctat

SEQ ID NO: 433481 - DNA, 75 bp, synthetic construct
  source 1..75: mol_type = other DNA
cgacagaactccatgacaagctaaaggctgaagcatggcgggtcagcaaacttggtgaaatacctgatataacgt

SEQ ID NO: 433482 - DNA, 75 bp, synthetic construct
  source 1..75: mol_type = other DNA
tctctatgatactgatggcattctgattgccgtggcgaactgcccggagacctacaagccgcaactgcaggaggg

SEQ ID NO: 433483 - DNA, 75 bp, synthetic construct
  source 1..75: mol_type = other DNA
caaatggtgtattcaattgctcaacaagcatccgatataaatggcgtatttagtgcgacatcaggcacacctaat

SEQ ID NO: 433484 - DNA, 75 bp, synthetic construct
  source 1..75: mol_type = other DNA
tgccgatgcgctggaaggcaaacatccggctgttccggttgatgtggtgcatcgcgcgctgcgtgaaatccacga

SEQ ID NO: 433485 - DNA, 75 bp, synthetic construct
  source 1..75: mol_type = other DNA
gcagatataactgctagggtactgccaaatgatttgaccatcctcaatatgggtaatgagtctgtattggcagtg

SEQ ID NO: 433486 - DNA, 75 bp, synthetic construct
  source 1..75: mol_type = other DNA
cggctattaccctgaaaatcgacccgtcggtcgtgctggcaacgcgccagtatgtcgacgataaggttatcgagg

SEQ ID NO: 433487 - DNA, 75 bp, synthetic construct
  source 1..75: mol_type = other DNA
ccgcatccgcaatacctgaaaataactgacattgcgaaatataccccggtcggcgtgccgctcccttatccgtca

SEQ ID NO: 433488 - DNA, 75 bp, synthetic construct
  source 1..75: mol_type = other DNA
tgctgatgcgctggaaggcaaacatccggctgttccggttgatgtggtgcaccgcgcgctgcgtgaaatccacga

SEQ ID NO: 433489 - DNA, 75 bp, synthetic construct
  source 1..75: mol_type = other DNA
ggtaaagaaccgcctgtttatgaaccaaagccagtatcaactcagacaaaggcaaagcatcttgccatgataaag

SEQ ID NO: 433490 - DNA, 75 bp, synthetic construct
  source 1..75: mol_type = other DNA
gatggctggaaaaggaggaagcaaaacgccttattgaaccgccccgggaatcctggagactaaacttcctgagaa

SEQ ID NO: 433491 - DNA, 75 bp, synthetic construct
  source 1..75: mol_type = other DNA
ggccaataccagtcagattatcgcggaacagattattcccgagaatgaaggtggtttctggatccgcgagattgg

SEQ ID NO: 433492 - DNA, 75 bp, synthetic construct
  source 1..75: mol_type = other DNA
ccacctcgaaattattacaccaatcaggactttgtcagctatgccggtactgggtttactgcttttggtggaact

SEQ ID NO: 433493 - DNA, 75 bp, synthetic construct
  source 1..75: mol_type = other DNA
aggcaaatattaatttaaatgaaaaagaacaggctttatttgatattagtgattcattgataaatgggcaagcat

SEQ ID NO: 433494 - DNA, 75 bp, synthetic construct
  source 1..75: mol_type = other DNA
ctgaacgttgtggcctgaccgttcattttctgccgtgtaatcagattaaagtgacaaccgtctgcgagggctatg

SEQ ID NO: 433495 - DNA, 75 bp, synthetic construct
  source 1..75: mol_type = other DNA
cccctataatgaaagccctgtaagtgcaactttcaatttaagcggcctgtcaaatgcactaaaaccgcttcaaga

SEQ ID NO: 433496 - DNA, 75 bp, synthetic construct
  source 1..75: mol_type = other DNA
tatctcgcttggataaacagaaggcaaaaacgaaaacatgggacatatctagcgataccaaatcggtattttatc

SEQ ID NO: 433497 - DNA, 75 bp, synthetic construct
  source 1..75: mol_type = other DNA
aaagaaatgtgggaaggtcttgtgattgtggccgaaacagttcttttattatggtctgtgattgcgtgtattttt

SEQ ID NO: 433498 - DNA, 75 bp, synthetic construct
  source 1..75: mol_type = other DNA
ttgctgcgctgtttctgggcgcggcgctggcaggggccggaaccacctatcagggaatgttccgtaatcccttag

SEQ ID NO: 433499 - DNA, 75 bp, synthetic construct
  source 1..75: mol_type = other DNA
gtgcattatttatatcaattagtgtactgcctgttcacgcagcaactgaacataagaatttcaatgcagtgctcc

SEQ ID NO: 433500 - DNA, 75 bp, synthetic construct
  source 1..75: mol_type = other DNA
gcgcatcatttatatcaattagtgtgctacctgctcacgcagcaactgagcataataactttaagtcatcactcc

SEQ ID NO: 433501 - DNA, 75 bp, synthetic construct
  source 1..75: mol_type = other DNA
ataccgttttaaacccggcagtacttccggacgggctgactcagccacactacatggatatttgcatggcaatgc

SEQ ID NO: 433502 - DNA, 75 bp, synthetic construct
  source 1..75: mol_type = other DNA
gtgctgaaacgggaagggcataccgttttaaacccggcagtacttccggacgggctgactcagccacactacatg

SEQ ID NO: 433503 - DNA, 75 bp, synthetic construct
  source 1..75: mol_type = other DNA
cgggctgactcagccacattacatggatatttgcatggcaatgattcgttgtgtggatgcggtttatatgctgaa

SEQ ID NO: 433504 - DNA, 75 bp, synthetic construct
  source 1..75: mol_type = other DNA
gatatttgtacggcgatgctccgctgtgtggatacgatttacatgctgaaaggctggcatcggtcggcaggcgct

SEQ ID NO: 433505 - DNA, 75 bp, synthetic construct
  source 1..75: mol_type = other DNA
tgaccgggtataaaaatttcaaccgtgaggcatttcacgaggcggaagagaagctgaaacagaaagggtgcacgg

SEQ ID NO: 433506 - DNA, 75 bp, synthetic construct
  source 1..75: mol_type = other DNA
gtgagagtgagagtctatatcgccggtccaatgaccgggtataaaaatttcaaccgtgaggcgtttcacaatgcg

SEQ ID NO: 433507 - DNA, 75 bp, synthetic construct
  source 1..75: mol_type = other DNA
tgacctggctgtgggataactggtacggcaaatctcgccgcgtgatgcagcgtactttctcttctcagtcacggc

SEQ ID NO: 433508 - DNA, 75 bp, synthetic construct
  source 1..75: mol_type = other DNA
cattggggattcttgcgggatttcgtttcttgttgcagtttttaggcggtatcgcagtgatgggtttaactatcg

SEQ ID NO: 433509 - DNA, 75 bp, synthetic construct
  source 1..75: mol_type = other DNA
aagcgaaacctataacacccgtttgtatatctttaccgaccgcccgctataccgcgcaggcgaccgtgttgatgt

SEQ ID NO: 433510 - DNA, 75 bp, synthetic construct
  source 1..75: mol_type = other DNA
atgactcgcggcgttactgatgacagcggtgccttgcagttacaacatatatcgcctgaacgttcatacattctt

SEQ ID NO: 433511 - DNA, 75 bp, synthetic construct
  source 1..75: mol_type = other DNA
accttcattcttatgcctatacagcatatcaatctggtgatgttataaccgcgagaaatctattccatttgctca

SEQ ID NO: 433512 - DNA, 75 bp, synthetic construct
  source 1..75: mol_type = other DNA
aaacgcaatggtcgtcctacggtggtagttgactgcttcactgatgaagatcgtgaacaataccagaatctacca

SEQ ID NO: 433513 - DNA, 75 bp, synthetic construct
  source 1..75: mol_type = other DNA
cggtgatgttgatctgggtagcttctttactcttcaagaactggatgaagcaatgtttaactacggcaaagaaac

SEQ ID NO: 433514 - DNA, 75 bp, synthetic construct
  source 1..75: mol_type = other DNA
gtggcgagaacgcgctgatgttgcccgagcaggcgagcaatatccggctacaaagtagtgaaacgccgcaggaga

SEQ ID NO: 433515 - DNA, 75 bp, synthetic construct
  source 1..75: mol_type = other DNA
gcaggggcagttgctggaaaaagcgcgaaatgaaatgggcgaactggcctatatggtgccggtgaaagaactgac

SEQ ID NO: 433516 - DNA, 75 bp, synthetic construct
  source 1..75: mol_type = other DNA
ctcgttatgtgcgttcctatgcacctgcacagcaaagtgttgcggcagggagcgaatggaccgggatgcaggtga

SEQ ID NO: 433517 - DNA, 75 bp, synthetic construct
  source 1..75: mol_type = other DNA
cacaacatggggcatttcagtcaataaacccaacgccgcgaaacagcaggggcaattgctggaaaaagcgcgtaa

SEQ ID NO: 433518 - DNA, 75 bp, synthetic construct
  source 1..75: mol_type = other DNA
atcgccggaacgttcatacattctgggtaaagatgctgaaggcggcgtttttgtctccgagaattttttctacga

SEQ ID NO: 433519 - DNA, 75 bp, synthetic construct
  source 1..75: mol_type = other DNA
caaagtgtcaggcaacgaacttctggtgtggactgctggcaaaaaacagggtgaagcgaagccaggctcagagat

SEQ ID NO: 433520 - DNA, 75 bp, synthetic construct
  source 1..75: mol_type = other DNA
agcgggcatttaacggaggagtatgtggatccgttatttaagcagataagggatgttgcctccggcaaaatcaga

SEQ ID NO: 433521 - DNA, 75 bp, synthetic construct
  source 1..75: mol_type = other DNA
cgcaacgctgatccccgtgttgaatggtgttcaccaggcgggtctgaataccacgatagaattcattagcgcggg

SEQ ID NO: 433522 - DNA, 75 bp, synthetic construct
  source 1..75: mol_type = other DNA
attttcttcgaaagattcctacggcatttcttgtagctattgcatttgtattagctcttatactttttttacctg

SEQ ID NO: 433523 - DNA, 75 bp, synthetic construct
  source 1..75: mol_type = other DNA
aggggtacatgacgtcagccgggcatcgagcctttcaacagcgaaagcacagattgaacttgtagctcaggaaat

SEQ ID NO: 433524 - DNA, 75 bp, synthetic construct
  source 1..75: mol_type = other DNA
ttgtcgattgccccggccacgacagccaggagttccgtagcgccctgacagtatcagatatcgtggtaacactgg

SEQ ID NO: 433525 - DNA, 75 bp, synthetic construct
  source 1..75: mol_type = other DNA
tgagcgaattctggcgcagtccatcgaagtgtatcagcgtaaagaagaagtggttggtgctgagatgatgcgtca

SEQ ID NO: 433526 - DNA, 75 bp, synthetic construct
  source 1..75: mol_type = other DNA
aacccggtgtttaaagcaccgagcgtgcataaatacgataccgaggattatcgccatgtcgattcgcaatttggc

SEQ ID NO: 433527 - DNA, 75 bp, synthetic construct
  source 1..75: mol_type = other DNA
ttgtccgccactggctgaaagcgccgtggaatatggacggctggcggctggatgtggtgcatatgctgggggaag

SEQ ID NO: 433528 - DNA, 75 bp, synthetic construct
  source 1..75: mol_type = other DNA
atgcataagcagcgcagtcagccgcagcctggcgtcaccgcatggcgtgcggcgattgatctctccagcggacaa

SEQ ID NO: 433529 - DNA, 75 bp, synthetic construct
  source 1..75: mol_type = other DNA
aaatatgtacagatatttcatatggatatacagcaagcgcaactgcgaaacctattggtcctaaatttctccgta

SEQ ID NO: 433530 - DNA, 75 bp, synthetic construct
  source 1..75: mol_type = other DNA
ctggctgggctatgccagcctgccgaagctggattatcagtcggaaagtctggtgaatgaaatttatcgcgggga

SEQ ID NO: 433531 - DNA, 75 bp, synthetic construct
  source 1..75: mol_type = other DNA
ggcggctggatgtggtgcatatgctgggagaagcgggtggggcgcgcaataatttgcagcacgttgctgggatca

SEQ ID NO: 433532 - DNA, 75 bp, synthetic construct
  source 1..75: mol_type = other DNA
atgaaagcgcctgtaatgaaggggcaggggtacatgacgttagccgggcatcgagcctttcaacagcgaaagcac

SEQ ID NO: 433533 - DNA, 75 bp, synthetic construct
  source 1..75: mol_type = other DNA
aagaacgtcgccgtctgtttgaaaagatggggcaactgtatgaagggtgctttatcgttaccttcacctggttcc

SEQ ID NO: 433534 - DNA, 75 bp, synthetic construct
  source 1..75: mol_type = other DNA
cagggaaatgaaagcctggaggttaaacagagccgtagtgttcgtgatggtgagcagggaattccggttgcactg

SEQ ID NO: 433535 - DNA, 75 bp, synthetic construct
  source 1..75: mol_type = other DNA
atgaagaaggtgacgttgtttctgtttgctgtcagcctcctgtcctccactgtactggcctggaatacaccggga

SEQ ID NO: 433536 - DNA, 75 bp, synthetic construct
  source 1..75: mol_type = other DNA
taagcatgagatcagcataattcaggcaaacctttcgcaggctgtttcgattgaacgactgaacggcgtgaaaat

SEQ ID NO: 433537 - DNA, 75 bp, synthetic construct
  source 1..75: mol_type = other DNA
actgtccgaaacatacggtgatggctgggttgatgaatggctacgcactaagggtctggacttaaatgattatga

SEQ ID NO: 433538 - DNA, 75 bp, synthetic construct
  source 1..75: mol_type = other DNA
tgcgaataccgctggtctacccgttttattttcctggattcccatgaggctatttccaaattaacggcataccgc

SEQ ID NO: 433539 - DNA, 75 bp, synthetic construct
  source 1..75: mol_type = other DNA
gcgccgaactcacccaggcgactatcaatcttttcggttcatttgccccgtacatcccggaattgattcaggact

SEQ ID NO: 433540 - DNA, 75 bp, synthetic construct
  source 1..75: mol_type = other DNA
agccatcaccaccctgctgcccgtgttacccgtcaatgccataccgatcggcggctggcggctcgatccttatca

SEQ ID NO: 433541 - DNA, 75 bp, synthetic construct
  source 1..75: mol_type = other DNA
tgccgcgttccagcatgactggctcggcccgcgtggtctggcagaagataccaccgtggcgtacctggtgacgga

SEQ ID NO: 433542 - DNA, 75 bp, synthetic construct
  source 1..75: mol_type = other DNA
tttcacttgaatggacagcgcccggcatggcgaaagtgacgctgcctgtgaccggcgataaaaaatgttcgtgcg

SEQ ID NO: 433543 - DNA, 75 bp, synthetic construct
  source 1..75: mol_type = other DNA
ggtgaattacgtctgaacggcacgatgccggaacgctggcgggtgtcactgccggtaagtattgagtaccagtaa

SEQ ID NO: 433544 - DNA, 75 bp, synthetic construct
  source 1..75: mol_type = other DNA
catggcggaagtgacgctgcccgtcaccggagataataacgtccgggcaggcacattggttttcagaatgcaggc

SEQ ID NO: 433545 - DNA, 75 bp, synthetic construct
  source 1..75: mol_type = other DNA
aggtgctgtatgcggaagataacgtggtggtatttgtccgcgtgctgaatcagcaacgtgtactggtggcaatca

SEQ ID NO: 433546 - DNA, 75 bp, synthetic construct
  source 1..75: mol_type = other DNA
atgtcagctcaaatcaacaacatccgcccggaatttgatcgtgaaatcgttgatatcgtcgattacgtgatgaac

SEQ ID NO: 433547 - DNA, 75 bp, synthetic construct
  source 1..75: mol_type = other DNA
gtctgtgatatcagccttaacctgcaattgacggaacgtgtgctggtcagtactgacggcagtgtgtcgagtgtt

SEQ ID NO: 433548 - DNA, 75 bp, synthetic construct
  source 1..75: mol_type = other DNA
tgtccgtaataacccggacaaactgcatctgtttgtagataatggttcgctggttgccaccggggccagctccat

SEQ ID NO: 433549 - DNA, 75 bp, synthetic construct
  source 1..75: mol_type = other DNA
ttctggacgtctctctcgacagaactcgccttgaacagatgccggtcaatgaatatctcgacctgtacgtcattt

SEQ ID NO: 433550 - DNA, 75 bp, synthetic construct
  source 1..75: mol_type = other DNA
ttcaacgatacctggctggcagcggagtggggccatccttccgacaacctcggcggtattctcgccacggcggac

SEQ ID NO: 433551 - DNA, 75 bp, synthetic construct
  source 1..75: mol_type = other DNA
cctgctcgacacgctcggctgcggtctggaagctctcgaatacccggcctgtaaaaaactgctggggccaattgt

SEQ ID NO: 433552 - DNA, 75 bp, synthetic construct
  source 1..75: mol_type = other DNA
ggagcatggaaagacgctgttgactgggtgctcaaagaggcttgccatgctgtaaacattggtatcaagggaggg

SEQ ID NO: 433553 - DNA, 75 bp, synthetic construct
  source 1..75: mol_type = other DNA
tgattaaagaaatcagggagcgaatcggcagtctggacgttcgagacaatattgagcgccgtgcttatgaaattg

SEQ ID NO: 433554 - DNA, 75 bp, synthetic construct
  source 1..75: mol_type = other DNA
acgccctcaataaagcagtgccttatgtccgcaataacccggacaaactgcatctgtttgtggataacggttcgc

SEQ ID NO: 433555 - DNA, 75 bp, synthetic construct
  source 1..75: mol_type = other DNA
tggttgctacaggggccagctccatgtcatgggagtatcgttacaccctgaacgtagtggttgaggatttcagcg

SEQ ID NO: 433556 - DNA, 75 bp, synthetic construct
  source 1..75: mol_type = other DNA
cgccagttgaaggcagcagcaaagcggctgcatacgctacaggctggaacgcctgccgcgccgctatgcttcatg

SEQ ID NO: 433557 - DNA, 75 bp, synthetic construct
  source 1..75: mol_type = other DNA
ctctggcatcgctggaagcagaggcagttatgttctgtatatcaggacaaaatgtagattcagaagaacatgtat

SEQ ID NO: 433558 - DNA, 75 bp, synthetic construct
  source 1..75: mol_type = other DNA
tgcgcgagaagatcaattgctttgaagatccggcgtttaccgctgactaccacgacccggaaaaacgcgccatcg

SEQ ID NO: 433559 - DNA, 75 bp, synthetic construct
  source 1..75: mol_type = other DNA
ggggtatatcaaaagtgagattcagttagcaaagttgaaatataatttaaaaatagatactcttttcttttcctt

SEQ ID NO: 433560 - DNA, 75 bp, synthetic construct
  source 1..75: mol_type = other DNA
catccgaaggtggtggccgcggtggaagcgcagttgaaaaaactgtcgcacacctgcttccaggtgctggtttag

SEQ ID NO: 433561 - DNA, 75 bp, synthetic construct
  source 1..75: mol_type = other DNA
tcagggcgagagcgatatggcaggaaaccgctggtactggcgaacgatcccactgaatacaggcaacgcgttgct

SEQ ID NO: 433562 - DNA, 75 bp, synthetic construct
  source 1..75: mol_type = other DNA
agccgctggtactggcgaaccacaccgctgagtacaggcaacgcgctgctccaggcggtggatattgaagtcagc

SEQ ID NO: 433563 - DNA, 75 bp, synthetic construct
  source 1..75: mol_type = other DNA
tcaggcggtggatattgaagtcagccgtcacgaagacttttcgtcggtggttcagtcacgacgcgcctggtttag

SEQ ID NO: 433564 - DNA, 75 bp, synthetic construct
  source 1..75: mol_type = other DNA
catccggcaatagatttattaggcatcactattgtagcgggtaatcagacgcttgataaaacattaattaatggc

SEQ ID NO: 433565 - DNA, 75 bp, synthetic construct
  source 1..75: mol_type = other DNA
atcagcacgttcttgaggaaaaaacggtagcgggctgggtagctgaaaaccagactgcgctgctttacctgatga

SEQ ID NO: 433566 - DNA, 75 bp, synthetic construct
  source 1..75: mol_type = other DNA
cagactgcgctgctttacctgatgacccgtgaacaacgagcggtcaggcaccagggcgagagtgatatggcagga

SEQ ID NO: 433567 - DNA, 75 bp, synthetic construct
  source 1..75: mol_type = other DNA
tggcctcgaccacgttctgttagtgaaagtggcttccaccgccgtggtcgccgaaatgctcggcctgacccgcga

SEQ ID NO: 433568 - DNA, 75 bp, synthetic construct
  source 1..75: mol_type = other DNA
cagaccgcactgctctacctgatgactcgcgagcagcgggcggtcaggcatcagggcgagagcgaaatggcgggt

SEQ ID NO: 433569 - DNA, 75 bp, synthetic construct
  source 1..75: mol_type = other DNA
aagtaatactcgcgctggcgatttttgcgctggctgccacggcggtgttacagattgccagcggcgcgctgagta

SEQ ID NO: 433570 - DNA, 75 bp, synthetic construct
  source 1..75: mol_type = other DNA
tgcgctggctgccacggcggtgttacagattgccagcggtgcgctgagtaatcagcaaattcttgaggaaaaaac

SEQ ID NO: 433571 - DNA, 75 bp, synthetic construct
  source 1..75: mol_type = other DNA
tgtcgtttcgctgtgtcttaccttttctgtttctgttgtgtttttgtgggggcaattgtgggatggatttcagta

SEQ ID NO: 433572 - DNA, 75 bp, synthetic construct
  source 1..75: mol_type = other DNA
agatcttcatcccaaaatataatattagtcttattcaatctgattattcacgactgaatggcggttataattatg

SEQ ID NO: 433573 - DNA, 75 bp, synthetic construct
  source 1..75: mol_type = other DNA
ccagaaaagcaaattaatacctttttttgaaaagaaaggtttttttaactcacatgaaccattaaagtcaccgtt

SEQ ID NO: 433574 - DNA, 75 bp, synthetic construct
  source 1..75: mol_type = other DNA
aaactgtctgaaggcattcgtctgttcgccgttgatcaacgcaaactggaagatcttcttgccgccaaactataa

SEQ ID NO: 433575 - DNA, 75 bp, synthetic construct
  source 1..75: mol_type = other DNA
aagagctgaagaacttccgtcagctacattcaaaaacaccaggtcacccggagattggctatacgccgggtgtgg

SEQ ID NO: 433576 - DNA, 75 bp, synthetic construct
  source 1..75: mol_type = other DNA
cgttaacggtacagtctggctcgaaggcagcagttgcaaagccaatgcctgcggctgggactatatcgtaacact

SEQ ID NO: 433577 - DNA, 75 bp, synthetic construct
  source 1..75: mol_type = other DNA
atggctaatggtattgaatttaatcaaaacaccgcatctgtttttaattctaattcattagattttgaattggaa

SEQ ID NO: 433578 - DNA, 75 bp, synthetic construct
  source 1..75: mol_type = other DNA
cgccttcgggatgtttataccattaaatccgttgattgttttatattatgattttcctgacatcttaccaaaaac

SEQ ID NO: 433579 - DNA, 75 bp, synthetic construct
  source 1..75: mol_type = other DNA
ttatttccgctaatatggaaaacgccggttaatataactcatccccctctgaacattgtgattgtacaggttggc

SEQ ID NO: 433580 - DNA, 75 bp, synthetic construct
  source 1..75: mol_type = other DNA
aagggggaaatcgtcgcgctaatatcttctttattgcaatctaaatttgttaagattgaattaaaaaagaaatac

SEQ ID NO: 433581 - DNA, 75 bp, synthetic construct
  source 1..75: mol_type = other DNA
ggctgctggaacaacacgatcctactttggcgatgtttggcagtatgccaaagggggaaatcgtcgcgctaatat

SEQ ID NO: 433582 - DNA, 75 bp, synthetic construct
  source 1..75: mol_type = other DNA
tctgctttcctggttaggggtgggtgagttaaatcaggaaggtatccagaagatcaaaaagctttatgaaaaggc

SEQ ID NO: 433583 - DNA, 75 bp, synthetic construct
  source 1..75: mol_type = other DNA
gcattcgaaaacccctggccacccggaaatcggctatacgcccggagttgaaaccaccaccggtcctcttggaca

SEQ ID NO: 433584 - DNA, 75 bp, synthetic construct
  source 1..75: mol_type = other DNA
cgggttaggactttacctgctggacaaggagcgttttcacctggaacagaaagccaaaggtcataatgtaccgga

SEQ ID NO: 433585 - DNA, 75 bp, synthetic construct
  source 1..75: mol_type = other DNA
cacaatataaaaaactcgtttttatggcatggtttggattcagcgttccattaatattctttgccatattcatgt

SEQ ID NO: 433586 - DNA, 75 bp, synthetic construct
  source 1..75: mol_type = other DNA
agcgctcagctgcgacccaaacgcccgggctgaacaacctggagcgtgtccaacaacgtacgagttgtacgaagg

SEQ ID NO: 433587 - DNA, 75 bp, synthetic construct
  source 1..75: mol_type = other DNA
cgtttgttaggattcgataagaaaattaacaaaaatatactagaagggttgctcaggatttttgatgactatttg

SEQ ID NO: 433588 - DNA, 75 bp, synthetic construct
  source 1..75: mol_type = other DNA
cattgaacgcgctgttggttttacagctggttataaccttcgctttgtgttcattcttcagaatgaaggacaagg

SEQ ID NO: 433589 - DNA, 75 bp, synthetic construct
  source 1..75: mol_type = other DNA
attagcgataaaacaaaatcattcttctttaagttcatgtcagcaccagatcgcacaaggggaagtatagaaaca

SEQ ID NO: 433590 - DNA, 75 bp, synthetic construct
  source 1..75: mol_type = other DNA
gctgttcccgtattttggctttaccgtcgagaatattgtggcaaaagcgcgtaaggtgctggggattaaagatgc

SEQ ID NO: 433591 - DNA, 75 bp, synthetic construct
  source 1..75: mol_type = other DNA
agaagcgggcgtttttctgatttcgccgtttgtcgggcgtatttatgactggtatcaggcacgcaagccgatgga

SEQ ID NO: 433592 - DNA, 75 bp, synthetic construct
  source 1..75: mol_type = other DNA
ggtacaaaaagccaattctggtcatcccggcgcgccgatgggcatggctgatattgctgaagtgctgtggaacga

SEQ ID NO: 433593 - DNA, 75 bp, synthetic construct
  source 1..75: mol_type = other DNA
ttactcttactacaatcgagacactcgaatagcattaaaaaatgttctattactatcaaagcaaattaaatcaaa

SEQ ID NO: 433594 - DNA, 75 bp, synthetic construct
  source 1..75: mol_type = other DNA
actggcgatatacatcatacaaggggggggaatttccggaaggtttcactgatgagaaattttccagcgccattt

SEQ ID NO: 433595 - DNA, 75 bp, synthetic construct
  source 1..75: mol_type = other DNA
aaagcacagcagagctggaatgagaagtttgccgcgtataaaaaggctcatccgcgactggcagaagagtttact

SEQ ID NO: 433596 - DNA, 75 bp, synthetic construct
  source 1..75: mol_type = other DNA
tatggtttacgtggagcatgtctacatgcactctcattaacttcattatccgccttcgggatgtttataccatta

SEQ ID NO: 433597 - DNA, 75 bp, synthetic construct
  source 1..75: mol_type = other DNA
ggatatttcttttcccgccccctgcccgccgaagaaattccaggctggatgagcagcgtgttaccgctgaaaatc

SEQ ID NO: 433598 - DNA, 75 bp, synthetic construct
  source 1..75: mol_type = other DNA
catcggtttatcggtagatgattttggtacaggcttttccggattatcccgcttagtcagtcttccggtaacgga

SEQ ID NO: 433599 - DNA, 75 bp, synthetic construct
  source 1..75: mol_type = other DNA
gtggaaacttgttgatattcctacatgggtagataaaagtgcattcgctggcgtcaggggaatgactgaacctgc

SEQ ID NO: 433600 - DNA, 75 bp, synthetic construct
  source 1..75: mol_type = other DNA
tccacgctgatgaaaatcatcgccggcattacccctgcggatagcggaatcattgagattgagggagcccgctgt

SEQ ID NO: 433601 - DNA, 75 bp, synthetic construct
  source 1..75: mol_type = other DNA
gggctggattgacaaaaaagccttcactagcgttaaagggatgaatgaacctgctgatggcgcaatgaatctctt

SEQ ID NO: 433602 - DNA, 75 bp, synthetic construct
  source 1..75: mol_type = other DNA
gttaaaggaatgaatgaacctgctgatggtgccatgaatcttgttaaaaccagtaatggttggaaagccaattaa

SEQ ID NO: 433603 - DNA, 75 bp, synthetic construct
  source 1..75: mol_type = other DNA
tggcggaaacgatggcggcaagctgcactgatgcccagcgtcgcgaagaactgttgactattgcggagatctccc

SEQ ID NO: 433604 - DNA, 75 bp, synthetic construct
  source 1..75: mol_type = other DNA
atgaagtaaaagccgcgaccaacacgcagattttcagcatcaaccagacggataaaggccaggggcacattatta

SEQ ID NO: 433605 - DNA, 75 bp, synthetic construct
  source 1..75: mol_type = other DNA
gcagttcttcgatgagcatcaggcgacctacccgacccggagctgtgtgcaggtcgcgcgtttgccgaaagatgt

SEQ ID NO: 433606 - DNA, 75 bp, synthetic construct
  source 1..75: mol_type = other DNA
gggcaagaggttgagttttgggatcgcaaaaatggagcctgtgtgggtcatcgtgccgtggctgaaattaaagaa

SEQ ID NO: 433607 - DNA, 75 bp, synthetic construct
  source 1..75: mol_type = other DNA
atcgctctgacggatacaatgaaaatgatgaaattttaaaaggtatggctaatcagggattgtttgatgtttcgc

SEQ ID NO: 433608 - DNA, 75 bp, synthetic construct
  source 1..75: mol_type = other DNA
cgggctgggtgagctggtggcacagatgcagcaacattgtcagcaacagccggagaatcacttttatcaggccgc

SEQ ID NO: 433609 - DNA, 75 bp, synthetic construct
  source 1..75: mol_type = other DNA
tcaacagcccggcgggttcactggatgtggccgaccggcaaatggtcgaaatcatgcgcgggctgatgcgcgatt

SEQ ID NO: 433610 - DNA, 75 bp, synthetic construct
  source 1..75: mol_type = other DNA
ataacaggttcttttgcggctacagttatcttttatatgttttattttgttggttattacttctatcggatgggg

SEQ ID NO: 433611 - DNA, 75 bp, synthetic construct
  source 1..75: mol_type = other DNA
ggtctcagtgctttattttctttcatggtatttatggataaaaacatgtgggccggttctcctgatttgacgctg

SEQ ID NO: 433612 - DNA, 75 bp, synthetic construct
  source 1..75: mol_type = other DNA
aaagacaagaaaacaccaggctaaaccagaaaaacgcgccagaatcgtttttagatggctgcataactatgcacg

SEQ ID NO: 433613 - DNA, 75 bp, synthetic construct
  source 1..75: mol_type = other DNA
aaaccgactgcggaactgcatcagatgtgcctggaggtggtggatcgcgcggttaaagatgaagagatcctgacg

SEQ ID NO: 433614 - DNA, 75 bp, synthetic construct
  source 1..75: mol_type = other DNA
agtgctttcttttctttcgttgtatttaaggataaaagtatgtggagcggctctcctgatttgacgctgtcagta

SEQ ID NO: 433615 - DNA, 75 bp, synthetic construct
  source 1..75: mol_type = other DNA
agttctttattttcttttatggtgtttaaagataataatatgtggagcggttctcctgatttgacgttatcagta

SEQ ID NO: 433616 - DNA, 75 bp, synthetic construct
  source 1..75: mol_type = other DNA
aattcccttatgtaaatgccaacgtcattgacgccggtaatgactccaacttattgatagtgttttatgttcaga

SEQ ID NO: 433617 - DNA, 75 bp, synthetic construct
  source 1..75: mol_type = other DNA
ccaggaaccgctgcttttcccaagcctgtcgataaaagaaaacatcctgtttgggctggcaaaaaaacagctctc

SEQ ID NO: 433618 - DNA, 75 bp, synthetic construct
  source 1..75: mol_type = other DNA
aacgctatcgccgcgcgcttaatatcaagctcaacgatccagaacagcctgcccgcactctttctggcggtaatc

SEQ ID NO: 433619 - DNA, 75 bp, synthetic construct
  source 1..75: mol_type = other DNA
actggacggaaatatcgggatattcctgctgaaacgccgtatgcgccgggagaacacattaagggagggcaagaa

SEQ ID NO: 433620 - DNA, 75 bp, synthetic construct
  source 1..75: mol_type = other DNA
gtctgaaatatattacagccgcaggactggacggaaatatcgggatattcctgctgaaacgccgtatgcgccggg

SEQ ID NO: 433621 - DNA, 75 bp, synthetic construct
  source 1..75: mol_type = other DNA
cgcaggactggacggaaatatcgggatattcctgctgaaatgtcgtatgcgccgggagaacaaattaagggaggg

SEQ ID NO: 433622 - DNA, 75 bp, synthetic construct
  source 1..75: mol_type = other DNA
ggtgccggattacgcctcgctccaggtctggcgtcttgtgttgcttgcaggtggattaggttgctggctgtgccc

SEQ ID NO: 433623 - DNA, 75 bp, synthetic construct
  source 1..75: mol_type = other DNA
ccgcaccccggactgtccgggagccttatgtgtgcatcgccacgcagtcctcctgtcaggcgaaatactggaaca

SEQ ID NO: 433624 - DNA, 75 bp, synthetic construct
  source 1..75: mol_type = other DNA
agcgggctgtcatggctggcatgggcaaccggtattcctgtggtgctgataagtggcttcagcctgcccgacagt

SEQ ID NO: 433625 - DNA, 75 bp, synthetic construct
  source 1..75: mol_type = other DNA
gtgaatcaggccatccagtttccggacagggaagagtgggacgagaataaaaaatgtgtatgttttcccgctctc

SEQ ID NO: 433626 - DNA, 75 bp, synthetic construct
  source 1..75: mol_type = other DNA
acagggaggagtggaatgagagcaaaaaatgcgtatgttttcccgctctggtgaacggtatgcaactgacttgtg

SEQ ID NO: 433627 - DNA, 75 bp, synthetic construct
  source 1..75: mol_type = other DNA
ttatgtatgtatcgcgacacaatccacttgtcaggcgaaatactggaacaatggcactggctggagtgaggttgt

SEQ ID NO: 433628 - DNA, 75 bp, synthetic construct
  source 1..75: mol_type = other DNA
aggcgctggttcacatgactgactggcagtatcaaaaactttgttcaaatcgaaaaaaggtaaatggtgaccaat

SEQ ID NO: 433629 - DNA, 75 bp, synthetic construct
  source 1..75: mol_type = other DNA
atgttatcatcttgtattggggtggttatgaaggatggtgcactgctcaggagttcttcactttttattgcctac

SEQ ID NO: 433630 - DNA, 75 bp, synthetic construct
  source 1..75: mol_type = other DNA
acaggatattacaaaccacagtttaagaaagaatatgaaatgattaattataatgatggttggtattatgttctt

SEQ ID NO: 433631 - DNA, 75 bp, synthetic construct
  source 1..75: mol_type = other DNA
ctcattacggtcaggggtttgtctggaatcacattccctggggagccgaagactttaccggcagacttccccttc

SEQ ID NO: 433632 - DNA, 75 bp, synthetic construct
  source 1..75: mol_type = other DNA
ccagtaaacaagaagagtggctacgccagcatggcgtgcactacggtcagggctggctctacagcaaggcattac

SEQ ID NO: 433633 - DNA, 75 bp, synthetic construct
  source 1..75: mol_type = other DNA
ctcagcagcatatttcgatcaatcttgaatccaccgtgctcacctcggaaaaaatcccgcaattgctgcgtgaaa

SEQ ID NO: 433634 - DNA, 75 bp, synthetic construct
  source 1..75: mol_type = other DNA
ataacaaaatccggctggatgatgagcgcggtaaagagcatatcaaggtcagtaccgaatatggcggcaagagcc

SEQ ID NO: 433635 - DNA, 75 bp, synthetic construct
  source 1..75: mol_type = other DNA
tgcgacctcttgaagcgatcaatctgattcgcaatctgctgaaagtggacgcacatttgattccgatgtcggagc

SEQ ID NO: 433636 - DNA, 75 bp, synthetic construct
  source 1..75: mol_type = other DNA
ctggaagccagtgatgtcccctatcgtcatgaccgccagttgttacataacgcgctggaaaaagcattacaggcg

SEQ ID NO: 433637 - DNA, 75 bp, synthetic construct
  source 1..75: mol_type = other DNA
cctggggcgatatgcgtaactgcctcaaccagctgataactgaacccagcgtcgcttccgcaatgtttgaatatc

SEQ ID NO: 433638 - DNA, 75 bp, synthetic construct
  source 1..75: mol_type = other DNA
gtttcggcggtaatggcgaactttccgggcacaaccttggaaacctgatgttgaaggcactggatcaccttagcg

SEQ ID NO: 433639 - DNA, 75 bp, synthetic construct
  source 1..75: mol_type = other DNA
ctggaggccagcgatattccttatcgtcatgaccgccagttgctgcataacgcactggaaaaggcattacaggca

SEQ ID NO: 433640 - DNA, 75 bp, synthetic construct
  source 1..75: mol_type = other DNA
cattacgccgaacgcctgccccgatggtgtatatcggtaatttggggcgagaattaagcctgcctgctgcaaatc

SEQ ID NO: 433641 - DNA, 75 bp, synthetic construct
  source 1..75: mol_type = other DNA
cagaactacaagcgcaacgtgctacgcaccccggcgaacaacaaaatccgcctcgacgatgagcgcggcaaagag

SEQ ID NO: 433642 - DNA, 75 bp, synthetic construct
  source 1..75: mol_type = other DNA
aggcgtggcgatcgccagcggagagcacctgcaactggcggcatcgaaaaacctgatcgcgaacgcaggaaatca

SEQ ID NO: 433643 - DNA, 75 bp, synthetic construct
  source 1..75: mol_type = other DNA
acactgaccatgtgaccatccagaactacaagcgcaacgttctgcgcacccctgccaataacaaaatccggctgg

SEQ ID NO: 433644 - DNA, 75 bp, synthetic construct
  source 1..75: mol_type = other DNA
gagttaagcttgccggcagcgaatctaaagctggaaaataagctggcgattatggagcgatatgtcggtaagaag

SEQ ID NO: 433645 - DNA, 75 bp, synthetic construct
  source 1..75: mol_type = other DNA
gctgtacatgctatcaatgaagcagatctgattcttatcgggccaggcagtttttataccagcctgatgccgatc

SEQ ID NO: 433646 - DNA, 75 bp, synthetic construct
  source 1..75: mol_type = other DNA
ttgatcgtgtcgttgctctcggcggagggcatggactgggacgcgttctctcatcactttcgtctttgggttctc

SEQ ID NO: 433647 - DNA, 75 bp, synthetic construct
  source 1..75: mol_type = other DNA
atcaatggtattggagaaaataaaggcggtctaaaagttggtgatggtctcgttatactggcacaaaaaaaagat

SEQ ID NO: 433648 - DNA, 75 bp, synthetic construct
  source 1..75: mol_type = other DNA
ttatcgggatcctcggatgcagtaaagcatttgcagccactgaattacagctccagcaaaaacgcgttatgcagt

SEQ ID NO: 433649 - DNA, 75 bp, synthetic construct
  source 1..75: mol_type = other DNA
gttcgtgctgggtgagggtgtcacaggcgtgggcggggccggggttcggtaacctggcgataccgcgtgtgggtc

SEQ ID NO: 433650 - DNA, 75 bp, synthetic construct
  source 1..75: mol_type = other DNA
gccacgccggtcagcgtactgggtattgtggccgtcgaagccggcgcggccataacccggggacaggcagtgcag

SEQ ID NO: 433651 - DNA, 75 bp, synthetic construct
  source 1..75: mol_type = other DNA
ggatgcgacggataaggaacaggtctatatccacgcgcagaagaacatggacacggaggtacttaacgaccggac

SEQ ID NO: 433652 - DNA, 75 bp, synthetic construct
  source 1..75: mol_type = other DNA
gtggacgggccgcagagtgcgatagtgacggggccagcgggagaggagattttctgcgacgaacatggtcgggta

SEQ ID NO: 433653 - DNA, 75 bp, synthetic construct
  source 1..75: mol_type = other DNA
tcaggtcgggaccagaaaagaagggggccacgaccagagtatcacggtggcgaacgaccggtgcatcacggtacg

SEQ ID NO: 433654 - DNA, 75 bp, synthetic construct
  source 1..75: mol_type = other DNA
gcagaaaaaagcccgggccattgccctgatggacagcaaaaagatgtggcggagcaattatgcccctcctcttct

SEQ ID NO: 433655 - DNA, 75 bp, synthetic construct
  source 1..75: mol_type = other DNA
acggttcagggctgctcagcctttaaggcagggcaggtcgccaccctggattttggtaacccgggacagctggat

SEQ ID NO: 433656 - DNA, 75 bp, synthetic construct
  source 1..75: mol_type = other DNA
cgtctgtgccgccgcgtgacttcacagtacgtctgtatgagtccggtgccacggttcagggctgctcagccttta

SEQ ID NO: 433657 - DNA, 75 bp, synthetic construct
  source 1..75: mol_type = other DNA
gccgttggcgtcaatgtgctggggattattgctgttgaagcaggcgcagcgattgaagccggtgcatccgtccag

SEQ ID NO: 433658 - DNA, 75 bp, synthetic construct
  source 1..75: mol_type = other DNA
cccggcgggcatttctgccgggattgcgctggatgaggcgctggccgaaggtgacgttatccgtatcctgcgcgg

SEQ ID NO: 433659 - DNA, 75 bp, synthetic construct
  source 1..75: mol_type = other DNA
agtacgccggttagcgttctgggcattattgctgttgaggccggtgctgcggtcagcagtggtgtggctgttcag

SEQ ID NO: 433660 - DNA, 75 bp, synthetic construct
  source 1..75: mol_type = other DNA
ttttgaaaacggaaccggacggtacgctggaagcggttgccgaacaatacaacaccacattgctggaggtagtga

SEQ ID NO: 433661 - DNA, 75 bp, synthetic construct
  source 1..75: mol_type = other DNA
aaaaatataaacacttgctttaccagaaaaaatttctcgatggtgtttttacagcaattaaatataatgttatga

SEQ ID NO: 433662 - DNA, 75 bp, synthetic construct
  source 1..75: mol_type = other DNA
catgaaatgcattccttttaataagaacgatattcatacctgggattcgccattatctgaaccgatctattacga

SEQ ID NO: 433663 - DNA, 75 bp, synthetic construct
  source 1..75: mol_type = other DNA
gtttaccgaaatgtttggtgccagttatcgctatagtggcgctggagtcggatatcaggttgccagtgtggttgg

SEQ ID NO: 433664 - DNA, 75 bp, synthetic construct
  source 1..75: mol_type = other DNA
gtatgttgggggaaatttgtgtattgcgtagaccggggcgagtcccatattcagagaatgaagttatcggccttc

SEQ ID NO: 433665 - DNA, 75 bp, synthetic construct
  source 1..75: mol_type = other DNA
tgatcaggaaaaactataaggagctgcagaagcagctatctactacttgcccgcgatgtggtcagaaaatgcctg

SEQ ID NO: 433666 - DNA, 75 bp, synthetic construct
  source 1..75: mol_type = other DNA
aagcaatcctgaatgctcagtggctgcaagccagcatggattcgccgcgtcagtatgcaacatacgactgccgaa

SEQ ID NO: 433667 - DNA, 75 bp, synthetic construct
  source 1..75: mol_type = other DNA
atggacaccacgctcatctccactcgtcccgatgatgggacgctttcgttaagtcgcgcccgacgagctgcgttt

SEQ ID NO: 433668 - DNA, 75 bp, synthetic construct
  source 1..75: mol_type = other DNA
ggtgcgcaatggcatggaggagtccgcggaatttgaacaacagcaacataatcaagcggccgcgaaaaaacgcat

SEQ ID NO: 433669 - DNA, 75 bp, synthetic construct
  source 1..75: mol_type = other DNA
ggactacatcaaacgaaacaaaaaagcgatcctcaacgttgaagttatccgcaaaaatatggacgagcctcggga

SEQ ID NO: 433670 - DNA, 75 bp, synthetic construct
  source 1..75: mol_type = other DNA
gctttcctgaagattattgcgctacgactgtgcgagttgctgacgatgtacatcgttactgcctttgcacttaat

SEQ ID NO: 433671 - DNA, 75 bp, synthetic construct
  source 1..75: mol_type = other DNA
gttcacagagatgtttggtgccagttatcgctacagcggcgctggggtcggatatcaagttgccagtgtggtagg

SEQ ID NO: 433672 - DNA, 75 bp, synthetic construct
  source 1..75: mol_type = other DNA
tgttgggggcattgtgggtgcgtaatggtatggaggaatccgctgaatttgagcaacagcaacataatcaagcgg

SEQ ID NO: 433673 - DNA, 75 bp, synthetic construct
  source 1..75: mol_type = other DNA
cttattgttgcccggaaacggactattcctttaacgctcaacccgatgaaacagagcaaaaacaaaccgcgaatt

SEQ ID NO: 433674 - DNA, 75 bp, synthetic construct
  source 1..75: mol_type = other DNA
tgtttgtctactggcacatacattgccgtggtgcaccgatccgcatcgtttattgcgtgaagccgatcgggtatt

SEQ ID NO: 433675 - DNA, 75 bp, synthetic construct
  source 1..75: mol_type = other DNA
tattgcgtgaagccgatcgggtactgattgatgatggctggctggtgattagtggcttcaatcccatcagtttaa

SEQ ID NO: 433676 - DNA, 75 bp, synthetic construct
  source 1..75: mol_type = other DNA
tgccgggaattcttccccacaacagaaggattcttttttggctctcaggagtatgaccagtattactggaaggat

SEQ ID NO: 433677 - DNA, 75 bp, synthetic construct
  source 1..75: mol_type = other DNA
agtcctgctaataaagcgcgagcagttttacatcagagcttcccgagttcttatggacaaaactttgcgttagct

SEQ ID NO: 433678 - DNA, 75 bp, synthetic construct
  source 1..75: mol_type = other DNA
aactggactggctttctttgttgaattttgaagtagtgcatgccagccgtttccatgttctcccgtggaacaaat

SEQ ID NO: 433679 - DNA, 75 bp, synthetic construct
  source 1..75: mol_type = other DNA
gcggaatacgggcgcacgagctgtccttggataaagtacggcgtctggctgagctgcagaggggggtcagccaga

SEQ ID NO: 433680 - DNA, 75 bp, synthetic construct
  source 1..75: mol_type = other DNA
gcgaggtggcgctggaaaatactcacccgtttacccgtgagctatggggacgcaactggacttatgcgcacaacg

SEQ ID NO: 433681 - DNA, 75 bp, synthetic construct
  source 1..75: mol_type = other DNA
atgtgcgaattgctcgggatgagcgccaacgtccctaccgatatctgctttagtttcaccgggcttgtacagcgc

SEQ ID NO: 433682 - DNA, 75 bp, synthetic construct
  source 1..75: mol_type = other DNA
atgaacgaaaaatgtttaggctggaatgaaatacccgttaaaatatccgcaagtaatgctgagacagcaaacttt

SEQ ID NO: 433683 - DNA, 75 bp, synthetic construct
  source 1..75: mol_type = other DNA
tatcgtggcgcagccgtcattgaagatcagtctgcaaaccctgaaacggaatcgcccgctgtttatgttgtgcat

SEQ ID NO: 433684 - DNA, 75 bp, synthetic construct
  source 1..75: mol_type = other DNA
ggagcaggtgaactggcgcgcaaaaaaaatgatgagtgatgcccgcctgtcggggctggatatcgtcgcactggt

SEQ ID NO: 433685 - DNA, 75 bp, synthetic construct
  source 1..75: mol_type = other DNA
gaagtttaaagctgtcggtcagggctttgccggtggcctggcggctcttgcctccctgcacggcgttaacatcta

SEQ ID NO: 433686 - DNA, 75 bp, synthetic construct
  source 1..75: mol_type = other DNA
caactctggcgggattcgcaatgagatcccggcgggtgcaattacgatgggtggcgtcatcagtaccttcccgtt

SEQ ID NO: 433687 - DNA, 75 bp, synthetic construct
  source 1..75: mol_type = other DNA
tggcggcgatggttttaccacgtttactgagggtaaagcgcgcaacacaacgggtggttattatgtctaccatgc

SEQ ID NO: 433688 - DNA, 75 bp, synthetic construct
  source 1..75: mol_type = other DNA
gctgatgagtggaaacctgacccacaaacgaagtcagttattgatggctggaataagaaacttgatgaaattgtg

SEQ ID NO: 433689 - DNA, 75 bp, synthetic construct
  source 1..75: mol_type = other DNA
cattgtatccatcagaagaacttgtaaaattcataagcacctcaaaagaatatttaagcaatatggatatgatta

SEQ ID NO: 433690 - DNA, 75 bp, synthetic construct
  source 1..75: mol_type = other DNA
tcaagtttatgggataatattaggggtggttttaccccttttcataataatactgtaaacatcgcccctaatgaa

SEQ ID NO: 433691 - DNA, 75 bp, synthetic construct
  source 1..75: mol_type = other DNA
tccccaataatgatgatagtgattatattttatgtttagacaaccctaacctctcatcttacacattgaacttta

SEQ ID NO: 433692 - DNA, 75 bp, synthetic construct
  source 1..75: mol_type = other DNA
ggcaaactggttctcgactacaaagagaagccgcatgattttacggtgaaaaacttcgagcttaaaaccatttac

SEQ ID NO: 433693 - DNA, 75 bp, synthetic construct
  source 1..75: mol_type = other DNA
attgaagatgcgacggtttaccacattgctactcagagtttccttgctgatggtggcgatggttttagcgccttt

SEQ ID NO: 433694 - DNA, 75 bp, synthetic construct
  source 1..75: mol_type = other DNA
ttgaattaaaacgtgcctatggtgaatcggcttccctcgggaacctggcggcggacgctttactggtagcggcgg

SEQ ID NO: 433695 - DNA, 75 bp, synthetic construct
  source 1..75: mol_type = other DNA
ggtggttgggcaaacatcactactctggtaaaacaggaaaaagcaaaaaataaggcaacatggtttttggatgcc

SEQ ID NO: 433696 - DNA, 75 bp, synthetic construct
  source 1..75: mol_type = other DNA
gtattctgttggcattaccattttgggcctgtgcaaaggatgtcacgattatttataccaatgatctccatgcgc

SEQ ID NO: 433697 - DNA, 75 bp, synthetic construct
  source 1..75: mol_type = other DNA
atgttttttatcagaacagcagtaaatcattctgggataagccatataccatcatcgaaaaagacggtgtgaaaa

SEQ ID NO: 433698 - DNA, 75 bp, synthetic construct
  source 1..75: mol_type = other DNA
tttacctgaacaggtaaaaatagttttcattaaagcacaaaatgaggtgaaaatgactggaaaaatagagtggtt

SEQ ID NO: 433699 - DNA, 75 bp, synthetic construct
  source 1..75: mol_type = other DNA
agctacgcggtagcgcaccattaattaatgacccactgttaacacaatatattaattcgttggggatgcgcctgg

SEQ ID NO: 433700 - DNA, 75 bp, synthetic construct
  source 1..75: mol_type = other DNA
agccgtctggctgatgcccgtaaccgtgccaatcagatgcgcccgatggtggtgcaatcgtcagaagatttctat

SEQ ID NO: 433701 - DNA, 75 bp, synthetic construct
  source 1..75: mol_type = other DNA
cgtccggttcggtggggcggagggcgcgatattttatcgtctgcggatgtggcggatgtcatggtggatgatgcc

SEQ ID NO: 433702 - DNA, 75 bp, synthetic construct
  source 1..75: mol_type = other DNA
gtcgagtagaaattggtgacaagaaatacaccaaatcacagatcgtcgagatgtatcgggagaagccactagctg

SEQ ID NO: 433703 - DNA, 75 bp, synthetic construct
  source 1..75: mol_type = other DNA
accaaagccggaaacagctatgccagaaagctattggttgaggcagcgtggagttaccggcatccgacacgcatc

SEQ ID NO: 433704 - DNA, 75 bp, synthetic construct
  source 1..75: mol_type = other DNA
agagcatgggatgctcaactcaggctttgcaagaggtctcgaaaacttcaggccaaaggaaagaatgtcaatatt

SEQ ID NO: 433705 - DNA, 75 bp, synthetic construct
  source 1..75: mol_type = other DNA
ggtttatatcggcaatctggggcgtgaattgagcctgcctgcggcgaatctgaagctggaaaataagctggcgat

SEQ ID NO: 433706 - DNA, 75 bp, synthetic construct
  source 1..75: mol_type = other DNA
agcgatattccgtatcgtcatgaccgccagttgttacataacgcactggaaaaggcgttacaggctttaggttaa

SEQ ID NO: 433707 - DNA, 75 bp, synthetic construct
  source 1..75: mol_type = other DNA
attcgctgctcagaaggcggcattgcctggggcgacatgcgcaactgcctcaaccaactgataacggaaccgagc

SEQ ID NO: 433708 - DNA, 75 bp, synthetic construct
  source 1..75: mol_type = other DNA
aaaaccacgacagagcagatggaaaaagaaaaggcggagctgctctcttcactgaatgttctgaaaaaagagatg

SEQ ID NO: 433709 - DNA, 75 bp, synthetic construct
  source 1..75: mol_type = other DNA
ttcagaaaacagaagggagtgaaacaggctgaaagtggattctggtaccggaccgaatatgccggcgacggtgag

SEQ ID NO: 433710 - DNA, 75 bp, synthetic construct
  source 1..75: mol_type = other DNA
tatttttccatggagtgtcatataaaataaatgagtcttttttatatagaaataaaacacaggataaaaaagtct

SEQ ID NO: 433711 - DNA, 75 bp, synthetic construct
  source 1..75: mol_type = other DNA
cttgcgtctatggttccgaactccaaagccgagaagttcgaaaagatggctgaaggcactgccaaagacaaagat

SEQ ID NO: 433712 - DNA, 75 bp, synthetic construct
  source 1..75: mol_type = other DNA
ttgttgcccggcaacacggtgtggcagccagccagttatttctctggcgcaagcaataccagggggctgagggcc

SEQ ID NO: 433713 - DNA, 75 bp, synthetic construct
  source 1..75: mol_type = other DNA
acattaagcaagccattagcagcgcaccacgaaatagccaaacgatggaaatgcacctccagatgatcaaatacg

SEQ ID NO: 433714 - DNA, 75 bp, synthetic construct
  source 1..75: mol_type = other DNA
ctcttgtccggtactggagccaatcggcccgctgcatacccagttcggttaccacatcattaaggtgctttaccg

SEQ ID NO: 433715 - DNA, 75 bp, synthetic construct
  source 1..75: mol_type = other DNA
tcacaacccgcacaacagagatcatgcgtcgattaggggcaaggatctgcgagtattgtgcgaagactgggcgct

SEQ ID NO: 433716 - DNA, 75 bp, synthetic construct
  source 1..75: mol_type = other DNA
gatccaaacttcaggcgtatgtactatgttcgatatgctgatgacttcgtaatcggtgtcatcggctcgaagaaa

SEQ ID NO: 433717 - DNA, 75 bp, synthetic construct
  source 1..75: mol_type = other DNA
acgcaacttttttctcgtctacggagtgaatattctggtttgcttccggagattcttacacctaaatctctgagg

SEQ ID NO: 433718 - DNA, 75 bp, synthetic construct
  source 1..75: mol_type = other DNA
taacatgtctgttgacctttgtcaccggtgcggtggaagtcgtactggtggcaaattcggtgattgatatctcgg

SEQ ID NO: 433719 - DNA, 75 bp, synthetic construct
  source 1..75: mol_type = other DNA
cgttggcctggctgtagccaatggcctgaacgcagatgaggatgacggtcagtgggtctacaaacagccggatac

SEQ ID NO: 433720 - DNA, 75 bp, synthetic construct
  source 1..75: mol_type = other DNA
atgtatcgggagaagccactggctgaaatcattgcggctttgcaggcaatagatgacaggcgcgagaagacatca

SEQ ID NO: 433721 - DNA, 75 bp, synthetic construct
  source 1..75: mol_type = other DNA
atgaatcatcgagtggaaattacggaaggaatactggcagatgagtgcgcggcgctactcagcgattttttccga

SEQ ID NO: 433722 - DNA, 75 bp, synthetic construct
  source 1..75: mol_type = other DNA
gagaacgaggatattgcgctaacggtagggaagctgcgcgttgagcttgaagcagaaaaacagcgggcaaaagtt

SEQ ID NO: 433723 - DNA, 75 bp, synthetic construct
  source 1..75: mol_type = other DNA
tggttgaaacagatgctcaggcttatgcaaacgctgaattcatagcagaggctaacccggctaccgtgctggcac

SEQ ID NO: 433724 - DNA, 75 bp, synthetic construct
  source 1..75: mol_type = other DNA
caaagactggcgggaagccgtggcgatttcatgccgaccgttgattgaaaacggttctatcgaaccgcgttatgt

SEQ ID NO: 433725 - DNA, 75 bp, synthetic construct
  source 1..75: mol_type = other DNA
aggtggtgggagagaaattaaccttttcctctgacgccggacgtgtgctacaaaacgcggtattacccgcattcc

SEQ ID NO: 433726 - DNA, 75 bp, synthetic construct
  source 1..75: mol_type = other DNA
cctgctgaaaaagctacaacaacagtttggcactgcctgcctgttcatcacccacgacttacgcctggtggaacg

SEQ ID NO: 433727 - DNA, 75 bp, synthetic construct
  source 1..75: mol_type = other DNA
ggctggtggcggcgtcgatgatcccggtgacgcagcggctgaagtttcttgtcgccctgcgccccagcgtaacct

SEQ ID NO: 433728 - DNA, 75 bp, synthetic construct
  source 1..75: mol_type = other DNA
accacgatctggcggaggctctgagatctgtcgagggtgtggatgttgaaagtggtacgggtaaaaccggtgggc

SEQ ID NO: 433729 - DNA, 75 bp, synthetic construct
  source 1..75: mol_type = other DNA
ctggatctctcggcgtgaattatctgatgatgctctcacattattcgagcacataaaacattcaatgactaatac

SEQ ID NO: 433730 - DNA, 75 bp, synthetic construct
  source 1..75: mol_type = other DNA
tgggtatcccaaaatccagttattcaaagctgttacgaagttgatggaacgtcacattgttcagaaaagatccca

SEQ ID NO: 433731 - DNA, 75 bp, synthetic construct
  source 1..75: mol_type = other DNA
gaacaacgtaatcatcccgacggccatttacgggagcaagctgaaatattgtcactggtgtattcgttctcgata

SEQ ID NO: 433732 - DNA, 75 bp, synthetic construct
  source 1..75: mol_type = other DNA
cgtggcagagcaacttcttatccgtcgcttcccttctattggtcagaataatgcccgtcggattgcagagttcgc

SEQ ID NO: 433733 - DNA, 75 bp, synthetic construct
  source 1..75: mol_type = other DNA
cttgctggggcgcagcggctgtgggaaaagtactctcgcacggctgctggtgggtttagagtcgccgtcgcaggg

SEQ ID NO: 433734 - DNA, 75 bp, synthetic construct
  source 1..75: mol_type = other DNA
aaaagcactctcgcgcggctgctggtaggcttagagtctccctcacaagggaatattagctggcgcggcgaaccg

SEQ ID NO: 433735 - DNA, 75 bp, synthetic construct
  source 1..75: mol_type = other DNA
tttttccatacaaaaagaaaagataacgaagacgtagaaccattgccggaaatacttgtgacattggaacgagaa

SEQ ID NO: 433736 - DNA, 75 bp, synthetic construct
  source 1..75: mol_type = other DNA
cgccacgcttgaccgtctctcaaatggtcgtgcgttgtttaatctggtcacaggcagcgatccacaagagctggc

SEQ ID NO: 433737 - DNA, 75 bp, synthetic construct
  source 1..75: mol_type = other DNA
gtcagggctcatcggtcacatcactgagcgacacctcagctacgcgtatcccttatcccacggaatcacagaatt

SEQ ID NO: 433738 - DNA, 75 bp, synthetic construct
  source 1..75: mol_type = other DNA
attataatcttggtgcacgtcttgactggaaggcgtcggcgcaggatgtgctctggtttgatatggataccaccc

SEQ ID NO: 433739 - DNA, 75 bp, synthetic construct
  source 1..75: mol_type = other DNA
ggtgtggtgaatatcattaccagaaagaatgcagacaaatggctctcttccgtcaatgcagggctgaatctgcag

SEQ ID NO: 433740 - DNA, 75 bp, synthetic construct
  source 1..75: mol_type = other DNA
agtttaatttctggagcagtggcccccttgtagatgattctgtcagcctgcagatccgcggcagcacacagcagc

SEQ ID NO: 433741 - DNA, 75 bp, synthetic construct
  source 1..75: mol_type = other DNA
acgatctggcagaggcactgagatcagtggagggggtagatgttgaaagtggtacgggtaaaaccggtgggctgg

SEQ ID NO: 433742 - DNA, 75 bp, synthetic construct
  source 1..75: mol_type = other DNA
tggcttgatatggatactgcacgacagcgttatgataaccgggacggccagctgggcagccttactggcggttat

SEQ ID NO: 433743 - DNA, 75 bp, synthetic construct
  source 1..75: mol_type = other DNA
agttttgtgctttcgggctatccgcatctggaagaagcgtatcgggttggcgagttgctgttcccgcatctggat

SEQ ID NO: 433744 - DNA, 75 bp, synthetic construct
  source 1..75: mol_type = other DNA
gatgatgacaccatcgccagagcacaggctgcatttgcccgcacggattccgtggggcaacagcgaatggctgcg

SEQ ID NO: 433745 - DNA, 75 bp, synthetic construct
  source 1..75: mol_type = other DNA
aacaagtgcgggcaaaagctgccgcgcatgggcgcaaaattcgtttcggtattcgtctgcatgtaattgtccgcg

SEQ ID NO: 433746 - DNA, 75 bp, synthetic construct
  source 1..75: mol_type = other DNA
ctggaaggctacggagcaggatgtgctctggtttgatatggataccacccgacagcgttacgataaccgggatgg

SEQ ID NO: 433747 - DNA, 75 bp, synthetic construct
  source 1..75: mol_type = other DNA
ttgatgataacaccaatagctatacaaacagcggaaaggcccgcttgcatggtgtggaattcgccggcacattgc

SEQ ID NO: 433748 - DNA, 75 bp, synthetic construct
  source 1..75: mol_type = other DNA
tacctacgcacggtgacggtcgttatctgggaactgaagaaggttcgcgtccggttgatcatggttatctgcagc

SEQ ID NO: 433749 - DNA, 75 bp, synthetic construct
  source 1..75: mol_type = other DNA
cacaaggtgttatagacactttaatctcagccccaggcgtaaccattactttaccatcgggaaaggggcaaaaac

SEQ ID NO: 433750 - DNA, 75 bp, synthetic construct
  source 1..75: mol_type = other DNA
ggaattagcgtcaataaatcgagcagcaatatcctgatggtggcggcgtttatctctgataacggcagcctcaac

SEQ ID NO: 433751 - DNA, 75 bp, synthetic construct
  source 1..75: mol_type = other DNA
aactgaaccgcttatcagcctatttcccggcaagtctgaagacggtttatccttacgacaccacgccgtttatcg

SEQ ID NO: 433752 - DNA, 75 bp, synthetic construct
  source 1..75: mol_type = other DNA
ccgtgggcggcttcggctttagcggtcaggggcaaaacaacggtctggcatttatcagtcttaaaccgtggtccg

SEQ ID NO: 433753 - DNA, 75 bp, synthetic construct
  source 1..75: mol_type = other DNA
ttatcactggcagcgcaatcaccgaatcaggtcaccggggttcgcccgaacggcctggaagatacgccgatgttc

SEQ ID NO: 433754 - DNA, 75 bp, synthetic construct
  source 1..75: mol_type = other DNA
ccttgttcgaacgcttcaaccatctgtttgaaaaatcgactcagcactataccgacagcacccgctcactgctgc

SEQ ID NO: 433755 - DNA, 75 bp, synthetic construct
  source 1..75: mol_type = other DNA
ggtgccgatgcgcaaacagtagaagactcggtcactcaggtgattgagcaaaatatgaatgggcttgatggcctg

SEQ ID NO: 433756 - DNA, 75 bp, synthetic construct
  source 1..75: mol_type = other DNA
gcgcattactggccaccgatctgcgcggcttaagtaatgacgtctacttccaggttggtttgctgaccaccatcg

SEQ ID NO: 433757 - DNA, 75 bp, synthetic construct
  source 1..75: mol_type = other DNA
ccatggggcaaatccaacgcgctctggtcgggattgccgttgtgctttccgcggtgtttatgccaatggccttta

SEQ ID NO: 433758 - DNA, 75 bp, synthetic construct
  source 1..75: mol_type = other DNA
ataaactgcaactcgctatgccttcattacctgaagcggtgcagcagcaggggattagcgtcgataagtcgagca

SEQ ID NO: 433759 - DNA, 75 bp, synthetic construct
  source 1..75: mol_type = other DNA
tcctccatgctgctttcagtatttgtagcaatgagcctgacccctgccctgtgcgccaccattctgaaagccgcg

SEQ ID NO: 433760 - DNA, 75 bp, synthetic construct
  source 1..75: mol_type = other DNA
ccccgccagtctgaagacggtttatccgtacgacaccacgccgtttatcaaaatctcgattcaggaagtcttcaa

SEQ ID NO: 433761 - DNA, 75 bp, synthetic construct
  source 1..75: mol_type = other DNA
ggtgccgatgcccaaacggtagaaaattctgtcactcaggtgattgagcaaaatatgaatggacttgatggcctg

SEQ ID NO: 433762 - DNA, 75 bp, synthetic construct
  source 1..75: mol_type = other DNA
aagacggggagcaaagtcctatttgcttgcaggatgatgctctgagatttctagaagcctcacccgagccacgag

SEQ ID NO: 433763 - DNA, 75 bp, synthetic construct
  source 1..75: mol_type = other DNA
gggttgaagcgataggccagttggtcacccacgagcgtgcagacatttctaagtcggctagagctgtttatgaaa

SEQ ID NO: 433764 - DNA, 75 bp, synthetic construct
  source 1..75: mol_type = other DNA
gaggctgtcgtgctgattgttcagtatggtgaccaacaggaactgcgcatcggccatatggggtatgaaggcttt

SEQ ID NO: 433765 - DNA, 75 bp, synthetic construct
  source 1..75: mol_type = other DNA
atccagaggttcaaaagagagcacaatgattccgctgggggaatggattacggcatggaatgtgttgttggtgcc

SEQ ID NO: 433766 - DNA, 75 bp, synthetic construct
  source 1..75: mol_type = other DNA
cgatcagtgtgcacaacattccgaacttcgattcgaattagtcaaccttcatccttggcaggagtttactgaaat

SEQ ID NO: 433767 - DNA, 75 bp, synthetic construct
  source 1..75: mol_type = other DNA
atttattggcaacaactagtcattcaattggatctacaacacaaatctcaacgtgatgtttcggtcattcgaggt

SEQ ID NO: 433768 - DNA, 75 bp, synthetic construct
  source 1..75: mol_type = other DNA
tatgagccagtaccgtcggctacagcaatgcttgataacctgctcgctgaaggccggcgagcaattatgatcctt

SEQ ID NO: 433769 - DNA, 75 bp, synthetic construct
  source 1..75: mol_type = other DNA
tacgcggttatccctggcattcactgaatgatgctttcccgcctgatatggaggctgttgtgctgattgttcagt

SEQ ID NO: 433770 - DNA, 75 bp, synthetic construct
  source 1..75: mol_type = other DNA
atggtgaccaacaggaactgcgcatcggccatatggggtatgaaggcttttttattgatgaagaaaccggagcct

SEQ ID NO: 433771 - DNA, 75 bp, synthetic construct
  source 1..75: mol_type = other DNA
gtggcagagcaacttcttatccgtcgcttcccttctattggtcagaataatgcccgtcggattgcagagttcgca

SEQ ID NO: 433772 - DNA, 75 bp, synthetic construct
  source 1..75: mol_type = other DNA
gatgatgcatcaatacaaatgttggcatacatcggtccggttgcgcctgaaacacttctcaacaggattgaagaa

SEQ ID NO: 433773 - DNA, 75 bp, synthetic construct
  source 1..75: mol_type = other DNA
cgtaacaccgacatcttggtggggaagtcgagttaacgtaatgcaacccagagcaaatactattagtagattaat

SEQ ID NO: 433774 - DNA, 75 bp, synthetic construct
  source 1..75: mol_type = other DNA
aatggaaactgaacaaggattactaccgttaatctctgagcaagtttctaaaagaggaggatacgtaattgtctg

SEQ ID NO: 433775 - DNA, 75 bp, synthetic construct
  source 1..75: mol_type = other DNA
tggtgccaatgttcctattccttgctacacctgcatgcattttcagccatggctgaatggcccacataacgaagt

SEQ ID NO: 433776 - DNA, 75 bp, synthetic construct
  source 1..75: mol_type = other DNA
gcatttgtcggggtacttgtagattcagagagggatgcacatcgaggtgacgacccaaccagccgtattcggacc

SEQ ID NO: 433777 - DNA, 75 bp, synthetic construct
  source 1..75: mol_type = other DNA
gcagtcctgagtgctcaggcaaggaatgctgttactctggttgagaatcgtctcgggattgaattgcaggaagct

SEQ ID NO: 433778 - DNA, 75 bp, synthetic construct
  source 1..75: mol_type = other DNA
cattagtgtccgagcgaatctgtgctagggctaatggctacttctttcacttatatgatacatcgtggatattgg

SEQ ID NO: 433779 - DNA, 75 bp, synthetic construct
  source 1..75: mol_type = other DNA
cgggtgaaagagataactggcgacatccagattgctgccgtacttgatcgcagtattatcgcgctggcagatgtg

SEQ ID NO: 433780 - DNA, 75 bp, synthetic construct
  source 1..75: mol_type = other DNA
ggccactgacggataatgagctgacagcgtttaacgagggggctgttcgggcttatgaaaagagcttaattacta

SEQ ID NO: 433781 - DNA, 75 bp, synthetic construct
  source 1..75: mol_type = other DNA
tggcttaccgtgcagtcctgggtctgctggcacttcagaaaaaatacggcccggaacggctggaaaaggcctgtt

SEQ ID NO: 433782 - DNA, 75 bp, synthetic construct
  source 1..75: mol_type = other DNA
aaaccgaaagataaagccaaagctgaagttggcgttcaggttgtgaacgctggatcatggcccgaatcaggcatg

SEQ ID NO: 433783 - DNA, 75 bp, synthetic construct
  source 1..75: mol_type = other DNA
accaggggctgttcggtctggataaagagatgaagctgaaaaatgtgctggcggagagttataccgtctccggcg

SEQ ID NO: 433784 - DNA, 75 bp, synthetic construct
  source 1..75: mol_type = other DNA
ccgccacctggttgagcagataccccgctacatcagtcagatggtaagctatgaatgtcgtttgattggtttctg

SEQ ID NO: 433785 - DNA, 75 bp, synthetic construct
  source 1..75: mol_type = other DNA
agttacaccctggtgaagaaagtcagagttcatgccgattaccacgtggaaatcgacaaacattactactcggtt

SEQ ID NO: 433786 - DNA, 75 bp, synthetic construct
  source 1..75: mol_type = other DNA
taccctgctgcgtcgttatgtcgaatctcaggtttatcagggcgtgattgaaaacctggccagcgagcaggccgc

SEQ ID NO: 433787 - DNA, 75 bp, synthetic construct
  source 1..75: mol_type = other DNA
cttactggagcaatggcaggcagtataatggttgccctacctgatatcaatgaccgcattgataatattacagga

SEQ ID NO: 433788 - DNA, 75 bp, synthetic construct
  source 1..75: mol_type = other DNA
aaattcagaatgaattattacattctgcaaataacgaacttgaggatatggcacagtcacttgtagcgataacaa

SEQ ID NO: 433789 - DNA, 75 bp, synthetic construct
  source 1..75: mol_type = other DNA
ccaacgtattatcgctgcgaactggacgaccggctggtgggcgtcgtggttatggcttacccgaaactgctgctg

SEQ ID NO: 433790 - DNA, 75 bp, synthetic construct
  source 1..75: mol_type = other DNA
cgaatgattaacctggttagcaggatgcataaccggccaatcatcgagattcagtcgtccatgagcaaatacaac

SEQ ID NO: 433791 - DNA, 75 bp, synthetic construct
  source 1..75: mol_type = other DNA
gtttgaacgaattcaccgttcgaatttaattggcatgggcatcctgccgctggaatttccgcaaggcgtaacgcg

SEQ ID NO: 433792 - DNA, 75 bp, synthetic construct
  source 1..75: mol_type = other DNA
aacagttttgctgatgagagctatcacggactgttaccgcatgacaggttcaggaaaatcccacacacagcggat

SEQ ID NO: 433793 - DNA, 75 bp, synthetic construct
  source 1..75: mol_type = other DNA
tggcgtttatccggtgctgtggtatctgtgatgggagccttatgtctgcttttgaagcaactacaccgtatcggt

SEQ ID NO: 433794 - DNA, 75 bp, synthetic construct
  source 1..75: mol_type = other DNA
ggcgatcgctttttataagaacataaaagttgcctcaagctcgactccttatatgtatcacgggcagctaaatgg

SEQ ID NO: 433795 - DNA, 75 bp, synthetic construct
  source 1..75: mol_type = other DNA
gcattgctgttgtcctggttcttcctgcaggaagatatatcatttattcagggactaggcgtttttataactatt

SEQ ID NO: 433796 - DNA, 75 bp, synthetic construct
  source 1..75: mol_type = other DNA
ctgtatttcttgtgtttttgtcaggaattttacaatattttttggctttttgtttctatctttattccctacgct

SEQ ID NO: 433797 - DNA, 75 bp, synthetic construct
  source 1..75: mol_type = other DNA
atttctttacggcgatgatcttcgcctgctcgttgggtattgcggtgtcggtaattagtatcccattactgatac

SEQ ID NO: 433798 - DNA, 75 bp, synthetic construct
  source 1..75: mol_type = other DNA
actcacgtaagaagccagcgcatgaatcttttattcagaattatgtcgcgattattgtcctgttttgcgccagcg

SEQ ID NO: 433799 - DNA, 75 bp, synthetic construct
  source 1..75: mol_type = other DNA
caagtgcaatattactgggtggcatgctcggtgcactgcttagccaacgcttaccggaacgtatccgcgtctcca

SEQ ID NO: 433800 - DNA, 75 bp, synthetic construct
  source 1..75: mol_type = other DNA
ggtcggcatcgaccggcgaagctgactgggcgctttcgccgctgtttgcttcgcagaactggccaccgacgctgt

SEQ ID NO: 433801 - DNA, 75 bp, synthetic construct
  source 1..75: mol_type = other DNA
atgcgttatattgctgctcgccagggtagcgaagtcatccgtttacaggcggtttactctgccgtcgcgatgggc

SEQ ID NO: 433802 - DNA, 75 bp, synthetic construct
  source 1..75: mol_type = other DNA
taggcagtctgcaacaggcccgctacgatgcgcgtatcgatcagttgcgtcagttgcaggaacgctttaagcctt

SEQ ID NO: 433803 - DNA, 75 bp, synthetic construct
  source 1..75: mol_type = other DNA
agtagcgccagttcacaagtaaaattaggcagtctgcaacaggcccgctacgatgcgcgtatcgatcagttgcgt

SEQ ID NO: 433804 - DNA, 75 bp, synthetic construct
  source 1..75: mol_type = other DNA
ccagcatcgcctgatagcccacgaaacgctatttaccggcaccatcaaccatacgcaggtccatccccgcgaagt

SEQ ID NO: 433805 - DNA, 75 bp, synthetic construct
  source 1..75: mol_type = other DNA
catatgcactgacagcctccgcacaacagactatccgtgaggcgctggccctgctggagcgccagttacgcgagc

SEQ ID NO: 433806 - DNA, 75 bp, synthetic construct
  source 1..75: mol_type = other DNA
atatcatgtctatatgaccgatgcgcagggcaaagtattgtttgattcggcaaataaagccgttggacaggatta

SEQ ID NO: 433807 - DNA, 75 bp, synthetic construct
  source 1..75: mol_type = other DNA
tttacagatgaagccattaaaaacaatgcctttaaaaaatgtcctttcgttcatccaaccgtgatgtttaaatcg

SEQ ID NO: 433808 - DNA, 75 bp, synthetic construct
  source 1..75: mol_type = other DNA
tacgcaatatcaatgagttcagtgcactggtagctgttaagccaggggcggtagcgtggattgatggaatgaaaa

SEQ ID NO: 433809 - DNA, 75 bp, synthetic construct
  source 1..75: mol_type = other DNA
tgggggcttgccggtcagccgcgggagcttaaggaatcgaaccttatcctgaattcattactgcttacccctctg

SEQ ID NO: 433810 - DNA, 75 bp, synthetic construct
  source 1..75: mol_type = other DNA
ggttcagtcatcagaagatttttatctggcaaaagcacgcacgcttgggatgtataattccgggcgtaaccagct

SEQ ID NO: 433811 - DNA, 75 bp, synthetic construct
  source 1..75: mol_type = other DNA
gatatcgatcttgggcaaaacaaagccaatgaggcgatcaatcgcttgaaaaatgcccgtgatttgcgcaccaat

SEQ ID NO: 433812 - DNA, 75 bp, synthetic construct
  source 1..75: mol_type = other DNA
ttattcaaccaaagatactctttccagattaagtcagggatggcagcaattcgaagtgtatcgccagcaaggatt

SEQ ID NO: 433813 - DNA, 75 bp, synthetic construct
  source 1..75: mol_type = other DNA
ctcctcattctaatagaccatttcttcttgggtgttatacgaatgtgaatgagttgcttgatgctatagattcat

SEQ ID NO: 433814 - DNA, 75 bp, synthetic construct
  source 1..75: mol_type = other DNA
ccaaactccgtggctccggtctggcgaatgcggtagggcgaatcagtggtattgccgcaccttatgccgttgcag

SEQ ID NO: 433815 - DNA, 75 bp, synthetic construct
  source 1..75: mol_type = other DNA
atgaatatgatgatctcatatcaggaacttgttcgcaccttccctaaaacctttagcatcgatggtaaaacggtg

SEQ ID NO: 433816 - DNA, 75 bp, synthetic construct
  source 1..75: mol_type = other DNA
cggtcgagtattggtcactggtacgcgacttcaccggtaaggatcgtccgtcctgggaaaaagcaaaacaagcgg

SEQ ID NO: 433817 - DNA, 75 bp, synthetic construct
  source 1..75: mol_type = other DNA
ctggaatcagaccgattttgtgaaggtgaaaaaattcgcgggttactggcagccaggattgcccaaactggacag

SEQ ID NO: 433818 - DNA, 75 bp, synthetic construct
  source 1..75: mol_type = other DNA
agagatgaagctgaaaaatgtgctggcagagagttataccgtctctgatgacggcctcacttacaccgtgaaatt

SEQ ID NO: 433819 - DNA, 75 bp, synthetic construct
  source 1..75: mol_type = other DNA
gtatcgcctacgcgcaaagttataaaccgtggccttacgatccagtgaaagcgcgcgaattactgaaaaaggcgg

SEQ ID NO: 433820 - DNA, 75 bp, synthetic construct
  source 1..75: mol_type = other DNA
gaagagaaagcccatgccgagcaggcataccgactctgcctggggctgctgagtcttagccgggagtatccgcca

SEQ ID NO: 433821 - DNA, 75 bp, synthetic construct
  source 1..75: mol_type = other DNA
aactgacggcattgatcggcctgcaaaacctgtcagcccgttttaattctgccatggacattcccgctcaggggc

SEQ ID NO: 433822 - DNA, 75 bp, synthetic construct
  source 1..75: mol_type = other DNA
tgcgtacccgactggctgcccattttgacgctcaggcactcaccgagctgacagcattgatcggcctgcaaaatc

SEQ ID NO: 433823 - DNA, 75 bp, synthetic construct
  source 1..75: mol_type = other DNA
gcgcatcaaactcagcaagccaggcgcggtggcacgggcggcgaatgttggcgtcatcattgagcgtggcaataa

SEQ ID NO: 433824 - DNA, 75 bp, synthetic construct
  source 1..75: mol_type = other DNA
gcctcgctgcatctccaccagtcgctgggatttgtcgtcaccgcgcaaatgccgcaggtaggcactaaatttggt

SEQ ID NO: 433825 - DNA, 75 bp, synthetic construct
  source 1..75: mol_type = other DNA
ccgatacgatcccgagctcaaccccagctaccagcagttggccgagcactatcaggtggcggtgatgccagctcg

SEQ ID NO: 433826 - DNA, 75 bp, synthetic construct
  source 1..75: mol_type = other DNA
gcattgaccacggtaaaacgccagcatcgccctgctctggatctttcccgcctgcctgaacttctgtcgcgtatt

SEQ ID NO: 433827 - DNA, 75 bp, synthetic construct
  source 1..75: mol_type = other DNA
gcattgaccacggtaaaacgccagcatcgccctgctctcgatctttcacgcctgcctgaacttatgtcgcgtatt

SEQ ID NO: 433828 - DNA, 75 bp, synthetic construct
  source 1..75: mol_type = other DNA
gaacgtcgactgatgctacagtggtgggccgattttcttgatgcgaaccgggagaaggggatcagtccgtttgaa

SEQ ID NO: 433829 - DNA, 75 bp, synthetic construct
  source 1..75: mol_type = other DNA
cttgcggttatgctgaatttactggtttttattcgttccagtgaactcagataagcccggtggtctgaaattgat

SEQ ID NO: 433830 - DNA, 75 bp, synthetic construct
  source 1..75: mol_type = other DNA
cttgccgttatgctgaatttactggtttttattcgttccagtgaactcagataagcccgctggtctgaaattgat

SEQ ID NO: 433831 - DNA, 75 bp, synthetic construct
  source 1..75: mol_type = other DNA
cttgcagttatgctgaatttactggtttttattcgttccagtgaactcagataagcccgatggtctgaaattgat

SEQ ID NO: 433832 - DNA, 75 bp, synthetic construct
  source 1..75: mol_type = other DNA
aataaggccctcagagtgatggggtatgacacaaccaaggaagtctgtggccatggattccgggcgatggcgtgc

SEQ ID NO: 433833 - DNA, 75 bp, synthetic construct
  source 1..75: mol_type = other DNA
gctccagtgaactcagatatgcccgctggtcagaaattgatattgaaaatgccatgtggactattcctgctgaac

SEQ ID NO: 433834 - DNA, 75 bp, synthetic construct
  source 1..75: mol_type = other DNA
ggtttgtggtcccgcgatgcagttgaacgtcagatgagccatcaggaacgtaacggtgtacgtgctgcttacatt

SEQ ID NO: 433835 - DNA, 75 bp, synthetic construct
  source 1..75: mol_type = other DNA
tatggctggcgcattgactacggtaaaacgccagcatcgccccgctcttgatctttctcgcctgcctgaactttt

SEQ ID NO: 433836 - DNA, 75 bp, synthetic construct
  source 1..75: mol_type = other DNA
ggaagtctgtggccatggattccgggcgatggcgtgcagtgcattgattgaatcaggtttgtggtcccgcgatgc

SEQ ID NO: 433837 - DNA, 75 bp, synthetic construct
  source 1..75: mol_type = other DNA
tactggtttttattcgttccagtgaactcagatatgcccgctggtctgaaattgatattgacaatgccatgtgga

SEQ ID NO: 433838 - DNA, 75 bp, synthetic construct
  source 1..75: mol_type = other DNA
tgtgtggacatggtttcaggacgatggcgtgtagttctttgattgaatcgggattgtggtcgagggatgcagtag

SEQ ID NO: 433839 - DNA, 75 bp, synthetic construct
  source 1..75: mol_type = other DNA
atggatctgtatatccagattatcctggtggcgtgcctgaccggtatgacatcatttctggcgcatcgctcggcg

SEQ ID NO: 433840 - DNA, 75 bp, synthetic construct
  source 1..75: mol_type = other DNA
tacctttgtttatgcggtgggctatctctcgccgaatccgatggttgcagcggtattaggcgcagtggttatttc

SEQ ID NO: 433841 - DNA, 75 bp, synthetic construct
  source 1..75: mol_type = other DNA
tgccagcatgaagattttcgccggtagtgaagtgtcgatcttcactctggagaaagcgtactccgcaggcgtaac

SEQ ID NO: 433842 - DNA, 75 bp, synthetic construct
  source 1..75: mol_type = other DNA
atggatctgtatattcagattatcgtggtggcgtgcctgacgggtatgacatcgcttctggcgcatcgctcggca

SEQ ID NO: 433843 - DNA, 75 bp, synthetic construct
  source 1..75: mol_type = other DNA
ccggtcgtagccgtaatgatcaccggtattctgctgaatgttctttactggcttggcctgttcgttccggcttaa

SEQ ID NO: 433844 - DNA, 75 bp, synthetic construct
  source 1..75: mol_type = other DNA
agctcgccggtggtttcagcttttgcactgttcccgctggtggcgattttctaccagtttggctggaagcaaagt

SEQ ID NO: 433845 - DNA, 75 bp, synthetic construct
  source 1..75: mol_type = other DNA
gccggaaacagaagatggcacgctgtatgccgccaatgtccccgccgccagcggtaaaccgctgcgtgccgacct

SEQ ID NO: 433846 - DNA, 75 bp, synthetic construct
  source 1..75: mol_type = other DNA
tgtggccatggattccgggcgatggcgtgcagtgcattgattgaatccggcttatggtcaagagatgcggttgaa

SEQ ID NO: 433847 - DNA, 75 bp, synthetic construct
  source 1..75: mol_type = other DNA
aagctaaacaaatttatgaaatcgccagtcgtctgcagcaaagaatatctgctgtaatgcgttatgccgtacagt

SEQ ID NO: 433848 - DNA, 75 bp, synthetic construct
  source 1..75: mol_type = other DNA
aacgcatggttactctttcttcctaccgatatcctcggcgtactggcgataaacagcctgatggcgtttggtctt

SEQ ID NO: 433849 - DNA, 75 bp, synthetic construct
  source 1..75: mol_type = other DNA
aaggggattgctgaactggcgcggcgttactacaacgtgcggatgcgtgaagaaagccctttactcagcccggag

SEQ ID NO: 433850 - DNA, 75 bp, synthetic construct
  source 1..75: mol_type = other DNA
gcagcccgtgaactcagcctgtatgaatcccagctttatgcccggcgcagtaaacagcagcaacaaatgagttcg

SEQ ID NO: 433851 - DNA, 75 bp, synthetic construct
  source 1..75: mol_type = other DNA
tggtgggccgattttctgaatgcaaacagagaaagatttatcagtccatttgaatatgcaaagattaataatccg

SEQ ID NO: 433852 - DNA, 75 bp, synthetic construct
  source 1..75: mol_type = other DNA
aatggcgtgatggcaggggtatttgcccgctacgtctggcttaatcgtctgcattactatgccatctgttacgtg

SEQ ID NO: 433853 - DNA, 75 bp, synthetic construct
  source 1..75: mol_type = other DNA
ttacggctatttaattactgtctgattgccgcattattatgcgctattgtcggggcgattggttcggtcagtatt

SEQ ID NO: 433854 - DNA, 75 bp, synthetic construct
  source 1..75: mol_type = other DNA
attgatggttgaagctgatacgtgtctctatcgctcgaaaaaagatgggcgtaaccgcaccagcaccatgcgtta

SEQ ID NO: 433855 - DNA, 75 bp, synthetic construct
  source 1..75: mol_type = other DNA
gtggactattccagccgaacgcaaacctctgccaggggtaaaattctcacaccggggctccaagatgcgaacacc

SEQ ID NO: 433856 - DNA, 75 bp, synthetic construct
  source 1..75: mol_type = other DNA
ccgaacgcgaacctctgccaggcgtaaaattctcacaccggggctccaagatgcgaacaccacatcttgtgccac

SEQ ID NO: 433857 - DNA, 75 bp, synthetic construct
  source 1..75: mol_type = other DNA
ccagtcgtctgcagcaaagaatatctgctgtaatgcgttatgctgtacagtctggcatcatcagatataacccgg

SEQ ID NO: 433858 - DNA, 75 bp, synthetic construct
  source 1..75: mol_type = other DNA
caccggacgcattaaagatctgattattattcgtggccgtaatatctggccgcaggaggtgatgctgccaactta

SEQ ID NO: 433859 - DNA, 75 bp, synthetic construct
  source 1..75: mol_type = other DNA
gaatatatagcggaacaggaaccggaaattcattctggcgatgcgattgcttttgttaccgcccaggaaaaaatc

SEQ ID NO: 433860 - DNA, 75 bp, synthetic construct
  source 1..75: mol_type = other DNA
ttgtagaggctttttttgcctgccagtatgccggcttagtcgccgtcccgttggcgattccaatgggcgtcggtc

SEQ ID NO: 433861 - DNA, 75 bp, synthetic construct
  source 1..75: mol_type = other DNA
tcattggcggagcggggagtctggcgttcccgctgcctgcattaatctggtgtgcagtgcgctatacgccgcagg

SEQ ID NO: 433862 - DNA, 75 bp, synthetic construct
  source 1..75: mol_type = other DNA
gtctttatgaggcgctgaaaagtccatcgctgaaacagacacaacatctgactgtcatgctgcttgatatcgact

SEQ ID NO: 433863 - DNA, 75 bp, synthetic construct
  source 1..75: mol_type = other DNA
ctgtttacctctttctcagggagtttagtctccaggatttccggggcggttcaatctgccgtaatgcgttatgcc

SEQ ID NO: 433864 - DNA, 75 bp, synthetic construct
  source 1..75: mol_type = other DNA
agggttatggggtatgacacaacccaggatgtctgtggtcatggattccgggcgatggcatgtagtgcattaata

SEQ ID NO: 433865 - DNA, 75 bp, synthetic construct
  source 1..75: mol_type = other DNA
agtggtgggccgattttctggatgcaaacagagaaagatttatcagtccatttgaatatgcaaagattaataatc

SEQ ID NO: 433866 - DNA, 75 bp, synthetic construct
  source 1..75: mol_type = other DNA
acgtggaattaacgtcacgatagtcactgacagaagctacaacactgaacataatgattttgagaagcgaaaaga

SEQ ID NO: 433867 - DNA, 75 bp, synthetic construct
  source 1..75: mol_type = other DNA
atttatgaaatcgccagtcgtctgcagcaaagaatatctgctgtaatgcgttatgccgtacagtctggcatcatc

SEQ ID NO: 433868 - DNA, 75 bp, synthetic construct
  source 1..75: mol_type = other DNA
tggaacgtcagatgagccatcaggaacgtaacggtgtacgtgctgcttacattcataaagcagaacatctggaag

SEQ ID NO: 433869 - DNA, 75 bp, synthetic construct
  source 1..75: mol_type = other DNA
tctttacgggagcacatgacccgcgtaaaccaatcagtgaaaatactgtaaataaagccctgagggtgatgggat

SEQ ID NO: 433870 - DNA, 75 bp, synthetic construct
  source 1..75: mol_type = other DNA
gaacatcttggggagcgaatgttgatgctgcagtggtgggctgattatctggatgcgaatagaatggcggctatc

SEQ ID NO: 433871 - DNA, 75 bp, synthetic construct
  source 1..75: mol_type = other DNA
gtgaaaatggtctgatctttacgggagcacatgacccgcgtaaaccaatcagtgaaaatactgtaaataaagccc

SEQ ID NO: 433872 - DNA, 75 bp, synthetic construct
  source 1..75: mol_type = other DNA
aagatgcgaacaccacatcttgtgccactcagcaaacaggctgtagccatactgacagaacttcagacatgggct

SEQ ID NO: 433873 - DNA, 75 bp, synthetic construct
  source 1..75: mol_type = other DNA
tttttattcgttccagtgaactcagatacgcccggtggtctgaaattgatattgacaatgccatgtggactattc

SEQ ID NO: 433874 - DNA, 75 bp, synthetic construct
  source 1..75: mol_type = other DNA
tgctgaatttactggtttttattcgttccagtgaactcagatatgcccgctggtctgaaattgatattgacaatg

SEQ ID NO: 433875 - DNA, 75 bp, synthetic construct
  source 1..75: mol_type = other DNA
gtgaaaatggtctgatctttacgggagcacatgacccacgtaaaccaatcagtgaaaacaccgtaaataaagccc

SEQ ID NO: 433876 - DNA, 75 bp, synthetic construct
  source 1..75: mol_type = other DNA
cgggcgatggcgtgcagtgcattgattgaatcaggtttgtggtcccgcgatgctgttgaaagacagatgagtcat

SEQ ID NO: 433877 - DNA, 75 bp, synthetic construct
  source 1..75: mol_type = other DNA
taccacctcacccttgatacagccaaagagctggcgatggtcgagcgtaacgaaaaaggtcgtcaggtacgacgc

SEQ ID NO: 433878 - DNA, 75 bp, synthetic construct
  source 1..75: mol_type = other DNA
actgaagcccggctaccgcagcctgattcattcgccgtctggtgttctcggcctgacggagaactcactgctgat

SEQ ID NO: 433879 - DNA, 75 bp, synthetic construct
  source 1..75: mol_type = other DNA
attcattcgccgtctggtgttctcggcctgacggagaactcactgctgatgaatctgctgaaccagttacaggaa

SEQ ID NO: 433880 - DNA, 75 bp, synthetic construct
  source 1..75: mol_type = other DNA
agattctgaagtctccaacctatagtgatgtcgatttatcctcctttgttgagcaagctaaagcctcggcaatgt

SEQ ID NO: 433881 - DNA, 75 bp, synthetic construct
  source 1..75: mol_type = other DNA
cgatgtggatctgacttgctttgttgagaaggcgaagtcctcatctctttacgagatggtaaaaaataattgtaa

SEQ ID NO: 433882 - DNA, 75 bp, synthetic construct
  source 1..75: mol_type = other DNA
ttggtattcctcttttagaagcaatgagggcaggatgcccattcattgcgtataatcactcctcaataccagagg

SEQ ID NO: 433883 - DNA, 75 bp, synthetic construct
  source 1..75: mol_type = other DNA
aagctaaagagtttgcagaaaaatatgaagcagttgcaaaatcaatgaaaaataaaattgaaggttatggtgatg

SEQ ID NO: 433884 - DNA, 75 bp, synthetic construct
  source 1..75: mol_type = other DNA
tggacaatgtttgcagaggcgaaagaatatagagagtcactagctattgagcaggaacgcaaagcagccacttcc

SEQ ID NO: 433885 - DNA, 75 bp, synthetic construct
  source 1..75: mol_type = other DNA
atacgcactacacgtcggcagggcaacagcaggcggtacgcacggtgttgacctgcggcagggataaaacgctac

SEQ ID NO: 433886 - DNA, 75 bp, synthetic construct
  source 1..75: mol_type = other DNA
cgtcggtgtgagtaaatgcctgcgtgatatccagacgcacgcggagtacatcaacgacaaggcagggttcttctg

SEQ ID NO: 433887 - DNA, 75 bp, synthetic construct
  source 1..75: mol_type = other DNA
gtatttaacatgcttgttaacgaaggcgctgatctgcaaatccgccgtcaatcgctcaggcgtgacactttggtt

SEQ ID NO: 433888 - DNA, 75 bp, synthetic construct
  source 1..75: mol_type = other DNA
tatgatttggtgcgattatttgagccaaatccatttgggcaaagcgatccgatttgataaaggaatattgaataa

SEQ ID NO: 433889 - DNA, 75 bp, synthetic construct
  source 1..75: mol_type = other DNA
gcaggcactgagaacgctggatattcagtatcaggatctgccgcagatttaccgttgtgtacagcatctttccgc

SEQ ID NO: 433890 - DNA, 75 bp, synthetic construct
  source 1..75: mol_type = other DNA
caaatcctgaacaacgccgcacccttttagaagagtacggctttaagtttgatcgccgaatccgtgaagatgaat

SEQ ID NO: 433891 - DNA, 75 bp, synthetic construct
  source 1..75: mol_type = other DNA
caactccagaacaacgccgggcgcttcttgaagaatacggttttgaatttgatcgccgtatccgtgaaaaggaat

SEQ ID NO: 433892 - DNA, 75 bp, synthetic construct
  source 1..75: mol_type = other DNA
gaggccgcattgcttcatatttgcggaaaatctacatttcgggaatactgttcaacactggcaggcgcgggcgtt

SEQ ID NO: 433893 - DNA, 75 bp, synthetic construct
  source 1..75: mol_type = other DNA
tttgactttggtctgcgtccatcgctgggttatgtcttatcgaaagggaaagatattgagggcatcggtgatgaa

SEQ ID NO: 433894 - DNA, 75 bp, synthetic construct
  source 1..75: mol_type = other DNA
acggctcaacgacaactggtgataaaaatcgccatcgcgctggcagtcagcctgtttgtttcctggacaatgggt

SEQ ID NO: 433895 - DNA, 75 bp, synthetic construct
  source 1..75: mol_type = other DNA
ttcccgagcgatcatggcacggtgatatttacctttgcgctggcatttttatgctggcatcgtttgtggtcagga

SEQ ID NO: 433896 - DNA, 75 bp, synthetic construct
  source 1..75: mol_type = other DNA
ggcacattcccgaaaccgttcagcaaaaaaaatgtgaagggttcggcctcggtttcgctttatataagcagtgcg

SEQ ID NO: 433897 - DNA, 75 bp, synthetic construct
  source 1..75: mol_type = other DNA
gggatgttgtcggaccttattttaagaaactctgggaaaccattggtccttattttgagactggctgggaactcc

SEQ ID NO: 433898 - DNA, 75 bp, synthetic construct
  source 1..75: mol_type = other DNA
tctgaaactgggattgatgggcgttggcagtgccatcagtattgtcagcaggctcatgtcgatgacgccgattgg

SEQ ID NO: 433899 - DNA, 75 bp, synthetic construct
  source 1..75: mol_type = other DNA
gcagaaatctattaaaagtcagtgccactaagaaccctgagcaagtaataaaagcagcccggactcacatttcca

SEQ ID NO: 433900 - DNA, 75 bp, synthetic construct
  source 1..75: mol_type = other DNA
ctacgccgatcactaataaatttacaaacaccagcggcttcgccaacaaaacgcaagacgttctgttagttgcgc

SEQ ID NO: 433901 - DNA, 75 bp, synthetic construct
  source 1..75: mol_type = other DNA
cccgggaagggttcggccgatttacggcatttaacgtcgcctggggctactggctgatgactatattcagcaacg

SEQ ID NO: 433902 - DNA, 75 bp, synthetic construct
  source 1..75: mol_type = other DNA
tttgttgggaatgtgtaagagatcgtttagccagtaaatattcaatgtcttggttagactatgatatcttacagg

SEQ ID NO: 433903 - DNA, 75 bp, synthetic construct
  source 1..75: mol_type = other DNA
atgtcaggatttaaagaagattttttatggggcggtgcggtagccgcacatcaattggaaggtggctggaatgaa

SEQ ID NO: 433904 - DNA, 75 bp, synthetic construct
  source 1..75: mol_type = other DNA
tggcaaattgatccggcagggctacgttattcactcaactggttctgggatcatttccaattgccgctgtttatt

SEQ ID NO: 433905 - DNA, 75 bp, synthetic construct
  source 1..75: mol_type = other DNA
tcatttccagttgccgctgtttattgtcgaaaatggatttggtgcggttgaccagagacaagctgacggcacggt

SEQ ID NO: 433906 - DNA, 75 bp, synthetic construct
  source 1..75: mol_type = other DNA
aacatatgctgaattactttgccaggaaaggattcaacctcgatatcacaccagaagataacgcgattcttgcca

SEQ ID NO: 433907 - DNA, 75 bp, synthetic construct
  source 1..75: mol_type = other DNA
gttagttgccagtgccctggcggtacagactggaaaactgatcaatcctgaatttaatatcggctgtatgattgc

SEQ ID NO: 433908 - DNA, 75 bp, synthetic construct
  source 1..75: mol_type = other DNA
cttcgcatcaacggtcttcacgcgctataaagaaaaagtaaagtactggatgacgtttaacgaaatcaataatca

SEQ ID NO: 433909 - DNA, 75 bp, synthetic construct
  source 1..75: mol_type = other DNA
cggcaccggtcgtagcagtaatgatcactggcatcctgctgaatgttctttactggcttggtctgttcgttccgg

SEQ ID NO: 433910 - DNA, 75 bp, synthetic construct
  source 1..75: mol_type = other DNA
gccggaacaatcacaaacgctgatcaaccaggcggcgctggcggaatttatgcgcgggctgggttttgtgccgtt

SEQ ID NO: 433911 - DNA, 75 bp, synthetic construct
  source 1..75: mol_type = other DNA
tcggtacgtaatgcgtcggataacatccgtaacgccatgaatatgctgatggaagtggcgttgctggtcggttcg

SEQ ID NO: 433912 - DNA, 75 bp, synthetic construct
  source 1..75: mol_type = other DNA
acatcgatgccagcgggctttcggtgtttgaagaacgcacgtcgcggattatcaaaaacttaccctatatcgcca

SEQ ID NO: 433913 - DNA, 75 bp, synthetic construct
  source 1..75: mol_type = other DNA
cggaagtgctgttactgcgttcgatcggcaaatggctgggacgctatccgtcggtgcgtaatgcgtcggataaca

SEQ ID NO: 433914 - DNA, 75 bp, synthetic construct
  source 1..75: mol_type = other DNA
aattgctaccactgcgctggccacaggcgtatatgccgtagccggttttacctttgtttatgctgtcggttatct

SEQ ID NO: 433915 - DNA, 75 bp, synthetic construct
  source 1..75: mol_type = other DNA
gaagatggtgttgacttaattggctacaccccgtggggttgcattgacctggtttctgccggaacaggagaaatg

SEQ ID NO: 433916 - DNA, 75 bp, synthetic construct
  source 1..75: mol_type = other DNA
ccgtaggtaatggggatatgacacttattcaaaccgaagatggaaagaatatattaatcgattgtcgtatcagag

SEQ ID NO: 433917 - DNA, 75 bp, synthetic construct
  source 1..75: mol_type = other DNA
ccacggtcgattgtatagatatagaattcgtgcaaataatatgttttattcgatccagccatcggttagttacct

SEQ ID NO: 433918 - DNA, 75 bp, synthetic construct
  source 1..75: mol_type = other DNA
actgactcgaatcctggcgttattcctaatattcctgttcctcaggtgagtgtacgagcacgtattaatgcattt

SEQ ID NO: 433919 - DNA, 75 bp, synthetic construct
  source 1..75: mol_type = other DNA
taaaatttttatcaatgaaatttggtcaagcccaattgtatttagacgccatcatgctcaaaatcatccattatg

SEQ ID NO: 433920 - DNA, 75 bp, synthetic construct
  source 1..75: mol_type = other DNA
ataaagaaaaaaattatttggatggagttggaaaccaagttctggtcttaggaaaagacgaagatgggaaaacag

SEQ ID NO: 433921 - DNA, 75 bp, synthetic construct
  source 1..75: mol_type = other DNA
taaaattttcatcaatgagatctggtcaagcccaattgtatttagacgacatcatgcacagaatcatcctttatg

SEQ ID NO: 433922 - DNA, 75 bp, synthetic construct
  source 1..75: mol_type = other DNA
ttgtcgcggtggaacatatacctggtgagaatattgttgaggctgtggagttgacttatgacagattcaacagcc

SEQ ID NO: 433923 - DNA, 75 bp, synthetic construct
  source 1..75: mol_type = other DNA
cacatggtcaggacggcatcactgacgaaaatggatatgtacttaatgagccgacaaaagaaattctcaccagac

SEQ ID NO: 433924 - DNA, 75 bp, synthetic construct
  source 1..75: mol_type = other DNA
atgagaaaaccggcagcggtatggcgcagggggtcggtattcaggtattaaaagaggggacgcccctgaagttta

SEQ ID NO: 433925 - DNA, 75 bp, synthetic construct
  source 1..75: mol_type = other DNA
ttacgcttctttcatttaatacagatgcagtacagtttgtgtatcgtgttgattcccgaccaccggacgttgtat

SEQ ID NO: 433926 - DNA, 75 bp, synthetic construct
  source 1..75: mol_type = other DNA
ttgtcgctatagaacatatccctagcgagaatattgttgaagccgtagagttaacatatgacagattcaatagta

SEQ ID NO: 433927 - DNA, 75 bp, synthetic construct
  source 1..75: mol_type = other DNA
cttaaataaacggtccacttactacgaaccagagttttatgacgctcgcgctgtgttaaaggaattattcaagta

SEQ ID NO: 433928 - DNA, 75 bp, synthetic construct
  source 1..75: mol_type = other DNA
caccctgccgatggtctggtacgttcctccgctgtcaccgattcagtcctacgcagatgcgggcggtttgccgaa

SEQ ID NO: 433929 - DNA, 75 bp, synthetic construct
  source 1..75: mol_type = other DNA
caacctgatgatgtgcgcaaagccgcgcaggaaatcgttaatagcggtaaggccaggcgggttgtcgtttccctc

SEQ ID NO: 433930 - DNA, 75 bp, synthetic construct
  source 1..75: mol_type = other DNA
accgttggcgctggtgacagcatggtcggcgcgatgacacttaaactggcagaaaatgcctctcttgaagagatg

SEQ ID NO: 433931 - DNA, 75 bp, synthetic construct
  source 1..75: mol_type = other DNA
ttatggataaagggatttacattgagcaaaacaagaccggcactaaacaaatcaaggaatggtctccacgattac

SEQ ID NO: 433932 - DNA, 75 bp, synthetic construct
  source 1..75: mol_type = other DNA
tctctgtgcggcaagactcggtgatgtgcttgagttgaaatggcaggatattatggataaagggatctacattga

SEQ ID NO: 433933 - DNA, 75 bp, synthetic construct
  source 1..75: mol_type = other DNA
tgctgtgccggattgattaacggtgaagtagtgactgtctttggcgtagcaccggcatcgatgatcggcggcagt

SEQ ID NO: 433934 - DNA, 75 bp, synthetic construct
  source 1..75: mol_type = other DNA
gtgatcagcacaaccaaaggcgggaaagtcatcgctaaaacgctgaacaactggtggaatcaggctaaacgcgca

SEQ ID NO: 433935 - DNA, 75 bp, synthetic construct
  source 1..75: mol_type = other DNA
tcagtgggcataaaacagaaaatcaggtgttgatttatgatcgaaaaacaaaagtcacaccaacactggacttgc

SEQ ID NO: 433936 - DNA, 75 bp, synthetic construct
  source 1..75: mol_type = other DNA
aagataatgcactaccaccgcgtgttagatcgaatggttacagttacgtgtggaaacccgaaggaagcacaagaa

SEQ ID NO: 433937 - DNA, 75 bp, synthetic construct
  source 1..75: mol_type = other DNA
ctggaaattgaatccggggccatcctggtcataagcggaagcctgccgccaggtgtgaagctggaaaaattaacc

SEQ ID NO: 433938 - DNA, 75 bp, synthetic construct
  source 1..75: mol_type = other DNA
cggcggagactggcgggtgcgccagcagctgcctgtcggagtcgggcctgacgaccggatgccgccaggcagccg

SEQ ID NO: 433939 - DNA, 75 bp, synthetic construct
  source 1..75: mol_type = other DNA
tagataaaatttcatatatctcagataacagcacatggaaaactgttatgttttatccatgcttatctgtaattg

SEQ ID NO: 433940 - DNA, 75 bp, synthetic construct
  source 1..75: mol_type = other DNA
agccaaagggatatcagattacgaaggaagcagtcgcgacaaacagattttcagtggacataaaacagaaaatca

SEQ ID NO: 433941 - DNA, 75 bp, synthetic construct
  source 1..75: mol_type = other DNA
tctcttcgatggtttttcctgcacatgccggagttgttatctacgggacacgtattatttacccggcagaaaaaa

SEQ ID NO: 433942 - DNA, 75 bp, synthetic construct
  source 1..75: mol_type = other DNA
atagttacgttacctactgttggtattaatcaactggaaaatcagggtcagactgctggtcgtacaggctttaat

SEQ ID NO: 433943 - DNA, 75 bp, synthetic construct
  source 1..75: mol_type = other DNA
agcaaaggcagacttcttaaacgtgtatgctaaaggtgtagcggggctgattcaaagggagtggttcaacaaaaa

SEQ ID NO: 433944 - DNA, 75 bp, synthetic construct
  source 1..75: mol_type = other DNA
gcgttgacatcctgattggcaccacgggtcgtttaatcgactacgccaaacagaatcacattaaccttggcgcta

SEQ ID NO: 433945 - DNA, 75 bp, synthetic construct
  source 1..75: mol_type = other DNA
tttgcgatgcaaaacagaattaagttgttttaccggccagcgggtattgctccggtaaacgggatcagtttaact

SEQ ID NO: 433946 - DNA, 75 bp, synthetic construct
  source 1..75: mol_type = other DNA
aagaatgcactgaagtttgcgatgcaaaacagaattaagttgttttaccggccagcgggtattgctccggtaaat

SEQ ID NO: 433947 - DNA, 75 bp, synthetic construct
  source 1..75: mol_type = other DNA
ccggcaggttatgaagttctacaagaactggatgagttagattctttattaattatagatctcgggggcaccaca

SEQ ID NO: 433948 - DNA, 75 bp, synthetic construct
  source 1..75: mol_type = other DNA
acaggaagtggatgtggttgttaccctgccactgagcgaatatttcgacacaaacgcacagccggacatggccaa

SEQ ID NO: 433949 - DNA, 75 bp, synthetic construct
  source 1..75: mol_type = other DNA
attgacgaactgtatgcggtatcgctgatgactaccgaagatgcgctgcgcgttggtcttcgcactgcgactatg

SEQ ID NO: 433950 - DNA, 75 bp, synthetic construct
  source 1..75: mol_type = other DNA
ctccctgctgattgtggatatcggtggaaccacgctggatatcgcgcacgttcgcagcaaaatgtccggattcac

SEQ ID NO: 433951 - DNA, 75 bp, synthetic construct
  source 1..75: mol_type = other DNA
gcagtcaggtattgctccgcaacctgttgatattattgttactttacctttaggtgagtatctggatgagaacga

SEQ ID NO: 433952 - DNA, 75 bp, synthetic construct
  source 1..75: mol_type = other DNA
atcagtccgaacagcttcaagcccgaatggtccatgacgttgctgacagattcatcagtgccggcttccgccaac

SEQ ID NO: 433953 - DNA, 75 bp, synthetic construct
  source 1..75: mol_type = other DNA
acccaggcaaatcatgaactggcaagcctgagtcgagtatacgggtggggatatgagcgtggatacgtgaagaat

SEQ ID NO: 433954 - DNA, 75 bp, synthetic construct
  source 1..75: mol_type = other DNA
aacggcgagtcctgcatatccctggaagaagcaccaccggcaaaacagcagattgtctgtagtcgcagttttggt

SEQ ID NO: 433955 - DNA, 75 bp, synthetic construct
  source 1..75: mol_type = other DNA
tggggagcgtcagtattgccggcaggtgacgacatttgtacggacatccccctttgcagtaaaagaaccctgtta

SEQ ID NO: 433956 - DNA, 75 bp, synthetic construct
  source 1..75: mol_type = other DNA
gaaagggcattgcgagaggcagggcttgaagaggaccgtagaaagcaagctttggcaatgttacgtggcgactca

SEQ ID NO: 433957 - DNA, 75 bp, synthetic construct
  source 1..75: mol_type = other DNA
ttcatttattacctttttatccatggtcatctgatgatggattttcggtaattgattatcatcaggtcgccagtg

SEQ ID NO: 433958 - DNA, 75 bp, synthetic construct
  source 1..75: mol_type = other DNA
tgttaattacctatgccgatcaatttcacagcaatgatttaaaaccattacccacatttaatcagttttaccatc

SEQ ID NO: 433959 - DNA, 75 bp, synthetic construct
  source 1..75: mol_type = other DNA
aagcgggggagtggcaggatattcagcaactcggtgaatgcagtcatttaatgtttgattttgtctgcaaccata

SEQ ID NO: 433960 - DNA, 75 bp, synthetic construct
  source 1..75: mol_type = other DNA
tacgtttatcacgcggtggttgattacttcaaagcgggcaacaccattacggatgaacagctcaacggtatgcgc

SEQ ID NO: 433961 - DNA, 75 bp, synthetic construct
  source 1..75: mol_type = other DNA
accacgatcacgaccacgacggttgctgcggtggtcatggccacgatcacggtcatgaacacggtggcgaaggct

SEQ ID NO: 433962 - DNA, 75 bp, synthetic construct
  source 1..75: mol_type = other DNA
ttatgggcgttgatgaactgcaggtaggtatgcgcttcctggctgaaaccgaccagggtccagtaccggttgaaa

SEQ ID NO: 433963 - DNA, 75 bp, synthetic construct
  source 1..75: mol_type = other DNA
gcggggcgaggaaccgcccctgaatggcaaatgaaacgggaaatgctatcgccttcgtatacaacacaatggact

SEQ ID NO: 433964 - DNA, 75 bp, synthetic construct
  source 1..75: mol_type = other DNA
caacaaatgaccagaacaccgcattgcaacgaaacgcactggagtgcgcaggatgtgaactgatattcgaggata

SEQ ID NO: 433965 - DNA, 75 bp, synthetic construct
  source 1..75: mol_type = other DNA
cgtgaagggtaccgctatatgaaggcaggagtcatgctggctgatttcacaccatcgggtatagcgctgccggga

SEQ ID NO: 433966 - DNA, 75 bp, synthetic construct
  source 1..75: mol_type = other DNA
gcatcgtcagggtagtggtttcggccccggaggatgggtgcttcgccgcgcgcaattcgatgcgttatgcggtgg

SEQ ID NO: 433967 - DNA, 75 bp, synthetic construct
  source 1..75: mol_type = other DNA
tcagcgcctgcgaagcggacgttatcgccctggtgcttaatgcggacgcaccgtggtcccctttttcgccaggct

SEQ ID NO: 433968 - DNA, 75 bp, synthetic construct
  source 1..75: mol_type = other DNA
cacgcaatgtctgcgtggcgaaaatattcattatcagaaaacgcaggcaatcgtctggtccccgaccaccattga

SEQ ID NO: 433969 - DNA, 75 bp, synthetic construct
  source 1..75: mol_type = other DNA
caatggtagtgaatcaaaattacaaacctttcaatgatatttatcttaaccgcatcggaggggtgatctgcaatg

SEQ ID NO: 433970 - DNA, 75 bp, synthetic construct
  source 1..75: mol_type = other DNA
atgggaagaccaagaaaaaacaaaaaagataatgcgctaccaccgcgtgttagatcaaatggttacagttacgtg

SEQ ID NO: 433971 - DNA, 75 bp, synthetic construct
  source 1..75: mol_type = other DNA
ctgcacgattttatgcagtggaagggaccgatcctcaccgactccggcggcttccaagtcttcagccttggcgat

SEQ ID NO: 433972 - DNA, 75 bp, synthetic construct
  source 1..75: mol_type = other DNA
tggagatgtctctgcgttgggcgaagcgtagccgtgagcgttttgacagtctcggaaacaaaaatgcgctgtttg

SEQ ID NO: 433973 - DNA, 75 bp, synthetic construct
  source 1..75: mol_type = other DNA
cctgccagtgtggaaagacatcactgacccagtacctaagaggagaaacgttacattatcagaagacccaagcga

SEQ ID NO: 433974 - DNA, 75 bp, synthetic construct
  source 1..75: mol_type = other DNA
ctggggcatacgtcaggggcagatacgctgctggggttctggcttggccaacaattattacaaggaaaaccatga

SEQ ID NO: 433975 - DNA, 75 bp, synthetic construct
  source 1..75: mol_type = other DNA
ccagtcctggcggttagcgggcgtgtggcggcgggcgattaatctgctgacggaaagtggcgaactgttaacgct

SEQ ID NO: 433976 - DNA, 75 bp, synthetic construct
  source 1..75: mol_type = other DNA
acgccaggtaaagaattcaacctcaccatgaaggatatgtgcagtgatcctacccacgtaatatggacacaggcc

SEQ ID NO: 433977 - DNA, 75 bp, synthetic construct
  source 1..75: mol_type = other DNA
gtttattgttgttcgctcgaaaccttccagagattgtccgggtggaatatgggggtggatcactcccagtaaaga

SEQ ID NO: 433978 - DNA, 75 bp, synthetic construct
  source 1..75: mol_type = other DNA
cgacaggtcagaaaactgtgtacagcgacggaagtggattcaatgggatggtttattgttgttcgctcgaaacct

SEQ ID NO: 433979 - DNA, 75 bp, synthetic construct
  source 1..75: mol_type = other DNA
tccaagatgcgaacaccacatcttgtgactcagcaaacaggctgtagccatactgacagaacttcagacatgggc

SEQ ID NO: 433980 - DNA, 75 bp, synthetic construct
  source 1..75: mol_type = other DNA
caacccaggatgtctgtggccatggattccgggcgatggcgtgcagtgcattgattgaatcaggtttgtggtccc

SEQ ID NO: 433981 - DNA, 75 bp, synthetic construct
  source 1..75: mol_type = other DNA
acagaacttcagacatgggctggtgaaaatggtctgatctttacgggagcacatgacccgcgtaaaccaatcagt

SEQ ID NO: 433982 - DNA, 75 bp, synthetic construct
  source 1..75: mol_type = other DNA
atcacacagcgataaagtactcaaaagcctcgagactcacgttttcccctttatcggcaaccgggatatcacaac

SEQ ID NO: 433983 - DNA, 75 bp, synthetic construct
  source 1..75: mol_type = other DNA
gccctgagggttatggggtatgacacaacccaggatgtctgtggtcatggattccgggcgatggcatgtagtgca

SEQ ID NO: 433984 - DNA, 75 bp, synthetic construct
  source 1..75: mol_type = other DNA
agggtgatggggtatgacacaacccaggatgtctgtggccatggattccgggcgatggcgtgcagtgcattgatt

SEQ ID NO: 433985 - DNA, 75 bp, synthetic construct
  source 1..75: mol_type = other DNA
ctcgccgttatgctgaatttactggtttttattcgttccagtgaactcagatacgcccgttggtctgaaattgat

SEQ ID NO: 433986 - DNA, 75 bp, synthetic construct
  source 1..75: mol_type = other DNA
ctagctgttatgctgaatttactggtttttattcgttccagtgaactcagatatgcccgttggtctgaaattgat

SEQ ID NO: 433987 - DNA, 75 bp, synthetic construct
  source 1..75: mol_type = other DNA
ctagcagttatgctgaatttactggtttttattcgttccagtgaactcagataggcccgttggtctgaaattgat

SEQ ID NO: 433988 - DNA, 75 bp, synthetic construct
  source 1..75: mol_type = other DNA
ctattccagccgaacgcgaacctctgcccggcgtaaaattctcacaccggggctccaagatgcgaacaccacatc

SEQ ID NO: 433989 - DNA, 75 bp, synthetic construct
  source 1..75: mol_type = other DNA
gcagggttggcaggggaacaatcgacaagcgagccaggctatcaaaaaacacggttaaaaaatgcctcgatcgtc

SEQ ID NO: 433990 - DNA, 75 bp, synthetic construct
  source 1..75: mol_type = other DNA
ctggatacattaaaccgccttgatgaagtattgcctcgcaaactgtacgaaagatgggagaaagatcatacagtc

SEQ ID NO: 433991 - DNA, 75 bp, synthetic construct
  source 1..75: mol_type = other DNA
aatagtgctttgcgagctatgggttatgacactaaaactgaagtatgtggtcacggtttcagaacaatggcgcga

SEQ ID NO: 433992 - DNA, 75 bp, synthetic construct
  source 1..75: mol_type = other DNA
acggcgactgatgctacagtggtgggccgattttctggatgcaaacagagaaagatttatcagtccatttgaata

SEQ ID NO: 433993 - DNA, 75 bp, synthetic construct
  source 1..75: mol_type = other DNA
tgccactcagcaaacaggctgtagccatactggcagaacttcagacatgggctggtgaaaatggtctgatcttta

SEQ ID NO: 433994 - DNA, 75 bp, synthetic construct
  source 1..75: mol_type = other DNA
acaacccaggatgtctgtggccatggattccgggcgatggcatgtagtgcgttaatagaatcaggtttgtggtcc

SEQ ID NO: 433995 - DNA, 75 bp, synthetic construct
  source 1..75: mol_type = other DNA
gcagaaaatgcgctggctgtcagcttctctgatgaagcctccggggttgtggttaacgaagtggatcgcgacatc

SEQ ID NO: 433996 - DNA, 75 bp, synthetic construct
  source 1..75: mol_type = other DNA
acaatcccgaattacatgttttaagccacgcctggtttaaggcattaccggaagccgatgttgcgcttcaacgtc

SEQ ID NO: 433997 - DNA, 75 bp, synthetic construct
  source 1..75: mol_type = other DNA
acaaccccgaattacatgttttaagccacgcctggtttaaggcattaccggaagccgatgttgcgctccagcgtc

SEQ ID NO: 433998 - DNA, 75 bp, synthetic construct
  source 1..75: mol_type = other DNA
taacagtgctttgcgcacaatggggtatgacacaaaaaccgaagtttgcgggcatggattcagaactatggcgcg

SEQ ID NO: 433999 - DNA, 75 bp, synthetic construct
  source 1..75: mol_type = other DNA
ggccgattttcttgatgcgaaccgggagaaggggatcagtccgtttgaatacgcaaatgttaacaatccgctgag

SEQ ID NO: 434000 - DNA, 75 bp, synthetic construct
  source 1..75: mol_type = other DNA
agaacttcagacatgggctggtgaaaatggtctgatctttacgggagcacatgacccgcgtaaaccaatcagtga

SEQ ID NO: 434001 - DNA, 75 bp, synthetic construct
  source 1..75: mol_type = other DNA
actggtttttattcgttccagtgaactcagatacgcccgctggtctgaaattgatattgacaatgccatgtggac

SEQ ID NO: 434002 - DNA, 75 bp, synthetic construct
  source 1..75: mol_type = other DNA
gcccgctggtctgaaattgatattgacaatgccatgtggactattccagccgaacgcgaacctctgcctggcgta

SEQ ID NO: 434003 - DNA, 75 bp, synthetic construct
  source 1..75: mol_type = other DNA
cgaaaccattgctcgtgaatggcatgccagtaacaagcgatggagtgaagaccatcgatcgcgcgttcttcgcta

SEQ ID NO: 434004 - DNA, 75 bp, synthetic construct
  source 1..75: mol_type = other DNA
gcattgaccacggtaaaacgccagcatcgcccggctcttgatctttcgcgcctgcctgaacttatgtcgcgtatt

SEQ ID NO: 434005 - DNA, 75 bp, synthetic construct
  source 1..75: mol_type = other DNA
ccttgccggaagccgacgttacgctccagcatcccgttccagacgatatcgcctacctccagtacacctccggca

SEQ ID NO: 434006 - DNA, 75 bp, synthetic construct
  source 1..75: mol_type = other DNA
ctgcacgatttcatgcaatggaaaggcccaatcctcaccgattccggtggtttccaggtcttcagccttggcgat

SEQ ID NO: 434007 - DNA, 75 bp, synthetic construct
  source 1..75: mol_type = other DNA
attaagagtatggtaaaagcatcaagtgattatttgagtgtttcttatgatttttgtgcggatgaaaaaacaaaa

SEQ ID NO: 434008 - DNA, 75 bp, synthetic construct
  source 1..75: mol_type = other DNA
tccagtggcaacagacacctgttcggtcatgtgaaaaatttacgcatttggcataaagaattaactgaggcacaa

SEQ ID NO: 434009 - DNA, 75 bp, synthetic construct
  source 1..75: mol_type = other DNA
gacgcataacaaccccgaattacatgttttaagccacgcctggtttaaggcattaccggaagccgatgttgcgct

SEQ ID NO: 434010 - DNA, 75 bp, synthetic construct
  source 1..75: mol_type = other DNA
acctgttaccgccccacagtattccccgcacctcttccggcaagcccgcccgcgcagaagcgaaaaaacgttatc

SEQ ID NO: 434011 - DNA, 75 bp, synthetic construct
  source 1..75: mol_type = other DNA
tatgtgttctgtcacttctcctttctattggcttcctcgctttacatctcccggcggcactcctgcttggcccga

SEQ ID NO: 434012 - DNA, 75 bp, synthetic construct
  source 1..75: mol_type = other DNA
cagttgcggcattacgttttgctgccatcgtgcctggcgcttattgctggcatcatgctgatgataatgaatttg

SEQ ID NO: 434013 - DNA, 75 bp, synthetic construct
  source 1..75: mol_type = other DNA
tgcgatcctctctttgttcgcaccagtcacggtatggttcccacactccgtgctaaagaacttgctatgccggta

SEQ ID NO: 434014 - DNA, 75 bp, synthetic construct
  source 1..75: mol_type = other DNA
tcacactgttccgtgtcatccttatcccattctttgtattggttttttatctacctgttacctggtcaccgtttg

SEQ ID NO: 434015 - DNA, 75 bp, synthetic construct
  source 1..75: mol_type = other DNA
gaactaccggaatggctgctggcgatggcgtatatggcaattggctggcggattggtcttggtttcgataaacaa

SEQ ID NO: 434016 - DNA, 75 bp, synthetic construct
  source 1..75: mol_type = other DNA
gcaatatctgcgggtactgtttgtcgcaggtgcggcagttctggttacgcggatgatgctgggcgataacgctga

SEQ ID NO: 434017 - DNA, 75 bp, synthetic construct
  source 1..75: mol_type = other DNA
agctcgttgttaataaagcaaaatcatctcattttcctgctggcacccttttttattcttaccttccagcaccat

SEQ ID NO: 434018 - DNA, 75 bp, synthetic construct
  source 1..75: mol_type = other DNA
atttgcatgcgaccctggcagctgcgggatgcacttttgacgatatcattgatgttacgagcggctttgttgaat

SEQ ID NO: 434019 - DNA, 75 bp, synthetic construct
  source 1..75: mol_type = other DNA
gcgccccaccttatccaaactggacggcggtgggtgttacatggctggcaggctttgattttgaaattaaagtga

SEQ ID NO: 434020 - DNA, 75 bp, synthetic construct
  source 1..75: mol_type = other DNA
gccctcagggtgatggggtatgacacaaccctggatatctgtgggcatggattcaggacgatggcatgtagcgcg

SEQ ID NO: 434021 - DNA, 75 bp, synthetic construct
  source 1..75: mol_type = other DNA
gcattgaccacggtaaaacgccagcatcgcccggctcttgatctttctcgcctgcctgaacttttgtcgcgtatt

SEQ ID NO: 434022 - DNA, 75 bp, synthetic construct
  source 1..75: mol_type = other DNA
gcattgaccacggtaaaacgccagcatcgcccggctcttgatctttcacgcctgcctgaacttgtgtcgcgtatt

SEQ ID NO: 434023 - DNA, 75 bp, synthetic construct
  source 1..75: mol_type = other DNA
gcattgaccacggtaaaacgccagcatcgcccagctcttgatctttcgcgcctgcctgaacttgtgtcgcgtatt

SEQ ID NO: 434024 - DNA, 75 bp, synthetic construct
  source 1..75: mol_type = other DNA
aaagcatgatgctcctggccttattgatggaacatactatgtcagagcgattggccgagatggatttagtttcaa

SEQ ID NO: 434025 - DNA, 75 bp, synthetic construct
  source 1..75: mol_type = other DNA
gaaagtacgggctttttttcgcattttatctgcctgtacggcagtgaacatagtgggcgggtggactatgttacc

SEQ ID NO: 434026 - DNA, 75 bp, synthetic construct
  source 1..75: mol_type = other DNA
tttctaagctgcctgtacggcagtgaactcaaatactacacgtttagcccgttgttaataaagcaaaaccatccc

SEQ ID NO: 434027 - DNA, 75 bp, synthetic construct
  source 1..75: mol_type = other DNA
ctgttgccaggtctgacggtctaaaactcaatattacagaaaatgataatgcacttgatttggaattagctcgag

SEQ ID NO: 434028 - DNA, 75 bp, synthetic construct
  source 1..75: mol_type = other DNA
gctgttggctgtggactgaatgttgcacctgctcaggcgcataaatttgccagcaattaccattgttttatggtt

SEQ ID NO: 434029 - DNA, 75 bp, synthetic construct
  source 1..75: mol_type = other DNA
cagtgttgttgatgaagctgggcatctctacatcgctaaatttcccagtgtaaaagatgagtatgatgttggtgg

SEQ ID NO: 434030 - DNA, 75 bp, synthetic construct
  source 1..75: mol_type = other DNA
atgacctcgattaatcctatctttgaaccgttcattgaggcgcatcgctacaaagttgccaaaggcggtcgaggt

SEQ ID NO: 434031 - DNA, 75 bp, synthetic construct
  source 1..75: mol_type = other DNA
agtagcatggatgcatgtaaataacggcatcggaataccagcaataacaaggagtaaagaggttgcagagagttg

SEQ ID NO: 434032 - DNA, 75 bp, synthetic construct
  source 1..75: mol_type = other DNA
ttgctgaaatgtcgttaattgaggccgtcgcggcctgcgccgtcgcccgctgtgggagtttgaaatcgacaccgc

SEQ ID NO: 434033 - DNA, 75 bp, synthetic construct
  source 1..75: mol_type = other DNA
tgtttgcacttgcactgtttagtggggtggtgaaagcagagccaggttgccagaatgccgaggtgattggtggga

SEQ ID NO: 434034 - DNA, 75 bp, synthetic construct
  source 1..75: mol_type = other DNA
gatgctaaaggttatgcatcgcgccacggttcggtagttaagcgcattgccgaaggcctgctgatggacatcaat

SEQ ID NO: 434035 - DNA, 75 bp, synthetic construct
  source 1..75: mol_type = other DNA
aggccggagcatgggctgatgaagtcgtacagggtgacaacgttcgcactattggcgatgtattccgcaataagc

SEQ ID NO: 434036 - DNA, 75 bp, synthetic construct
  source 1..75: mol_type = other DNA
ggggatgtggaaaaggcaagccgtgtattcgtccgaaatgagctaatgccactacaaaagcgattacaggagatg

SEQ ID NO: 434037 - DNA, 75 bp, synthetic construct
  source 1..75: mol_type = other DNA
atgaaagtaattagcatgaaatttatttttattttaacgattattgctcttgctgctgtttttttctggtctgaa

SEQ ID NO: 434038 - DNA, 75 bp, synthetic construct
  source 1..75: mol_type = other DNA
tcagagatgaacaggccagaacgtttgtaaaaaatgattacctgcaaagaatgaaacgctgggacaacgatgtac

SEQ ID NO: 434039 - DNA, 75 bp, synthetic construct
  source 1..75: mol_type = other DNA
tttgtgcaggactatctggtattcggtaacgcctacctggagaaacgcacgaatcgattcggtgaagttatcgcc

SEQ ID NO: 434040 - DNA, 75 bp, synthetic construct
  source 1..75: mol_type = other DNA
ggggatgtggagaaggctagtcttgtatttgttcgcaatgaattgatgccactacagaagcgactacatgaacta

SEQ ID NO: 434041 - DNA, 75 bp, synthetic construct
  source 1..75: mol_type = other DNA
accggacatcaaccaagagatctacggcctgccaggttacctttctgccattccgtcagccctgctcaacgagtc

SEQ ID NO: 434042 - DNA, 75 bp, synthetic construct
  source 1..75: mol_type = other DNA
atgcggaaaattcaatttatccttggaatactggcggctgcgtcatcttctgctacgcttgcttatgacggtaca

SEQ ID NO: 434043 - DNA, 75 bp, synthetic construct
  source 1..75: mol_type = other DNA
tatcacttttcgtaatatccggtttcgctataagcctgactctccggttattttagataatatcaatctcagtat

SEQ ID NO: 434044 - DNA, 75 bp, synthetic construct
  source 1..75: mol_type = other DNA
tacaaaagactgttatgatcatcaacctgtggttgggagcacacctggttatttccggggatttaagtattggtc

SEQ ID NO: 434045 - DNA, 75 bp, synthetic construct
  source 1..75: mol_type = other DNA
tgaggggtataacaccattgtcggggaacagggggcaggattatccggaggtcaacgtcaacgcatcgcaattgc

SEQ ID NO: 434046 - DNA, 75 bp, synthetic construct
  source 1..75: mol_type = other DNA
gaagcggctggcgcgcagaatatccagctggttctgtctaccgacaacgccaccgcactgaccaacaaaatcatc

SEQ ID NO: 434047 - DNA, 75 bp, synthetic construct
  source 1..75: mol_type = other DNA
ttgagtgggttcacccgactgagcaagcctcgcttgaagcggcgcaggctatggttacggcctatggtatgaata

SEQ ID NO: 434048 - DNA, 75 bp, synthetic construct
  source 1..75: mol_type = other DNA
gttgccagagtaagggaactggaacaaattcgtaattttttaaccggacaagcgttgacatcagttcttgatcta

SEQ ID NO: 434049 - DNA, 75 bp, synthetic construct
  source 1..75: mol_type = other DNA
gaagtgggttataactatgaagctctgcaacagcaaaatgctggttatgtaaatacctgtgccacacgtatgagt

SEQ ID NO: 434050 - DNA, 75 bp, synthetic construct
  source 1..75: mol_type = other DNA
atgaatttagaagaacatcactatggggaggaagttaacgagattacattagatggggtaacaccatttggtaat

SEQ ID NO: 434051 - DNA, 75 bp, synthetic construct
  source 1..75: mol_type = other DNA
ctacaggacagaatgttacagctgtacagattgataacgcagctatgaaactgcgttataatgcacaatattatg

SEQ ID NO: 434052 - DNA, 75 bp, synthetic construct
  source 1..75: mol_type = other DNA
gataaggttcttgttcatagaggcttctctaccctcaatgtcattgttattgctttggtcgtcgttgttctgtgc

SEQ ID NO: 434053 - DNA, 75 bp, synthetic construct
  source 1..75: mol_type = other DNA
ttttggaagaccagtcatctggcgtgactcagaaaaatttaaaacagacaccagtaataaaagaggagtggtctt

SEQ ID NO: 434054 - DNA, 75 bp, synthetic construct
  source 1..75: mol_type = other DNA
aagtggcgactggaaagggaagaaaatagaaaccggtgcgaaattactggcagatcagctttcccgggctgatgt

SEQ ID NO: 434055 - DNA, 75 bp, synthetic construct
  source 1..75: mol_type = other DNA
cctacagaagcgttttgaggaactgaatagctgggccaatgaacaagtaattcgttttgattcttatgcatttga

SEQ ID NO: 434056 - DNA, 75 bp, synthetic construct
  source 1..75: mol_type = other DNA
agtcttccgctgctgtttcgtcgcccggcattgatgagcatttatttgctgacggtagtcgtggtcaccgcccat

SEQ ID NO: 434057 - DNA, 75 bp, synthetic construct
  source 1..75: mol_type = other DNA
ttgtggggcagtatttcggctggcgaatgaccttcttcgcgattggtatcggggcgcttattacccttttgtgcc

SEQ ID NO: 434058 - DNA, 75 bp, synthetic construct
  source 1..75: mol_type = other DNA
gggtagtggcgctaatgtcattgccttttatgttaatgaccagccaggttgaacggcgcaaattactgatctgcc

SEQ ID NO: 434059 - DNA, 75 bp, synthetic construct
  source 1..75: mol_type = other DNA
ttttgcacatgcgattttctggtcgattacggcgtctctggcgatccgtatggctccggccgggaagcgagcaca

SEQ ID NO: 434060 - DNA, 75 bp, synthetic construct
  source 1..75: mol_type = other DNA
tattaatcaggagctgtacggcctgccggaatatctcagcgcccttaactctgcctggctgaatgagtcggccac

SEQ ID NO: 434061 - DNA, 75 bp, synthetic construct
  source 1..75: mol_type = other DNA
cgttgtcggaagttgcagcaaaggatgaatttctgaacatcaagaacgtgagccgtgatgacatgatggctgctc

SEQ ID NO: 434062 - DNA, 75 bp, synthetic construct
  source 1..75: mol_type = other DNA
aataacagcgcgcaactggagcacgaggcgactacgtcgcgcattggcgaagatcagttgttttattgcctgcaa

SEQ ID NO: 434063 - DNA, 75 bp, synthetic construct
  source 1..75: mol_type = other DNA
cggcactcgccgcgttgatatggtcaattatcatattccgccgctggcctgtgacactcgaagaacaaactcggt

SEQ ID NO: 434064 - DNA, 75 bp, synthetic construct
  source 1..75: mol_type = other DNA
atgaacttatcccgctccaaaaaagaatatcggaagttaatgaatggttaggtgaaaatgctataacttttgtgg

SEQ ID NO: 434065 - DNA, 75 bp, synthetic construct
  source 1..75: mol_type = other DNA
acttccgcaatctgtttatgtactcgccgaacggcaaaaaggacgggattcagattatcccgctgtcagaagtcg

SEQ ID NO: 434066 - DNA, 75 bp, synthetic construct
  source 1..75: mol_type = other DNA
atggaaaagagtaagaagaaccgcgctgcgtcgacgaaacagatccagcataaaaaccaaacttcagccgaagca

SEQ ID NO: 434067 - DNA, 75 bp, synthetic construct
  source 1..75: mol_type = other DNA
gtcccaatgatttagtgattgcagtcatgggtgaagaagatatttgcaatgaagcactggtactggcccagcaac

SEQ ID NO: 434068 - DNA, 75 bp, synthetic construct
  source 1..75: mol_type = other DNA
attacaaaaaaggctaattgaattaaatgaatggcttaatgacgaaattattcgttttgacgaatataaattagg

SEQ ID NO: 434069 - DNA, 75 bp, synthetic construct
  source 1..75: mol_type = other DNA
gtttttgaatatcaaaaatgttagtcgcgatgacatgatggcggcacaccgcgtgccgccgcagatgatggggat

SEQ ID NO: 434070 - DNA, 75 bp, synthetic construct
  source 1..75: mol_type = other DNA
aaagacgggcttcagattatcccgttgtcagaggtggcggcgaaggatgaatttttgaacatcaaaaacgtgagt

SEQ ID NO: 434071 - DNA, 75 bp, synthetic construct
  source 1..75: mol_type = other DNA
tgtttgttcgcaatgagttaatcccccttcaaaaaagatttgaggagctgaatgaatggatagaagaaacagtaa

SEQ ID NO: 434072 - DNA, 75 bp, synthetic construct
  source 1..75: mol_type = other DNA
accggacatcaaccaagagatctacggcctgccaggttatctttctgccatcccgtcagccctgctcaacgagtc

SEQ ID NO: 434073 - DNA, 75 bp, synthetic construct
  source 1..75: mol_type = other DNA
cttgagcctgccctggcaaaatatacccgacgcgggttagacctggatatctactggtttgtgcaatacggtatg

SEQ ID NO: 434074 - DNA, 75 bp, synthetic construct
  source 1..75: mol_type = other DNA
atttcttaacatcaagaacgtgagtcgggatgacatgatggcagcgcatcgcgtgccgccgcaaatgatggggat

SEQ ID NO: 434075 - DNA, 75 bp, synthetic construct
  source 1..75: mol_type = other DNA
tttttgtccgcaacgagttgataccgctgcaaaagcgaatcaaagaaattaatgaatggttgagtgatgaaataa

SEQ ID NO: 434076 - DNA, 75 bp, synthetic construct
  source 1..75: mol_type = other DNA
tgggtgtgaaggaatacaactgcgataaacctgagtgcccccacgtcagatacgtcactaactcatgcggcagcc

SEQ ID NO: 434077 - DNA, 75 bp, synthetic construct
  source 1..75: mol_type = other DNA
cacagccaaccagtgctggacatccttcctggatgcgggcggcctgcgcgatatcgaggttgaggctgtcacaaa

SEQ ID NO: 434078 - DNA, 75 bp, synthetic construct
  source 1..75: mol_type = other DNA
aatgctggcctgcggcacgcggatactgggagtgaaggaatacaactgcgataaacctgactgcccccacgtcag

SEQ ID NO: 434079 - DNA, 75 bp, synthetic construct
  source 1..75: mol_type = other DNA
gggtattaatatcgctattgttgagcgttacaggattattaagtggctgcgccagccataatgaaaacgccagtt

SEQ ID NO: 434080 - DNA, 75 bp, synthetic construct
  source 1..75: mol_type = other DNA
ccacaaaacgggagaaacggcgacggaaacgctgacacagcgtgagctggtcgcgaggctgaaacagcacatccc

SEQ ID NO: 434081 - DNA, 75 bp, synthetic construct
  source 1..75: mol_type = other DNA
aagaaaacggccggcgggaggaatacggcgcgctacctgggtcgttatctgaagaagccgccgatagcagcctcc

SEQ ID NO: 434082 - DNA, 75 bp, synthetic construct
  source 1..75: mol_type = other DNA
catggtcagtggaaaaagctgagcttcctgaaagacgcgatgcgttcacggtggatgtggaatatgcggcagctg

SEQ ID NO: 434083 - DNA, 75 bp, synthetic construct
  source 1..75: mol_type = other DNA
catcccggagaagttttttaagatggtgaggtacttcaggttccttgccaaccgggtgtatggagagaagctgcc

SEQ ID NO: 434084 - DNA, 75 bp, synthetic construct
  source 1..75: mol_type = other DNA
ttgcacccaaaccagactttgttgccagagatattttcgccctttcgcaaatcattaattcgttaactggagaga

SEQ ID NO: 434085 - DNA, 75 bp, synthetic construct
  source 1..75: mol_type = other DNA
ggggctggaacccggtatcttctgcgccatccatacgtatggtcgtcgtctcaactggcatccgcatgtgcatgt

SEQ ID NO: 434086 - DNA, 75 bp, synthetic construct
  source 1..75: mol_type = other DNA
ggggctggaacccggtatcttctgcgccatccacacgtatggccgtcgtctcaactggcatccgcatgtacatgt

SEQ ID NO: 434087 - DNA, 75 bp, synthetic construct
  source 1..75: mol_type = other DNA
tatcacgacggagtcacagtggagaagcctggtgctgaaagctggcggaaaatactggcatgtgtatatgtcgaa

SEQ ID NO: 434088 - DNA, 75 bp, synthetic construct
  source 1..75: mol_type = other DNA
cctttttaaccagctatcaacgacaaatgtgcgctgacccgacggtgaaattaatgatcactgagggaattaatt

SEQ ID NO: 434089 - DNA, 75 bp, synthetic construct
  source 1..75: mol_type = other DNA
acagtggaaaacgggcagcaagcgcttcaaagagttgcgcagacggggagtaagcaaagaccttgcagcgcaaac

SEQ ID NO: 434090 - DNA, 75 bp, synthetic construct
  source 1..75: mol_type = other DNA
tttatccagcaggcgatgatgcaggtgttgcaggcacagtgggatgcgacgttcagcgacagcagctacgggttc

SEQ ID NO: 434091 - DNA, 75 bp, synthetic construct
  source 1..75: mol_type = other DNA
gctgcttgacgacctcgacaaggaactggagaaacgtggtctgaagttcgtgcggtacgcagacgactgtaatgt

SEQ ID NO: 434092 - DNA, 75 bp, synthetic construct
  source 1..75: mol_type = other DNA
ccattacctgaacttgctggaatctaatcagcacagcggtgagtggcaggcgtttatcaattcgctgaccacgaa

SEQ ID NO: 434093 - DNA, 75 bp, synthetic construct
  source 1..75: mol_type = other DNA
ctccttaaacccgacggattgctgtttgcgggtcactctgaaaactttagccaccttgagcgccgcttcacgctg

SEQ ID NO: 434094 - DNA, 75 bp, synthetic construct
  source 1..75: mol_type = other DNA
ccccacgagccaacgctatggtctggtatcgtctctcaacttgccaccactcctgaaatctttgaagacgaagat

SEQ ID NO: 434095 - DNA, 75 bp, synthetic construct
  source 1..75: mol_type = other DNA
caaagacctcgaaaaaggcaagtgggtgaaagttgaaggctgggaaaacgcagaagccgctaaagctgaaatcgt

SEQ ID NO: 434096 - DNA, 75 bp, synthetic construct
  source 1..75: mol_type = other DNA
gttgaaggttgggaaaacgcagaagccgctaaagctgaaatcgttgcctccttcgagcgcgcaaagaataaataa

SEQ ID NO: 434097 - DNA, 75 bp, synthetic construct
  source 1..75: mol_type = other DNA
ttagtgctggcacaaagtagcggcacgacggtaaaaatgaccattatcagcgaagcgggtactcagaccacgcag

SEQ ID NO: 434098 - DNA, 75 bp, synthetic construct
  source 1..75: mol_type = other DNA
gataaacgggtgttgtcacttatccgcaggttcctgaatgcaggggtgatggacgcaggtctggtaaggccggtg

SEQ ID NO: 434099 - DNA, 75 bp, synthetic construct
  source 1..75: mol_type = other DNA
tggcccatatggacatgctggagacaagccggatacagcagatccgccagcaactgacaggagtcagtgccacgc

SEQ ID NO: 434100 - DNA, 75 bp, synthetic construct
  source 1..75: mol_type = other DNA
cggtcagaaagccgtgtttatgctgaatacatagtaaagtgcactgttcgttttgttgtctctggtggcttcaac

SEQ ID NO: 434101 - DNA, 75 bp, synthetic construct
  source 1..75: mol_type = other DNA
tacttcgggttccttgccaaccgggtgtgtggagagaagctgccgcaggtgtaccgtgctctggggatggataaa

SEQ ID NO: 434102 - DNA, 75 bp, synthetic construct
  source 1..75: mol_type = other DNA
tcacgagctggcggtaacggtggcaataacgatgccccgccaacaccgcaagagcgaaagctacagggtaagggc

SEQ ID NO: 434103 - DNA, 75 bp, synthetic construct
  source 1..75: mol_type = other DNA
ggccagcgcggtaagaaagcctcaaagggttatctgaaagacattctcatatttgggggggctattgttctaatc

SEQ ID NO: 434104 - DNA, 75 bp, synthetic construct
  source 1..75: mol_type = other DNA
agctcgaacagcagggcaagttaggtaacggaaataacgcgaacggcgcacaacggggcggtggtagcggaaatg

SEQ ID NO: 434105 - DNA, 75 bp, synthetic construct
  source 1..75: mol_type = other DNA
caaggccgcatgactgaaatcctttcggacgaatttatccgggcgcaaaaacaggcagaggtaaacaatggaaaa

SEQ ID NO: 434106 - DNA, 75 bp, synthetic construct
  source 1..75: mol_type = other DNA
taacggcagcgcaaacaacaacacttcacgagctggcgggaacggtggtaataacgatgccccgccaacgccgca

SEQ ID NO: 434107 - DNA, 75 bp, synthetic construct
  source 1..75: mol_type = other DNA
ctcacaaagcgcgggagggggcttaaataaggcgctggaaggtggtacttacgccaatggtcaagcttccattct

SEQ ID NO: 434108 - DNA, 75 bp, synthetic construct
  source 1..75: mol_type = other DNA
gtgcgtgccaaccgggaattacccgtggtctggggcgtggcgaagggatcgctcatcaacaaagtgattctggtg

SEQ ID NO: 434109 - DNA, 75 bp, synthetic construct
  source 1..75: mol_type = other DNA
actgttttaaatctgattcttggttttatcatcggtggtatcgtcgtgttgggagtgaaaacgatagcgaaattg

SEQ ID NO: 434110 - DNA, 75 bp, synthetic construct
  source 1..75: mol_type = other DNA
cactaaacaggatgacgtaagcaaactgggcgtgaactggaccggcggtaacctgctggctggcgcaaccagcaa

SEQ ID NO: 434111 - DNA, 75 bp, synthetic construct
  source 1..75: mol_type = other DNA
atgacaaatatccttttcatcgtgatttatggcgaaaaccgactgcgtcgaatggctggagctgcacgccgcgca

SEQ ID NO: 434112 - DNA, 75 bp, synthetic construct
  source 1..75: mol_type = other DNA
ggttctgcgttgacgatgtgatttaccttcagtgcggcgtaaaacccgcaaaacagaaaatgaccgaaatactgt

SEQ ID NO: 434113 - DNA, 75 bp, synthetic construct
  source 1..75: mol_type = other DNA
atggaaaaagggaaaattgttgaacagggtaaacataaggagctgctttctgaaccggaaagtttatacagttac

SEQ ID NO: 434114 - DNA, 75 bp, synthetic construct
  source 1..75: mol_type = other DNA
ggaatgagcgccctttctcgcgggagctgtggaccgtacaacggcccgcatcaggtaacagttgcaggccaagaa

SEQ ID NO: 434115 - DNA, 75 bp, synthetic construct
  source 1..75: mol_type = other DNA
ggatcccctgttgcagggcggtgcaatgaatgaaaaagcggcgcaacaatctctggttgaacgtgttcgatttgc

SEQ ID NO: 434116 - DNA, 75 bp, synthetic construct
  source 1..75: mol_type = other DNA
gtgctggcgcaaagtagcggcacgacggtaaaaatgaccattatcagcgaagcgggtgctcagaccacgcagacg

SEQ ID NO: 434117 - DNA, 75 bp, synthetic construct
  source 1..75: mol_type = other DNA
gccagccataatgaaaatgccagtttactggcgaaaaaacaggcgcaaaatatcagccaaaacctgccgattaaa

SEQ ID NO: 434118 - DNA, 75 bp, synthetic construct
  source 1..75: mol_type = other DNA
cgacattctctcccaaagcgatgccccactccgtctggcagacgatctcaagttaatgaatcccctctattttca

SEQ ID NO: 434119 - DNA, 75 bp, synthetic construct
  source 1..75: mol_type = other DNA
ttgccccaggtattgatcctgaacgcgacattctcgcccaaagcgatgccccactccgtctggcagacgatctca

SEQ ID NO: 434120 - DNA, 75 bp, synthetic construct
  source 1..75: mol_type = other DNA
ggtacaggacgtcgcccacgtgacgttctccggcaaacgcgcaataagactcgggcaacaagtacagtacattac

SEQ ID NO: 434121 - DNA, 75 bp, synthetic construct
  source 1..75: mol_type = other DNA
atatggcgggatgacggtaagcattatatattgtctcgtgttactaaagattcatcacgctatcttgtttatgat

SEQ ID NO: 434122 - DNA, 75 bp, synthetic construct
  source 1..75: mol_type = other DNA
cagatgattgctacatgggataaacaactggccgggtatgttgcttccagtttcagggtaaatctggttgcaatg

SEQ ID NO: 434123 - DNA, 75 bp, synthetic construct
  source 1..75: mol_type = other DNA
attaacactggttatattattgtcactaccttgttatgttatatggtcattgtttatatcacccttattacgtcg

SEQ ID NO: 434124 - DNA, 75 bp, synthetic construct
  source 1..75: mol_type = other DNA
taacagaaaaaagaaaatatgatcgttctgtattggcaaggtcattaaaagaaagaaatctcaactatatggcaa

SEQ ID NO: 434125 - DNA, 75 bp, synthetic construct
  source 1..75: mol_type = other DNA
tcttattcactttattttgaataacaaaacaaatagcgaaaatgttttcattaacgaaaaaagaaaatatgatcg

SEQ ID NO: 434126 - DNA, 75 bp, synthetic construct
  source 1..75: mol_type = other DNA
cgcctgcgtcatgaagaagcgatgacgccggatgcggtggtgcgcctggcggaagcggcatatgaaaaatatggc

SEQ ID NO: 434127 - DNA, 75 bp, synthetic construct
  source 1..75: mol_type = other DNA
atgcggggctatgcggaaggtggttatgtgggcggtgccggaagtccggcgcagatgcggcgggctgaaggcatt

SEQ ID NO: 434128 - DNA, 75 bp, synthetic construct
  source 1..75: mol_type = other DNA
atggcccgcaagggggcacaggatgaactccggctgcagttgcgtgatggcggtatgttatcagggagcggtcga

SEQ ID NO: 434129 - DNA, 75 bp, synthetic construct
  source 1..75: mol_type = other DNA
atcagccagcagcgtcgcgatttatggaaagcggaaaatcagtatgcggtcctgaaagaggctgccacgaaacgg

SEQ ID NO: 434130 - DNA, 75 bp, synthetic construct
  source 1..75: mol_type = other DNA
tgtggaggtggacaaggttgcagaggctttcggaaaactgaccaccgaccctacgtcggggctgattgcgatggt

SEQ ID NO: 434131 - DNA, 75 bp, synthetic construct
  source 1..75: mol_type = other DNA
ggctgcgcggtttgagcagcagcagggcgcgaagcaggcggcaatcagtgcccaggcgcgggcctcaccgaccgt

SEQ ID NO: 434132 - DNA, 75 bp, synthetic construct
  source 1..75: mol_type = other DNA
cgtggtgattcagaacgacggtatcaacggacaggcagggccgcagctgatgaaagcggtgtatgacatggcccg

SEQ ID NO: 434133 - DNA, 75 bp, synthetic construct
  source 1..75: mol_type = other DNA
tgcgcggctatgccaccggcggttatgtcggtggcaccggaagtccggcgcaaatgcggcgttcagagggtatca

SEQ ID NO: 434134 - DNA, 75 bp, synthetic construct
  source 1..75: mol_type = other DNA
aatggcagtggtatcagagccgaagccaccggcgcggtaaaacctcagcatttcttgccaatctccggggagcat

SEQ ID NO: 434135 - DNA, 75 bp, synthetic construct
  source 1..75: mol_type = other DNA
gaagcaggtaacgattgcgcagcttgaagatgtgaaaccgctactgatgaaaagtattaacggcgatgatgatga

SEQ ID NO: 434136 - DNA, 75 bp, synthetic construct
  source 1..75: mol_type = other DNA
acctcgctggcggtggcgacaggtgcgctggtgtacgcctggtaccagggagattccacgctttcagcgtttaat

SEQ ID NO: 434137 - DNA, 75 bp, synthetic construct
  source 1..75: mol_type = other DNA
gaaaaagccgaagtcgtcaggcgttaaagtgtcagccggtgagcgtcaggaagaccagtcgcatgccgcactgct

SEQ ID NO: 434138 - DNA, 75 bp, synthetic construct
  source 1..75: mol_type = other DNA
gaaaaagccgaagtcgtcaggcgtaaaagtgtcagccggtgagcgtcaggaagaccaggcgcatgccgccctgct

SEQ ID NO: 434139 - DNA, 75 bp, synthetic construct
  source 1..75: mol_type = other DNA
gaaaaagccgaagtcgtcaggcgtaaaagtgtcagccggtgagcgtcaggaagaccagccgcatgccgcgctgct

SEQ ID NO: 434140 - DNA, 75 bp, synthetic construct
  source 1..75: mol_type = other DNA
gaaaaagccgaagtcgtcaggcgtgaaagtgtcagccggtgagcgtcaggaagaccagtcgcatgccgctctgct

SEQ ID NO: 434141 - DNA, 75 bp, synthetic construct
  source 1..75: mol_type = other DNA
gaggtggtgtaacggcttcctcggggacggccattgaggctgcggcagcgaacttccattttgcgaccggcggat

SEQ ID NO: 434142 - DNA, 75 bp, synthetic construct
  source 1..75: mol_type = other DNA
gaacgacggtacgaatggtctgccaggtccacagatgatgaaggcggtgtatgacatggcccgcaagggtgcccg

SEQ ID NO: 434143 - DNA, 75 bp, synthetic construct
  source 1..75: mol_type = other DNA
cgctggcgtatgcctggtatcagggggactcaacctttcagcgtttaataaaaccctggttctttccggtaatca

SEQ ID NO: 434144 - DNA, 75 bp, synthetic construct
  source 1..75: mol_type = other DNA
tgagaaagagacgctggagtacaaacgccagctggctgagcttggcgacaaggttgaacaccagaaacggctgaa

SEQ ID NO: 434145 - DNA, 75 bp, synthetic construct
  source 1..75: mol_type = other DNA
ctggcgaagtcagcgttggtgacggtttatccattgccagacacacgtctattgatggtagtaaatattcatgca

SEQ ID NO: 434146 - DNA, 75 bp, synthetic construct
  source 1..75: mol_type = other DNA
ggtgtatgacatggcccgcaagggggcgcaggatgagctccggctgcagttgcgtgatggcggtatgttatcagg

SEQ ID NO: 434147 - DNA, 75 bp, synthetic construct
  source 1..75: mol_type = other DNA
tgattgcgccgttgctcatctcctgttcgacgaccaaaaaaggcgatacctataacgaagcctgggtcaaagaca

SEQ ID NO: 434148 - DNA, 75 bp, synthetic construct
  source 1..75: mol_type = other DNA
tgtggaggtggacaaggttgctgaggctttcggaaaactgaccaccgacccgacgtcgggactgatggcgatggc

SEQ ID NO: 434149 - DNA, 75 bp, synthetic construct
  source 1..75: mol_type = other DNA
gcggtgctttcggtggtggtgcgtctgcctccacggggacggccattcaggctgcggcggcgaacttccatttcg

SEQ ID NO: 434150 - DNA, 75 bp, synthetic construct
  source 1..75: mol_type = other DNA
cgatgacggtaaagtgcgtgcgctggtggcggcattgggtggcggtttctggacgtggtggttctggcttggtgt

SEQ ID NO: 434151 - DNA, 75 bp, synthetic construct
  source 1..75: mol_type = other DNA
gccggtgcgatcaccctgccgatggtcggggtcacctcgctggcggtggcgacaggtgcgctggtgtacgcctgg

SEQ ID NO: 434152 - DNA, 75 bp, synthetic construct
  source 1..75: mol_type = other DNA
gccacgctgcagtcggatatggaaaaagccggtgaactggtggcaagggaccgggctgagcgtgaggcgtcacag

SEQ ID NO: 434153 - DNA, 75 bp, synthetic construct
  source 1..75: mol_type = other DNA
ctgaagtataccggagaggcgcagaaggcgtatgagcgtctgctgacgccgctggagaaatatactaaccggcag

SEQ ID NO: 434154 - DNA, 75 bp, synthetic construct
  source 1..75: mol_type = other DNA
gccggaagtccggcgcagatgcggcgggcggaaggcattaattttaatcagaacaatcacgtggtgattcagaac

SEQ ID NO: 434155 - DNA, 75 bp, synthetic construct
  source 1..75: mol_type = other DNA
atgtcccagccagcgggtgatctggttattgatttgagtctggatgcggcccggtttgatgaacagatggcccgg

SEQ ID NO: 434156 - DNA, 75 bp, synthetic construct
  source 1..75: mol_type = other DNA
ggcggcgtgtggcgccagcctggttggggtgttgatgctgcgctttttcattctctacgccgggcagttgacggt

SEQ ID NO: 434157 - DNA, 75 bp, synthetic construct
  source 1..75: mol_type = other DNA
atgatttgcttgccctgcaacaacgctggttgccgaagctggggatcgtgcaaaaggttctgagcctgctgacgc

SEQ ID NO: 434158 - DNA, 75 bp, synthetic construct
  source 1..75: mol_type = other DNA
ggcggcgtgtggggccagtctggtcggcgtgttgatgctgcgctttttcattctctacgccggacagttgacggt

SEQ ID NO: 434159 - DNA, 75 bp, synthetic construct
  source 1..75: mol_type = other DNA
caagggacagggctgagcgtgagtcgtcacagctgaagtataccggagaggcgcagaaggcgtatgagcgcctgc

SEQ ID NO: 434160 - DNA, 75 bp, synthetic construct
  source 1..75: mol_type = other DNA
cttaataacccgatcctgccggtgctgttcctcttctccggcatctcgtccggtgcggcggtggcgctgatcgcc

SEQ ID NO: 434161 - DNA, 75 bp, synthetic construct
  source 1..75: mol_type = other DNA
ccgtcaggaagaactgaataaggccctgaaagacggaaaaatcctgcaggcagattacaacacgctgatggcggc

SEQ ID NO: 434162 - DNA, 75 bp, synthetic construct
  source 1..75: mol_type = other DNA
accgggctacaggaagtgacttgccgaatcgaccagctcggagcgggtatttctcaggcgttgggaacaggcgga

SEQ ID NO: 434163 - DNA, 75 bp, synthetic construct
  source 1..75: mol_type = other DNA
gcggtgtatgagatggcccgcaagggggcacaggatgaactccggctgcagttgcgtgatggcggtatgttatca

SEQ ID NO: 434164 - DNA, 75 bp, synthetic construct
  source 1..75: mol_type = other DNA
aagaggcggtttttccccggcgctggctccggctctggtaccactgccattttttatccgcctcatcaaatgcct

SEQ ID NO: 434165 - DNA, 75 bp, synthetic construct
  source 1..75: mol_type = other DNA
gcagcgggagtcggaagagcagcgccttcgtgaggtgtacggtgataatccggctgcgctggcgaaggccacatc

SEQ ID NO: 434166 - DNA, 75 bp, synthetic construct
  source 1..75: mol_type = other DNA
gacaagattgaacaccagaagcggctgaatgagctggcacagcaggcggcgcggtttgaacagcagcaaagcgcg

SEQ ID NO: 434167 - DNA, 75 bp, synthetic construct
  source 1..75: mol_type = other DNA
actgtgttttgtctggatggtgagggattcgctttgcggatttcgtatcgagcagggaaatacggtgtttgtggc

SEQ ID NO: 434168 - DNA, 75 bp, synthetic construct
  source 1..75: mol_type = other DNA
catgccgacggcaaccaatgcacgtaacttcacccagtgcgactcaatgctgataggcgctaattgtggggcgca

SEQ ID NO: 434169 - DNA, 75 bp, synthetic construct
  source 1..75: mol_type = other DNA
gcaggttgtaaaggcgatggcaaaatggcgatttgagaaggacaggccgcgtaaaggcgtgaagaaaacgtttat

SEQ ID NO: 434170 - DNA, 75 bp, synthetic construct
  source 1..75: mol_type = other DNA
tgtcagaagtcgcggcgaaggatgaatttcttaacatcaagaacgtgagccgggatgacatgatggcggcacacc

SEQ ID NO: 434171 - DNA, 75 bp, synthetic construct
  source 1..75: mol_type = other DNA
gtcaccaagcgcgccttgtgtgaaggagaaaacagtaaaatgtcgtggacgcaatcggaaaccggttcagcgatt

SEQ ID NO: 434172 - DNA, 75 bp, synthetic construct
  source 1..75: mol_type = other DNA
cgtattaacgcggaaaaaaccgggcagtttgagcgcactattctgatagccgacgaagacagttatgtcagctac

SEQ ID NO: 434173 - DNA, 75 bp, synthetic construct
  source 1..75: mol_type = other DNA
ggtgcgcgcaatctcggcgaagcgtaatgagccggagtggatgctggagtttcgtctcaacgcctatcgcgcatg

SEQ ID NO: 434174 - DNA, 75 bp, synthetic construct
  source 1..75: mol_type = other DNA
aaccgaagtcgtcaggtgtcaaagtgtcagccggggagcgtcaggaagaccgggcgcatgcagccatgctggcgc

SEQ ID NO: 434175 - DNA, 75 bp, synthetic construct
  source 1..75: mol_type = other DNA
acagccattcaggctgcggcggcgaacttccatttcgcgaccgggggatttacggggacggggggtaaatatgaa

SEQ ID NO: 434176 - DNA, 75 bp, synthetic construct
  source 1..75: mol_type = other DNA
gtgagggattcgctttgcgtactccggctccagcagggaaacacagtgcttgtggcaacgttagcctacgaagtt

SEQ ID NO: 434177 - DNA, 75 bp, synthetic construct
  source 1..75: mol_type = other DNA
ggcactcatttctgtaccgggagactacgccgccgccgaagcaattaaagcgttaaacctcggaatgaacgtgat

SEQ ID NO: 434178 - DNA, 75 bp, synthetic construct
  source 1..75: mol_type = other DNA
cttggcgacaaggttgaacaccagaaacggctgaatgagctggcacagcaggcggcgcggtttgagcagcagcag

SEQ ID NO: 434179 - DNA, 75 bp, synthetic construct
  source 1..75: mol_type = other DNA
tccggactgactgccgatcgtatgctgactctctcaagagccgggcaggcagcagggctgacgtttaaccaggcg

SEQ ID NO: 434180 - DNA, 75 bp, synthetic construct
  source 1..75: mol_type = other DNA
ccgttcggcccggtccctggcggccagttcaccggctttttccatatccgactgcagcgtggccgctgccagccc

SEQ ID NO: 434181 - DNA, 75 bp, synthetic construct
  source 1..75: mol_type = other DNA
ttggtaatgtgcgcatggccgcccgccagcttcagccggtgcggatcaccacccgtgaagaatgcaaaattccag

SEQ ID NO: 434182 - DNA, 75 bp, synthetic construct
  source 1..75: mol_type = other DNA
acttttcaggttctcccccaccagcgagtgatggggaaagcctttgatgaccgcctcggttgctacctgctggtg

SEQ ID NO: 434183 - DNA, 75 bp, synthetic construct
  source 1..75: mol_type = other DNA
acgcgcaccgctggctaataatggcagtgtgcctgagcagtcgacgccgaataaatggccagaatgggatgttcc

SEQ ID NO: 434184 - DNA, 75 bp, synthetic construct
  source 1..75: mol_type = other DNA
cgtttactttgcaatactacgaaggtttcccgatggatcaggtggcgtggggggaaattaaatctgaccaacagt

SEQ ID NO: 434185 - DNA, 75 bp, synthetic construct
  source 1..75: mol_type = other DNA
cccggactcctctgcagatatgctcgccaaagctgaaaaggcttttgatgaagcggataaaaaatggcagtggta

SEQ ID NO: 434186 - DNA, 75 bp, synthetic construct
  source 1..75: mol_type = other DNA
acgttactgcgtgagctgcacgacgccgaactgcctgcggaagtgtggctggtggcaagttccagcgaagaggtg

SEQ ID NO: 434187 - DNA, 75 bp, synthetic construct
  source 1..75: mol_type = other DNA
gaaggggcgatcgatgtgttgccggttggcaatgtacgcatggctgcccgccagcttcagtcggtgcgtatcact

SEQ ID NO: 434188 - DNA, 75 bp, synthetic construct
  source 1..75: mol_type = other DNA
ttggcaacgtgcgcatggctgcccgccagctgcagccggtgcgcatcaccacccgtgaagagtgcaaaattccag

SEQ ID NO: 434189 - DNA, 75 bp, synthetic construct
  source 1..75: mol_type = other DNA
gcctgcttgacggcgaccggcaggggaatgacgtcagcgccatgcgcgtggacattggcgcgcgctcctgtgacg

SEQ ID NO: 434190 - DNA, 75 bp, synthetic construct
  source 1..75: mol_type = other DNA
ttggcaatgtgcgcatggctgcccgccagcttcagccagtacggatcactactcgtgaagagtgcaaaattcccg

SEQ ID NO: 434191 - DNA, 75 bp, synthetic construct
  source 1..75: mol_type = other DNA
ctgcacgacgccgaactgcctgcggaggtgtggctggtggcaagttccagcgaagaggtgggattacgcggcggg

SEQ ID NO: 434192 - DNA, 75 bp, synthetic construct
  source 1..75: mol_type = other DNA
ctgtggcagggatggttttactctcttcgaatgcgcaggcacagaccacaccggaaggctatcagttacaacaag

SEQ ID NO: 434193 - DNA, 75 bp, synthetic construct
  source 1..75: mol_type = other DNA
ggtgattcagaacgacggtacgaatggtctgccaggtccacagatgatgaaggcagtgtatgacatggcccgcaa

SEQ ID NO: 434194 - DNA, 75 bp, synthetic construct
  source 1..75: mol_type = other DNA
ctgaccggcagcgaacagagctggcgtggtttcacccgttctgtgctctccatgctgacagagatttttctgaag

SEQ ID NO: 434195 - DNA, 75 bp, synthetic construct
  source 1..75: mol_type = other DNA
aagtccggcgcagatgcggcgggccgaaggcattaattttaatcagaacaatcacgtggtgattcagaacgacgg

SEQ ID NO: 434196 - DNA, 75 bp, synthetic construct
  source 1..75: mol_type = other DNA
gcagcgccattggcggggctaccggtggcggcgcatcagcgtcaggcggtacagccattcaggctgcggcggcga

SEQ ID NO: 434197 - DNA, 75 bp, synthetic construct
  source 1..75: mol_type = other DNA
atgcgcggctatgccaccggtggttatgtcggtacaccgggcagtctggctgacagccggtcgcaggcgtccggg

SEQ ID NO: 434198 - DNA, 75 bp, synthetic construct
  source 1..75: mol_type = other DNA
ccagcaatgcggtgaaggaaccggacggtagcagttctgaaaccaatctttttgccatgctggatagcgccatcg

SEQ ID NO: 434199 - DNA, 75 bp, synthetic construct
  source 1..75: mol_type = other DNA
gtattaaacaacaggtcgatgcttcgcgttcgatggtgataggacacacgggtgacaaaattttcgacagtatta

SEQ ID NO: 434200 - DNA, 75 bp, synthetic construct
  source 1..75: mol_type = other DNA
atgcgaaccctgcccgcacagtttacggatatcgccacgcagcttgccggtggtcagaatccctggctgatcctg

SEQ ID NO: 434201 - DNA, 75 bp, synthetic construct
  source 1..75: mol_type = other DNA
cgtggtgattcagaacgacggtatcaacggacaggcggggccgcagctgatgaaggcggtgtatgacatggcccg

SEQ ID NO: 434202 - DNA, 75 bp, synthetic construct
  source 1..75: mol_type = other DNA
atgagccatcatcacgaagggtgttgtaaacatgaaggccagccacgccatgaaggctgctgcaaaggtgagaag

SEQ ID NO: 434203 - DNA, 75 bp, synthetic construct
  source 1..75: mol_type = other DNA
tgtgacgcaacggttgaagtttcttgttgccctgcgccccagtgtgacatcgcctaccgttgccgcccgccaggc

SEQ ID NO: 434204 - DNA, 75 bp, synthetic construct
  source 1..75: mol_type = other DNA
cgaatacgctgcacttggcatcgacagttttgtgctttcgggctacccgcatctggaagaagcgtatcgggttgg

SEQ ID NO: 434205 - DNA, 75 bp, synthetic construct
  source 1..75: mol_type = other DNA
gctgatatacgtcacgtagagtcatcgacagcagtattgtacttgtttagcgagcggtttatgagctatggcaaa

SEQ ID NO: 434206 - DNA, 75 bp, synthetic construct
  source 1..75: mol_type = other DNA
gccgatatacggcaggtggagtcatcgacggcggtgttgtacttgtttagcgagcgatttatgacctatggcaag

SEQ ID NO: 434207 - DNA, 75 bp, synthetic construct
  source 1..75: mol_type = other DNA
ttacaccccaagcccgggcgttatttatccgacgctggatctcctccaggaacaatcgctaatcaccatccgcga

SEQ ID NO: 434208 - DNA, 75 bp, synthetic construct
  source 1..75: mol_type = other DNA
gattgcttatttgttgatggggacgttaatggctggtgaatggctggtgcgccgccaggttatgaaaagagatcg

SEQ ID NO: 434209 - DNA, 75 bp, synthetic construct
  source 1..75: mol_type = other DNA
ttattaaactgctgaccggattattactgctcgcctggccgtttgtgatttggcttggtttggcacataacggcc

SEQ ID NO: 434210 - DNA, 75 bp, synthetic construct
  source 1..75: mol_type = other DNA
agctactgctgttttacccggtagtggttaacgcgatcatgctggcggtttttggcggttcgctgtggtcgacaa

SEQ ID NO: 434211 - DNA, 75 bp, synthetic construct
  source 1..75: mol_type = other DNA
taccgacccacggtgacggacattacctgggaacggaagaaggttcacgcctggttgatcatgattatctgcaac

SEQ ID NO: 434212 - DNA, 75 bp, synthetic construct
  source 1..75: mol_type = other DNA
gcctttatcgaagaaattttgctcgacagaagccgtgaagagagccgccgtgagcgttctctacgtcgtctggag

SEQ ID NO: 434213 - DNA, 75 bp, synthetic construct
  source 1..75: mol_type = other DNA
atgttggcccagaatgtccgccagaacttcgaattgctctattcgcgtcgcgagatgctgccgctggtgagtagt

SEQ ID NO: 434214 - DNA, 75 bp, synthetic construct
  source 1..75: mol_type = other DNA
ctttgtgctggtcgagaaatacagcgcccgcgccttctggggacaggtgcagaagtaccgcgccaccattaccga

SEQ ID NO: 434215 - DNA, 75 bp, synthetic construct
  source 1..75: mol_type = other DNA
agccgatcccttcccgcacgtcacgcctgcgtttgaaatgacaccggagaaaggtgcctatttatacacatacag

SEQ ID NO: 434216 - DNA, 75 bp, synthetic construct
  source 1..75: mol_type = other DNA
cgcctgcctggtggtttcaccattgaggatgcgaaggagttacatgaagacctggttcgcagccacataagccag

SEQ ID NO: 434217 - DNA, 75 bp, synthetic construct
  source 1..75: mol_type = other DNA
tggagcagaatgtgctaacgggtaactctcaggtaatccctgatgacggtcgcgaacagtttgaaacacttatca

SEQ ID NO: 434218 - DNA, 75 bp, synthetic construct
  source 1..75: mol_type = other DNA
gcgctgtactgcaactgtgtgacatcgctttacaacccggagaaaacgtcaacaacattgatgttggtgatccac

SEQ ID NO: 434219 - DNA, 75 bp, synthetic construct
  source 1..75: mol_type = other DNA
taggcctggatacgtctctggttgtcacaacagatcgccgtacctaccgcttccggttgaagtccagccgtaagg

SEQ ID NO: 434220 - DNA, 75 bp, synthetic construct
  source 1..75: mol_type = other DNA
gatatgaataaaaatttactggtatcaaaggctgcctgtggaagcatcacgcttacagaccccaaggccaaagct

SEQ ID NO: 434221 - DNA, 75 bp, synthetic construct
  source 1..75: mol_type = other DNA
gcgataagcgtcgctggccgtcgattggtcgtgcaggattttgctacgaagcggagatccgcgacgatcacaatc

SEQ ID NO: 434222 - DNA, 75 bp, synthetic construct
  source 1..75: mol_type = other DNA
ggcacttcccgctgatgatggcgtgagttcgtttactcaactgaaagatcaacaacctgccaccttgtgctatgc

SEQ ID NO: 434223 - DNA, 75 bp, synthetic construct
  source 1..75: mol_type = other DNA
gtggtgctgaatgaaggtgaaacattgagcgaagaggaatttttccgcttctgcgaacaaaatatggcgaaattt

SEQ ID NO: 434224 - DNA, 75 bp, synthetic construct
  source 1..75: mol_type = other DNA
cgagttgctgttcccgcatctggatgtcgccatcccggaaattccccagccgcagccgctgaatccgcaaaggcg

SEQ ID NO: 434225 - DNA, 75 bp, synthetic construct
  source 1..75: mol_type = other DNA
gtcctacggtcgccgcgcgaatcaacgaatacgctgcacttggcatcgacagttttgtgctttcgggctacccgc

SEQ ID NO: 434226 - DNA, 75 bp, synthetic construct
  source 1..75: mol_type = other DNA
caggcagcgatccacaagaactggcaggcgacggcgtgttccttgatcatagcgagcgttacgaagcctcggcag

SEQ ID NO: 434227 - DNA, 75 bp, synthetic construct
  source 1..75: mol_type = other DNA
tgagcagggtttctccggtcgtgaagtgatggcggagtttcgacgggcgaccggcttgcccgtcgcgaccaacat

SEQ ID NO: 434228 - DNA, 75 bp, synthetic construct
  source 1..75: mol_type = other DNA
ttccagttataagtaaaattcctcttataggctggattttcagtagcaaggcaaacagcaatgaacagcgtatta

SEQ ID NO: 434229 - DNA, 75 bp, synthetic construct
  source 1..75: mol_type = other DNA
actggcacactgtggctatttatttgctggcaggctgtttgatatccgccgccactgctctgctaatgaaagagg

SEQ ID NO: 434230 - DNA, 75 bp, synthetic construct
  source 1..75: mol_type = other DNA
atcaagtcgccagtgtggttggcggtggattcacaccatttatcgctgcagcgctggtcaccttctcgaacggta

SEQ ID NO: 434231 - DNA, 75 bp, synthetic construct
  source 1..75: mol_type = other DNA
cctttcctgtttagcatcgtactggtactgggagcattgtgggtgcgcaatggcatggaggagtccgcggaattt

SEQ ID NO: 434232 - DNA, 75 bp, synthetic construct
  source 1..75: mol_type = other DNA
aaagtacaggggaggaattaggtggttttgtagcagtgattcgtcccaaacaaaagtcatcattccagaggcact

SEQ ID NO: 434233 - DNA, 75 bp, synthetic construct
  source 1..75: mol_type = other DNA
attatccaggcaataactcgctgattgtttctgcgcctgacgagctgctgccggttctgtccgattttatcaatt

SEQ ID NO: 434234 - DNA, 75 bp, synthetic construct
  source 1..75: mol_type = other DNA
ctgaaattgaagccaactatcagggtcgcctgctcgccagacaaaatggcttccttgacccagtgaactaccgta

SEQ ID NO: 434235 - DNA, 75 bp, synthetic construct
  source 1..75: mol_type = other DNA
ttatcaacgttattaacggcaaaacagatacgttgttagaaatcgccgtattaccgctggatagctatgccaaac

SEQ ID NO: 434236 - DNA, 75 bp, synthetic construct
  source 1..75: mol_type = other DNA
ggtatggcatttaagagaagtggttaacaccacctacaacttgtgggattacggttacggcgctttctggccaga

SEQ ID NO: 434237 - DNA, 75 bp, synthetic construct
  source 1..75: mol_type = other DNA
cgcgaatttttcccacaggtcagtcccgcgatgggaacactcgcggcatttgcgacattcggcgttggtttcctc

SEQ ID NO: 434238 - DNA, 75 bp, synthetic construct
  source 1..75: mol_type = other DNA
gccccaaaattaacagaattgaactgaaccgaagggatataaacatcagacaggtttacgttactatcaggcata

SEQ ID NO: 434239 - DNA, 75 bp, synthetic construct
  source 1..75: mol_type = other DNA
gccccaaaatcaatggaattgaactaaacaaaagggatataaacatcagacaggtttacgttactatcaggcata

SEQ ID NO: 434240 - DNA, 75 bp, synthetic construct
  source 1..75: mol_type = other DNA
ccgacagagtggaaactgctgtgggttaagctggaaggaaaaccgcttccgtcacagacgccgacactgaaatgg

SEQ ID NO: 434241 - DNA, 75 bp, synthetic construct
  source 1..75: mol_type = other DNA
tgaagccatttctctatgcaaagggctgaatgatgttcttacctatgccgaagatccatgcggcgcagaacaggg

SEQ ID NO: 434242 - DNA, 75 bp, synthetic construct
  source 1..75: mol_type = other DNA
atgacgacacaatccagtcctgttattactgatatgaaagtcattccggtcgccgggcacgacagcatgttgctt

SEQ ID NO: 434243 - DNA, 75 bp, synthetic construct
  source 1..75: mol_type = other DNA
atgaacagcgaagccgttgtgcgtctggcggaagcctcacaggatcgctatggctttaaagatttcaaacttaag

SEQ ID NO: 434244 - DNA, 75 bp, synthetic construct
  source 1..75: mol_type = other DNA
ctgaatgatgttctcacctatgccgaagatccatgtggcgcagaacagggtttctccggacgtgaagtgatggcg

SEQ ID NO: 434245 - DNA, 75 bp, synthetic construct
  source 1..75: mol_type = other DNA
tgttacctggcgagcaagaaatcgacactgttcgtgcattgaagaaacgcttcccggatgcgcgaattaccgttg

SEQ ID NO: 434246 - DNA, 75 bp, synthetic construct
  source 1..75: mol_type = other DNA
ttttatatcggtgatcggaccaaaaccgatcttccttatctggaaaatacgccgggcaaccatgagtggtatcaa

SEQ ID NO: 434247 - DNA, 75 bp, synthetic construct
  source 1..75: mol_type = other DNA
ccagcagggcaggagattaaaaaaatgaatatccaggaagcattaaacgtttttggattatccggcgaattaact

SEQ ID NO: 434248 - DNA, 75 bp, synthetic construct
  source 1..75: mol_type = other DNA
agaacacagcattgaagaaatccgtgaaatgtatggtacagcgggtaaacgtaaggcgtcaggctggagacgtgt

SEQ ID NO: 434249 - DNA, 75 bp, synthetic construct
  source 1..75: mol_type = other DNA
ggaccggtcagggtcgtacgccgaagccaattgcccaggcgctggcagaaggtaaatctctcgacgatttcctga

SEQ ID NO: 434250 - DNA, 75 bp, synthetic construct
  source 1..75: mol_type = other DNA
tattccgatggttctgggccaggaagttgcgcgcctgaataaagtggttcagcaggtgcataaaggtaatcaggc

SEQ ID NO: 434251 - DNA, 75 bp, synthetic construct
  source 1..75: mol_type = other DNA
gggctgtaagtgggcatctaagaaaaaacaatggttttaccgtcctgaagaacacaaaagccgctggaaccgtaa

SEQ ID NO: 434252 - DNA, 75 bp, synthetic construct
  source 1..75: mol_type = other DNA
tctttggcatcaatagcaatggcctttcaaaagatgatcttaaaagtgcgtataaaaaattagcgcttaaatacc

SEQ ID NO: 434253 - DNA, 75 bp, synthetic construct
  source 1..75: mol_type = other DNA
aatacatcccgccagtgacttcccgcgtagttgatgagttcctggctgaacatgaagatgatgaggatgattatg

SEQ ID NO: 434254 - DNA, 75 bp, synthetic construct
  source 1..75: mol_type = other DNA
aaagaactttttgcattacagtatccccattacaaaaacgtagatgtcttatataattgggcagatcttaatagc

SEQ ID NO: 434255 - DNA, 75 bp, synthetic construct
  source 1..75: mol_type = other DNA
ccgctttgacagccaccagactattaatcagttgacgcaggattcccgcgttgacgatctccagcaagttcatac

SEQ ID NO: 434256 - DNA, 75 bp, synthetic construct
  source 1..75: mol_type = other DNA
cttgatcttgattcagatgatttcgaatacatcccgccagtaacttgccgcatagttgatgacttcctggctgaa

SEQ ID NO: 434257 - DNA, 75 bp, synthetic construct
  source 1..75: mol_type = other DNA
aagtcaggtgtaaaggcgaataccctggctttacggttggttgcgaatacctgggccacattgggtacggtcctt

SEQ ID NO: 434258 - DNA, 75 bp, synthetic construct
  source 1..75: mol_type = other DNA
tatacaagatctggtgcaaaggcgaataccctggctttactactggatgcgaatacctgggccatattgggtatg

SEQ ID NO: 434259 - DNA, 75 bp, synthetic construct
  source 1..75: mol_type = other DNA
aacataggtcatgcacaggacatgacaaacttgatgcgacttgtgagaaacatggcagcatatcctcaagctcat

SEQ ID NO: 434260 - DNA, 75 bp, synthetic construct
  source 1..75: mol_type = other DNA
gaacagtccagcggtcatacgatccataccatagcttctggccccggcttcccggaagacctgattcaccaggcg

SEQ ID NO: 434261 - DNA, 75 bp, synthetic construct
  source 1..75: mol_type = other DNA
ggaattattgcctatctggcagtcggtgaactgcatttaggcaagcgccgcgccgaacgtgcaagagcgatgtgg

SEQ ID NO: 434262 - DNA, 75 bp, synthetic construct
  source 1..75: mol_type = other DNA
tcccacagtgggtcattgatgctggtatgataaaagccggctcgccaattgaaaaatatttcaggtattttgaaa

SEQ ID NO: 434263 - DNA, 75 bp, synthetic construct
  source 1..75: mol_type = other DNA
ttaaaatctcaattttcggttgaatcggcggcacatactatcgaagtccgactggaggcaggagaatgcgtttag

SEQ ID NO: 434264 - DNA, 75 bp, synthetic construct
  source 1..75: mol_type = other DNA
actacgcggcgatgtctttgcaagttgtggagcaggacatttgtcgcgccattgcacacgccgttcgttttgagt

SEQ ID NO: 434265 - DNA, 75 bp, synthetic construct
  source 1..75: mol_type = other DNA
ttgttaattcattatcaaagcagtgggaactaaaaaatctaacttatctgccagcattaactcaatcagagttta

SEQ ID NO: 434266 - DNA, 75 bp, synthetic construct
  source 1..75: mol_type = other DNA
aacctacacgcgcgtgtttgcgctcgatgtcggccgtcagtatggcgtccggttcagcctgccagacagtcatct

SEQ ID NO: 434267 - DNA, 75 bp, synthetic construct
  source 1..75: mol_type = other DNA
tggataagcacatcatttgccatattggggcaattccccttgataagtgtgatacaaggcagtggatcgcatgtt

SEQ ID NO: 434268 - DNA, 75 bp, synthetic construct
  source 1..75: mol_type = other DNA
gcagggtgatggtgcagtcgctatcagcgggggaaccaccagctatacggttcaactggtgaacagtgggaccat

SEQ ID NO: 434269 - DNA, 75 bp, synthetic construct
  source 1..75: mol_type = other DNA
gtttgaaaaatcaactcagcactataccgatagcacccgctcgctgttgcgttgtaccggtcgctacatggtggt

SEQ ID NO: 434270 - DNA, 75 bp, synthetic construct
  source 1..75: mol_type = other DNA
cagaaaagatcatcgacacctacgcggaagcgactcgccatgtcgatcaggggctgtcgctgacgcttttttccc

SEQ ID NO: 434271 - DNA, 75 bp, synthetic construct
  source 1..75: mol_type = other DNA
gaagacatgatgcgggagcttacgcatcgccatgacttgaataagcagccgcacaaaacgcaatacgcactctaa

SEQ ID NO: 434272 - DNA, 75 bp, synthetic construct
  source 1..75: mol_type = other DNA
cgcattctcggcaaacagattatccgcgaaattctatactacgtgctgaccggaccttgcggcggcgcgttactg

SEQ ID NO: 434273 - DNA, 75 bp, synthetic construct
  source 1..75: mol_type = other DNA
cggataacgccgggaaaatcacgctggatacgctttgggtcgatcaaaacgacaccacgacgctgcgtactgacc

SEQ ID NO: 434274 - DNA, 75 bp, synthetic construct
  source 1..75: mol_type = other DNA
cattgattctcatggtctttattgtgagatagatacccgattcacttcctgtgaagctatcaccagagcagtgga

SEQ ID NO: 434275 - DNA, 75 bp, synthetic construct
  source 1..75: mol_type = other DNA
acagcagccaggaaagtgcgttgcaggtagatgcattccactggaaagaagacggcatcagcgataaaggtgtga

SEQ ID NO: 434276 - DNA, 75 bp, synthetic construct
  source 1..75: mol_type = other DNA
acaggttctaaggtcatcaataatggcaatatagatatccaaaatatcggttttatttcagtgtcaggtgaagat

SEQ ID NO: 434277 - DNA, 75 bp, synthetic construct
  source 1..75: mol_type = other DNA
cagaagccaacatgagcgtatcggcgttccaccataattttaagtctgtcaccagtacctcgccgttgcagtatt

SEQ ID NO: 434278 - DNA, 75 bp, synthetic construct
  source 1..75: mol_type = other DNA
gcgaactccacttaggtaaacgccgtgccgaacgcgccagagcgatgtggccttctaccgctaaatggcttaacg

SEQ ID NO: 434279 - DNA, 75 bp, synthetic construct
  source 1..75: mol_type = other DNA
aaaaaatttatgaagcactgtgaacaactggatagtgaagtagactctatattactgcaatttgtgaaggataat

SEQ ID NO: 434280 - DNA, 75 bp, synthetic construct
  source 1..75: mol_type = other DNA
aaaaaacctccgaaaaatgcgcagacagaaatgcgcaaaactgcgcaaaaaagtgcgcagaaaaaatctgcgtag

SEQ ID NO: 434281 - DNA, 75 bp, synthetic construct
  source 1..75: mol_type = other DNA
tcacagcttgaatttctgcccgaacgccataccgactttatctttgcggtattagcggaagaactgggattagtg

SEQ ID NO: 434282 - DNA, 75 bp, synthetic construct
  source 1..75: mol_type = other DNA
atagcattggcgattgaatatgagtgggatctcaagcgtaagttttggtttggttttgcagatatccaattatta

SEQ ID NO: 434283 - DNA, 75 bp, synthetic construct
  source 1..75: mol_type = other DNA
gcagacgtcactcatcaggaagcagagaatgttttgttggctacaaactatgatattgcagaagctcttcggcgt

SEQ ID NO: 434284 - DNA, 75 bp, synthetic construct
  source 1..75: mol_type = other DNA
aaaaaatttatgaagcactgtgaacaactggatagtgaagccgacgctatattactgcaatttgtaaaggataat

SEQ ID NO: 434285 - DNA, 75 bp, synthetic construct
  source 1..75: mol_type = other DNA
aatggtgtttcaggactccatcagcgccgtgaatccgcgcaaaaccgtgcgcgagatcctgcgtgaaccgatgcg

SEQ ID NO: 434286 - DNA, 75 bp, synthetic construct
  source 1..75: mol_type = other DNA
tcaagcgtaatcaatggcagaaaacaaggaaaactcgtcgcattttcaacagatacaacggcagcaaatttacag

SEQ ID NO: 434287 - DNA, 75 bp, synthetic construct
  source 1..75: mol_type = other DNA
atgaaaataaaaatggagcaatgctctttggatatcatgaggacaggatacatcgcggcagctattctttttatg

SEQ ID NO: 434288 - DNA, 75 bp, synthetic construct
  source 1..75: mol_type = other DNA
ctccgtcactgaagaatacagctatcgcactggtgctgattttcatgcctacgttgctggtagctgctcagcctg

SEQ ID NO: 434289 - DNA, 75 bp, synthetic construct
  source 1..75: mol_type = other DNA
tcggcgttgcagtggtgctggtagccgcgttcattccgattctgtggttcttcctgatgcatgattaccaacgcc

SEQ ID NO: 434290 - DNA, 75 bp, synthetic construct
  source 1..75: mol_type = other DNA
tttggcaccgcctgcctgttcatcacccacgacttacgtctggtggaacgtttttgccagcgagtgatggtcatg

SEQ ID NO: 434291 - DNA, 75 bp, synthetic construct
  source 1..75: mol_type = other DNA
gaatgccggagatgctttaagtaaaatagcgttagcgatagagtatgagtgggaactcaaacgtaagttctggtt

SEQ ID NO: 434292 - DNA, 75 bp, synthetic construct
  source 1..75: mol_type = other DNA
ctatggtgctttttctggcttaattggttttatggcgatgcatctgggaacgaacttttatcttaaacagcacga

SEQ ID NO: 434293 - DNA, 75 bp, synthetic construct
  source 1..75: mol_type = other DNA
atcagagaactggcgtttggcgctggtacattacacgcggcagtggcgtcttatgtgcagtctccgcactattaa

SEQ ID NO: 434294 - DNA, 75 bp, synthetic construct
  source 1..75: mol_type = other DNA
ccaaaaggcagcgcaaaaaccgccgacgcgttaaccgcctcactgagatgtggcctgacttattcagccataaag

SEQ ID NO: 434295 - DNA, 75 bp, synthetic construct
  source 1..75: mol_type = other DNA
ctggggttaaaatttatcagtttgaaggcgggttactgcataccaagagcgtgctggtcgatggcgaactaagtc

SEQ ID NO: 434296 - DNA, 75 bp, synthetic construct
  source 1..75: mol_type = other DNA
attatttgcccgatagtactcgagtaggcgcaaaaatgtttcatgagttggctctcgaactacagtcccgcggac

SEQ ID NO: 434297 - DNA, 75 bp, synthetic construct
  source 1..75: mol_type = other DNA
gagaggctggatcgggtactacgcaaagttctggtccagaaatttcaactatcgactgtggagtgcaatgcagtc

SEQ ID NO: 434298 - DNA, 75 bp, synthetic construct
  source 1..75: mol_type = other DNA
actctgccaataacacatcaggaataaccgtgtcggttacagccagtaaaatatgcgcaggtcagaaagagtttg

SEQ ID NO: 434299 - DNA, 75 bp, synthetic construct
  source 1..75: mol_type = other DNA
cagattcagtggcgggaggatgtggacaggaattatcccagagaaaaggtttatattttcagtcccgataatgtc

SEQ ID NO: 434300 - DNA, 75 bp, synthetic construct
  source 1..75: mol_type = other DNA
aacttgcaagagaggttgattctatattactgcaatttgtgaaggacaatattgatgttttcccgtgtcgccata

SEQ ID NO: 434301 - DNA, 75 bp, synthetic construct
  source 1..75: mol_type = other DNA
tactgccgagaaaatgcaacagttaacccatctgttagaggaatttattgctctgggcaattcccgacaagaaga

SEQ ID NO: 434302 - DNA, 75 bp, synthetic construct
  source 1..75: mol_type = other DNA
acaacgtcgtctggggctgcaatctgtcggctggatagaggctgaaatagacgaatggattttacaacgaacccg

SEQ ID NO: 434303 - DNA, 75 bp, synthetic construct
  source 1..75: mol_type = other DNA
acattattaaaagacttaagcgtgccgccgggcacctgaaaagtaccatccagatgctcgaagatgaaaaagcgt

SEQ ID NO: 434304 - DNA, 75 bp, synthetic construct
  source 1..75: mol_type = other DNA
aattcaaattcgtgattacaaaagtgataatcacaaagtatatataccattaaataaagcaaaaagattcgtaga

SEQ ID NO: 434305 - DNA, 75 bp, synthetic construct
  source 1..75: mol_type = other DNA
tgtatcctgcggcgaagtccagtgatgttcaatcttatgaatttccgctgccaccacttgccgaacaaaaaatca

SEQ ID NO: 434306 - DNA, 75 bp, synthetic construct
  source 1..75: mol_type = other DNA
cggtaaccaaccaaatcttaatctaaataaagtccgggagatacctatcttacttccctctctccccgaacaaca

SEQ ID NO: 434307 - DNA, 75 bp, synthetic construct
  source 1..75: mol_type = other DNA
acctcactgcaagcgcgctggcatcggcatcttcgcacacgattgcaatggtcgtaccaaacctggctgaagcag

SEQ ID NO: 434308 - DNA, 75 bp, synthetic construct
  source 1..75: mol_type = other DNA
atgccgtgcgcagcggggtgctggaacatggcaatattttacccggcgagcgcgatttaagtcagttaaccggcg

SEQ ID NO: 434309 - DNA, 75 bp, synthetic construct
  source 1..75: mol_type = other DNA
tataacaaaaaaagttgaattagataactacaaaatccttattccagaagactggagtgaaacaattttgggtga

SEQ ID NO: 434310 - DNA, 75 bp, synthetic construct
  source 1..75: mol_type = other DNA
gttgataaggcattaaagctgcttgatgaagccgaacgtctgggatcgacatctgcccgttccacctttatcagc

SEQ ID NO: 434311 - DNA, 75 bp, synthetic construct
  source 1..75: mol_type = other DNA
gacccggctaaagcctatgccaaaggcgtcggtaactcgatcccggatattcctgacccggttgctcgtcatacc

SEQ ID NO: 434312 - DNA, 75 bp, synthetic construct
  source 1..75: mol_type = other DNA
tatggccttacctgttgcctgttgtggccggtggggccgtctgggcaatgcgtcgtagttttgccagcactgagc

SEQ ID NO: 434313 - DNA, 75 bp, synthetic construct
  source 1..75: mol_type = other DNA
ctagaaattctgtttccatgtttcaggccattgtgagtgaggaaatctgcaacggaaagtttggcacagcaagcc

SEQ ID NO: 434314 - DNA, 75 bp, synthetic construct
  source 1..75: mol_type = other DNA
tggacaccggtcgaccaatctaagactcagacgacccaactggcgaccggcggccaacaactgaacatccctggt

SEQ ID NO: 434315 - DNA, 75 bp, synthetic construct
  source 1..75: mol_type = other DNA
gaccctgacgctgaccagcgaagtgaacaaacaaaccagcgtatttgcgccgaacgtgctgattcttgatcagaa

SEQ ID NO: 434316 - DNA, 75 bp, synthetic construct
  source 1..75: mol_type = other DNA
gttcctcacaggaaaattggtctggaggcaggaaaggctttgctggaacgaattagagaaggtaactggagcgat

SEQ ID NO: 434317 - DNA, 75 bp, synthetic construct
  source 1..75: mol_type = other DNA
aaggctggtatcaacgtttacgtgcgatgcccgcgttaattattccgctaactcataatgcgcttaacgatctgg

SEQ ID NO: 434318 - DNA, 75 bp, synthetic construct
  source 1..75: mol_type = other DNA
cgcactacgctatgggcaccacctgacagtaaattacaaaaagtggctcgttacaccatgatattgctgatgctg

SEQ ID NO: 434319 - DNA, 75 bp, synthetic construct
  source 1..75: mol_type = other DNA
tggtcgttgagcagttaaaacggcaattggcgattattcatgaagcgcagcgcgcccgcggcgtgccgctggatg

SEQ ID NO: 434320 - DNA, 75 bp, synthetic construct
  source 1..75: mol_type = other DNA
ttcacatcgaggccaccagcgaacaggaagcacaccagcaatctcctgatggctgcgtgatggtattcgctgccc

SEQ ID NO: 434321 - DNA, 75 bp, synthetic construct
  source 1..75: mol_type = other DNA
ggaagcacgcctgcaatccccggctggctgcgtgatggtattcgctgcccgtattcgtcagggggtaggcttatg

SEQ ID NO: 434322 - DNA, 75 bp, synthetic construct
  source 1..75: mol_type = other DNA
cgccagcgaacaggaagcccgccagcaatccccaactggctacgtgatgatattcgccgcccgtattcgtcagga

SEQ ID NO: 434323 - DNA, 75 bp, synthetic construct
  source 1..75: mol_type = other DNA
acgtaatcgcattgtgggccgtgtcatttgcttttctggccgtcctgtattggtggaagatcaccgccagaaaac

SEQ ID NO: 434324 - DNA, 75 bp, synthetic construct
  source 1..75: mol_type = other DNA
tcgatgatgcagaacgcggtttttcctttatgcgcgacggtccgctggacatgcgtatggatccgacacgcggcc

SEQ ID NO: 434325 - DNA, 75 bp, synthetic construct
  source 1..75: mol_type = other DNA
ttgggaggtcgccagttgcgagcattaggcaagttgatgccgggcgaagaagaggtagcagagaatcctcgtgcc

SEQ ID NO: 434326 - DNA, 75 bp, synthetic construct
  source 1..75: mol_type = other DNA
ctggctgacagaatggctaagcggcacgccacgctcgccagaacggtgggcgcatgctattacgctctggttgcg

SEQ ID NO: 434327 - DNA, 75 bp, synthetic construct
  source 1..75: mol_type = other DNA
tgcaatgttttattcgcgctctgtttgcttctcgcctgccgccaggcgtcgcttatctgtttgccgggccgttat

SEQ ID NO: 434328 - DNA, 75 bp, synthetic construct
  source 1..75: mol_type = other DNA
tggcgctggtgggcgacgctgcacataccattcatccgctggcggggcagggcgttaatctcggctttatggatg

SEQ ID NO: 434329 - DNA, 75 bp, synthetic construct
  source 1..75: mol_type = other DNA
taaaggtcacgctacgctgggtggcccgaacaccacttatgtgtttaaggctggtgaagaagcggtgccgctgga

SEQ ID NO: 434330 - DNA, 75 bp, synthetic construct
  source 1..75: mol_type = other DNA
aggtaaagggttattgatcattgcgccctggctgatgaaagcgttatcgattgtcggcacgctggcgatgttcct

SEQ ID NO: 434331 - DNA, 75 bp, synthetic construct
  source 1..75: mol_type = other DNA
ttatcccgtgggcgattacgccattgttgatggttggcggcgcgtttctctgctttgaaggcgcagagaaagtgc

SEQ ID NO: 434332 - DNA, 75 bp, synthetic construct
  source 1..75: mol_type = other DNA
aagcggaggcgcgacgaattgagagctgggtgcagcggcaaatcgcagatcttgggacaaccaggatcgccgaag

SEQ ID NO: 434333 - DNA, 75 bp, synthetic construct
  source 1..75: mol_type = other DNA
gccacacatggtgaggaaaaatcattaccttatgtaacaatcggtgaagcactaaagggattacctgaatggcca

SEQ ID NO: 434334 - DNA, 75 bp, synthetic construct
  source 1..75: mol_type = other DNA
aaagagagatataaggtcgtaggtaatgcagttccaccacctttgtttgaagcggttgtgagaaacatccctgat

SEQ ID NO: 434335 - DNA, 75 bp, synthetic construct
  source 1..75: mol_type = other DNA
cgggttgtggtggttccgatgctggattaagcaaagctggtttcgacatcgttatggcaaacgatattttgccat

SEQ ID NO: 434336 - DNA, 75 bp, synthetic construct
  source 1..75: mol_type = other DNA
tgctggaaaaagccagaagcggtatctatcgccatgaagagttgaaaaccctgacgccgcagcaactgcaacggt

SEQ ID NO: 434337 - DNA, 75 bp, synthetic construct
  source 1..75: mol_type = other DNA
acaggcgaagaaccgtacagcattgcgatgacgctggcggacacattgggcactgcgcccggacgctggaaagtc

SEQ ID NO: 434338 - DNA, 75 bp, synthetic construct
  source 1..75: mol_type = other DNA
tttgccagtgatatcgacaccgaggtgctggaaaaagccagaagcggtatttatcgccatgaagagctgaaaaat

SEQ ID NO: 434339 - DNA, 75 bp, synthetic construct
  source 1..75: mol_type = other DNA
tcgtctattcgtccatgagaaaggctgtcgtccaggttctggagacaattccggatgttcttgaacgcgattgcg

SEQ ID NO: 434340 - DNA, 75 bp, synthetic construct
  source 1..75: mol_type = other DNA
cgggcaagttctgcgcatcaggcggcggcactctcggggatggcacaatccgtcgggtatttgctggcagcctgt

SEQ ID NO: 434341 - DNA, 75 bp, synthetic construct
  source 1..75: mol_type = other DNA
cacctttatggtccgtggtggcctgcgcttaaaacgatattgctggagcgcggcgacacatcatttggacaggtt

SEQ ID NO: 434342 - DNA, 75 bp, synthetic construct
  source 1..75: mol_type = other DNA
ggataccttgaagcaacaacataataccagcctgagtcttatctccataatacccgcagggggtattgagacaga

SEQ ID NO: 434343 - DNA, 75 bp, synthetic construct
  source 1..75: mol_type = other DNA
gttaacagtggatgggcagactatcaggcagagttcggtaagtaaccgttatggtacgacgaaagtgtttgaaag

SEQ ID NO: 434344 - DNA, 75 bp, synthetic construct
  source 1..75: mol_type = other DNA
gcatgtgctgaatggcgacaatacagacgaaaacaaacagccgaatctgggcaaagacgtagcgagtgctacgga

SEQ ID NO: 434345 - DNA, 75 bp, synthetic construct
  source 1..75: mol_type = other DNA
cggcttccggtgctgcaggggcattcagtggtgaacttgcagcccggtatatcattgataactactacggtggtc

SEQ ID NO: 434346 - DNA, 75 bp, synthetic construct
  source 1..75: mol_type = other DNA
tggtcgagctaaagacatgggctctgcggctgtcttcattgctctgatgttgaatgccatagtgtggggtgcatt

SEQ ID NO: 434347 - DNA, 75 bp, synthetic construct
  source 1..75: mol_type = other DNA
ataaaagtcacccggtcggagagttaacagtggatgggcagactatcaggcagagttcggtaagtaaccgttatg

SEQ ID NO: 434348 - DNA, 75 bp, synthetic construct
  source 1..75: mol_type = other DNA
gcgttctttatgatgatgtttattttgattcgtgcgtcgttaccgcgtccgcgttatgaccaggtaatgtccttc

SEQ ID NO: 434349 - DNA, 75 bp, synthetic construct
  source 1..75: mol_type = other DNA
tattcataatgagagtaaaccttccttaggttatggtccaacatgcaataattggttaagccaatcctttacaac

SEQ ID NO: 434350 - DNA, 75 bp, synthetic construct
  source 1..75: mol_type = other DNA
ctataagtcaaattcctcttctctatcctcacactcggggctcaaggacccaacgggcacacccgtctgttatta

SEQ ID NO: 434351 - DNA, 75 bp, synthetic construct
  source 1..75: mol_type = other DNA
aaatcagcattcattggttaatctggaagcgcaaaataataatctaaaaaaaattaatatttctgatagttataa

SEQ ID NO: 434352 - DNA, 75 bp, synthetic construct
  source 1..75: mol_type = other DNA
tgaaagcagccaggaaagagcatcctggcatgagcgatgcacagttgcgggagactccggaatacagagaggtca

SEQ ID NO: 434353 - DNA, 75 bp, synthetic construct
  source 1..75: mol_type = other DNA
gataacctttccaaatgaatcaaatctggaaaacatttatattgatcataacaatctggaaagtttagatttaaa

SEQ ID NO: 434354 - DNA, 75 bp, synthetic construct
  source 1..75: mol_type = other DNA
caaccatattgcacatttaaacaccaaaaccactacaaaactggaatatttaaacttaagcaataacaatttatt

SEQ ID NO: 434355 - DNA, 75 bp, synthetic construct
  source 1..75: mol_type = other DNA
gtgcggcaggctaatgaaggttcacgcgccgtcagtgaaagtgccgatcgtgtgtggcaggatacgcaaaaggct

SEQ ID NO: 434356 - DNA, 75 bp, synthetic construct
  source 1..75: mol_type = other DNA
catagataaaagacgagaagaaggacgtatcgagtgggaacgggtcagaacagacaaacagaagagcaaagaaca

SEQ ID NO: 434357 - DNA, 75 bp, synthetic construct
  source 1..75: mol_type = other DNA
gttgcagagggttctaaggccatcagaatcacaacgggccaactggaactactcaaagcacagtccgcagtggca

SEQ ID NO: 434358 - DNA, 75 bp, synthetic construct
  source 1..75: mol_type = other DNA
gacgtccattacggatgtcagcaatgaaatcacgcagaccgtcaataagaaactggaagaccagagtgcagcgat

SEQ ID NO: 434359 - DNA, 75 bp, synthetic construct
  source 1..75: mol_type = other DNA
cgaccagttattttttatgtttttcgtgtaggagaaaaatttttaaaatttggtataactacgcgcaaaaatcca

SEQ ID NO: 434360 - DNA, 75 bp, synthetic construct
  source 1..75: mol_type = other DNA
ccggcagcttcattcccttcgcagggatttaccggggcatattatcagttgaataatgacaactttgcaccagga

SEQ ID NO: 434361 - DNA, 75 bp, synthetic construct
  source 1..75: mol_type = other DNA
ttaatcaaatttttgccggatgcggcgtgaacgccttatccggcctacaacgggcaattttacggcccccgttaa

SEQ ID NO: 434362 - DNA, 75 bp, synthetic construct
  source 1..75: mol_type = other DNA
ggaaacggggctgcattacaatctgcacaggtactatgatccggatgtcgggcggttcatggtaacggacccgat

SEQ ID NO: 434363 - DNA, 75 bp, synthetic construct
  source 1..75: mol_type = other DNA
tatgtatataaacactatcgacatattatgaccgggaacattccttaccccctctgcgctctcagaggttttttt

SEQ ID NO: 434364 - DNA, 75 bp, synthetic construct
  source 1..75: mol_type = other DNA
acgtgattacccgtattatggggttgttactgatggcattagggattgaatttattgttaatggaatcaaaggga

SEQ ID NO: 434365 - DNA, 75 bp, synthetic construct
  source 1..75: mol_type = other DNA
actcaaagcacagtccgcagtagcaggttgctcaatgattcaggtgttaagcgcaaaggtccatcaattagcgga

SEQ ID NO: 434366 - DNA, 75 bp, synthetic construct
  source 1..75: mol_type = other DNA
cgtgaacgccttatccggcctacaacgggcaattttacggcacccgttaatctcaaactataccattagcactgg

SEQ ID NO: 434367 - DNA, 75 bp, synthetic construct
  source 1..75: mol_type = other DNA
ttcgagtatatcgtgacaataaatccgtcacttttgctgaaatcaatgcgtttgatctcagtgaagccttaagca

SEQ ID NO: 434368 - DNA, 75 bp, synthetic construct
  source 1..75: mol_type = other DNA
cggcgcaacaatgatactggggttgacgttcattggtcttcgggcaagttctgcgcatcaggcggcggcactctc

SEQ ID NO: 434369 - DNA, 75 bp, synthetic construct
  source 1..75: mol_type = other DNA
ctcggggtatctggcgttcgccgcttgcctggcaggtcacattgtttcttgggatcaactcactggtctattacg

SEQ ID NO: 434370 - DNA, 75 bp, synthetic construct
  source 1..75: mol_type = other DNA
tggaagaccgtccgtcactgctggttgcggtgatgttcagcctcattatttacatcgagaacaggatgtaccgca

SEQ ID NO: 434371 - DNA, 75 bp, synthetic construct
  source 1..75: mol_type = other DNA
catgtcacaaccattggaccggttgctgatgaattactgtcactgggtgccgtcagtgttgaaactgcgcgctag

SEQ ID NO: 434372 - DNA, 75 bp, synthetic construct
  source 1..75: mol_type = other DNA
ctttaatgctggctactggaactgtgcgccccgtgatcagcaaatcccttttcccgcacccgggactcaaatcac

SEQ ID NO: 434373 - DNA, 75 bp, synthetic construct
  source 1..75: mol_type = other DNA
atgattgccactacattacgcgtcaccttcaccggcgcagcaccgttactcgatacgattcgttccgcttactcg

SEQ ID NO: 434374 - DNA, 75 bp, synthetic construct
  source 1..75: mol_type = other DNA
ttgttcaggataccggctcaaactctgccgataacattggtggcgtatattacagaccggtgcagaaatacatta

SEQ ID NO: 434375 - DNA, 75 bp, synthetic construct
  source 1..75: mol_type = other DNA
gaaacaacaaactgcaatcaaccattttagcgccataccgtttaacgaacgtcttgcatgcagggggatggatac

SEQ ID NO: 434376 - DNA, 75 bp, synthetic construct
  source 1..75: mol_type = other DNA
gaaagttgctggcaacgttgcgcggataaactcattgccgcactgccggtaatccccatcgttcgccgtcctttt

SEQ ID NO: 434377 - DNA, 75 bp, synthetic construct
  source 1..75: mol_type = other DNA
gattatctacatcgagaacaggatgtaccgcacgccgcgtaacctcaagaaactgaacgttattgatgaaggctg

SEQ ID NO: 434378 - DNA, 75 bp, synthetic construct
  source 1..75: mol_type = other DNA
gatttctctaataagatctgcaatcactacggggttagtgctaaataatctcttccccgagttatctagttttat

SEQ ID NO: 434379 - DNA, 75 bp, synthetic construct
  source 1..75: mol_type = other DNA
gcgatgagggagtgtgctggccgtccattgaaactattgctcgccagcttggcgcagggccgagcacgatcagaa

SEQ ID NO: 434380 - DNA, 75 bp, synthetic construct
  source 1..75: mol_type = other DNA
tatgccggaacagcagaccagccactggcgtcggcaaattgtccgcatcagtctcgcgttgctgcctatccattt

SEQ ID NO: 434381 - DNA, 75 bp, synthetic construct
  source 1..75: mol_type = other DNA
ggaccatttcagggcaaaattgcctgtgtccggatacccgtcgggcgcggcgtgtgtggcactgcggttgcccgc

SEQ ID NO: 434382 - DNA, 75 bp, synthetic construct
  source 1..75: mol_type = other DNA
tctggcaacgcttgcgaacaccagtgcgttgttatatgagcgtctcactgacgtaaactgggcaggtttttattt

SEQ ID NO: 434383 - DNA, 75 bp, synthetic construct
  source 1..75: mol_type = other DNA
gaaatcacaaacaaagcaattgtatctctgtttaatattatttatcgggaattagaaacaataaaatctggtatg

SEQ ID NO: 434384 - DNA, 75 bp, synthetic construct
  source 1..75: mol_type = other DNA
atgactatgttccagtattacaaacgatcacggcattttgttttttcagcatttattgcttttgtttttgtcttg

SEQ ID NO: 434385 - DNA, 75 bp, synthetic construct
  source 1..75: mol_type = other DNA
ttctggaaaaacaacccccgctggtgttacttgaagtgggcggcgtaggctatgaagtgcatatgccgatgacct

SEQ ID NO: 434386 - DNA, 75 bp, synthetic construct
  source 1..75: mol_type = other DNA
tgctgaacaggaagcggttgctgcgctggtggcgctgggctataaaccacaagaagcaagccgcatggtgagcaa

SEQ ID NO: 434387 - DNA, 75 bp, synthetic construct
  source 1..75: mol_type = other DNA
atgaaaattttccaacggtacaacccactgcaggtggcgaagtacgtaaagatcctgttccgtggacggttatac

SEQ ID NO: 434388 - DNA, 75 bp, synthetic construct
  source 1..75: mol_type = other DNA
atcgaagccagtaaaggtccggcctttgcccgtcgtggcattaccgatgaagtactgtggcagcacaacccgaaa

SEQ ID NO: 434389 - DNA, 75 bp, synthetic construct
  source 1..75: mol_type = other DNA
cggacggcaaaacagagctggctgtcagggatattgccggacaggagcgtgaccggtctgccatatctgaacggg

SEQ ID NO: 434390 - DNA, 75 bp, synthetic construct
  source 1..75: mol_type = other DNA
ataacaacgatatccgtacctaaccggatatctaatgtcataagcatccctttaattatcccctcaacctcttga

SEQ ID NO: 434391 - DNA, 75 bp, synthetic construct
  source 1..75: mol_type = other DNA
cgatatccagtctggtaaacagcctcaaaggcgtatcgagtaggttactgcgacgagatcgaccagatattgcag

SEQ ID NO: 434392 - DNA, 75 bp, synthetic construct
  source 1..75: mol_type = other DNA
caactagatttaataacaacgatatccgtacctaaccggatatctaatgtcataaattggactgaccccaccccg

SEQ ID NO: 434393 - DNA, 75 bp, synthetic construct
  source 1..75: mol_type = other DNA
ctggcgctgcggtggtgaaaaacgtcaccatgggcagtctgttgtttgcgattatcgcctcaatggtggcctggg

SEQ ID NO: 434394 - DNA, 75 bp, synthetic construct
  source 1..75: mol_type = other DNA
agaaggggccgaaggtgccgagccgccggaagagccaaccatcgcgctggagcaagtcaaccagcagacgttgcg

SEQ ID NO: 434395 - DNA, 75 bp, synthetic construct
  source 1..75: mol_type = other DNA
aagatgaatttaagtcgatgaagatcacggtaaactgggaaaaagcctggcctgccgtctttatcgctttcctcg

SEQ ID NO: 434396 - DNA, 75 bp, synthetic construct
  source 1..75: mol_type = other DNA
ggcgattttctggctggtgtttggcctgtgctggaaggtactggagaaaaacggcgttgccgtgcgtcactttgg

SEQ ID NO: 434397 - DNA, 75 bp, synthetic construct
  source 1..75: mol_type = other DNA
tattaccatgctgctgatgtttgcactgtttggtttgatgttctgggcgatttggtccgatttgatcaccgtgtt

SEQ ID NO: 434398 - DNA, 75 bp, synthetic construct
  source 1..75: mol_type = other DNA
tgatgatggccattaacctgcaaatcaaccagcagcagttaatgagcgtatcgaaaaacctgaaatccatcctga

SEQ ID NO: 434399 - DNA, 75 bp, synthetic construct
  source 1..75: mol_type = other DNA
agtgcatctgcacaacgagaagggcgatgaagtgactgaagtgaagcgcgactacaaaggcgatgatccgacgcc

SEQ ID NO: 434400 - DNA, 75 bp, synthetic construct
  source 1..75: mol_type = other DNA
cgcaaagaagtgatcatcccgaacaaagcgtttgttaccgagcgtctgatcaactggtcgttgactgacactact

SEQ ID NO: 434401 - DNA, 75 bp, synthetic construct
  source 1..75: mol_type = other DNA
tgcgacaacgattaccgatttcgatcgcaaagaagtgatcatcccgaacaaagcgtttgttaccgagcgtctgat

SEQ ID NO: 434402 - DNA, 75 bp, synthetic construct
  source 1..75: mol_type = other DNA
ggacggtaagtaagatccgtattcgtgcgacaacgattaccgatttcgatcgcaaagaagtgatcatcccgaaca

SEQ ID NO: 434403 - DNA, 75 bp, synthetic construct
  source 1..75: mol_type = other DNA
accaacgaagtcaacagcgaagttcacgatgcgttattgcaagtagttgatatgcgtcgcgaattgctggatcag

SEQ ID NO: 434404 - DNA, 75 bp, synthetic construct
  source 1..75: mol_type = other DNA
taaaagaagaaacggtgcaattacggcaaaaagttgccgaagcaccagagaaaatgcgccaggcgactgctgcgt

SEQ ID NO: 434405 - DNA, 75 bp, synthetic construct
  source 1..75: mol_type = other DNA
agtgcatctgcacaacgagaagggcgatgaggtgacggaagtcaaacgcgactacaaaggcgatgacccgacgcc

SEQ ID NO: 434406 - DNA, 75 bp, synthetic construct
  source 1..75: mol_type = other DNA
tgtcgatagtgctgattggtcagcctgaactgaagctgaaactgtccgaacgtaatcaggaagtgcgtgaagtgg

SEQ ID NO: 434407 - DNA, 75 bp, synthetic construct
  source 1..75: mol_type = other DNA
caggaggctgggaaacaaaccgactggaaaatattttagagctggcttatgggaaagcactcaaaaaaacagaaa

SEQ ID NO: 434408 - DNA, 75 bp, synthetic construct
  source 1..75: mol_type = other DNA
cagcaaaattgaaaacgatcagggcggcgtgattttcgaagcgaaaccgaaagtagcctgcccggaatgtgatat

SEQ ID NO: 434409 - DNA, 75 bp, synthetic construct
  source 1..75: mol_type = other DNA
atggataaaggtctgacgctggcaagtatgttgaacgatgtgccgatttcccgctgggacgcaggcgcgggttct

SEQ ID NO: 434410 - DNA, 75 bp, synthetic construct
  source 1..75: mol_type = other DNA
ggcactggtagcgatactggtgcctttttttctggtgggatgcgtcagcctggataaggcgcgccagcttttcga

SEQ ID NO: 434411 - DNA, 75 bp, synthetic construct
  source 1..75: mol_type = other DNA
atgataaattaagtaaactcggtagcgagtcacaatcaaataaaataattcctcatggtagcatctgtgtaagtt

SEQ ID NO: 434412 - DNA, 75 bp, synthetic construct
  source 1..75: mol_type = other DNA
gatacagtattttatgtaaaacctaaaaagtacttttcgcttgtttactgctatcagctcttgaaaacactagga

SEQ ID NO: 434413 - DNA, 75 bp, synthetic construct
  source 1..75: mol_type = other DNA
aacccgctgtggatcatcgttggtttcttcgtcatcggtatcgctggttacgcttgcggcctgctgggactgtaa

SEQ ID NO: 434414 - DNA, 75 bp, synthetic construct
  source 1..75: mol_type = other DNA
ccgttcgtggctgcgccgattctcggcgtaaccctggcgctggaagaacagcgtgctaatggcgcagagatcgac

SEQ ID NO: 434415 - DNA, 75 bp, synthetic construct
  source 1..75: mol_type = other DNA
tatatgcgcggacgttaaccatggatcttacgttactcagcagactaattgatattgatgagctggtatctggcg

SEQ ID NO: 434416 - DNA, 75 bp, synthetic construct
  source 1..75: mol_type = other DNA
acgcagccgacacaacaggcggtgcacgaggtgggaacgaccattatcgataatggtgaggcacaggaattgttc

SEQ ID NO: 434417 - DNA, 75 bp, synthetic construct
  source 1..75: mol_type = other DNA
ggctacgcggtcatggcgaacggtggcttcctggtggacccgtggtttatcagcaaaattgaaaacgatcagggc

SEQ ID NO: 434418 - DNA, 75 bp, synthetic construct
  source 1..75: mol_type = other DNA
tgggggctggtattgcaatgagcggcagtctgttaggaccgttgctgttcttcatcctgtttaacctggtgcgtt

SEQ ID NO: 434419 - DNA, 75 bp, synthetic construct
  source 1..75: mol_type = other DNA
aactctggctgaaggtcagaacgttgagttcgaaattcaggacggtcagaaaggtccggcagctgttaacgtaac

SEQ ID NO: 434420 - DNA, 75 bp, synthetic construct
  source 1..75: mol_type = other DNA
ggatgagttacgggcagagattgcatttgctcagaagggcgaaaagccatggacttatcgttcctgcctgatgcg

SEQ ID NO: 434421 - DNA, 75 bp, synthetic construct
  source 1..75: mol_type = other DNA
ggcggtatcaatggcaaaacacatcatccgtaactatctggccagtgtggagatcaccgacgtgatgcgccttac

SEQ ID NO: 434422 - DNA, 75 bp, synthetic construct
  source 1..75: mol_type = other DNA
atcgcttctccctggtagagaaaatccgcaaacacacaccgcagaacaaccgaaattacgtcattcagtcggtac

SEQ ID NO: 434423 - DNA, 75 bp, synthetic construct
  source 1..75: mol_type = other DNA
gaccgccgtcgcctgctgcgcaccgaatggggcgtagtgcatcagcatccactcgacggcctgcgccgtcaggtc

SEQ ID NO: 434424 - DNA, 75 bp, synthetic construct
  source 1..75: mol_type = other DNA
tgctggacctgctccgcggtctggtgatggagcttaacctggcggtagtgattgtcacccacgatttaggcgtcg

SEQ ID NO: 434425 - DNA, 75 bp, synthetic construct
  source 1..75: mol_type = other DNA
gggactgcgagtttgataattatctggaggttaatcctgacgcagccagaaatcttgcggcctgtcgccgctatg

SEQ ID NO: 434426 - DNA, 75 bp, synthetic construct
  source 1..75: mol_type = other DNA
gcggtggactgtatggcgatctgaactataccgctgacacctgtcgtcaatgcaaagatccgcaatgcatgaacg

SEQ ID NO: 434427 - DNA, 75 bp, synthetic construct
  source 1..75: mol_type = other DNA
atgagccgaaaacactggacacacagaatgccgcgaacggcggcgaaatgggcactggtagcgatactggtgcct

SEQ ID NO: 434428 - DNA, 75 bp, synthetic construct
  source 1..75: mol_type = other DNA
ggtggggtgcgtcagcctggataaggcgcgccagcttttcgataccgcgtctcaggtctgtgaaattgtcgacgg

SEQ ID NO: 434429 - DNA, 75 bp, synthetic construct
  source 1..75: mol_type = other DNA
attaaaggcgcagagtgttttcgcgatagtaccctgctggttgaaaccgttaaacagttccaccgttccgggcgt

SEQ ID NO: 434430 - DNA, 75 bp, synthetic construct
  source 1..75: mol_type = other DNA
acccgtggtgcgtaaagccagccggcactgcagacaatgtcatcacgattattatggggagcggtactgcacgca

SEQ ID NO: 434431 - DNA, 75 bp, synthetic construct
  source 1..75: mol_type = other DNA
tatttcatcctcagagaacggctgatggcaatgcagaagcaactggaaggagcacaggaatatatccgtacccag

SEQ ID NO: 434432 - DNA, 75 bp, synthetic construct
  source 1..75: mol_type = other DNA
aaactcgatactgggatctagaacatgttaaggggaatcctttaattttcgcaattgctgattttcatgaaccaa

SEQ ID NO: 434433 - DNA, 75 bp, synthetic construct
  source 1..75: mol_type = other DNA
ccggttctgaaacggcggtgggatgtgacaccggcaattatccgcgcggtggaatacctttcccgggtaccggta

SEQ ID NO: 434434 - DNA, 75 bp, synthetic construct
  source 1..75: mol_type = other DNA
aacggctgttcactgagcgttatatcagaaaccttaatgagctgttaccggttctgaaacggcggtgggatgtga

SEQ ID NO: 434435 - DNA, 75 bp, synthetic construct
  source 1..75: mol_type = other DNA
tagccaatacgataatgccgtttggcaaatacaaagggcgtcgcttaatcgacctgccggaggagtatctgctgt

SEQ ID NO: 434436 - DNA, 75 bp, synthetic construct
  source 1..75: mol_type = other DNA
atgaacccgttatttaacgatattcagatgcgtcttttttatctgaaccactctccgtactcctggcactggaat

SEQ ID NO: 434437 - DNA, 75 bp, synthetic construct
  source 1..75: mol_type = other DNA
tattcagatgcgtcttttttatctgaaccactctccgtactcctggcactggaatgtcagattcagacctcagga

SEQ ID NO: 434438 - DNA, 75 bp, synthetic construct
  source 1..75: mol_type = other DNA
atgagaaatatattttttgtgattttgattatgaacccgttatttaatgatattcagatgcgtcttttttatctg

SEQ ID NO: 434439 - DNA, 75 bp, synthetic construct
  source 1..75: mol_type = other DNA
atttaatcaggcagccataattggtcaagctgggactaataatagtgctcagttacggcagggaggctcaaaact

SEQ ID NO: 434440 - DNA, 75 bp, synthetic construct
  source 1..75: mol_type = other DNA
attagaaaaactactatctgataaaaaaagaatatcacgtaatgttgttggtgatcatgctggaatggaggtttt

SEQ ID NO: 434441 - DNA, 75 bp, synthetic construct
  source 1..75: mol_type = other DNA
gtatgtcaatcgcggtggtcgcctgactattctgcaggaagaccagggacaattactgactcttgccggtgaacc

SEQ ID NO: 434442 - DNA, 75 bp, synthetic construct
  source 1..75: mol_type = other DNA
gacgcacgtctgacctctgaactggtgttgctgtttctgtatgttggtgtgattgcgctgtggcacgctttcgac

SEQ ID NO: 434443 - DNA, 75 bp, synthetic construct
  source 1..75: mol_type = other DNA
tacatgtacctgcggcgatgtggtcgatggggatttatgcgtcgatggcggtggcggcgtttatcggtcttgtct

SEQ ID NO: 434444 - DNA, 75 bp, synthetic construct
  source 1..75: mol_type = other DNA
cctcacgagacgaaagactgaaggcgttactcgcgatattggatctcgccgttcgtgacgttcatttcctgctgg

SEQ ID NO: 434445 - DNA, 75 bp, synthetic construct
  source 1..75: mol_type = other DNA
tggaagctgcccgtcaccccgctgttaacgttttccgttgacggtcgcaccgtcacagcctcaccggaactggag

SEQ ID NO: 434446 - DNA, 75 bp, synthetic construct
  source 1..75: mol_type = other DNA
atactggcaaggtccggaagcaaaaaaacgacagtatacaggctcataatggcgcaaattcatcaaactgaacgt

SEQ ID NO: 434447 - DNA, 75 bp, synthetic construct
  source 1..75: mol_type = other DNA
ccacggcgcgcagctttgacgggcgaatgacggtcacgttaaccggccagcacaacgacaccggccagccacttt

SEQ ID NO: 434448 - DNA, 75 bp, synthetic construct
  source 1..75: mol_type = other DNA
tgcgccctatgacggcaaacatattcgcggtatggcgtatctgttagatacgctggcgcggcaatataatgtact

SEQ ID NO: 434449 - DNA, 75 bp, synthetic construct
  source 1..75: mol_type = other DNA
gaatgatattaatcaatcatctgaaatgctatctgaacctaaaagtaaggaagaattgctagagaaaatagagaa

SEQ ID NO: 434450 - DNA, 75 bp, synthetic construct
  source 1..75: mol_type = other DNA
tatcttttcgcatatttacgagaggaacacttttggctagataggcagtttaatgcccctgattatgtggcacgt

SEQ ID NO: 434451 - DNA, 75 bp, synthetic construct
  source 1..75: mol_type = other DNA
gcggaagcatactaaattaaacgtaaaagtatttccacaaggtgatgaaacttataaagcaatggatttattcac

SEQ ID NO: 434452 - DNA, 75 bp, synthetic construct
  source 1..75: mol_type = other DNA
cgaacgggccatcagcgcacctgtcaccagtgtggtgccccgtatcagctccctcacggtaaatctgtcacccgg

SEQ ID NO: 434453 - DNA, 75 bp, synthetic construct
  source 1..75: mol_type = other DNA
ctcgtgcgctcacgggccatgctgcgggatgaatttgaacagacgctggcatcggctgatggtacgcggctgtgg

SEQ ID NO: 434454 - DNA, 75 bp, synthetic construct
  source 1..75: mol_type = other DNA
atgagcgaaaagctgcaggcgcacgccgagaagctgctggctgccggtaagcgtatgctctccttcggtggtgac

SEQ ID NO: 434455 - DNA, 75 bp, synthetic construct
  source 1..75: mol_type = other DNA
ctgttgatgtaccggatagaggtttcgctcgcgcaagcagaatacctgttagcgcatcgggacgtcaggttggtt

SEQ ID NO: 434456 - DNA, 75 bp, synthetic construct
  source 1..75: mol_type = other DNA
acccgccagatgatgattgcgcagctgtgtatgcgcgaagcacagcgcctggaacagatggagatgaatggtgat

SEQ ID NO: 434457 - DNA, 75 bp, synthetic construct
  source 1..75: mol_type = other DNA
gtactcgtgtatatactaccactcctagaaaaccgaactccgcgctgcgtaaagtatgccgtgttcgtctgacta

SEQ ID NO: 434458 - DNA, 75 bp, synthetic construct
  source 1..75: mol_type = other DNA
cagataacccgcaactggattatgttgaaccacgagatttggtcagcaacccttatatcgatacatccgaatggg

SEQ ID NO: 434459 - DNA, 75 bp, synthetic construct
  source 1..75: mol_type = other DNA
aggaaaaacacaccgtatacctttttaatgccgaacatgctgacaagacagccgccaagcaagccgggaaactct

SEQ ID NO: 434460 - DNA, 75 bp, synthetic construct
  source 1..75: mol_type = other DNA
gcactggctgtctttcagaaacaacgccggactgttgaataccgccttgctgtattgcgccaggaggaaaaggaa

SEQ ID NO: 434461 - DNA, 75 bp, synthetic construct
  source 1..75: mol_type = other DNA
cgatctcactatgtcgctggcctttttgccggatatcaaaaccgaatcaacgaccgcttctggtctgccggtgtt

SEQ ID NO: 434462 - DNA, 75 bp, synthetic construct
  source 1..75: mol_type = other DNA
caatgctcttgttgggttatcaacctgcaccacatcgacagaatgttttggtcctgacaggaaaaagaactcata

SEQ ID NO: 434463 - DNA, 75 bp, synthetic construct
  source 1..75: mol_type = other DNA
acggcacggtgaacgatcactatcgcattgattactttgcttcccatattcgggaaatgaaaaaagccgtagttg

SEQ ID NO: 434464 - DNA, 75 bp, synthetic construct
  source 1..75: mol_type = other DNA
ctttaactggactacggatgaaataaccaatggtttaccgatgaccgttgccctgcgtgaaacaaccgcgggcgc

SEQ ID NO: 434465 - DNA, 75 bp, synthetic construct
  source 1..75: mol_type = other DNA
atgaaacggatattgctagcaatccctctgctcagcttctgcctaccccaggccgtgcaagcggaaaatattgat

SEQ ID NO: 434466 - DNA, 75 bp, synthetic construct
  source 1..75: mol_type = other DNA
cctggaaggcaggcaaaaaggtcatcgtcaataatgtctcgctgcgggtgccgcgcggcgaaacggtcggactgc

SEQ ID NO: 434467 - DNA, 75 bp, synthetic construct
  source 1..75: mol_type = other DNA
aaaacgaagcgacggacactcctgtagcaaccaatattggtatgggcatcaagcgccgggatgcagctgatgctt

SEQ ID NO: 434468 - DNA, 75 bp, synthetic construct
  source 1..75: mol_type = other DNA
atgaaaaggatactactaacatccgcgttaataggtctgggtttaccggcggttgaagctgcaacaactcttaat

SEQ ID NO: 434469 - DNA, 75 bp, synthetic construct
  source 1..75: mol_type = other DNA
caagccaactttaaattactggcttccgattgcagcaatggttactcaaagatttttaccacacttacaggtgca

SEQ ID NO: 434470 - DNA, 75 bp, synthetic construct
  source 1..75: mol_type = other DNA
agcgtcgcgcactggcagaaaatcagccagttccgcgcccgccatcccgcaattggcgcgggcaaacaaacgaca

SEQ ID NO: 434471 - DNA, 75 bp, synthetic construct
  source 1..75: mol_type = other DNA
atcaaccccgaatctgtatgacttttgctcctgacgcaaagaagcggttgcgtgatgttggtagggacgtaaagc

SEQ ID NO: 434472 - DNA, 75 bp, synthetic construct
  source 1..75: mol_type = other DNA
tcaagattaaggactttggccgcgaccggaaattccgttcggttgatgagcttcaaagcactttgtcagaacagt

SEQ ID NO: 434473 - DNA, 75 bp, synthetic construct
  source 1..75: mol_type = other DNA
tacagttacgctgcaagtgccatgaaatatcatattatgaacggttacagttataaggaggcacttgcactgaca

SEQ ID NO: 434474 - DNA, 75 bp, synthetic construct
  source 1..75: mol_type = other DNA
caaccgctcacaggcgttattccgcgaactgtatccggcgctaaaacaaattcaatcgaactattccggcagatg

SEQ ID NO: 434475 - DNA, 75 bp, synthetic construct
  source 1..75: mol_type = other DNA
gcattattccgcgaactgtatccggcgctaaaacaaattcaatcgaactattccggcagatgctacgactacggt

SEQ ID NO: 434476 - DNA, 75 bp, synthetic construct
  source 1..75: mol_type = other DNA
tgctgtaaatatgctagtcagcaaaaagcatctaatgaaccgccccgggtttcctggagagtgttttatctgtga

SEQ ID NO: 434477 - DNA, 75 bp, synthetic construct
  source 1..75: mol_type = other DNA
ctgaattttaatcaacaatgctggcagcctgcgaatgcaataaaactcaatcagatgctttctctgcaaccttgt

SEQ ID NO: 434478 - DNA, 75 bp, synthetic construct
  source 1..75: mol_type = other DNA
caggcgcggtacaaatcttttatggtgatgaatcctcgcgtccgttcggccctacaggttctgatccgctgcaag

SEQ ID NO: 434479 - DNA, 75 bp, synthetic construct
  source 1..75: mol_type = other DNA
caggcgcggtacaaatcttttatggcgatgaatcctcgcgtccgttcggtcctacaggttctgatccgctgcaag

SEQ ID NO: 434480 - DNA, 75 bp, synthetic construct
  source 1..75: mol_type = other DNA
acatctatggatttaggacatggtgatggtcgtggcgattatattaaacgggtttatagtcagaaaggggatgtt

SEQ ID NO: 434481 - DNA, 75 bp, synthetic construct
  source 1..75: mol_type = other DNA
aataaattgcaggttatttttggcactaaaggcgggcgggccaggatgacaacagtggtcgatcgaccaaaggtg

SEQ ID NO: 434482 - DNA, 75 bp, synthetic construct
  source 1..75: mol_type = other DNA
acttatcaataagccaaccttgcatactgcaatagaacgctatcgtaatattcttcgtgatgccggaatgacagg

SEQ ID NO: 434483 - DNA, 75 bp, synthetic construct
  source 1..75: mol_type = other DNA
gtgattatcagtatgtggtggataacctgcgcaacatggggctgtttatgcaggcgtttggtgttgacggacagg

SEQ ID NO: 434484 - DNA, 75 bp, synthetic construct
  source 1..75: mol_type = other DNA
gtcgttccgctcggtggacggttcgtagcgcatttctggcggctgctgaatgatcttgagattccacatgccact

SEQ ID NO: 434485 - DNA, 75 bp, synthetic construct
  source 1..75: mol_type = other DNA
ggcggcggtgttactgcgtccgctcctgtagagctcagggcgctcattgagtacgttacggataagcttaatctg

SEQ ID NO: 434486 - DNA, 75 bp, synthetic construct
  source 1..75: mol_type = other DNA
gcgtctttacgccaaccatcattcagaccattgccgaaaccggcaaagaagggatggtcatgccgtcagagatcg

SEQ ID NO: 434487 - DNA, 75 bp, synthetic construct
  source 1..75: mol_type = other DNA
gattgccaatacgattttgttcctcgcctctgatctcgccagccatatcaccctacaggatgtcgtggtggatgg

SEQ ID NO: 434488 - DNA, 75 bp, synthetic construct
  source 1..75: mol_type = other DNA
gggtaactggcgcggggaaaggtattggctacgccacggcgctggcgtttgttgaggcgggagcgaaagttacag

SEQ ID NO: 434489 - DNA, 75 bp, synthetic construct
  source 1..75: mol_type = other DNA
ctggtcaatgcggcgggaattttacgcatgggcgcgacagaccaactgagcaaagaggactggcagcagactttt

SEQ ID NO: 434490 - DNA, 75 bp, synthetic construct
  source 1..75: mol_type = other DNA
gagagtgggttaaccgaccgcgtgctcgacgacccgcaccatccgtatacccagttgctggtgtcatcggttttg

SEQ ID NO: 434491 - DNA, 75 bp, synthetic construct
  source 1..75: mol_type = other DNA
atctccgcgcgtctgacgccgcagcagggggagattcactatgaaaaccgttccctctatggcatgagcgaggcc

SEQ ID NO: 434492 - DNA, 75 bp, synthetic construct
  source 1..75: mol_type = other DNA
gaccgccgccgtttactgcgcaccgaatggggcgtggtacatcagcatccgctcgacggcctgcgccgccaggtg

SEQ ID NO: 434493 - DNA, 75 bp, synthetic construct
  source 1..75: mol_type = other DNA
atctgggagttatataaaaatatcagaagaattaagttatttatccgtcgagttgaatgttttcgatatattagc

SEQ ID NO: 434494 - DNA, 75 bp, synthetic construct
  source 1..75: mol_type = other DNA
gttcgcggcggtatcaaagtcaccactgccagcgtcgccagcgatggtaacctggcgattacctgctcgcgcggc

SEQ ID NO: 434495 - DNA, 75 bp, synthetic construct
  source 1..75: mol_type = other DNA
gttcgtggcggtatcaaagtcaccactgccagcgtcgccagcgatggcaacctggcaattacctgctcgcgcggc

SEQ ID NO: 434496 - DNA, 75 bp, synthetic construct
  source 1..75: mol_type = other DNA
tcttgatttctcgattaatgacattaccgcctggaacaaaagcatcattgggcatatggcctatgactccacctc

SEQ ID NO: 434497 - DNA, 75 bp, synthetic construct
  source 1..75: mol_type = other DNA
accacgatgtacgcacgatcgttacgcttgggcgttccatcggattcgaccccaaaatggacatgcctttcgatg

SEQ ID NO: 434498 - DNA, 75 bp, synthetic construct
  source 1..75: mol_type = other DNA
taaccggcacgcagacaatacgaaatatttaaaagtctggggtaacggggccaccttcgacaacgtaattttacg

SEQ ID NO: 434499 - DNA, 75 bp, synthetic construct
  source 1..75: mol_type = other DNA
gaaactgctggcggagtcattgatcgggacacctttaaatggtggcttaagcaatcacgcgaagcgcaatctgcc

SEQ ID NO: 434500 - DNA, 75 bp, synthetic construct
  source 1..75: mol_type = other DNA
cgggcttggcagtagcctcaccatcaagcaggtcgccgactttgatgcacaaatgcggcgtatgggaaccaatgc

SEQ ID NO: 434501 - DNA, 75 bp, synthetic construct
  source 1..75: mol_type = other DNA
atcccgcaactcacgtggaccaaagacgccagcgctggttacaccacaaaccgcatcaggatttaatctccttga

SEQ ID NO: 434502 - DNA, 75 bp, synthetic construct
  source 1..75: mol_type = other DNA
gtgattatcagtatgtggtggacaacctccgcaacatggggctgatgatgcaggcgttcggtgttgacggacagg

SEQ ID NO: 434503 - DNA, 75 bp, synthetic construct
  source 1..75: mol_type = other DNA
cgtgagcaggcgcttgatgcggtaaggcaactggcaccctccgttatttctaaaactcagggttatgatcctgat

SEQ ID NO: 434504 - DNA, 75 bp, synthetic construct
  source 1..75: mol_type = other DNA
atgagagaagccacgctgtatgctcttctgtcccaactggccggagggcaggtttatccttatgtggtcccgctg

SEQ ID NO: 434505 - DNA, 75 bp, synthetic construct
  source 1..75: mol_type = other DNA
acggagggaaagcctgcggtatctccgccgtggctggtgttttctgtggtgtctgacacggcatctgatgtgctt

SEQ ID NO: 434506 - DNA, 75 bp, synthetic construct
  source 1..75: mol_type = other DNA
ggaaacggtctgatgtaatgattgaccttgaaacaatgggtactaacacatgtgctccaattgtttctatcgggg

SEQ ID NO: 434507 - DNA, 75 bp, synthetic construct
  source 1..75: mol_type = other DNA
gcgggccaggagacggctttaatattacctggcgcggtcgcaccgattgcagtgaacttcatgtcgatattgacg

SEQ ID NO: 434508 - DNA, 75 bp, synthetic construct
  source 1..75: mol_type = other DNA
atgtactgctggccctttctgctgcatggatagcaaaacagatccctgatatacaacataacggagtcttacctg

SEQ ID NO: 434509 - DNA, 75 bp, synthetic construct
  source 1..75: mol_type = other DNA
cggattgaacaggcctgtttatttgccgagtttgttgagtgcagcgctgagcgtatcaacaaccgactcgttgat

SEQ ID NO: 434510 - DNA, 75 bp, synthetic construct
  source 1..75: mol_type = other DNA
aaggggcgatagaaggcattcaaactcgcgaccaggcgctattgaccgaatgtcgtagtttgctctacggccaat

SEQ ID NO: 434511 - DNA, 75 bp, synthetic construct
  source 1..75: mol_type = other DNA
atgccagcgcctctatatggtgcggacgacgcgcgccgctgttccggcaattccgtatcggaggtgctggataaa

SEQ ID NO: 434512 - DNA, 75 bp, synthetic construct
  source 1..75: mol_type = other DNA
atgccagcgcctatgtatggtgcggatgacccgcgccgctgttccggcaaatcagtatcggaggtgctggataaa

SEQ ID NO: 434513 - DNA, 75 bp, synthetic construct
  source 1..75: mol_type = other DNA
ccatgggcgacgctcatgaacaggcaatgagtgaacttagcaaacaaagtagccagaagccgctcatcaagctat

SEQ ID NO: 434514 - DNA, 75 bp, synthetic construct
  source 1..75: mol_type = other DNA
tgcgtaaactcgatttaggtagagcgcatgacaagctttcagccttagcgcaagaagtgggtttaaacctgcaca

SEQ ID NO: 434515 - DNA, 75 bp, synthetic construct
  source 1..75: mol_type = other DNA
tgttcaatggaggctgcaaatgacttcgctgaggcctatatggctgactataaccgccgttttggcaaagtaccg

SEQ ID NO: 434516 - DNA, 75 bp, synthetic construct
  source 1..75: mol_type = other DNA
gcagccagtgggctaaaaacctcgaagagggcgatcttccggccatcagtgaagccaacatcctaagtacctttg

SEQ ID NO: 434517 - DNA, 75 bp, synthetic construct
  source 1..75: mol_type = other DNA
gcaatatcgatcgcagtatctggcgcgatctcatgctgaagtccgggatgttgactctgatggatgccgaagccc

SEQ ID NO: 434518 - DNA, 75 bp, synthetic construct
  source 1..75: mol_type = other DNA
accgttccgcaaagccacatatacccacttccctgaatatatcgacccgcgcctgcgtaattaccgctcacgcta

SEQ ID NO: 434519 - DNA, 75 bp, synthetic construct
  source 1..75: mol_type = other DNA
gtccattgctctctttgtctaacggtggtgtttatatcaagcgcaaagatcaagatttctctgtcactcgtcagc

SEQ ID NO: 434520 - DNA, 75 bp, synthetic construct
  source 1..75: mol_type = other DNA
cgtatcggcaacacgatgacgatacgtccttctctggtacggatgcggcggctgaacatgctgaacgcagggagg

SEQ ID NO: 434521 - DNA, 75 bp, synthetic construct
  source 1..75: mol_type = other DNA
ttccgtatcggaggtgctggataaattcaggaaaaactacgacaggataatgtcgctaccgcaggaaacgaaaga

SEQ ID NO: 434522 - DNA, 75 bp, synthetic construct
  source 1..75: mol_type = other DNA
tattcagaactactctgacaaaccagcatgcgtcatggaacaagttcagcagaacgcttcatataccgaataacg

SEQ ID NO: 434523 - DNA, 75 bp, synthetic construct
  source 1..75: mol_type = other DNA
aaacttgtcacgctaaacccaaaacttaaatcaacggctgctggacgctaccagattctttcccggtggtgggat

SEQ ID NO: 434524 - DNA, 75 bp, synthetic construct
  source 1..75: mol_type = other DNA
gcaataaataaagcaaagcgtcgtgatataattattattgtagaaaaagactttttaatagagtcaataataaaa

SEQ ID NO: 434525 - DNA, 75 bp, synthetic construct
  source 1..75: mol_type = other DNA
atgcagacactgaattcccagcgtaaagctttccttgatatggtggcatggtcagaaggaacagataacggacgg

SEQ ID NO: 434526 - DNA, 75 bp, synthetic construct
  source 1..75: mol_type = other DNA
cgggtatatccagatatagataatttcaccgttgtctcttttcggggaaaagaatattctgttcgctttattaaa

SEQ ID NO: 434527 - DNA, 75 bp, synthetic construct
  source 1..75: mol_type = other DNA
tgctgcgcaacggctggtacaccgaaaactacctcgccagcgccccggcagcactggaacacggcgtatttatcg

SEQ ID NO: 434528 - DNA, 75 bp, synthetic construct
  source 1..75: mol_type = other DNA
atgatcgctattactggtgccactggccaacttggtcactatgttattgaatccttgatgaaaacggttcctgcc

SEQ ID NO: 434529 - DNA, 75 bp, synthetic construct
  source 1..75: mol_type = other DNA
ctacgatcgaataatgtctctaccgcaggaaacgaaagaggaaaaggaatttcgccactgtatatggcttgcaga

SEQ ID NO: 434530 - DNA, 75 bp, synthetic construct
  source 1..75: mol_type = other DNA
aagtgggtgtctctcaagattatttagctttctttctggcggtgtgactcaggctttggaaagtaaactaaatga

SEQ ID NO: 434531 - DNA, 75 bp, synthetic construct
  source 1..75: mol_type = other DNA
ctcggcaacgcgggcagattatgcggcagctgcggcacgcgtgattagcgaagccggtcacgaaggcaaggttta

SEQ ID NO: 434532 - DNA, 75 bp, synthetic construct
  source 1..75: mol_type = other DNA
aagcaggtcacgaaggcaaggtttatgaactggcaggtgatagcgcctggacactgacacagttagcggcggaac

SEQ ID NO: 434533 - DNA, 75 bp, synthetic construct
  source 1..75: mol_type = other DNA
tgcgattcggtttatggacttcgttagtgctcacccgtatgagcaggtatttgatgacgatttatttgtcatccg

SEQ ID NO: 434534 - DNA, 75 bp, synthetic construct
  source 1..75: mol_type = other DNA
cgatacggagcacctgaaacagtcagtcagggacatcctgaccaccccgctggcaagccgggttatgcgacggga

SEQ ID NO: 434535 - DNA, 75 bp, synthetic construct
  source 1..75: mol_type = other DNA
ctggatgcccccaagaatgatgtaacccgccttcagtgcatgagtgccgcagtgatcgccctgacccgccatgaa

SEQ ID NO: 434536 - DNA, 75 bp, synthetic construct
  source 1..75: mol_type = other DNA
gatcatggcaaactgaaacggataatcggcgccacgctgggatttaaatccatgaagacggcttacgccaccatc

SEQ ID NO: 434537 - DNA, 75 bp, synthetic construct
  source 1..75: mol_type = other DNA
aaattgagtggacggttcgcgtgatctccgcactgctgttgctgggtgttctggcggaaatcgcctcctggattg

SEQ ID NO: 434538 - DNA, 75 bp, synthetic construct
  source 1..75: mol_type = other DNA
attttatggtttattcccgtgggactttgtgctgcggaaatggccaccgtcgacggctgggaagaaggtggtgtc

SEQ ID NO: 434539 - DNA, 75 bp, synthetic construct
  source 1..75: mol_type = other DNA
tgcatttattttgatcgcattagcggctatttacctgcactccggtgcgccggttgctatcgaaatggatgcaaa

SEQ ID NO: 434540 - DNA, 75 bp, synthetic construct
  source 1..75: mol_type = other DNA
gcaaaggccaggcttcagcattttattatggtgatcccctgggcgaaatgcgcctggtaagcagagtttttgaaa

SEQ ID NO: 434541 - DNA, 75 bp, synthetic construct
  source 1..75: mol_type = other DNA
cgccaatgatgagcagtgccttaaacaatgtagtagtaaacccgccgtggaacgtaccaccgacgctggcacgca

SEQ ID NO: 434542 - DNA, 75 bp, synthetic construct
  source 1..75: mol_type = other DNA
ggttagcaccacagcatccgcaatattcagcaatgcatgaatctttactgaccttattgagtgactccaaaccgt

SEQ ID NO: 434543 - DNA, 75 bp, synthetic construct
  source 1..75: mol_type = other DNA
ccgggccatcgacagccggggccgcactgtcgatttttatctctcctcccgtcgtaacagcaaagctgcataccg

SEQ ID NO: 434544 - DNA, 75 bp, synthetic construct
  source 1..75: mol_type = other DNA
gaatgcgatcatggcaaactgaaacggataatcggcgccacgctgggatttaaatccatgaagacggcttacgcc

SEQ ID NO: 434545 - DNA, 75 bp, synthetic construct
  source 1..75: mol_type = other DNA
tgatgattgtggatgatcatccacttatgcgacgcggtgttcgtcagttactggagcttgatcctggttttgaag

SEQ ID NO: 434546 - DNA, 75 bp, synthetic construct
  source 1..75: mol_type = other DNA
atggctacatcagtacagacaggtaaagctaagcagctaacattacttgggttcttcgctattacggcatcgatg

SEQ ID NO: 434547 - DNA, 75 bp, synthetic construct
  source 1..75: mol_type = other DNA
attggcggtgatgtggctggaacctggggaatgcgtaatggatatgcctttgattgctggctgatgcagccaacc

SEQ ID NO: 434548 - DNA, 75 bp, synthetic construct
  source 1..75: mol_type = other DNA
tagcgacgttaatccaaaaacttgatgatatctccagcctgacatccagtattggcggtgatgtggctggaacct

SEQ ID NO: 434549 - DNA, 75 bp, synthetic construct
  source 1..75: mol_type = other DNA
ccctcgccctggccggtatttgtcagtcggcacgcctggtgcaacaactcgctcaccaggggcattgtgatggcg

SEQ ID NO: 434550 - DNA, 75 bp, synthetic construct
  source 1..75: mol_type = other DNA
gaagccaacatcctgagtacctttgaacaacttcaccacaataagcaggacgttttcgaacgtgggattatcaat

SEQ ID NO: 434551 - DNA, 75 bp, synthetic construct
  source 1..75: mol_type = other DNA
gccggtggggattcatcttatcaccggaccacagactgaccgggttgccgactaggaaaggatgcagcatctctt

SEQ ID NO: 434552 - DNA, 75 bp, synthetic construct
  source 1..75: mol_type = other DNA
agatcagcttgccgatctggaacggatgttctacctgctggatgggaagaccattcccgataaccggcatgatgt

SEQ ID NO: 434553 - DNA, 75 bp, synthetic construct
  source 1..75: mol_type = other DNA
acctgctgccagcggcattcgctaaaatgaacaaaaatggcgtaccggtaacgctggtcatttcgcagctggtga

SEQ ID NO: 434554 - DNA, 75 bp, synthetic construct
  source 1..75: mol_type = other DNA
cccgctgcgttcgccaaaatgaataaaaatggcgtgccagtaacgctggttatttctcagttggtaattacttcc

SEQ ID NO: 434555 - DNA, 75 bp, synthetic construct
  source 1..75: mol_type = other DNA
aaaatggcgtgccggtaacgctggttatttcccaattggtgatcacttcaattgcgttgattatcctcaccaata

SEQ ID NO: 434556 - DNA, 75 bp, synthetic construct
  source 1..75: mol_type = other DNA
cgcgcagccccgaggagaagcgccgttcgatgagctgggcgcaacgcctcaagcgggtcttttccatcgacgtca

SEQ ID NO: 434557 - DNA, 75 bp, synthetic construct
  source 1..75: mol_type = other DNA
atatggcagccttgtgcctgatttgattgacgaacccatgaataacaccacgcgtctgcaatgcatgagcgctgc

SEQ ID NO: 434558 - DNA, 75 bp, synthetic construct
  source 1..75: mol_type = other DNA
gcgtttatcgtctcgttcctgccgccggataatatccagggtgactcgactgatatgtatgtcgaattactggtg

SEQ ID NO: 434559 - DNA, 75 bp, synthetic construct
  source 1..75: mol_type = other DNA
cattaaccgatatttataaaaaaatacaagatatttatgatcttgaaacaaatgttatcaattcaataaaagcct

SEQ ID NO: 434560 - DNA, 75 bp, synthetic construct
  source 1..75: mol_type = other DNA
tgatttatttaaattaatgaatagcaaggtttttaaattaaccaacggcataattgaagacttttcaaaaataag

SEQ ID NO: 434561 - DNA, 75 bp, synthetic construct
  source 1..75: mol_type = other DNA
ataaagagcctaagtctagaggtattaaaacatatagacttatacgttctatcgaccgtttgcgtagtagtgagg

SEQ ID NO: 434562 - DNA, 75 bp, synthetic construct
  source 1..75: mol_type = other DNA
aatttcgacatgcgcgagcgtctgaacgtggtggactgcggcgatctggtatatgccttcggcgatgcccgtgag

SEQ ID NO: 434563 - DNA, 75 bp, synthetic construct
  source 1..75: mol_type = other DNA
ctttaatacgtttgacacaacgaaatctgcaggaacgactactccacagccccaactggcgactgtaggggttac

SEQ ID NO: 434564 - DNA, 75 bp, synthetic construct
  source 1..75: mol_type = other DNA
tatgctatggttgggacggaacgcaaaaaaagataatatatcaaaactttacttcttggctcgtgaaggctggtt

SEQ ID NO: 434565 - DNA, 75 bp, synthetic construct
  source 1..75: mol_type = other DNA
agtatgagcataaaatcggtgacctgattgtccgatttaaagaggctggcggggtagtaaatgaagttgagctat

SEQ ID NO: 434566 - DNA, 75 bp, synthetic construct
  source 1..75: mol_type = other DNA
aggtgaagctatgggggttattctccagtctgatggcgaaaagactatctatatagttggtgatactatctggat

SEQ ID NO: 434567 - DNA, 75 bp, synthetic construct
  source 1..75: mol_type = other DNA
tacagtgaccacccgttcgcgcatggccgaccggcgaaggtgtttaaccggcgcggtgaaaaatcaacggcctcc

SEQ ID NO: 434568 - DNA, 75 bp, synthetic construct
  source 1..75: mol_type = other DNA
cttacaagttagtgctcattactcttttcaatcggatacaccatactccaatcagatggagtttttacttgatgt

SEQ ID NO: 434569 - DNA, 75 bp, synthetic construct
  source 1..75: mol_type = other DNA
gagaatgaaataagtttggctaacttatttatagatagatcaaaatatgagataaacacacttacaccatttaaa

SEQ ID NO: 434570 - DNA, 75 bp, synthetic construct
  source 1..75: mol_type = other DNA
aaagaaaattgaaaatatttccagtaccctatcaaactatttggatgatcattatgatgttattttgctttggga

SEQ ID NO: 434571 - DNA, 75 bp, synthetic construct
  source 1..75: mol_type = other DNA
aaaaaatttcgaatctctagtattaatgctgcaacatactatagtcgggattcaatggctaagaaaatgattgag

SEQ ID NO: 434572 - DNA, 75 bp, synthetic construct
  source 1..75: mol_type = other DNA
gttctacatcaagctgcgggatattgatgaccggagcgcgttgattagcttcctgaaggaagcggaaatcatggc

SEQ ID NO: 434573 - DNA, 75 bp, synthetic construct
  source 1..75: mol_type = other DNA
ctgcgccttcctctgttctacaatttgtcgcccgtcaatcaacgcacggtaattgcgaccttgttgaactacttc

SEQ ID NO: 434574 - DNA, 75 bp, synthetic construct
  source 1..75: mol_type = other DNA
ccacttacaaagggcgtgcactgggaaccattggtcatattggctgctttagcttccatgaaaccaaaaactaca

SEQ ID NO: 434575 - DNA, 75 bp, synthetic construct
  source 1..75: mol_type = other DNA
atgaccccaaacggggaaatgtattatcctgatgctgtttatagttcagatttttcatcgcaagcaatgcctggt

SEQ ID NO: 434576 - DNA, 75 bp, synthetic construct
  source 1..75: mol_type = other DNA
tgaacgtctgaacatgaatgatttacaaaacaaatggcctgagctttttctgcatgatatgccagagcaagatag

SEQ ID NO: 434577 - DNA, 75 bp, synthetic construct
  source 1..75: mol_type = other DNA
cgcgaaaatcgtctttgtggatgttcgcccggacactatgaacatcgacgaaacgctgattgaagcggcgatcac

SEQ ID NO: 434578 - DNA, 75 bp, synthetic construct
  source 1..75: mol_type = other DNA
gtcatgctttagatgtgcaaaaattacgtaacccgaaagtgacattctggtcagtatgggaaggcgaacaactcg

SEQ ID NO: 434579 - DNA, 75 bp, synthetic construct
  source 1..75: mol_type = other DNA
agaaagcacggttttgttgactgcgagccctttgctgattaccagcacgatccaaatagccgttttatgtcttta

SEQ ID NO: 434580 - DNA, 75 bp, synthetic construct
  source 1..75: mol_type = other DNA
atgttcacgattaaaacagatgatctcacccatccagcagtgcaagcattagtggcttaccatatttccggcatg

SEQ ID NO: 434581 - DNA, 75 bp, synthetic construct
  source 1..75: mol_type = other DNA
aattattcgccggattattcttgataaggaacttgaagagggagactggtcgggatggtctgtcagtgtgcatag

SEQ ID NO: 434582 - DNA, 75 bp, synthetic construct
  source 1..75: mol_type = other DNA
taaaagtcatcggcgtacatattgatggcgctatgcaagaagtggtttcgcatccggctcacttaattcacaaaa

SEQ ID NO: 434583 - DNA, 75 bp, synthetic construct
  source 1..75: mol_type = other DNA
gtgagttttatctgcgagtggggtttgaaccatcgcctgtcgattctatgatactgatggcaacattggctgatt

SEQ ID NO: 434584 - DNA, 75 bp, synthetic construct
  source 1..75: mol_type = other DNA
gtcagaaggaacagataacgggcgacaaccgacacgtaaccacggttatgacgttattgtggggggcgaactgtt

SEQ ID NO: 434585 - DNA, 75 bp, synthetic construct
  source 1..75: mol_type = other DNA
cagccgtgtgtcaacgggcagtttctacatcaaggatccccgtcttggtatgctattgatgatgcaaccggaacc

SEQ ID NO: 434586 - DNA, 75 bp, synthetic construct
  source 1..75: mol_type = other DNA
aagacttctctccgaaaagccaggacgctgtggcactgcaacagattaaagagcgtggcgctttaccgatgattg

SEQ ID NO: 434587 - DNA, 75 bp, synthetic construct
  source 1..75: mol_type = other DNA
caaccgacacgtaaccacggttatgacgttattgttggtggcgaactgttcgctgattactccgatcaccctcgc

SEQ ID NO: 434588 - DNA, 75 bp, synthetic construct
  source 1..75: mol_type = other DNA
tatgaacataaaatcggtgacctgattgcccggtttaaagaggctggtggggtggtaaatgaagttgagctataa

SEQ ID NO: 434589 - DNA, 75 bp, synthetic construct
  source 1..75: mol_type = other DNA
attattgttgaacaaataaataataaattattttcttcatacaaggtactattcattccaactttcccaaatgtt

SEQ ID NO: 434590 - DNA, 75 bp, synthetic construct
  source 1..75: mol_type = other DNA
attttgataatgttaaaatattatcggatgatataacatctccctctttgcacgataaaaggattttcttggggg

SEQ ID NO: 434591 - DNA, 75 bp, synthetic construct
  source 1..75: mol_type = other DNA
aaatgcaaaataaaacacttgattggattagcatcatcttctttggtatacgcacctttagtttataaagagtgt

SEQ ID NO: 434592 - DNA, 75 bp, synthetic construct
  source 1..75: mol_type = other DNA
aaccatgaacaaaagcagatgttcattcagcatttaacatcaaccttatataataacaaggtattaaacaaccct

SEQ ID NO: 434593 - DNA, 75 bp, synthetic construct
  source 1..75: mol_type = other DNA
agagaacatcattgctgcggcgcaagcgggggccagtggctatgtggtgaagccattttaccgccgcgacgctgg

SEQ ID NO: 434594 - DNA, 75 bp, synthetic construct
  source 1..75: mol_type = other DNA
cgaccgttgcagcaatatctgggcttcactgccgggcgctggttacggtcagtatgaacataaaatcggtgacct

SEQ ID NO: 434595 - DNA, 75 bp, synthetic construct
  source 1..75: mol_type = other DNA
aaacttgtcacgctaaacccgaaacttaaatcaacagccgcaggacgttatcagcttctttcacgctggtgggat

SEQ ID NO: 434596 - DNA, 75 bp, synthetic construct
  source 1..75: mol_type = other DNA
aagacttctctcccaaaagccaggacgcagtggcattgcagcagattaaagagcgtggcgctttaccgatgattg

SEQ ID NO: 434597 - DNA, 75 bp, synthetic construct
  source 1..75: mol_type = other DNA
aatatgaacataaaatcggtgacctgattgcccgattcaaagaggctggcggggtggtaaatgaagttgagctat

SEQ ID NO: 434598 - DNA, 75 bp, synthetic construct
  source 1..75: mol_type = other DNA
cgctgtggcactgcaacagattaaggagcgtggcgctttaccgatgattgatcgcggtgatatccgtcaggcaat

SEQ ID NO: 434599 - DNA, 75 bp, synthetic construct
  source 1..75: mol_type = other DNA
atgcaggaactaaatcctcagcgtaaagctttccttgatatggtggcctggtcagaaggaacggataacgggcga

SEQ ID NO: 434600 - DNA, 75 bp, synthetic construct
  source 1..75: mol_type = other DNA
aatgacctgtcacacttcccggtgccattctttgacccgcgtgataaccgtactaacaccttgccgatggtcttt

SEQ ID NO: 434601 - DNA, 75 bp, synthetic construct
  source 1..75: mol_type = other DNA
ggtgctggcggctatcagtgtgatattgctggcatgggtactgtggcgtttgctgcgtattatcagccgtcgtcg

SEQ ID NO: 434602 - DNA, 75 bp, synthetic construct
  source 1..75: mol_type = other DNA
gcgaccaaccagctgcgcttcgactttgagtatatgaacccgatgccgggcggttcggtggataactgtattacc

SEQ ID NO: 434603 - DNA, 75 bp, synthetic construct
  source 1..75: mol_type = other DNA
cttaccgtaaacagcttggcctgaaagatttttctccagaaagccaggacgctgtagctctgcagcagattaaag

SEQ ID NO: 434604 - DNA, 75 bp, synthetic construct
  source 1..75: mol_type = other DNA
ggcgtgctgccagtgaccaaagaacagttgggtaaaaaaacgctggcgcaaatgcccattaacccactgtttatt

SEQ ID NO: 434605 - DNA, 75 bp, synthetic construct
  source 1..75: mol_type = other DNA
gcaaagatgccgacatcatgatcgtcggtggtatcccggacaaactgaaagacgataagcagatcgacctgttgg

SEQ ID NO: 434606 - DNA, 75 bp, synthetic construct
  source 1..75: mol_type = other DNA
agtttctgaacaccgtgggagcagccagagtatacgggcgggacattcatacgggggccggtgaatggaaaacac

SEQ ID NO: 434607 - DNA, 75 bp, synthetic construct
  source 1..75: mol_type = other DNA
tgacatttgatggttctcagtggcgtacagtcagcgtgggtgagtatgtgtcgtcaggagcttcggggtttgagt

SEQ ID NO: 434608 - DNA, 75 bp, synthetic construct
  source 1..75: mol_type = other DNA
cgtgaaggcggcaatggatgtggcaaatgaagcgaaaacaaaggcagaagaggctgcagcaggaggtggtgttcc

SEQ ID NO: 434609 - DNA, 75 bp, synthetic construct
  source 1..75: mol_type = other DNA
gagcacgaggtgagcgtggggagactggcccccgaggtgaacctggtcctgcaggtccgagaggcgaacgaggag

SEQ ID NO: 434610 - DNA, 75 bp, synthetic construct
  source 1..75: mol_type = other DNA
aaaggtgagcgtggtgacgttggtgctcagggggctgtagggcctgctggtccgcgtggtgagaagggcgaacag

SEQ ID NO: 434611 - DNA, 75 bp, synthetic construct
  source 1..75: mol_type = other DNA
tgatgtggtttttgatttcgtcggtggtggtcccttattatcagagctaaaaaagaaataccaatctagccctaa

SEQ ID NO: 434612 - DNA, 75 bp, synthetic construct
  source 1..75: mol_type = other DNA
tggcctgacgcttttcgatgaactggagcgcaaatcgttaacggcgtctgttggcggttttgcttatatcgctga

SEQ ID NO: 434613 - DNA, 75 bp, synthetic construct
  source 1..75: mol_type = other DNA
caggacctgcgggagcagtggggcccgcaggcccacagggaccggctggtgcagctggtcccaaaggtgatgcag

SEQ ID NO: 434614 - DNA, 75 bp, synthetic construct
  source 1..75: mol_type = other DNA
gtttacgggtacatcgattatctggcaatgaacatgctgcctgacctgtgcgatgagtcctggctggcgcgacat

SEQ ID NO: 434615 - DNA, 75 bp, synthetic construct
  source 1..75: mol_type = other DNA
cgccctaatcaaagacgaaaacggaaactatatgaaagctaacaccgatggcattgacggcatactatcctcagt

SEQ ID NO: 434616 - DNA, 75 bp, synthetic construct
  source 1..75: mol_type = other DNA
cagggtgttccggggccggttggtccggcaggtcctgcgggtaaaacggggccacgaggtttgcagggagaaaca

SEQ ID NO: 434617 - DNA, 75 bp, synthetic construct
  source 1..75: mol_type = other DNA
gggcagattgaacaggattgcgattattgggtggggatccatcgtgaaggtgcttttgatgacagtgttccacct

SEQ ID NO: 434618 - DNA, 75 bp, synthetic construct
  source 1..75: mol_type = other DNA
atgggggtaaagaaaatcgttatgctggctattttagtcagctttgtggcgggatgtgcgccattacatccttca

SEQ ID NO: 434619 - DNA, 75 bp, synthetic construct
  source 1..75: mol_type = other DNA
cgtaccacgcggcgagttcggttaaccccggatgggatgacctattaccaacgggcaaaagacatattgagtaac

SEQ ID NO: 434620 - DNA, 75 bp, synthetic construct
  source 1..75: mol_type = other DNA
ccggtctggggattattcagatcccgcgcattgccgtgcgcgaagccctgcgtgccgggcggcttattgaagtgt

SEQ ID NO: 434621 - DNA, 75 bp, synthetic construct
  source 1..75: mol_type = other DNA
agccatgaccgtccggtagatattcttcatgatggttttgattgcgtgatacgcactggcgcgttaccggaagat

SEQ ID NO: 434622 - DNA, 75 bp, synthetic construct
  source 1..75: mol_type = other DNA
agctgtcacgggaaaaaacagcgtatttttctgcggttgaaaaagcaatgaacatcacgcttaccgatgagcaga

SEQ ID NO: 434623 - DNA, 75 bp, synthetic construct
  source 1..75: mol_type = other DNA
tgtatttgcgatatctccatgcccgatatctccggtctggaactgctaagccagctgccgaaaggtatggcgaca

SEQ ID NO: 434624 - DNA, 75 bp, synthetic construct
  source 1..75: mol_type = other DNA
tccacactatctgacgcgctttggttatccgcaaagccccgacgatctgacttcacacgcaatagtgcgttacac

SEQ ID NO: 434625 - DNA, 75 bp, synthetic construct
  source 1..75: mol_type = other DNA
caaaattaagtacatatacatttgcaatgaagctgacatcagatgcaaacctaaagaaaagcctgcccaaaaacc

SEQ ID NO: 434626 - DNA, 75 bp, synthetic construct
  source 1..75: mol_type = other DNA
tgcaattgtaaattttcactacacctctggctcataccaacgaaacggtgctgcttttgttacgagttatctgat

SEQ ID NO: 434627 - DNA, 75 bp, synthetic construct
  source 1..75: mol_type = other DNA
ataatgctctctgttcatgacagtccggcgctggttgagcaggcgcttaacgcggggggcacgcggctttctctc

SEQ ID NO: 434628 - DNA, 75 bp, synthetic construct
  source 1..75: mol_type = other DNA
aggataccaccagcatcagcggtaaattgcgcgtcgatatcccggtcggaatggcgaaaaatttgttgctgccgc

SEQ ID NO: 434629 - DNA, 75 bp, synthetic construct
  source 1..75: mol_type = other DNA
gccagatacaggcactggaacatcaacttggcacccagcttctccagcgcaccacgcgacgggtcaaactcacgc

SEQ ID NO: 434630 - DNA, 75 bp, synthetic construct
  source 1..75: mol_type = other DNA
gcttggcacccagctcctccagcgtaccacgcggcgggtacaactgacgccggatggtatgacctattatcaacg

SEQ ID NO: 434631 - DNA, 75 bp, synthetic construct
  source 1..75: mol_type = other DNA
tattcagcgcgatgacctggttcagtacacggcaactgccgatgcaaccagctccggtggtgtcctgcgcgtgcc

SEQ ID NO: 434632 - DNA, 75 bp, synthetic construct
  source 1..75: mol_type = other DNA
aaatcatcgccggagagagtatgctcggcggtgcacgaatggaagtgatttttggtcgccagcattcttcgccaa

SEQ ID NO: 434633 - DNA, 75 bp, synthetic construct
  source 1..75: mol_type = other DNA
aattggctactacctgcatcgcgccagtatgcgcggtggaacattacttagccgcgaattgcatcctgtcgcccc

SEQ ID NO: 434634 - DNA, 75 bp, synthetic construct
  source 1..75: mol_type = other DNA
gctggacaaggctcccccctggtcactgtatcagaccttacacggggtgaattatctgttcagtatttcatccat

SEQ ID NO: 434635 - DNA, 75 bp, synthetic construct
  source 1..75: mol_type = other DNA
gttaagaccaacggcctgcgccgccgtgtgaaggccacccgtataagcggatgcacggtttactgggaagtatga

SEQ ID NO: 434636 - DNA, 75 bp, synthetic construct
  source 1..75: mol_type = other DNA
gcgaggatcattcgatacaacggcagttacaggaagtacgggaagatgacgacgatgctgagatgacccactcgg

SEQ ID NO: 434637 - DNA, 75 bp, synthetic construct
  source 1..75: mol_type = other DNA
gcggtgctgcaaagtacgctgcgttctctgcgtagtgaaaagatgagcgtcagtgatgctgagccggtaatgctg

SEQ ID NO: 434638 - DNA, 75 bp, synthetic construct
  source 1..75: mol_type = other DNA
ggagagaattcaggcaatacgaaaacatgtattatccggtcagaatctggccacagcaatgcgaaattccggtta

SEQ ID NO: 434639 - DNA, 75 bp, synthetic construct
  source 1..75: mol_type = other DNA
ttgccgtctgcctctacccccttctgctgctttcgctctgtgtggtgaatatgtacaacgcccatacccgtatca

SEQ ID NO: 434640 - DNA, 75 bp, synthetic construct
  source 1..75: mol_type = other DNA
tatcgcttttgctactgctgattctgttataaccgttggaaacccagctaatcctaaagcaggaaataatagcga

SEQ ID NO: 434641 - DNA, 75 bp, synthetic construct
  source 1..75: mol_type = other DNA
gcgggaacatcgccgaagccctgttccaggtcgcaaaaaccgtgaaagcacggcgggaaatggtgagcagtctca

SEQ ID NO: 434642 - DNA, 75 bp, synthetic construct
  source 1..75: mol_type = other DNA
acgcctgcaagagcatttcaccgttcaccaggtggcaaacctcagcccacaaaccgtcgaacaaaatgcagcaat

SEQ ID NO: 434643 - DNA, 75 bp, synthetic construct
  source 1..75: mol_type = other DNA
tttttaatatttcatccatgctgcagataaataattcctttatctcatgcccttaccagaatagaaaaacatgca

SEQ ID NO: 434644 - DNA, 75 bp, synthetic construct
  source 1..75: mol_type = other DNA
cctggcgactgggtttcgttggagagaaaagtattgcgaagatgtacgccaccccagacggtgggattgccgtca

SEQ ID NO: 434645 - DNA, 75 bp, synthetic construct
  source 1..75: mol_type = other DNA
cacgacggcgacggtgaccgcagccgatggtcttctccgggtgcctgttgtggcagatgaaccgggggcggcggg

SEQ ID NO: 434646 - DNA, 75 bp, synthetic construct
  source 1..75: mol_type = other DNA
atccttttcgaagaaataaccagaatgcaccgggagcaaaagccagtagatggcctgacgcttttcgatgaactg

SEQ ID NO: 434647 - DNA, 75 bp, synthetic construct
  source 1..75: mol_type = other DNA
cagtccgggaagccgcaatggagcgctacggtatcaaccgtctgaccgaagctactgagctgctgtattcccgca

SEQ ID NO: 434648 - DNA, 75 bp, synthetic construct
  source 1..75: mol_type = other DNA
caacgctggccgaaaacatcagcatgatccgcaccgacctttttgcacggcttgacatcaatgatgagcttcgcc

SEQ ID NO: 434649 - DNA, 75 bp, synthetic construct
  source 1..75: mol_type = other DNA
cgatcgcctgctcaagtgcaggcgcgggcggtaacgctgacgacggtacgtcattaatcctggtcacgccggtga

SEQ ID NO: 434650 - DNA, 75 bp, synthetic construct
  source 1..75: mol_type = other DNA
ggcctgaaggtgactgccgggagcgtgattcagcgcgatgacctggttcagtacacggcaactgctgatgcaacc

SEQ ID NO: 434651 - DNA, 75 bp, synthetic construct
  source 1..75: mol_type = other DNA
ccaaacagctatttgtgaggctgtctggagtcgctataaaggaaacatccccgcgtcaactcagagaaaagtagt

SEQ ID NO: 434652 - DNA, 75 bp, synthetic construct
  source 1..75: mol_type = other DNA
gcgtgaagacgctgctgtcacgctgtcgcgcattaccgccttgctggtggggattgttacccgcaccacctattt

SEQ ID NO: 434653 - DNA, 75 bp, synthetic construct
  source 1..75: mol_type = other DNA
atgaaaagattgattctcgcggcgctgatcgttctccccttcgcctcaagtgcaaccacatttacctgtaaggcg

SEQ ID NO: 434654 - DNA, 75 bp, synthetic construct
  source 1..75: mol_type = other DNA
cccatgtggaaagttaatgtccccttgaaaaataaaagcacttcaaatcacgaactttgcgagcgatggatgctg

SEQ ID NO: 434655 - DNA, 75 bp, synthetic construct
  source 1..75: mol_type = other DNA
cgttatcggtggcctgctgctggatgatgacaacagcgagcgagtccagaaggttctggcgatgctcaagcctga

SEQ ID NO: 434656 - DNA, 75 bp, synthetic construct
  source 1..75: mol_type = other DNA
gtcttatcgaacagctcagacacatggtccaaatgctggtcgatccgttcggccagtttttcgatggcctcttgc

SEQ ID NO: 434657 - DNA, 75 bp, synthetic construct
  source 1..75: mol_type = other DNA
ccttccccctcagttcaggacaaaccagccagctctgacaataccaacgtcaatggcgaagacatggctgagatt

SEQ ID NO: 434658 - DNA, 75 bp, synthetic construct
  source 1..75: mol_type = other DNA
ttatgtaattctttaccgtgtagccacttcaagtattgaaattgtgagtatcgtgcacgccagacgccagttccc

SEQ ID NO: 434659 - DNA, 75 bp, synthetic construct
  source 1..75: mol_type = other DNA
cctccaagcgagcgagttcttggtcttcgtgaaattgtaactcatcctaactacatcatcctttaccgagtaaca

SEQ ID NO: 434660 - DNA, 75 bp, synthetic construct
  source 1..75: mol_type = other DNA
agcattactgaccagagaaccaggcccgtggataaccgaactgaaaaaatgtcgtccggccagtgtggcaatcgt

SEQ ID NO: 434661 - DNA, 75 bp, synthetic construct
  source 1..75: mol_type = other DNA
gtaccttcctggcggcaggttctttacttgccactctgcctgttctcccgactcctttcgcccgcgcgcaggaac

SEQ ID NO: 434662 - DNA, 75 bp, synthetic construct
  source 1..75: mol_type = other DNA
ggcggtaagcaatggaaagggctgatgacccgtcgtgagattgagcgtgaagtctgtttgtgggggcagcaatga

SEQ ID NO: 434663 - DNA, 75 bp, synthetic construct
  source 1..75: mol_type = other DNA
aagctattcttgatcgcgcggcgaatctaagctgcgcttcctggttgaaagagcatcttcagcagcctgaaaaaa

SEQ ID NO: 434664 - DNA, 75 bp, synthetic construct
  source 1..75: mol_type = other DNA
aaatggaaaccttccgtacaatggtgcgcgaaccggcaaccgtccctgaacaggttgatggcctgcaacaaagcg

SEQ ID NO: 434665 - DNA, 75 bp, synthetic construct
  source 1..75: mol_type = other DNA
cgtctgaattccccatgggcagaacaagcccggcagttggttgatgctaacagcacaataacttcagcgttacac

SEQ ID NO: 434666 - DNA, 75 bp, synthetic construct
  source 1..75: mol_type = other DNA
ctgctcgtgatgatttgcgccagatcgtagcctacatagctaaagaaaatcccgcggcagcacgcagaatgaaaa

SEQ ID NO: 434667 - DNA, 75 bp, synthetic construct
  source 1..75: mol_type = other DNA
ctacataatcctatacagggtagcgacttcaagcattgaaattgtaagcgtgatacatgctcgtcagcaatatcc

SEQ ID NO: 434668 - DNA, 75 bp, synthetic construct
  source 1..75: mol_type = other DNA
ttaagatctgcgctggcggtatggcaggcaccacggcagcggcactgggttttgcacccagcgtagcgctcgcgg

SEQ ID NO: 434669 - DNA, 75 bp, synthetic construct
  source 1..75: mol_type = other DNA
gctgtggtttattgaagaaaagaaactgatcgaaaccgctgaagatgtcacgcacacccttcataacacctattc

SEQ ID NO: 434670 - DNA, 75 bp, synthetic construct
  source 1..75: mol_type = other DNA
aacggtgaagtggtcggaacggtgatgggcggttatgacgggcatcgcgggtctgcttattatcttggcgtgcat

SEQ ID NO: 434671 - DNA, 75 bp, synthetic construct
  source 1..75: mol_type = other DNA
gtatgaacgtctggaatatgaacacgccgatgtgctgagtctgggtaagcgtttgattgaagatgaagagtactg

SEQ ID NO: 434672 - DNA, 75 bp, synthetic construct
  source 1..75: mol_type = other DNA
tttccttggcgaagttgcactacgtagtctttatacctttgtactggtttttttgttcctcaaaatgaccggaag

SEQ ID NO: 434673 - DNA, 75 bp, synthetic construct
  source 1..75: mol_type = other DNA
agtgcctctgacagagcctcagaaggtgggtatcgcatccttctgcccgtataacatcggccccggtaaatgctt

SEQ ID NO: 434674 - DNA, 75 bp, synthetic construct
  source 1..75: mol_type = other DNA
tataagcgaattaatgctggcgatacgaaaggagcctgtgaagctatccgctggtggattaaagacggtggccgc

SEQ ID NO: 434675 - DNA, 75 bp, synthetic construct
  source 1..75: mol_type = other DNA
atgatagtgtagacttgcgaaatataaaatgccctgaaggttcagagagagtaggcgattatcacactcacggtt

SEQ ID NO: 434676 - DNA, 75 bp, synthetic construct
  source 1..75: mol_type = other DNA
acgcggtgtgcggcagatgtcgctgtttgaagtgttaatcattctgacgctgggttcagcggcgggagatgtggc

SEQ ID NO: 434677 - DNA, 75 bp, synthetic construct
  source 1..75: mol_type = other DNA
gcccaagttgttagtaaggtggtgtttgccgatccaaacaaccaggcagcgagtcactggtgcacaggaattgcg

SEQ ID NO: 434678 - DNA, 75 bp, synthetic construct
  source 1..75: mol_type = other DNA
tcatcgaaggtaaagaaggtattaccgtcgttgacccactggtttctgcagaaacagccaaagtgggtatggatc

SEQ ID NO: 434679 - DNA, 75 bp, synthetic construct
  source 1..75: mol_type = other DNA
ttttcttggcgaagtcgctctacgcagtctctatacctttgtactggtctttctgtttcttaaaatgacaggtag

SEQ ID NO: 434680 - DNA, 75 bp, synthetic construct
  source 1..75: mol_type = other DNA
ttttcttggcgaagtcgctctacggagtctctatacctttgttctggtctttctgtttctaaaaatgactggaag

SEQ ID NO: 434681 - DNA, 75 bp, synthetic construct
  source 1..75: mol_type = other DNA
gctattcttgaaaccaacgggcaaatcagcgtctatttctttgaagatgaaaaggtgaaaccgggattacttatt

SEQ ID NO: 434682 - DNA, 75 bp, synthetic construct
  source 1..75: mol_type = other DNA
ggctggtggaaaaacagttgctcacctatcgcctgcacggtgagtcgtggcgtgaaaaagtgatcgaacgcccgg

SEQ ID NO: 434683 - DNA, 75 bp, synthetic construct
  source 1..75: mol_type = other DNA
aactattccgcaagatggcagatctccgccttatcggtatgccagtagacgtatctgtactgtgggacgacctta

SEQ ID NO: 434684 - DNA, 75 bp, synthetic construct
  source 1..75: mol_type = other DNA
atcgtcgcggtggtatcgctcacggtgctattgagaagatcatcactacgtgctggcgcaccaggccaacgctga

SEQ ID NO: 434685 - DNA, 75 bp, synthetic construct
  source 1..75: mol_type = other DNA
tctgacccgtcagcaacctatgacgtcaacctgcaaaccgccgccgctggtattgatattccgacccgcatcctg

SEQ ID NO: 434686 - DNA, 75 bp, synthetic construct
  source 1..75: mol_type = other DNA
ctaccggaaccagcgtcggtctgaccagcgtcagccttggcgtgatccgtgcaatggaacgcaaaggcgttcgtc

SEQ ID NO: 434687 - DNA, 75 bp, synthetic construct
  source 1..75: mol_type = other DNA
taagtctactggttacactggccagtatcgtactctggctacttggttatcattttgaaaataaaggatttcatt

SEQ ID NO: 434688 - DNA, 75 bp, synthetic construct
  source 1..75: mol_type = other DNA
acgcgtttgtggggccggagcgtaataatcacggacatgcagttatcctgaaactccgggaactctatccgacac

SEQ ID NO: 434689 - DNA, 75 bp, synthetic construct
  source 1..75: mol_type = other DNA
gtcgacagctggttcacgtcgaaaacggtaaacactttattatccgaaatattaaggcacgaaatatcaccccgg

SEQ ID NO: 434690 - DNA, 75 bp, synthetic construct
  source 1..75: mol_type = other DNA
atgacattccggaagaatgaaccgcgatgtgatgaaccgtcagaaatgaccggaaccgaacaacgtctgttcatc

SEQ ID NO: 434691 - DNA, 75 bp, synthetic construct
  source 1..75: mol_type = other DNA
ccggatgaagagtatgtttgtggggcagatactgccgaagggctggagcacggagaccgctcatcgctggatgtt

SEQ ID NO: 434692 - DNA, 75 bp, synthetic construct
  source 1..75: mol_type = other DNA
agctattccgcaagatggcagatctccgccttatcagtatgccagtcgatgtatcagttttatgggatgacctga

SEQ ID NO: 434693 - DNA, 75 bp, synthetic construct
  source 1..75: mol_type = other DNA
catacggatgcgacgtcacagagctgcgcgaaaaattcaacgaagcagcggatgaaatgaataaaggtaacgacg

SEQ ID NO: 434694 - DNA, 75 bp, synthetic construct
  source 1..75: mol_type = other DNA
cgtttatgacgcgaaaggctccatgaatgcacaggaaggctgttttgatgatcaactcatgagctacatgattgc

SEQ ID NO: 434695 - DNA, 75 bp, synthetic construct
  source 1..75: mol_type = other DNA
cagtatgatgctgcagtaatggctgacgttgcgaaatctaaagcaccgaactctccggttgctggtcgcgctacc

SEQ ID NO: 434696 - DNA, 75 bp, synthetic construct
  source 1..75: mol_type = other DNA
tagcgggcggtttgctgatgatggccactgctggttatgtgcaggcagatgcgctccagcctgatccagcatggc

SEQ ID NO: 434697 - DNA, 75 bp, synthetic construct
  source 1..75: mol_type = other DNA
gcgcaaaagaaactggagctgcagaaactgtttgccgcctatgcgcgagctgataccgatattctgatgggtcag

SEQ ID NO: 434698 - DNA, 75 bp, synthetic construct
  source 1..75: mol_type = other DNA
tcttctttgccatttctggtctggataccggtagtccgtttactgctattggcgcgagccgtgaagcgatgcttg

SEQ ID NO: 434699 - DNA, 75 bp, synthetic construct
  source 1..75: mol_type = other DNA
ccccgctggcgtgagacgttgcgtcgtcgtctgaaggacgcaaccgtcccagcagagctcaccgaagaggtgatg

SEQ ID NO: 434700 - DNA, 75 bp, synthetic construct
  source 1..75: mol_type = other DNA
caggttgatggcttgcagcaaagcgatgatattttacgccttctgccgccggaactggcgactctgggcattact

SEQ ID NO: 434701 - DNA, 75 bp, synthetic construct
  source 1..75: mol_type = other DNA
gttaaatcaacagttattagaagaagaacgcgaacaactgttgagtgaagttcaggaacgcatgacgctaagtgg

SEQ ID NO: 434702 - DNA, 75 bp, synthetic construct
  source 1..75: mol_type = other DNA
atcgggccgatgctgcaaggtatgcgcaaaccggttaacgacctgtcccgtggcgcactggttgacgatatcgtc

SEQ ID NO: 434703 - DNA, 75 bp, synthetic construct
  source 1..75: mol_type = other DNA
ccgttatcagctgactgaacttgcgcgcaaagcgggcaaacgtatcgttctgccggaaggtgacgaaccgcgtac

SEQ ID NO: 434704 - DNA, 75 bp, synthetic construct
  source 1..75: mol_type = other DNA
gaacgtggtatcgcaacttgcgtactgctgggtaatccggcagagatcaaccgtgttgcagcgtctcagggtgta

SEQ ID NO: 434705 - DNA, 75 bp, synthetic construct
  source 1..75: mol_type = other DNA
tcttctttgccatttccggtctggataccggtagcccgtttaccgctatcggcgcgagccgtgaagcgatgcttg

SEQ ID NO: 434706 - DNA, 75 bp, synthetic construct
  source 1..75: mol_type = other DNA
tctctgactgccacttccgagcgcagccgtcgtctgtctccgccagcgttccgttatcagctgaccgaactggcg

SEQ ID NO: 434707 - DNA, 75 bp, synthetic construct
  source 1..75: mol_type = other DNA
tggtttccggtgctgttcacaccaccgcaaacaccatccgtccgccgctgcagctgatcaaaacggctccgggca

SEQ ID NO: 434708 - DNA, 75 bp, synthetic construct
  source 1..75: mol_type = other DNA
cgctgaccactcacggtgatgacagtaccagcgccggggtctttgcgggggatgctggactcagctcactggcaa

SEQ ID NO: 434709 - DNA, 75 bp, synthetic construct
  source 1..75: mol_type = other DNA
aacagcagcaatacgtttgatgatgtgatccccggcgtcaccatgacttttaccgaagtcagcgattctgacagc

SEQ ID NO: 434710 - DNA, 75 bp, synthetic construct
  source 1..75: mol_type = other DNA
gatctgtcggcggcagatcagaacggtgacggcgacggttttatcgacgccagtgaactggtgaatgcgattaac

SEQ ID NO: 434711 - DNA, 75 bp, synthetic construct
  source 1..75: mol_type = other DNA
cgcctgaacttgtttgttatcgtgatatgcttaaatctaattggattggtaatcttactggcatttataatgctt

SEQ ID NO: 434712 - DNA, 75 bp, synthetic construct
  source 1..75: mol_type = other DNA
agtacagacctttgtcgatgcctataacacgctgattgatactgtcgattcgttaaccaccagcggcagcgacag

SEQ ID NO: 434713 - DNA, 75 bp, synthetic construct
  source 1..75: mol_type = other DNA
atgatcaacccaagaaccattgcgcaagaaatcgcctatgccgacgttgccactcaggcggcaaacttgcaggaa

SEQ ID NO: 434714 - DNA, 75 bp, synthetic construct
  source 1..75: mol_type = other DNA
gacagccagtatggcttagcttcttcagtatggacgaaagatgtgggtagagcgcaccgcgtcagcgcacgtctg

SEQ ID NO: 434715 - DNA, 75 bp, synthetic construct
  source 1..75: mol_type = other DNA
gacagtcagtacgggttggcctcttcggtgtggacgaaagatgtcggtcgggcgcatcgtgtgagcgctcgtctg

SEQ ID NO: 434716 - DNA, 75 bp, synthetic construct
  source 1..75: mol_type = other DNA
tttggcagaggcaaaacggtgggcgatccgctgaccggacatcccaaagtgcggatggtgtcgctgacgggctct

SEQ ID NO: 434717 - DNA, 75 bp, synthetic construct
  source 1..75: mol_type = other DNA
cactcaggcggcaaacttgcaggagaagcaaacagagctggatgctgaaagcagcggcctggactcgctcagctc

SEQ ID NO: 434718 - DNA, 75 bp, synthetic construct
  source 1..75: mol_type = other DNA
tacaaacctcaacgcatatcaaactcttgttcttgtggcttttttcgtttttcttttatggaaaggtgtgttatt

SEQ ID NO: 434719 - DNA, 75 bp, synthetic construct
  source 1..75: mol_type = other DNA
cacaggactgaacgcatatcaagctcttgtcgttgttgccttttttgtttttcttttatggaaaggcgtgttatt

SEQ ID NO: 434720 - DNA, 75 bp, synthetic construct
  source 1..75: mol_type = other DNA
gtgacagaaccgttaaccgaaacccctgaactatccgcgaaatatgcctggttttttgatcttgatggaacgctg

SEQ ID NO: 434721 - DNA, 75 bp, synthetic construct
  source 1..75: mol_type = other DNA
atgagacttctgattctgactctttcattaataacgctggcggggtgtacggttactcgccaggcccatgtgagc

SEQ ID NO: 434722 - DNA, 75 bp, synthetic construct
  source 1..75: mol_type = other DNA
ggtttgccgtgcaggtatgatcctgttcgcaatcgcatgttatgccactgagtcaatggtagctcaggcggggca

SEQ ID NO: 434723 - DNA, 75 bp, synthetic construct
  source 1..75: mol_type = other DNA
ttatggctacgatcctcaccccatcacatcctcaatttatatttgtttttgccgccgttcgtcgtgcagaacgta

SEQ ID NO: 434724 - DNA, 75 bp, synthetic construct
  source 1..75: mol_type = other DNA
cgtcatttccaggtatagtttttccgctgtcgcaaaatcggcagccggaattggcgttccgtgtaacttattggc

SEQ ID NO: 434725 - DNA, 75 bp, synthetic construct
  source 1..75: mol_type = other DNA
ggtaacgcaatacgagcaacgggaatttatgcgcgtacgttaactatggatcttacgttactcaccagacagatt

SEQ ID NO: 434726 - DNA, 75 bp, synthetic construct
  source 1..75: mol_type = other DNA
tatgtcagtcgcgggatcgccgatcgcgcatgccagcaggaaggctatacccacgcgatcccctttggtcagcca

SEQ ID NO: 434727 - DNA, 75 bp, synthetic construct
  source 1..75: mol_type = other DNA
accgatgaatctggcttcgcagtcgttaaccggctgggcggaatgtcagtaaaaattggcacaggtgcaactcag

SEQ ID NO: 434728 - DNA, 75 bp, synthetic construct
  source 1..75: mol_type = other DNA
tacagcagggaaagtgtgtcgtcgagattaagccaggaggcaccagtaaagggggggctattgtcgcgtttatgc

SEQ ID NO: 434729 - DNA, 75 bp, synthetic construct
  source 1..75: mol_type = other DNA
ctccctttatcgggcgaacgcccgtatttctgggcgatgatttaaccgatgaatctggcttcgcagtcgttaacc

SEQ ID NO: 434730 - DNA, 75 bp, synthetic construct
  source 1..75: mol_type = other DNA
ccgcacgcctttccctcgttcgcgattacgtcctctcgtttgctggccgcctgccggttgcggaggtgcgcgcat

SEQ ID NO: 434731 - DNA, 75 bp, synthetic construct
  source 1..75: mol_type = other DNA
ccatagcccctgtcagataatggtggtccgggcggggcagctttcgggctggccggtattctgtgaagccggtat

SEQ ID NO: 434732 - DNA, 75 bp, synthetic construct
  source 1..75: mol_type = other DNA
tcctacccccgtccgggctaccacccatgagcgtaggaactccagtggtagctgtaactgttacttcaaggaggc

SEQ ID NO: 434733 - DNA, 75 bp, synthetic construct
  source 1..75: mol_type = other DNA
tgttcgcacttttggctattacaatgccggacaggattgtactgcggcttgtcggatctacgcgcaaaaaggtat

SEQ ID NO: 434734 - DNA, 75 bp, synthetic construct
  source 1..75: mol_type = other DNA
gtcatgagttctcgtatgttatcggaatggcgagagacgttttaatcaatcacacacgagatgttgatattaatg

SEQ ID NO: 434735 - DNA, 75 bp, synthetic construct
  source 1..75: mol_type = other DNA
gagagatgttttaatcaaccatacacgagatgttgatattaatgagccaggcggaccgacgaacctttcagcatg

SEQ ID NO: 434736 - DNA, 75 bp, synthetic construct
  source 1..75: mol_type = other DNA
aaatcaccactgaacagcaggaagccattaaacaactcgtcatgagtcgcggtcagtctctgccaaaagaaaaac

SEQ ID NO: 434737 - DNA, 75 bp, synthetic construct
  source 1..75: mol_type = other DNA
cctggtgccggaaaagcgtcaggaagtgacaaccgaaggcggcctggacgttgcaggtcagcgtgacaaaatgcg

SEQ ID NO: 434738 - DNA, 75 bp, synthetic construct
  source 1..75: mol_type = other DNA
tgcatgaactgaatatcggtcatgccattattggtcgtgcagtgatgaccggactgaaagatgcggtggcagaaa

SEQ ID NO: 434739 - DNA, 75 bp, synthetic construct
  source 1..75: mol_type = other DNA
taccgtgcatttacgtgaagatcgccgccacattacagaccgtgacgtgcgcatcctccgtcagacgctagatac

SEQ ID NO: 434740 - DNA, 75 bp, synthetic construct
  source 1..75: mol_type = other DNA
tggttaactacttcttgcagggcgacccttatcaggggatggtccactttacccgctttttcctgaataccattt

SEQ ID NO: 434741 - DNA, 75 bp, synthetic construct
  source 1..75: mol_type = other DNA
acacacgagatgttgatattaatgagccagacggaccaacgaatctttccgcatggatgagacttaagaataaag

SEQ ID NO: 434742 - DNA, 75 bp, synthetic construct
  source 1..75: mol_type = other DNA
ggcattattccgcgaactgtatccggcattaaaacaaattcaatcgaactattccggaagatgctacgactacgg

SEQ ID NO: 434743 - DNA, 75 bp, synthetic construct
  source 1..75: mol_type = other DNA
gaaaggacttcgctatgacgatgcatacaatatggttcatcagcgttttggtattgacagcattgatgaactttc

SEQ ID NO: 434744 - DNA, 75 bp, synthetic construct
  source 1..75: mol_type = other DNA
ttgacctggccgatgtctgtgggtaaatggacgcttgaagggatcgaaacccgcgcacagctgctggattccgac

SEQ ID NO: 434745 - DNA, 75 bp, synthetic construct
  source 1..75: mol_type = other DNA
cttccagcgtcatgatttcatcgccaatggcggtgaactcaaaccacaagaaaacccgaatgcgcaagcgattca

SEQ ID NO: 434746 - DNA, 75 bp, synthetic construct
  source 1..75: mol_type = other DNA
atgctgatgccaaaactgatgccgaacaggctcaagagctggcgcgcatcgccaaagccgcgacttttgccgcaa

SEQ ID NO: 434747 - DNA, 75 bp, synthetic construct
  source 1..75: mol_type = other DNA
gtgaatgctcacctatcatcatcggggcaattgttatcgccagtgcggctgaagttgcatcaatgatggttaact

SEQ ID NO: 434748 - DNA, 75 bp, synthetic construct
  source 1..75: mol_type = other DNA
ttcaattaattctttaataattataaataaagaaaatcaaggggtgcttgttacatttaacgaagtggagttacc

SEQ ID NO: 434749 - DNA, 75 bp, synthetic construct
  source 1..75: mol_type = other DNA
tttggagtatttcaaatacctagaagatcaattttgtgcagcagcttttaattttctacgcaatactgatatgac

SEQ ID NO: 434750 - DNA, 75 bp, synthetic construct
  source 1..75: mol_type = other DNA
caacgcaggcatttcagtgaaaaaacgcggtgaccttctcgacctcgaaccagacagcttcgaccaaaatattgc

SEQ ID NO: 434751 - DNA, 75 bp, synthetic construct
  source 1..75: mol_type = other DNA
cgccagtaaaagtacgaccaaaagcaaaaccgcttcttccgttaaaaaatcttccattaccgcttctaaaaacgg

SEQ ID NO: 434752 - DNA, 75 bp, synthetic construct
  source 1..75: mol_type = other DNA
cgcgaggcgcagtcatcaacagaagccagcgagagccgccggacgttgctggctgaagcagccatggcggtgcgg

SEQ ID NO: 434753 - DNA, 75 bp, synthetic construct
  source 1..75: mol_type = other DNA
cacattgctgcctgcttttactcaatcccgacgtttccaccggacgaatgatacaattccgacattgatgagccg

SEQ ID NO: 434754 - DNA, 75 bp, synthetic construct
  source 1..75: mol_type = other DNA
atatcagcctgatatttacaatgcctgtgtcgatgcatttaaatatgatctaatcgataacgacttcattcgcgt

SEQ ID NO: 434755 - DNA, 75 bp, synthetic construct
  source 1..75: mol_type = other DNA
gccgctgctcgtctgtttgctgctcgcctttgtaatgaacaaattggcgtttatgaagtgcgtcctggtctcatc

SEQ ID NO: 434756 - DNA, 75 bp, synthetic construct
  source 1..75: mol_type = other DNA
ctcgtacccgagagttttacttgcatgatttttggtgacgatagctggggaagtgacgacggtgattatatggct

SEQ ID NO: 434757 - DNA, 75 bp, synthetic construct
  source 1..75: mol_type = other DNA
ttgaattgtattacaacactcagcgggatttcgctagcgcccttaaagtcaccccccaacaggtaactaaatggc

SEQ ID NO: 434758 - DNA, 75 bp, synthetic construct
  source 1..75: mol_type = other DNA
gcagacgggaatggaatcgcttcctggacacccactaccggcgtggctggaatgtcaacgtatcccgggtgatgg

SEQ ID NO: 434759 - DNA, 75 bp, synthetic construct
  source 1..75: mol_type = other DNA
cggttgccttattttaccggagcagaccgcgcagcgctgacaacccttacagctattggtcgcgctattatcgct

SEQ ID NO: 434760 - DNA, 75 bp, synthetic construct
  source 1..75: mol_type = other DNA
gacattgggtctggtcattcaatcaataactatgaccaaattgtttctaaccaaccaggcttttcccgtttttca

SEQ ID NO: 434761 - DNA, 75 bp, synthetic construct
  source 1..75: mol_type = other DNA
cgatatggataaaaaccgcgtctttgctcagcggttacgtcagtcggtacaaacctattttgatgagccgtgggc

SEQ ID NO: 434762 - DNA, 75 bp, synthetic construct
  source 1..75: mol_type = other DNA
aacaaatccgcgcccgtaatgtggtgattgcaacaggttctcagccgcgtcaactgcctggcgttaccattgata

SEQ ID NO: 434763 - DNA, 75 bp, synthetic construct
  source 1..75: mol_type = other DNA
taatgggtggtgggccaggtggttatgtagcggcgctgcgagctgcgcagaatgggctttccgtggtgtgtatcg

SEQ ID NO: 434764 - DNA, 75 bp, synthetic construct
  source 1..75: mol_type = other DNA
gcaggtaaacaaccgctggacaatacgttgactaatttgagtggaaaggatgtcgctggtcttctcgcatacctt

SEQ ID NO: 434765 - DNA, 75 bp, synthetic construct
  source 1..75: mol_type = other DNA
cggttgccacgctgaacggagagcgtctggatggtgagatgagtgaaggcgagctggtggatgtattccgccatg

SEQ ID NO: 434766 - DNA, 75 bp, synthetic construct
  source 1..75: mol_type = other DNA
atttccagctgtgaattgttgctttcggaaacttccggaacgctgcgtgaattgcaggatacgctggaagcggca

SEQ ID NO: 434767 - DNA, 75 bp, synthetic construct
  source 1..75: mol_type = other DNA
gtcagcgccagcaaaagctcctctgcgaatgccagccgtgacggtaaaactaattttggctttgatactgtgccg

SEQ ID NO: 434768 - DNA, 75 bp, synthetic construct
  source 1..75: mol_type = other DNA
attgcaggatacactggaagcggcaggcgacaaattgcaggccaacctgttacgcattcaggaagccaccatgac

SEQ ID NO: 434769 - DNA, 75 bp, synthetic construct
  source 1..75: mol_type = other DNA
cgtctggtgtacgacctgcaaagcaaactcgaccgtattatcagttggggtcagcaatccatcgatttatggatc

SEQ ID NO: 434770 - DNA, 75 bp, synthetic construct
  source 1..75: mol_type = other DNA
gcgtagcgcaagcagatttcaccggactgccagcgaaatggcagccgattaatgattacggagccaaggtacagg

SEQ ID NO: 434771 - DNA, 75 bp, synthetic construct
  source 1..75: mol_type = other DNA
cgggaatcagagaacaacagcatatgggataaatgaaacccgtccacggaatattgcatttaactatatcgtgag

SEQ ID NO: 434772 - DNA, 75 bp, synthetic construct
  source 1..75: mol_type = other DNA
ttttgatgcaatcagaggggctttttacgatgcaggaacacgatcagcgacaatggcgaataacacaactgctat

SEQ ID NO: 434773 - DNA, 75 bp, synthetic construct
  source 1..75: mol_type = other DNA
agttcgctcggctctacacaatacggatttggtgacgctttaacctctaatcaactgggggtcataaatggcaaa

SEQ ID NO: 434774 - DNA, 75 bp, synthetic construct
  source 1..75: mol_type = other DNA
gcttcattcgcgaggaagtattggtaacacaggtggtagtgaaacccgcccccgcaatattgcatttaactatat

SEQ ID NO: 434775 - DNA, 75 bp, synthetic construct
  source 1..75: mol_type = other DNA
ggatgggacgacgggcgcaaagttgatacaggacgttcattgctaagtggtcaggctgcaacatttattcgtaca

SEQ ID NO: 434776 - DNA, 75 bp, synthetic construct
  source 1..75: mol_type = other DNA
catccctggaatcagatcactggtgtgccaacagcttcattgacagcgaaaggcatcactcagctcagtagtgcc

SEQ ID NO: 434777 - DNA, 75 bp, synthetic construct
  source 1..75: mol_type = other DNA
ttatcgctaagggcagtataaaagatgtcctcaattaccttggtttgggagaaggttctccagctattggcgttc

SEQ ID NO: 434778 - DNA, 75 bp, synthetic construct
  source 1..75: mol_type = other DNA
cgcctcgctgaccgtaaaaggttttactcagttaagcagtgcaattaacagtgaatcagaaacactggccgcaac

SEQ ID NO: 434779 - DNA, 75 bp, synthetic construct
  source 1..75: mol_type = other DNA
gtcacctgatgcactaaacacgctgagcgaactggctgcggcgctggcaatgacccgaattttgcgaccaccatg

SEQ ID NO: 434780 - DNA, 75 bp, synthetic construct
  source 1..75: mol_type = other DNA
taccctgtgctggcgaaagtgtttccggcgctggcattacctgacgcacgcggtgatttcattcgtatctgggat

SEQ ID NO: 434781 - DNA, 75 bp, synthetic construct
  source 1..75: mol_type = other DNA
ccaataaattaccggatttacgcggtgaatttatccgtggctgggatgatgggcgaggaattgatgcggcacgcg

SEQ ID NO: 434782 - DNA, 75 bp, synthetic construct
  source 1..75: mol_type = other DNA
tggaatcacacacccaccaagggcagctcttcagagttagtgattatcgtacaaaagaaataccagcatcagaag

SEQ ID NO: 434783 - DNA, 75 bp, synthetic construct
  source 1..75: mol_type = other DNA
gcaccattaaacagcccggcactgaccggaacgccaacaacaccaacagcgccacaggggactaatagtacccag

SEQ ID NO: 434784 - DNA, 75 bp, synthetic construct
  source 1..75: mol_type = other DNA
tgccgcgctatttgcaggggctttttggtaacgctcgtgccgatgtcgaagcctccggttgtactgaccccaaaa

SEQ ID NO: 434785 - DNA, 75 bp, synthetic construct
  source 1..75: mol_type = other DNA
cgcacgtctgatcgactgccgcaaacaactggtagccgaaggtattgccgctattcagtgtggcgcatttcataa

SEQ ID NO: 434786 - DNA, 75 bp, synthetic construct
  source 1..75: mol_type = other DNA
actggtgatggcattttactttgtgcctgaacaacttctcactgatgttattaatacatgggaaagtactactac

SEQ ID NO: 434787 - DNA, 75 bp, synthetic construct
  source 1..75: mol_type = other DNA
atgatgtccattaagagttattttaactggaataagttattcgtgtttttagctgtggccttatactggttctgg

SEQ ID NO: 434788 - DNA, 75 bp, synthetic construct
  source 1..75: mol_type = other DNA
tggggtgacggcagcacctataaaggaaacgatatcgaacgtttctatcgttacggtctgctgaccaatgctgaa

SEQ ID NO: 434789 - DNA, 75 bp, synthetic construct
  source 1..75: mol_type = other DNA
cgaagctccggggatggcgctgctgcatatcgcttatgaacgtctgctgaccggtattcacaacgaagacaccat

SEQ ID NO: 434790 - DNA, 75 bp, synthetic construct
  source 1..75: mol_type = other DNA
cggtaggtcaacgtattggcatcgctttttccggcggtctggacaccagtgccgcactgctgtggatgcgacaaa

SEQ ID NO: 434791 - DNA, 75 bp, synthetic construct
  source 1..75: mol_type = other DNA
aaccggggcgttgtcaaataaccctactctagctggttaccagcaacaggttaaatcaggaaattttgatagtta

SEQ ID NO: 434792 - DNA, 75 bp, synthetic construct
  source 1..75: mol_type = other DNA
ggtcaatctgctgttctgtgcgctggtgatatgcgttcgcggaaatgtctcgaaactcctgttattacgaaggcg

SEQ ID NO: 434793 - DNA, 75 bp, synthetic construct
  source 1..75: mol_type = other DNA
accgttgccggtgatgaacacgccgcacgcctgtccctcgttcgcgactacgttctgtcgttcgctggccgcctg

SEQ ID NO: 434794 - DNA, 75 bp, synthetic construct
  source 1..75: mol_type = other DNA
gcttgcccacatggaagaaattacgggagaaagcggggtagacgctttcgtggcgtatgcggagaaagtttcctc

SEQ ID NO: 434795 - DNA, 75 bp, synthetic construct
  source 1..75: mol_type = other DNA
gctagttatcgatcttggcgaagaaactaaacgacagaaggatgaacacaccgagatcagtcgtgaagttgcagc

SEQ ID NO: 434796 - DNA, 75 bp, synthetic construct
  source 1..75: mol_type = other DNA
agccagtattttcgttaatggcgggggtgttttttttttaacaaatacagataagcccataggaattatgctttc

SEQ ID NO: 434797 - DNA, 75 bp, synthetic construct
  source 1..75: mol_type = other DNA
cagaagaagtcacagtacgctttgagcaaggtcatccggtggcgctgaacggtaaaacctttagcgacgacgtag

SEQ ID NO: 434798 - DNA, 75 bp, synthetic construct
  source 1..75: mol_type = other DNA
atggcgcggaaaatccttaactgggctgaagcgcacccacgttttcgtgatggctatgcaataggcaccggtcgc

SEQ ID NO: 434799 - DNA, 75 bp, synthetic construct
  source 1..75: mol_type = other DNA
ccgacgcgcataaagccaaagtacagaaagccacaaaagtggctatgaataagctgatgcagcaaattggcaaac

SEQ ID NO: 434800 - DNA, 75 bp, synthetic construct
  source 1..75: mol_type = other DNA
acttcgttaagtgaagattactggcaacgccactatgttggcgctcgtcgggtgatgaccccaaaaacacttcgc

SEQ ID NO: 434801 - DNA, 75 bp, synthetic construct
  source 1..75: mol_type = other DNA
ttttggctttgatactgtgccgcgctatttgcaggggctgtttggtaacgcccgcgccgatgtcgatgcctctgg

SEQ ID NO: 434802 - DNA, 75 bp, synthetic construct
  source 1..75: mol_type = other DNA
atatcggcgcaatttacgcttttatgccgatgacccaacgattcgcgtcggcggaccaacctaccattgggtgcg

SEQ ID NO: 434803 - DNA, 75 bp, synthetic construct
  source 1..75: mol_type = other DNA
tcttaatcatcgaccatcgcggtcaggggcgttccggtcggctgttagccgatccgcatcttggtcatgttaatc

SEQ ID NO: 434804 - DNA, 75 bp, synthetic construct
  source 1..75: mol_type = other DNA
tacagctattggtcgcgctattatcgctaagggcagtataaaagatgtcctcaattaccttggtttaggagaagg

SEQ ID NO: 434805 - DNA, 75 bp, synthetic construct
  source 1..75: mol_type = other DNA
ggcgttggttcgactcccaggcgctgatgctacgagactccctgcaacgctgggttgccagccagattacaggtg

SEQ ID NO: 434806 - DNA, 75 bp, synthetic construct
  source 1..75: mol_type = other DNA
cacggactccaacatgcttggtgcaacgcatgaagcgaaggatctggaatacctcaactccagcgtcaaaatcgt

SEQ ID NO: 434807 - DNA, 75 bp, synthetic construct
  source 1..75: mol_type = other DNA
gattaccttggtttaggagaagcggcgaaaagggatgtgggcacgacagtcggaaccgttgccgctggtgatgat

SEQ ID NO: 434808 - DNA, 75 bp, synthetic construct
  source 1..75: mol_type = other DNA
gcaggtaaacaaccgctggacaatacgctgactaatttgagtggaaaggatgtaactggtcttctcacataccta

SEQ ID NO: 434809 - DNA, 75 bp, synthetic construct
  source 1..75: mol_type = other DNA
tcagaagcgggtatgcgaagggtatcactgtcagaccccgtagcattgcacttaattacattgtgagggcagttt

SEQ ID NO: 434810 - DNA, 75 bp, synthetic construct
  source 1..75: mol_type = other DNA
tttagtgtggataacttttttatccacaggttgtggataactttttttagattcaactcggattcgttatggatt

SEQ ID NO: 434811 - DNA, 75 bp, synthetic construct
  source 1..75: mol_type = other DNA
gttatttgcgtttttatcaggggacagatttatggtcaactagggacagatttagtgtggataacttttttatcc

SEQ ID NO: 434812 - DNA, 75 bp, synthetic construct
  source 1..75: mol_type = other DNA
tatcgcacccaaagcgaagtgatccgtgagtcactgcgcttacttcgagaaaaacaagcagagtctcgcctgcaa

SEQ ID NO: 434813 - DNA, 75 bp, synthetic construct
  source 1..75: mol_type = other DNA
gttgtccagacatcttggtgatgacgaggtgatggatggtttctccgccatgaaattacgaaactattatctgct

SEQ ID NO: 434814 - DNA, 75 bp, synthetic construct
  source 1..75: mol_type = other DNA
agcctgcggcttaacaaccgccgaactcgccaggctgctcgatctcgatgaagaaattatcatccagtgggagag

SEQ ID NO: 434815 - DNA, 75 bp, synthetic construct
  source 1..75: mol_type = other DNA
atgcttatcccactggcaaatattcttggctgcgatccgatgtggctgttaactggcgaggttactcctccggag

SEQ ID NO: 434816 - DNA, 75 bp, synthetic construct
  source 1..75: mol_type = other DNA
tgagaagttatgcacaagcctggcaaactatataactaactggaattcgggagttaattatcgcgttgtcaggaa

SEQ ID NO: 434817 - DNA, 75 bp, synthetic construct
  source 1..75: mol_type = other DNA
gccgcgcgtggagcagtacagtattgacgagatgtttctggacattcgcggcatagaccactgcatcaatgttga

SEQ ID NO: 434818 - DNA, 75 bp, synthetic construct
  source 1..75: mol_type = other DNA
cgttctatgcgagctgtgaaaaggtgtttcgtcttgacctgcgcaacaggcccgttgtggtgctcagtaacaacg

SEQ ID NO: 434819 - DNA, 75 bp, synthetic construct
  source 1..75: mol_type = other DNA
tatcgtactcagagtgaagtaatccgcgagtcacttcgtctcctgcgcgagaaacaggcagagtcacgtctccag

SEQ ID NO: 434820 - DNA, 75 bp, synthetic construct
  source 1..75: mol_type = other DNA
tcggagatgaactctgggagtacatagaatctctcatagaatcaggggattaccgtacccaaagcgaagtaatac

SEQ ID NO: 434821 - DNA, 75 bp, synthetic construct
  source 1..75: mol_type = other DNA
aagctggtgactaaaaatccagcgcaggcgcttaatctccaggatcgcggggtgattggcgagggcaaacgcgcc

SEQ ID NO: 434822 - DNA, 75 bp, synthetic construct
  source 1..75: mol_type = other DNA
gtgcaatggcattgggaaaagaaagtgacaaatcgcttgctacggcttttcaggatttgcgcgagttaaaggttg

SEQ ID NO: 434823 - DNA, 75 bp, synthetic construct
  source 1..75: mol_type = other DNA
ttcagtgccgaaattgcttataacaccttcctgaagttgattctgtgccactggcgctgcttctcgttggtatgg

SEQ ID NO: 434824 - DNA, 75 bp, synthetic construct
  source 1..75: mol_type = other DNA
gcgattttccgcgccagcgggttagcgcgtaatgcctgcgagtatctgcttgaacgggcgcagcagccgttagcg

SEQ ID NO: 434825 - DNA, 75 bp, synthetic construct
  source 1..75: mol_type = other DNA
aaggcgaaagatctacactggccgtgttttatctgccccagcagcgcgaagttgtggacagcaacggaaatacgg

SEQ ID NO: 434826 - DNA, 75 bp, synthetic construct
  source 1..75: mol_type = other DNA
gatgacacgccaactgacgcggtagtcagcccatccgctgttactgttgaaacagcagaaactaagctgatggac

SEQ ID NO: 434827 - DNA, 75 bp, synthetic construct
  source 1..75: mol_type = other DNA
tttttggtcatgacggcatcgaacttgaagcaaaagacaatgttgagaatacttcggttaagtttgaagtcacca

SEQ ID NO: 434828 - DNA, 75 bp, synthetic construct
  source 1..75: mol_type = other DNA
cctcatgatatctggcaggtattaggctctcacttcagtaaggaatcctcggctctggagtcaagtatcgattca

SEQ ID NO: 434829 - DNA, 75 bp, synthetic construct
  source 1..75: mol_type = other DNA
acggcattaattcacgagacgtatcgcggagatattaaatcgtcagaaaatagcggtaatcaagtcatttttaca

SEQ ID NO: 434830 - DNA, 75 bp, synthetic construct
  source 1..75: mol_type = other DNA
tatgggatcgtgcagcgatacaaaagagagcggaacgtctggccgagctggcaatagacgtctgggcgatcccca

SEQ ID NO: 434831 - DNA, 75 bp, synthetic construct
  source 1..75: mol_type = other DNA
caatccgtatgaatcgggcgagcgtggttttaagttactgcttacgcaaacggacagagagagcctgctggcatt

SEQ ID NO: 434832 - DNA, 75 bp, synthetic construct
  source 1..75: mol_type = other DNA
aatattcccctgctctggaacagcgcagaacgacagggatatgaaaacgatcgctggctgaccttcactcaaatt

SEQ ID NO: 434833 - DNA, 75 bp, synthetic construct
  source 1..75: mol_type = other DNA
aaccatgttcaggcttgttgtcctgcgcgcgcgtattgctcgtgaaattgctgtacccaatagtgatgtccgaaa

SEQ ID NO: 434834 - DNA, 75 bp, synthetic construct
  source 1..75: mol_type = other DNA
ctggtttcttcctaatgcgatttttgattatgtacacccttatgtacacggttttttcgggtgctttggtcagaa

SEQ ID NO: 434835 - DNA, 75 bp, synthetic construct
  source 1..75: mol_type = other DNA
agcaagctgtacgacaaaatgcgcctgtttgttgatgatatgtctgcgattggtcaaagtctggataaagcgcag

SEQ ID NO: 434836 - DNA, 75 bp, synthetic construct
  source 1..75: mol_type = other DNA
ttgccggtgatgagcacgccgcacgcctttccctcgttcgcgattacgtcctctcatttgctggccgtctgcctg

SEQ ID NO: 434837 - DNA, 75 bp, synthetic construct
  source 1..75: mol_type = other DNA
ttgccggtgacgagcacgccgcacgcctttccctcgttcgcgattacatcctctcgttcgctggccgtttgccgg

SEQ ID NO: 434838 - DNA, 75 bp, synthetic construct
  source 1..75: mol_type = other DNA
ggtttacgatctggatggggtaatgaagacatttcagggacgagacattaccggtacagcagaacgccggtacct

SEQ ID NO: 434839 - DNA, 75 bp, synthetic construct
  source 1..75: mol_type = other DNA
gatgcatctatctggtaacaccactcaggatgcagaagatcagttgggcgcgttcctgacgctcaaggcgcgtgg

SEQ ID NO: 434840 - DNA, 75 bp, synthetic construct
  source 1..75: mol_type = other DNA
cgctcagaaaatagccgatcgcgccagcaagttgtacgacaagatgcgtctgtttgtcgatgatatgtccgcgat

SEQ ID NO: 434841 - DNA, 75 bp, synthetic construct
  source 1..75: mol_type = other DNA
gaactggtttttggcaacggcgaaacgctgtcaatcgaggactacctggcctgcccatgcgatcgcctgctaacc

SEQ ID NO: 434842 - DNA, 75 bp, synthetic construct
  source 1..75: mol_type = other DNA
atggcaacgaccctcatcccgtcacacccgcagtttgtctttgtgtttgccgccgttcgccgcgcagaccgtaaa

SEQ ID NO: 434843 - DNA, 75 bp, synthetic construct
  source 1..75: mol_type = other DNA
tttcacgtcgggttattcttatgtctgttgcagctttatcactttcttcggcatggccagctctgtcggcaacgg

SEQ ID NO: 434844 - DNA, 75 bp, synthetic construct
  source 1..75: mol_type = other DNA
ctactctcgccatgttcgtaatcagtcgaccattggtggtgaaatcgccgcccggcaggaagagtcggtgctgct

SEQ ID NO: 434845 - DNA, 75 bp, synthetic construct
  source 1..75: mol_type = other DNA
accacgacggtatgcgaattgcgctggatggcgtcgccagtaaagcactgcgtctgcatgatgttgaaactcaaa

SEQ ID NO: 434846 - DNA, 75 bp, synthetic construct
  source 1..75: mol_type = other DNA
cgtctgcatgatgtcgaaaaacaaaatctggaaggcaatgcacttgaacaggctgtcgccaacgccattttcccg

SEQ ID NO: 434847 - DNA, 75 bp, synthetic construct
  source 1..75: mol_type = other DNA
gccgtcttccagactatctggttgaacgaaacatatcgcctgaaatggcaaagtattttgacctacgatactgcg

SEQ ID NO: 434848 - DNA, 75 bp, synthetic construct
  source 1..75: mol_type = other DNA
tatttataagtgaagaaaaagacagcttgctaagaaaggggaaattagcaagaaatgatttaatcatcaccactc

SEQ ID NO: 434849 - DNA, 75 bp, synthetic construct
  source 1..75: mol_type = other DNA
caaatcccgcaaatcctgaaacgttttcgtcaggcggtgctgggtgccgcgacaaatggaaaactaataggacac

SEQ ID NO: 434850 - DNA, 75 bp, synthetic construct
  source 1..75: mol_type = other DNA
attaatgcacagaaattaattgcatacccaataactgttccccccttcccgaacaagctgaaatcgttcgccgcg

SEQ ID NO: 434851 - DNA, 75 bp, synthetic construct
  source 1..75: mol_type = other DNA
atgagaaataaattaaaatataaattgctgcatattaaattattagaggttttattaagttgggctgtgatactc

SEQ ID NO: 434852 - DNA, 75 bp, synthetic construct
  source 1..75: mol_type = other DNA
gaatctatcttaactgaattacgtaatggtctttcatcaaagccaaatgaaagtggtgttggtcatccaatacta

SEQ ID NO: 434853 - DNA, 75 bp, synthetic construct
  source 1..75: mol_type = other DNA
tgatgaacttggctacgatgttgccgactgcgatgctcacggatcaaaggaccccaaaataattgacggtaagaa

SEQ ID NO: 434854 - DNA, 75 bp, synthetic construct
  source 1..75: mol_type = other DNA
gaggacgctgaagatcagttgggcgcgttcctgacgctcaaggcgcgtggattacgcaacgtcatcatgatgtgg

SEQ ID NO: 434855 - DNA, 75 bp, synthetic construct
  source 1..75: mol_type = other DNA
gatagtgaaaagcaagctatacgcaacactatggccgcagccaggcgactgaccagtatcggtcttaatgtcaaa

SEQ ID NO: 434856 - DNA, 75 bp, synthetic construct
  source 1..75: mol_type = other DNA
atgagtaattcgttgttaccaccatcagccagcaatttcatgcgttgcgccgaagccgtcggaacacgcattaca

SEQ ID NO: 434857 - DNA, 75 bp, synthetic construct
  source 1..75: mol_type = other DNA
cgcccggcaccttccggcttgatattggtgtactggaaagcggcatcacagaggaaatgtatctggaaatggaga

SEQ ID NO: 434858 - DNA, 75 bp, synthetic construct
  source 1..75: mol_type = other DNA
tgatcgaccggggctgggacaaggcgcttggggagatagattttaacaatgcagaaaatcaggcgaacagaccac

SEQ ID NO: 434859 - DNA, 75 bp, synthetic construct
  source 1..75: mol_type = other DNA
tatattcccggcgaatggataagcgtctggcaggttgaactgcctgatgttccccgcaagcaggtacagacgatt

SEQ ID NO: 434860 - DNA, 75 bp, synthetic construct
  source 1..75: mol_type = other DNA
tacccgaacaaaattacagatgctgatatatccgcactggcgagcctactggcgcgtctttcgggaagtgtcgct

SEQ ID NO: 434861 - DNA, 75 bp, synthetic construct
  source 1..75: mol_type = other DNA
atttgtatacatggtgcgcttcgggatgattagctggttgcctatttatctgctgacggtgaaacatttttcaaa

SEQ ID NO: 434862 - DNA, 75 bp, synthetic construct
  source 1..75: mol_type = other DNA
tgcccgctattaccacctgcggtgaaccagaagggaacctgctgacagggcagtggcaacctcgcgtcagctacc

SEQ ID NO: 434863 - DNA, 75 bp, synthetic construct
  source 1..75: mol_type = other DNA
agattttattgtgcaacaggacgcgttacagaaagagggcgatgcggtttccggcggcgtaacgttgcggaggaa

SEQ ID NO: 434864 - DNA, 75 bp, synthetic construct
  source 1..75: mol_type = other DNA
tgcgtggtttcacctttgatcaaaaacgccagacgctccaccttcagttgcgggccgcgaactttgccagtttcg

SEQ ID NO: 434865 - DNA, 75 bp, synthetic construct
  source 1..75: mol_type = other DNA
cgagtgggagagcgccttcgcggaatggcagaagatgtctggtcttatgcaacgggagaacgcggcgctgaacga

SEQ ID NO: 434866 - DNA, 75 bp, synthetic construct
  source 1..75: mol_type = other DNA
gtggattacctgctgggaaaagaccggcagcgcgagggggcgaccgtgctgcagggaaagccggaggaagtccgg

SEQ ID NO: 434867 - DNA, 75 bp, synthetic construct
  source 1..75: mol_type = other DNA
acagttgaatacaatcgaacatcgccagcagcatgaacggagccaggtccagaaaatactggagctagaaaaagc

SEQ ID NO: 434868 - DNA, 75 bp, synthetic construct
  source 1..75: mol_type = other DNA
acttatgtattacgcaataaaaatgcctggtatgtctcactggttgacgtatttgtatacatggtacgcttcggg

SEQ ID NO: 434869 - DNA, 75 bp, synthetic construct
  source 1..75: mol_type = other DNA
ttcgatgatactcagccccgaagcaacagcaaacagctgatgaaagttgtggacggtattaaccattcgggcaag

SEQ ID NO: 434870 - DNA, 75 bp, synthetic construct
  source 1..75: mol_type = other DNA
gtggtggcaggggcaacagatactcgacaactacacgaccatccaggaacagaagagcacgcaggccatgctttc

SEQ ID NO: 434871 - DNA, 75 bp, synthetic construct
  source 1..75: mol_type = other DNA
ggaaaagcaagccgaatctatgcttgaatccatggccagtcgtatagataattatcctgaactacgcgctcgtat

SEQ ID NO: 434872 - DNA, 75 bp, synthetic construct
  source 1..75: mol_type = other DNA
taaccgaatcccgctgcaatctttaacggcggcaaatatcatggttgaaggttcgattatcggttatgaaagcaa

SEQ ID NO: 434873 - DNA, 75 bp, synthetic construct
  source 1..75: mol_type = other DNA
tatcgttacccgtctggattcgttatcagaaaacctcgccgttcagaccatgctgcctgcattttatgaacaggg

SEQ ID NO: 434874 - DNA, 75 bp, synthetic construct
  source 1..75: mol_type = other DNA
gagatcgtcaccgttgatcccggctacgctgaagccggacgccaggcggcctgccagttgatcgagcaggtaacc

SEQ ID NO: 434875 - DNA, 75 bp, synthetic construct
  source 1..75: mol_type = other DNA
ctgccagatggaactgaccggccatctgctgacgtcgatgacggacgccatgcgcttccccggaggagaaatggc

SEQ ID NO: 434876 - DNA, 75 bp, synthetic construct
  source 1..75: mol_type = other DNA
agtatgggacaacttgtgaaattaccgacaagaagggaaacggccttcccgagagtggtaaaggagaggccctag

SEQ ID NO: 434877 - DNA, 75 bp, synthetic construct
  source 1..75: mol_type = other DNA
aaatgaggtgacagcccgcctgctgaccgtgacgcgcaaaggaaaagtctgccatctgctgacgtcgatgacgga

SEQ ID NO: 434878 - DNA, 75 bp, synthetic construct
  source 1..75: mol_type = other DNA
attgcggtcgacttatgtctcttacacgaaaagttactttacttagcctaatagcactttctggatgttctgcca

SEQ ID NO: 434879 - DNA, 75 bp, synthetic construct
  source 1..75: mol_type = other DNA
agataagtgataaagaaaaaggggtttttatcagtgaggagaattggttctcactgctggaaaaggtgagtgctt

SEQ ID NO: 434880 - DNA, 75 bp, synthetic construct
  source 1..75: mol_type = other DNA
aaatggtggggcatattatcctctgctggagtgccgtcggcttacagatattgaagatgtcaggaaatcagagga

SEQ ID NO: 434881 - DNA, 75 bp, synthetic construct
  source 1..75: mol_type = other DNA
tgctgcctgcattctatgaacagggctacgacccaatcatgatggaaagccagttttcaccacaattggtcgcag

SEQ ID NO: 434882 - DNA, 75 bp, synthetic construct
  source 1..75: mol_type = other DNA
tgttagcccactggcagtcatcgctggtgctgctggcacgcgacgcaaagggctttgcttcagtctgttatgacg

SEQ ID NO: 434883 - DNA, 75 bp, synthetic construct
  source 1..75: mol_type = other DNA
ccgctttactgtgtgcgactgacacgctggcgcttggcgcgagtaagtacctacaagagcagcacatcaacactt

SEQ ID NO: 434884 - DNA, 75 bp, synthetic construct
  source 1..75: mol_type = other DNA
cggggtttactctccttagcgtcgtccggggagcttaaaacgcgtcaggacgtcactaaggcgctggaaagtgca

SEQ ID NO: 434885 - DNA, 75 bp, synthetic construct
  source 1..75: mol_type = other DNA
caggttcgcgacatgtttgttaaagatgtgccgcagggagctgatctgctgaaagccgtggatgaggtgcaataa

SEQ ID NO: 434886 - DNA, 75 bp, synthetic construct
  source 1..75: mol_type = other DNA
gcgctaaccctatcccgatgccgtttgccgaagtctataccgggctggaaacgcgcactatcgacgctcaggaac

SEQ ID NO: 434887 - DNA, 75 bp, synthetic construct
  source 1..75: mol_type = other DNA
gtaagggactgaaagtactggcctactgggaaaacggctggcgcgatgtcaccaactcacgccagccagttaaaa

SEQ ID NO: 434888 - DNA, 75 bp, synthetic construct
  source 1..75: mol_type = other DNA
tttttcccttttctgcctccggggtaatacgctggcaacgccatgcacaagaagtggaacaaggtatttggccca

SEQ ID NO: 434889 - DNA, 75 bp, synthetic construct
  source 1..75: mol_type = other DNA
gaaatgaagccgatacctatgtcgagttaaatgtagaacataaacaaacactggataacggtgcgaccacacgct

SEQ ID NO: 434890 - DNA, 75 bp, synthetic construct
  source 1..75: mol_type = other DNA
gtgatattggttgtctggagattcagggggccagtctacaaagacagtactgtctgggctggtaaacgctttgat

SEQ ID NO: 434891 - DNA, 75 bp, synthetic construct
  source 1..75: mol_type = other DNA
ttgtttatcttaatactcgatatgctttaaacagcctcaacattcgtgccgaacattctaaccataagggcgtct

SEQ ID NO: 434892 - DNA, 75 bp, synthetic construct
  source 1..75: mol_type = other DNA
gaaatcagacgtcaaaaagctgaagactacattccatgcctggaatgcgattcactagaaaaagaatttgaggaa

SEQ ID NO: 434893 - DNA, 75 bp, synthetic construct
  source 1..75: mol_type = other DNA
ggcgaactccagtgaccttaacgtccgccaggtggtggctgaactgggaaatctgccggacttcaccgggccgct

SEQ ID NO: 434894 - DNA, 75 bp, synthetic construct
  source 1..75: mol_type = other DNA
caggtccgcgacatgtttgtaaaagatgttccgcagggtgctgatctactgaaagccgtggatgaggtgcaataa

SEQ ID NO: 434895 - DNA, 75 bp, synthetic construct
  source 1..75: mol_type = other DNA
aatatcgccgcattcaaagtctttggcgctaacccgatcccgatgccgtttgccgaagtctataccgggctggaa

SEQ ID NO: 434896 - DNA, 75 bp, synthetic construct
  source 1..75: mol_type = other DNA
gcaaatcagcagcacaccctgcaactcatttcacaaatcagtgaggcggccacgaatgaaaaaacaacagaacat

SEQ ID NO: 434897 - DNA, 75 bp, synthetic construct
  source 1..75: mol_type = other DNA
cgatcgtctggcagattaccccaggctgtatgaaacagatgaacgctatggcgaaggggttcgccgtattaggga

SEQ ID NO: 434898 - DNA, 75 bp, synthetic construct
  source 1..75: mol_type = other DNA
ctccggatggcacacccgccgtcccgggcaatgacggtggacgacagcctgcccggcttagccgtccctccggcc

SEQ ID NO: 434899 - DNA, 75 bp, synthetic construct
  source 1..75: mol_type = other DNA
agcggacgaggaaatcacggataccgatgacgatccggaaagtgccccggaagatgaggaagataccccactccc

SEQ ID NO: 434900 - DNA, 75 bp, synthetic construct
  source 1..75: mol_type = other DNA
cgttcttacggaaaaattcatctgtttatgggcggtgtaggtaacgacggtcatattgcatttaacgaaccggcg

SEQ ID NO: 434901 - DNA, 75 bp, synthetic construct
  source 1..75: mol_type = other DNA
ggcaggaagaagggcatcagactggtacaggagtagagcagcatgacggagctggaaaaacagttattgagcgca

SEQ ID NO: 434902 - DNA, 75 bp, synthetic construct
  source 1..75: mol_type = other DNA
taactgaccatactgtttcatctattggccatgatttttaccgagcctttagtgataaatgggaaagtgactata

SEQ ID NO: 434903 - DNA, 75 bp, synthetic construct
  source 1..75: mol_type = other DNA
gaaaaggtggtggcagtggtccggttgattacctgctggggagggagcgtaaccgcgaaggcgcaacggtgcttc

SEQ ID NO: 434904 - DNA, 75 bp, synthetic construct
  source 1..75: mol_type = other DNA
gctcggccagcatgtgctgtatgaggtgaacgacgaggcacggcgggtaaacattctggccgtggtcggtcagcg

SEQ ID NO: 434905 - DNA, 75 bp, synthetic construct
  source 1..75: mol_type = other DNA
ttttcgaagtgaatgatgaggcccgtcgtgtcaatatcctggcggttgttggccagcttcagaagccccgattta

SEQ ID NO: 434906 - DNA, 75 bp, synthetic construct
  source 1..75: mol_type = other DNA
gtggatcactattgcaccgttcgtgacaccaggctgtatgaaacggatgaacgctatggtgaaggggttcgccgt

SEQ ID NO: 434907 - DNA, 75 bp, synthetic construct
  source 1..75: mol_type = other DNA
caacaggcaaccgtggcggtgattcaccagcagcatatgcgcaacattgcgcagtggttgcaggaaaacggcatc

SEQ ID NO: 434908 - DNA, 75 bp, synthetic construct
  source 1..75: mol_type = other DNA
tttacgctcgcaggtggcgatggcgctgaaaaaatatcgcccacaggctgatgataccgatctgcttgccgagtt

SEQ ID NO: 434909 - DNA, 75 bp, synthetic construct
  source 1..75: mol_type = other DNA
ggagcgccgggcgtgcgctggctccggtcatgttccgcgcacagtgcaatgagcaggcatcgccgctttcgctaa

SEQ ID NO: 434910 - DNA, 75 bp, synthetic construct
  source 1..75: mol_type = other DNA
ttggcggtctttttgatacccagcttatgcaatatcttgcgtcacgcatggttaatatggttgccagatataacc

SEQ ID NO: 434911 - DNA, 75 bp, synthetic construct
  source 1..75: mol_type = other DNA
gggcagtcaacgagccaatgcctttttaatcagcttctgcaaaaaggcattaccacgtcttgaactggtcgcaaa

SEQ ID NO: 434912 - DNA, 75 bp, synthetic construct
  source 1..75: mol_type = other DNA
gttttacactctaaccgcgccgtcaaaatatcacgccacgactaaagccggttaccgtaacagcaaatggagcgg

SEQ ID NO: 434913 - DNA, 75 bp, synthetic construct
  source 1..75: mol_type = other DNA
acggaacgccacactggcacatgcttatgttcatgttgccggaagacgtcgagcgcgtgcgcctcatcatccgtg

SEQ ID NO: 434914 - DNA, 75 bp, synthetic construct
  source 1..75: mol_type = other DNA
gctaatttcattcgcgctgaactggctgacattgatgacaccggatttagcgagcttaaaacgctgtacacctgg

SEQ ID NO: 434915 - DNA, 75 bp, synthetic construct
  source 1..75: mol_type = other DNA
ggtgctttctctccagcccgactgcgtgcggttagatgtttatcgcactgctgcggtgctggagcaaaatcaggg

SEQ ID NO: 434916 - DNA, 75 bp, synthetic construct
  source 1..75: mol_type = other DNA
tcagaaactgcgcgttatattccctgacctattgtttattcgcaaaggccagggggtcactcctaccgcatttgc

SEQ ID NO: 434917 - DNA, 75 bp, synthetic construct
  source 1..75: mol_type = other DNA
cgccctggcacctttcacgcccatcgtgactggcgcactctttctctatttctgtttcgcactcacgctcagtgt

SEQ ID NO: 434918 - DNA, 75 bp, synthetic construct
  source 1..75: mol_type = other DNA
tacatttttttctgtccccaatgtacgaattaatatacggaaatgtcgggatattcctgttgaaacgccgtatgc

SEQ ID NO: 434919 - DNA, 75 bp, synthetic construct
  source 1..75: mol_type = other DNA
agtaaaaactgcgtgaccgactggcgtgagcaaaagcgccgcacgcgcgagtttctcaaggggctggatctcgaa

SEQ ID NO: 434920 - DNA, 75 bp, synthetic construct
  source 1..75: mol_type = other DNA
agcaagccgcggaagctatcacggcgcttttacgtcataacccgaccatcagtgccgtggtttgctataacgaaa

SEQ ID NO: 434921 - DNA, 75 bp, synthetic construct
  source 1..75: mol_type = other DNA
tatcgacggaaaaatctgggatcggctgatgtcggaaaccggcatgtatacgctgatgagcaacaaacaacgtca

SEQ ID NO: 434922 - DNA, 75 bp, synthetic construct
  source 1..75: mol_type = other DNA
tttaaccagtatggtgaggaaactgtctgcattcgtggtgtgtacgactccaccgttggtgttggcactccgatt

SEQ ID NO: 434923 - DNA, 75 bp, synthetic construct
  source 1..75: mol_type = other DNA
atcattggtgaagtagatggcgatgatgaagccatcttcaggccaatacaaaaatacatcaatggcacatggtat

SEQ ID NO: 434924 - DNA, 75 bp, synthetic construct
  source 1..75: mol_type = other DNA
tctcggcaacgcgccgaccattccgccagtgctctacggcctgaatgaaacgcgtccgagtcaggataaagacga

SEQ ID NO: 434925 - DNA, 75 bp, synthetic construct
  source 1..75: mol_type = other DNA
atggatcaggccggcattattcgcgaccttttaatctggctggaaggtcatctggatcagcccctgtcgctcgac

SEQ ID NO: 434926 - DNA, 75 bp, synthetic construct
  source 1..75: mol_type = other DNA
gtcgatcatttattggtaatgatggccgccgttgttatcgccatcagcctgatgctgatggcaagcaaaccgtta

SEQ ID NO: 434927 - DNA, 75 bp, synthetic construct
  source 1..75: mol_type = other DNA
tgtgctcgaactggtcctcggcattgataacctggtttttattgccatcctcgccgaaaaactcccgccgaaaca

SEQ ID NO: 434928 - DNA, 75 bp, synthetic construct
  source 1..75: mol_type = other DNA
ggacagccaatggcaccgatggtcaggcgtacatggataataacggtaactggctttgtggctcgcaagttattc

SEQ ID NO: 434929 - DNA, 75 bp, synthetic construct
  source 1..75: mol_type = other DNA
gggcgatggttatactgtgtggatcccggtcccgcaggatcttgagctaaattacgcgctgctgatgcgtaattt

SEQ ID NO: 434930 - DNA, 75 bp, synthetic construct
  source 1..75: mol_type = other DNA
gaccttcaggacggcaaagccgtccctcggagttctgtcaataactgtacgggaagcgaaagcgatccaccggaa

SEQ ID NO: 434931 - DNA, 75 bp, synthetic construct
  source 1..75: mol_type = other DNA
cacggaacagatgagcaaagtgctccgatagaaaaaactatcgacgagatccgtctgacaaccggcattaccatc

SEQ ID NO: 434932 - DNA, 75 bp, synthetic construct
  source 1..75: mol_type = other DNA
cgccaactgacaaagtgtttatgattgaagaagcccagcgtccgggcgaatatatgaccgcgtttgaagatgaac

SEQ ID NO: 434933 - DNA, 75 bp, synthetic construct
  source 1..75: mol_type = other DNA
gaacgtctgactaaaatgggtgtgcattcgctgaaaatcgaaggccgtaccaaatctttctattattgcgcacgc

SEQ ID NO: 434934 - DNA, 75 bp, synthetic construct
  source 1..75: mol_type = other DNA
ccggtcccgcaggatcttgagctaaattacgcgctgctgatgcgtaatttctccggggaaaccacgcgtaacccc

SEQ ID NO: 434935 - DNA, 75 bp, synthetic construct
  source 1..75: mol_type = other DNA
tttttcagtgccggtattgattcgtggaaagcgaacccggaattaaataattcgatttatatgtggaatatcctg

SEQ ID NO: 434936 - DNA, 75 bp, synthetic construct
  source 1..75: mol_type = other DNA
tcagcttcaccaagaacttcagcgcctataccgatgctaactacctcggtggtggtgacgtagatcaagactggt

SEQ ID NO: 434937 - DNA, 75 bp, synthetic construct
  source 1..75: mol_type = other DNA
gtcactctgaataatggttctgaatggaataccgttaacgcttcaaacattgatactttagctgtaaataatggc

SEQ ID NO: 434938 - DNA, 75 bp, synthetic construct
  source 1..75: mol_type = other DNA
ttgcaggtattgcattatctcaaggtaatactttacactaccgaatctcatacttgggataacaatatctctgta

SEQ ID NO: 434939 - DNA, 75 bp, synthetic construct
  source 1..75: mol_type = other DNA
ctactacatcagcaaatgttgatgatgaatctactgcttcgactgactggtatgatgttacaggtaatagcctgt

SEQ ID NO: 434940 - DNA, 75 bp, synthetic construct
  source 1..75: mol_type = other DNA
ttacaacgaaacctacactaccgaatctcatacttgggataacaatatctctgtaaaagattccacagtgacttc

SEQ ID NO: 434941 - DNA, 75 bp, synthetic construct
  source 1..75: mol_type = other DNA
actacggctacggtattgttgctatgaactctgatggtcatctgactatcaatggtaacggcgacatgaacaacg

SEQ ID NO: 434942 - DNA, 75 bp, synthetic construct
  source 1..75: mol_type = other DNA
cggaagatttattaacccgttcggtaaacgttggtttttccggcggcgagaaaaagcgcaacgatattttgcaaa

SEQ ID NO: 434943 - DNA, 75 bp, synthetic construct
  source 1..75: mol_type = other DNA
cgaacatccatttattcatgaaatgaatggtatggacataactggaacttcattagctacggtcactgagttaac

SEQ ID NO: 434944 - DNA, 75 bp, synthetic construct
  source 1..75: mol_type = other DNA
cactatcaggacaattcaattcacctgagctattcattgagcatttaaaaaaaatactttcaatcaaagataaat

SEQ ID NO: 434945 - DNA, 75 bp, synthetic construct
  source 1..75: mol_type = other DNA
aacttcagatactatcgatttaactaacggttcttcgctgaacattggtgaagatggttacgttgataccgatca

SEQ ID NO: 434946 - DNA, 75 bp, synthetic construct
  source 1..75: mol_type = other DNA
aatcacttccatgcttcctggtggtgatctctggcataatggtgcttacgatcaaagttatggctacgttcaagc

SEQ ID NO: 434947 - DNA, 75 bp, synthetic construct
  source 1..75: mol_type = other DNA
attacatcaaacctgattatgtccatgttttgtatcaggggcgaattgtgaaatccggtgatttcacgttggtca

SEQ ID NO: 434948 - DNA, 75 bp, synthetic construct
  source 1..75: mol_type = other DNA
gcaacgtagtgtctggtgtattcgatatccacagcagcgattacgttctgaacgcggatttggtgaacgaccgta

SEQ ID NO: 434949 - DNA, 75 bp, synthetic construct
  source 1..75: mol_type = other DNA
atgcctcatatcacggcgctggttattgtctggtacgttgtctttctttctggtatccatcctttctggaaggat

SEQ ID NO: 434950 - DNA, 75 bp, synthetic construct
  source 1..75: mol_type = other DNA
aattatcgcgctggtggccctgtacggcgcgaatatccgcatgatgcaggaatggcaggcaaaacaaaggcgacc

SEQ ID NO: 434951 - DNA, 75 bp, synthetic construct
  source 1..75: mol_type = other DNA
tggcggtacgctgctgatgacaccgcttaagggtgtcgatagccaggtgtatgcgctggcgcagggcaatattct

SEQ ID NO: 434952 - DNA, 75 bp, synthetic construct
  source 1..75: mol_type = other DNA
aggaattcaaaatcagaaaaattaagcggggtattgagcgcagctgtgataatgccaaaaaatatttctggcttt

SEQ ID NO: 434953 - DNA, 75 bp, synthetic construct
  source 1..75: mol_type = other DNA
ttgtggttttctttgttgccggattgctcttatggtacggtatgcatgctattttcagcgcctgtattgattcgt

SEQ ID NO: 434954 - DNA, 75 bp, synthetic construct
  source 1..75: mol_type = other DNA
ttttttctgccagcgctttacgccatatcaatggcattgtgtattgtgcgtactcgtgcaccatccagtcatttc

SEQ ID NO: 434955 - DNA, 75 bp, synthetic construct
  source 1..75: mol_type = other DNA
ggtaaatctcgacaaactgtcccgggagcaggaaaagaaactgcgtctcagcgctgagcgcgatcagcttatacg

SEQ ID NO: 434956 - DNA, 75 bp, synthetic construct
  source 1..75: mol_type = other DNA
tgttgaggattctgcgcggagtttgaaaccgtgggtagagttagggatcagtcgggcaacctattatcgacgtag

SEQ ID NO: 434957 - DNA, 75 bp, synthetic construct
  source 1..75: mol_type = other DNA
gacgcataaacgcttcactgaagctggatttgagcaatatgtggctgattcatacatcagaaattcaggctcgta

SEQ ID NO: 434958 - DNA, 75 bp, synthetic construct
  source 1..75: mol_type = other DNA
cagaccgtggtggctccacaaacccagatcgatttacgccagagcggcggttcgctgcaaagtgtacgttccagc

SEQ ID NO: 434959 - DNA, 75 bp, synthetic construct
  source 1..75: mol_type = other DNA
atgcgctggcgcagggcaatattctggttggcggcgcaggggcatctgcagggggaagcagtgtccaggttaacc

SEQ ID NO: 434960 - DNA, 75 bp, synthetic construct
  source 1..75: mol_type = other DNA
ctcgcgcaccggttcggtggtgatgaatcgcgaagtgaccctcgacagctgcgcggtagcgcaggggaatctctc

SEQ ID NO: 434961 - DNA, 75 bp, synthetic construct
  source 1..75: mol_type = other DNA
caaaggtacgtgccagatagaaagggctgctaaggagtcagaacattttcttcggttccatgttccatgcccaca

SEQ ID NO: 434962 - DNA, 75 bp, synthetic construct
  source 1..75: mol_type = other DNA
gttgctgggggggggcgggtattttattgagcataaatcccgaaacagtctgctttttcagcccacggattctgc

SEQ ID NO: 434963 - DNA, 75 bp, synthetic construct
  source 1..75: mol_type = other DNA
tgtggaaagcgcagaacgtgattgtctttaaacgttcgatgaacactggctatgctggtgtgcaaaacccgctgt

SEQ ID NO: 434964 - DNA, 75 bp, synthetic construct
  source 1..75: mol_type = other DNA
tgatcatcaccccaggctacggcatggcggtcgcgcaggcgcaatatccggtggcagaaatcaccgagaaattgc

SEQ ID NO: 434965 - DNA, 75 bp, synthetic construct
  source 1..75: mol_type = other DNA
gcgctcgtggtattaacgtgcgtttcggtatccacccggttgcggggcgtttgcctggacatatgaacgtattgc

SEQ ID NO: 434966 - DNA, 75 bp, synthetic construct
  source 1..75: mol_type = other DNA
tgctatgacgaactttcctcgttcgaaccggatgtcgaaaaagagggttcgccaaccctgcttggggataaacgt

SEQ ID NO: 434967 - DNA, 75 bp, synthetic construct
  source 1..75: mol_type = other DNA
taactttacgggactttcgccgataataaatctactggacgtacctttcctgttccgcgataccgcccacgcgca

SEQ ID NO: 434968 - DNA, 75 bp, synthetic construct
  source 1..75: mol_type = other DNA
agcgcctcagtgagcaatttgaaaacctcgccaaccgtatttttgagcacagcaatcgccgggttgatgagcaaa

SEQ ID NO: 434969 - DNA, 75 bp, synthetic construct
  source 1..75: mol_type = other DNA
cggtctgcgtgaagggtatgaatatgaaacccaggtcagcatcgaaaatgacgcccgctcgcggatgcagccgga

SEQ ID NO: 434970 - DNA, 75 bp, synthetic construct
  source 1..75: mol_type = other DNA
ctacgtgaacaactggacggttttcgtcgtcaggttcaggacagtttcggtaaagaagcacaagaacgccatacc

SEQ ID NO: 434971 - DNA, 75 bp, synthetic construct
  source 1..75: mol_type = other DNA
gctgattctcgttggtggtgctgtaaacgcaatccgcgatgatgtgctggatgcggcaagcaatctgggagccag

SEQ ID NO: 434972 - DNA, 75 bp, synthetic construct
  source 1..75: mol_type = other DNA
taaaccgatggcctataaagagggcattatcgcggtgctgcgtgcgccgatgtttatccccggtctggtggcggc

SEQ ID NO: 434973 - DNA, 75 bp, synthetic construct
  source 1..75: mol_type = other DNA
gcagccaatggtgggtaaagaagccattatcgctgtcttgcgtgcgccgatgtttatcccaggtctggtcgctgc

SEQ ID NO: 434974 - DNA, 75 bp, synthetic construct
  source 1..75: mol_type = other DNA
cgcacgcacttctccccctgctgatgttgctgacagcctgcaacaacacgccagcgccgctgaaaaccggcgtca

SEQ ID NO: 434975 - DNA, 75 bp, synthetic construct
  source 1..75: mol_type = other DNA
aatattgccgcattcaaagtttttggcgctaacccgatcccgatgccgtttgccgaagtctataccgggctggaa

SEQ ID NO: 434976 - DNA, 75 bp, synthetic construct
  source 1..75: mol_type = other DNA
gctttggtaaagaagcacaagaacgccataccctgacccacgaaattcgtaatctacaacaactcaacgcgcaaa

SEQ ID NO: 434977 - DNA, 75 bp, synthetic construct
  source 1..75: mol_type = other DNA
gtaatctccagtgggatatcatggcgaccgccagcatcctgcaacaatgggatttggttcgtgctattgctgctg

SEQ ID NO: 434978 - DNA, 75 bp, synthetic construct
  source 1..75: mol_type = other DNA
gagctggttgaaaaagttgtgaacgggcgggtgaaactccagtgggatgccagaaaacggcgtaatgaagctctg

SEQ ID NO: 434979 - DNA, 75 bp, synthetic construct
  source 1..75: mol_type = other DNA
atttccatttgtaaatcttaagggaaaccaaatgtatgcgataagcaacggtcatacttgtgtgagttatccaat

SEQ ID NO: 434980 - DNA, 75 bp, synthetic construct
  source 1..75: mol_type = other DNA
gcgacacggtgtcaggcatcttctctgccgggtcagcgggaacaaggagagtcaccggtatctgtgatatgtaaa

SEQ ID NO: 434981 - DNA, 75 bp, synthetic construct
  source 1..75: mol_type = other DNA
gcaggtctcgtcacgctggtggttatcgaactggtgttgggtatcgataacctggtctttatcgctatcctcgcc

SEQ ID NO: 434982 - DNA, 75 bp, synthetic construct
  source 1..75: mol_type = other DNA
attgtctatgactggctggatgcactgaaagatcccaacggcctgaaaacctttgtgaacaccacgctgggcgag

SEQ ID NO: 434983 - DNA, 75 bp, synthetic construct
  source 1..75: mol_type = other DNA
catggttcggaagaaaacaccgcgataatacgctcaccctgaagcgtttttcctccggcgtggggctctggtgtc

SEQ ID NO: 434984 - DNA, 75 bp, synthetic construct
  source 1..75: mol_type = other DNA
caaagaagtgattatcaccacgccggaatgcttgcctgcggcgctacgcggcgaaacgggcacccatattattaa

SEQ ID NO: 434985 - DNA, 75 bp, synthetic construct
  source 1..75: mol_type = other DNA
gccctggagcagttccgtaatgcccgcacgcactttgcttttgtggtggatgagtttggctcggtggaagggatt

SEQ ID NO: 434986 - DNA, 75 bp, synthetic construct
  source 1..75: mol_type = other DNA
atgttaatgcgcctgttactgctggcgtcaatctcctggctggtcaccctgactcaaccgctgttcagcttccgc

SEQ ID NO: 434987 - DNA, 75 bp, synthetic construct
  source 1..75: mol_type = other DNA
cgggatggtcgaccatttactggtcatgatggccgccgtggttatcgctatcagcctgatgttgatggccagcaa

SEQ ID NO: 434988 - DNA, 75 bp, synthetic construct
  source 1..75: mol_type = other DNA
cctgcgggtgttgattcgccagccgctggtgttcccggaaaccttgccgttgttacctgccctcgagcagttccg

SEQ ID NO: 434989 - DNA, 75 bp, synthetic construct
  source 1..75: mol_type = other DNA
cacacaacgcaaaggagcgaagttctggggcgtggtgacgcaaatagttgtgctggacgccatcttctctctcga

SEQ ID NO: 434990 - DNA, 75 bp, synthetic construct
  source 1..75: mol_type = other DNA
cgaagtggaagagatcgacgcccgccatgatattcagaaaaatgcggacggttcctggacggcgaatggtcatat

SEQ ID NO: 434991 - DNA, 75 bp, synthetic construct
  source 1..75: mol_type = other DNA
aaaaataccgccatgcggatggcaccgaaatgaccatttcccgtgtctgctgggacaccggggggatcgatggtg

SEQ ID NO: 434992 - DNA, 75 bp, synthetic construct
  source 1..75: mol_type = other DNA
aatcccgggaagaagagacgacccggccaacccttaaagaactggcagcgaagctgtccggaggagtgaatggtt

SEQ ID NO: 434993 - DNA, 75 bp, synthetic construct
  source 1..75: mol_type = other DNA
cgtttatcagaggtcaaaaaaacacggtgttttccgagtgctgccggtaaaaggcgcatctgtctatggcaagcc

SEQ ID NO: 434994 - DNA, 75 bp, synthetic construct
  source 1..75: mol_type = other DNA
tttggcgatgatgcgacgccatttggcctgaaatgggagaagggtaaaccggaaacggtgtattacctgtgtgaa

SEQ ID NO: 434995 - DNA, 75 bp, synthetic construct
  source 1..75: mol_type = other DNA
atcttattgcatggattgacgagcatattgaccagccactgaacattgatgtcgtcgcgaaaaaatcaggttatt

SEQ ID NO: 434996 - DNA, 75 bp, synthetic construct
  source 1..75: mol_type = other DNA
actttgaagcgtctgtgccggagcgagtggcatatctgacagcgggtattgactcccagcttgaccgttacgaaa

SEQ ID NO: 434997 - DNA, 75 bp, synthetic construct
  source 1..75: mol_type = other DNA
tggacacgagacggccttaactggttttcttcatccggtaccgaaattgaacctcctgacagcgttacattccac

SEQ ID NO: 434998 - DNA, 75 bp, synthetic construct
  source 1..75: mol_type = other DNA
ggggatcgatggcgaaatcgtttatcagaggtcaaaaaaacacggtgttttccgggtgctgccggtaaaaggcgc

SEQ ID NO: 434999 - DNA, 75 bp, synthetic construct
  source 1..75: mol_type = other DNA
acagatccgtttctggcagggagtagaggacggccatgtggcatcttttctggtttccccggagaagaaatctac

SEQ ID NO: 435000 - DNA, 75 bp, synthetic construct
  source 1..75: mol_type = other DNA
gtgaatatatcgaacagtcaggttaaggggctgcagcactctgcgcgggcggggctacgttcgctttaccggcca

SEQ ID NO: 435001 - DNA, 75 bp, synthetic construct
  source 1..75: mol_type = other DNA
atggcggcgacgtctgccgtacgctggtggctaacggcgcgattcccctcattcctggtttgtggttagtacccg

SEQ ID NO: 435002 - DNA, 75 bp, synthetic construct
  source 1..75: mol_type = other DNA
caaacgcaaagcaaaatcggtcacggagctggcgcctccgtctttccggccgatcatgccgaactgcaatggcga

SEQ ID NO: 435003 - DNA, 75 bp, synthetic construct
  source 1..75: mol_type = other DNA
atgccgaactgcaatggcgacaaagccgtggcctgaccgcattgttgatggcgctgctggccatttcattaagtc

SEQ ID NO: 435004 - DNA, 75 bp, synthetic construct
  source 1..75: mol_type = other DNA
ggaaaacgatcccgctggtaaacagtggtgcaaccgatattcagagcggcgacccggttgttgttggaaaactta

SEQ ID NO: 435005 - DNA, 75 bp, synthetic construct
  source 1..75: mol_type = other DNA
tggactgtatgtgtcagttggcgtgacgctagggcagatgtataccgactcggaaattaccgctatctctgcggc

SEQ ID NO: 435006 - DNA, 75 bp, synthetic construct
  source 1..75: mol_type = other DNA
cggaaattaccgctatctctgcggcggggggcagtccgggacgcttgtacaaagccgttctttatctggcgatac

SEQ ID NO: 435007 - DNA, 75 bp, synthetic construct
  source 1..75: mol_type = other DNA
acatcgccacgaacagtactttcagatgcatttcctcaatagcggacagattgagctacagcttgacgatcatcg

SEQ ID NO: 435008 - DNA, 75 bp, synthetic construct
  source 1..75: mol_type = other DNA
caccagtaatccgcggattattcacgcctcactccgcaccgggtattctcgtcgaagcactgaaacgccgccgtg

SEQ ID NO: 435009 - DNA, 75 bp, synthetic construct
  source 1..75: mol_type = other DNA
catgcgtgataagggcgggcgctatgttttcctgatcaaagctgccaccagcgaagtgtggtggccggaagatgc

SEQ ID NO: 435010 - DNA, 75 bp, synthetic construct
  source 1..75: mol_type = other DNA
gtgcggtggctgcgggggtagcctgggaaaatgcccctgcaaacagcgccactgtggcggtaaaaatcaatgtct

SEQ ID NO: 435011 - DNA, 75 bp, synthetic construct
  source 1..75: mol_type = other DNA
gtgaatgccggagatcagaccatcctgagcggtgctgcggtggtggtcggcagtatggtggccgtggccattacc

SEQ ID NO: 435012 - DNA, 75 bp, synthetic construct
  source 1..75: mol_type = other DNA
gatgacgatgaattcagcggcgatgaaactcaaaaaaatgggagtggagtcgctactatgcctggcgggcgttac

SEQ ID NO: 435013 - DNA, 75 bp, synthetic construct
  source 1..75: mol_type = other DNA
agttgcgtcaataccggaatttccgtgcgcggcatggatacggcgctgactggcgcacaggcggcggcacaaacg

SEQ ID NO: 435014 - DNA, 75 bp, synthetic construct
  source 1..75: mol_type = other DNA
cggataataacaacgtcgtactgaccagggagaaacttattgcgctgaacgatgccatgatggtggccatggtgg

SEQ ID NO: 435015 - DNA, 75 bp, synthetic construct
  source 1..75: mol_type = other DNA
tcagtacagcgtggtggcgggtaaagtgcatcagaacacgctcgatgccgaacccgcattcatgcaggccacgct

SEQ ID NO: 435016 - DNA, 75 bp, synthetic construct
  source 1..75: mol_type = other DNA
gtgaacagttggcaggttggctggggtttgcctcggcgacccgtaacagtctcgatagcgtttctgaccgcgacc

SEQ ID NO: 435017 - DNA, 75 bp, synthetic construct
  source 1..75: mol_type = other DNA
gggtttaaaatccacgaacgccagcgccggatgaaagaggaagtggcaggactgacggagttgtctgaaatccgg

SEQ ID NO: 435018 - DNA, 75 bp, synthetic construct
  source 1..75: mol_type = other DNA
gccggatgaaagaagaagtggcagggctgaccgcactgccggatattcgtgcgtatcctgttggctggccggagg

SEQ ID NO: 435019 - DNA, 75 bp, synthetic construct
  source 1..75: mol_type = other DNA
ccagcgcgagatgaaggaacaactgaataatctggatgatttacgctcaatcagagagatggcgattagcggcaa

SEQ ID NO: 435020 - DNA, 75 bp, synthetic construct
  source 1..75: mol_type = other DNA
gttcgaatggaacggtcgcacctggaatgctggccccgactcaatggctcgtctttatccggcagtaatggcatc

SEQ ID NO: 435021 - DNA, 75 bp, synthetic construct
  source 1..75: mol_type = other DNA
cgcacctggaatgctggccccgactcaatggctcgtctttatccggcagtaatggcatcaaagtctgacacagcg

SEQ ID NO: 435022 - DNA, 75 bp, synthetic construct
  source 1..75: mol_type = other DNA
gcgaaattgccccgttcaccgtcacgccggaacttatcgctgcggcaaaagatgccaaaaagcgggaaattgagg

SEQ ID NO: 435023 - DNA, 75 bp, synthetic construct
  source 1..75: mol_type = other DNA
ggcgcgttaaccggcatgatgatgacgctgaaaggtttgccgctggcttacaacaaagatatgcaggaagacaaa

SEQ ID NO: 435024 - DNA, 75 bp, synthetic construct
  source 1..75: mol_type = other DNA
cgcgcagaacaatcaggacgcggtaatgccaggttacactcacctgcaacgcgcccagccggtgacgttcgcgca

SEQ ID NO: 435025 - DNA, 75 bp, synthetic construct
  source 1..75: mol_type = other DNA
cgcaccatatcgtgggtgaagcggtggtggaagccattcgtcagggtaaaccgctggaagatctgccgctgaccg

SEQ ID NO: 435026 - DNA, 75 bp, synthetic construct
  source 1..75: mol_type = other DNA
ccggaagatgcggagcatattccttttattcgcgggcgtattggttttgaactgcctgactggtttatcccgaag

SEQ ID NO: 435027 - DNA, 75 bp, synthetic construct
  source 1..75: mol_type = other DNA
cggcggttttctgcctctcaaggtcggtatctcccgcgatattcctgcctggctggctgagtaccctgaagccgg

SEQ ID NO: 435028 - DNA, 75 bp, synthetic construct
  source 1..75: mol_type = other DNA
accggcatgcgttacatcatgaaacatgccagtgccatgcgtgataagggggggcgctatgttttcctgatcaaa

SEQ ID NO: 435029 - DNA, 75 bp, synthetic construct
  source 1..75: mol_type = other DNA
cttgcggagcttaaaggtgctgcctttggtaatccccatacagccgcgccagtcagcatgaggggcaatacatca

SEQ ID NO: 435030 - DNA, 75 bp, synthetic construct
  source 1..75: mol_type = other DNA
tatgacggcctcgggtttttgatggaagtcaccaggggagagcagagaagtgatgaggttgacgcgaattattcc

SEQ ID NO: 435031 - DNA, 75 bp, synthetic construct
  source 1..75: mol_type = other DNA
ttattttaatccacggtttttaagcaatgatcttgctgaatctgtcgatttatccgcctttacggtgatgctgcc

SEQ ID NO: 435032 - DNA, 75 bp, synthetic construct
  source 1..75: mol_type = other DNA
gccagacgctggctggcagtaagggaacaacagaagctaaagatgaaaaccatgcaggaacagtccgcgtcaacc

SEQ ID NO: 435033 - DNA, 75 bp, synthetic construct
  source 1..75: mol_type = other DNA
caccggttggacgcgcaactgcaatattcaaagtgacagcgcattgcagcaagcctgcgaagatgtcttccgctt

SEQ ID NO: 435034 - DNA, 75 bp, synthetic construct
  source 1..75: mol_type = other DNA
ctggccatgatgggctacacgttaccggtgctgtaccaggtcattctccgggttatccgcgggaaaaaacttacc

SEQ ID NO: 435035 - DNA, 75 bp, synthetic construct
  source 1..75: mol_type = other DNA
taaataaagcctttgaggaaaaatttccgctgaaagaattaaataatccagagcatgacagttacgcaatgagtg

SEQ ID NO: 435036 - DNA, 75 bp, synthetic construct
  source 1..75: mol_type = other DNA
gccagcaggtctgccattccctgttaggttatctcggagtggtcgtggatatcgacccggtttattcgctctctg

SEQ ID NO: 435037 - DNA, 75 bp, synthetic construct
  source 1..75: mol_type = other DNA
aggttatctcggagtggtcgtggatatcgacccggtttattcgctctctgaaccgtcgcctgatgagctggcggt

SEQ ID NO: 435038 - DNA, 75 bp, synthetic construct
  source 1..75: mol_type = other DNA
tcatcgaactaatggtagttattggcattattgccattttaagcgccattggtattcccgcttatcagaactacc

SEQ ID NO: 435039 - DNA, 75 bp, synthetic construct
  source 1..75: mol_type = other DNA
attcagtgacagaacaactgaccatggcaggaataaaccggatacgccaggaaataaatgttcatggtattcctg

SEQ ID NO: 435040 - DNA, 75 bp, synthetic construct
  source 1..75: mol_type = other DNA
ccggaagatgcagaccatattacttttattcgcgggcgtattggttttgaactgcctgactggtttatcccgaag

SEQ ID NO: 435041 - DNA, 75 bp, synthetic construct
  source 1..75: mol_type = other DNA
ccggaagatgcagaacatattccttttattcgcgggcgtattggttttgaactgcctgactggtttatcccgaag

SEQ ID NO: 435042 - DNA, 75 bp, synthetic construct
  source 1..75: mol_type = other DNA
gtgaccgacggcgagcatgtcgaggttaaatggtgggatgaatctgggtattggaatagttggacggaacttaac

SEQ ID NO: 435043 - DNA, 75 bp, synthetic construct
  source 1..75: mol_type = other DNA
ccggaagatgcggaccatattgcttttattcgcgggcgtattggttttgaactgcctgactggtttatcccgaag

SEQ ID NO: 435044 - DNA, 75 bp, synthetic construct
  source 1..75: mol_type = other DNA
ccggaagatgccgaccatattccttttattcgcgggcgtattggttttgaactgcctgactggtttatcccgaag

SEQ ID NO: 435045 - DNA, 75 bp, synthetic construct
  source 1..75: mol_type = other DNA
ccggaagatgctgatcatattccttttattcgcgggcgtattggttttgaactgcctgactggtttatcccgaag

SEQ ID NO: 435046 - DNA, 75 bp, synthetic construct
  source 1..75: mol_type = other DNA
gacgtgatggaaacgagagaaggctattgtaatctgtccgatgtgcttaatgcaatagatgaacagtttcgatag

SEQ ID NO: 435047 - DNA, 75 bp, synthetic construct
  source 1..75: mol_type = other DNA
ggtagctgacgctgaacagaaaaaacagtcgctgatagacgcagcaatggccaatatcagcgtgattcagttaaa

SEQ ID NO: 435048 - DNA, 75 bp, synthetic construct
  source 1..75: mol_type = other DNA
ggcagttaaaatcgacctctacagagagcggcgtggtcgcgccggatgaacgattgccgtttgctcaaacggcag

SEQ ID NO: 435049 - DNA, 75 bp, synthetic construct
  source 1..75: mol_type = other DNA
catgacattgattatcttgagccatctgaagtttacgcgcttgggcgaacagctggctggaacgcctgccgcgcc

SEQ ID NO: 435050 - DNA, 75 bp, synthetic construct
  source 1..75: mol_type = other DNA
gtggcggggctgattatcgtcggtattttgatgaccatcttccagctcagtagcatttcgccaaacgcgaccaaa

SEQ ID NO: 435051 - DNA, 75 bp, synthetic construct
  source 1..75: mol_type = other DNA
aatattgaattaatgggcacaaacattggagtttaccctgaactatcagcagtaagtggtaacttgtttcagtat

SEQ ID NO: 435052 - DNA, 75 bp, synthetic construct
  source 1..75: mol_type = other DNA
ccccgacagttaaggggagcaacggcgcagtaatcaacaacctcgacaaactgaaagccaaggcgctggaaactg

SEQ ID NO: 435053 - DNA, 75 bp, synthetic construct
  source 1..75: mol_type = other DNA
gagcatggactggtaaaacacctgcgcaagacgattaaagagaaagaccgcgagctgaaagagctgatgcgtcag

SEQ ID NO: 435054 - DNA, 75 bp, synthetic construct
  source 1..75: mol_type = other DNA
gtctcggttaataaacagcaggaacaattctgcactattacctttgataacgttattgatgagaataaagtttat

SEQ ID NO: 435055 - DNA, 75 bp, synthetic construct
  source 1..75: mol_type = other DNA
gtactgccgctggtcccggcagcaggtctgcccgcaggcggcacttctgccactgatctggcggtggagctgaac

SEQ ID NO: 435056 - DNA, 75 bp, synthetic construct
  source 1..75: mol_type = other DNA
tccgctggaagtggcgcagtggctgcaggcctgtcatgacgcaggaatagaggttcgcgtacagataaatgaaag

SEQ ID NO: 435057 - DNA, 75 bp, synthetic construct
  source 1..75: mol_type = other DNA
atattattaacaataattcaaattgcaagaagaaataatttcattgccattttagatacactagatagatcataa

SEQ ID NO: 435058 - DNA, 75 bp, synthetic construct
  source 1..75: mol_type = other DNA
ggtgctcaacctatttttcattgtctgaaaagtttgaatgatttggtgcgactggcgaaggcgctggacgtcgat

SEQ ID NO: 435059 - DNA, 75 bp, synthetic construct
  source 1..75: mol_type = other DNA
tcgatgtggggctacctggcgaatcgggcgcgctatgagttagccaacaacggtaagttaccagcgccagagtaa

SEQ ID NO: 435060 - DNA, 75 bp, synthetic construct
  source 1..75: mol_type = other DNA
ctgaaaagcggcaaatggggcgaaatcgccccgttcactgttacgcctgaaatgctggaagcagcaaaggacgct

SEQ ID NO: 435061 - DNA, 75 bp, synthetic construct
  source 1..75: mol_type = other DNA
gttattccaaatggtgttgatataaataagtttactccagcaacgaataaaggtaaaataaaagaagaaatatta

SEQ ID NO: 435062 - DNA, 75 bp, synthetic construct
  source 1..75: mol_type = other DNA
tagaacgggtgctggagcgaagcggggaagcaccggtctacgggccaaacctgcgcgcgtcctgccgccgcttgg

SEQ ID NO: 435063 - DNA, 75 bp, synthetic construct
  source 1..75: mol_type = other DNA
gccgggccgtggcacagcctctgctgctggcagaaaaggaccgcctccgggcagaacagcgtgcggcagaagtcg

SEQ ID NO: 435064 - DNA, 75 bp, synthetic construct
  source 1..75: mol_type = other DNA
ccgggcagaacagcgcgcggcggaagttgtcgtactaccgctaatcccgttgtcagttccgcccgcagaaggcac

SEQ ID NO: 435065 - DNA, 75 bp, synthetic construct
  source 1..75: mol_type = other DNA
ccgagttcagaggcaatttatttgcatgacacgccgaatcacaacttgttcaagcgtgatacccgcgcgttgagc

SEQ ID NO: 435066 - DNA, 75 bp, synthetic construct
  source 1..75: mol_type = other DNA
gacccggaactggtaggggaggttctgaataccattcggcaactggcgcaggagagacgtactatggtgattgtg

SEQ ID NO: 435067 - DNA, 75 bp, synthetic construct
  source 1..75: mol_type = other DNA
ccatcaccgttggcgatattactattgatactgcacgttcattaagtcagcaaaaatcgctgattcgccagttgc

SEQ ID NO: 435068 - DNA, 75 bp, synthetic construct
  source 1..75: mol_type = other DNA
tacagcagtaaaccttatgcgctctctacaccaccgctctcggtcattaaccaatggcaggtggcgctaaataat

SEQ ID NO: 435069 - DNA, 75 bp, synthetic construct
  source 1..75: mol_type = other DNA
ttatggcgggacttcagccgctaccagagggggcggcggaaaacgctcgcacacaaatcgaatctcaattacccg

SEQ ID NO: 435070 - DNA, 75 bp, synthetic construct
  source 1..75: mol_type = other DNA
tgcagcgcacaggtatgctcgatggtgggccgaaaattacgctgcctggcgatgaaacacccgctgatgcagtcg

SEQ ID NO: 435071 - DNA, 75 bp, synthetic construct
  source 1..75: mol_type = other DNA
ggatttaaatccatgaagacggcttacgctaccatcaaaggtattgaggtgatgtgtgcactacgcaaaggctag

SEQ ID NO: 435072 - DNA, 75 bp, synthetic construct
  source 1..75: mol_type = other DNA
ttagcggccataataactaaactaacgtttgtagcgttagcatggtttcaaagcgggatttttgaagttttgtag

SEQ ID NO: 435073 - DNA, 75 bp, synthetic construct
  source 1..75: mol_type = other DNA
gacgtggcgcagtggctgcatgcctatcacgatgccggaatagaagttcgtgtacaggttaatgaaagtgtcact

SEQ ID NO: 435074 - DNA, 75 bp, synthetic construct
  source 1..75: mol_type = other DNA
gtttgacgagccaacgtcggcgctggatccagagctggtgggcgaagtcctgaacaccatccgccagctggcgca

SEQ ID NO: 435075 - DNA, 75 bp, synthetic construct
  source 1..75: mol_type = other DNA
ggggccgcaaaagcgttatttgccgatcctcagcagcctcgcacccgccagttcctcgagaagtttctgctgcaa

SEQ ID NO: 435076 - DNA, 75 bp, synthetic construct
  source 1..75: mol_type = other DNA
ttatcggtccgagtggttccggcaaaaccacgttgctacgcagcataaatctgctggaacaaccggaagcgggaa

SEQ ID NO: 435077 - DNA, 75 bp, synthetic construct
  source 1..75: mol_type = other DNA
tgacgagatttatcgccgtcagcgtgaaatgaaagaggatctgaacaatctggaggatttgggttcaatccgagc

SEQ ID NO: 435078 - DNA, 75 bp, synthetic construct
  source 1..75: mol_type = other DNA
agcaaaaccgtctggcaatcctgctggcggtgcttcaccgtcacggtggcctgcaaatggccgatcaggatgtgt

SEQ ID NO: 435079 - DNA, 75 bp, synthetic construct
  source 1..75: mol_type = other DNA
accgcttcggcgcggtaaatgagctgggcgtattcgcgatgactgaacaggggctacgcgaagtcagcaaccctt

SEQ ID NO: 435080 - DNA, 75 bp, synthetic construct
  source 1..75: mol_type = other DNA
ctcagtggctatgccggtagcgctggagtggcaaaagtccagaaactctccgacatcagccttgaggagctgccg

SEQ ID NO: 435081 - DNA, 75 bp, synthetic construct
  source 1..75: mol_type = other DNA
gggctgcgcgaagtcagcaacccttccgccatcttcttaagccgtggcgatgaagtgacctccggcagttcagtg

SEQ ID NO: 435082 - DNA, 75 bp, synthetic construct
  source 1..75: mol_type = other DNA
ggtcgatcactcgatgatggcgaatccacgccgcgtggcggtagggctggagcaaaaccgtctggcgatcctgct

SEQ ID NO: 435083 - DNA, 75 bp, synthetic construct
  source 1..75: mol_type = other DNA
tttcgcaccttacgcagccataaaaaccgcttcggcgcggtgaatgagctgggcgtcttcgcgatgactgaacag

SEQ ID NO: 435084 - DNA, 75 bp, synthetic construct
  source 1..75: mol_type = other DNA
atcgcaacgacgagatttatcaacgtcagcgggagatgaaagagaggttgagcagtctggatgatttggtttcaa

SEQ ID NO: 435085 - DNA, 75 bp, synthetic construct
  source 1..75: mol_type = other DNA
acccttgtgtggggtgatgccgataatcaacaggtgaaactgtcgatgccggaactggaagaactggcggcagca

SEQ ID NO: 435086 - DNA, 75 bp, synthetic construct
  source 1..75: mol_type = other DNA
ttttgaattcagtggtcatcgctgggatgccggaaaggcgtcacagtccagactgacacctgttgttgcggtggc

SEQ ID NO: 435087 - DNA, 75 bp, synthetic construct
  source 1..75: mol_type = other DNA
atcaacaggtgaaactgtcaatgccggaactggaagaactggcgacagcaatggcgcaggcacaggttgagcgca

SEQ ID NO: 435088 - DNA, 75 bp, synthetic construct
  source 1..75: mol_type = other DNA
tcacgtttgaatggaacggtcgcacgtggaacgctgacgcctcgtcagtggcccgcctgtccccggtggtcatgc

SEQ ID NO: 435089 - DNA, 75 bp, synthetic construct
  source 1..75: mol_type = other DNA
cccgttgtcccctctggatgaaatccgcatcgttgatcaagacgagaacgacgtcgcgccgggcgaaaccgggca

SEQ ID NO: 435090 - DNA, 75 bp, synthetic construct
  source 1..75: mol_type = other DNA
gatggcatcaaaatccgatacggcgcgtgacgtgatgacgtggggtgacgccgataatcaacaagtgaagatgtc

SEQ ID NO: 435091 - DNA, 75 bp, synthetic construct
  source 1..75: mol_type = other DNA
ccccgtttacagtcacgcctgaacttatcgcagcggcaaaagatgccaaaaagatggaaatcgaggcgtggcgca

SEQ ID NO: 435092 - DNA, 75 bp, synthetic construct
  source 1..75: mol_type = other DNA
gcgaaatcgccccgttcaccgtcacgccggaacttatcgctgcggcaaaagatgccaaaaagcgggaaatcgagg

SEQ ID NO: 435093 - DNA, 75 bp, synthetic construct
  source 1..75: mol_type = other DNA
gatgaagcaaaaactgaatagtctggaggatttggtttcaatcaggaaactggtcgttagcccagaaaaaacttg

SEQ ID NO: 435094 - DNA, 75 bp, synthetic construct
  source 1..75: mol_type = other DNA
atgagatttatcggcgtcagcgggagatgaaagaggaactgagcagtctggaggatttgaggtcggttaggaatt

SEQ ID NO: 435095 - DNA, 75 bp, synthetic construct
  source 1..75: mol_type = other DNA
gttcgaatggaacggccgcacctggaatgctggccccgactcaatggcccgtctttatccggtagtaatggcggc

SEQ ID NO: 435096 - DNA, 75 bp, synthetic construct
  source 1..75: mol_type = other DNA
ctgtcagccttgaacacggggcgataaattgcgaaatattatttgacgatatggaggaatatgtaccctataccg

SEQ ID NO: 435097 - DNA, 75 bp, synthetic construct
  source 1..75: mol_type = other DNA
aacaggtgaaactgtcgatgccggaactggaagaactggctgcagcaatggcgcaggcgcaggtcgatcgcaacg

SEQ ID NO: 435098 - DNA, 75 bp, synthetic construct
  source 1..75: mol_type = other DNA
ctgataatcagaaggtgaaactgtcgatgctggaacttgaggggctggctgcagcgatggcgcaggcgcaggtcg

SEQ ID NO: 435099 - DNA, 75 bp, synthetic construct
  source 1..75: mol_type = other DNA
atcgcaatgacgagatttatcagcgccagcgtgaaatgaaggaagaactgaataacctgaatgatttacgctcag

SEQ ID NO: 435100 - DNA, 75 bp, synthetic construct
  source 1..75: mol_type = other DNA
cagaacaggaggcgcagccgttcacgttcgaatggaacggtcgtacctggaatggtggtgcagactcaataagtc

SEQ ID NO: 435101 - DNA, 75 bp, synthetic construct
  source 1..75: mol_type = other DNA
atgaaaatcagagcggtaaaaggcatcagaaacgcgcattatcttgaaaatggcgcggttgactgcgaggtgtta

SEQ ID NO: 435102 - DNA, 75 bp, synthetic construct
  source 1..75: mol_type = other DNA
caatggcccgtctttatccggtagtaatggcggcgaaatccgatacggcacgaaccgcccttgcatggggtgatg

SEQ ID NO: 435103 - DNA, 75 bp, synthetic construct
  source 1..75: mol_type = other DNA
gcagctcttaatcttcatttcagtaaaccggtgacaggacggtcagactggcgggcggggatgacggtgattatc

SEQ ID NO: 435104 - DNA, 75 bp, synthetic construct
  source 1..75: mol_type = other DNA
tgccggtaaatcagcccgtgcttttgagggcagtgagacatccggcgctggtattgttcctgttattcagctgaa

SEQ ID NO: 435105 - DNA, 75 bp, synthetic construct
  source 1..75: mol_type = other DNA
ctggggaataacagtgctgatgcttatgtgtttaatggcggcgtacctgacagcaacgcgtggagcactgctgac

SEQ ID NO: 435106 - DNA, 75 bp, synthetic construct
  source 1..75: mol_type = other DNA
tcagcgtcaagcaaccagacttagccatgaattaccaagcgataaatattgcgctttgcttgctgtaatgtgcgc

SEQ ID NO: 435107 - DNA, 75 bp, synthetic construct
  source 1..75: mol_type = other DNA
atgcaggattcagaatttagagcgatgcttcaggcatcaagagagcgcaacaagcacaactcctacgcttacaca

SEQ ID NO: 435108 - DNA, 75 bp, synthetic construct
  source 1..75: mol_type = other DNA
ttacgcgggcctgtcgtttggtaatgaagcctctacccgtcaccgttttcaggtgtctaacccgcgactggcggc

SEQ ID NO: 435109 - DNA, 75 bp, synthetic construct
  source 1..75: mol_type = other DNA
agccatctgctgacggctgcagccttcggcacgatgaagaacagcgaaaatgagcttgctgagcaacttatagaa

SEQ ID NO: 435110 - DNA, 75 bp, synthetic construct
  source 1..75: mol_type = other DNA
ctgtccgccgcgtgttcacgaaaacagcgcagctctggcataacgccacgccgcatccgcactggtgcggcctga

SEQ ID NO: 435111 - DNA, 75 bp, synthetic construct
  source 1..75: mol_type = other DNA
gcggaacatctgaaaggttactggccgaatcaactgagtttctcagaatcatgcggaatggtgatgagaatgctg

SEQ ID NO: 435112 - DNA, 75 bp, synthetic construct
  source 1..75: mol_type = other DNA
ctctaaataaagttcggacagtaaaacgattactggatgtatggcccgaagctaaagaactgcttccaacagacg

SEQ ID NO: 435113 - DNA, 75 bp, synthetic construct
  source 1..75: mol_type = other DNA
atggtatgcagcgcccagcaaggcgcgtggctggtggctgattcagaatgaagatcgcgaggttgtagtggccct

SEQ ID NO: 435114 - DNA, 75 bp, synthetic construct
  source 1..75: mol_type = other DNA
atggcctgccgtacttcgctggaagtggaacatctgctggcgcaattccgcatgacccaacaggacgcaccactg

SEQ ID NO: 435115 - DNA, 75 bp, synthetic construct
  source 1..75: mol_type = other DNA
aggcattgacgaagtaattcgggcaattacaccgagggaacgttatatgtcaaccagaaagagcacccagaacag

SEQ ID NO: 435116 - DNA, 75 bp, synthetic construct
  source 1..75: mol_type = other DNA
gattcttacgagcaactaccatcacgaattgaagatgtaattatcggtacttgtcgcagtcttggaagagataat

SEQ ID NO: 435117 - DNA, 75 bp, synthetic construct
  source 1..75: mol_type = other DNA
gaattgaagatgtaattatcggtacttgtcgcagttttggaagggataactatcaccggaaagttttctatttac

SEQ ID NO: 435118 - DNA, 75 bp, synthetic construct
  source 1..75: mol_type = other DNA
ccggtactgtggaagtacctctatcgatatgcgtgccaacggcgaaaagaaaacgtcaatggatacactgacagc

SEQ ID NO: 435119 - DNA, 75 bp, synthetic construct
  source 1..75: mol_type = other DNA
cgtcaggctacccgattaggccacgaactaccaagcgataaatattgcgctaacttaactaccatttgcattaaa

SEQ ID NO: 435120 - DNA, 75 bp, synthetic construct
  source 1..75: mol_type = other DNA
atgaacgacagagaatttagagcgatgcttcaggcatcaaaagaacgcaacagacacaacggttacagccacaca

SEQ ID NO: 435121 - DNA, 75 bp, synthetic construct
  source 1..75: mol_type = other DNA
atgaacgacagagaatttcaaagatttcttgaagagagcaaagcaagaaacagaagcaacggttacagctacaca

SEQ ID NO: 435122 - DNA, 75 bp, synthetic construct
  source 1..75: mol_type = other DNA
attacgccacgagacagatttatgtcagtacgcaaagaaaaagaaaatactttaaaaactttcttgatgagtttt

SEQ ID NO: 435123 - DNA, 75 bp, synthetic construct
  source 1..75: mol_type = other DNA
atgagagacgcagaatttagagcgatgcttcaggcatcaagagaacgcaacaagcacaactcctacgcttacaca

SEQ ID NO: 435124 - DNA, 75 bp, synthetic construct
  source 1..75: mol_type = other DNA
ttgccgttggaaatattgagccaatggaaaacgagcaaccagatttcgagtttgacccgtatttagttacagagg

SEQ ID NO: 435125 - DNA, 75 bp, synthetic construct
  source 1..75: mol_type = other DNA
ccttgccagccattttctctggctggcgtatcgaaaaagaactcacttggtcgtgcgcacggttttgcctgcgat

SEQ ID NO: 435126 - DNA, 75 bp, synthetic construct
  source 1..75: mol_type = other DNA
gtttgctggaattggcggcattcggcgcgggtttgagtcgatagggggtcagtgcgtatttaccagcgaatggaa

SEQ ID NO: 435127 - DNA, 75 bp, synthetic construct
  source 1..75: mol_type = other DNA
tggtacgcattatcgacgcgcgtcgtccggcgatgtttgtgctcgaaaacgtcaaaaacctgaaaagtcacgacc

SEQ ID NO: 435128 - DNA, 75 bp, synthetic construct
  source 1..75: mol_type = other DNA
ttcaccagattgtgaatcgcctggacatcatgctgccgggcaatcgccccttcgttgcccccagtgccgttattc

SEQ ID NO: 435129 - DNA, 75 bp, synthetic construct
  source 1..75: mol_type = other DNA
atggattttaatttaaatgatgagcaggaactgtttgtcgccggtatccgcgaactgatggccagcgaaaactgg

SEQ ID NO: 435130 - DNA, 75 bp, synthetic construct
  source 1..75: mol_type = other DNA
gcgcttcaccgggacgtataccggagctgatgcgcgatcttgcaagtatgggacaacttgtgaaattaccgacaa

SEQ ID NO: 435131 - DNA, 75 bp, synthetic construct
  source 1..75: mol_type = other DNA
cttatgaccgtattctggcttcccgtatgggcgcatatgcgattgatctgctgctggcaggctacggtggtcgtt

SEQ ID NO: 435132 - DNA, 75 bp, synthetic construct
  source 1..75: mol_type = other DNA
cctacgtgctgtaccagttgccgggtgggtttaacaccttcctgcgcgaaggcacacaagagcagatcgacaaga

SEQ ID NO: 435133 - DNA, 75 bp, synthetic construct
  source 1..75: mol_type = other DNA
aggaactgtttgtcgccggtatccgcgaactgatggccagcgaaaactgggaagcctattttgccgagtgcgacc

SEQ ID NO: 435134 - DNA, 75 bp, synthetic construct
  source 1..75: mol_type = other DNA
cggcgcgctacgccaaccagcgcgtacagtttggcgaggctattggtcgtttccagttgattcaggaaaaattcg

SEQ ID NO: 435135 - DNA, 75 bp, synthetic construct
  source 1..75: mol_type = other DNA
caatatgaagagatcagaaaactgggtaaaggcgatcatctggtgaagctgaaaaccagcccgcaggcacgaaaa

SEQ ID NO: 435136 - DNA, 75 bp, synthetic construct
  source 1..75: mol_type = other DNA
ggaaaagtacgaactggtacgtatcgatcacagaggattttcgtggcaacaacagtctccatatatttccgtagt

SEQ ID NO: 435137 - DNA, 75 bp, synthetic construct
  source 1..75: mol_type = other DNA
cgcgggcggcgaagccctgtctgtctccagtggctgtctggcaaatgctacttacacgcctgctggaaaaacact

SEQ ID NO: 435138 - DNA, 75 bp, synthetic construct
  source 1..75: mol_type = other DNA
atcagatgattaaaatggcggaacatctgaaaggttactggccgaatcaactgagtttctcagaatcatgcggaa

SEQ ID NO: 435139 - DNA, 75 bp, synthetic construct
  source 1..75: mol_type = other DNA
ccaaccgcgtcctggtgaagtccacggtgaacattatttctttgttaatcatgatgaatttaaagaaatgattag

SEQ ID NO: 435140 - DNA, 75 bp, synthetic construct
  source 1..75: mol_type = other DNA
caaagctccgtcgatatcgacaggattaatcaccatattgttaatgtggaaaagattaactttagattgccggaa

SEQ ID NO: 435141 - DNA, 75 bp, synthetic construct
  source 1..75: mol_type = other DNA
aattaccgacaagaagagaaagggccttcccgagagtggtaaaggagaggccctggaaataccccacagccccga

SEQ ID NO: 435142 - DNA, 75 bp, synthetic construct
  source 1..75: mol_type = other DNA
acagcgatccgcgtgaaggctatcatcaggactggaacacactgatttataactatggtcgtcgtgaagtcagta

SEQ ID NO: 435143 - DNA, 75 bp, synthetic construct
  source 1..75: mol_type = other DNA
attctttagcggcgtcattccgcgacgtaaaaactttttccgttatcaattagctgttgtctggcatggtcaaca

SEQ ID NO: 435144 - DNA, 75 bp, synthetic construct
  source 1..75: mol_type = other DNA
gaaatcgccagccatggtcgtcagcactcactgagcctcacgttaccgccgttggcaacgatttggctggtccgg

SEQ ID NO: 435145 - DNA, 75 bp, synthetic construct
  source 1..75: mol_type = other DNA
aattaccgacgagaagggaaagggccttcccgagagtggtaaaggagaggccctggaaataccccacagccccga

SEQ ID NO: 435146 - DNA, 75 bp, synthetic construct
  source 1..75: mol_type = other DNA
aactatgggcgtcgtgaagtcagtaatttcctcgtcggcaacgcgctgtactggattgaacgttttggtattgat

SEQ ID NO: 435147 - DNA, 75 bp, synthetic construct
  source 1..75: mol_type = other DNA
aaacttcgtcctgccgttgtcgcacgacgaagtggtgcacggcaaaaaatcgattctcgacagaatgccgggcga

SEQ ID NO: 435148 - DNA, 75 bp, synthetic construct
  source 1..75: mol_type = other DNA
tttggcccgctaatccaggaaatggatgcctggctattatctgaaggtactcacctgcgcccgtatgaaacctta

SEQ ID NO: 435149 - DNA, 75 bp, synthetic construct
  source 1..75: mol_type = other DNA
aagggaaagggccttcccgggagtggtaaaggagaggccctggaaataccccacagccccgaataaatatcctcc

SEQ ID NO: 435150 - DNA, 75 bp, synthetic construct
  source 1..75: mol_type = other DNA
ctgacggctgcagccttcggcacgatgaagaacagcgaaaatgagcttgctgagcaacttatagaacaaaccggc

SEQ ID NO: 435151 - DNA, 75 bp, synthetic construct
  source 1..75: mol_type = other DNA
tcgactggcatctgttggaaggcggcgataactggcaccacggtgtccagcgtctggtgcgcgatctgaacctca

SEQ ID NO: 435152 - DNA, 75 bp, synthetic construct
  source 1..75: mol_type = other DNA
tcgggattctctacaactacactgaaaacttcgtcctgccgttgtcgcatgatgaagtggtccacggtaaaaaat

SEQ ID NO: 435153 - DNA, 75 bp, synthetic construct
  source 1..75: mol_type = other DNA
ggcttctggtacaagtggaacctcggctggatgcatgacaccctggactacatgaagctcgacccggtttatcgt

SEQ ID NO: 435154 - DNA, 75 bp, synthetic construct
  source 1..75: mol_type = other DNA
ggtcaatctggggtggaatggtcatcgtttcccgtcaacatgggcggcctttgacccgtacatcagtcttgagac

SEQ ID NO: 435155 - DNA, 75 bp, synthetic construct
  source 1..75: mol_type = other DNA
atggcgcgtggcagccttctgacaatggcgctgttgagcatggctgtcagcagtctctgccgggcgggggcgcat

SEQ ID NO: 435156 - DNA, 75 bp, synthetic construct
  source 1..75: mol_type = other DNA
tggacattaccggcacatcacccgcaggccggtgaaatccatccctggccgtggacgctgaatgtggctggtaaa

SEQ ID NO: 435157 - DNA, 75 bp, synthetic construct
  source 1..75: mol_type = other DNA
cgctcaggctctgctgataactttgcatggagccttggcgcaggtgtccgctatgacgtcaccccggatatcgcg

SEQ ID NO: 435158 - DNA, 75 bp, synthetic construct
  source 1..75: mol_type = other DNA
gttgtgatgcaggaatggaagagaaacatgtaaatgccttggatatattcacacatagctatccagaaatttatg

SEQ ID NO: 435159 - DNA, 75 bp, synthetic construct
  source 1..75: mol_type = other DNA
ttctgctgatgctggcaggcagcggtatgtgtcagtctgttgcacagaccattcctgacgggtatgcgcaggtgg

SEQ ID NO: 435160 - DNA, 75 bp, synthetic construct
  source 1..75: mol_type = other DNA
gacaaactactgaaaaatcaacttactccacgttaggaagcaggtttagaattctcccagaaggatatttttccg

SEQ ID NO: 435161 - DNA, 75 bp, synthetic construct
  source 1..75: mol_type = other DNA
agccgcaaaatctgtttccgctttatcatcacaacgtagagcgcagcctgctgtgggatgttttacagcgttatc

SEQ ID NO: 435162 - DNA, 75 bp, synthetic construct
  source 1..75: mol_type = other DNA
tcatcacaacgtagagcgcagcctgctatgggatgttctacagcgttatcagcatgttccggcgcttttgcaacg

SEQ ID NO: 435163 - DNA, 75 bp, synthetic construct
  source 1..75: mol_type = other DNA
cggtgataagagcccggcgatttctgcaaccaaagcaatgaccggtcactctctgggcgctgcgggtgtgcagga

SEQ ID NO: 435164 - DNA, 75 bp, synthetic construct
  source 1..75: mol_type = other DNA
aaaattcatggcgttaactactccatcagctccgcgtgtgcgacttccgcacactgtatcggtaacgcagtagag

SEQ ID NO: 435165 - DNA, 75 bp, synthetic construct
  source 1..75: mol_type = other DNA
ctagcggaatacaatgatgagatgctcgttagtaatgcacggaaatgtataaaaaggatgagttccggtcatgcg

SEQ ID NO: 435166 - DNA, 75 bp, synthetic construct
  source 1..75: mol_type = other DNA
gtgttgttaccaatattgcggtatgggatggtgagagtgcctggcaaccaactaatgcgttagttatacctgtat

SEQ ID NO: 435167 - DNA, 75 bp, synthetic construct
  source 1..75: mol_type = other DNA
tatccctgtcattattggctggatgcgtacaaaaaccgttagtaacggtcaatgctttatcttccgggcaatctg

SEQ ID NO: 435168 - DNA, 75 bp, synthetic construct
  source 1..75: mol_type = other DNA
ctgatgcagtcccttatcaagagttcgcaaggcttattggtaagactcccatggctgttcggggaatgattgata

SEQ ID NO: 435169 - DNA, 75 bp, synthetic construct
  source 1..75: mol_type = other DNA
agaaagtatcaaaaatcttcttgagattacttatggtaaacacttgccccataagaattcacaattatgtttttc

SEQ ID NO: 435170 - DNA, 75 bp, synthetic construct
  source 1..75: mol_type = other DNA
aacgctgaaatgtatgcatggataaatagcgcgcagggtgcaagtgaaccgccccggaaatcctggagactaaac

SEQ ID NO: 435171 - DNA, 75 bp, synthetic construct
  source 1..75: mol_type = other DNA
gataaatagcgcgcagggtgcaagagaacttaacttgccttctgtttatggagatgccgcagaatggaacacagc

SEQ ID NO: 435172 - DNA, 75 bp, synthetic construct
  source 1..75: mol_type = other DNA
atgcaagcagggttaaaagaggtcatgaggactcacttccctgaatatgaaataatatccagcgcctctgcggag

SEQ ID NO: 435173 - DNA, 75 bp, synthetic construct
  source 1..75: mol_type = other DNA
ggtgatgctgacttgccgaccgggtaatgctttgtatgtcattaacccaagtactctcgtgcagtatcctttaaa

SEQ ID NO: 435174 - DNA, 75 bp, synthetic construct
  source 1..75: mol_type = other DNA
aggttttatggcgggcaaaaaaaacggtcatggcggtcgtttttgcgtatctctttcatcctgccgcaaaaatgg

SEQ ID NO: 435175 - DNA, 75 bp, synthetic construct
  source 1..75: mol_type = other DNA
cgtcggcaatatgaaacttcaacattaaaaacaactaatacaggtgaaccagcgataaacggacgtatagggctg

SEQ ID NO: 435176 - DNA, 75 bp, synthetic construct
  source 1..75: mol_type = other DNA
ttgtattgcttaccagttcggcagcggcgctggcggcgccacaagtgatcaccgttagtcgctttgaaattggca

SEQ ID NO: 435177 - DNA, 75 bp, synthetic construct
  source 1..75: mol_type = other DNA
atgatgaaaaaaagtattctggcgtttctgttactcaccagttctgcagcggcgctggcggcaccgcaggtgatt

SEQ ID NO: 435178 - DNA, 75 bp, synthetic construct
  source 1..75: mol_type = other DNA
ggcaatgcgctgtatgtcattaaccccagcactctggtgcagtaccctttgaacgatgtcgcgcaaaaagaagtt

SEQ ID NO: 435179 - DNA, 75 bp, synthetic construct
  source 1..75: mol_type = other DNA
aaacctttccggcgggcgtttatacacccatgcgctcgcggaactcctccctcagtttcacctgaccgcgcctct

SEQ ID NO: 435180 - DNA, 75 bp, synthetic construct
  source 1..75: mol_type = other DNA
atgatgtttccctggctgatgcaagaaaacgtcgtagcgagtacagggcgttaatttcgtcaggaactgacccac

SEQ ID NO: 435181 - DNA, 75 bp, synthetic construct
  source 1..75: mol_type = other DNA
aagaaatcaaccttgaggcggcaacctggacgataccagccggacgcatgaagatgcgccgtgatcatgtgatcc

SEQ ID NO: 435182 - DNA, 75 bp, synthetic construct
  source 1..75: mol_type = other DNA
aagatgcgccgtgaccatgtgatccctctttgcggtcaggcgatggctgtactggaaacaatgaagccaatcagc

SEQ ID NO: 435183 - DNA, 75 bp, synthetic construct
  source 1..75: mol_type = other DNA
agcaagtacagccatgaatgaagctggattaaatcctgatgttatcgagtctgccttagcccacagtgataaaaa

SEQ ID NO: 435184 - DNA, 75 bp, synthetic construct
  source 1..75: mol_type = other DNA
ctcaccgctcgccgctttgttgagatactcacacccattaaagcacgcggcaacctggaaactctgaaacgcgtt

SEQ ID NO: 435185 - DNA, 75 bp, synthetic construct
  source 1..75: mol_type = other DNA
gatagatacccttaccgcccgtcgttttgtggaaatcctcacccctgttaaggagcgcggcaatctggaaacact

SEQ ID NO: 435186 - DNA, 75 bp, synthetic construct
  source 1..75: mol_type = other DNA
ttgccgttgggaatattgagccaatggaaaacgaacaagcagactttgaatttgacccgtatttagttacagagg

SEQ ID NO: 435187 - DNA, 75 bp, synthetic construct
  source 1..75: mol_type = other DNA
ttgtcgttggtaatatcagccttacaaccagtgaaccagactttgaatttgacgtatacgcacaagcagaggaat

SEQ ID NO: 435188 - DNA, 75 bp, synthetic construct
  source 1..75: mol_type = other DNA
ttttgattcttacgagcaattaccacgcaagtttgaagatgtaattatcggattctgtagatgcgaaggtcaccc

SEQ ID NO: 435189 - DNA, 75 bp, synthetic construct
  source 1..75: mol_type = other DNA
attacaccgagggaacgttatatgccaaccagaaagagcacaaagaacagcatcaaaaattatttgaataacttt

SEQ ID NO: 435190 - DNA, 75 bp, synthetic construct
  source 1..75: mol_type = other DNA
agcttgatgatattttcattggattctgtagaggtgaaggtcacccgaaatacaataaaaaactattttatcttc

SEQ ID NO: 435191 - DNA, 75 bp, synthetic construct
  source 1..75: mol_type = other DNA
caaccagaaagagcacccagaacactattaaaaattatttggctaactttgattcttacgaacaattaacgccac

SEQ ID NO: 435192 - DNA, 75 bp, synthetic construct
  source 1..75: mol_type = other DNA
atgatgcagtgtttcttcaaagcccgagagaaatacggcttcttcaaacttcctttcgaaaggaccgaacgttag

SEQ ID NO: 435193 - DNA, 75 bp, synthetic construct
  source 1..75: mol_type = other DNA
acccatgcgctcgcggaactcctcccgcaatttcatctgaccgcgcctcttgaacgacgcatcactcacgaaagc

SEQ ID NO: 435194 - DNA, 75 bp, synthetic construct
  source 1..75: mol_type = other DNA
gaatctgtgatgacttacccggcggcgcatttctttatactaatcaacaaacgctctcgttagggattgtttgcc

SEQ ID NO: 435195 - DNA, 75 bp, synthetic construct
  source 1..75: mol_type = other DNA
tgttccaccgctgcgccagttattctggcgtcatttacgtcgtcacggattgtggcatctggcaggcgatgttat

SEQ ID NO: 435196 - DNA, 75 bp, synthetic construct
  source 1..75: mol_type = other DNA
tgaacgacgcatcactcacgaaagcctttccctgttaacgccggatggcgcaacgacgttttccagcttacagcc

SEQ ID NO: 435197 - DNA, 75 bp, synthetic construct
  source 1..75: mol_type = other DNA
tgcgaggcatggatatggcgttcattggcgcacaggcagcagcacaaacactgattagcgcctgccagcaacgcg

SEQ ID NO: 435198 - DNA, 75 bp, synthetic construct
  source 1..75: mol_type = other DNA
tgaacgacgcatcactcacgaaagcctttctctgctaacgccggatggcgcaacgacgttttccagcttacagcc

SEQ ID NO: 435199 - DNA, 75 bp, synthetic construct
  source 1..75: mol_type = other DNA
cctacccctttacgcctagaacgcacctctgaacgttttaagcgaacgccgaaagaacagttcattgaatttaaa

SEQ ID NO: 435200 - DNA, 75 bp, synthetic construct
  source 1..75: mol_type = other DNA
taccccagcaaaccgaatcgacgtgccagcacttcacgctgtttggcgttcagctcgaacagccatttgacgatg

SEQ ID NO: 435201 - DNA, 75 bp, synthetic construct
  source 1..75: mol_type = other DNA
gtgagggctgaggaacaaagcgtattccggcgtagcggagatgaagcatttatcattcagcagcagcgtcaggaa

SEQ ID NO: 435202 - DNA, 75 bp, synthetic construct
  source 1..75: mol_type = other DNA
agatagcaaaacgtttcgccaaccttacgaaatggatggaatcgtcgtcaatcaagatgaggagtaataaaggta

SEQ ID NO: 435203 - DNA, 75 bp, synthetic construct
  source 1..75: mol_type = other DNA
gcagagaaatggatacggatgtgatttcagttcggcataacagacaacagatccatttgtttaatacctatcagg

SEQ ID NO: 435204 - DNA, 75 bp, synthetic construct
  source 1..75: mol_type = other DNA
cgccagcaataacgccctcttccgggtattcttctcttgcagataccgatataccagcgcaacgtgtagccgcta

SEQ ID NO: 435205 - DNA, 75 bp, synthetic construct
  source 1..75: mol_type = other DNA
ggaagacgacagtcaggttaagcgcatgctggtggagtgggggaacatcgttaagaaagggaaagtagaaatcac

SEQ ID NO: 435206 - DNA, 75 bp, synthetic construct
  source 1..75: mol_type = other DNA
ggaagacgacagtcaggttaaacggatggcaatcgaatgggggcctgtagtaaagcctggaagggtagagataac

SEQ ID NO: 435207 - DNA, 75 bp, synthetic construct
  source 1..75: mol_type = other DNA
atgaagctgatcctgcctttcccacccagcgtgaacacgtactggcgacaccccaacaaaggggtgtttgctggt

SEQ ID NO: 435208 - DNA, 75 bp, synthetic construct
  source 1..75: mol_type = other DNA
aatgcttataagtgggcgtccggtgatgcagcagcagaaaaagcagcagcagaagaacagcgacgtaatgaagca

SEQ ID NO: 435209 - DNA, 75 bp, synthetic construct
  source 1..75: mol_type = other DNA
gccacacacaccggccagataagagcagaacttgcccgtcagggacgccctgtcgggccatttgatcaaatgatc

SEQ ID NO: 435210 - DNA, 75 bp, synthetic construct
  source 1..75: mol_type = other DNA
atgctgaagtttatgctcgataccaacatctgcatttttacgataaagaacaaacccgccagcgtcagggagcgt

SEQ ID NO: 435211 - DNA, 75 bp, synthetic construct
  source 1..75: mol_type = other DNA
ggaagacgacagtcaggtgaaaagaatgctggttgagtggggaccggttaacctcgaaggctttccggtagagcg

SEQ ID NO: 435212 - DNA, 75 bp, synthetic construct
  source 1..75: mol_type = other DNA
atgctggtggaatggggacccgtagtgccgaaaggtcgggtagagataacgatcagcagatatgaaccggcgggg

SEQ ID NO: 435213 - DNA, 75 bp, synthetic construct
  source 1..75: mol_type = other DNA
acgcgaattagtaaccgccagcttgaatgggaaggcgtcggtaactggcgaattcacagcagcaaagaaatgcag

SEQ ID NO: 435214 - DNA, 75 bp, synthetic construct
  source 1..75: mol_type = other DNA
atgaagctgatcttgcctttcccccccagcgtgaacacgtactggcgacaccccaacaaaggggagtttgctggt

SEQ ID NO: 435215 - DNA, 75 bp, synthetic construct
  source 1..75: mol_type = other DNA
atgaagctgatcttgcctttcccacccagcgtgaacacgtactggcgacaccccaacaaaggggcgtttgctggt

SEQ ID NO: 435216 - DNA, 75 bp, synthetic construct
  source 1..75: mol_type = other DNA
atgaagctgatcatgcctttcccccccagcgtgaacacgtactggcgacaccccaacaaaggggtgtttgctggt

SEQ ID NO: 435217 - DNA, 75 bp, synthetic construct
  source 1..75: mol_type = other DNA
tggttaagttattccgaagttggcgatgatggcaaagccggaactgctgtgggttatggccgcttaagtgatgat

SEQ ID NO: 435218 - DNA, 75 bp, synthetic construct
  source 1..75: mol_type = other DNA
ttagggcagaatagcgacgtatcagcagcaggaaaggccaatgataacgtagcatataacaaatcagttgatgac

SEQ ID NO: 435219 - DNA, 75 bp, synthetic construct
  source 1..75: mol_type = other DNA
cagaaccaggaggctatgaaaactctcgctatatcttctgatgcaatgtcacaaattggtaacggtatggcggcg

SEQ ID NO: 435220 - DNA, 75 bp, synthetic construct
  source 1..75: mol_type = other DNA
gagtagaaatagatggcgatagctcagggctatctaaatcactacagcaggcagaaaataaaatagatgcctttg

SEQ ID NO: 435221 - DNA, 75 bp, synthetic construct
  source 1..75: mol_type = other DNA
gtggagcaacctcggttatttctgacaaccttaatgaccttgtgcacggtgcagaagatttaggtgatttcttca

SEQ ID NO: 435222 - DNA, 75 bp, synthetic construct
  source 1..75: mol_type = other DNA
gcgccgacttaataaccttaaagctgatgtagaagatcagggcttccttgccagttttaacagaattggaatgga

SEQ ID NO: 435223 - DNA, 75 bp, synthetic construct
  source 1..75: mol_type = other DNA
ctggttggtggtgttgttgatctcgcgacctggcttgttaaagttggtgctgaagcagggaagctaattgacctg

SEQ ID NO: 435224 - DNA, 75 bp, synthetic construct
  source 1..75: mol_type = other DNA
tcgaccatccctgggcgctggcctttttacccgataatcacggtatgttaatcactctgcgcggcggcgagttgc

SEQ ID NO: 435225 - DNA, 75 bp, synthetic construct
  source 1..75: mol_type = other DNA
gcgcgccgagatctggtcttatggcattcgtaatccgcaaggaatggcgatgaatccgtggagtaatgcactgtg

SEQ ID NO: 435226 - DNA, 75 bp, synthetic construct
  source 1..75: mol_type = other DNA
ctggataaattacagggcaaactggtgcgtctgaccgaacagggcgagatcccggatgataatccctttgtaaac

SEQ ID NO: 435227 - DNA, 75 bp, synthetic construct
  source 1..75: mol_type = other DNA
ctagtgctggtcagttccacggtggcgtagatgaaatacccgctaacttgaataataaatcttttattcttaaag

SEQ ID NO: 435228 - DNA, 75 bp, synthetic construct
  source 1..75: mol_type = other DNA
tctctgggcagctcctgcaacggtaaatgtcgaagtactgcaagacaaactcgatcacccctgggcgctggcctt

SEQ ID NO: 435229 - DNA, 75 bp, synthetic construct
  source 1..75: mol_type = other DNA
gacaaagtgacagaagatggccgtattttaacggacagagggcagcgaattcgtgatgttcgcactggacccgac

SEQ ID NO: 435230 - DNA, 75 bp, synthetic construct
  source 1..75: mol_type = other DNA
tgcaaaccaactgtaagagcaattatcagaactttaaaatactggtatctggatttgcttttcggcaggggctgg

SEQ ID NO: 435231 - DNA, 75 bp, synthetic construct
  source 1..75: mol_type = other DNA
tcaagcccagagaaagctaattctgcgttaggttggattgctcaacgtggtttgactgagatggtacaggatgcc

SEQ ID NO: 435232 - DNA, 75 bp, synthetic construct
  source 1..75: mol_type = other DNA
ttaatttggggactggggtaccatatagtgtaatggaggtaatcactacatttgaaaagattacaggggaaaaag

SEQ ID NO: 435233 - DNA, 75 bp, synthetic construct
  source 1..75: mol_type = other DNA
tgcccgtagatgagtcttttaatattggtggagttacaaatccctatggatcaacaaaattatttattgaaaata

SEQ ID NO: 435234 - DNA, 75 bp, synthetic construct
  source 1..75: mol_type = other DNA
ttccgcttgatgagtcgtgtgatactggagatactacaaatccatatggaacttcaaaatattttttggagcaga

SEQ ID NO: 435235 - DNA, 75 bp, synthetic construct
  source 1..75: mol_type = other DNA
ttgccctgttaccggggagtgcccaggctatgtggttacttggtgccgggacaaatgccgggatgcagtatgcag

SEQ ID NO: 435236 - DNA, 75 bp, synthetic construct
  source 1..75: mol_type = other DNA
ccggcggtaatctgagtgcagccctggcaggtggtgcagcaccgtatctggctgaagtggtgaaaaccatgacca

SEQ ID NO: 435237 - DNA, 75 bp, synthetic construct
  source 1..75: mol_type = other DNA
tccaggtgacattgctgagtgttggtcagaccccaaaaaagccttcttagaattaggttggaaggcgatgtataa

SEQ ID NO: 435238 - DNA, 75 bp, synthetic construct
  source 1..75: mol_type = other DNA
tgaacgacgaaatccaccagaatctggtgggcgtttccaaccatcgtacactcgagtttgctaaatatctggcga

SEQ ID NO: 435239 - DNA, 75 bp, synthetic construct
  source 1..75: mol_type = other DNA
gcaaggaatgcgacgccctgtttgcccttctcgatgcagagttggcgaaagtgaaatggttctccggcgatgcat

SEQ ID NO: 435240 - DNA, 75 bp, synthetic construct
  source 1..75: mol_type = other DNA
aaaataacagtgtacgatattgacttaagagaaaaagaaaaagtaattagtgttttccagaagtcatcatttgat

SEQ ID NO: 435241 - DNA, 75 bp, synthetic construct
  source 1..75: mol_type = other DNA
acaataaagttttatgaaggaagtattagtaataaaagtttattacacgagattttctcaaaaaacagaatcgag

SEQ ID NO: 435242 - DNA, 75 bp, synthetic construct
  source 1..75: mol_type = other DNA
aattaggttggaaggcgatgtataacttggacgatatggtaagagatgcatggaattggcagaaaaaaaatccta

SEQ ID NO: 435243 - DNA, 75 bp, synthetic construct
  source 1..75: mol_type = other DNA
ggaagcgcatgtcacgctgaaaggtaaaaaagcgggcacgcatacggttaccgcaacgctgggtaataacaatac

SEQ ID NO: 435244 - DNA, 75 bp, synthetic construct
  source 1..75: mol_type = other DNA
ctccagtcatcgcggcgagcgctctctggaagtgatgtgccatccggcgtttatcgataatacgattcgccagag

SEQ ID NO: 435245 - DNA, 75 bp, synthetic construct
  source 1..75: mol_type = other DNA
ttcccgattgttgccaggtttgcggcagagcagggcattgcgttgcgggcggatcgtcagatggcgtttgatttg

SEQ ID NO: 435246 - DNA, 75 bp, synthetic construct
  source 1..75: mol_type = other DNA
gagctggaagtgctgacatcagcgtcgttgaaatatgcaattgctgagcgtggttatcggttgggtagttatctt

SEQ ID NO: 435247 - DNA, 75 bp, synthetic construct
  source 1..75: mol_type = other DNA
ccagcgtgaacacgtactggcgacaccccaacaaaggggcatttgctggtaagagcctgataagcgaggcggggc

SEQ ID NO: 435248 - DNA, 75 bp, synthetic construct
  source 1..75: mol_type = other DNA
gctttaccgctacaaaagccggggtttatctagtgacggcaaccctcgacaatggcgattccatgcaacaaacag

SEQ ID NO: 435249 - DNA, 75 bp, synthetic construct
  source 1..75: mol_type = other DNA
atccggtggcggggataacggtaaacttcaccatgccacaggacgttgcggcaaactttacccttgaaaataacg

SEQ ID NO: 435250 - DNA, 75 bp, synthetic construct
  source 1..75: mol_type = other DNA
aattacatcgcggcaacttcaccgctatcggtcggcatcgctcgccacgggaatatctgcggcagcgggcttgta

SEQ ID NO: 435251 - DNA, 75 bp, synthetic construct
  source 1..75: mol_type = other DNA
ggaaatcgttcgctacttcagcatgggtaaaagatgctctcaaacacacatacctcggttatgaaaccaaggacc

SEQ ID NO: 435252 - DNA, 75 bp, synthetic construct
  source 1..75: mol_type = other DNA
gtgaacctcccacaagatggtatcaaattgcatcgcggtaacttcaccgctatcggtcggcagatccagccttat

SEQ ID NO: 435253 - DNA, 75 bp, synthetic construct
  source 1..75: mol_type = other DNA
aacctacgcatcttgatagccatcatcatgtgcatatgttcccgcagattttcccgattgttgccaggtttgcgg

SEQ ID NO: 435254 - DNA, 75 bp, synthetic construct
  source 1..75: mol_type = other DNA
tatcggtcagcagctccagccttatctggaggacggcaagtgcttccgcatggtactgaagccatggcgcgataa

SEQ ID NO: 435255 - DNA, 75 bp, synthetic construct
  source 1..75: mol_type = other DNA
ccagcgtgaacacgtactggcgacaccccaacaaaggggcgcttgcaggtaagagcctgataagcgcggcggggc

SEQ ID NO: 435256 - DNA, 75 bp, synthetic construct
  source 1..75: mol_type = other DNA
gggggctacaaagtgatatcacccctcgatttggcgcaagattagttcaggaaggcaaccggctgcattacctgg

SEQ ID NO: 435257 - DNA, 75 bp, synthetic construct
  source 1..75: mol_type = other DNA
atcagcagaccgtcacgctgtatgcgaaaaggatgatcggtgaatcccccttcggttcgcactggtacatttgcc

SEQ ID NO: 435258 - DNA, 75 bp, synthetic construct
  source 1..75: mol_type = other DNA
attgtatatacgcctctgattgcttcccctgatggttacgatattaatctggcgcttctatttgcgccgggaagg

SEQ ID NO: 435259 - DNA, 75 bp, synthetic construct
  source 1..75: mol_type = other DNA
caccacctttgaggtgccgaggactctagcgttaaaagatgatatacccagaatagttagcctgtttctgactcc

SEQ ID NO: 435260 - DNA, 75 bp, synthetic construct
  source 1..75: mol_type = other DNA
cctgacggtaatgcctgcgtttcatatcgattgccagtgtactgcggcgatggcggcgttttctgccggggccac

SEQ ID NO: 435261 - DNA, 75 bp, synthetic construct
  source 1..75: mol_type = other DNA
tggtgtttaatgacctgctgaactggttaaaagcactggatgaaaaatatgcgctgcgggtgacacaaattgatg

SEQ ID NO: 435262 - DNA, 75 bp, synthetic construct
  source 1..75: mol_type = other DNA
gttgagtgttgttctgtttatcttttatggtaatagtcataaatttattactctcttatgcattctatatgtttt

SEQ ID NO: 435263 - DNA, 75 bp, synthetic construct
  source 1..75: mol_type = other DNA
ggagaatgcagacaccctttatttcacagtagacgactgctaccgcgtggacttaacaccacacgggctggcgtt

SEQ ID NO: 435264 - DNA, 75 bp, synthetic construct
  source 1..75: mol_type = other DNA
aatgggtgcgcacacaggacacccgtctggctccaaaacttcaggcaatgtttgatttctatctccgtgcccgcg

SEQ ID NO: 435265 - DNA, 75 bp, synthetic construct
  source 1..75: mol_type = other DNA
atcagttttgttcctgtggtgccatcacctgataattttgatattaatctggcgttacctcttgctccgggaaag

SEQ ID NO: 435266 - DNA, 75 bp, synthetic construct
  source 1..75: mol_type = other DNA
actaaacgtatctatatcaatgccagcgcgcggcaggcagaggatatgctcgcgcttatgcgtaagtctctgggt

SEQ ID NO: 435267 - DNA, 75 bp, synthetic construct
  source 1..75: mol_type = other DNA
atcagtggtggtattgcgcatttccgggggcagcgattttgcttaccgccgtcgggtttaatctctttggtgatg

SEQ ID NO: 435268 - DNA, 75 bp, synthetic construct
  source 1..75: mol_type = other DNA
agtaacttatcgcccattctcggcgtacctgttggcttaatgtatgccgccgcaatccccactagcctgattatc

SEQ ID NO: 435269 - DNA, 75 bp, synthetic construct
  source 1..75: mol_type = other DNA
ttgcgatcattatcgcaatactgtcttgcattatatttataaatataattctcagatatggattccacacaagta

SEQ ID NO: 435270 - DNA, 75 bp, synthetic construct
  source 1..75: mol_type = other DNA
ggatagtggtgcatataacgccatgattggtggtgcatctgcattaattcttcactttaatataaatgctggtag

SEQ ID NO: 435271 - DNA, 75 bp, synthetic construct
  source 1..75: mol_type = other DNA
cacggaacgcagcaattgcaggagaaaattgccagagcagtgaataactcgctcaaaggtggacaatttcaaccg

SEQ ID NO: 435272 - DNA, 75 bp, synthetic construct
  source 1..75: mol_type = other DNA
taccgttctattggacgatattttaagcattctcgcgctgcttgaggctggcgattggtcagaacattgcactaa

SEQ ID NO: 435273 - DNA, 75 bp, synthetic construct
  source 1..75: mol_type = other DNA
cggttcagtaccacggagcgcagcaattgcgggagaagattgccagagcagtgaacaactcagtccgtaaaaaat

SEQ ID NO: 435274 - DNA, 75 bp, synthetic construct
  source 1..75: mol_type = other DNA
ggtcagttcctgaccctgcccgtggagaccttttgccttctgacgggcgaaatgtggaagaaaacagctactggt

SEQ ID NO: 435275 - DNA, 75 bp, synthetic construct
  source 1..75: mol_type = other DNA
atgtttgtgaaacctgttaaagggcggtcagtgcctgaccctgcccgcggcgaccttttgcccgccgaggggcga

SEQ ID NO: 435276 - DNA, 75 bp, synthetic construct
  source 1..75: mol_type = other DNA
aatgtggaagaaagcagctactggcttcgccgtatagcggcgtgtgatgtggtacgtgttaaacaggataaggct

SEQ ID NO: 435277 - DNA, 75 bp, synthetic construct
  source 1..75: mol_type = other DNA
ttcacagcaaaagcagctccgatgaacgcatcaaaaggctctccgacagttcagagcaaaaaaactcgctcctgg

SEQ ID NO: 435278 - DNA, 75 bp, synthetic construct
  source 1..75: mol_type = other DNA
ggtcagtacatgaccctgcccgaggcgaccttttgcctgttgaagggcgaaatgttgaagaaagcagctactggc

SEQ ID NO: 435279 - DNA, 75 bp, synthetic construct
  source 1..75: mol_type = other DNA
ggtcagtgcctgaccctgcccgcggtgaccttttgcccgccgaagggcgaaatgttgacgagaacaactactggc

SEQ ID NO: 435280 - DNA, 75 bp, synthetic construct
  source 1..75: mol_type = other DNA
acatcgttacggtgaaagaagcgacggacgccctgctgcattgtgcggagcagcttcgcaaaggaggcaaccagt

SEQ ID NO: 435281 - DNA, 75 bp, synthetic construct
  source 1..75: mol_type = other DNA
gtcgctgctgaccacgcaggcgtatacaggacggccctggcctctgattgatggcgtcgggcagatttacggcat

SEQ ID NO: 435282 - DNA, 75 bp, synthetic construct
  source 1..75: mol_type = other DNA
ccgtcgtgtgtggtttttctgtgacgagttacccacgttacacaaactgccggacctggtggagatcctgccgga

SEQ ID NO: 435283 - DNA, 75 bp, synthetic construct
  source 1..75: mol_type = other DNA
gggatataaatatacaccaaaacaaatagttgagcttgctctggaggtttacagaacgtccctaaataatgcatt

SEQ ID NO: 435284 - DNA, 75 bp, synthetic construct
  source 1..75: mol_type = other DNA
gcgtgacggtatctcgtttggtaaggaagaagaacgtgtcagtatcatcagctactccgacgtgcagtcactgaa

SEQ ID NO: 435285 - DNA, 75 bp, synthetic construct
  source 1..75: mol_type = other DNA
tcaacgtcgcgtctggtttttctatgacgagctgccctcactgcacaaactgcccacgctgccacgcattattgc

SEQ ID NO: 435286 - DNA, 75 bp, synthetic construct
  source 1..75: mol_type = other DNA
catcgttcagcgatatgctgtccggcttcaaagataaagtgacatcatctcttaacagcgcggccagttcagtta

SEQ ID NO: 435287 - DNA, 75 bp, synthetic construct
  source 1..75: mol_type = other DNA
agagcaaaaaaccggaaaatcaccgtgccggtagtcaccgacgcgcaaaagggcattatcattcattacgtcccg

SEQ ID NO: 435288 - DNA, 75 bp, synthetic construct
  source 1..75: mol_type = other DNA
agaacgacgccttgcccggtgcggtagaccgcctggcgggacgctattgcagaacccttgctcgacaagaaatac

SEQ ID NO: 435289 - DNA, 75 bp, synthetic construct
  source 1..75: mol_type = other DNA
ggattcgcaacagcagtcggggctgcagccatcggagccggagtggcggggtataacctgctcaaaaccacttca

SEQ ID NO: 435290 - DNA, 75 bp, synthetic construct
  source 1..75: mol_type = other DNA
tcacccggcacagtatgccgcgttccttgaggtgctcgaaggcttcgctaaagagcttgaggataatttcagtta

SEQ ID NO: 435291 - DNA, 75 bp, synthetic construct
  source 1..75: mol_type = other DNA
acaaagtccgtaacgggtacatctttgaccagcttccgctggatatcgtcgccatgaagtacgccgtgccgcacg

SEQ ID NO: 435292 - DNA, 75 bp, synthetic construct
  source 1..75: mol_type = other DNA
atttcatgccaagttgaaggtaccatctcatttaatcagccagcatcaatcaccttgtcaaaaaatattattaat

SEQ ID NO: 435293 - DNA, 75 bp, synthetic construct
  source 1..75: mol_type = other DNA
ccgggaagttatccggtagtgaaactctcgatgaagtatgaggcgatgcctaaagtggcagattctctgctgttg

SEQ ID NO: 435294 - DNA, 75 bp, synthetic construct
  source 1..75: mol_type = other DNA
atgattgaggtttgggtagatatcgaagggattccattttatcaggttagcaataaaggaaatttcaggtctatt

SEQ ID NO: 435295 - DNA, 75 bp, synthetic construct
  source 1..75: mol_type = other DNA
tattatgaagcagctatggatgctgtcagagaaggatttgatagttcgtcaattagtcgttgctgtaatggcgaa

SEQ ID NO: 435296 - DNA, 75 bp, synthetic construct
  source 1..75: mol_type = other DNA
aattaaatgaacatgtaaataatccatatatcaaaagcaatctggaaatgttgctaccaatgaaagatattggaa

SEQ ID NO: 435297 - DNA, 75 bp, synthetic construct
  source 1..75: mol_type = other DNA
gaccttttccatgagctggtaacaccatcgattgtgcaggcactgctggatgaacgggaagcccaaagcaaacgc

SEQ ID NO: 435298 - DNA, 75 bp, synthetic construct
  source 1..75: mol_type = other DNA
actgatgaggagacggattcctgaaactccggccaccgatgctttcctggatgaagtacgggcgcagggggtaga

SEQ ID NO: 435299 - DNA, 75 bp, synthetic construct
  source 1..75: mol_type = other DNA
gcgctggcggcggagaatgcggggctgaagtctgcacaccctcaaccattcggacctgagatgatgaaggctctt

SEQ ID NO: 435300 - DNA, 75 bp, synthetic construct
  source 1..75: mol_type = other DNA
ccgggaatggatgaagggccagaccgataaatcgaagaatggctggcttttcattacctccgatgaacaaaacca

SEQ ID NO: 435301 - DNA, 75 bp, synthetic construct
  source 1..75: mol_type = other DNA
gtctgctggcgatgggagaaaaccgtcagcgccgcgtctggtttttctatgacgaactgccttcactgcacaaac

SEQ ID NO: 435302 - DNA, 75 bp, synthetic construct
  source 1..75: mol_type = other DNA
acctggcgaaaaaaattcagtgaacagaccagctttggtcatgaacaggtgcgtgacgggatttcttttggcaag

SEQ ID NO: 435303 - DNA, 75 bp, synthetic construct
  source 1..75: mol_type = other DNA
tggtctggagtttgagaaatcagcctttggtaagtacaacgttgataatgctgtcaacgccaacttccgttattc

SEQ ID NO: 435304 - DNA, 75 bp, synthetic construct
  source 1..75: mol_type = other DNA
ttgacagcgagacgccgttacctgacggtcaccttttatcacggcagaagacattgctgggtttcgataatcggt

SEQ ID NO: 435305 - DNA, 75 bp, synthetic construct
  source 1..75: mol_type = other DNA
ctgctgaataccaagttcttcttccgttccccgagtgcccggattgcgaagtttgtggaggaagatatcggggaa

SEQ ID NO: 435306 - DNA, 75 bp, synthetic construct
  source 1..75: mol_type = other DNA
gagctgtggcgggatatgcgctgggcagtggcgcgtatccaggacaagccgcgctgcatcgtgagtcaaatctga

SEQ ID NO: 435307 - DNA, 75 bp, synthetic construct
  source 1..75: mol_type = other DNA
atgacgacagtgattattgagccaaaaaaagagccgcaggatgtgccgggcgtggtgataccaccaccgggcgtg

SEQ ID NO: 435308 - DNA, 75 bp, synthetic construct
  source 1..75: mol_type = other DNA
gaacttgaaaagggttactttaattcaggtgtcctgttaattaatacactagcgtgggcgcaggagtccgtttct

SEQ ID NO: 435309 - DNA, 75 bp, synthetic construct
  source 1..75: mol_type = other DNA
agtacgtctgacttcggtaatattctgctggatgttgcgaacaaagccattctgcagggctgggaagatgcccct

SEQ ID NO: 435310 - DNA, 75 bp, synthetic construct
  source 1..75: mol_type = other DNA
cgtgcatgaacatatccgcgacatttgtcgccgtctggcgctggaggggtatctggctatcgcacctgaacttta

SEQ ID NO: 435311 - DNA, 75 bp, synthetic construct
  source 1..75: mol_type = other DNA
acaaaaaagccgacagcgtcgaaaccaccattgatgacctatggcgggatatgcgctggtcggtctcgcgtctgc

SEQ ID NO: 435312 - DNA, 75 bp, synthetic construct
  source 1..75: mol_type = other DNA
tggaagagtatcgccatatcccaatggtggtgatggactggggtgaagcaaaggcagactttaccgatgcagtca

SEQ ID NO: 435313 - DNA, 75 bp, synthetic construct
  source 1..75: mol_type = other DNA
attgcttccagaaaggttacaccctgattctgggcaatgcgtggaacaatcttgagaaacagcgggcttatctgt

SEQ ID NO: 435314 - DNA, 75 bp, synthetic construct
  source 1..75: mol_type = other DNA
gtcaattgaagttcatccacgattgattgaacgtcgctccgtggctgatggcccgttccgcgactatcgtcgtta

SEQ ID NO: 435315 - DNA, 75 bp, synthetic construct
  source 1..75: mol_type = other DNA
cgagtcagcttgggaagaaatgacctgcttattcgcaccttccctaactggtggtcgttacggggtcaaagtctg

SEQ ID NO: 435316 - DNA, 75 bp, synthetic construct
  source 1..75: mol_type = other DNA
agcgtgcgctgtttccactatttccgcgctgtctgcgccatgaccagtgccacgctgtttgagcgctatcgcggc

SEQ ID NO: 435317 - DNA, 75 bp, synthetic construct
  source 1..75: mol_type = other DNA
caggtgtcctgttaattaatacactagcgtgggcgcaggagtccgtttctgctaaagcgatgtcgatgcttgatg

SEQ ID NO: 435318 - DNA, 75 bp, synthetic construct
  source 1..75: mol_type = other DNA
tggcgtgacaacgaaagtgcgtattgacgccggtgtcgcgccagttgatcaccgcggtctggtgaaatgtacggc

SEQ ID NO: 435319 - DNA, 75 bp, synthetic construct
  source 1..75: mol_type = other DNA
tgccgaaagggttccggggcagcaatgctattaaagtgcaattgtggtgggcggtacaggcaacaatatttgcct

SEQ ID NO: 435320 - DNA, 75 bp, synthetic construct
  source 1..75: mol_type = other DNA
tacacccaccaccctttcgcacatggcagaccagcgaaagtgtttaatcgacgcggcgaaaaatccacggcatca

SEQ ID NO: 435321 - DNA, 75 bp, synthetic construct
  source 1..75: mol_type = other DNA
tctgggcttcattgccgggggccgggtacggtcagcgcgagcacagcctcgataaactggtcgcagtgtggcgca

SEQ ID NO: 435322 - DNA, 75 bp, synthetic construct
  source 1..75: mol_type = other DNA
gttgcgtctgtgcgccatgaccttaatcctgcctgtgctggtcgctgttttcggcattcttagcgtttatggtcg

SEQ ID NO: 435323 - DNA, 75 bp, synthetic construct
  source 1..75: mol_type = other DNA
tgcagaaattggagaggcgatggctcgggcggtcgtaaaacctgcatcccgtgcgcgtcggcgtctttcgtttga

SEQ ID NO: 435324 - DNA, 75 bp, synthetic construct
  source 1..75: mol_type = other DNA
agaagcgcctgccctgtctggtgatgcgccgcttgaagtgttgctggtgacactggcgaaagagatgacgccagt

SEQ ID NO: 435325 - DNA, 75 bp, synthetic construct
  source 1..75: mol_type = other DNA
tggatgcgctggcgtggacagaaggcaccagtaccagccgttacacgaaaaatgacggttacgacatcatcgttg

SEQ ID NO: 435326 - DNA, 75 bp, synthetic construct
  source 1..75: mol_type = other DNA
ttaccgttggggtgcgccaaacatgcgtcgccgtctgatcctggacagcatcaggccaataaaacaggtagcaac

SEQ ID NO: 435327 - DNA, 75 bp, synthetic construct
  source 1..75: mol_type = other DNA
aaaggtggcagaggtctctgaagcgactcagtccggtctcagtgatgtgaaggataccgctcctgaaaagggggc

SEQ ID NO: 435328 - DNA, 75 bp, synthetic construct
  source 1..75: mol_type = other DNA
gcgacgaaaagagtgcgggttttctctcttaatataaccaaaaacgggaacattaaaggcaaccgggaagggggt

SEQ ID NO: 435329 - DNA, 75 bp, synthetic construct
  source 1..75: mol_type = other DNA
caaatatattccagccagtttatgtcgtaccaacgcttctggtacgcccgttaatggctattttctgaccctggt

SEQ ID NO: 435330 - DNA, 75 bp, synthetic construct
  source 1..75: mol_type = other DNA
agtattacaacataggtaatactttaatggtgatttacgccattgcgaataccctgggacaagtagctgcgctgg

SEQ ID NO: 435331 - DNA, 75 bp, synthetic construct
  source 1..75: mol_type = other DNA
gcgttcaacatgctgttggatcgtatcgtcaacaaacgtgaagaaccgcagtccattgaagtgcatccgcgcttg

SEQ ID NO: 435332 - DNA, 75 bp, synthetic construct
  source 1..75: mol_type = other DNA
agtatctttattatgttttcctgtggggagtaaaataatatatttattaactttcaataaaaaatcaaaccgtat

SEQ ID NO: 435333 - DNA, 75 bp, synthetic construct
  source 1..75: mol_type = other DNA
gtcgccggtccatttggattaatcatttcctattctattgctgcgggcgtagttgaagggaaactgattccagaa

SEQ ID NO: 435334 - DNA, 75 bp, synthetic construct
  source 1..75: mol_type = other DNA
ggttgaaagtgctccgtcaacaatcgtcaacaccgattgcaatgggggagttattcacgaatattaatgaatata

SEQ ID NO: 435335 - DNA, 75 bp, synthetic construct
  source 1..75: mol_type = other DNA
taactgaaagcctggaatgggccgatgtggtggtgattggtcccggtctgggccagcaagagtgggggaaaaaag

SEQ ID NO: 435336 - DNA, 75 bp, synthetic construct
  source 1..75: mol_type = other DNA
gcatgggcgatgtgctctctggtattattggcgcattgttagggcagaaactgacgccgtatgatgctgcctgtg

SEQ ID NO: 435337 - DNA, 75 bp, synthetic construct
  source 1..75: mol_type = other DNA
tttgcccaagaatatcgggcacaaaaattgaagaatatgtcatggcgtatagtcaatatattaaatcaattctac

SEQ ID NO: 435338 - DNA, 75 bp, synthetic construct
  source 1..75: mol_type = other DNA
acatcaacgaccagcctggctccggtatcgtttgcagccagcaatgcactacgctgttcgtgttagccgttcgcg

SEQ ID NO: 435339 - DNA, 75 bp, synthetic construct
  source 1..75: mol_type = other DNA
ctgtcatgcagaaaaccggtcatcttactgggggcagacgcgaagaatcaaaatgatgccgtgaaaggggctgat

SEQ ID NO: 435340 - DNA, 75 bp, synthetic construct
  source 1..75: mol_type = other DNA
caggtttacttaactacttcgagtctcgcaagaaatacgctgcaactcgaatatctagtttatccagtcagaatg

SEQ ID NO: 435341 - DNA, 75 bp, synthetic construct
  source 1..75: mol_type = other DNA
atttgcgtaataagtttggttttggcattgaatttatccatgacgttcatgaacgtataagtcccatcaacgcaa

SEQ ID NO: 435342 - DNA, 75 bp, synthetic construct
  source 1..75: mol_type = other DNA
gtattgaaatggatgaaaataaagcaaaagcatggccaattaatggcggtattcctagctggacattagcgcgta

SEQ ID NO: 435343 - DNA, 75 bp, synthetic construct
  source 1..75: mol_type = other DNA
acttattgccagtaaattagccagagcaaaaaacattcaaccgaaacgctcaccagccaacaaaacttctggcat

SEQ ID NO: 435344 - DNA, 75 bp, synthetic construct
  source 1..75: mol_type = other DNA
ggtacgcgcgggatgctggcaaccgatctcttttccacgctacagcgtattgttaacccggaagtgactgataaa

SEQ ID NO: 435345 - DNA, 75 bp, synthetic construct
  source 1..75: mol_type = other DNA
agcgaaggcgatctggtatttgccctttcgcaacatgccgttgcttttgcacagtcacagctgcatcagcaaggt

SEQ ID NO: 435346 - DNA, 75 bp, synthetic construct
  source 1..75: mol_type = other DNA
agcgaaggagatctactatttgccctttcgcaacatgccgttgcttttgcacagtcgcaactgcatcagcaaggt

SEQ ID NO: 435347 - DNA, 75 bp, synthetic construct
  source 1..75: mol_type = other DNA
ttaacgtggttcgtgcaactatcgatggcctggaaaatatgaattctccagaaatggtcgctgccaagcgtggta

SEQ ID NO: 435348 - DNA, 75 bp, synthetic construct
  source 1..75: mol_type = other DNA
tggaagagtatcgccatatcccaatggtggtgatggactggggtgaagcaaaagctgacttcaccgatgcggtca

SEQ ID NO: 435349 - DNA, 75 bp, synthetic construct
  source 1..75: mol_type = other DNA
ttgctgatattaaatataacacccagtttagcttaaattatcaactcaaagaaagttttaaaaacccagtaaacg

SEQ ID NO: 435350 - DNA, 75 bp, synthetic construct
  source 1..75: mol_type = other DNA
ttatgatcataaagtagaaacagaaaatctttgtctggacatcgcttatggaactgacaaaaactttctatttgg

SEQ ID NO: 435351 - DNA, 75 bp, synthetic construct
  source 1..75: mol_type = other DNA
actgcgccggctgacgcggcgcggcaggaacgctgcctgtggtcagtgtcccgcgtccggctgggcacgggacgg

SEQ ID NO: 435352 - DNA, 75 bp, synthetic construct
  source 1..75: mol_type = other DNA
cgaataccctgggacaagtagctgcgctggtattctcgattgatgccccgcttaaagtgctattaggtgatgctg

SEQ ID NO: 435353 - DNA, 75 bp, synthetic construct
  source 1..75: mol_type = other DNA
acggcacggcgggagctattcgtatgacgggggaagcggcactgcgtgctggtgctggtttagttcgagtattga

SEQ ID NO: 435354 - DNA, 75 bp, synthetic construct
  source 1..75: mol_type = other DNA
gcggttgttcatgcagactggtgtttcatggtcagatccgttacgcgcacagtatttttctgtgcagttttctga

SEQ ID NO: 435355 - DNA, 75 bp, synthetic construct
  source 1..75: mol_type = other DNA
cctgcgatttgcctgttctcccggtgaggtgagcgtgctttatgccgtcgctcgaaagccggacgcagccagata

SEQ ID NO: 435356 - DNA, 75 bp, synthetic construct
  source 1..75: mol_type = other DNA
gctgtgagtgttgatgctgtggtcagccgcattccggaggcggtgtatgttctgacgcaggatgatgacacgcct

SEQ ID NO: 435357 - DNA, 75 bp, synthetic construct
  source 1..75: mol_type = other DNA
taactggcgtcctttttttgttaaaacagaaaccatcatagcaggtaatgccgcaacggctcttgttgctctggt

SEQ ID NO: 435358 - DNA, 75 bp, synthetic construct
  source 1..75: mol_type = other DNA
tttgccacggattatcagcaattgtttgcagaaaagccttcactgacgctgcatcagcggatgcaggaactggag

SEQ ID NO: 435359 - DNA, 75 bp, synthetic construct
  source 1..75: mol_type = other DNA
gccacggattatcagcaactgtttgccgagaagccgtcactgacgctgcatcagcggatgcgggaatgggggtga

SEQ ID NO: 435360 - DNA, 75 bp, synthetic construct
  source 1..75: mol_type = other DNA
tcgaagtaccggtaaggtcatgcaccctgaactgcatgcaatcgaaaatctttttccggcttgcgccccctgcaa

SEQ ID NO: 435361 - DNA, 75 bp, synthetic construct
  source 1..75: mol_type = other DNA
gtgaagctgtctgatatatcgtctaatctgaacaggttcagtcgcggactgggatatgcaggaaaaattacaaat

SEQ ID NO: 435362 - DNA, 75 bp, synthetic construct
  source 1..75: mol_type = other DNA
cttgctgactggatcactgagtttggtaaagctgtccggacagagaactggcgtcctctttttgttaaaacagaa

SEQ ID NO: 435363 - DNA, 75 bp, synthetic construct
  source 1..75: mol_type = other DNA
ttggtgaatttacccgtgatatgggcaacgttgagaaaatcgagctcctcccctaccacgaactgggcaaacaca

SEQ ID NO: 435364 - DNA, 75 bp, synthetic construct
  source 1..75: mol_type = other DNA
ttgatgccgatcgtgcaaaagagcgttatcaggaggttgtggatctggttcacttcgggaaaggttgccttaata

SEQ ID NO: 435365 - DNA, 75 bp, synthetic construct
  source 1..75: mol_type = other DNA
gcgaccagcgaccagcgaccagcgaccagcgaccagcgaccagcgaccagcgaccagcgaccagcgaccagcgac

SEQ ID NO: 435366 - DNA, 75 bp, synthetic construct
  source 1..75: mol_type = other DNA
cggacgattacacgatcctgggcgtagtgctttctgaagatgtcatcacccgtcaggctaactttttgcataatc

SEQ ID NO: 435367 - DNA, 75 bp, synthetic construct
  source 1..75: mol_type = other DNA
cgcagaaatagccacgcggcctggcggcactgagtttgaattaagtacgccggacgattacaccattcttggcgt

SEQ ID NO: 435368 - DNA, 75 bp, synthetic construct
  source 1..75: mol_type = other DNA
aaataaacaaccttccattagagaaaagcaaatggtgttccttggggactttttatcgagcattcattgaacggt

SEQ ID NO: 435369 - DNA, 75 bp, synthetic construct
  source 1..75: mol_type = other DNA
ctccccatacggaagatagacgaattggtgaaactacaaacccatatgggacatcgaagtttataatagaaatga

SEQ ID NO: 435370 - DNA, 75 bp, synthetic construct
  source 1..75: mol_type = other DNA
tcagatccttctcttgccaaaaaagtacttttttgggaggcgaagaaaactttggtcgacatggttcgtgatgct

SEQ ID NO: 435371 - DNA, 75 bp, synthetic construct
  source 1..75: mol_type = other DNA
ccggttatattggttctcacacagtattacagttactaaggaatgagtatgatgttgttgttattgataatttga

SEQ ID NO: 435372 - DNA, 75 bp, synthetic construct
  source 1..75: mol_type = other DNA
acatcaaagtatatatcagaattgatgattagagatattgcaaaaaaatatagcgatactaattttttgtgtctg

SEQ ID NO: 435373 - DNA, 75 bp, synthetic construct
  source 1..75: mol_type = other DNA
acttaggtgctggtgtaggatattcggtattagatattataagaaagtttgaggaagttaatggtgtgaagatta

SEQ ID NO: 435374 - DNA, 75 bp, synthetic construct
  source 1..75: mol_type = other DNA
aggcctctattttatcatggtgatgtgcgtgataggaaaaaacttaaacatattttccagtatcatgatattaca

SEQ ID NO: 435375 - DNA, 75 bp, synthetic construct
  source 1..75: mol_type = other DNA
acaatcttggcacagggaaaggttattcagtcaaagagattgttgaaacttttcaaaaaataactggaaaaaaaa

SEQ ID NO: 435376 - DNA, 75 bp, synthetic construct
  source 1..75: mol_type = other DNA
atcttggtacaggaaaaggttattcagtgcttgaattaatcacttcatttgaaaaattaacaaacattaaggtca

SEQ ID NO: 435377 - DNA, 75 bp, synthetic construct
  source 1..75: mol_type = other DNA
tggcaatgattaccctactaatgatggaacaggtgtaagggattttattcatgttgttgacttagcgaaaggtca

SEQ ID NO: 435378 - DNA, 75 bp, synthetic construct
  source 1..75: mol_type = other DNA
aaaagctttcctggaaagcggaaaaaaaattgaaagaaatgatcgaagatgtatggcgttggcaaacaaacaatc

SEQ ID NO: 435379 - DNA, 75 bp, synthetic construct
  source 1..75: mol_type = other DNA
ttccaatatctgaatcaagtaaaattggtggtacaacaaatccatatgggacgtcaaaattattcgctgagcaaa

SEQ ID NO: 435380 - DNA, 75 bp, synthetic construct
  source 1..75: mol_type = other DNA
accagatttttattatgctaataatgtatctgggacattacatctaattaatcttgccatcaataataacgttgc

SEQ ID NO: 435381 - DNA, 75 bp, synthetic construct
  source 1..75: mol_type = other DNA
cgttgaaagacattaaaaacatcacctttaagactgatgagattggatttaattttgacaagtctctccttggag

SEQ ID NO: 435382 - DNA, 75 bp, synthetic construct
  source 1..75: mol_type = other DNA
ggctatatatgaacatactcagcgatgctgcaacgaaaagaaaattacaactgtccagttaggcaggaaacttaa

SEQ ID NO: 435383 - DNA, 75 bp, synthetic construct
  source 1..75: mol_type = other DNA
aaatgctgaagttaactggggtgatattgaaattcagaagctggtaccgagtggcggaaatcagaaagactttac

SEQ ID NO: 435384 - DNA, 75 bp, synthetic construct
  source 1..75: mol_type = other DNA
caggtaataatgcagataaaactatatcacttcatgccaaacttggatataaaggaaatatgcagaacttgcagg

SEQ ID NO: 435385 - DNA, 75 bp, synthetic construct
  source 1..75: mol_type = other DNA
atattacaggtcaggttccggccagaaatatttctctctatgcaaaacttggatataaaggaaatatacagaatt

SEQ ID NO: 435386 - DNA, 75 bp, synthetic construct
  source 1..75: mol_type = other DNA
ttacttacttgcgcggcggagtgcattaccgaagagggatttttctgcgtggtgctgccagagcagattggtaat

SEQ ID NO: 435387 - DNA, 75 bp, synthetic construct
  source 1..75: mol_type = other DNA
ggctggggtaaaacgttgccttgatatcggcgcgggtagcgggttgctggcattaatgctggcgcagcgaaccga

SEQ ID NO: 435388 - DNA, 75 bp, synthetic construct
  source 1..75: mol_type = other DNA
ggtgttgccagagcagattggtaatggttttactgaactggcattaagtatgggctggcatttacgtttgcggac

SEQ ID NO: 435389 - DNA, 75 bp, synthetic construct
  source 1..75: mol_type = other DNA
tttgctggcgcacgtattttttaatctgccgatggcgagccgtttattacttcaggcactggaaaacattcccgg

SEQ ID NO: 435390 - DNA, 75 bp, synthetic construct
  source 1..75: mol_type = other DNA
ttttcaccaatgcgttaatggcgatcccttatgcgctgaaagtgctggaaaacccgatgcgcgatatcaccgccc

SEQ ID NO: 435391 - DNA, 75 bp, synthetic construct
  source 1..75: mol_type = other DNA
tgagttacgactacgatcccgcccgcgcagcaatgctggcgctgatccagatggtgtgctgtctgggactggtgt

SEQ ID NO: 435392 - DNA, 75 bp, synthetic construct
  source 1..75: mol_type = other DNA
tttcgccctacggcctgcaaggcattttgctggcacacgtattttttaatctgccgatggcaagccgcttattcc

SEQ ID NO: 435393 - DNA, 75 bp, synthetic construct
  source 1..75: mol_type = other DNA
gctacagcatgttatgtcagtcgctggggattgaaggctggtcgcgcttaaaagtggtggagctgcgcgccctga

SEQ ID NO: 435394 - DNA, 75 bp, synthetic construct
  source 1..75: mol_type = other DNA
aggagaacaacctgttcagccacctgacggtcgcgcagaacatcgggctggggctaaatccggggttgaaactga

SEQ ID NO: 435395 - DNA, 75 bp, synthetic construct
  source 1..75: mol_type = other DNA
ggttttactgaactggcattaagcatgggatggcatttacgtttacggacggacgtggcggaaaacgaggctcga

SEQ ID NO: 435396 - DNA, 75 bp, synthetic construct
  source 1..75: mol_type = other DNA
gttaccgttgaagatttgatgaaggaagtggtgacctatcgccactttatgaacgcttccggcggcggcgttacc

SEQ ID NO: 435397 - DNA, 75 bp, synthetic construct
  source 1..75: mol_type = other DNA
ttacctccgttgatgttgaagactgggcaccggagcgtcgattctcagttgttcttgagacggctacgctgtcag

SEQ ID NO: 435398 - DNA, 75 bp, synthetic construct
  source 1..75: mol_type = other DNA
ttcaggcgcatgaaaaaaaattgacggaaaatattcgaacagacagggcattgcgtgacgcaaaaaataagttac

SEQ ID NO: 435399 - DNA, 75 bp, synthetic construct
  source 1..75: mol_type = other DNA
caagctcgacggtgtaaaaccaccgaaaaaagagacgatggagcgagtaaaaggcattcttgaacaatatggtca

SEQ ID NO: 435400 - DNA, 75 bp, synthetic construct
  source 1..75: mol_type = other DNA
aagtggtgacctatcgccactttatgaacgcttccggcggcggcgttaccgcatccggcggtgaagcaatcctgc

SEQ ID NO: 435401 - DNA, 75 bp, synthetic construct
  source 1..75: mol_type = other DNA
ttccggatgataaaaatccactaaagtctctccctatgcagtgttataataatgggaaattgattttaacctgcg

SEQ ID NO: 435402 - DNA, 75 bp, synthetic construct
  source 1..75: mol_type = other DNA
acgtagttattcgtccgtcagtaaaaattacctatccgtggaaattaaccttaggtgattacgcgtgggtcggcg

SEQ ID NO: 435403 - DNA, 75 bp, synthetic construct
  source 1..75: mol_type = other DNA
gattacgcgtgggtcggcgatgacgtcaatttatataccctcggtgaaataaccattggcgcacattcggtgggt

SEQ ID NO: 435404 - DNA, 75 bp, synthetic construct
  source 1..75: mol_type = other DNA
ctggggacaccattcacaccagagcatgtctcaggtcaggttccggccagaaacatttctctctatgcaaaactt

SEQ ID NO: 435405 - DNA, 75 bp, synthetic construct
  source 1..75: mol_type = other DNA
acgatttcctgcgtatccgcgacgagatgaacaaactttccggcgcggatacggacctcatctgccagcttgccg

SEQ ID NO: 435406 - DNA, 75 bp, synthetic construct
  source 1..75: mol_type = other DNA
ggcgcttaaccttgccaccagtgatgcggcggctgtagccggtcttgttatgacggtgctgactgttggtctggt

SEQ ID NO: 435407 - DNA, 75 bp, synthetic construct
  source 1..75: mol_type = other DNA
gtagagattcagacattgagcccagatggaagcggacatcaaaaagacttttctgtcggtatgaactgcccctat

SEQ ID NO: 435408 - DNA, 75 bp, synthetic construct
  source 1..75: mol_type = other DNA
tgcggctttttcacatagtgttcaactggaaggcggatatgttgagcctacatggcaagctgttctggagaatgg

SEQ ID NO: 435409 - DNA, 75 bp, synthetic construct
  source 1..75: mol_type = other DNA
attcagtgctacttactcatcttgagggggggcatctctcaccttcatctttgattaataattattcttctcatg

SEQ ID NO: 435410 - DNA, 75 bp, synthetic construct
  source 1..75: mol_type = other DNA
gattgttcgcgactggctggcgggtgttgagtggcggtcacgtaatatctggctcgaggcggagtacgctgaacg

SEQ ID NO: 435411 - DNA, 75 bp, synthetic construct
  source 1..75: mol_type = other DNA
aacgctcaatttgttcgagacgccccatctggaaatgcttttttcattgcaacattatctaaagatttttcatat

SEQ ID NO: 435412 - DNA, 75 bp, synthetic construct
  source 1..75: mol_type = other DNA
tcaggagtttcttgcgagtccaccttcaaattttccgcagaaccttgatcatgttgaagagagttgccgtgaaga

SEQ ID NO: 435413 - DNA, 75 bp, synthetic construct
  source 1..75: mol_type = other DNA
ggatatttgaatggctttcgtaccttcggctgtgatatgaatccgctagcagccaagatatcacgagcgaagctc

SEQ ID NO: 435414 - DNA, 75 bp, synthetic construct
  source 1..75: mol_type = other DNA
aaattattccgccctgggcgctatattgggttgcgtcggcttatctcaaagatcagcagccgaaaaaagcacagt

SEQ ID NO: 435415 - DNA, 75 bp, synthetic construct
  source 1..75: mol_type = other DNA
atgggcacgcctacgagcatcccgaatgatacctggttacaggggcattcgtttctctcaaccgtagcaaaatat

SEQ ID NO: 435416 - DNA, 75 bp, synthetic construct
  source 1..75: mol_type = other DNA
gtgctgtgtgtgaatcctgacggctgccagttagggttacgggccaatgctaatggtgtggatttaaacagaaac

SEQ ID NO: 435417 - DNA, 75 bp, synthetic construct
  source 1..75: mol_type = other DNA
gcctgtctggctggtatgattttaatgataactggcgtattggttcgcaactggaacgcctctctcaccgcgttc

SEQ ID NO: 435418 - DNA, 75 bp, synthetic construct
  source 1..75: mol_type = other DNA
atgaccgagctcttttatcacaaggagaccattgccccggatttatccgatgaagaacttgcggatctcttttac

SEQ ID NO: 435419 - DNA, 75 bp, synthetic construct
  source 1..75: mol_type = other DNA
attgatgctggcgcaacgctacgctgggaaaacgaccttatgacggtgacagagaacacaacttatacgttgaat

SEQ ID NO: 435420 - DNA, 75 bp, synthetic construct
  source 1..75: mol_type = other DNA
ggagaagtgaaatcactggtttcgtcgctacaaaccaaatatgccctgaaaggctataacgtcgaagccaccgct

SEQ ID NO: 435421 - DNA, 75 bp, synthetic construct
  source 1..75: mol_type = other DNA
aaggccggggccagtatcagcgccattgctcgggagtttaatacaacccggcaaaccatactcagggtaaaggca

SEQ ID NO: 435422 - DNA, 75 bp, synthetic construct
  source 1..75: mol_type = other DNA
tattcgcgtacactgcctcgcgctgggtggcgtggacctcaccagcgcggccggaaagatgaccatgcaggtcat

SEQ ID NO: 435423 - DNA, 75 bp, synthetic construct
  source 1..75: mol_type = other DNA
ggtggtacgtttgatagatgcgctttcgcaacttccggctggttacccggtgtacagcaaccgtggggccagcgg

SEQ ID NO: 435424 - DNA, 75 bp, synthetic construct
  source 1..75: mol_type = other DNA
atgtctcgaatttttgcttactgtcgggtatcaactctggatcagaccaccgaaaatcaacgtcgggaaatcgaa

SEQ ID NO: 435425 - DNA, 75 bp, synthetic construct
  source 1..75: mol_type = other DNA
gatttgcttcttgagcgtacgcactctggtattgcgagagcgaaagctgccggaaagcggtttggccgtccttca

SEQ ID NO: 435426 - DNA, 75 bp, synthetic construct
  source 1..75: mol_type = other DNA
tattcgtgtccactgcttagctttgggtggagtagatctcaccagccccgcggggaaaatgaccatgcaggttat

SEQ ID NO: 435427 - DNA, 75 bp, synthetic construct
  source 1..75: mol_type = other DNA
atcaatgattatctgcctgaacagggacaactgtttgtcggcaacagcctggtggtgcgtttgattgatgccctc

SEQ ID NO: 435428 - DNA, 75 bp, synthetic construct
  source 1..75: mol_type = other DNA
ggaaaattccgcttttattcaccatacccattttgatgagcgtggtctggggcatatggcgctggggttggcgaa

SEQ ID NO: 435429 - DNA, 75 bp, synthetic construct
  source 1..75: mol_type = other DNA
agaagttcttgtgaccagcaccattgcaggaacgaaagtaattacagctaatctggcaaatgcacctaccgaagc

SEQ ID NO: 435430 - DNA, 75 bp, synthetic construct
  source 1..75: mol_type = other DNA
tttcactgccgcgcccgacgcaggatatttctgcccgttggctggtctctactatcgaccacgcccttggtacgc

SEQ ID NO: 435431 - DNA, 75 bp, synthetic construct
  source 1..75: mol_type = other DNA
tctgattgatgcgctttcgcaacttccggcaggttacccggtgtacagcaaccgaggggccagcggtatcgacgg

SEQ ID NO: 435432 - DNA, 75 bp, synthetic construct
  source 1..75: mol_type = other DNA
gcgactggttcttctggcgacaaaagcgcggcgtggtggttgccgggcgcatgagtgcggaagagggcaaaaaag

SEQ ID NO: 435433 - DNA, 75 bp, synthetic construct
  source 1..75: mol_type = other DNA
gcccaggcgtttgaattgcctctggtaaccagcgtcggttatgaaacgcctggctctttcggtagttggtgtgcg

SEQ ID NO: 435434 - DNA, 75 bp, synthetic construct
  source 1..75: mol_type = other DNA
atgaaagatgaacgtcgccctatttgcgaagtggttgcagagagtatcgaacggttaattatcgacggcgtattg

SEQ ID NO: 435435 - DNA, 75 bp, synthetic construct
  source 1..75: mol_type = other DNA
tgatgttgctggtgcagggcgatcagccgcgttaccgtttagttgaactgcaccgcaaacgcgttgccaacggtg

SEQ ID NO: 435436 - DNA, 75 bp, synthetic construct
  source 1..75: mol_type = other DNA
aatgcccgttttttgttgctcgtcgggaaattcaggaagcggaagtggtggtggcaaaccatgcgctggtgatgg

SEQ ID NO: 435437 - DNA, 75 bp, synthetic construct
  source 1..75: mol_type = other DNA
atgaccgtaaaaaagaatctccacgatatcgagctggaaggccaccacttgattcgctcggcggtgccgctggag

SEQ ID NO: 435438 - DNA, 75 bp, synthetic construct
  source 1..75: mol_type = other DNA
cttctcgcgttccgcactgcgtgaagggctgacggtgctgcgcgggcacgggattattgaaacggcgcaggggcg

SEQ ID NO: 435439 - DNA, 75 bp, synthetic construct
  source 1..75: mol_type = other DNA
ctgatgtttaattcggtgtttgccagcgtgaataatctctatcatcgaccacagcagaagaaacagatcgatcgc

SEQ ID NO: 435440 - DNA, 75 bp, synthetic construct
  source 1..75: mol_type = other DNA
tcacccggtctgtgtggtgtcagcactgaccggatggggcgttgaggagatggtggcaaccatgatgcactgtct

SEQ ID NO: 435441 - DNA, 75 bp, synthetic construct
  source 1..75: mol_type = other DNA
gggcgggtgttcgatacggcggagtcttcgttgctcctgcccgccccgctgaaaatggtgattcggaccgtgcgt

SEQ ID NO: 435442 - DNA, 75 bp, synthetic construct
  source 1..75: mol_type = other DNA
tcccgatacgcttcgccagcttattcttgaacgtattcagaacctcacccactacgagccggtgattggcatcat

SEQ ID NO: 435443 - DNA, 75 bp, synthetic construct
  source 1..75: mol_type = other DNA
cggtgttggcgaaagcggcgcacgtgataccgaatatgctgcactttaccgtaaacaacttccccaactggacct

SEQ ID NO: 435444 - DNA, 75 bp, synthetic construct
  source 1..75: mol_type = other DNA
gtgaagtctcccccgtcagtgatgtgaacgcctgtacccgtgacgtgctgcgcttccggctgcgcagcgggcgtc

SEQ ID NO: 435445 - DNA, 75 bp, synthetic construct
  source 1..75: mol_type = other DNA
ttgtctccctggaaacagggacgcaaaacacttatcaaacgcatgaatttttttatggggcgtgttataaacaga

SEQ ID NO: 435446 - DNA, 75 bp, synthetic construct
  source 1..75: mol_type = other DNA
tggtagcaaccatgatgcgctgtctgccggaccgcgccaccagcccagtagcgacacagttgcacgggaggctct

SEQ ID NO: 435447 - DNA, 75 bp, synthetic construct
  source 1..75: mol_type = other DNA
gtacggaggcggtcaggtcgcaggcccgtgacggcttcggtgcggccgtgggccaggtgtttgatacggcggagt

SEQ ID NO: 435448 - DNA, 75 bp, synthetic construct
  source 1..75: mol_type = other DNA
gccggacagggccaccagtccggtggcgacgcagttacatgggaggctctgtaccgaacaggtccggtcgcaggc

SEQ ID NO: 435449 - DNA, 75 bp, synthetic construct
  source 1..75: mol_type = other DNA
cctgccatgaatgggataccctcaccagcaaaccttcaccgcaccaactgggaaatcttaaagcgaagcaggctg

SEQ ID NO: 435450 - DNA, 75 bp, synthetic construct
  source 1..75: mol_type = other DNA
gtgctgtgtgtgaatcctgacggctgccagttagggttacgggccaatgctaatggcgtggatttaaatagaaac

SEQ ID NO: 435451 - DNA, 75 bp, synthetic construct
  source 1..75: mol_type = other DNA
ccgtgacagtttcggtgacgctgtgggttgtgttttcgatacggctgagtcatcgtcattcctgcctgcgccact

SEQ ID NO: 435452 - DNA, 75 bp, synthetic construct
  source 1..75: mol_type = other DNA
ccctggaaaaaccgctggcgtcgcttccctccacgcttcgccagcttattctcgaacgtattcagaatctgaccc

SEQ ID NO: 435453 - DNA, 75 bp, synthetic construct
  source 1..75: mol_type = other DNA
actggcaaagcaaaataatgtgtctgtagatgatatcgcgaaactcgccgggcaaaagctcgtagctcgggccaa

SEQ ID NO: 435454 - DNA, 75 bp, synthetic construct
  source 1..75: mol_type = other DNA
tggcgttggtgaaagtggtgaacgtgatgccgaatatgccgccttgtatcgcgcacagctttctcgcctcgacct

SEQ ID NO: 435455 - DNA, 75 bp, synthetic construct
  source 1..75: mol_type = other DNA
gaccgggcgctgtcagtggacgaacagttctggcgcggagtgatgcagccttaccagcagcaggtgctgtttgtg

SEQ ID NO: 435456 - DNA, 75 bp, synthetic construct
  source 1..75: mol_type = other DNA
tcatccggtctgcatggtgtcagcattgaccggctggggcattgaagagatggtgtcaaccataatgcgctgtct

SEQ ID NO: 435457 - DNA, 75 bp, synthetic construct
  source 1..75: mol_type = other DNA
gcgacgcaactgcacaggaggctctgcacagagccggtaaagtcgcaagcccgtgacagttttggtgaagcggtg

SEQ ID NO: 435458 - DNA, 75 bp, synthetic construct
  source 1..75: mol_type = other DNA
tgtaccgtgacattctgccagaactggacctggtactgtggctgattaaagccgatgaccgtgccctgtctgtgg

SEQ ID NO: 435459 - DNA, 75 bp, synthetic construct
  source 1..75: mol_type = other DNA
acgccaggtagcggaaaaactggcgcaaggaatggcggtaaaagagattgccgctgaacttggcttatcaccgaa

SEQ ID NO: 435460 - DNA, 75 bp, synthetic construct
  source 1..75: mol_type = other DNA
ctcgttttattcatcgtccttttattacgtggtcgcggaatgcgcccgacgccgtttaaatacaccttagccatt

SEQ ID NO: 435461 - DNA, 75 bp, synthetic construct
  source 1..75: mol_type = other DNA
gcccgtcatccgcgcgtagatttattgtcgttaacatcctggcagatgctgtatgcggcgctggtgatgagtgtg

SEQ ID NO: 435462 - DNA, 75 bp, synthetic construct
  source 1..75: mol_type = other DNA
accgcgaaacgctgttgaaagaggccaacaaaatcattcgtgagcatgaggatacgctcgcagggattgaagcca

SEQ ID NO: 435463 - DNA, 75 bp, synthetic construct
  source 1..75: mol_type = other DNA
tttggggcgagcattattcacgccatgatgggatgcacaggaattgggcagttaacgcagcatatggtttccgtc

SEQ ID NO: 435464 - DNA, 75 bp, synthetic construct
  source 1..75: mol_type = other DNA
acgccaggtggcggaaaaactggcgcaaggaatggcggtgaaagagattgccgccgaactgggcttgtcgccgaa

SEQ ID NO: 435465 - DNA, 75 bp, synthetic construct
  source 1..75: mol_type = other DNA
acgtgctgccggcaacaccagtgctgactttttcggttaacggtcaggcgcgtgacgttgaagttgagctgaatt

SEQ ID NO: 435466 - DNA, 75 bp, synthetic construct
  source 1..75: mol_type = other DNA
tgaaagtgtcgacgtgggtgaatccgagccgctcgtataggccacgcaggttcgggtggcagtcgagccgcagct

SEQ ID NO: 435467 - DNA, 75 bp, synthetic construct
  source 1..75: mol_type = other DNA
cttgataaactttcagaagtaacaggctttcccccatattggtttatgttaccgccaaacgatgaagagcaggtt

SEQ ID NO: 435468 - DNA, 75 bp, synthetic construct
  source 1..75: mol_type = other DNA
ctcgttctattcatcgttcttttgttacgtggatgcggaatgcgcccaacaccatttaaatacaccttagccatt

SEQ ID NO: 435469 - DNA, 75 bp, synthetic construct
  source 1..75: mol_type = other DNA
aacattaccccggttttgaaacggatattcacggcgcgaaacaggacgaagacggcgtttaccgcgtacgagtcc

SEQ ID NO: 435470 - DNA, 75 bp, synthetic construct
  source 1..75: mol_type = other DNA
tgcgatcaaattccgtaaagagatcaaacgtctgagaacggaatctgatggctggttctttgatgtatggcagcc

SEQ ID NO: 435471 - DNA, 75 bp, synthetic construct
  source 1..75: mol_type = other DNA
catcgttaaacctgatcccttgcagatctccatttgattctgtaatgggagaacgatgctatcagtcgattgttt

SEQ ID NO: 435472 - DNA, 75 bp, synthetic construct
  source 1..75: mol_type = other DNA
atatgcatttctcggaagggaaaaagcaaatcagcagtaaagtttatgtcgatgaccaggatctcgcggacttac

SEQ ID NO: 435473 - DNA, 75 bp, synthetic construct
  source 1..75: mol_type = other DNA
atgcacctggtaaagatcgtaatgtggattataccgaaaactcacgacaggcaatggctgaaatggctaaagtcg

SEQ ID NO: 435474 - DNA, 75 bp, synthetic construct
  source 1..75: mol_type = other DNA
tggtgcgccaacaattcaaaggcaaaaagaccatcgagttcaccaccatgttgtgctttgccgtaccgggtacag

SEQ ID NO: 435475 - DNA, 75 bp, synthetic construct
  source 1..75: mol_type = other DNA
ttattgcggtgacaggtgaatccggcgcagggaaaaccacgctgcgccgtgacctggctgaccgcatcaaccgcg

SEQ ID NO: 435476 - DNA, 75 bp, synthetic construct
  source 1..75: mol_type = other DNA
tttatttcaacggtactgtacagactgaaggcagtgagtttgaaacgctggagcagcatggtagagagctgatca

SEQ ID NO: 435477 - DNA, 75 bp, synthetic construct
  source 1..75: mol_type = other DNA
tttactatggcggggtagtggtaacggaaggcgagccactggagaccctggaacagcatggccgcgaactggtca

SEQ ID NO: 435478 - DNA, 75 bp, synthetic construct
  source 1..75: mol_type = other DNA
ccttatatcatcgttgtcaatcttgctaccagcaaaggtaaaatgatggattataaccgtcatgcaacatgcagt

SEQ ID NO: 435479 - DNA, 75 bp, synthetic construct
  source 1..75: mol_type = other DNA
gggcttatctcacaacattaccccccttctctggttaccttatagcttttggtgctatggctttctttggcgaag

SEQ ID NO: 435480 - DNA, 75 bp, synthetic construct
  source 1..75: mol_type = other DNA
gttaacgcaacatatggtttccgtcagtaaatatgttgcacctgagtttcacggaaagaaaatcgggttagtgct

SEQ ID NO: 435481 - DNA, 75 bp, synthetic construct
  source 1..75: mol_type = other DNA
gattatcaggccgccagcacccttggcgctttcctgctgctgttctcgctactggtgttctgcgtccagtatatg

SEQ ID NO: 435482 - DNA, 75 bp, synthetic construct
  source 1..75: mol_type = other DNA
ggcggcgggctgggttatggcttagcagggaggggggtggcctgttgctccggtcagtcccgcagtttccggcga

SEQ ID NO: 435483 - DNA, 75 bp, synthetic construct
  source 1..75: mol_type = other DNA
gttcacccgataaaggccatcttaccgttgttattttcgaccctaccatcaaaaagaatatcggtcttaatacca

SEQ ID NO: 435484 - DNA, 75 bp, synthetic construct
  source 1..75: mol_type = other DNA
ccaggcttttagtgcgttccctgaggaggaccaagaaaaaatgcttcaagaaatcaaagacaaaaaaaaatcaat

SEQ ID NO: 435485 - DNA, 75 bp, synthetic construct
  source 1..75: mol_type = other DNA
gataccgctgcggcaatccgcgctgaactggcgaaaatggaaccgttcttcccgtcgggtctgaaaatcgtttat

SEQ ID NO: 435486 - DNA, 75 bp, synthetic construct
  source 1..75: mol_type = other DNA
gacattatcgctgagtttaacggtcaaccagcttccggtctggggatcaagctggcaaccggcgctaacgcgctg

SEQ ID NO: 435487 - DNA, 75 bp, synthetic construct
  source 1..75: mol_type = other DNA
tcggcaatggcactgtcagtactggtggcgttgatcctgactccggcgctttgtgcgaccatgctgaaacctatc

SEQ ID NO: 435488 - DNA, 75 bp, synthetic construct
  source 1..75: mol_type = other DNA
tgacacgctggatcctttataatggagagcaacaggtagccgcctttgcattacctgcaacctgtcggcctgagg

SEQ ID NO: 435489 - DNA, 75 bp, synthetic construct
  source 1..75: mol_type = other DNA
ggctatcttcttcgttccggtgttctttgtggtggttcgccgccgctttagccgcaaaaacgaagatcttgaaca

SEQ ID NO: 435490 - DNA, 75 bp, synthetic construct
  source 1..75: mol_type = other DNA
tcctaacggtctggaagataccccgcagttcaagattgatatcgaccaggagaaagcccaggcactgggtgtttc

SEQ ID NO: 435491 - DNA, 75 bp, synthetic construct
  source 1..75: mol_type = other DNA
ccgcctttggcttctcgataaacacgctaacaatgttcgggatggtgctcgccattggcttgttggtggatgacg

SEQ ID NO: 435492 - DNA, 75 bp, synthetic construct
  source 1..75: mol_type = other DNA
ccgggatagtaagagcccgcggcgcagggaaacgttttggtcgaccacctgtgttaaggaaggtgcgaacaagtt

SEQ ID NO: 435493 - DNA, 75 bp, synthetic construct
  source 1..75: mol_type = other DNA
ggcaagtataagtgctattgccagggaatttcgaaccacacggcaaacaattctgagagttagagcgaaacagca

SEQ ID NO: 435494 - DNA, 75 bp, synthetic construct
  source 1..75: mol_type = other DNA
gcgtgtgatggcggaagaaggtttgccgccaaaagaagctacccgtaagtcgatggggcagattcagggcgctct

SEQ ID NO: 435495 - DNA, 75 bp, synthetic construct
  source 1..75: mol_type = other DNA
atgtacatgtcctctaacagtgactccacgggtaccgtgcaaatcaccctgacctttgagtctggtactgatgcg

SEQ ID NO: 435496 - DNA, 75 bp, synthetic construct
  source 1..75: mol_type = other DNA
ggcgctgatgcgaaaacagtgcaggacacggtgacacaggttatcgaacagaatatgaatggtatcgataacctg

SEQ ID NO: 435497 - DNA, 75 bp, synthetic construct
  source 1..75: mol_type = other DNA
cgacgctgagtcaaccggaattttatgatccagaaatagtcttctttgcagacaaactggacgcttatacagatc

SEQ ID NO: 435498 - DNA, 75 bp, synthetic construct
  source 1..75: mol_type = other DNA
aggaaaacccctctaccaaaaatctgttagaagacgctgtaaaagataagttgtttaataaggtttttgcctata

SEQ ID NO: 435499 - DNA, 75 bp, synthetic construct
  source 1..75: mol_type = other DNA
cgatcatgattttaataaattggttgctgatatttcaaatttatttgataaaacggaaattgatttttcaaaaag

SEQ ID NO: 435500 - DNA, 75 bp, synthetic construct
  source 1..75: mol_type = other DNA
ggtgtcggcacacagtaaaaacctgaccggtttttggatcatgccagacaccggcttcagctttgaagacgcgga

SEQ ID NO: 435501 - DNA, 75 bp, synthetic construct
  source 1..75: mol_type = other DNA
tgtccgtacgtttgtgctggtgaaagataaaaaacattctgttcatctgcgaccggtgagatggacattccactc

SEQ ID NO: 435502 - DNA, 75 bp, synthetic construct
  source 1..75: mol_type = other DNA
gctccagccgctgaccttagatacatgcaagcaagctaaccccgaactgaccgcccgcgcggcgtttagcatgaa

SEQ ID NO: 435503 - DNA, 75 bp, synthetic construct
  source 1..75: mol_type = other DNA
gcggagcacataccactatactccgcggacttcagaaccagccggtactataactcagttatgggacaccgcctc

SEQ ID NO: 435504 - DNA, 75 bp, synthetic construct
  source 1..75: mol_type = other DNA
tcagtggctggcgtttaatcaacggattatgcagggagaagcctctctgtcgacgctgagtcaaccggaatttta

SEQ ID NO: 435505 - DNA, 75 bp, synthetic construct
  source 1..75: mol_type = other DNA
tggaaaaccatctgtcgcaggatgatgactgggccagccgcagacagatcgtaattgaacagcaggttgggtgga

SEQ ID NO: 435506 - DNA, 75 bp, synthetic construct
  source 1..75: mol_type = other DNA
tgctgaagttccatccagcacttcaggcagccatcggagccaacgagcgtaagcgcatcaccacggagatcctgc

SEQ ID NO: 435507 - DNA, 75 bp, synthetic construct
  source 1..75: mol_type = other DNA
gcgttgttgacccggtgctgaccagtattgcccggggttataaaaatgccgcgttcatcggcgagcgaattttcc

SEQ ID NO: 435508 - DNA, 75 bp, synthetic construct
  source 1..75: mol_type = other DNA
acgatgggcgcatcggtgatgacgctgctgaaattccacccggtgattcaggctgctatcggcgcgaacgaacgc

SEQ ID NO: 435509 - DNA, 75 bp, synthetic construct
  source 1..75: mol_type = other DNA
gtcgcgcgggcgcatttatgccgatgtgaatggttttcttgacccggtcgatttccgtgggcaactggtgacggt

SEQ ID NO: 435510 - DNA, 75 bp, synthetic construct
  source 1..75: mol_type = other DNA
cttctcgcgttccgcactgcgtgaagggctgaccgtgctgcgcggacgcgggattattgaaacagcacaggggcg

SEQ ID NO: 435511 - DNA, 75 bp, synthetic construct
  source 1..75: mol_type = other DNA
caggcatgaataacatgctggaacgcattggggcggagccgtacaagcgttaccgattgtatgaaaagcagattt

SEQ ID NO: 435512 - DNA, 75 bp, synthetic construct
  source 1..75: mol_type = other DNA
tatctggttttgttgtgttatgtgcatttgctggagtttataaaatcctaaacaatgttccggttaaacctgacc

SEQ ID NO: 435513 - DNA, 75 bp, synthetic construct
  source 1..75: mol_type = other DNA
ccagcaggggaaaacccgtctggaaattgccaccgtaccgctcgatagcggagccaggccgacgctgggagagcc

SEQ ID NO: 435514 - DNA, 75 bp, synthetic construct
  source 1..75: mol_type = other DNA
gcggcaaagtggtcgcggtacaaaaccagcaggggaaaacccgtctggaaattgccaccgtaccgctcgatagcg

SEQ ID NO: 435515 - DNA, 75 bp, synthetic construct
  source 1..75: mol_type = other DNA
cgctcttgagcctagcaagccgctggcacacgacgagaagcccattaccatcgaagtggtttccatggactggaa

SEQ ID NO: 435516 - DNA, 75 bp, synthetic construct
  source 1..75: mol_type = other DNA
caccgttagcctgattcgccccctgcaccgcccgtcttcagcactggtacaggcatttacagagcatttacaagt

SEQ ID NO: 435517 - DNA, 75 bp, synthetic construct
  source 1..75: mol_type = other DNA
gggagccgtgaatggtggcaactgttccgcctggtatcgcagtggcactgcgatgtggttatcacggaccgcgcc

SEQ ID NO: 435518 - DNA, 75 bp, synthetic construct
  source 1..75: mol_type = other DNA
cagagtggcgcccgaccgtaagtccgggagccgtgaatggtggcaactgttccgcctggtatcgcagtggcactg

SEQ ID NO: 435519 - DNA, 75 bp, synthetic construct
  source 1..75: mol_type = other DNA
atgaccacatcgcattctgcaattacccagaaaaaagccttccacatactcgaacgattagaggcgcttgctacg

SEQ ID NO: 435520 - DNA, 75 bp, synthetic construct
  source 1..75: mol_type = other DNA
atgttccggttaaacctgaccttttggacttcactggaaacacatttaaaaagacatcactctttcctgccatgt

SEQ ID NO: 435521 - DNA, 75 bp, synthetic construct
  source 1..75: mol_type = other DNA
agaagatgtgctgaaagaagccgtcaatctgatccagtcgctcgatccgcgtccgggtcagtcgatccagaccgg

SEQ ID NO: 435522 - DNA, 75 bp, synthetic construct
  source 1..75: mol_type = other DNA
atgaagcaaggtttgcaactcaggcttagtcagcaactggcgatgacgcctcagctacaacaggcaattcgtctg

SEQ ID NO: 435523 - DNA, 75 bp, synthetic construct
  source 1..75: mol_type = other DNA
aaagagatgccggaagagctaccgctcgatgccagttgggacacgatctataccgccggtacaccatctggcacc

SEQ ID NO: 435524 - DNA, 75 bp, synthetic construct
  source 1..75: mol_type = other DNA
cgaaccggaatatgtcattccagatgtgttggtacgcaagcataacggtcaatggacggttgaactcaacagcga

SEQ ID NO: 435525 - DNA, 75 bp, synthetic construct
  source 1..75: mol_type = other DNA
ccacgccgtggctggaagaggccagactgatcattagcgatcatctcgatctgttagccaatcacgacttccgca

SEQ ID NO: 435526 - DNA, 75 bp, synthetic construct
  source 1..75: mol_type = other DNA
agcggtgactacattgacgacgagctaccggtctatcagggcgaaacgacgcagaccttgcaggattacctgatg

SEQ ID NO: 435527 - DNA, 75 bp, synthetic construct
  source 1..75: mol_type = other DNA
aaatgctaatgaaattattagaagagaacactgtacacaacaaataccttgataaaaccgatggatggactacaa

SEQ ID NO: 435528 - DNA, 75 bp, synthetic construct
  source 1..75: mol_type = other DNA
cggcggttttctcgagggcagcaacgtctcggcggtgagcgaaatgatgtcgtccatcgccatgaaccgccagtt

SEQ ID NO: 435529 - DNA, 75 bp, synthetic construct
  source 1..75: mol_type = other DNA
gtggatgagacaacgctgacagcaacagtgaaagatccttttgataacgtagtaatagatctaccggtcaccttt

SEQ ID NO: 435530 - DNA, 75 bp, synthetic construct
  source 1..75: mol_type = other DNA
tcgttgatgtttctgcgacttaatgtcacgccggaatcggtaaaagcccagcataaggccctgctgcgttatttc

SEQ ID NO: 435531 - DNA, 75 bp, synthetic construct
  source 1..75: mol_type = other DNA
atggatctgagcgcacatcgctcagccctgaagttcacatccctgacgtttgtcatcctgttgttttttctcggt

SEQ ID NO: 435532 - DNA, 75 bp, synthetic construct
  source 1..75: mol_type = other DNA
ccatcatactcaaactctactataccatacttattcttattcgatgcagacaaagcaatatcaattaaaggtgag

SEQ ID NO: 435533 - DNA, 75 bp, synthetic construct
  source 1..75: mol_type = other DNA
aatatcgtgccgcaggaatcgccgctacttgaagagtggctttcggcccagcgccatgatttaggactcaccgaa

SEQ ID NO: 435534 - DNA, 75 bp, synthetic construct
  source 1..75: mol_type = other DNA
ggagacgttgttgcagcagctggtggcgatgaacgcgcgactgaagagcactgcgccgaatattattgcggcgcg

SEQ ID NO: 435535 - DNA, 75 bp, synthetic construct
  source 1..75: mol_type = other DNA
ccgcaccggatattatcgcagcgcgaaaatccgccacgacaacgcctgcacaggtatcgcgggttatcagtgaca

SEQ ID NO: 435536 - DNA, 75 bp, synthetic construct
  source 1..75: mol_type = other DNA
tcagcgcaggtgagaagccggggatggtgaacgtgcagcgactggaatttggacggggtaaagtatcaggagatt

SEQ ID NO: 435537 - DNA, 75 bp, synthetic construct
  source 1..75: mol_type = other DNA
tataggtgatatacctgtgagccggatgaacaaaagggctttgatggattatcgctccatgcgactacgtgatgg

SEQ ID NO: 435538 - DNA, 75 bp, synthetic construct
  source 1..75: mol_type = other DNA
atcagagatcagcagattgctggatactctgaccggcgatgatcgacgcgtagcactgctatgcctcagcactgg

SEQ ID NO: 435539 - DNA, 75 bp, synthetic construct
  source 1..75: mol_type = other DNA
caaacgccgcaaaatgacgtctctgacgccattccgcaacatttgccggtgacctacagtcggttcttgttggag

SEQ ID NO: 435540 - DNA, 75 bp, synthetic construct
  source 1..75: mol_type = other DNA
atgattgatgaattccacgttatgtatatgtatagaaaaatccaagctgaagcggctaccactgatataaagaca

SEQ ID NO: 435541 - DNA, 75 bp, synthetic construct
  source 1..75: mol_type = other DNA
tcgatctcgcaccgaaaaagtccgttaccgaagctcgatggctatcagtatcgactggtcgataccgcgacgctg

SEQ ID NO: 435542 - DNA, 75 bp, synthetic construct
  source 1..75: mol_type = other DNA
acctaagctcgatggctaccagtatcgactggtcgataccgccacgctggaagttgaagtcctgcgggagcaggg

SEQ ID NO: 435543 - DNA, 75 bp, synthetic construct
  source 1..75: mol_type = other DNA
atagccgagcgtggggagaatattcaggtctggatagatccggtggtgtttaatgacctgctgaactggttaaac

SEQ ID NO: 435544 - DNA, 75 bp, synthetic construct
  source 1..75: mol_type = other DNA
cgtcttaagacagaaatttttagtcttaaaaatcagtttgagaattacattatgttatgtaaggggagaacagtt

SEQ ID NO: 435545 - DNA, 75 bp, synthetic construct
  source 1..75: mol_type = other DNA
cagatacaaaatgattatgctgatgaaaacaatttcatcaaaaccacgctttacttaacaggtaaacaaagggct

SEQ ID NO: 435546 - DNA, 75 bp, synthetic construct
  source 1..75: mol_type = other DNA
atggcctacttacatcaacagaatggtgcaattagtgatgcccgtgagcaatacgaattggctattgtattatca

SEQ ID NO: 435547 - DNA, 75 bp, synthetic construct
  source 1..75: mol_type = other DNA
cgattgatccatggttttatggcggtcgtggctggccctatggctacggcgatggggctggtataatcccggccc

SEQ ID NO: 435548 - DNA, 75 bp, synthetic construct
  source 1..75: mol_type = other DNA
attattggccgcagcgaagccatgtacagcgtacttaaacaagttgaaatggtggcgcaaagtgacagtaccgtg

SEQ ID NO: 435549 - DNA, 75 bp, synthetic construct
  source 1..75: mol_type = other DNA
cggcaacggtggttgcgcaagaaggcgaagatgaatatcaattaatcgttcgcgtattaaaagagactaatggcg

SEQ ID NO: 435550 - DNA, 75 bp, synthetic construct
  source 1..75: mol_type = other DNA
ccgctgaaagtctgcgcgagtttcgccagggagaactttcaattgcctgcctgccggtcttttcgcagtcttttt

SEQ ID NO: 435551 - DNA, 75 bp, synthetic construct
  source 1..75: mol_type = other DNA
ctgccggtcttttcgcaatcttttttaccgcagctcctgcaaccctttctggcacgttatcccgatgtcagctta

SEQ ID NO: 435552 - DNA, 75 bp, synthetic construct
  source 1..75: mol_type = other DNA
tacctgtgcgatcagcgggcatccgatcaggcgcgtgaccgttaccgtgaggcgctggcatggctgaaagacgtc

SEQ ID NO: 435553 - DNA, 75 bp, synthetic construct
  source 1..75: mol_type = other DNA
aatccttcctgccgtgcagaaaaaaatctggcggtggtcggtgcgggacctgctgggctggcgtttgccattaac

SEQ ID NO: 435554 - DNA, 75 bp, synthetic construct
  source 1..75: mol_type = other DNA
agcagatggggctgacgcttattactgttgatttcaatgacctgtcggcactgaagcaggtcgtcgacgagcaac

SEQ ID NO: 435555 - DNA, 75 bp, synthetic construct
  source 1..75: mol_type = other DNA
caatcgtatgtcgcgtaacccaagttacattaagtggttcgtaagttcggttcaaacgggattgagccctgaagc

SEQ ID NO: 435556 - DNA, 75 bp, synthetic construct
  source 1..75: mol_type = other DNA
gaacagagcgaagtcgatgaagccggaacactcaccgagcgtgtgtttaaaagcaaagagatgctgctgattaat

SEQ ID NO: 435557 - DNA, 75 bp, synthetic construct
  source 1..75: mol_type = other DNA
tggtcactattgtctgctgccgctagcagcggaagggcatatttttggcggttgtgaatttattcgttatgacga

SEQ ID NO: 435558 - DNA, 75 bp, synthetic construct
  source 1..75: mol_type = other DNA
cctacgaacgcatgttgttcgatacctggggcaaccagatccagacgctgtgcctgctgccgttgatgtctggca

SEQ ID NO: 435559 - DNA, 75 bp, synthetic construct
  source 1..75: mol_type = other DNA
tgaagctccagcgcattgatttttttattaagcttgtagcggctagtgagtgcagcgacgaagaaaagcggctgg

SEQ ID NO: 435560 - DNA, 75 bp, synthetic construct
  source 1..75: mol_type = other DNA
ccctgcagtgggtttctgaactaacagatgagctcatggcaaaaatcagaagccacgaatacaaccgctcaatgg

SEQ ID NO: 435561 - DNA, 75 bp, synthetic construct
  source 1..75: mol_type = other DNA
ctatccagtgggtttctgagctgactgacgagttgatggcgaaaattcgtaactatgaatacagccgtacaatgg

SEQ ID NO: 435562 - DNA, 75 bp, synthetic construct
  source 1..75: mol_type = other DNA
ggcaggtcagcccgccatccggccggtgcatgatctgacagcggccgggtttaacatgatgaacggtctgcccgt

SEQ ID NO: 435563 - DNA, 75 bp, synthetic construct
  source 1..75: mol_type = other DNA
atgctggaagagtacaagaaggtggtgaacagcggtgacggcgatgcggtgaaaggggatgaggccgggcgtcag

SEQ ID NO: 435564 - DNA, 75 bp, synthetic construct
  source 1..75: mol_type = other DNA
tacgccggtcatggcagacagtattctctcgctgccaaaactgaatgacagcacgtttggttacggaaaatcggt

SEQ ID NO: 435565 - DNA, 75 bp, synthetic construct
  source 1..75: mol_type = other DNA
atatggggcattacacgactgaagctggttttcaatcaaatatgtattggtcatctagtcccgcaaactcaaacg

SEQ ID NO: 435566 - DNA, 75 bp, synthetic construct
  source 1..75: mol_type = other DNA
ctaatcaacaggtgatttttatcggtgatcaaagtactgctgccctgaccctcagtgtgccttcaggtgatatca

SEQ ID NO: 435567 - DNA, 75 bp, synthetic construct
  source 1..75: mol_type = other DNA
aagggactataactccagaaataagccaacggcatcagagatcggggcgttaccgtcaggtggaacagcagtatc

SEQ ID NO: 435568 - DNA, 75 bp, synthetic construct
  source 1..75: mol_type = other DNA
gacttcactagcaagcatcagcacttatcgaaggttttgcatacatgggatgatgtagtttcgcaaagcaaacct

SEQ ID NO: 435569 - DNA, 75 bp, synthetic construct
  source 1..75: mol_type = other DNA
aacatattcagcgagtaagccttccagcgttacctatggtgttgtttatacgatgtatagctcacatcagaaacc

SEQ ID NO: 435570 - DNA, 75 bp, synthetic construct
  source 1..75: mol_type = other DNA
tgaagctccagcgcattgatttttttgtcaagcttgtggcggctagtgagtgtgatgatgaagagaagcgactgg

SEQ ID NO: 435571 - DNA, 75 bp, synthetic construct
  source 1..75: mol_type = other DNA
gtgatctgatgtgcggcaattttgatatcaaaaccacggtgggcaatcagctgaacggggtgacggccggcttta

SEQ ID NO: 435572 - DNA, 75 bp, synthetic construct
  source 1..75: mol_type = other DNA
atgtatgaggagtgtgtgacatttttcatgagagtaaaacaggtgataacctcctttcgtaaggggcattcacag

SEQ ID NO: 435573 - DNA, 75 bp, synthetic construct
  source 1..75: mol_type = other DNA
atgtatgaggagagtgtgacatttttcatgacagtaaaacaggtgataacctcctttcgtaaggggtattcacag

SEQ ID NO: 435574 - DNA, 75 bp, synthetic construct
  source 1..75: mol_type = other DNA
catgatatgtcagtaccttcgggcgaaggtgcaggctctgttttgctgaaaaactatccggtggcattttctggt

SEQ ID NO: 435575 - DNA, 75 bp, synthetic construct
  source 1..75: mol_type = other DNA
cggtaacgctatttgtcagtctgcaaacaccgaaggccagaacatccacggtaagtgtgcaacgtctgcgattgc

SEQ ID NO: 435576 - DNA, 75 bp, synthetic construct
  source 1..75: mol_type = other DNA
atgtatgaggagcgtgtgacatttttcatgatagtaaaacaggtgataacctcctttcgtaagggggattcacag

SEQ ID NO: 435577 - DNA, 75 bp, synthetic construct
  source 1..75: mol_type = other DNA
atgtatgaggagcgtgtgacatttttcatgaaagtaaaacaggtgataacctcctttcgtaaggggtattcacag

SEQ ID NO: 435578 - DNA, 75 bp, synthetic construct
  source 1..75: mol_type = other DNA
agcaacatgaagaagctcggggtggatattggctggagcagcaacctgatgtgcggcaactttgacctgaaaacc

SEQ ID NO: 435579 - DNA, 75 bp, synthetic construct
  source 1..75: mol_type = other DNA
ggcctgcagcacaatggccggcgcggcggagaatgaacgcagtacgttcggtctctccctgccacaggtgaatga

SEQ ID NO: 435580 - DNA, 75 bp, synthetic construct
  source 1..75: mol_type = other DNA
atgagcttctgaccaatggcgtgcttcaggccaatgtctcgtttgataaagctcaactcaactgccagaacatgt

SEQ ID NO: 435581 - DNA, 75 bp, synthetic construct
  source 1..75: mol_type = other DNA
atgaagagaagtttaatactgtgttttgtcattaatgccttatttagcaccagtgcgatggctctgacgctggat

SEQ ID NO: 435582 - DNA, 75 bp, synthetic construct
  source 1..75: mol_type = other DNA
ggcaaaagcttgtagaacgggccaaacccggggaatatgtacaagggataaacggtaaatgggtgcgaaaatttt

SEQ ID NO: 435583 - DNA, 75 bp, synthetic construct
  source 1..75: mol_type = other DNA
caatgtaatggcattgactctggatgaagccagaactcaggggcgggtaggggaaacattttatggttatctggt

SEQ ID NO: 435584 - DNA, 75 bp, synthetic construct
  source 1..75: mol_type = other DNA
tcggaagttgccggaccttgcagatgaaggcacattacagaaatggaggtctgttctaccgttcctcaagagatg

SEQ ID NO: 435585 - DNA, 75 bp, synthetic construct
  source 1..75: mol_type = other DNA
cgccaacatattcagcgagtaagccttccagcgttacctatggtgttgtttatacgatgtatagctcacatcaga

SEQ ID NO: 435586 - DNA, 75 bp, synthetic construct
  source 1..75: mol_type = other DNA
gactgcaagaaaaatatccggtgttccatttgatggttctactgatatcactttaaccgccgcgcatgtggctgc

SEQ ID NO: 435587 - DNA, 75 bp, synthetic construct
  source 1..75: mol_type = other DNA
caccactggtaatgctgcaactgctacaaaacttcagactgcaagaaaaatatccggtgttccatttgatggttc

SEQ ID NO: 435588 - DNA, 75 bp, synthetic construct
  source 1..75: mol_type = other DNA
cccgcagtgaaaacattgcgccgctgctgactgcacgaccggaattgatggtgcatgaactgactatggactctc

SEQ ID NO: 435589 - DNA, 75 bp, synthetic construct
  source 1..75: mol_type = other DNA
acattaagaccgtttgctattgataacgcaaccggcgaactgattattggaaccaaactgtccgcaagtctgaac

SEQ ID NO: 435590 - DNA, 75 bp, synthetic construct
  source 1..75: mol_type = other DNA
tgcagccacttctgcatccgcagcgaccacaaaggcgtcagaagctgccacctcagcccgggatgcggcggcctc

SEQ ID NO: 435591 - DNA, 75 bp, synthetic construct
  source 1..75: mol_type = other DNA
ccctattcgtatcggcgataattgtatgctggcgcctggcgtccatatttataccgcaacccatcctgtcgatcc

SEQ ID NO: 435592 - DNA, 75 bp, synthetic construct
  source 1..75: mol_type = other DNA
aaccagtttttcgcaactgttatgcaaaatcgtggcaaatctgttactttccctctactattcccacgttaaaat

SEQ ID NO: 435593 - DNA, 75 bp, synthetic construct
  source 1..75: mol_type = other DNA
ctaccaacatatgttggtacagatgatggtatttccggttcgataatgcttgtaccaacagggagggaatacgag

SEQ ID NO: 435594 - DNA, 75 bp, synthetic construct
  source 1..75: mol_type = other DNA
gaatgccgaatcaggcgcttacaatgtcacccgctctggcaacagctatattctggttaacttctataccggagt

SEQ ID NO: 435595 - DNA, 75 bp, synthetic construct
  source 1..75: mol_type = other DNA
aagacggatatcgagtctttagagaacaggtacgcggacgagttgttgaaacttcgtcctgtatggtatcgctcg

SEQ ID NO: 435596 - DNA, 75 bp, synthetic construct
  source 1..75: mol_type = other DNA
ctgcgcgctcgtcagcttattcaccgatacaatcattccctggcggaagagcacacattacgccagcaaattctt

SEQ ID NO: 435597 - DNA, 75 bp, synthetic construct
  source 1..75: mol_type = other DNA
cattattgatgccggaaatgcaggcatggcgagcggcggcatgggcgatgtgctctctggtattattggcgcatt

SEQ ID NO: 435598 - DNA, 75 bp, synthetic construct
  source 1..75: mol_type = other DNA
tggcgctggttacaacgtcggctccccacagcaggcaggcatttcagaactggttctacgagcaggcaatggaaa

SEQ ID NO: 435599 - DNA, 75 bp, synthetic construct
  source 1..75: mol_type = other DNA
aatgacaatgcgaatggcagggtaccatctaaccgaaaagttaacgggaaagcactgactgcggatataacatta

SEQ ID NO: 435600 - DNA, 75 bp, synthetic construct
  source 1..75: mol_type = other DNA
aaacttgcagccgcttatccgtcaggcgtgatccctgatatgcgtggctggacgattaagggcaaacccgccagt

SEQ ID NO: 435601 - DNA, 75 bp, synthetic construct
  source 1..75: mol_type = other DNA
gatgaaggcgcattacagaaatcgtggtctgttctaccgttcttcaagagacggttatggttttgaggaagactg

SEQ ID NO: 435602 - DNA, 75 bp, synthetic construct
  source 1..75: mol_type = other DNA
tttaacgtgggggcacctcaacaggcaggtatatctgaacttgttttgcgtgcaggtaatggtaatccgaagggg

SEQ ID NO: 435603 - DNA, 75 bp, synthetic construct
  source 1..75: mol_type = other DNA
cgcatccagtacggatttggggacgaaaaccacatcgtcgtttgattacggaaccaaatccacgaataacaccgg

SEQ ID NO: 435604 - DNA, 75 bp, synthetic construct
  source 1..75: mol_type = other DNA
atgtctacggggtggttagcgaataccagtacagatggtaatcatagccattcactgtccggcacagcagcatct

SEQ ID NO: 435605 - DNA, 75 bp, synthetic construct
  source 1..75: mol_type = other DNA
cggcagacccaaaaattaacggtgttaagtttgatggctcggcggatattaacctcacgccggaaaatattggtg

SEQ ID NO: 435606 - DNA, 75 bp, synthetic construct
  source 1..75: mol_type = other DNA
gccgcgaagaagtcagccggcgatgccagcacatcagcccgtgaggcggcaacccatgcgactgatgctgcaggc

SEQ ID NO: 435607 - DNA, 75 bp, synthetic construct
  source 1..75: mol_type = other DNA
actcgtaatgcagggaagacatcatcagatggtgctcatacccactcgctgtccggcactgctgcaagcgcaggc

SEQ ID NO: 435608 - DNA, 75 bp, synthetic construct
  source 1..75: mol_type = other DNA
tggttattggaaccaaactgtccgcaagtctgaacggtaatgcattaacagcaacaaagctgcaaacgccaagac

SEQ ID NO: 435609 - DNA, 75 bp, synthetic construct
  source 1..75: mol_type = other DNA
gaggcactgcgccgctttgagcagatggtggaagaggtgtcacgtaacgcctccgcggttgcacagaacacggca

SEQ ID NO: 435610 - DNA, 75 bp, synthetic construct
  source 1..75: mol_type = other DNA
ttctgccggaggagccaatccggccgacatgaaaaatcccggccagcgcaagtccgccgttcgtttcaagtatgc

SEQ ID NO: 435611 - DNA, 75 bp, synthetic construct
  source 1..75: mol_type = other DNA
agccggggcaacatgtggggaaatctttatccgcgcagcggttttgtcacccagcaggacggggagaaagcagcg

SEQ ID NO: 435612 - DNA, 75 bp, synthetic construct
  source 1..75: mol_type = other DNA
aatcgtcaccttcagcggcacaaataccggcgctgaaaccaacgaaatttaccaactctggttgcagcaatatca

SEQ ID NO: 435613 - DNA, 75 bp, synthetic construct
  source 1..75: mol_type = other DNA
tggctttactgcagcgcgtctggctgtacggtcagaatttccgtgaaggtgacacatttcatcccggaagtggtt

SEQ ID NO: 435614 - DNA, 75 bp, synthetic construct
  source 1..75: mol_type = other DNA
atgtccctgaaatgtcgtctgcgtaccggcgtgctgttactgagtgtggcatcactgcccctggcgtctgtatca

SEQ ID NO: 435615 - DNA, 75 bp, synthetic construct
  source 1..75: mol_type = other DNA
ctggcgtgtcagcgggatttgttactggctttactgcagcgcgtctggctgtacggtcagaacttccgtgaaggt

SEQ ID NO: 435616 - DNA, 75 bp, synthetic construct
  source 1..75: mol_type = other DNA
aaccgcacccgattgatggcctgtccggtgaatatgcggagaaatctcttgaggagtgggcggaacagattcgta

SEQ ID NO: 435617 - DNA, 75 bp, synthetic construct
  source 1..75: mol_type = other DNA
tcgtgcggcgctggcagcggagagtgcgggaataaagtctgcaattccagaatcacgggatattgaagatgacaa

SEQ ID NO: 435618 - DNA, 75 bp, synthetic construct
  source 1..75: mol_type = other DNA
ttgggtgtaggacagatagcgcaagcagagattcagttgcggcatgtgttctggctttccactcttggattaacg

SEQ ID NO: 435619 - DNA, 75 bp, synthetic construct
  source 1..75: mol_type = other DNA
gccgataaaaacatgtgggggagtgtttatccaagaagcggttttgtgatgcagaccgatgatgaccgggccgcg

SEQ ID NO: 435620 - DNA, 75 bp, synthetic construct
  source 1..75: mol_type = other DNA
atgatgagccggtcatttcgtctgcgtgccggggccctgctgctgagtgttgcagctctgcctctggcgtcagcc

SEQ ID NO: 435621 - DNA, 75 bp, synthetic construct
  source 1..75: mol_type = other DNA
ggaggccagttgcgcggctctggcggcggagaatgcaagactgaaggccggggctatgtatttctcatatggctc

SEQ ID NO: 435622 - DNA, 75 bp, synthetic construct
  source 1..75: mol_type = other DNA
ccgtggcggctcggtgtgccggaaatggcgtatccggaagccctgatccccgggaaacgggaaatcggggcacag

SEQ ID NO: 435623 - DNA, 75 bp, synthetic construct
  source 1..75: mol_type = other DNA
cggtgacagcggcgaaagctgatgcccagcaggcggtggatggtctgcaggatggtccggtcaagacgggcttca

SEQ ID NO: 435624 - DNA, 75 bp, synthetic construct
  source 1..75: mol_type = other DNA
cagccgggtgaaacacagtgtacagcagtatttaatgttgtgggtgaaaatggccaggtaactgaagctgtcctg

SEQ ID NO: 435625 - DNA, 75 bp, synthetic construct
  source 1..75: mol_type = other DNA
gccggatgcagaggaagcagcagaggcggtgaatgcagcgacagccaaggtagcagaagcggaagcgaaggaaaa

SEQ ID NO: 435626 - DNA, 75 bp, synthetic construct
  source 1..75: mol_type = other DNA
tgttgctctgcgctttctcattcgtagctagtggagcggtctcgggcgaaatccagccatatcctgattacctgt

SEQ ID NO: 435627 - DNA, 75 bp, synthetic construct
  source 1..75: mol_type = other DNA
ggcaaacgcgccagcgtcgttgcgctggatagcgggctgcatgtgcaacaaatctggattcagggtcaattagct

SEQ ID NO: 435628 - DNA, 75 bp, synthetic construct
  source 1..75: mol_type = other DNA
tagactgggccgcaagcacgggggttatgaccaagcaacggtgcaagatgtcatgtcaggagcgatgtcagcgcc

SEQ ID NO: 435629 - DNA, 75 bp, synthetic construct
  source 1..75: mol_type = other DNA
gtgagcagaagccggttcagctcaggaagcggtcaagagaccggatgcagacaagggtaacctgcaggatcgcgt

SEQ ID NO: 435630 - DNA, 75 bp, synthetic construct
  source 1..75: mol_type = other DNA
aaaaaatacgcttaaggctactttcaagatcgatctcaatggcgataataaatctgacgttgatgtcaataccaa

SEQ ID NO: 435631 - DNA, 75 bp, synthetic construct
  source 1..75: mol_type = other DNA
cggaggcggtgacggagaataccgggacaaaaaaccataaatggcagcgcctgtcgccggggctgaaaaacagct

SEQ ID NO: 435632 - DNA, 75 bp, synthetic construct
  source 1..75: mol_type = other DNA
acccaagatggtcctgtactggagaatttcactgcagggcaaagtggcacactggttgaaggtatcaataacggg

SEQ ID NO: 435633 - DNA, 75 bp, synthetic construct
  source 1..75: mol_type = other DNA
acccaggatggtcctgtactggagaattttactgcagggcaaagtggcacactggctgaaggtatcaataacggg

SEQ ID NO: 435634 - DNA, 75 bp, synthetic construct
  source 1..75: mol_type = other DNA
aggcagtcaggaaactgggaaaattgatggacctccgacagtctctacgaagccggtaaatgggaattctttcgg

SEQ ID NO: 435635 - DNA, 75 bp, synthetic construct
  source 1..75: mol_type = other DNA
tggtccgcctcatgggtgctacccgctggatttaagggggctcgtgacgcccgttacgctatgtgggtttctatg

SEQ ID NO: 435636 - DNA, 75 bp, synthetic construct
  source 1..75: mol_type = other DNA
gattcgctggtggattaaggacggtggcagagactgccgtatccgctcaaataattgctacggtcaggtatcccg

SEQ ID NO: 435637 - DNA, 75 bp, synthetic construct
  source 1..75: mol_type = other DNA
atctgccgtggtgccatcatggtggatggcaaacctgtcgttccgggcatgaagttgtcgaaggaaaaatgcgat

SEQ ID NO: 435638 - DNA, 75 bp, synthetic construct
  source 1..75: mol_type = other DNA
gaagctgtcgaaggaaaaatgcgactgggttaacgctatcgaacgggataaggcgctggcgtgggtggagaaaaa

SEQ ID NO: 435639 - DNA, 75 bp, synthetic construct
  source 1..75: mol_type = other DNA
agaatgtaaagatactaacgaggcgaaattactttcattcgatagaataacagcgctaatggcaagctctaaata

SEQ ID NO: 435640 - DNA, 75 bp, synthetic construct
  source 1..75: mol_type = other DNA
gagactctgcgtgtctgggttcgccagtatgagcgggataccgggggcggagatggagggctcaccagtgctgaa

SEQ ID NO: 435641 - DNA, 75 bp, synthetic construct
  source 1..75: mol_type = other DNA
ttgctgctgctattggtggcggggctattgctatagcatctgtgttaatcactggcccaggtggtaacgatggtc

SEQ ID NO: 435642 - DNA, 75 bp, synthetic construct
  source 1..75: mol_type = other DNA
tggcgctgattggtgcaggggcgtctgcgcctgaaatcctcgaccagtttcttgacgaaaaagaaggtaaccaca

SEQ ID NO: 435643 - DNA, 75 bp, synthetic construct
  source 1..75: mol_type = other DNA
cggaaccactcaaataactgttacgggcaggtgtcgcggcgtgaccaggaaagtgcgctggcgtgctggggaatt

SEQ ID NO: 435644 - DNA, 75 bp, synthetic construct
  source 1..75: mol_type = other DNA
cacgcctccagcctgacggcgctgaccgatattaccccgcgcccgcaggtggtctatctcgacccgatgttcccg

SEQ ID NO: 435645 - DNA, 75 bp, synthetic construct
  source 1..75: mol_type = other DNA
gattaaggacggtggcagagactgccgtattcgctcaaataactgttacggtcaggtatcccgtcgcgaccagga

SEQ ID NO: 435646 - DNA, 75 bp, synthetic construct
  source 1..75: mol_type = other DNA
attggccccggtaagtgtttcccgtcgacgttttataaacgaattaatgcaggtgatcgaaaaggtgcctgcgaa

SEQ ID NO: 435647 - DNA, 75 bp, synthetic construct
  source 1..75: mol_type = other DNA
gacaggcaagtagaatattttgctaaaaatgacgttagtcaacgcgggtgggtaacacgaaatcctgcgaactgg

SEQ ID NO: 435648 - DNA, 75 bp, synthetic construct
  source 1..75: mol_type = other DNA
tttacctatgatggtataacctatgccaccgcagaacactggatgatggcgggaaaagcgcggctgtttaatgac

SEQ ID NO: 435649 - DNA, 75 bp, synthetic construct
  source 1..75: mol_type = other DNA
taaaaacgtaaacgaaatcgagattggaattcgtccgtcggcacttttgattggtaaagtatggagtcggttcta

SEQ ID NO: 435650 - DNA, 75 bp, synthetic construct
  source 1..75: mol_type = other DNA
gctaatcgatgttgtgcggtggttgcaaacagccctaatgatgagaaaattggtgtttttcttggcatggtgcaa

SEQ ID NO: 435651 - DNA, 75 bp, synthetic construct
  source 1..75: mol_type = other DNA
cagaaagcgggtatagcgtcattttgtccctataacattggccccggtaagtgttttccgtcgacgttttataag

SEQ ID NO: 435652 - DNA, 75 bp, synthetic construct
  source 1..75: mol_type = other DNA
aaagaaattgaaagtcacgcctgtctgaccaatatgatcaatgccaggagcaatttactttataccggcatcgaa

SEQ ID NO: 435653 - DNA, 75 bp, synthetic construct
  source 1..75: mol_type = other DNA
ctttatatttaataatgttgttaagctgttcttcgcaggctggtcaggaaaactgggatctaaaatgcacacttg

SEQ ID NO: 435654 - DNA, 75 bp, synthetic construct
  source 1..75: mol_type = other DNA
aaagaaactgaaagtcacgcctgtctgcccggcacgattactaccaggagtgatttactttatacaggtatcgaa

SEQ ID NO: 435655 - DNA, 75 bp, synthetic construct
  source 1..75: mol_type = other DNA
atgaacgtaaaaatcagatacagcctgtcagctgccgttctggcgctgattgccgccagtgctcctgcccccgac

SEQ ID NO: 435656 - DNA, 75 bp, synthetic construct
  source 1..75: mol_type = other DNA
acaggcagtcaatcagttaataacggccagtgaacagaagcagtccggttcttcttcattaacctttgccacaga

SEQ ID NO: 435657 - DNA, 75 bp, synthetic construct
  source 1..75: mol_type = other DNA
caatcaccggttatcacccaaccggccagcaatgccttcgccgtaaaccagactcaaccacaaccggcacaagtg

SEQ ID NO: 435658 - DNA, 75 bp, synthetic construct
  source 1..75: mol_type = other DNA
gctgaccgaaccccagaaggcgggtatcgcgtcattttgtccttataacattggccccggtaagtgtttcccgtc

SEQ ID NO: 435659 - DNA, 75 bp, synthetic construct
  source 1..75: mol_type = other DNA
cgaattaatgcaggcgatcgaaaaggtgcctgcgaagcgattcgctggtggattaaggacggtggcagagactgc

SEQ ID NO: 435660 - DNA, 75 bp, synthetic construct
  source 1..75: mol_type = other DNA
cgaattaatgcaggcgatcgcaggggagcgtgtgaggcgattcgctggtggattaaggacggtggcagagactgc

SEQ ID NO: 435661 - DNA, 75 bp, synthetic construct
  source 1..75: mol_type = other DNA
aacacaggaagagtcgctatcggaacagtggcgtgagttgtggcaggatgcgttgcaggaagatgacaccacgcc

SEQ ID NO: 435662 - DNA, 75 bp, synthetic construct
  source 1..75: mol_type = other DNA
ttgccgatttccgcaaagagctggataagcgcaccatcgggccgcgaggacgtcaggtgctcgaccatctgatgc

SEQ ID NO: 435663 - DNA, 75 bp, synthetic construct
  source 1..75: mol_type = other DNA
aaccgtgcgcggctggcgtgggcgatggactttgctgactggccgcaattgaccggggcgctgaccgcacatatg

SEQ ID NO: 435664 - DNA, 75 bp, synthetic construct
  source 1..75: mol_type = other DNA
cacttggagccagcatgattctgggcggtgtggcccagatgctggccccgaaggcaaaaacaccggattaccggg

SEQ ID NO: 435665 - DNA, 75 bp, synthetic construct
  source 1..75: mol_type = other DNA
caacgatttggccgccgcctcagcctgtatgtgaacacggcagcggaagccatccgtgccctgtcgatgcagatg

SEQ ID NO: 435666 - DNA, 75 bp, synthetic construct
  source 1..75: mol_type = other DNA
gtgccgcatcgccgatgattgccagccagctggcgcgctatccattattgctggacgaactgctcgatccaaaca

SEQ ID NO: 435667 - DNA, 75 bp, synthetic construct
  source 1..75: mol_type = other DNA
attgaatttatcgttcaggtgttccagctcattcgcggcgggcgcgaaccgtcgctgcaatcgcgctctttactg

SEQ ID NO: 435668 - DNA, 75 bp, synthetic construct
  source 1..75: mol_type = other DNA
cgcatggggcagcggctgattaaagtgctggatcaaccaacgcaggatggcttcgtctatcgcgtggatatgcgg

SEQ ID NO: 435669 - DNA, 75 bp, synthetic construct
  source 1..75: mol_type = other DNA
tgaatctgctttctgaaaacgatgccgaacaattgcgggcagcgtatctgttcctgcggcgcctggaaaacctgc

SEQ ID NO: 435670 - DNA, 75 bp, synthetic construct
  source 1..75: mol_type = other DNA
aactgctggcgcaaaacgacattatggaagagcaggaagcgatggcgctgacccgtgcttacacgacgcttcgcg

SEQ ID NO: 435671 - DNA, 75 bp, synthetic construct
  source 1..75: mol_type = other DNA
caaaaccctgcaaacagaagtgcgggaaatgcgcgagaaaatgcgcgctcatctcggcaataaacatcgcgatcg

SEQ ID NO: 435672 - DNA, 75 bp, synthetic construct
  source 1..75: mol_type = other DNA
gagtggttggtggaactggaaagcgaaccaccgcaggccgacgaatggcagcattacgctgcatggttacagaag

SEQ ID NO: 435673 - DNA, 75 bp, synthetic construct
  source 1..75: mol_type = other DNA
atcatttccagcatgaatgaaccgtactggaaaaaacgttacaacgaagcgcgtcgagtacttagtcgcagctaa

SEQ ID NO: 435674 - DNA, 75 bp, synthetic construct
  source 1..75: mol_type = other DNA
agtacgtatcacagttgcaaaatctttcctctcttcaggggcaaggtcaggcgcttaaccagtattacaactccc

SEQ ID NO: 435675 - DNA, 75 bp, synthetic construct
  source 1..75: mol_type = other DNA
tttggcttaaaaaccgtaaaagaatttgttaaagcaattctttatattattttatttttttttgcattggcgatc

SEQ ID NO: 435676 - DNA, 75 bp, synthetic construct
  source 1..75: mol_type = other DNA
ccgggcaaacatatgccaacaacatgagtcagatttcacagcaaagcgcggcgctggcggcggcaaacgccaacc

SEQ ID NO: 435677 - DNA, 75 bp, synthetic construct
  source 1..75: mol_type = other DNA
agccacaagcaatcaactggctacgatcgcgccgacactcggtcagtcttggttatcaaatcagatgagcaatta

SEQ ID NO: 435678 - DNA, 75 bp, synthetic construct
  source 1..75: mol_type = other DNA
gagatgctattccttctcatactgtattgtctcggcagtatgataattgtcttaatttttgattttatcgctgaa

SEQ ID NO: 435679 - DNA, 75 bp, synthetic construct
  source 1..75: mol_type = other DNA
ttgttaaagcaattctttatattatttttttttttttttttttttttttttttttttgcattggcgatcaaagta

SEQ ID NO: 435680 - DNA, 75 bp, synthetic construct
  source 1..75: mol_type = other DNA
atgtctggaaatataggggcaaatccactggttgatgaaaaagctgaacaagggagcaggcaagcctggagtaat

SEQ ID NO: 435681 - DNA, 75 bp, synthetic construct
  source 1..75: mol_type = other DNA
ataaaagttaaaggattttggttggaaaataatgttactttccttgggctttctgttacaggtgtttctttgcct

SEQ ID NO: 435682 - DNA, 75 bp, synthetic construct
  source 1..75: mol_type = other DNA
gtgagaacgccggagggggagcggtatatcccttgtgtgaatatctctgcagagccggaggcgtattttcgtatt

SEQ ID NO: 435683 - DNA, 75 bp, synthetic construct
  source 1..75: mol_type = other DNA
gtgctgagacgacgcttacaaagatattttccctgcgtgaatatctccggtgagccggaggcgtatttccggatg

SEQ ID NO: 435684 - DNA, 75 bp, synthetic construct
  source 1..75: mol_type = other DNA
atgcgtaaaagcctgttagctattcttgcagtctcctcgttggtattcagttcggcgtcatttgctgctgatctg

SEQ ID NO: 435685 - DNA, 75 bp, synthetic construct
  source 1..75: mol_type = other DNA
ctgataatgccgttaaaattgggcttggctctgcgctgacaatattgggcggttatctaacgctcaaattatctc

SEQ ID NO: 435686 - DNA, 75 bp, synthetic construct
  source 1..75: mol_type = other DNA
caaactgttctgacagtctttattcgtatatttatcgcactctgcaaaaacgggctggtgatgagaatgaaagcc

SEQ ID NO: 435687 - DNA, 75 bp, synthetic construct
  source 1..75: mol_type = other DNA
aacctttacctggacaatatggcggtcacaggcttttaccgggtgcccctgtcctctgcacaggcgggcgatatc

SEQ ID NO: 435688 - DNA, 75 bp, synthetic construct
  source 1..75: mol_type = other DNA
aatctctatcttgacaatatggaggctactggtttttaccgtgtcgcactgacagaggcgcagccgggcgatgtg

SEQ ID NO: 435689 - DNA, 75 bp, synthetic construct
  source 1..75: mol_type = other DNA
ccgccaccgacagggcctagtggactaccgccccttgcacaggcattaaaagatcatttagctgcctatgagcaa

SEQ ID NO: 435690 - DNA, 75 bp, synthetic construct
  source 1..75: mol_type = other DNA
gagaaagacgagatgaaccgggtattcatcttcggtaaggttattgggagcatgccgcagacatacaggaaacac

SEQ ID NO: 435691 - DNA, 75 bp, synthetic construct
  source 1..75: mol_type = other DNA
atatacgccttcctgtacgacgacactgctcacgtcaagcgcctgcagaagatgaaggacaagctgctggttatc

SEQ ID NO: 435692 - DNA, 75 bp, synthetic construct
  source 1..75: mol_type = other DNA
tggtcagcgccgttctggcgttggtggtcggcgctggagcaggatggagtgtctggcatcattatgccggaaaag

SEQ ID NO: 435693 - DNA, 75 bp, synthetic construct
  source 1..75: mol_type = other DNA
ttgattttgaggttctgtctctatctgatattgaggatatgtccacccaattaaggcgtttttgggggttaggtg

SEQ ID NO: 435694 - DNA, 75 bp, synthetic construct
  source 1..75: mol_type = other DNA
ccatcaatacgcaagcgtataaattaaaacttatgaaaaaagaaactcttgctgatcgcttaaacctagcgatgg

SEQ ID NO: 435695 - DNA, 75 bp, synthetic construct
  source 1..75: mol_type = other DNA
cgatcgagaaagacgagatgaaccgggtgttcatattcggtaaggtcattggaagcatgccgcagacgtacagga

SEQ ID NO: 435696 - DNA, 75 bp, synthetic construct
  source 1..75: mol_type = other DNA
atacgggcaaaaatttgatgtggttgttattaacttcctcaatcagcgaaaccaggccgatcaacgcgttcttga

SEQ ID NO: 435697 - DNA, 75 bp, synthetic construct
  source 1..75: mol_type = other DNA
ggtggcgcaacggtcagaacctttacctggacaatatggcggtcaccggcttttaccgggtgcccctgtcctctg

SEQ ID NO: 435698 - DNA, 75 bp, synthetic construct
  source 1..75: mol_type = other DNA
tgttctttctcacgttagaagcatatttcggggtgttttcctttaaaagaaaaggaaaagtaaataatggcaaaa

SEQ ID NO: 435699 - DNA, 75 bp, synthetic construct
  source 1..75: mol_type = other DNA
ccaggttcgtcgaatattaatgcgagaacgacttttaatatgagtcatatgagtcagatgagtcagatgagtcgt

SEQ ID NO: 435700 - DNA, 75 bp, synthetic construct
  source 1..75: mol_type = other DNA
agtgagattgtcgttgcgtataggaccagaaaaagatctggtatggttaaacgtcaaaatacgaagttacccggt

SEQ ID NO: 435701 - DNA, 75 bp, synthetic construct
  source 1..75: mol_type = other DNA
tctccggtttactgatgaccgtcaccgtcttctttggcatttcggcgctgacagttctttcggtgattgcggttc

SEQ ID NO: 435702 - DNA, 75 bp, synthetic construct
  source 1..75: mol_type = other DNA
tcgacggtgatggtatctatgcgtttctgtacgacgacacagcccatgtaaagcgcctgcaaatgatgaaggata

SEQ ID NO: 435703 - DNA, 75 bp, synthetic construct
  source 1..75: mol_type = other DNA
gaaacacccaccctgctggtggtgcacaatattagcctgccgccaggcgagtttggcggtccgtggatcgacgca

SEQ ID NO: 435704 - DNA, 75 bp, synthetic construct
  source 1..75: mol_type = other DNA
gatgtgctgctgtgctgctttggttcatcggtgccgaatcatgccgctatttactgtggtgacggcgagctgctg

SEQ ID NO: 435705 - DNA, 75 bp, synthetic construct
  source 1..75: mol_type = other DNA
agatgagtcagatgagtcgtatgagtcagatggcgacttcatttactcctactcgcccggcaccaccgccaccga

SEQ ID NO: 435706 - DNA, 75 bp, synthetic construct
  source 1..75: mol_type = other DNA
gggcctggtggactaccgccccttgcacaggcactaaaagatcatttagctgcctatgagcaatcgaagaaaggg

SEQ ID NO: 435707 - DNA, 75 bp, synthetic construct
  source 1..75: mol_type = other DNA
ttcgttgatatcactgttaaatctttcgacggtgatggtatctatgcgtttctgtacgacgacacagcccatgta

SEQ ID NO: 435708 - DNA, 75 bp, synthetic construct
  source 1..75: mol_type = other DNA
cggaaccgctcaaataactgttacgggcaggtgtcgcggcgtgaccaggaaagtgcgctggcgtgctggagtatc

SEQ ID NO: 435709 - DNA, 75 bp, synthetic construct
  source 1..75: mol_type = other DNA
caacgcaaaacggcgtgcaggttgatgacgatggcaaagtttacgccacctacagcaacggcgagcgcatgttgc

SEQ ID NO: 435710 - DNA, 75 bp, synthetic construct
  source 1..75: mol_type = other DNA
aacgccgccgacggctacgcctctgccactcagaacggtgtgcaggttgatgacgatggcaaagtttacgctacc

SEQ ID NO: 435711 - DNA, 75 bp, synthetic construct
  source 1..75: mol_type = other DNA
catcaaagtgccactgactgaaccacagaaagcgggtattgcgtcattctgcccgtataacattggccccggtaa

SEQ ID NO: 435712 - DNA, 75 bp, synthetic construct
  source 1..75: mol_type = other DNA
acaataatatatataaagcagcaaaagatgtaaccacttccctatcaaaagtattaaagaatatcaataaggatt

SEQ ID NO: 435713 - DNA, 75 bp, synthetic construct
  source 1..75: mol_type = other DNA
gattaaggacggtgggcgtgattgccgcactcgttcaaataactgctacggacaggttattcgtcgtgaccagga

SEQ ID NO: 435714 - DNA, 75 bp, synthetic construct
  source 1..75: mol_type = other DNA
gaaaccgacaaaaacggttatatcgtcaacgcctcaggcgcttatttgcagggctacccggtcgatgacacgggc

SEQ ID NO: 435715 - DNA, 75 bp, synthetic construct
  source 1..75: mol_type = other DNA
ttatcagatttgtcgataaaaatgctcagggaggtattatcctcccatgagtatgattatgtgttcccgccagtg

SEQ ID NO: 435716 - DNA, 75 bp, synthetic construct
  source 1..75: mol_type = other DNA
gtgcctgcgaagcgattcgctggtggattaaggacggtggcagagactgccgtatccgttcaaataattgctacg

SEQ ID NO: 435717 - DNA, 75 bp, synthetic construct
  source 1..75: mol_type = other DNA
atgagttatgaaattgccgcaacggggctgaatgccgttaacgaacagctcgacgggatcagtaacaacatcgcc

SEQ ID NO: 435718 - DNA, 75 bp, synthetic construct
  source 1..75: mol_type = other DNA
gtcagcgtggcgggtacggcgcagagcatttcgcgcggcggttcgctggtctccaccggcaacgcgctggatctg

SEQ ID NO: 435719 - DNA, 75 bp, synthetic construct
  source 1..75: mol_type = other DNA
atatccagatcaaaaccggcaatatcccggcgcaggccagcagcagcctgacctttaccgccaacttcgatgcca

SEQ ID NO: 435720 - DNA, 75 bp, synthetic construct
  source 1..75: mol_type = other DNA
tgtcggctgccgttctggcgctgattgccgctggtgcgtctgcgcctgacattctcgaccagtttctggatgaaa

SEQ ID NO: 435721 - DNA, 75 bp, synthetic construct
  source 1..75: mol_type = other DNA
gattcgctggtggattaaggacggtggcagagactgccgtattcgctcaaataactgttatggtcaggtatcccg

SEQ ID NO: 435722 - DNA, 75 bp, synthetic construct
  source 1..75: mol_type = other DNA
aaacccgcgcggaaatattacatggcatctccgcagaggaactggaacaactgattacgctcatcgcaaaacttg

SEQ ID NO: 435723 - DNA, 75 bp, synthetic construct
  source 1..75: mol_type = other DNA
ttaaaatctgcgcgggcggtatggcgggaacaacagtagcggcattgggctttgccccgaagcaagcactggctc

SEQ ID NO: 435724 - DNA, 75 bp, synthetic construct
  source 1..75: mol_type = other DNA
taccggatagagagttatcgtttctggaagaaagaacaggctggcgccgcggtgggtgacatgctggcgttcggt

SEQ ID NO: 435725 - DNA, 75 bp, synthetic construct
  source 1..75: mol_type = other DNA
cgctggcggtaagcaatggaaagggctgatgactcgccgtgagattgagcgtgaagtctgtttgtgggggcaaca

SEQ ID NO: 435726 - DNA, 75 bp, synthetic construct
  source 1..75: mol_type = other DNA
tacctgattgaaagccatcatttctggaggatggagacagctctccccgcgctggtcgatatgggtgctttcggt

SEQ ID NO: 435727 - DNA, 75 bp, synthetic construct
  source 1..75: mol_type = other DNA
tgggtgctggtaatttcagaacatcgacgcttcttcgcaaaataaaccagggcgatatcaaaggcgcatgtgatc

SEQ ID NO: 435728 - DNA, 75 bp, synthetic construct
  source 1..75: mol_type = other DNA
ttgctgctgctattggtggtggggcaattgctatagcatctgtgttaatcactggcccaagtggtgacgatggtc

SEQ ID NO: 435729 - DNA, 75 bp, synthetic construct
  source 1..75: mol_type = other DNA
tgccgctggtgcgtctgcgcctgacattctcgaccagtttctggatgaaaaggaaggcaatcacaccacggcata

SEQ ID NO: 435730 - DNA, 75 bp, synthetic construct
  source 1..75: mol_type = other DNA
tacgtcaacagcgaaaaccgtctgcgctacccggaatatcgtgcgccaggttctgacaaatggcagcgcattagc

SEQ ID NO: 435731 - DNA, 75 bp, synthetic construct
  source 1..75: mol_type = other DNA
tcaaataattgttacggtcaggttattcgtcgtgaccaggagagtgcattaacctgctgggggatagaacagtga

SEQ ID NO: 435732 - DNA, 75 bp, synthetic construct
  source 1..75: mol_type = other DNA
atgaatttgtgtatgcgagttacgaaagtgtgggacttccaaatttttcttttaatgttcattttcttaagttga

SEQ ID NO: 435733 - DNA, 75 bp, synthetic construct
  source 1..75: mol_type = other DNA
gtgtttcccgtcgacgttttataagcggcttaatgcaggcgatcgcaggggagcgtgtgaggcgattcgctggtg

SEQ ID NO: 435734 - DNA, 75 bp, synthetic construct
  source 1..75: mol_type = other DNA
gcgtagctggcgaccaaatcctggggttcacccggaacgtggccaaactggccagcgccttggaactgaacccgg

SEQ ID NO: 435735 - DNA, 75 bp, synthetic construct
  source 1..75: mol_type = other DNA
aagtactaccagagaaaaaggaaagtatcgtgatctatggatggagtatgggggaaaatgacagccatatactcg

SEQ ID NO: 435736 - DNA, 75 bp, synthetic construct
  source 1..75: mol_type = other DNA
gccctcggtcacgatgaagctgtcaaagcatacgaacaaaatatttcagcactggctattgccgcacagtttatt

SEQ ID NO: 435737 - DNA, 75 bp, synthetic construct
  source 1..75: mol_type = other DNA
gattaaggacggtggcagagactgccgtattcgctcaaataactgttacggtcaggtattccgtcgtgaccagga

SEQ ID NO: 435738 - DNA, 75 bp, synthetic construct
  source 1..75: mol_type = other DNA
ggattgtctgccaggataagcccgcacggcgttatatctttccagtatcgctaccgattcaacggcaagccgcga

SEQ ID NO: 435739 - DNA, 75 bp, synthetic construct
  source 1..75: mol_type = other DNA
tccgcaaggttgccaacttcgaaacccctgacggcctggttaagatgggccaggctatccaggatatgtcaacca

SEQ ID NO: 435740 - DNA, 75 bp, synthetic construct
  source 1..75: mol_type = other DNA
caggttaacgccattgagcgtgataaagcgctggcgtgggtggagaaaaacatcagagtgccgctgaccgaaccc

SEQ ID NO: 435741 - DNA, 75 bp, synthetic construct
  source 1..75: mol_type = other DNA
attacgaagccttgagttttcccgactgaacttttccggtctgcctgccattcaactgcgtaatctggctcgtta

SEQ ID NO: 435742 - DNA, 75 bp, synthetic construct
  source 1..75: mol_type = other DNA
caaagtgcctctgacagagcctcagaaggtgggtatcgcatccttctgcccgtataacatcggccccggtaaatg

SEQ ID NO: 435743 - DNA, 75 bp, synthetic construct
  source 1..75: mol_type = other DNA
gagcggccaggtacgcgtccattatcggcaccactatatccgtttagccaaatttttccggagttagatgattgg

SEQ ID NO: 435744 - DNA, 75 bp, synthetic construct
  source 1..75: mol_type = other DNA
atctgccgcggtgccatcctggtggatggtaaacctgtcgtcccgggcatgaagttgtcgaaggagaaatgcgac

SEQ ID NO: 435745 - DNA, 75 bp, synthetic construct
  source 1..75: mol_type = other DNA
gcggtccactacggctatgacgataaaggccgcctgacgggcgaacggcagacggtggagaaccaggagacgggg

SEQ ID NO: 435746 - DNA, 75 bp, synthetic construct
  source 1..75: mol_type = other DNA
atgaacaccaaaatcagatacggcctgtcggctgccgttctggcgctgattgccgctggtgcgcctgcgcctgac

SEQ ID NO: 435747 - DNA, 75 bp, synthetic construct
  source 1..75: mol_type = other DNA
aggacaaacctttcagcgcttggcgttgcgcctcacgtcgctgaaaaggttttggggcataagctggcggggatg

SEQ ID NO: 435748 - DNA, 75 bp, synthetic construct
  source 1..75: mol_type = other DNA
agaacggcgtactgatctctaacggtcagggtaaagcggtcgcgttcgcgctgttcggtttgcaggatcgcggta

SEQ ID NO: 435749 - DNA, 75 bp, synthetic construct
  source 1..75: mol_type = other DNA
ccccgctgtatcaggcgattgttgaccacgttcctgcgccggacgttgaccttgacggtccgttccagatgcaga

SEQ ID NO: 435750 - DNA, 75 bp, synthetic construct
  source 1..75: mol_type = other DNA
attcgctcaaataactgttacggtcaggtatcccggcgagaccaggagagtgcgctggcgtgctggggaattgac

SEQ ID NO: 435751 - DNA, 75 bp, synthetic construct
  source 1..75: mol_type = other DNA
atgaacgcaaaaatcaaacacggcctgtcggctgccgttctggcactgattgccgctggtgcgtctgcgcctgaa

SEQ ID NO: 435752 - DNA, 75 bp, synthetic construct
  source 1..75: mol_type = other DNA
caatagcaaacaagccatatgacggcccgaacgagatagcagatcgcgatggcttgtctgccaggataagcccga

SEQ ID NO: 435753 - DNA, 75 bp, synthetic construct
  source 1..75: mol_type = other DNA
aggcgctggcatgggtggagcgcaatattaaagtaccactgactgaaccacagaaagcgggtatcgcgtcatttt

SEQ ID NO: 435754 - DNA, 75 bp, synthetic construct
  source 1..75: mol_type = other DNA
acatccacggcaagccatatgacggcccggaagaagtcccggacgcgggcggattgtctgccaggataagcccgc

SEQ ID NO: 435755 - DNA, 75 bp, synthetic construct
  source 1..75: mol_type = other DNA
cggctgaatgctggtgatcgtaagggcgcatgcgaggcgattcgctggtggataaaagatggtgggcgcgattgc

SEQ ID NO: 435756 - DNA, 75 bp, synthetic construct
  source 1..75: mol_type = other DNA
tctatccgtattcgtaaacgtcacctgacggaaaacgatcgtcgtcgcgccaaccgcgcaccgaaagacgattaa

SEQ ID NO: 435757 - DNA, 75 bp, synthetic construct
  source 1..75: mol_type = other DNA
acccgcaacgcgaaagtcggtaaagtgctgggccacctcggtctggaacgtatcgaaaccgatctggcggaagct

SEQ ID NO: 435758 - DNA, 75 bp, synthetic construct
  source 1..75: mol_type = other DNA
cgtccgggtgaagtgggtcagcgtcagaacggcgtattgatctctaacggtcagggtaaagcggtggcgttcgcg

SEQ ID NO: 435759 - DNA, 75 bp, synthetic construct
  source 1..75: mol_type = other DNA
cggtgactacttcctcgtttatccgattaaagttaaccagcatcgtcgcgtgattgaatccctgattcattcagg

SEQ ID NO: 435760 - DNA, 75 bp, synthetic construct
  source 1..75: mol_type = other DNA
tggcacatgctggcatgacccgtagcgtcatcgtctgcaatggttataaagaccgcgaatatatccgcctggcat

SEQ ID NO: 435761 - DNA, 75 bp, synthetic construct
  source 1..75: mol_type = other DNA
atcgaccagttgttcccggttctgccgctggaagggctggatcaagtgccggaacgtcgcgctgtgctgctggat

SEQ ID NO: 435762 - DNA, 75 bp, synthetic construct
  source 1..75: mol_type = other DNA
agcgtctgcctgcactgttctgcttcccgcagatcttgcaacaccgcttgcgttctattaacgctgcgttcaaac

SEQ ID NO: 435763 - DNA, 75 bp, synthetic construct
  source 1..75: mol_type = other DNA
atatcaggagatcctcggcaatatgcacaacctgttcggtgataccgaagcggttgacgtgttcgtgttccctga

SEQ ID NO: 435764 - DNA, 75 bp, synthetic construct
  source 1..75: mol_type = other DNA
tggctcatgcaggcatgacccgtagcgttatcgtctgtaacggttataaagaccgcgaatatatccgcctggcgc

SEQ ID NO: 435765 - DNA, 75 bp, synthetic construct
  source 1..75: mol_type = other DNA
ggcgatcgcaggggagcgtgtgaagcgattcgctggtggattaaggacggtggcagagactgccgtatccgctca

SEQ ID NO: 435766 - DNA, 75 bp, synthetic construct
  source 1..75: mol_type = other DNA
aagaaggtaaccacaccacggcataccgtgatggtgcgggtatctggaccatctgccgcggtgccatcctggtgg

SEQ ID NO: 435767 - DNA, 75 bp, synthetic construct
  source 1..75: mol_type = other DNA
atggaaaaaccgtttttcccaatatgaaactgtcgaaggaaaaatgcgaccaggtcaacgccattgagcgtgata

SEQ ID NO: 435768 - DNA, 75 bp, synthetic construct
  source 1..75: mol_type = other DNA
acataatgcccggtaaaacgtataccgaagcagaatgcaaagcactcctgaataaagaccttgccacggtcgcca

SEQ ID NO: 435769 - DNA, 75 bp, synthetic construct
  source 1..75: mol_type = other DNA
tgggcgaagaagcgaagcgtgaaggtcgcgtaaccgctcatgactatgtggcttcgcgtccggtatttaccgaag

SEQ ID NO: 435770 - DNA, 75 bp, synthetic construct
  source 1..75: mol_type = other DNA
atctgttgtggtgccacaatggtggatggtaagcccgtcataccgggaatgaagctgtcgaaggaaaaatgcgac

SEQ ID NO: 435771 - DNA, 75 bp, synthetic construct
  source 1..75: mol_type = other DNA
tcgaaagccgagttgatggcggttctggcgcatgcaggaatgactcgcagcgtcatcgtctgtaacggttataaa

SEQ ID NO: 435772 - DNA, 75 bp, synthetic construct
  source 1..75: mol_type = other DNA
ttaaaggcgattatttgccggatgtggtggacgccaccgcaggattagggcgcgatgcctttgtgctggcttcgg

SEQ ID NO: 435773 - DNA, 75 bp, synthetic construct
  source 1..75: mol_type = other DNA
ctggcgaatgtcgccacaccgaacgcggttgttaccaaagggcatcgctttgatatttatgcgggtacgccggtg

SEQ ID NO: 435774 - DNA, 75 bp, synthetic construct
  source 1..75: mol_type = other DNA
cgcgatgcctttgtgctggcttcagtcggctgccgcgtgcggatgctggagcgtaatccagtcgttgccgcattg

SEQ ID NO: 435775 - DNA, 75 bp, synthetic construct
  source 1..75: mol_type = other DNA
agtttgtcttgacccaatgttcccgcataagcagaaaagcgcgctggtgaaaaaagagatgcgcgtgtttcagtc

SEQ ID NO: 435776 - DNA, 75 bp, synthetic construct
  source 1..75: mol_type = other DNA
ttgttggcggggcgatggcgcaccgtcgcaaattcggcggcggacgtggggaggcagtggcgaaagcggtgggta

SEQ ID NO: 435777 - DNA, 75 bp, synthetic construct
  source 1..75: mol_type = other DNA
ctggcgaatgtcgccacgccaaacgcggtagtcactaaagggcatcgctttgatatctacgccggaacgccgtca

SEQ ID NO: 435778 - DNA, 75 bp, synthetic construct
  source 1..75: mol_type = other DNA
gagcgtgtgaggcgattcgctggtggattaaggacggtggcagagactgccgtatccgctcaaataactgttatg

SEQ ID NO: 435779 - DNA, 75 bp, synthetic construct
  source 1..75: mol_type = other DNA
atgcctccatcattacgaaaagcagttgctgctgctattggtggcggagcaattgctatagcatcagtgttaatc

SEQ ID NO: 435780 - DNA, 75 bp, synthetic construct
  source 1..75: mol_type = other DNA
gcaagaacgcgcgtgggctgagcagctttatctgagcatgtgtcatgaagtgcaaaagcagctggatccgcaaaa

SEQ ID NO: 435781 - DNA, 75 bp, synthetic construct
  source 1..75: mol_type = other DNA
ctggcgaatgtcgccacgccaaacgcggtagtcactaaagggcataggtttgatatttatgccggaacgccgtca

SEQ ID NO: 435782 - DNA, 75 bp, synthetic construct
  source 1..75: mol_type = other DNA
gaagctgtcgaaggggaaatgcgaccgggttaacgccattgagcgtgataaggcgctggcatgggtggagaaaaa

SEQ ID NO: 435783 - DNA, 75 bp, synthetic construct
  source 1..75: mol_type = other DNA
gcgatgagctcattgaagcgctacaagaacggctcacgcaaaccactgaaacagaacacttatttaccattcgct

SEQ ID NO: 435784 - DNA, 75 bp, synthetic construct
  source 1..75: mol_type = other DNA
cgcctgacaaaagggcagaagaatggctgttatgggcaggtcgagcggcgcgatcaggaaagcgcactggcgtgc

SEQ ID NO: 435785 - DNA, 75 bp, synthetic construct
  source 1..75: mol_type = other DNA
tgccgtggagccacccgggtggatggtaagcctgtgattcctggcatgaagctgtcgaaggggaaatgcgaccgg

SEQ ID NO: 435786 - DNA, 75 bp, synthetic construct
  source 1..75: mol_type = other DNA
cgcgcggcgctctttactcgttcgtttacaacgtgggcgctggcaatttcagaacatcgacgcttcttcgcaaaa

SEQ ID NO: 435787 - DNA, 75 bp, synthetic construct
  source 1..75: mol_type = other DNA
gtgtttcccgtcgacgttttataagcggcttaatgccggtgatcgtaaaggtgcctgtgagtcgattcgctggtg

SEQ ID NO: 435788 - DNA, 75 bp, synthetic construct
  source 1..75: mol_type = other DNA
gacaaattaacccgtacataaaagttgatataacggggctacagcgcagacgctcactatcaacaagaatgaggt

SEQ ID NO: 435789 - DNA, 75 bp, synthetic construct
  source 1..75: mol_type = other DNA
agaccttgccacggtcgccagacaaattaacccgtacatcaaagtcgatataccggaaacaacgcgcggcgctct

SEQ ID NO: 435790 - DNA, 75 bp, synthetic construct
  source 1..75: mol_type = other DNA
caaagtgccactgactgaaccccagaaagcgggtattgcgtcattctgcccgtataacattggccccggtaagtg

SEQ ID NO: 435791 - DNA, 75 bp, synthetic construct
  source 1..75: mol_type = other DNA
tgccgcaggtgcgcctgcgcctgaaatcctcgaccagtttctggatgaaaaggaaggcaaccacaccacggcata

SEQ ID NO: 435792 - DNA, 75 bp, synthetic construct
  source 1..75: mol_type = other DNA
agcgcgctggcgtgctggggtatcgacagataagcagaatattttgctgaaaaataaggcatggccacgcgggcg

SEQ ID NO: 435793 - DNA, 75 bp, synthetic construct
  source 1..75: mol_type = other DNA
gaggcgattcgctggtggattaaggacggtggcagagactgccgtattcgctcaaataactgttacggtcaggta

SEQ ID NO: 435794 - DNA, 75 bp, synthetic construct
  source 1..75: mol_type = other DNA
agctacggcgctggacatacgctggcggtaatcaatggaaagggctgatgactcgccgtgagattgagcgtgaag

SEQ ID NO: 435795 - DNA, 75 bp, synthetic construct
  source 1..75: mol_type = other DNA
ggtaagtgtttcagctcaacgttttaccggaaactgaacgccggagaccgtaaaggcgcatgtgctgaaattcgt

SEQ ID NO: 435796 - DNA, 75 bp, synthetic construct
  source 1..75: mol_type = other DNA
tgccgtggtgccacgatggttgatggtaagcctgtagtgaagggtatgaagctgacgcaggcaaaatgtgaccag

SEQ ID NO: 435797 - DNA, 75 bp, synthetic construct
  source 1..75: mol_type = other DNA
gtccctataacattggccccggtaagtgtttcccgtcgacgttttataagcggctgaatgctggtgaccgcaggg

SEQ ID NO: 435798 - DNA, 75 bp, synthetic construct
  source 1..75: mol_type = other DNA
atctgccgcggtgcaacgatggtggacgctaagccagtcgtaccaggaatgaaactgtcgaaggaaaaatgcgaa

SEQ ID NO: 435799 - DNA, 75 bp, synthetic construct
  source 1..75: mol_type = other DNA
tggaaggtgtcagctacataccatacaaagatatcgttggtgtatggactgtatgtcacgggcatacaggaaaag

SEQ ID NO: 435800 - DNA, 75 bp, synthetic construct
  source 1..75: mol_type = other DNA
cggcgctggacatacgctggcggtaagcaatggaaagggctgatgactcgccgcgagattgagcgtgaagtctgt

SEQ ID NO: 435801 - DNA, 75 bp, synthetic construct
  source 1..75: mol_type = other DNA
aggcgctggcatgggtggagcgcaacattaaagtgccactgaccgaaccacagaaagcgggtatagcgtcatttt

SEQ ID NO: 435802 - DNA, 75 bp, synthetic construct
  source 1..75: mol_type = other DNA
aatgctggcgaccgtaaaggcgcatgtgaagctattcgctggtggattaaagatggtggccgcgactgtcgtctg

SEQ ID NO: 435803 - DNA, 75 bp, synthetic construct
  source 1..75: mol_type = other DNA
cctgcgaagcgattcgctggtggattaaggacggtggcagagactgccgtatccgttcaaataattgctacggtc

SEQ ID NO: 435804 - DNA, 75 bp, synthetic construct
  source 1..75: mol_type = other DNA
tcgaaaaggtgcctgcgaagcgattcgctggtggattaaggacggtggcagggactgccgtattcgctcaaataa

SEQ ID NO: 435805 - DNA, 75 bp, synthetic construct
  source 1..75: mol_type = other DNA
gcgattcgctggtggattaaggacggtggtagagactgccgtatccgttcaaataattgctacggtcaggtctca

SEQ ID NO: 435806 - DNA, 75 bp, synthetic construct
  source 1..75: mol_type = other DNA
ggtggcagagactgccgtattcgttcaaacaactgttacggtcaggtatcccgtcgtgaccaggagagcgcgctg

SEQ ID NO: 435807 - DNA, 75 bp, synthetic construct
  source 1..75: mol_type = other DNA
cgatataccggaaacaatgcgcggcgctctttactcattcgtttacaacgtgggtgctggcaatttcagaacatc

SEQ ID NO: 435808 - DNA, 75 bp, synthetic construct
  source 1..75: mol_type = other DNA
gtccgtacaacattggtcccggtaagtgtttcccgtcgacgttttacagacgaattaatgcaggtgatcgaaaag

SEQ ID NO: 435809 - DNA, 75 bp, synthetic construct
  source 1..75: mol_type = other DNA
gtatccgctcaaataattgctacggtcaggtatcccggcgagaccaggaaagtgcactggcgtgctggggaattg

SEQ ID NO: 435810 - DNA, 75 bp, synthetic construct
  source 1..75: mol_type = other DNA
gggcgctgtcgttacaggtgccgggctttcgccgtcagatgaacgaaggctggtaccagatacgtattgccggtt

SEQ ID NO: 435811 - DNA, 75 bp, synthetic construct
  source 1..75: mol_type = other DNA
ttccgcggtcagatgaacgaaggctggtatcagatacgtattgccggtgaggataccgcgccggaggcggtgtat

SEQ ID NO: 435812 - DNA, 75 bp, synthetic construct
  source 1..75: mol_type = other DNA
agggaacggtcatccacattgtgccgcgactggccggggccggaaaggggggactgcagattgtgctgggggctg

SEQ ID NO: 435813 - DNA, 75 bp, synthetic construct
  source 1..75: mol_type = other DNA
ctgctgtgctgctttggcgcatcggtacccaaccatgctgccatttactgcggcaacggtgaactgcttcaccat

SEQ ID NO: 435814 - DNA, 75 bp, synthetic construct
  source 1..75: mol_type = other DNA
cacagagtttttaccgggtctcaccgcatgaggcacaggcaggcgacgtgctgctgtgttgttttggctcgcctg

SEQ ID NO: 435815 - DNA, 75 bp, synthetic construct
  source 1..75: mol_type = other DNA
gtgtcgcactgacagaggcgcagcctggcgacgtgctgctgtgctgctttggttcatcggtgccgaatcatgccg

SEQ ID NO: 435816 - DNA, 75 bp, synthetic construct
  source 1..75: mol_type = other DNA
tggtgctgtcatcggtaatcttggggtggctatgatggtggggggtatcacgcagatgctcacccccagggcgaa

SEQ ID NO: 435817 - DNA, 75 bp, synthetic construct
  source 1..75: mol_type = other DNA
gggttcagccctggcagccggtggtttttctgccaccacgatgctgttttctctgggggccagcatgattctggg

SEQ ID NO: 435818 - DNA, 75 bp, synthetic construct
  source 1..75: mol_type = other DNA
ttctgggcggtgtggcccagatgctggccccgaaggcaaaaacaccggattaccgcgcaacggataacggcagac

SEQ ID NO: 435819 - DNA, 75 bp, synthetic construct
  source 1..75: mol_type = other DNA
agggaacggtcatccacattgtgccgcgactggccggtgccggaaaggggggactgcagattgtgctgggggcgg

SEQ ID NO: 435820 - DNA, 75 bp, synthetic construct
  source 1..75: mol_type = other DNA
tggttcacgacggatatcccaggatatcagcacccgtgatgagggcggagacgggaaagtggtggttatcgggcg

SEQ ID NO: 435821 - DNA, 75 bp, synthetic construct
  source 1..75: mol_type = other DNA
atggcaacgacgaacgcattctgtctggcgtcaccgccactggcacgtatctgccttcacggggatttacaacga

SEQ ID NO: 435822 - DNA, 75 bp, synthetic construct
  source 1..75: mol_type = other DNA
gccaacgccgcgctcgacagccacaacgaatatcaacaaaccggaacgctcaggatgatgggctgcccggaactg

SEQ ID NO: 435823 - DNA, 75 bp, synthetic construct
  source 1..75: mol_type = other DNA
ccccaccattgcggtacccgtggtgttattagggacgtttgccatcctcgccgcttttggttactccatcaacac

SEQ ID NO: 435824 - DNA, 75 bp, synthetic construct
  source 1..75: mol_type = other DNA
tctgcaggttttgatatggagttgcaggaccacgctggagcaggtcacgatgcgctgatggcagcacgtaaccag

SEQ ID NO: 435825 - DNA, 75 bp, synthetic construct
  source 1..75: mol_type = other DNA
gaaaaactgtcagcgcagacacactgaaggtcaacagccgcgccggtgacccggaaagcgcccggataaaagcgg

SEQ ID NO: 435826 - DNA, 75 bp, synthetic construct
  source 1..75: mol_type = other DNA
tggcggccattgccggacgtattgccaaaaaacatcagctgacgctgtcggggacaatcgaaaacatcagaattg

SEQ ID NO: 435827 - DNA, 75 bp, synthetic construct
  source 1..75: mol_type = other DNA
ccgattttggtgtgctttccggtcagtggctgattgataaatctactcacagttttgtgcgcagtggctatacca

SEQ ID NO: 435828 - DNA, 75 bp, synthetic construct
  source 1..75: mol_type = other DNA
ggctgcagccatcgtgggctctttcttcaccgccggtgcaacgatggcgttgtggggcgcagccctgagtgccgg

SEQ ID NO: 435829 - DNA, 75 bp, synthetic construct
  source 1..75: mol_type = other DNA
tggtaccagatacgtattgccggtgaggataccgcgccggaggcggtgtatgcccgtcttcatgaaccgctgagc

SEQ ID NO: 435830 - DNA, 75 bp, synthetic construct
  source 1..75: mol_type = other DNA
ggttcagccctggcagccggtggtttttctgccaccacgatgctgttttcactgggggccagcatgattctgggt

SEQ ID NO: 435831 - DNA, 75 bp, synthetic construct
  source 1..75: mol_type = other DNA
gaccgagatatgatcctagcttaaccccagaacagcgaagctcgattgataacggtatatggatgtgtcgttcac

SEQ ID NO: 435832 - DNA, 75 bp, synthetic construct
  source 1..75: mol_type = other DNA
gtgccgcgactggccggagccggaaagggcggactgcagattgtgctgggggcagcagccatcgttggctctttc

SEQ ID NO: 435833 - DNA, 75 bp, synthetic construct
  source 1..75: mol_type = other DNA
ctgttttcacttggagccagcatgattctgggcggtgtggcccagatgctggccccgaaggcaaaaacaccggat

SEQ ID NO: 435834 - DNA, 75 bp, synthetic construct
  source 1..75: mol_type = other DNA
agaacgccggagggggagcggtatctgccgtgtgtgaatatctctgcagagccggaggcgtattttcgtattgca

SEQ ID NO: 435835 - DNA, 75 bp, synthetic construct
  source 1..75: mol_type = other DNA
cgcgactggccggtgccggaaagggtggactgcagattgtgctgggggcggcagccatcgtgggctctttcttca

SEQ ID NO: 435836 - DNA, 75 bp, synthetic construct
  source 1..75: mol_type = other DNA
ctgtatggcgaaatgcgcgtggggtcgcgggtggtatctcaggagatcagcacggcagatgaaggtgatggtggt

SEQ ID NO: 435837 - DNA, 75 bp, synthetic construct
  source 1..75: mol_type = other DNA
accacgatgctgttttcactgggggccagcatgattctgggtggtgtggcccagatgctggccccgaaggcaaaa

SEQ ID NO: 435838 - DNA, 75 bp, synthetic construct
  source 1..75: mol_type = other DNA
cagccatcgtgggctctttcttcaccgccggcgcaacgatggcgttgtggggcgcagccctgagtgccggagggc

SEQ ID NO: 435839 - DNA, 75 bp, synthetic construct
  source 1..75: mol_type = other DNA
tgcggagtcgtgcggcttcgtggtgagaacgcaggagggggagcggtatatcccttgtgtgaatatctctgcaga

SEQ ID NO: 435840 - DNA, 75 bp, synthetic construct
  source 1..75: mol_type = other DNA
ccatattgtgccgcgactggccggagccggaaagggcggactgcagattgtgctgggggcagcagccatcgtggg

SEQ ID NO: 435841 - DNA, 75 bp, synthetic construct
  source 1..75: mol_type = other DNA
tgccttacggggaaatgctggttggctcccgccgtatatcccaggacatcagtacccgtgatgaaggcggtgacg

SEQ ID NO: 435842 - DNA, 75 bp, synthetic construct
  source 1..75: mol_type = other DNA
ccgatgccggtgccttacggtgaaatgctggttggttcacgacggatatcccaggacatcagcacccgtgatgag

SEQ ID NO: 435843 - DNA, 75 bp, synthetic construct
  source 1..75: mol_type = other DNA
acagttctttcggtgattgcggttccggcgatcgcctgtcttggcggttattccgtgtggctggccgttaacggc

SEQ ID NO: 435844 - DNA, 75 bp, synthetic construct
  source 1..75: mol_type = other DNA
ctgctgtgctgctttgcctcatcggtaccgaaccatgcggcgatttactgcggtaacggtgagctgctgcaccat

SEQ ID NO: 435845 - DNA, 75 bp, synthetic construct
  source 1..75: mol_type = other DNA
cgacgggtttttaccgtgtcgcactgacagaggcacagcagggcgatattctgctgtgctgctttgcctcatcgg

SEQ ID NO: 435846 - DNA, 75 bp, synthetic construct
  source 1..75: mol_type = other DNA
ccggaagactggctgcgggcagagatgcagggggagattgtggcgctggttcacagtcatcccggtggtctgccc

SEQ ID NO: 435847 - DNA, 75 bp, synthetic construct
  source 1..75: mol_type = other DNA
tatcctgctgtgctgctttggcgcatcggtggccaatcatgccgccatatactgcggcaacggtgagctgcttca

SEQ ID NO: 435848 - DNA, 75 bp, synthetic construct
  source 1..75: mol_type = other DNA
ccacagtcatcccggtggtctgccctggctgagcgaggccgaccggcggctgcagataaaaagtgcactgttctg

SEQ ID NO: 435849 - DNA, 75 bp, synthetic construct
  source 1..75: mol_type = other DNA
gccggaggcgtattttcgtatcgctccggaagactggctgcgggcagagatgcagggggagattgtggcactggt

SEQ ID NO: 435850 - DNA, 75 bp, synthetic construct
  source 1..75: mol_type = other DNA
gccggaggtgtattttcgtatcgccccggaagactggctgcgggcagagatgcagggggagattgtggcactggt

SEQ ID NO: 435851 - DNA, 75 bp, synthetic construct
  source 1..75: mol_type = other DNA
gcggctgcagataaaaagcgcactgccctggtggctggtctgccggggtgacattcacaaattccgctgtgtgcc

SEQ ID NO: 435852 - DNA, 75 bp, synthetic construct
  source 1..75: mol_type = other DNA
gccggaggggtattttcgtatcgccccggaagactggctgcgggcagagatgcagggggagattgtggctctggt

SEQ ID NO: 435853 - DNA, 75 bp, synthetic construct
  source 1..75: mol_type = other DNA
gccggaggcgtattttcgtatcgcgccggaagactggctgcgggcagagatgcagggggagattgtggctctggt

SEQ ID NO: 435854 - DNA, 75 bp, synthetic construct
  source 1..75: mol_type = other DNA
caaaaatggccggaagagaacggtgccaatttcgcaggcggtttgtgaggcgatcagaaccagagaaacagggag

SEQ ID NO: 435855 - DNA, 75 bp, synthetic construct
  source 1..75: mol_type = other DNA
aggggcgcgctggagtgaagcttgtaagcttcgtggtgaacagatagttcataaccgtgtaacgtttcttgaaac

SEQ ID NO: 435856 - DNA, 75 bp, synthetic construct
  source 1..75: mol_type = other DNA
aggcgtaaggcggaagaagaccgaaaacaactgcgcaacataatcaatgagcttggcgctgatatgcaggctgtg

SEQ ID NO: 435857 - DNA, 75 bp, synthetic construct
  source 1..75: mol_type = other DNA
tcctcagagttttcgcgtacgagaacattacatatgctatatgaggtttcgttgcgaaaagggatttcaaatata

SEQ ID NO: 435858 - DNA, 75 bp, synthetic construct
  source 1..75: mol_type = other DNA
ccgcacacacatcctggcacgggaccgggaggccgtccgccgctggcgtgacgccaccggcgacacgtctgactg

SEQ ID NO: 435859 - DNA, 75 bp, synthetic construct
  source 1..75: mol_type = other DNA
aaaacgccagcaaaagaaatcgatctcgccagaaagcggttagcggaggtacttaatgaaactggtaagccataa

SEQ ID NO: 435860 - DNA, 75 bp, synthetic construct
  source 1..75: mol_type = other DNA
gaacggacgcaagggaaagcgcgtgcgtaaggtatttgacaaaaaatcggtagcggtggccactgaacgctacat

SEQ ID NO: 435861 - DNA, 75 bp, synthetic construct
  source 1..75: mol_type = other DNA
gttgcactggcggcgtttctcgccctgtggtggaacgcgccgcagggtgactgggtgtcaatctggcaggacagc

SEQ ID NO: 435862 - DNA, 75 bp, synthetic construct
  source 1..75: mol_type = other DNA
caaggctggcgcgacccggacgatcgtctgcatagccgcatttgcgacacggcgttaattgtgctggcgctgctg

SEQ ID NO: 435863 - DNA, 75 bp, synthetic construct
  source 1..75: mol_type = other DNA
atgtttaccgtaatttttcatgatgaagctgaaaaagaattcgttgctctgcctgttaccgttcgtgccaagatg

SEQ ID NO: 435864 - DNA, 75 bp, synthetic construct
  source 1..75: mol_type = other DNA
caaaaatggccggaagagaacagtgccaatttcgcaggcagtttgtgaggcgatcaaaaccagagaaacaggcgg

SEQ ID NO: 435865 - DNA, 75 bp, synthetic construct
  source 1..75: mol_type = other DNA
cattttgcaccggattacctgcaggatgcggtggcccttaatccgctgaaaggtggcgtgagtgtccacgcagtg

SEQ ID NO: 435866 - DNA, 75 bp, synthetic construct
  source 1..75: mol_type = other DNA
atgaaggcgtcgttactgaaaaaaatcaaacgttctgcctacgtttaccgcgtggactgcggcggctgcaacggc

SEQ ID NO: 435867 - DNA, 75 bp, synthetic construct
  source 1..75: mol_type = other DNA
ctgtgtaatgaatgccctacctgccatggccgcggaacggtgaaaaccgtggaaaccgtatgctatgaaatcatg

SEQ ID NO: 435868 - DNA, 75 bp, synthetic construct
  source 1..75: mol_type = other DNA
tgaactggtaaagcgtgagaatccgccagccgaaaccggagcatggaaagacgctgttgactgggtgctcaaaga

SEQ ID NO: 435869 - DNA, 75 bp, synthetic construct
  source 1..75: mol_type = other DNA
atgaacaggaaacagaagcaggaactgaaaggcttcttacgtaaagaaattgccaggctggaagatgtggaatct

SEQ ID NO: 435870 - DNA, 75 bp, synthetic construct
  source 1..75: mol_type = other DNA
agttaatggagtcattattagctgaaggcaaacggcgcaatatttttaagccagatatcgacccgttgcaggtga

SEQ ID NO: 435871 - DNA, 75 bp, synthetic construct
  source 1..75: mol_type = other DNA
gtgcatagtgaaaaccaaagtaaaggtgtgcattatgcaaaatcacagcgtctcttagaaattaatcatgcgcac

SEQ ID NO: 435872 - DNA, 75 bp, synthetic construct
  source 1..75: mol_type = other DNA
ttttacttgggattattacatcaataacccgtggtttttaaaaattgtccatagtgaaaaccaaagtaagggtgt

SEQ ID NO: 435873 - DNA, 75 bp, synthetic construct
  source 1..75: mol_type = other DNA
aaacaaaaagaaatggatccaaccagattcggattccatcattcacatgctgaatcattttcaagaatgcggaat

SEQ ID NO: 435874 - DNA, 75 bp, synthetic construct
  source 1..75: mol_type = other DNA
agagcatgcatggttaaaaataatttctggtgaaatatgcgttatggatgcagtaaataaaatttcaggcatcga

SEQ ID NO: 435875 - DNA, 75 bp, synthetic construct
  source 1..75: mol_type = other DNA
acagttagggcagggcgaagagcaggttgcacgctggctggaagcggaaaacgatccgcgtctgaacgagattgt

SEQ ID NO: 435876 - DNA, 75 bp, synthetic construct
  source 1..75: mol_type = other DNA
gatgcaacataccggatacatgcatatcaatctgcacgaattgtagcatcaacatcccgaataaacatcccggat

SEQ ID NO: 435877 - DNA, 75 bp, synthetic construct
  source 1..75: mol_type = other DNA
agaaaaaataacttttgacccattgaaatcaggttttcatccggttcaaatagatgcttttgctagattaagaag

SEQ ID NO: 435878 - DNA, 75 bp, synthetic construct
  source 1..75: mol_type = other DNA
agtgataataacgtgacgctggatggaaagttagactggccccctgaatcaccagacaaccaatatcacttattt

SEQ ID NO: 435879 - DNA, 75 bp, synthetic construct
  source 1..75: mol_type = other DNA
caatcacttggtctggagtggaccttttcgccctacggcctgcaaggcattttgctggcccatgtgttttttaat

SEQ ID NO: 435880 - DNA, 75 bp, synthetic construct
  source 1..75: mol_type = other DNA
cacgcgttccagggaccacttccaccaccttatcttcttcgtgggtatcaggatattttacctgatgcccctgaa

SEQ ID NO: 435881 - DNA, 75 bp, synthetic construct
  source 1..75: mol_type = other DNA
tgggcggtatggtcaaaaatccggagctgaccgccaagaaagaacaggagtccgagatgagcagcacgggggcaa

SEQ ID NO: 435882 - DNA, 75 bp, synthetic construct
  source 1..75: mol_type = other DNA
aagccacatcagcgttaaccggcgtcagcgatgtgctgacgccggtattcactctgtggtatctgcagaaaaaca

SEQ ID NO: 435883 - DNA, 75 bp, synthetic construct
  source 1..75: mol_type = other DNA
gttgagcaaagaccgggtgaaaaccagcgttaatggtttttcggcgctggggctggtggagatgacgcgtaaacg

SEQ ID NO: 435884 - DNA, 75 bp, synthetic construct
  source 1..75: mol_type = other DNA
aacaaaagcaattcacggtgcgcgacatctcggaactggtccgtcaggggcaagatctgatggtgcaggtggtga

SEQ ID NO: 435885 - DNA, 75 bp, synthetic construct
  source 1..75: mol_type = other DNA
tgttcgctgtgaagcgacaacttgaagagcttcgcacgaatcttttaagtggcggtatatggagcctcccgaatg

SEQ ID NO: 435886 - DNA, 75 bp, synthetic construct
  source 1..75: mol_type = other DNA
cgtccgttgtcgctatccggggcgtggccacgtcggtcaacaacgccctgcggacaaaatccagtcgtggtttcg

SEQ ID NO: 435887 - DNA, 75 bp, synthetic construct
  source 1..75: mol_type = other DNA
tgatgccgaagttaagtatcagaaaatgaagatagactggccccctgaatctccagacaaccagtatcacttaaa

SEQ ID NO: 435888 - DNA, 75 bp, synthetic construct
  source 1..75: mol_type = other DNA
ggatgcaaaggtggcgcatcagaagagtaaggataaggaactgatcacctataacgccgatggcagtagcagtac

SEQ ID NO: 435889 - DNA, 75 bp, synthetic construct
  source 1..75: mol_type = other DNA
cgcgtcagcgacccggacaccgcacggattaaagcagattcggcgctggccaggcataacgaataccagcagaac

SEQ ID NO: 435890 - DNA, 75 bp, synthetic construct
  source 1..75: mol_type = other DNA
cagcttttccctgcgtgacaccatcaaccgcgtctacaaatccgcgaaggtaaaacaccagaagagcagcgataa

SEQ ID NO: 435891 - DNA, 75 bp, synthetic construct
  source 1..75: mol_type = other DNA
ctgaagctggttggcagtattgagtccatcaaaattgaccgggtgacccagtatgctgaaacggacgtgggcttc

SEQ ID NO: 435892 - DNA, 75 bp, synthetic construct
  source 1..75: mol_type = other DNA
cggtattacctgaaatcaatcgtgaagcatggattaaactcggctacctttcacaggatttaaaccgcctgctga

SEQ ID NO: 435893 - DNA, 75 bp, synthetic construct
  source 1..75: mol_type = other DNA
gctggggatgtttgaggcgcaaagcaaactctggcggctggcttcgctggcgcaatcttccggtgcgccagtgag

SEQ ID NO: 435894 - DNA, 75 bp, synthetic construct
  source 1..75: mol_type = other DNA
tgaagggcgatctcgacacttataaatgggatggtctgcgcgatcatactgatatcgctatagatgatgatctct

SEQ ID NO: 435895 - DNA, 75 bp, synthetic construct
  source 1..75: mol_type = other DNA
acaactggaagagcttcgcacgaatcttttaagtgacagtatatggagcctcccgaatgaagggtatgcggaaga

SEQ ID NO: 435896 - DNA, 75 bp, synthetic construct
  source 1..75: mol_type = other DNA
ctggatggcaatctggcaggacagctacctgtggcatgtggtgcgcttttccttctggcaggcgtttctctcggc

SEQ ID NO: 435897 - DNA, 75 bp, synthetic construct
  source 1..75: mol_type = other DNA
ttaactgactggcattacaccgaagtgaccctttttcagaacttttgcgaattacgcgtaaccgtagctcatcag

SEQ ID NO: 435898 - DNA, 75 bp, synthetic construct
  source 1..75: mol_type = other DNA
cccacagccccgaaaaagagccagtcagttgcttaactgactggcattaccgcccttcggggcggtttttttaca

SEQ ID NO: 435899 - DNA, 75 bp, synthetic construct
  source 1..75: mol_type = other DNA
tttcgccgctgtttgatgcagaacgcttcggcattaaagtcgttccttcaccgcgtcatgcggatattttactgt

SEQ ID NO: 435900 - DNA, 75 bp, synthetic construct
  source 1..75: mol_type = other DNA
ttgctggcctggcgcgatcgtgatgaagtgaagcaaatccttgagggcgttgagtataaacgcagtaccgatcgt

SEQ ID NO: 435901 - DNA, 75 bp, synthetic construct
  source 1..75: mol_type = other DNA
gcaaggttatggtgaagataacgaagagcaggaagaaggactacgttgtatcgcggttccggtatttgaccgctt

SEQ ID NO: 435902 - DNA, 75 bp, synthetic construct
  source 1..75: mol_type = other DNA
ataataaagaatcacctgaaagcttgttaagaacacattgcatcagtgttaggttgaaccatgaagaactacaac

SEQ ID NO: 435903 - DNA, 75 bp, synthetic construct
  source 1..75: mol_type = other DNA
gcttttctcgataagattccagtagctgtgccgcctatcaacattgaagcctggaaatcccttagcgaaatttca

SEQ ID NO: 435904 - DNA, 75 bp, synthetic construct
  source 1..75: mol_type = other DNA
atacaaatgattttaaaccaatcaacaatcatatcccccctgctcaatcgttacgaatacactgtgtcagtgttc

SEQ ID NO: 435905 - DNA, 75 bp, synthetic construct
  source 1..75: mol_type = other DNA
cagcatgattctgggtggtgtggctcagatgctggccccgaaggctaaagtaccggagtacaaaagcacggataa

SEQ ID NO: 435906 - DNA, 75 bp, synthetic construct
  source 1..75: mol_type = other DNA
ccgccggcgcaacgatggcgttgtggggtgcagccctgagtgccggagggctgactgccaccacgatgctgttct

SEQ ID NO: 435907 - DNA, 75 bp, synthetic construct
  source 1..75: mol_type = other DNA
ttttctgccaccacgatgctgttttcactgggtgccagtatgattctgggcggtgtggcccagatgctggcaccg

SEQ ID NO: 435908 - DNA, 75 bp, synthetic construct
  source 1..75: mol_type = other DNA
ctgctgtgctgttttggttcatcggtgccgaatcatgccgccatttactgtggtgacggtgagctgctgcaccat

SEQ ID NO: 435909 - DNA, 75 bp, synthetic construct
  source 1..75: mol_type = other DNA
gctgtatcgggcatgtatgcggcaggggccagtatgatcctgggcggtgtggcgcagatgctggcaccgaaagcc

SEQ ID NO: 435910 - DNA, 75 bp, synthetic construct
  source 1..75: mol_type = other DNA
gtgaacacggcagcggaagccatccgtgccctgtcgatgcagatgccgggattccgccttcagatgaacgaaggc

SEQ ID NO: 435911 - DNA, 75 bp, synthetic construct
  source 1..75: mol_type = other DNA
tttctgccaccacgatgctgttttcactgggtgccagcatgatactgggtggtgtggcccagatgctggccccga

SEQ ID NO: 435912 - DNA, 75 bp, synthetic construct
  source 1..75: mol_type = other DNA
gaggatgactggtggcgcaacggtcagaacctttacctggacaatatggcggtcaccggcttttaccgggtgccc

SEQ ID NO: 435913 - DNA, 75 bp, synthetic construct
  source 1..75: mol_type = other DNA
gccgtggtggctggtttgccggggggcgattcacaagttccgctgtgtgccacatctttccgggcggcgctttga

SEQ ID NO: 435914 - DNA, 75 bp, synthetic construct
  source 1..75: mol_type = other DNA
cgggatgcttaccatctggcggggataacgctgccggattttgtgcgtgaggatgactggtggcgcaacggccag

SEQ ID NO: 435915 - DNA, 75 bp, synthetic construct
  source 1..75: mol_type = other DNA
ccataagtacaatgatgaacctaacgaagaatgcgaacaatgggctaatgaatgccatgagttcgctgctattaa

SEQ ID NO: 435916 - DNA, 75 bp, synthetic construct
  source 1..75: mol_type = other DNA
gcagccatcgtgggctctttcttcaccgccggcgcaacgatggcgttgtggggcgcagccctgagtgccggaggg

SEQ ID NO: 435917 - DNA, 75 bp, synthetic construct
  source 1..75: mol_type = other DNA
gctcacagtatgtgcatttttgtgtacggggctgtcaccctgtatcgcgcgcctttccagacgcttccactaaca

SEQ ID NO: 435918 - DNA, 75 bp, synthetic construct
  source 1..75: mol_type = other DNA
atggcattgaatgataagagcgcttgcgttcgagctacggcaatcgagtcaacggctcagcgatgcaagaaaaac

SEQ ID NO: 435919 - DNA, 75 bp, synthetic construct
  source 1..75: mol_type = other DNA
tcccttgtgtgaatatttccgcagagccggaggcgtattttcgtatcgcaccggaagactggctgcgggcagaga

SEQ ID NO: 435920 - DNA, 75 bp, synthetic construct
  source 1..75: mol_type = other DNA
atgcccacacaaattagtgtgaggtcctgtttcttactacgcgcaggactgacgagcatgaggggaaaatacgcg

SEQ ID NO: 435921 - DNA, 75 bp, synthetic construct
  source 1..75: mol_type = other DNA
acaataaaacctatcttaaggatactgagtatcagagcctgaccagtataaaatttaaagatggacgcgtagcat

SEQ ID NO: 435922 - DNA, 75 bp, synthetic construct
  source 1..75: mol_type = other DNA
ataatgcggctaaaataggtttcaaagtgattcatactattgatgactttagagcaaaagttgagtctgaactta

SEQ ID NO: 435923 - DNA, 75 bp, synthetic construct
  source 1..75: mol_type = other DNA
gggtgaagagctttcatggtcgtggggaaagaaaaaaataaatgatgagttttataatctaatagtaatagatat

SEQ ID NO: 435924 - DNA, 75 bp, synthetic construct
  source 1..75: mol_type = other DNA
acaaagttgtattttatggcagcaacttcgaaagtgcgaaacagatggaactcaatgaagcactacaaagttatg

SEQ ID NO: 435925 - DNA, 75 bp, synthetic construct
  source 1..75: mol_type = other DNA
tcatctgtgttcaattagatgaagaaacagataaaaagaaacaagcctataaagaagggtataaatccatcttca

SEQ ID NO: 435926 - DNA, 75 bp, synthetic construct
  source 1..75: mol_type = other DNA
taaccgacgtgaagagaacaagaacagtcaaaatctgttaatcaaaggggataaccttgaggtattaaagcatat

SEQ ID NO: 435927 - DNA, 75 bp, synthetic construct
  source 1..75: mol_type = other DNA
cgaccaaaggcgtgaagttcgtcggctactggccaacggaaggatatgaatttaccagcccgaaaccggtgattg

SEQ ID NO: 435928 - DNA, 75 bp, synthetic construct
  source 1..75: mol_type = other DNA
ggtctggcgctggatgaaactaaccagtatgaccttagcgacgagcgtattcagagctggtgcgagcaaatcctc

SEQ ID NO: 435929 - DNA, 75 bp, synthetic construct
  source 1..75: mol_type = other DNA
atgattattctattgggattgagctggaaggcaccgacacgctggcttataccgatgctcagtatcagcaactgg

SEQ ID NO: 435930 - DNA, 75 bp, synthetic construct
  source 1..75: mol_type = other DNA
tggcatgctgcctgccgtatggcggaacagctgaccaccctgcgttaccggtttggtctgcaggctgatgaaagt

SEQ ID NO: 435931 - DNA, 75 bp, synthetic construct
  source 1..75: mol_type = other DNA
ttggggattgcacaagttacggagagacttgaggtttcagtaacaaaacggagaaatctagcaaaacatattcct

SEQ ID NO: 435932 - DNA, 75 bp, synthetic construct
  source 1..75: mol_type = other DNA
aaccatcaagtcttcagactgcaattagcggtggcacgtctggtgcgattgccggtgcaggtcttgccagccttt

SEQ ID NO: 435933 - DNA, 75 bp, synthetic construct
  source 1..75: mol_type = other DNA
gcaccaacgcttggtcagcaatggctatctggtcagatgaacaactaccagaatctggcaaatattggtcttggc

SEQ ID NO: 435934 - DNA, 75 bp, synthetic construct
  source 1..75: mol_type = other DNA
ttaaccagtattacaactctcagcagtacaaagatcttgctggtcaggctcgctatcagagtctggcggcagcgg

SEQ ID NO: 435935 - DNA, 75 bp, synthetic construct
  source 1..75: mol_type = other DNA
gaccatcagcaatgcaatctgctattggcggaggtgcgtctggtgctattgctggggctggacttgcgaaattaa

SEQ ID NO: 435936 - DNA, 75 bp, synthetic construct
  source 1..75: mol_type = other DNA
acagcaggcggcagcatcggcagcaaatgcgaataagccttcaggcctacagagttttgctacaggtgccattgg

SEQ ID NO: 435937 - DNA, 75 bp, synthetic construct
  source 1..75: mol_type = other DNA
cggcagcctcgagaacttatcgtctctggaggggcaaggtcaggcacttaaccagtattacaactctcagcagta

SEQ ID NO: 435938 - DNA, 75 bp, synthetic construct
  source 1..75: mol_type = other DNA
tctctggaggggcaaggtcaggcacttaaccagtattacaactctcagcagtacaaagatcttgctggtcaggct

SEQ ID NO: 435939 - DNA, 75 bp, synthetic construct
  source 1..75: mol_type = other DNA
atgtcaacgtttattttgtgccctgaaccgggcatctcttcttttttccggcgaatgacggctcagttgcgggtg

SEQ ID NO: 435940 - DNA, 75 bp, synthetic construct
  source 1..75: mol_type = other DNA
aacacgctgcgatcgtgataaacgccctgtattcactaaacctcgatggatggggcgagattgtcagcgagtggc

SEQ ID NO: 435941 - DNA, 75 bp, synthetic construct
  source 1..75: mol_type = other DNA
tatcgctggactgcaaaccggactggcgattcatattgtattggttggtgtgggtttgggtacgctattttcacg

SEQ ID NO: 435942 - DNA, 75 bp, synthetic construct
  source 1..75: mol_type = other DNA
cgccgctggcgcaattgatcttaaatcgctggcctctactcaatcgcgtcgacatttgttccagcgcgcagtttt

SEQ ID NO: 435943 - DNA, 75 bp, synthetic construct
  source 1..75: mol_type = other DNA
ctttgtggcaggcaatcctgaggcagacccggagcaggagctgacggaccgctgggtggtggagcagatgtcagc

SEQ ID NO: 435944 - DNA, 75 bp, synthetic construct
  source 1..75: mol_type = other DNA
tctgacaagcctgctggacgatcaaactgccgatgggagtaaccgctgttgggctgctgcggccatagcgcggct

SEQ ID NO: 435945 - DNA, 75 bp, synthetic construct
  source 1..75: mol_type = other DNA
agaacgccggagggggagcggtatatcccttgtgtgaatatctctgcagagcctgaggcatattttcgtattgcc

SEQ ID NO: 435946 - DNA, 75 bp, synthetic construct
  source 1..75: mol_type = other DNA
ccagagcacaaatttgtcaccctggaagatacgccgctgattggtgttacccagagctactcctgttcgctggag

SEQ ID NO: 435947 - DNA, 75 bp, synthetic construct
  source 1..75: mol_type = other DNA
cgacgggtttttaccgtgtcgcactgacagaggcgcagcctggcgatgtgctgctgtgctgttttggttcatcgg

SEQ ID NO: 435948 - DNA, 75 bp, synthetic construct
  source 1..75: mol_type = other DNA
cgccccgtaattttagaggcgcagaatgtatggataacctacaaaggaaagctaccgggaataattactggttct

SEQ ID NO: 435949 - DNA, 75 bp, synthetic construct
  source 1..75: mol_type = other DNA
gccacgctggagttttacgaagctgaggcgaaaaagcaggcgaagcagtttttcatggatgttgctgccgggtta

SEQ ID NO: 435950 - DNA, 75 bp, synthetic construct
  source 1..75: mol_type = other DNA
actacaactcttacgtgaaggggtagtggagaaaaactttatcgccatagcctctgatgaggttggtgagttgat

SEQ ID NO: 435951 - DNA, 75 bp, synthetic construct
  source 1..75: mol_type = other DNA
tacggtgaaatgctggttggctcacggcgaatctcccaggacatcagtacccgtgatgaaggcggtgacgggaag

SEQ ID NO: 435952 - DNA, 75 bp, synthetic construct
  source 1..75: mol_type = other DNA
tcaatggcgttatggggttcagccctggcagccggtggtttttctgccaccacgatgctgttttcactgggggcc

SEQ ID NO: 435953 - DNA, 75 bp, synthetic construct
  source 1..75: mol_type = other DNA
cgccgtatatcccaggacatcagtacccgtgatgaaggcgggggcggaaaggtcgtggttatcgggcggcaggca

SEQ ID NO: 435954 - DNA, 75 bp, synthetic construct
  source 1..75: mol_type = other DNA
gttatttatgggtatttgttgcatttattgcagtcgttcgcctggcgcagaaatataaaccagaatatgtcttta

SEQ ID NO: 435955 - DNA, 75 bp, synthetic construct
  source 1..75: mol_type = other DNA
gggtacagccctgagtgccggcggtttttctgccaccacaatgctgttttcactgggtgccagcatgatactggg

SEQ ID NO: 435956 - DNA, 75 bp, synthetic construct
  source 1..75: mol_type = other DNA
gtgaacacggcagcggaagccatccgggcgctgtcgatgcagataccgggattccgccgtcagatgaacgaaggc

SEQ ID NO: 435957 - DNA, 75 bp, synthetic construct
  source 1..75: mol_type = other DNA
cgcccgatctgccgtatcgcgccagtgaagatgaagtctcggcggtgtttgaaatgccgctcgcccaggcattac

SEQ ID NO: 435958 - DNA, 75 bp, synthetic construct
  source 1..75: mol_type = other DNA
cgcatcttaccgggcggcactttgagcacggggtgacggactgttatgcgctgttccgggatgcgtaccatctgg

SEQ ID NO: 435959 - DNA, 75 bp, synthetic construct
  source 1..75: mol_type = other DNA
gcgattcacaagttccgctgtgtgccgcatcttaccgggcggcactttgagcacggggtgacggactgttatgcg

SEQ ID NO: 435960 - DNA, 75 bp, synthetic construct
  source 1..75: mol_type = other DNA
gctgtatcaggtgccgttgtcagcggcgcagccgggcgatgtgctgctgtgctgctttggttcatcggtgccgaa

SEQ ID NO: 435961 - DNA, 75 bp, synthetic construct
  source 1..75: mol_type = other DNA
gctaccaggtaacgccagtggtcggcattatcccgcctgatttaccttatcgtgccagtgaagatgaagtttccg

SEQ ID NO: 435962 - DNA, 75 bp, synthetic construct
  source 1..75: mol_type = other DNA
cgtcaccgccactggcacgcatccgccttcacggggatttgcaacgatttggccgccgcctcagcctgtatgtga

SEQ ID NO: 435963 - DNA, 75 bp, synthetic construct
  source 1..75: mol_type = other DNA
ttgatatgccggattttcatcgcggggatgactggtggtgcaacggtcagaacctttacctggacaatatggagg

SEQ ID NO: 435964 - DNA, 75 bp, synthetic construct
  source 1..75: mol_type = other DNA
cgaggatgagtggtggcgaaacggtcagaacctgtacctggacaatatggaggcaacgggcttttaccgggtgcc

SEQ ID NO: 435965 - DNA, 75 bp, synthetic construct
  source 1..75: mol_type = other DNA
cgcattctgtctggcgtcaccgccactggcacgcatctgccttcacggggatttgcaacgatttggccgccgcct

SEQ ID NO: 435966 - DNA, 75 bp, synthetic construct
  source 1..75: mol_type = other DNA
ctatctggataatctggaggccacagggctgtatcaggtgccgttgtcatcagcacaaccgggcgatgtgctgct

SEQ ID NO: 435967 - DNA, 75 bp, synthetic construct
  source 1..75: mol_type = other DNA
cacatctgaccggaaggcgctttgatcacggggtgacggactgttacacgctgttccgggacgcttatcatctgg

SEQ ID NO: 435968 - DNA, 75 bp, synthetic construct
  source 1..75: mol_type = other DNA
gagccagcatgatactgggtggtgtggctcagatgcttgccccgaaggcaaaaacaccggattaccgcgcaacgg

SEQ ID NO: 435969 - DNA, 75 bp, synthetic construct
  source 1..75: mol_type = other DNA
cgcacacactccctctggcgtcacctggcatggcccgcatctgcctttacggggattttcaacgatttggccgcc

SEQ ID NO: 435970 - DNA, 75 bp, synthetic construct
  source 1..75: mol_type = other DNA
cgcacacactccctctggcgtcacctggcatggctcgcatctgcctttacggggatttccaacgatttggccgcc

SEQ ID NO: 435971 - DNA, 75 bp, synthetic construct
  source 1..75: mol_type = other DNA
tgcagataaaaagtgcactgtcctggtggctggtctgccgggggacattcataaattccgctgtgtgccacatct

SEQ ID NO: 435972 - DNA, 75 bp, synthetic construct
  source 1..75: mol_type = other DNA
ctgctgtgctgctttggtgcttcggtaccgaaccatgccgccatttactgcggtaacggtgagctgcttcaccat

SEQ ID NO: 435973 - DNA, 75 bp, synthetic construct
  source 1..75: mol_type = other DNA
gccggaggcgtattttcgtattgcaccggaagactggctgcaggcacagatgcagggggagattgtggcgctggt

SEQ ID NO: 435974 - DNA, 75 bp, synthetic construct
  source 1..75: mol_type = other DNA
ttgatatgccggattttgagcgtgaggatgactggtggcgcaacggccagaacctgtacctggacaacctggcgg

SEQ ID NO: 435975 - DNA, 75 bp, synthetic construct
  source 1..75: mol_type = other DNA
gtcagcggcgcagccgggcgatgtgctgctgtgctgatttggttcatcggtgccgaatcatgccgcaatttactg

SEQ ID NO: 435976 - DNA, 75 bp, synthetic construct
  source 1..75: mol_type = other DNA
gtggctggtctgccggggtgatattcacaaattccgctgtgtgccacatctgacgggacggcgctttgagcacgg

SEQ ID NO: 435977 - DNA, 75 bp, synthetic construct
  source 1..75: mol_type = other DNA
tcccttgtgtgaatatctctgcagagcctgaggcatattttcgtattgccccggaagactggctgcgggcagaga

SEQ ID NO: 435978 - DNA, 75 bp, synthetic construct
  source 1..75: mol_type = other DNA
gagcgagcacgaagtggcacagttcaaaactgcggtgctggtgttcctcggcgctgaatacgcacgtcgcggctg

SEQ ID NO: 435979 - DNA, 75 bp, synthetic construct
  source 1..75: mol_type = other DNA
ttcaccattaaagtgctgccgagctggcgtccggataaagccttcaacatcgaacaggcgacctttaacgactac

SEQ ID NO: 435980 - DNA, 75 bp, synthetic construct
  source 1..75: mol_type = other DNA
agtttgatgcgtgggcggcgaccgttccacacactatcggcaacccgttataccactggacgcatctggaactgc

SEQ ID NO: 435981 - DNA, 75 bp, synthetic construct
  source 1..75: mol_type = other DNA
tttgacaagcctgctggacgatcaaacagccgatgggagtaaccgctgttgggctgcagcggctatagcgcggct

SEQ ID NO: 435982 - DNA, 75 bp, synthetic construct
  source 1..75: mol_type = other DNA
gtcagcggcgcagccgggcgatgtgctgctgtgctggtttggttcatcggtgccgaatcatgccgcgatttactg

SEQ ID NO: 435983 - DNA, 75 bp, synthetic construct
  source 1..75: mol_type = other DNA
tcgcctggcgcagaaatataaaccagaatatgtctttattcgtaataagcctctggcaatgaccgtcgggatttg

SEQ ID NO: 435984 - DNA, 75 bp, synthetic construct
  source 1..75: mol_type = other DNA
ctcactgggtgccagcatgatactgggtggtgtggcccagatgctggccccgaaggcaaagacgccggaatacaa

SEQ ID NO: 435985 - DNA, 75 bp, synthetic construct
  source 1..75: mol_type = other DNA
gtaccaacgcttctggtacgcccgttaatggctattttctgaccctggtactggtggcgattctgattatgctgc

SEQ ID NO: 435986 - DNA, 75 bp, synthetic construct
  source 1..75: mol_type = other DNA
ggtgggaatgcagctggcgctggattatcccgcgtcggtaactgtgctggtcagcgttaacggctggctacgaat

SEQ ID NO: 435987 - DNA, 75 bp, synthetic construct
  source 1..75: mol_type = other DNA
cggtgtggcccagatgctggccccgaaggccaaagtaccggagtacaaaagcacggataacggtaaacagaacac

SEQ ID NO: 435988 - DNA, 75 bp, synthetic construct
  source 1..75: mol_type = other DNA
gggcgcagccctgagtgccggagggctgactgccaccacgatgctgttctcactgggtgccagcatgatactggg

SEQ ID NO: 435989 - DNA, 75 bp, synthetic construct
  source 1..75: mol_type = other DNA
caatggatatattttgacgctggtgctggtggcgatcctgattatgctgccaacactgggtattggagatatgaa

SEQ ID NO: 435990 - DNA, 75 bp, synthetic construct
  source 1..75: mol_type = other DNA
aggcatgagacacgatcgcggctattttaatgtttccaacggcggcaaaatccatgttaagggcaccagccgtct

SEQ ID NO: 435991 - DNA, 75 bp, synthetic construct
  source 1..75: mol_type = other DNA
gtgatgatctgctggtgccatcagcatgttccagtgaacttcatgccgccctgcccgatagccagaaaatggtga

SEQ ID NO: 435992 - DNA, 75 bp, synthetic construct
  source 1..75: mol_type = other DNA
gtctgctgcggtaagcgcagccgagggtgatgaatcagtaacgaccactgttaatggcggtgtaattcattttaa

SEQ ID NO: 435993 - DNA, 75 bp, synthetic construct
  source 1..75: mol_type = other DNA
aaaatggctggcacggcggatatcgaaattcgcgttccgcactttggttatgccgaccgcattcaggagattcac

SEQ ID NO: 435994 - DNA, 75 bp, synthetic construct
  source 1..75: mol_type = other DNA
ttctcccgttacgttgaagcggtaggtcgcgaaggcgatgtactgctggggatctccacctctggtaactctgca

SEQ ID NO: 435995 - DNA, 75 bp, synthetic construct
  source 1..75: mol_type = other DNA
tctgctggtacgcgtcgcaatcggtggccgtatctcattaatggtcggtgttgctgcagcgctggtggcagtggt

SEQ ID NO: 435996 - DNA, 75 bp, synthetic construct
  source 1..75: mol_type = other DNA
aaaatggctggcacggcggatattgaaattcgcgttccgcactttggttatgccgaccgcattcaggagatccac

SEQ ID NO: 435997 - DNA, 75 bp, synthetic construct
  source 1..75: mol_type = other DNA
atgtaccaggatcttattcgtaatgaactgaacgcagcggcggaaacgctggctaactttttaaaagatgacgcc

SEQ ID NO: 435998 - DNA, 75 bp, synthetic construct
  source 1..75: mol_type = other DNA
cagcgttatgcccgtccgatactggaagaactgtggtcatggcttgaagagcaggaaccgcaatgttctccggga

SEQ ID NO: 435999 - DNA, 75 bp, synthetic construct
  source 1..75: mol_type = other DNA
tgaaaactggcttcagggctggggcgggacgctggttgtcgacggacataaagcttaccggactctggcaaacaa

SEQ ID NO: 436000 - DNA, 75 bp, synthetic construct
  source 1..75: mol_type = other DNA
ctgaaccggcgcgatgaactgagctgcttcctgagtgacggagccgtgcccctggacaacaatatctgcgagcgt

SEQ ID NO: 436001 - DNA, 75 bp, synthetic construct
  source 1..75: mol_type = other DNA
ttggtgatgttctggacatgcaatccgttggcgtgtacagccagttgcgccgccgctatgtgctggttgcaagct

SEQ ID NO: 436002 - DNA, 75 bp, synthetic construct
  source 1..75: mol_type = other DNA
accctgaaggaatacctgtctcatgaacaggatatgctgcgtcttcgcatcatgatctggcgtactcttgcgacc

SEQ ID NO: 436003 - DNA, 75 bp, synthetic construct
  source 1..75: mol_type = other DNA
ttccggttacgcgtgaccagtccgacatctacgaagtctttaacgtggcaggttcctcttttggttcttatgctg

SEQ ID NO: 436004 - DNA, 75 bp, synthetic construct
  source 1..75: mol_type = other DNA
ccttggactgggcacacaggagccgttaagtagctggggcgcattgcttagcgatggcgcgaattcgatggaagt

SEQ ID NO: 436005 - DNA, 75 bp, synthetic construct
  source 1..75: mol_type = other DNA
tcactgcctgaaatatggtctgaccgtacataacctgctgaaaattgaagtgcaaacgctggacggcgaggcgct

SEQ ID NO: 436006 - DNA, 75 bp, synthetic construct
  source 1..75: mol_type = other DNA
atgcgtaatattgaaaccctctcgacccaaaccggaccggatgacgcagggctaaatattttactgacagaggct

SEQ ID NO: 436007 - DNA, 75 bp, synthetic construct
  source 1..75: mol_type = other DNA
cgtcagctaaaccacgtggaagcagcagaactactgcgtgtaactgctgaagcaatccagaacgaagcgcaggag

SEQ ID NO: 436008 - DNA, 75 bp, synthetic construct
  source 1..75: mol_type = other DNA
accggcgataacgtggtgattcgtcagtcgcacggtggttcagggaaacaggcaacatcggtaatcaacgggata

SEQ ID NO: 436009 - DNA, 75 bp, synthetic construct
  source 1..75: mol_type = other DNA
atcagccgaatagtgtcatggaggattatatgaaaaaagcgaaagcttttgtttttgctgcagaagaggattttg

SEQ ID NO: 436010 - DNA, 75 bp, synthetic construct
  source 1..75: mol_type = other DNA
agatacctgacgacctgatacaggctatcgccatcagagaactggcgtttagcgcaggtgcattacgcgcggcag

SEQ ID NO: 436011 - DNA, 75 bp, synthetic construct
  source 1..75: mol_type = other DNA
cggtattaatgaactgattgatgatttaatggagcacatcagtctggaaaataatgtactgttcccacgcgcgct

SEQ ID NO: 436012 - DNA, 75 bp, synthetic construct
  source 1..75: mol_type = other DNA
acaaggcatgggcagccaggcaatggggccaatcagcgtaatggaaagcgagcacgatgaagcgggcgaactgct

SEQ ID NO: 436013 - DNA, 75 bp, synthetic construct
  source 1..75: mol_type = other DNA
gtttaagttcaggagcaaaggcgttactcgcaaaatggatcttacataaacttagaatttgggatgtaagaactg

SEQ ID NO: 436014 - DNA, 75 bp, synthetic construct
  source 1..75: mol_type = other DNA
gcttaatattttactgacagaggctcgtctggaagagcgccgggcaagggctgaagcaatggcagctcgccttga

SEQ ID NO: 436015 - DNA, 75 bp, synthetic construct
  source 1..75: mol_type = other DNA
caatgattttggctttaacgatattttctcccgctacgttgaagcggtaggccgcgaaggcgatgtgctgctggg

SEQ ID NO: 436016 - DNA, 75 bp, synthetic construct
  source 1..75: mol_type = other DNA
taatgatttcggtttcaatgatattttctcccgctacgttgaagcggtaggtcgcgaaggcgatgtactgctggg

SEQ ID NO: 436017 - DNA, 75 bp, synthetic construct
  source 1..75: mol_type = other DNA
acgtccctgaggctccttgatacccggaaaggcggtaaatcctgctccggctggctgtgggcttacgtcagcgga

SEQ ID NO: 436018 - DNA, 75 bp, synthetic construct
  source 1..75: mol_type = other DNA
gttcgaagccaaaccagctaaccagttgttgacccagccggtgaagcaaggtgcagaactggacttcccgattcc

SEQ ID NO: 436019 - DNA, 75 bp, synthetic construct
  source 1..75: mol_type = other DNA
tgtggatgattttgccttctcgctgcatgaccttagtgataaagaaaccaccattagccagcagagtgccgccat

SEQ ID NO: 436020 - DNA, 75 bp, synthetic construct
  source 1..75: mol_type = other DNA
ttgccaaagaaaatgccgcaggtatcccgatggatgccgccgagcgtaactataaagatcctaaccacaagccgg

SEQ ID NO: 436021 - DNA, 75 bp, synthetic construct
  source 1..75: mol_type = other DNA
atttattgccgccaatgagtcgccggtgacggtgaaaggccacggacgtttagcgcgtgtttacaacaagctgta

SEQ ID NO: 436022 - DNA, 75 bp, synthetic construct
  source 1..75: mol_type = other DNA
gccgctctccattcaggttcatccaaacaaacacaattctgaaatcggttttgccaaagaaaatgccgcaggtat

SEQ ID NO: 436023 - DNA, 75 bp, synthetic construct
  source 1..75: mol_type = other DNA
agtggatgattttgccttctcgctgcatgatcttagtgataaagaaaccactatcagccagcaaagtgccgccat

SEQ ID NO: 436024 - DNA, 75 bp, synthetic construct
  source 1..75: mol_type = other DNA
ggttcttcctctttcgccagcaacaatatttatgactataccaacgaaactgcgaacgatgtcttcgacgtgcgt

SEQ ID NO: 436025 - DNA, 75 bp, synthetic construct
  source 1..75: mol_type = other DNA
atggctgctaacgcgtttgttcgcgcccgaatcgatgaggatttgaagaatcaggcggcggacgtactggccggg

SEQ ID NO: 436026 - DNA, 75 bp, synthetic construct
  source 1..75: mol_type = other DNA
tgttaaggcagcacaaagttctattaatcatgtaataatggggaatgcttcttttggcaagaaaatagatgctct

SEQ ID NO: 436027 - DNA, 75 bp, synthetic construct
  source 1..75: mol_type = other DNA
ctacggtcgcgctaacctgcgtgataactatcgtctggttgatggcgcatcgaaagatggctggatgttcactgc

SEQ ID NO: 436028 - DNA, 75 bp, synthetic construct
  source 1..75: mol_type = other DNA
cgtagcacaacagaatgactgggaagccaccgatccggccttccgtgaagcgaacgtgcaggggaaaaacctgat

SEQ ID NO: 436029 - DNA, 75 bp, synthetic construct
  source 1..75: mol_type = other DNA
cgtaatgtctgctcaggcaatggctgtggatttccacggttacgctcgttccgggatcggctggacagggagcgg

SEQ ID NO: 436030 - DNA, 75 bp, synthetic construct
  source 1..75: mol_type = other DNA
aaggcgtggcgctggaagtgatggcgaactccgataacgtgctgcgtgcgggtctgacgcctaaatacattgata

SEQ ID NO: 436031 - DNA, 75 bp, synthetic construct
  source 1..75: mol_type = other DNA
atggaaattacagatattctggttaatccagataattacgaccaattcaatatctctactcaatcagttgatttg

SEQ ID NO: 436032 - DNA, 75 bp, synthetic construct
  source 1..75: mol_type = other DNA
aaccgctgccgaactgacccgcgaagaaaagagcgccatttcccaccgtggtcaggcattgaaactgctgctgga

SEQ ID NO: 436033 - DNA, 75 bp, synthetic construct
  source 1..75: mol_type = other DNA
cagttatggcggttccgggtcacgaccagcgcgactacgagtttgcctctaaatacggcctgaatatcaaaccgg

SEQ ID NO: 436034 - DNA, 75 bp, synthetic construct
  source 1..75: mol_type = other DNA
gtgaaacgctggctggtatgcaacgctccctgtttcgaagaggatgttgatgccgatatcgccgcgcttaccgca

SEQ ID NO: 436035 - DNA, 75 bp, synthetic construct
  source 1..75: mol_type = other DNA
accattccaatggtggcggcagtttcacgcgtggcgcgtgttcattacgccgaaattatcgcttctatcgccagt

SEQ ID NO: 436036 - DNA, 75 bp, synthetic construct
  source 1..75: mol_type = other DNA
gtgccatccgtccggtcgtcatgggacggaaatcgtggttgtttgaaccgccccgggtttcctggagagtgtttt

SEQ ID NO: 436037 - DNA, 75 bp, synthetic construct
  source 1..75: mol_type = other DNA
ctgaaaggcgaaggcgatatcgacaacgcgccgtggccggttgctgacgaaaaagcgatggtggaagactccacg

SEQ ID NO: 436038 - DNA, 75 bp, synthetic construct
  source 1..75: mol_type = other DNA
aagaagacttctgcggtcaactggtgcccgaacgaccagaccgtactggcgaacgaacaggttatcgacggctgc

SEQ ID NO: 436039 - DNA, 75 bp, synthetic construct
  source 1..75: mol_type = other DNA
ttcaatcaatcaaaaacagcgaagctggcgttgatgttcataaggccaaagacgccgatgatttatttgataaat

SEQ ID NO: 436040 - DNA, 75 bp, synthetic construct
  source 1..75: mol_type = other DNA
ggtggacgcaacggaagaacaggttcgcgaacgtgctggccaggaacatctggtagcaaaatatcttgatggcgt

SEQ ID NO: 436041 - DNA, 75 bp, synthetic construct
  source 1..75: mol_type = other DNA
tatgttggcgaaaacggcgaacgtaactgggtttcaccggttgatgctatcgttgaacgtgacgagaaaggccgt

SEQ ID NO: 436042 - DNA, 75 bp, synthetic construct
  source 1..75: mol_type = other DNA
tggtagcaaaatatcttgatggcattaccgtgcgtaaagtgatttacgtacccggtaaactcctcaatctggtcg

SEQ ID NO: 436043 - DNA, 75 bp, synthetic construct
  source 1..75: mol_type = other DNA
agttgatatgaagaagttaccagcagacatcgaggctcgtcgttctgttgtagaatccgtcctgaccgagggggc

SEQ ID NO: 436044 - DNA, 75 bp, synthetic construct
  source 1..75: mol_type = other DNA
tttctcagagcgtaactatatgaccatggaacagtatcttgatgcccgttatcgcaatgatttcacgagacgtga

SEQ ID NO: 436045 - DNA, 75 bp, synthetic construct
  source 1..75: mol_type = other DNA
gactataacattaacggaacagtaaacaagccgcaccagggaggacaatctcagttactcagttattacggtact

SEQ ID NO: 436046 - DNA, 75 bp, synthetic construct
  source 1..75: mol_type = other DNA
ttctgaggcaggctggtattccgttgctcagaagctacgatgccagaaaactgctgcagatgaccggagaatggc

SEQ ID NO: 436047 - DNA, 75 bp, synthetic construct
  source 1..75: mol_type = other DNA
tctgctgttttcagttcatggcgatataccggtgcccgtctggaaagtgatgagcgtatgttgccaccaaaactg

SEQ ID NO: 436048 - DNA, 75 bp, synthetic construct
  source 1..75: mol_type = other DNA
ttatcaaccctttccacacacagtgcagtgccagaatccccgatatttaccccgaccatgtgccgcgctctccca

SEQ ID NO: 436049 - DNA, 75 bp, synthetic construct
  source 1..75: mol_type = other DNA
atggctaaaccagcgcgaagacgatgtaaccgtaaaagagaagatttaactgttaaaaggatatttgagttacta

SEQ ID NO: 436050 - DNA, 75 bp, synthetic construct
  source 1..75: mol_type = other DNA
atggcgcaattatggatggcgaagaaacccagggtaatgttggcggcgacacaaccgcagcgcaaatccgcgacg

SEQ ID NO: 436051 - DNA, 75 bp, synthetic construct
  source 1..75: mol_type = other DNA
ctcggggatttcgatgatgcggtcgccaaagcagcagagctggcaaaagtgaaacagtggcatctggaatactac

SEQ ID NO: 436052 - DNA, 75 bp, synthetic construct
  source 1..75: mol_type = other DNA
ctggtcgctgttcaccttcctgcaaggctttgttgatatgtttccgctggcctgggctgggatctccatgttctt

SEQ ID NO: 436053 - DNA, 75 bp, synthetic construct
  source 1..75: mol_type = other DNA
tttaatattactgattatttttattgttaccgccgttaactacgccgatcgtgcaacgctgtctattgctggtac

SEQ ID NO: 436054 - DNA, 75 bp, synthetic construct
  source 1..75: mol_type = other DNA
tttgcgggggcgaagaactatcagtacgtaatgagcgaacagcctgaaatgcgcagcatccagccggttcacgtc

SEQ ID NO: 436055 - DNA, 75 bp, synthetic construct
  source 1..75: mol_type = other DNA
gtactggtgttttatgcatgaagtgtgttatgaactggatcatgaggcactgataaccattatgggaataaaaaa

SEQ ID NO: 436056 - DNA, 75 bp, synthetic construct
  source 1..75: mol_type = other DNA
tggccaacctgtcagcgaacttctctgccgtggagaacggttacacgtcattcggtatgagcgcatccggtggtg

SEQ ID NO: 436057 - DNA, 75 bp, synthetic construct
  source 1..75: mol_type = other DNA
cggagatggttggtcatatgggactgacagaggcgtcacaggaaaaaatcacatactggaataacgggcagtgtg

SEQ ID NO: 436058 - DNA, 75 bp, synthetic construct
  source 1..75: mol_type = other DNA
accagatggaaattatggtgaatgaccaggggatttcaccgtcggcatttccggtgacgtttctggagccgccgg

SEQ ID NO: 436059 - DNA, 75 bp, synthetic construct
  source 1..75: mol_type = other DNA
ctactacgcaccggacccttcctcacaaatcgcctgttccattggcggcaacgtggcagaaaatgccggcggcgt

SEQ ID NO: 436060 - DNA, 75 bp, synthetic construct
  source 1..75: mol_type = other DNA
caggcaccgggctttctggtggcgcgctgccgctggaaaaaggtgtgttgttggtgatggcgcgctttaaagaga

SEQ ID NO: 436061 - DNA, 75 bp, synthetic construct
  source 1..75: mol_type = other DNA
gcgttattggcgcaattatggtagcagctgctggtggttttggtgttggccatttgcgaggcaccaataaagcgg

SEQ ID NO: 436062 - DNA, 75 bp, synthetic construct
  source 1..75: mol_type = other DNA
ttctggatgcagcagacagacagaatattgatttttcccggttctcccaggcgggatatatcatgcccgggcagt

SEQ ID NO: 436063 - DNA, 75 bp, synthetic construct
  source 1..75: mol_type = other DNA
atgttctggatgcggcagacagacagaatattgatttttcccgattctcacgggctggatatattatgcccggac

SEQ ID NO: 436064 - DNA, 75 bp, synthetic construct
  source 1..75: mol_type = other DNA
atggacactccatacattgagttatttgcaggcagtcagcaggtatccacgacgttggtacattttgccgctgat

SEQ ID NO: 436065 - DNA, 75 bp, synthetic construct
  source 1..75: mol_type = other DNA
tcagagcatttctccgtcggcatttcagataacgtttcttgaaccaccttattcagattcggataacgagaaacc

SEQ ID NO: 436066 - DNA, 75 bp, synthetic construct
  source 1..75: mol_type = other DNA
tccgctgatgtgactcagtcggtggcccgtataccgggttacgacacaaaacagggtaaatcctggcgtctgagc

SEQ ID NO: 436067 - DNA, 75 bp, synthetic construct
  source 1..75: mol_type = other DNA
acgttgggttacagcgacacgctgaacaaagggttgagcagttacagcctgaacgccggtgtgagcagtggtggc

SEQ ID NO: 436068 - DNA, 75 bp, synthetic construct
  source 1..75: mol_type = other DNA
ccggattttttaaatggacgtggcgtctgctgaatttcgtccgtgaaatggtacttaacctgttttttatttttc

SEQ ID NO: 436069 - DNA, 75 bp, synthetic construct
  source 1..75: mol_type = other DNA
tgaaaacccgtcgtttgaacttaactcggcactgctttcccgtgcccgtgtctatctgctgaaatccctgagtac

SEQ ID NO: 436070 - DNA, 75 bp, synthetic construct
  source 1..75: mol_type = other DNA
ccgaattactgacggaaatcgccggtgagcgtagcgcccgcttcgataacaaaggcgatcgcttttacgatctga

SEQ ID NO: 436071 - DNA, 75 bp, synthetic construct
  source 1..75: mol_type = other DNA
ccggcggaaggtgaacgcgccattgctcaggcgattgtttacctggcctgcgcgccaaaaagcaacgctgtctac

SEQ ID NO: 436072 - DNA, 75 bp, synthetic construct
  source 1..75: mol_type = other DNA
cgggaaccggtaaaacgaccctcgctgaagtgattgctcgctatgcaaatgctgatgtggaacgtatttctgccg

SEQ ID NO: 436073 - DNA, 75 bp, synthetic construct
  source 1..75: mol_type = other DNA
tttatctgctgaaatcccttagcacagaggatattgagcaagtactggctcaggcgatggaagacaaaacccgcg

SEQ ID NO: 436074 - DNA, 75 bp, synthetic construct
  source 1..75: mol_type = other DNA
gctgaactggtgaatggcgacgcgcgccgggcgttaaatacgctggaaatgatggcggatatggccgaagtcgat

SEQ ID NO: 436075 - DNA, 75 bp, synthetic construct
  source 1..75: mol_type = other DNA
ctatcagcccgttacttaaacacccttataaactcctctcaatttttgagcagtgggcatcagatgatggcatca

SEQ ID NO: 436076 - DNA, 75 bp, synthetic construct
  source 1..75: mol_type = other DNA
cacgcctaatccgaaaagctctggtggcgcgcgctggaactacctggcagcctggggctacgcgctgcatcacaa

SEQ ID NO: 436077 - DNA, 75 bp, synthetic construct
  source 1..75: mol_type = other DNA
tgcgtttccaaagctgaagttattcaccattgatgaagagttcggcggctggacgaaagcgcaaaaagagcattt

SEQ ID NO: 436078 - DNA, 75 bp, synthetic construct
  source 1..75: mol_type = other DNA
cgggtacgggtaaaacgacccttgctgaagtgatcgcccgctacgcaaacgctgatgtggaacgtatttctgccg

SEQ ID NO: 436079 - DNA, 75 bp, synthetic construct
  source 1..75: mol_type = other DNA
agaaacatttaattatttagtaagttttttgatgagtttttcaagtcgaacagcaactagggatcgattacatat

SEQ ID NO: 436080 - DNA, 75 bp, synthetic construct
  source 1..75: mol_type = other DNA
gcataacggcgatgcagtaaaaagcctcacacttacaccagcgattattgatgctgttacaactgccagcactgg

SEQ ID NO: 436081 - DNA, 75 bp, synthetic construct
  source 1..75: mol_type = other DNA
cgccaaaatattgagccctggctaacagctctcttccaatcagagcatttaaatttattaatcggtgcaggctta

SEQ ID NO: 436082 - DNA, 75 bp, synthetic construct
  source 1..75: mol_type = other DNA
agataatgggatatcaatcctcaaatgtcatgcttgattatatgcaaaaagcaaaagcttttgtatttgctgctg

SEQ ID NO: 436083 - DNA, 75 bp, synthetic construct
  source 1..75: mol_type = other DNA
cgatcgctgtggtcgccatgcgaagacggtggtagatgacattgagttcaatgagtttctgtctgttaatcactt

SEQ ID NO: 436084 - DNA, 75 bp, synthetic construct
  source 1..75: mol_type = other DNA
ctgtaatgttatgtgcgaagacctgcgatcgctgtggtcgccatgcgaagacggtggtagatgacattgagttca

SEQ ID NO: 436085 - DNA, 75 bp, synthetic construct
  source 1..75: mol_type = other DNA
ccggattttttaaatggacgtggcgtctgctgaatttcgtccgtgaaatggtacttaacctgttctttattttcc

SEQ ID NO: 436086 - DNA, 75 bp, synthetic construct
  source 1..75: mol_type = other DNA
cgagcgactcgccagaatgcctctattgattcatttatggccgcgattgatttgcaatcgtctatatacggtcgt

SEQ ID NO: 436087 - DNA, 75 bp, synthetic construct
  source 1..75: mol_type = other DNA
tcaaaccttgatgccattattcaggatcagacatttagccagttggctataccggtacagtcgcttttacctggt

SEQ ID NO: 436088 - DNA, 75 bp, synthetic construct
  source 1..75: mol_type = other DNA
catcgccgcgggtggcgcgctgatcaatatggatcagcaaaacaccaaagttaaagtgccgttcagcgtgaagtg

SEQ ID NO: 436089 - DNA, 75 bp, synthetic construct
  source 1..75: mol_type = other DNA
acggctggttggtggtggaggcggagcaggatccggcgattgcccatccgctgacctatgcccgtctggggtata

SEQ ID NO: 436090 - DNA, 75 bp, synthetic construct
  source 1..75: mol_type = other DNA
tgctagttattctctgcgagaattcttaaaaaaaagaactattacgaattttctttcttgcctctatcatttttg

SEQ ID NO: 436091 - DNA, 75 bp, synthetic construct
  source 1..75: mol_type = other DNA
gcacgaccgaattaaccaccaccgcgacggaatatcgtggtactaccgatgcgaatggtgttgccacggttacgg

SEQ ID NO: 436092 - DNA, 75 bp, synthetic construct
  source 1..75: mol_type = other DNA
ttgcgcgcaaggtctggccgggcgttcgctggtggcctggccacagattgatgcgcagcagaccattccactgct

SEQ ID NO: 436093 - DNA, 75 bp, synthetic construct
  source 1..75: mol_type = other DNA
gcgccacggtcgtcgatcataacgaaacctggtccaccttcacctggagcggcgcagatagccactgcaccgtgc

SEQ ID NO: 436094 - DNA, 75 bp, synthetic construct
  source 1..75: mol_type = other DNA
acgacagaaattaatgccaacaccgtctgaagatgcgttaaaacagatggtggatgataagaaagaacgattgaa

SEQ ID NO: 436095 - DNA, 75 bp, synthetic construct
  source 1..75: mol_type = other DNA
gcatacgctgcagtaccgcacatatcacagaaacagacaacgcatggctgtactcgctgtcacaccagaccagtg

SEQ ID NO: 436096 - DNA, 75 bp, synthetic construct
  source 1..75: mol_type = other DNA
gtcgttgacgtcgatggtattaatctcgctgaactgattaacaaggtcgctgaaaacggttattcactccgcgtg

SEQ ID NO: 436097 - DNA, 75 bp, synthetic construct
  source 1..75: mol_type = other DNA
ccaaaacgatgggggtgtcgccttatccatttgcgatggtcgtggcgatggcagcatccgccgcctttatgacac

SEQ ID NO: 436098 - DNA, 75 bp, synthetic construct
  source 1..75: mol_type = other DNA
gccattattgagcaaagaacgcaggacagtaatatccgtaatgatgtaaaacatcaggttgataatatggtcaca

SEQ ID NO: 436099 - DNA, 75 bp, synthetic construct
  source 1..75: mol_type = other DNA
atgatgtaaaacatcaggttgataatatggtcacagaatataaagggaatatcggagatactcaggatagtattc

SEQ ID NO: 436100 - DNA, 75 bp, synthetic construct
  source 1..75: mol_type = other DNA
tgtttgtgttacgaattttacgtcgggttcagtctccgcattaccgtttgcaagatgccattgaaaaccatgata

SEQ ID NO: 436101 - DNA, 75 bp, synthetic construct
  source 1..75: mol_type = other DNA
tccggagccggggaagatttcaaaagatggctatcgggtctggttaacctcacacaatgacttaggtattacccg

SEQ ID NO: 436102 - DNA, 75 bp, synthetic construct
  source 1..75: mol_type = other DNA
aagcgtcgtttgttgaagagctgaatacctattcctcccgcgtcgctattcgagccaataaagtggcgacgcaag

SEQ ID NO: 436103 - DNA, 75 bp, synthetic construct
  source 1..75: mol_type = other DNA
tgaataataaggtcgctgaaaacggttattcactccgcgtggtggatgctcccgaacagcagacaaccgactctc

SEQ ID NO: 436104 - DNA, 75 bp, synthetic construct
  source 1..75: mol_type = other DNA
cccggagccggggaggatttcaaaagagggttatcgtgtctggttaacctcgcacaacgacttaggtatcacccg

SEQ ID NO: 436105 - DNA, 75 bp, synthetic construct
  source 1..75: mol_type = other DNA
ttacggtcagggctggttgtacagcaaggccttaccaaaagaagatttcattcgttgggcagaacaacgcctgta

SEQ ID NO: 436106 - DNA, 75 bp, synthetic construct
  source 1..75: mol_type = other DNA
taaaagggataaatcattacccggataagataactgttactgtggcactggaaattgccgggcagccgccgttgt

SEQ ID NO: 436107 - DNA, 75 bp, synthetic construct
  source 1..75: mol_type = other DNA
cgtcctcgacagcggcatcactgacgaaatgtatcaagagcttgagcgcctgattgaagacgccaaaccggcaag

SEQ ID NO: 436108 - DNA, 75 bp, synthetic construct
  source 1..75: mol_type = other DNA
gttggcgagaactacagccaggggcaatattatctcgccagtttcgccaataaaatttggctgtctccgcaaggc

SEQ ID NO: 436109 - DNA, 75 bp, synthetic construct
  source 1..75: mol_type = other DNA
gcaggaaaactcactgtttgatatcgtcaacaccattcgccaggcgaaggaggaccgcaatatcaccggtattgt

SEQ ID NO: 436110 - DNA, 75 bp, synthetic construct
  source 1..75: mol_type = other DNA
tgggcgttttcggttgaccggtgggatgagaactggccggaggcgacaaaacgcagcgtcatcgcctcggcgttt

SEQ ID NO: 436111 - DNA, 75 bp, synthetic construct
  source 1..75: mol_type = other DNA
gcacctgctgccttatctcgcctgggcgttttccgttgaccgctgggatcgcaactggccggaagagacaaagcg

SEQ ID NO: 436112 - DNA, 75 bp, synthetic construct
  source 1..75: mol_type = other DNA
tgggttcgtcgccgcttgaggtggcggcggcgcgcgcctgcgcggatatcgaaaatacccccgtcccgctgcgtc

SEQ ID NO: 436113 - DNA, 75 bp, synthetic construct
  source 1..75: mol_type = other DNA
taagcgatgccaaaccatgtagccgtcacatgatcggcatgtccatcaacctgcagaccagcggcccgcactggg

SEQ ID NO: 436114 - DNA, 75 bp, synthetic construct
  source 1..75: mol_type = other DNA
tcggtgatgccaaaccatgcagccgtcatctggttggtatgtccatcaacctgcagactggcggcccgtattttg

SEQ ID NO: 436115 - DNA, 75 bp, synthetic construct
  source 1..75: mol_type = other DNA
ttcatccactgtcataaaggcactataggtgcaatccggcgtgtggtggagccgctaggctatctaattaacgta

SEQ ID NO: 436116 - DNA, 75 bp, synthetic construct
  source 1..75: mol_type = other DNA
aagtgaaagcgacaagctggccgcgtttaacgacccacaaaaccgttatgcgttttgcctgatctgcgccaacgt

SEQ ID NO: 436117 - DNA, 75 bp, synthetic construct
  source 1..75: mol_type = other DNA
gcccgtttgttcgcaaactttctattttgttattagaaaagggcattacattcgaatttattaacgaactgccct

SEQ ID NO: 436118 - DNA, 75 bp, synthetic construct
  source 1..75: mol_type = other DNA
tggcgtgcttgagcagggtattaccgaggaaatgtatcaggagctggagcgcctcgttgctgatgccaaaccggc

SEQ ID NO: 436119 - DNA, 75 bp, synthetic construct
  source 1..75: mol_type = other DNA
tttctcgctaccgggaggcgggccatgaaatttatcttgatgattttggtacggggtattcaagtttaagttatt

SEQ ID NO: 436120 - DNA, 75 bp, synthetic construct
  source 1..75: mol_type = other DNA
ctgggaaggggtggacgtgcgtggcgatacattgtcattggtgattatcgacaaattgccgtttacctcgccgga

SEQ ID NO: 436121 - DNA, 75 bp, synthetic construct
  source 1..75: mol_type = other DNA
cgcttcttgtggcaaccagcagtttctgggaaggggtggacgtgcgtggcgatacattgtcattggtgattatcg

SEQ ID NO: 436122 - DNA, 75 bp, synthetic construct
  source 1..75: mol_type = other DNA
ggaaaccagcaaagggcaactgttgcagcaatttgtcagcgccggtaacgcgcttcttgtggcaaccagcagttt

SEQ ID NO: 436123 - DNA, 75 bp, synthetic construct
  source 1..75: mol_type = other DNA
aattgaggcactggcggatggcattatggatgccgggctggtatcggtgcgtgaacaggcgcgtccagcggcgca

SEQ ID NO: 436124 - DNA, 75 bp, synthetic construct
  source 1..75: mol_type = other DNA
gtcagttagcgaaagcgataccaggctttaagccgcgagaaccacagcgacagatggcggtagccgtcacccagg

SEQ ID NO: 436125 - DNA, 75 bp, synthetic construct
  source 1..75: mol_type = other DNA
caaaggcattgaaatacacgggcaacgtggcgttgctgaaagggcgctcaaactacctctgcctcgaacgtctcg

SEQ ID NO: 436126 - DNA, 75 bp, synthetic construct
  source 1..75: mol_type = other DNA
cccgcccggaaattcgctttctgatgcgacttgcgctccgtctggggcgcaccttatccgaactgcggcacagcc

SEQ ID NO: 436127 - DNA, 75 bp, synthetic construct
  source 1..75: mol_type = other DNA
gaaggacgccatgctctgctggggcgaggatgaggataagccggaggtggatccgtttgcggcgctggaagacgc

SEQ ID NO: 436128 - DNA, 75 bp, synthetic construct
  source 1..75: mol_type = other DNA
gcggctgctggacagactggaggaagaaatccgggcagaccgcgtgagcagtgaaagccgggcgtggcttgcgca

SEQ ID NO: 436129 - DNA, 75 bp, synthetic construct
  source 1..75: mol_type = other DNA
gtgccggtaacgcgcttcttgtggcaaccagtagtttctgggagggggtggacgtgcgtggcgatacattgtcat

SEQ ID NO: 436130 - DNA, 75 bp, synthetic construct
  source 1..75: mol_type = other DNA
tttctggcggatatggtggtaaaagaaagtgggtttggcgaactgatcccggaagcagatgtcatgatcttcgac

SEQ ID NO: 436131 - DNA, 75 bp, synthetic construct
  source 1..75: mol_type = other DNA
tctgtgtgccgcgtaacctgccgcaaactaatcaaccgggttccgcacggcaactggcagcaatgttgcgaccgc

SEQ ID NO: 436132 - DNA, 75 bp, synthetic construct
  source 1..75: mol_type = other DNA
ccatttcttctccccgtgatgttgcggtattaaagcagtggttctatttcatgagtgatgcgtcaatgctgaaac

SEQ ID NO: 436133 - DNA, 75 bp, synthetic construct
  source 1..75: mol_type = other DNA
atatgtggtggggatgggtgacggggggatatatgctgtatatgtcatgggattatgagtttaaatacagattac

SEQ ID NO: 436134 - DNA, 75 bp, synthetic construct
  source 1..75: mol_type = other DNA
atgggtgggtatactctgtatatgtcatggtattatgagtttaaatacagattgctgttctggtgtatttctctc

SEQ ID NO: 436135 - DNA, 75 bp, synthetic construct
  source 1..75: mol_type = other DNA
tatgacgtaaagcgcccaactcttgcggtagccagaatgaaagacctgattcgtcacattgttgatgggcatggt

SEQ ID NO: 436136 - DNA, 75 bp, synthetic construct
  source 1..75: mol_type = other DNA
gtgagaacacgacatctggtcggccttatttcgggagtactgattctttcagtattgctgcctgtcggcttaagc

SEQ ID NO: 436137 - DNA, 75 bp, synthetic construct
  source 1..75: mol_type = other DNA
ttgctctgttgctatccgtcattgtcgggagatggcagttactttttcacgttaaaggatgggacgtttttacgg

SEQ ID NO: 436138 - DNA, 75 bp, synthetic construct
  source 1..75: mol_type = other DNA
ggaaaaatgggattgcttgctgtttatacgggtgctgttttcatattatctcttccgttaaggaaggtgcgaaca

SEQ ID NO: 436139 - DNA, 75 bp, synthetic construct
  source 1..75: mol_type = other DNA
atgaaggtaattgagactccacttgctggttgtgtaatcattgagccaaaagtctttggtgactctcgtggtttc

SEQ ID NO: 436140 - DNA, 75 bp, synthetic construct
  source 1..75: mol_type = other DNA
tgcgcatggatttttggtgttgagtgaaacggcggagtttttgtataagacgacgaattattatcatccagagag

SEQ ID NO: 436141 - DNA, 75 bp, synthetic construct
  source 1..75: mol_type = other DNA
cgacaaattattatcatcctgagagtgaaagaggaattatttgggatgataaaaatataaatatccattggccta

SEQ ID NO: 436142 - DNA, 75 bp, synthetic construct
  source 1..75: mol_type = other DNA
ccgctcatccgcatcgaaacagacaacggcgagcgggagaaagcgcagcgccgcagcctggcggagaagctgcag

SEQ ID NO: 436143 - DNA, 75 bp, synthetic construct
  source 1..75: mol_type = other DNA
cgaataattattacaataaaaaaaatgaaagaaatattatttggaatgataatacaattgacattgattggcccg

SEQ ID NO: 436144 - DNA, 75 bp, synthetic construct
  source 1..75: mol_type = other DNA
agagaaagcgtccactccggcgcagcgccagcaggcgtctctggaagagcaaaacaacgatgcgttaagcccggc

SEQ ID NO: 436145 - DNA, 75 bp, synthetic construct
  source 1..75: mol_type = other DNA
gccatgaaagccggtgcctgccggtatgacacggaagggtatgtgacggagcatatttctcaggaggaggaagtg

SEQ ID NO: 436146 - DNA, 75 bp, synthetic construct
  source 1..75: mol_type = other DNA
atgtggtggacccatacacgatctgaaaccgttgttgtctgtggccaaaaagtcccgcaggtatgcctgctcaaa

SEQ ID NO: 436147 - DNA, 75 bp, synthetic construct
  source 1..75: mol_type = other DNA
aaaagcgttatcccgcaagcaaaagggaagcgcgaatcgtaaaaaggccagaatccgtctggcagcgttacacga

SEQ ID NO: 436148 - DNA, 75 bp, synthetic construct
  source 1..75: mol_type = other DNA
ttcacggcaagaaaaacgggaactggcgcagcgattaagtgacgatgtacgcgccaagcggaaaacgcggccacc

SEQ ID NO: 436149 - DNA, 75 bp, synthetic construct
  source 1..75: mol_type = other DNA
acggaatggctggcccagaaaaaggctaaccgtgaataccttaaggctatggaactggaagaccaggacacgggc

SEQ ID NO: 436150 - DNA, 75 bp, synthetic construct
  source 1..75: mol_type = other DNA
tgagcgccacgtattaacgcgtattgatagcgtgaacagtgtttaccagcctgacactgtgatgcccggcattct

SEQ ID NO: 436151 - DNA, 75 bp, synthetic construct
  source 1..75: mol_type = other DNA
ggggagacgcctgtccgcagccggaaaaccatcatcaatgtcaccacgccaccaaagtggaaggtgaaaaagcag

SEQ ID NO: 436152 - DNA, 75 bp, synthetic construct
  source 1..75: mol_type = other DNA
accatcatcaatgttaccacgccaccaaaatggaaggtgaaaaagcagaaactggcggagaaagcggcccgggaa

SEQ ID NO: 436153 - DNA, 75 bp, synthetic construct
  source 1..75: mol_type = other DNA
gccatcacccgttcagaaagctatctgtgtgccatgaaagccggtgcctgccggtatgacacggaagggtatgta

SEQ ID NO: 436154 - DNA, 75 bp, synthetic construct
  source 1..75: mol_type = other DNA
actatgcttcaattctctgtgatgatggtctggaagctccggtaaaacccacgttgatatcaacagttactggcc

SEQ ID NO: 436155 - DNA, 75 bp, synthetic construct
  source 1..75: mol_type = other DNA
ttttaatccgaagcggaaagcgcggttcccgacgtttaaacgtaaacacggaaaacaatcgagccatcactgtgt

SEQ ID NO: 436156 - DNA, 75 bp, synthetic construct
  source 1..75: mol_type = other DNA
acagaacatatcacacaggaagaagaacagtatgcgcaggcgcgcttggaaaaggtgcgcagacagaaccggatc

SEQ ID NO: 436157 - DNA, 75 bp, synthetic construct
  source 1..75: mol_type = other DNA
catgaaagccggtgcctgccggtatgacacggaagggtatgtgacggagcatatttctcaggaggaggaagcgta

SEQ ID NO: 436158 - DNA, 75 bp, synthetic construct
  source 1..75: mol_type = other DNA
tattgcagtactgatgctgctgaccgcgccgaaactgcaccgcatgacgcaggatgacgctgcagacaaagcggc

SEQ ID NO: 436159 - DNA, 75 bp, synthetic construct
  source 1..75: mol_type = other DNA
gctcggcgctattgtgctggcgattggttatgctctggttgcctggtctggtcacgacgccggtatcgtttatat

SEQ ID NO: 436160 - DNA, 75 bp, synthetic construct
  source 1..75: mol_type = other DNA
atcttctcgattgagttatgggaacgttttggttattacggcctacaaggaattatggctgtttacctggttaaa

SEQ ID NO: 436161 - DNA, 75 bp, synthetic construct
  source 1..75: mol_type = other DNA
ctttcagctcttttggtgtaagttgtcatagagaaaattcctttcggaaccctttccgagggaagaatgatgagg

SEQ ID NO: 436162 - DNA, 75 bp, synthetic construct
  source 1..75: mol_type = other DNA
cttcattatgggtagctggttcctgaccactgcgggtgcaaacctgattggcggttatgttgcagggatgatggc

SEQ ID NO: 436163 - DNA, 75 bp, synthetic construct
  source 1..75: mol_type = other DNA
gcgtgttcttgcagattggtgtcgccactgccgttatcgcagtgctgatgctgctgaccgcaccgaaactgcatc

SEQ ID NO: 436164 - DNA, 75 bp, synthetic construct
  source 1..75: mol_type = other DNA
gtcggtggggggcccggacgtaacgatggcatccctgcgcgagaagatgaacatcgcccaacaggaaggacaaca

SEQ ID NO: 436165 - DNA, 75 bp, synthetic construct
  source 1..75: mol_type = other DNA
cgaggctgaagaacagatctggtttgagcatcaacagcagcagtatggtgaaagccagcattgctttgcctggaa

SEQ ID NO: 436166 - DNA, 75 bp, synthetic construct
  source 1..75: mol_type = other DNA
tttcaatccgaaactgaaagcaggtaaacctacctttaaaagtaaacacggcagacaatcgagctatcattgtgt

SEQ ID NO: 436167 - DNA, 75 bp, synthetic construct
  source 1..75: mol_type = other DNA
ttgtgagccagagatatcaactaactcttgatgttaaggcagcacaaagttctattaatcatgtgataatgggga

SEQ ID NO: 436168 - DNA, 75 bp, synthetic construct
  source 1..75: mol_type = other DNA
accaggagattgataattactgttttcaaaaaaatgcaaaaatttccactgaagagaggcaaagagtcttttttc

SEQ ID NO: 436169 - DNA, 75 bp, synthetic construct
  source 1..75: mol_type = other DNA
ctcggcaccgataccggcatgagcccgactgaatacatcatgcaggcgctggctggctgttataccgccaccctc

SEQ ID NO: 436170 - DNA, 75 bp, synthetic construct
  source 1..75: mol_type = other DNA
ccagacaatttcattcgctcacgttctttgccggtctttgtattggcatcacgcctgtggctcaggcactcgccg

SEQ ID NO: 436171 - DNA, 75 bp, synthetic construct
  source 1..75: mol_type = other DNA
aatcgtggtcagcgcgccggatggcgcggtgttccgctacgacgcggacgcaggcgcactgagcgccagcggcat

SEQ ID NO: 436172 - DNA, 75 bp, synthetic construct
  source 1..75: mol_type = other DNA
aaacgaaatggtcatcaccgcaccggacggtgcagtgtttcgctataacgcacaggaaagcgcgctgactgcaac

SEQ ID NO: 436173 - DNA, 75 bp, synthetic construct
  source 1..75: mol_type = other DNA
agtgtctgggtgccgccagccaccggtgaacaggtggcgttcgtctgtatcggtggtaatcccgaaaccgcgata

SEQ ID NO: 436174 - DNA, 75 bp, synthetic construct
  source 1..75: mol_type = other DNA
gtatcaagcgtccaaaacgttttcacactctttccggcggtaaaccgcaggtcgaaggtgctgaagactacaccg

SEQ ID NO: 436175 - DNA, 75 bp, synthetic construct
  source 1..75: mol_type = other DNA
tgcttgaacgtcatggttatgccttcaatgagctggatctcggcaaacgcgagccggttaccgaggaagagaaac

SEQ ID NO: 436176 - DNA, 75 bp, synthetic construct
  source 1..75: mol_type = other DNA
ataattggcagcctgtggagtgatgccagtccggcccccggcaaaagcctgaaagaaatcgtggtcagcgcgccg

SEQ ID NO: 436177 - DNA, 75 bp, synthetic construct
  source 1..75: mol_type = other DNA
cctgcttgtgcgcgttgcgattggcgggcgtatctcactcatggtcggtgttgctgcggcactggtggcagtggt

SEQ ID NO: 436178 - DNA, 75 bp, synthetic construct
  source 1..75: mol_type = other DNA
gcgcgggctgctggctaatagaggaataccacaaggcgtggaaaagtggtggtacatgtgtggaatcgctgcgaa

SEQ ID NO: 436179 - DNA, 75 bp, synthetic construct
  source 1..75: mol_type = other DNA
ggctgattgccgatgccaaacctgcaagtcgtcaccttattggtctgaatattacccaggacatccccggttatc

SEQ ID NO: 436180 - DNA, 75 bp, synthetic construct
  source 1..75: mol_type = other DNA
gcatccgtcagcgtgacactggatacgcccgtcgtggaatgcacaaaccttctgagaacggcgacgcttgacgtc

SEQ ID NO: 436181 - DNA, 75 bp, synthetic construct
  source 1..75: mol_type = other DNA
cgtcacgttgatgccttttatcgctatgcagagcgtggcgccgcattcgttgtggtcgtttctgcagaaagcgga

SEQ ID NO: 436182 - DNA, 75 bp, synthetic construct
  source 1..75: mol_type = other DNA
aacaaagtcgcatccgatgaacgcagcgcaatgggatcacttccgtttctggttggcagtgttccggcggattaa

SEQ ID NO: 436183 - DNA, 75 bp, synthetic construct
  source 1..75: mol_type = other DNA
gagtcctttgccatagctcaaacggtgaaacctttcttggataaaattatgagaagtgattctttagataaaatc

SEQ ID NO: 436184 - DNA, 75 bp, synthetic construct
  source 1..75: mol_type = other DNA
atgtacgtttgtttgtgtaatggtgtaagtgacaaaaaaattcgccaggcagtccgtcagtttcatccgcaatct

SEQ ID NO: 436185 - DNA, 75 bp, synthetic construct
  source 1..75: mol_type = other DNA
ctctccgttctttaggatgcagttcttttagcaggtcctcctttctggggggaaggcaggagatcttgcagttct

SEQ ID NO: 436186 - DNA, 75 bp, synthetic construct
  source 1..75: mol_type = other DNA
atgcctgcgaatatatcaggaagctctttaggatgcagttcttttaggcaatcgtctatcctgggtcgaagggag

SEQ ID NO: 436187 - DNA, 75 bp, synthetic construct
  source 1..75: mol_type = other DNA
cttaattatctgcatgtcacccagcacaacacgccagacggcggcattccgaccatcggtttgccgggttattct

SEQ ID NO: 436188 - DNA, 75 bp, synthetic construct
  source 1..75: mol_type = other DNA
aaagagtttgaaattgagaccgggaaatccacctggctgttagggctggcaggtattaccgaaggggcgatcccg

SEQ ID NO: 436189 - DNA, 75 bp, synthetic construct
  source 1..75: mol_type = other DNA
cattcgcgccgcgcgcgaagtgatgcaggacgagttgatgcaggacgagttgatgcagatgccagaatttaaaga

SEQ ID NO: 436190 - DNA, 75 bp, synthetic construct
  source 1..75: mol_type = other DNA
acaagacgaaaaaaaagtctatccctctcgattagtcaatatgggaattgataagttttgcgctgaaaataatac

SEQ ID NO: 436191 - DNA, 75 bp, synthetic construct
  source 1..75: mol_type = other DNA
cagtcatgtaagcatggactccattgaatttatcgaaccgattactgaggaagaagatggacgagaacaagctca

SEQ ID NO: 436192 - DNA, 75 bp, synthetic construct
  source 1..75: mol_type = other DNA
gaatctgggctcatcgctcagccagggaacgtgggtaatcacttctttcggggtggcgaatgccatctcgatccc

SEQ ID NO: 436193 - DNA, 75 bp, synthetic construct
  source 1..75: mol_type = other DNA
acatataaatactaacatcgacataaaacgattgcagaatgacgtagaaagctatattttacgggcaaatgccat

SEQ ID NO: 436194 - DNA, 75 bp, synthetic construct
  source 1..75: mol_type = other DNA
tgcagcgcaaagctctataactcatattataaatggaaacggtttgtttggtgaaaaaacagcctacctttgtaa

SEQ ID NO: 436195 - DNA, 75 bp, synthetic construct
  source 1..75: mol_type = other DNA
actttggaataccactagatcctaaggcagcgcaaagctctataaatcatattataaatggaagcggctggtttg

SEQ ID NO: 436196 - DNA, 75 bp, synthetic construct
  source 1..75: mol_type = other DNA
cttttagattgagaaatctcggcctacctgtcatgaacaatttgcatgacatgtctaaggcgactcgcatatctg

SEQ ID NO: 436197 - DNA, 75 bp, synthetic construct
  source 1..75: mol_type = other DNA
aaggacagattgctgctgccagacagtcagcaggcattgccacggaaaggatgacagaagcgcataaacagctcc

SEQ ID NO: 436198 - DNA, 75 bp, synthetic construct
  source 1..75: mol_type = other DNA
gtctgcactggcagaggaaaccggtcggcgtactgcggatattgataataacctcaatgcgctgggcagtacgct

SEQ ID NO: 436199 - DNA, 75 bp, synthetic construct
  source 1..75: mol_type = other DNA
atccgggataacgctggctaaccgtgccggatggatagacacactgatgtcaccgaaaggcatgatgcttggcgg

SEQ ID NO: 436200 - DNA, 75 bp, synthetic construct
  source 1..75: mol_type = other DNA
tgagctggtctctcagtacacgccccgatgctgaactggtcaacactatgctggatagcgctgtcgaaacgttaa

SEQ ID NO: 436201 - DNA, 75 bp, synthetic construct
  source 1..75: mol_type = other DNA
ctgatgaggtcatggcgttcaattcacactgtggcaacggaattctacatggatggacgacggctcaagagttgt

SEQ ID NO: 436202 - DNA, 75 bp, synthetic construct
  source 1..75: mol_type = other DNA
tctgggtaaagcctggatggaggggcgggaagaaggcgaagcctttaaccggcagcttgagctcaccggacacta

SEQ ID NO: 436203 - DNA, 75 bp, synthetic construct
  source 1..75: mol_type = other DNA
gcgggaggagcaggttcaggcggctgcgctggctgcggcgcaggataagatggcagccgcattttatcgtcagat

SEQ ID NO: 436204 - DNA, 75 bp, synthetic construct
  source 1..75: mol_type = other DNA
tgccctgaaggtggtttatgacctcgggaaaaaagcagcagcggactttatgcaacagcagtcccgtgatggtgg

SEQ ID NO: 436205 - DNA, 75 bp, synthetic construct
  source 1..75: mol_type = other DNA
gcggataatgcggcaggcactgctgagcagatgcttacagcggcatttaacagtgcaggtaatgcactggcaacg

SEQ ID NO: 436206 - DNA, 75 bp, synthetic construct
  source 1..75: mol_type = other DNA
agccagtgcgctggctcaggcggttggcagcggtgcatttcgtggaggtgatatcgccatggtggcgaaagctgc

SEQ ID NO: 436207 - DNA, 75 bp, synthetic construct
  source 1..75: mol_type = other DNA
cccagcttgaacaaatccgtgttctcggggaacaggggcgtgccagtgatgctgcccggatcgccatgtcagcgc

SEQ ID NO: 436208 - DNA, 75 bp, synthetic construct
  source 1..75: mol_type = other DNA
atgaactgattcaggcactgacgctgctggatgtaaaacagcaggagcttcagaaacagacggcactcaacgagc

SEQ ID NO: 436209 - DNA, 75 bp, synthetic construct
  source 1..75: mol_type = other DNA
ggaactccaccacagagccagatacagcgatcacctggtggagttggtaactgaactgcgcgatgaacaggggat

SEQ ID NO: 436210 - DNA, 75 bp, synthetic construct
  source 1..75: mol_type = other DNA
acacagcgccggagctgacaaagcactttcagagaaccgagtcagcaatacgaagccgcatccgtcttttgctct

SEQ ID NO: 436211 - DNA, 75 bp, synthetic construct
  source 1..75: mol_type = other DNA
cgtgtttttagtttgtctccagaaagtctcaaggatggttctgaatctgcgtctttcaaccttggtggaaatcat

SEQ ID NO: 436212 - DNA, 75 bp, synthetic construct
  source 1..75: mol_type = other DNA
ataagcaaaattacccgtctgtgaggcgtgttttgtatcaaaaacaagggggaccggatgcacctgaagtaagcg

SEQ ID NO: 436213 - DNA, 75 bp, synthetic construct
  source 1..75: mol_type = other DNA
tagggcctaataattatcggtatttccgtttccgcgacctttgcaccctgacgcacagtgaaatcgttgagcgct

SEQ ID NO: 436214 - DNA, 75 bp, synthetic construct
  source 1..75: mol_type = other DNA
ggtatcggttcaggaaatacggggaactccaccacagaaccagatacagcgatcacctggtggagttggtaactg

SEQ ID NO: 436215 - DNA, 75 bp, synthetic construct
  source 1..75: mol_type = other DNA
aaaatgcatgacgccttattggattacatggacaaaattcgcgatccgttccgcagttatcaatggaacctgcgt

SEQ ID NO: 436216 - DNA, 75 bp, synthetic construct
  source 1..75: mol_type = other DNA
gtcagtcatattgatttactgccgacaatgatggcgctggcagatattgaaaaaccagagattctgccgggggaa

SEQ ID NO: 436217 - DNA, 75 bp, synthetic construct
  source 1..75: mol_type = other DNA
aaagttgtgagctggtctctcagtacacgccccgatgctgaactggtcaacactatgctggatagcgctgtcgaa

SEQ ID NO: 436218 - DNA, 75 bp, synthetic construct
  source 1..75: mol_type = other DNA
gttcttactcagcctcagaaatatggctatatgctgtttgatctcgcgcatgagttaggccatatcgccagaggg

SEQ ID NO: 436219 - DNA, 75 bp, synthetic construct
  source 1..75: mol_type = other DNA
ctccgccatctttaactcggcgcaatatttctcgctggcgctcttttcgcctctgcttggctggctgactttcgc

SEQ ID NO: 436220 - DNA, 75 bp, synthetic construct
  source 1..75: mol_type = other DNA
gctgggaggtgtcttctcggattatctgatcaaacgcggtttatccctgaccctggcacgtaagctaccgattgt

SEQ ID NO: 436221 - DNA, 75 bp, synthetic construct
  source 1..75: mol_type = other DNA
atggcgcagatggccatgatgcaggcggtgaaggggattggttcggcgtttggctgggggagtgctgccgctgcc

SEQ ID NO: 436222 - DNA, 75 bp, synthetic construct
  source 1..75: mol_type = other DNA
atgctgaaactggagagttttgccagtgaagaaacgcgccagcgccatccgttgtgtgtggacgtctggccgcgc

SEQ ID NO: 436223 - DNA, 75 bp, synthetic construct
  source 1..75: mol_type = other DNA
ttgcgcgatatccacactctgcaatgggtggcccgccgtcattttggcgcaacatcgctggatgaaatggtcggg

SEQ ID NO: 436224 - DNA, 75 bp, synthetic construct
  source 1..75: mol_type = other DNA
agacatcaaaagtagccctggcggcttgcgcgatatccacactctgcaatgggtggcccgccgtcattttggcgc

SEQ ID NO: 436225 - DNA, 75 bp, synthetic construct
  source 1..75: mol_type = other DNA
ctcaaccagatgctgctgcaactgttcgatgaagccatcctcgcccttcccgccgacgaaaaaccacgtccaatc

SEQ ID NO: 436226 - DNA, 75 bp, synthetic construct
  source 1..75: mol_type = other DNA
cggtggttatggtcgtggcgagctgcatccactttccgacatcgatttactgattttaagccgtaaaaagctccc

SEQ ID NO: 436227 - DNA, 75 bp, synthetic construct
  source 1..75: mol_type = other DNA
tttgacaatgggatctccgcagaacagttgattgaggcacgtaccgagttcatagaccagctcctgcaacgatta

SEQ ID NO: 436228 - DNA, 75 bp, synthetic construct
  source 1..75: mol_type = other DNA
taacgcttgaagtaaatcgcacatgtaccacaggagaacgcaacgctaacagcgcactttatggtgctgtctggc

SEQ ID NO: 436229 - DNA, 75 bp, synthetic construct
  source 1..75: mol_type = other DNA
tgcgttgctggcagaaatcaacgcggcacttgataaggtcaaagcctcgcccgaatacgcacaaatgcaagagaa

SEQ ID NO: 436230 - DNA, 75 bp, synthetic construct
  source 1..75: mol_type = other DNA
gtgttgactacaacaagccacgacagcgtatttctgcgtgccgataattccctgatcgacatgaactttatcacc

SEQ ID NO: 436231 - DNA, 75 bp, synthetic construct
  source 1..75: mol_type = other DNA
tggccccgtgatgaattaaccgtttgtgggataaaagcccatattgatactttccagcgttggctgggtgatgcc

SEQ ID NO: 436232 - DNA, 75 bp, synthetic construct
  source 1..75: mol_type = other DNA
atgaatacccttccagaacagtacgcaaacaccgctctccccaccctgcccggtcaaccgcaaaatccatgcgtc

SEQ ID NO: 436233 - DNA, 75 bp, synthetic construct
  source 1..75: mol_type = other DNA
aacgcgatccagtcggaaacggtggtgttcctcgtgtgctctgggaaatcaggagaatgagtaccactggtattc

SEQ ID NO: 436234 - DNA, 75 bp, synthetic construct
  source 1..75: mol_type = other DNA
taattgccaccgctgaccggcgtgcgcttaataacgagttgcagcaggaagtgcatcagcggttgacagaggccc

SEQ ID NO: 436235 - DNA, 75 bp, synthetic construct
  source 1..75: mol_type = other DNA
tggtttcctgggttgtatcgtttattcctcgccgcccggagcggagcgaaacggcacaaccatcggatcaggctt

SEQ ID NO: 436236 - DNA, 75 bp, synthetic construct
  source 1..75: mol_type = other DNA
gtttgaaccaccgaaaccaggaacaaccaagcctgagaagaagacaccgcctccgttgccgccttcctgccaggc

SEQ ID NO: 436237 - DNA, 75 bp, synthetic construct
  source 1..75: mol_type = other DNA
cagccacgtctttaacttcgatatgccgcgcagtggcgatacttatttgcaccgtatcggacgtaccgcgcgcgc

SEQ ID NO: 436238 - DNA, 75 bp, synthetic construct
  source 1..75: mol_type = other DNA
atggctcagatgtccatgatgcaggcagttaaggggattggttcggcgtttggctgggggagtgcagcaactgcc

SEQ ID NO: 436239 - DNA, 75 bp, synthetic construct
  source 1..75: mol_type = other DNA
gatcaccgttaccaataaccagatcctgaacattggcgttaatcagatacagacggttggtgtcaaccaggtgga

SEQ ID NO: 436240 - DNA, 75 bp, synthetic construct
  source 1..75: mol_type = other DNA
atgtgaaaaccaatgcagaaggtggtgtttatcagtctgctgatttgagtcgctacagtggcatggtggttaacc

SEQ ID NO: 436241 - DNA, 75 bp, synthetic construct
  source 1..75: mol_type = other DNA
tgtcggtcaccgcccagcgccgcgatattcaggatccggaagtcatcaaacaattcgccgaagaagtacaaacgg

SEQ ID NO: 436242 - DNA, 75 bp, synthetic construct
  source 1..75: mol_type = other DNA
ctgccgtcgccagagctgattttcattgccgcattgtttcacgatatcgccaaagggcgcggcggcgaccattcc

SEQ ID NO: 436243 - DNA, 75 bp, synthetic construct
  source 1..75: mol_type = other DNA
acctttatcgtgctggaacccgatggtagcccgctatccgcagatcgtcatgaggttattcggtttggtctggag

SEQ ID NO: 436244 - DNA, 75 bp, synthetic construct
  source 1..75: mol_type = other DNA
aaacatacgcatcttgatatcgccactatcaccggcggcgtggcctatatgaaccatgcggaagtgttcagcgaa

SEQ ID NO: 436245 - DNA, 75 bp, synthetic construct
  source 1..75: mol_type = other DNA
atactcggcgcacaagacgtggtaaattttgctgaactccacgggctgaactcgcgcgaaacgcaactggtggcc

SEQ ID NO: 436246 - DNA, 75 bp, synthetic construct
  source 1..75: mol_type = other DNA
actaacgaaacgctgtggaatagctggaagcagagtctgttgcgcgaactctattttgccaccgaaaaacagcta

SEQ ID NO: 436247 - DNA, 75 bp, synthetic construct
  source 1..75: mol_type = other DNA
atcctcagtgatatctaccagcaaacgatcaattatgtggtcagtggtcagtggtcagcaccctacgctttaagg

SEQ ID NO: 436248 - DNA, 75 bp, synthetic construct
  source 1..75: mol_type = other DNA
tgtcgatctgaatgctacacaagcagctattcgcgcaggctacgtctccaggcgagcacatgttacgggggctga

SEQ ID NO: 436249 - DNA, 75 bp, synthetic construct
  source 1..75: mol_type = other DNA
ggagcacaatgcgctaaaacagctggtgaccaaacttgcggcggcaacgggggaaccagcaaacagatctggcaa

SEQ ID NO: 436250 - DNA, 75 bp, synthetic construct
  source 1..75: mol_type = other DNA
tgttctgtcgcgagtacctcatcgatttaaacgccacacaggcggctattcgtgcggggtacagcgcaaagacag

SEQ ID NO: 436251 - DNA, 75 bp, synthetic construct
  source 1..75: mol_type = other DNA
tctcacgagctaaccggcaaagacggcggcgcaatccagattgaaacatcaccgatgagcactctattcggaaaa

SEQ ID NO: 436252 - DNA, 75 bp, synthetic construct
  source 1..75: mol_type = other DNA
tgttctgtcgcgagtacctcatcgatttaaatgccacgcaagcggctattcgggcggggtacagcgcaaagacag

SEQ ID NO: 436253 - DNA, 75 bp, synthetic construct
  source 1..75: mol_type = other DNA
ctgccgccaattgacgtcagtcagtatggcaaagatcaggttcgtgagctggctgcccattgtcgttcgataatg

SEQ ID NO: 436254 - DNA, 75 bp, synthetic construct
  source 1..75: mol_type = other DNA
gaagcgcgcgccatgcttccggcatcccgtctggtctttgttgcccgtatccgtgtccgggaggcgtgccatgtt

SEQ ID NO: 436255 - DNA, 75 bp, synthetic construct
  source 1..75: mol_type = other DNA
gggctgacggaaaagcgtactcaagacacatccctgaaatcagtgaatatatttatgagattaaaataaaatctg

SEQ ID NO: 436256 - DNA, 75 bp, synthetic construct
  source 1..75: mol_type = other DNA
tcagagcttaagccaacaaaataccccgacgctggaatcgcttcagatggcgctaaagaaaccgctggataccaa

SEQ ID NO: 436257 - DNA, 75 bp, synthetic construct
  source 1..75: mol_type = other DNA
atggcaaggatttccataccgatacgccgcagcgcaacaccccgttcacgcttaagggatgcggcgcgcttgact

SEQ ID NO: 436258 - DNA, 75 bp, synthetic construct
  source 1..75: mol_type = other DNA
gcccccctgttcccgctcgccgatgtgctgatgtgtacacgcggtattctgcgcagcgtggtgccgcctgccact

SEQ ID NO: 436259 - DNA, 75 bp, synthetic construct
  source 1..75: mol_type = other DNA
ggcatgaaatccattctgacggtattcagaacgctgtcagaacagtcaaaaggtgcacaggccagtgcgatgaac

SEQ ID NO: 436260 - DNA, 75 bp, synthetic construct
  source 1..75: mol_type = other DNA
tgaagcattccgcgaaaccgtaatcattggcaaacgcgtgcacgcaagtagcatggcgtttatcacaagcgaaaa

SEQ ID NO: 436261 - DNA, 75 bp, synthetic construct
  source 1..75: mol_type = other DNA
gcctcggttccggtaacgcaggtgccgcaaacggtctggagtttgacgtcatcgccgcggtcgtggtcggcggta

SEQ ID NO: 436262 - DNA, 75 bp, synthetic construct
  source 1..75: mol_type = other DNA
ccgttggcctatctctgtgggatttatccccattcctcatggcccattatcgtggcgaacactatttttctttcc

SEQ ID NO: 436263 - DNA, 75 bp, synthetic construct
  source 1..75: mol_type = other DNA
attcgtccgcgttttgaatccgtcgatccatttaaagacgtaagcgccgagattgctttaattgataaaggactt

SEQ ID NO: 436264 - DNA, 75 bp, synthetic construct
  source 1..75: mol_type = other DNA
atgtttaatctttttcgacgcaaaaaggcggtagaaactccagttaaaactaatcaccgccagcaacaacaaaaa

SEQ ID NO: 436265 - DNA, 75 bp, synthetic construct
  source 1..75: mol_type = other DNA
agatcgcttaattgataccgttattctaccgttattccaagcattccttgaacatgcggtgattaattcgaaact

SEQ ID NO: 436266 - DNA, 75 bp, synthetic construct
  source 1..75: mol_type = other DNA
cacggcctgcaccattacctttacccggtaaatccggtcttctgagcaggcttgcaggcagtgctgccgggcaac

SEQ ID NO: 436267 - DNA, 75 bp, synthetic construct
  source 1..75: mol_type = other DNA
ttttgtgactgacctgtatcagaaatggacggccccggaaagggaaccgcaggagcaaaaagtgaatgcggaagc

SEQ ID NO: 436268 - DNA, 75 bp, synthetic construct
  source 1..75: mol_type = other DNA
gtttacaaggtgctggcagatgcaaccggtgatgatgaaaagaaaatccgcaaacggggtgagaaaggcaaacta

SEQ ID NO: 436269 - DNA, 75 bp, synthetic construct
  source 1..75: mol_type = other DNA
gtggagctaaatgacccgacagcaactataaatgcgctgttatgtgcttgtgttgttattactctgatgttttat

SEQ ID NO: 436270 - DNA, 75 bp, synthetic construct
  source 1..75: mol_type = other DNA
ggataaggaaccgcaggagcaaaaagtgaatgcggaagcctcgctgcgcgtcgaacttggcgaggggttacgtct

SEQ ID NO: 436271 - DNA, 75 bp, synthetic construct
  source 1..75: mol_type = other DNA
ctcggcggtgccgttggcagccttgccggaccgctgggtacggttgccggtgccacgctgggcagtgtcgccggg

SEQ ID NO: 436272 - DNA, 75 bp, synthetic construct
  source 1..75: mol_type = other DNA
agtaaggagtatgcgaatataaattcgttttggaatgaccttggatttccaggaaaggggtatcaggatggacga

SEQ ID NO: 436273 - DNA, 75 bp, synthetic construct
  source 1..75: mol_type = other DNA
gtcatggatgatctggaccgactggagccatcccaggtggcggaagtgttcaggcttgtgcgtgcagtagccgac

SEQ ID NO: 436274 - DNA, 75 bp, synthetic construct
  source 1..75: mol_type = other DNA
atcttcgtcgacgtcagcatcgactgctttgacggtgacggcatatacattttcgttctggacaatgatctctac

SEQ ID NO: 436275 - DNA, 75 bp, synthetic construct
  source 1..75: mol_type = other DNA
ttaccggttaaaagagaaacgtaaagctggagtgctgaccaaaaacacaacgccaatcagtgatgatgaaatggt

SEQ ID NO: 436276 - DNA, 75 bp, synthetic construct
  source 1..75: mol_type = other DNA
aacatggtcgggcgctgtgctttccccctgtttgtgctggtctgtggctgcaacatggcgggtaaaaccttacgt

SEQ ID NO: 436277 - DNA, 75 bp, synthetic construct
  source 1..75: mol_type = other DNA
aattcaagtctggccgcaacagcgaagtgaaagacgcaaaaaccgaacagcattgggtaccgccattatctcagg

SEQ ID NO: 436278 - DNA, 75 bp, synthetic construct
  source 1..75: mol_type = other DNA
cttcgccgttctggatagccgattttatgcgggatcttatctgggaacatggacttgctcagaatgcagtacctt

SEQ ID NO: 436279 - DNA, 75 bp, synthetic construct
  source 1..75: mol_type = other DNA
agatgtttacagcggcatttaacagtgcaggtaatgcactggcgacgttctgtaccaccggaaaactgaacttca

SEQ ID NO: 436280 - DNA, 75 bp, synthetic construct
  source 1..75: mol_type = other DNA
gaacaggcaactgaatgagaatcgccgttactggcaacagcttgaaattgctcagggtaactggaaaaacggtgc

SEQ ID NO: 436281 - DNA, 75 bp, synthetic construct
  source 1..75: mol_type = other DNA
gatacaacgtgaaaatgaacgttacgagaaagccctggcatccggtaagaaaaaaacacgcgaaacccgtaatga

SEQ ID NO: 436282 - DNA, 75 bp, synthetic construct
  source 1..75: mol_type = other DNA
atcgcctgaaaatggagcatctgagttatcacgttgaaagcctgctggaacaggcagctaaaaaagagctgatgt

SEQ ID NO: 436283 - DNA, 75 bp, synthetic construct
  source 1..75: mol_type = other DNA
attcagttgctcgtgatggggataacgacattaatgctgtttttgtctctgaacgttaaggtagtagtcatcatt

SEQ ID NO: 436284 - DNA, 75 bp, synthetic construct
  source 1..75: mol_type = other DNA
gataatacggcaggaacagcagaacaggtgttctcgtcagccttcagcaacatgggaaatggcctggcaactttt

SEQ ID NO: 436285 - DNA, 75 bp, synthetic construct
  source 1..75: mol_type = other DNA
gctccgtttgctggcaccgtgaaagagatcaaagtgaacgtgggtgacaaagtgtctaccggctcgctgattatg

SEQ ID NO: 436286 - DNA, 75 bp, synthetic construct
  source 1..75: mol_type = other DNA
tggatatcgccacggtgggtatgggtgatcagcagcgacagcgatatcaggtacaactgagtcttcgccagaaat

SEQ ID NO: 436287 - DNA, 75 bp, synthetic construct
  source 1..75: mol_type = other DNA
cagtgaagtcatttgctctcgcgcatatgtaacgatgtttcaggaatttggtattacgctcgatcctgaagaggt

SEQ ID NO: 436288 - DNA, 75 bp, synthetic construct
  source 1..75: mol_type = other DNA
tgacgctggaatcaatagcgaagtggccgttaattacttaccgacaggggattacggggcgctcacgtattgatg

SEQ ID NO: 436289 - DNA, 75 bp, synthetic construct
  source 1..75: mol_type = other DNA
tggctttaataccagcattaagcctgtcggtattttctgctggcgtatatgcagcagacgcctctggaattaatg

SEQ ID NO: 436290 - DNA, 75 bp, synthetic construct
  source 1..75: mol_type = other DNA
ccggttgctgttgcagtacagtcagcagcaggcgcaggtggaggggcagatcgccgccgccagacagtccgcggg

SEQ ID NO: 436291 - DNA, 75 bp, synthetic construct
  source 1..75: mol_type = other DNA
catgcgggcgtttcagaattttacggcagatgcggataatgcggcaggaactgctgaacaaatgtttacatcggc

SEQ ID NO: 436292 - DNA, 75 bp, synthetic construct
  source 1..75: mol_type = other DNA
cgccggtcggcaggagtgggagcgaagacttacggcgatggcgaaccgcagacgggggagtccggggtttaaact

SEQ ID NO: 436293 - DNA, 75 bp, synthetic construct
  source 1..75: mol_type = other DNA
tgatggaacatcagtaagtgaagataccaccctgtataaactggatgagggatctgttgaggggttagcgctggc

SEQ ID NO: 436294 - DNA, 75 bp, synthetic construct
  source 1..75: mol_type = other DNA
acccgtactaataactctatcgcttccagccatattctggctctgaactacgatcactggcactactctgtcgta

SEQ ID NO: 436295 - DNA, 75 bp, synthetic construct
  source 1..75: mol_type = other DNA
tgcaggactgttagttgaggatatcaagcggcaggtgatggaaagcagtgaagaggaaattgattatcagatata

SEQ ID NO: 436296 - DNA, 75 bp, synthetic construct
  source 1..75: mol_type = other DNA
ttttcacttacaccatcagttgataatatattgcatttttttgcggcttacaaagcattaaaaaataatgtccaa

SEQ ID NO: 436297 - DNA, 75 bp, synthetic construct
  source 1..75: mol_type = other DNA
ttactgaaaaggtttatttttccataacgttaacccgctgtggtagtgatgttggcaacgcttatataaagttta

SEQ ID NO: 436298 - DNA, 75 bp, synthetic construct
  source 1..75: mol_type = other DNA
ctcacccagggacaggctaacgcactgggccgccgtgctggtgagccaccattgccactcgatcgccagcgcgcg

SEQ ID NO: 436299 - DNA, 75 bp, synthetic construct
  source 1..75: mol_type = other DNA
actggtttcacccggctgcaggaaaacttcaactacagcgttgcagggctcgcaggattcgtccgcgccgggcga

SEQ ID NO: 436300 - DNA, 75 bp, synthetic construct
  source 1..75: mol_type = other DNA
tgattatcaatggtggccggaacggcatcgacgaccggcgcgcgcggtacgttactgccagtaaggtgctggccg

SEQ ID NO: 436301 - DNA, 75 bp, synthetic construct
  source 1..75: mol_type = other DNA
gggttcagcatgtccagattattcgcgagcgagatgggcagaaggaagttgttcgagtctatgatgaagatggcg

SEQ ID NO: 436302 - DNA, 75 bp, synthetic construct
  source 1..75: mol_type = other DNA
ttcattttgacccaataaatactgttttcctgtcaattaatggcacaattggaaatgtttccttttacaataatg

SEQ ID NO: 436303 - DNA, 75 bp, synthetic construct
  source 1..75: mol_type = other DNA
atttcaactacagcgtcaccggactggctaacttcgttcgtgccggtcgtctcactcagggacaagccaacgcac

SEQ ID NO: 436304 - DNA, 75 bp, synthetic construct
  source 1..75: mol_type = other DNA
tctgcgatgaaagagtttggtatcagcaaaccagaagatcaggcaatgtttattgctcaggtcgggcatgagtct

SEQ ID NO: 436305 - DNA, 75 bp, synthetic construct
  source 1..75: mol_type = other DNA
taccgctgagcttaccgctgagcttaccgctgagcttaacatgcgtaaaaaacaatacaactactatcgcgacca

SEQ ID NO: 436306 - DNA, 75 bp, synthetic construct
  source 1..75: mol_type = other DNA
gtacaaatactatcacccctatgagcccgtcggatattattgttggactttataacaatactattaaattaaatt

SEQ ID NO: 436307 - DNA, 75 bp, synthetic construct
  source 1..75: mol_type = other DNA
ggctaacttcgttcgggctgggcgtctcactcaggggcaggctaatgcactgggtcgccgtgctggtgaaccacc

SEQ ID NO: 436308 - DNA, 75 bp, synthetic construct
  source 1..75: mol_type = other DNA
cggctcgtagcgcggcgtggttctttgccagcaaaggatgcatgaagtataccggcgatattgcacgtgtaactc

SEQ ID NO: 436309 - DNA, 75 bp, synthetic construct
  source 1..75: mol_type = other DNA
ggaggatttacccggttacaggaaaacttcaactacagcgttaatggactgtccgggtttatccgtgccggacgc

SEQ ID NO: 436310 - DNA, 75 bp, synthetic construct
  source 1..75: mol_type = other DNA
accccggagttcctggcgatgagcgggaaggtgaacgacatcgaacgtgaggggaatgcgctgctgaaagagcag

SEQ ID NO: 436311 - DNA, 75 bp, synthetic construct
  source 1..75: mol_type = other DNA
aacgcaattactgaagaatatctccgccaggggggaggtgaattgtctctgacaccaggcaaggactggaacaat

SEQ ID NO: 436312 - DNA, 75 bp, synthetic construct
  source 1..75: mol_type = other DNA
aactgcgccaccgactcagcattttcgataccctggaacgccgggcattgctggcggcacaggaagcgttgagta

SEQ ID NO: 436313 - DNA, 75 bp, synthetic construct
  source 1..75: mol_type = other DNA
tgatgctgatactccgtacccaccggaaccgaagctgatgcagttcaggcttaagggctgtcaggacacgctttt

SEQ ID NO: 436314 - DNA, 75 bp, synthetic construct
  source 1..75: mol_type = other DNA
accggagcaactcatgcccgttgtcttttcgacagagcgaaacagcaggacgctgaatctgctgttgtgcaaagg

SEQ ID NO: 436315 - DNA, 75 bp, synthetic construct
  source 1..75: mol_type = other DNA
cgccggaaggaacaggaatatgacgcacggctgaaacaccatgataaccatcgcctgagccgtgaaacggcatta

SEQ ID NO: 436316 - DNA, 75 bp, synthetic construct
  source 1..75: mol_type = other DNA
aaggcgtcgacaaggagctatacaccgcagaaaacctatcgtgactctcgttggcaagaacgagatgagttattt

SEQ ID NO: 436317 - DNA, 75 bp, synthetic construct
  source 1..75: mol_type = other DNA
gttctggtttcaaagaagaacaataaaatagtctgtgttattgagctggatgacccgagtcatgaaagggcggat

SEQ ID NO: 436318 - DNA, 75 bp, synthetic construct
  source 1..75: mol_type = other DNA
ttgccgggaatgtcatcaggcattgcacaacgacagaaagggatgggaggagaggaacggcagccagctactgtg

SEQ ID NO: 436319 - DNA, 75 bp, synthetic construct
  source 1..75: mol_type = other DNA
gttctggtttcaaagaagaacaacaaaatagtctgtgttattgagctggatgatccgagtcatgaaagggcagat

SEQ ID NO: 436320 - DNA, 75 bp, synthetic construct
  source 1..75: mol_type = other DNA
gataatctggagaaatggtttggacattattgtcatatccattgccaggtctctctggggcgcttgatcaacttt

SEQ ID NO: 436321 - DNA, 75 bp, synthetic construct
  source 1..75: mol_type = other DNA
gtacaaatactatcacccctatgagcccgtcggatattattgttggactttataacgatactattaaatttacat

SEQ ID NO: 436322 - DNA, 75 bp, synthetic construct
  source 1..75: mol_type = other DNA
tcgtctgttcatgatgttcgcgtctccggcagatatgactcttgaatggcaggagtctggcgttgaaggggctaa

SEQ ID NO: 436323 - DNA, 75 bp, synthetic construct
  source 1..75: mol_type = other DNA
ccggtgattctgccggaagacgtggtgatggacggcattaccagcccgattaaagcagatcctgagtgggcgaaa

SEQ ID NO: 436324 - DNA, 75 bp, synthetic construct
  source 1..75: mol_type = other DNA
aattccggtttgggcagcaaacttcgtattgatggaatatggcaccggcgcagtcatggcggttccgggtcacga

SEQ ID NO: 436325 - DNA, 75 bp, synthetic construct
  source 1..75: mol_type = other DNA
atcgtgaaagcgaaagacgcggcaggccatgaactggtttataccggcatgagcaaaatgtccaagtcgaagaac

SEQ ID NO: 436326 - DNA, 75 bp, synthetic construct
  source 1..75: mol_type = other DNA
tggcggtagcggcgggtcatccgctggcacagaaagcggcagaaaataatcctgaactggcgtcctttatcgacg

SEQ ID NO: 436327 - DNA, 75 bp, synthetic construct
  source 1..75: mol_type = other DNA
gcaagccctgactgaaaaaggcgtgctgttcaactctggcgagttcaacggtcttgaccatgaagcggccttcaa

SEQ ID NO: 436328 - DNA, 75 bp, synthetic construct
  source 1..75: mol_type = other DNA
cgttggtcgccgcgcgcgcgtgcagccgggcgtgcgtaacctggcgatctcccaggccgttgcgccgcataatct

SEQ ID NO: 436329 - DNA, 75 bp, synthetic construct
  source 1..75: mol_type = other DNA
ggacggcgtggagtctgacgtacaggaagactgcgagcgggttaacgacatcttgttgaaagcgggtgcgactga

SEQ ID NO: 436330 - DNA, 75 bp, synthetic construct
  source 1..75: mol_type = other DNA
ctcggtagaaaaagccggacttgcagttggtgacatcatcgccaatggcattatccccggcgggctggagatgat

SEQ ID NO: 436331 - DNA, 75 bp, synthetic construct
  source 1..75: mol_type = other DNA
tgcaggtgcttttggtctgggtaaatcgcgcggtactaatatcgctgagacaaaagcggaccagcaacgcactga

SEQ ID NO: 436332 - DNA, 75 bp, synthetic construct
  source 1..75: mol_type = other DNA
tcaccagagaggccagtaatgtacagcagaaagttaatcatatgcctggcgacgacgttgatcgcgagctgcgca

SEQ ID NO: 436333 - DNA, 75 bp, synthetic construct
  source 1..75: mol_type = other DNA
tgcattcggcgcatttggttttggtcgtatgaaggggcgagaaaaggccgaagatgaagctgaaaagcagcgcat

SEQ ID NO: 436334 - DNA, 75 bp, synthetic construct
  source 1..75: mol_type = other DNA
taactttggccgtactgctgccacggtactgaccgaagaaatctgcaacccggtactgacgcaggctgggacgga

SEQ ID NO: 436335 - DNA, 75 bp, synthetic construct
  source 1..75: mol_type = other DNA
cgtctggcaaaaatcgccaaagcattgggtaacaatattaatggcacgccggtcaactataaggtttatatgacc

SEQ ID NO: 436336 - DNA, 75 bp, synthetic construct
  source 1..75: mol_type = other DNA
attgccacttgagcgccagagagcgattgccaatctggtgtacagcaaacgcatggggaacaatgcccccggcga

SEQ ID NO: 436337 - DNA, 75 bp, synthetic construct
  source 1..75: mol_type = other DNA
tccgtcataacctcattatgccggataactttggccgtactgctgccacagtgctgaccgaagaaatctgcaacc

SEQ ID NO: 436338 - DNA, 75 bp, synthetic construct
  source 1..75: mol_type = other DNA
tttgatctgttgaagaaacgtggcatcagcacccaggggctggtcggtagctttgaaaaactggccagcctggat

SEQ ID NO: 436339 - DNA, 75 bp, synthetic construct
  source 1..75: mol_type = other DNA
caggtctgaatgcttataaagccgcaacattaagcgatgctgatgctaaagcaatcgccaatcagggctgtgccg

SEQ ID NO: 436340 - DNA, 75 bp, synthetic construct
  source 1..75: mol_type = other DNA
aaatggacagcggcaacaaagtcgctagcaaatccagcaagtacggtaaacgtctggcaaaaatcgccaaagcat

SEQ ID NO: 436341 - DNA, 75 bp, synthetic construct
  source 1..75: mol_type = other DNA
tgccgacgcggatttatccgcctttatcgaaccactggacacactttgggaaattgtcgccaaccaggacattcc

SEQ ID NO: 436342 - DNA, 75 bp, synthetic construct
  source 1..75: mol_type = other DNA
acgcgaactgaagaagctggcggcgcaaccggaagcgacagcacaaccggagcctgtgccggttgtcgtagagaa

SEQ ID NO: 436343 - DNA, 75 bp, synthetic construct
  source 1..75: mol_type = other DNA
gggatacctcattcgcgtgtctgagtggtgggagttcgacggcgaacccggaacattcaaggttgatgttggcac

SEQ ID NO: 436344 - DNA, 75 bp, synthetic construct
  source 1..75: mol_type = other DNA
attgccgaaggccgtacgctgaaaggccacaaaatcggcctgacctcgaaagcgatgcaggccagctcgcagatc

SEQ ID NO: 436345 - DNA, 75 bp, synthetic construct
  source 1..75: mol_type = other DNA
cagcgatatcccgaccgatcgctttatcgtgccgcgcattgaagtggagctggctttcgtgctggcaaaaccgct

SEQ ID NO: 436346 - DNA, 75 bp, synthetic construct
  source 1..75: mol_type = other DNA
gtgtgaaacgcgagattgcaaccctttcccgcgccctgaaaaaagccgattccgcagccgcaccagaagacgcca

SEQ ID NO: 436347 - DNA, 75 bp, synthetic construct
  source 1..75: mol_type = other DNA
agccccgcaaatttcaaactattcgtaaaatcaaataatggcggcgctgagaacataatgttgcgtaatgaggct

SEQ ID NO: 436348 - DNA, 75 bp, synthetic construct
  source 1..75: mol_type = other DNA
gttttgccccgggcctgattgtcggctttctctgtgggcaaatccataccggatttattggcggtatgttgggta

SEQ ID NO: 436349 - DNA, 75 bp, synthetic construct
  source 1..75: mol_type = other DNA
cactttgcaattgggcaaaaataaaagatatcactgaacaatggttaactgaggaaaatatagatcttgataaat

SEQ ID NO: 436350 - DNA, 75 bp, synthetic construct
  source 1..75: mol_type = other DNA
aagcgctggagcaggggatcgatgcgatggtttcctcctggaaccgcgcagcaccaaacaccatcccgacggcgg

SEQ ID NO: 436351 - DNA, 75 bp, synthetic construct
  source 1..75: mol_type = other DNA
ctacgactcgcacaaaggaccggttgtattccgccatcgtgagcatatgcagcgtctgcatgactccgccaaaat

SEQ ID NO: 436352 - DNA, 75 bp, synthetic construct
  source 1..75: mol_type = other DNA
tttggttcaatggggagatggttcgctgggaagacgcgaaggtgcatgtgatgtcgcacgcgctgcactatggca

SEQ ID NO: 436353 - DNA, 75 bp, synthetic construct
  source 1..75: mol_type = other DNA
aagttctgaaagcgtcagagggtgttctgagtgaaccggagcagcctatcgaaattcagaaagataagcgcaaga

SEQ ID NO: 436354 - DNA, 75 bp, synthetic construct
  source 1..75: mol_type = other DNA
gcttaccggtaattcagcaccggcagaacaatctttatgccacgtatactccggatgttcacttatcagcggtca

SEQ ID NO: 436355 - DNA, 75 bp, synthetic construct
  source 1..75: mol_type = other DNA
tgcatcacttgttgccagaacatcaacggaaacacgtgcgcgaaatattgcatttaactttatcgtgagggctgc

SEQ ID NO: 436356 - DNA, 75 bp, synthetic construct
  source 1..75: mol_type = other DNA
tcgcggtttagcgtaaatgatttgacactttgcaattgggcaaaaataaaagatatcactgaacaatggttaact

SEQ ID NO: 436357 - DNA, 75 bp, synthetic construct
  source 1..75: mol_type = other DNA
tggccgataccaaaaaaacattgaaaaacttgaatcagaaaatatggacctaagaagaaaactcggtgaagcacg

SEQ ID NO: 436358 - DNA, 75 bp, synthetic construct
  source 1..75: mol_type = other DNA
caaaatcagaagtgaataatcagctccgaacctttgctcaactggcactggataaatccgagctggtcattcgct

SEQ ID NO: 436359 - DNA, 75 bp, synthetic construct
  source 1..75: mol_type = other DNA
gctgccgggtattacccgtgatgccatcatcaaactggcgaaagagctgggaattgaagtgcgtgagcaggtgct

SEQ ID NO: 436360 - DNA, 75 bp, synthetic construct
  source 1..75: mol_type = other DNA
tagttactgctgatagtgccaacaacaccagccaactcaaaaacagaatattttatgtcaaagataaattattag

SEQ ID NO: 436361 - DNA, 75 bp, synthetic construct
  source 1..75: mol_type = other DNA
accatttgaatgtatctaaaagcaccatggcaaacagatatttacgagacactttcccagctgattggatcataa

SEQ ID NO: 436362 - DNA, 75 bp, synthetic construct
  source 1..75: mol_type = other DNA
ggcagcaagcacagttctctcacaacattggtaaaagagctgcctaaatttcatctcaatgcaggaaaaatggtt

SEQ ID NO: 436363 - DNA, 75 bp, synthetic construct
  source 1..75: mol_type = other DNA
cgcagcagccgctggtacaaaagtgaagtggagcagtggatgcagcagcgaattgaggaatcacgaggagaatga

SEQ ID NO: 436364 - DNA, 75 bp, synthetic construct
  source 1..75: mol_type = other DNA
acgaagatggagaagatgctttcattcgtattggttctatcgctatggtgcgagtcgcgcttgacgcgttagaac

SEQ ID NO: 436365 - DNA, 75 bp, synthetic construct
  source 1..75: mol_type = other DNA
gagaagatgcttttatccgtattgggtctattgcgatggtgcgggtcgcgcttgacgcgttagaacctgtggaag

SEQ ID NO: 436366 - DNA, 75 bp, synthetic construct
  source 1..75: mol_type = other DNA
atatgcatgtacgattacgttgtcctgccgatagtctggagtgtgaagatcaacctttaccgccaccgggcgatg

SEQ ID NO: 436367 - DNA, 75 bp, synthetic construct
  source 1..75: mol_type = other DNA
ccggaacaacggcaaggattatggctctatcacgttatcgaaccggatcgctgggctgctatgtgcgcacgagtc

SEQ ID NO: 436368 - DNA, 75 bp, synthetic construct
  source 1..75: mol_type = other DNA
gcaccgaacaccatcccgacggcggcaaaagccggtggtaactacctctcttccctgctggttggcagcgaagca

SEQ ID NO: 436369 - DNA, 75 bp, synthetic construct
  source 1..75: mol_type = other DNA
aagtaaagaaacttactttgaatgtgcattttctgatatcgaggtagttgcatgcataagaagcacaatcatttc

SEQ ID NO: 436370 - DNA, 75 bp, synthetic construct
  source 1..75: mol_type = other DNA
ggtgctgattggcgatatgggaatgcctgctggtgggcgtttcaatggcggtcacgccagtcatcagaccggact

SEQ ID NO: 436371 - DNA, 75 bp, synthetic construct
  source 1..75: mol_type = other DNA
agctcttgcgcccgcaagcactggacttagtatcccgcgacggtaaacacgttgtccccgcgctgtggaagccag

SEQ ID NO: 436372 - DNA, 75 bp, synthetic construct
  source 1..75: mol_type = other DNA
tcagcattatcaaaatcagcttaacggtgctggtgataggttatgcactcggcaaaattgcgatgttgttcagtt

SEQ ID NO: 436373 - DNA, 75 bp, synthetic construct
  source 1..75: mol_type = other DNA
ttcccggatgatataccggatgaacaggagaatgacctgggatgccgggatatcccgtcctggcgacgaatatgt

SEQ ID NO: 436374 - DNA, 75 bp, synthetic construct
  source 1..75: mol_type = other DNA
gctcggccgatcagaatacagctcgtcaggaagaggcattgtcaaaggcgggctttcagccggataaaatttgtg

SEQ ID NO: 436375 - DNA, 75 bp, synthetic construct
  source 1..75: mol_type = other DNA
agccgacgcatatcgttgtaccggtcgggctggaaaaagccgcagagcaactgcttaaccgtgagctgttcgcgg

SEQ ID NO: 436376 - DNA, 75 bp, synthetic construct
  source 1..75: mol_type = other DNA
acgcagtggtgctgaccacggaagagggcggtattttctggtgtaacggtctggcgcaacagattcttggtttgc

SEQ ID NO: 436377 - DNA, 75 bp, synthetic construct
  source 1..75: mol_type = other DNA
gtggctttaccatgttctggagccggaaacgtggagccggatgtgtgagcgggtgtcaggagcagtcagtggggc

SEQ ID NO: 436378 - DNA, 75 bp, synthetic construct
  source 1..75: mol_type = other DNA
tggatatataacgccagaacccgtgccatctacaatcccctgtatgacctgatgtaccgtgccggagtgccgtta

SEQ ID NO: 436379 - DNA, 75 bp, synthetic construct
  source 1..75: mol_type = other DNA
gaatgtgaaacgccagtgcgtaaggcgaagcatggtgattccagtggcgtacgcggcgccgcgtggttatggccg

SEQ ID NO: 436380 - DNA, 75 bp, synthetic construct
  source 1..75: mol_type = other DNA
cgcaatgtgggctacggcttctggcagatggcctacatgatgcagtcaccgctgacgctggatgcactgtggcac

SEQ ID NO: 436381 - DNA, 75 bp, synthetic construct
  source 1..75: mol_type = other DNA
aactcatgcctgttgtattttcgagagagggaaacagcaggacgctgaatctgttgttatgcaaagggccggagg

SEQ ID NO: 436382 - DNA, 75 bp, synthetic construct
  source 1..75: mol_type = other DNA
agtcgctggcacacgtggtgaatattctcgacccggatgtgattgtgctggggggcgggatgagcaatgttgacc

SEQ ID NO: 436383 - DNA, 75 bp, synthetic construct
  source 1..75: mol_type = other DNA
gtttatatcaaacggttccgccgttgattaaacaatttgtcttcggtggagaatgtgaaacgccggtacgtaagg

SEQ ID NO: 436384 - DNA, 75 bp, synthetic construct
  source 1..75: mol_type = other DNA
gatttcgccttacactggcgtggtgaaaaatgccaattcaacctggcttaacggtcagccatttgataaagattt

SEQ ID NO: 436385 - DNA, 75 bp, synthetic construct
  source 1..75: mol_type = other DNA
tgatgtcacgcaaatgcatcaactggaaggggcgcggcgtaacttttttgccaacgtgagccatgagttacgtac

SEQ ID NO: 436386 - DNA, 75 bp, synthetic construct
  source 1..75: mol_type = other DNA
gtggcaaacggaagaaccagaaagcgaagatgcccggtattacttgtgtgcacaacgtttgtactgcggcgaggg

SEQ ID NO: 436387 - DNA, 75 bp, synthetic construct
  source 1..75: mol_type = other DNA
ggaaagcctgcttgccgatctctgcgcgtactgggaaagttacccatctacacaagccgataatttgttgttgca

SEQ ID NO: 436388 - DNA, 75 bp, synthetic construct
  source 1..75: mol_type = other DNA
tgttatgggcggaaattttacatagcggaaaattatcgccgttaggtcaatcgtttattgagtcgttattcttca

SEQ ID NO: 436389 - DNA, 75 bp, synthetic construct
  source 1..75: mol_type = other DNA
ccagcatcatcaaagtcagcttaacggttctggtaataggttacgcgatcggtaaaatcgttatgttgttcagtt

SEQ ID NO: 436390 - DNA, 75 bp, synthetic construct
  source 1..75: mol_type = other DNA
catggtttgttccagacgatgcgaaattgcatcgcaagctattgcgctggtatagctcggtacaaacaggtatgg

SEQ ID NO: 436391 - DNA, 75 bp, synthetic construct
  source 1..75: mol_type = other DNA
gttacatcgcaaactgttgcgctggtacagctcggtgcaaacaggtatggcggaactcattcctgttgcccaaca

SEQ ID NO: 436392 - DNA, 75 bp, synthetic construct
  source 1..75: mol_type = other DNA
cacgaaagtcgcctgaatattgagagtacagtaggaaaaggaacacgtttcagttttgttctgccggaacgtttg

SEQ ID NO: 436393 - DNA, 75 bp, synthetic construct
  source 1..75: mol_type = other DNA
gactctgagccagaaaaaacagacatttacctttgaaatagataacgacctcaaagtgtctggcaatgaagatca

SEQ ID NO: 436394 - DNA, 75 bp, synthetic construct
  source 1..75: mol_type = other DNA
gttgcacaccatgcgcgagcagacccagcggatggaagggctggtgaagcagttgctgacgctgtcgaaaataga

SEQ ID NO: 436395 - DNA, 75 bp, synthetic construct
  source 1..75: mol_type = other DNA
atgaaaacatgttggcaaatcctcgaaattgaaagcacgacgcaaatagacattatccgccaggcttatcttgct

SEQ ID NO: 436396 - DNA, 75 bp, synthetic construct
  source 1..75: mol_type = other DNA
ggagtccggagagtaacagaatagcagagagcttcgtgaaaacgataaagcgtgactacatcgtgttcatgccca

SEQ ID NO: 436397 - DNA, 75 bp, synthetic construct
  source 1..75: mol_type = other DNA
ccgttggcgtgcccgttccgtggcccttagaaacaccaccaacgggctggctgaaatgtaacggagcagcatttt

SEQ ID NO: 436398 - DNA, 75 bp, synthetic construct
  source 1..75: mol_type = other DNA
tcagtaggtacagtaaaaagcaaagccccgcaagtgtcgttaccactcgcagggcttctaaccaacaacgtaaac

SEQ ID NO: 436399 - DNA, 75 bp, synthetic construct
  source 1..75: mol_type = other DNA
tgccagcagcaggtgctggatatgctgatttcttaccagaaagaacgtggcttcccgccaaccaatcaggaggtg

SEQ ID NO: 436400 - DNA, 75 bp, synthetic construct
  source 1..75: mol_type = other DNA
ccgacgtttatcgacgaagtcaaaccggtgaacgtggaagccgtgcgtgaactggctgcttctggtgtgatgctg

SEQ ID NO: 436401 - DNA, 75 bp, synthetic construct
  source 1..75: mol_type = other DNA
aacgataaattttctaaggttattgatgcgctgcaacagcgaggatatcaggttgtgctgacctgtgggccttcg

SEQ ID NO: 436402 - DNA, 75 bp, synthetic construct
  source 1..75: mol_type = other DNA
acacggtttactgaactgggtgctttaattgatcatgccgtactctttattggtgtggattctgcaccaggacat

SEQ ID NO: 436403 - DNA, 75 bp, synthetic construct
  source 1..75: mol_type = other DNA
gacagcgaggcggtcgggattatccgcgcactgcttgccggtgaggaaaacgccaggctgcgtgcaactcactgg

SEQ ID NO: 436404 - DNA, 75 bp, synthetic construct
  source 1..75: mol_type = other DNA
ccaaaactgctgtttttctgacggatggttctgtgtggaatggtgctgtttccattaactcacaatgggaccgcg

SEQ ID NO: 436405 - DNA, 75 bp, synthetic construct
  source 1..75: mol_type = other DNA
accgacaacatcacccttgctgactcaaatattattaatggcgggattgaaacaatagttactgccgggaataag

SEQ ID NO: 436406 - DNA, 75 bp, synthetic construct
  source 1..75: mol_type = other DNA
aacggctgttgttctgacggatggttctgtgtggaatggtgccattaacagcaatcctgttgcaggaagtcatgc

SEQ ID NO: 436407 - DNA, 75 bp, synthetic construct
  source 1..75: mol_type = other DNA
gagaaaaaaggcgtcatcacgataaagcgtggcgtggcccgggggatcacgcttcataccgcagtgaaggacgac

SEQ ID NO: 436408 - DNA, 75 bp, synthetic construct
  source 1..75: mol_type = other DNA
tgcgggatgtcggcgttgatactatgtatggggtgggcattggcgaaaaaggcatgaatccgctgaccagaactt

SEQ ID NO: 436409 - DNA, 75 bp, synthetic construct
  source 1..75: mol_type = other DNA
aaatcatctaaagcaacgttaaagaaagctgctggcgcaatggataataaatttattggcgggcaacgagctatt

SEQ ID NO: 436410 - DNA, 75 bp, synthetic construct
  source 1..75: mol_type = other DNA
tatctttctgttattccagcggaagatgtcattgccgctacggaaaagctgttgccagaagatgcaccttcagct

SEQ ID NO: 436411 - DNA, 75 bp, synthetic construct
  source 1..75: mol_type = other DNA
gcgcactgcttgccggtgaggaaaacgccagactgcgtgcagtccactggttacataagaggggcctgaaagtat

SEQ ID NO: 436412 - DNA, 75 bp, synthetic construct
  source 1..75: mol_type = other DNA
acgagaaaatagcgagtcgctgcttaatcgttttttcctcagccgtgttgttatcaccaccctcagcgtttcggt

SEQ ID NO: 436413 - DNA, 75 bp, synthetic construct
  source 1..75: mol_type = other DNA
cttcgcagtactgatgttgtctttatttattttaaaagaaacgcgccctgccgcgcctgccgcttcggacaagcc

SEQ ID NO: 436414 - DNA, 75 bp, synthetic construct
  source 1..75: mol_type = other DNA
atgacgacatttattcagcttcatttgttaaccgcttaccctgctgccaaccttaaccgtgatgacaccggtgcg

SEQ ID NO: 436415 - DNA, 75 bp, synthetic construct
  source 1..75: mol_type = other DNA
gtggttggtctggccgaaacatcatgaacaaagtccggctgcgcgtaactttcgtattcatctgctgaatgctct

SEQ ID NO: 436416 - DNA, 75 bp, synthetic construct
  source 1..75: mol_type = other DNA
gctcactgcttgccggtgaggaaaacgcaaagctgcgtgcaacccactggttacatgagagaggcctgaaagtat

SEQ ID NO: 436417 - DNA, 75 bp, synthetic construct
  source 1..75: mol_type = other DNA
gcatcttcgcgcactggagaaaaaaggcgtcatcacgataaagcgtggtgtggcccgggggatcacgcttcatac

SEQ ID NO: 436418 - DNA, 75 bp, synthetic construct
  source 1..75: mol_type = other DNA
tatctttctgttattccagcggaagatgtgattgccgcgacggaaaagttgttgccggaagatgcccctgtggct

SEQ ID NO: 436419 - DNA, 75 bp, synthetic construct
  source 1..75: mol_type = other DNA
atgcgttgcaacgtcgcggttatcaggttgtgctgacttgtggtccttcggcagatgatctcgcctgtgtagatg

SEQ ID NO: 436420 - DNA, 75 bp, synthetic construct
  source 1..75: mol_type = other DNA
atttgcgccggtttctcagtgggcttcggcgtggcaatgagccaggcattaggcccgttttcattacgcgcaggc

SEQ ID NO: 436421 - DNA, 75 bp, synthetic construct
  source 1..75: mol_type = other DNA
ttatcagaaagagcgtggctttccgccaaccaatcaggaggtggcaaccatgctgggataccgttcagtgaatgc

SEQ ID NO: 436422 - DNA, 75 bp, synthetic construct
  source 1..75: mol_type = other DNA
tgctgggataccgttcagtgaatgcagcggtggagcatcttcgagctctggagaaaaaaggcgtcatcacgataa

SEQ ID NO: 436423 - DNA, 75 bp, synthetic construct
  source 1..75: mol_type = other DNA
agttattgccaaggagaatacgggaactcatacagtcaatctgaatattaaggatggctcagtaattggggcggc

SEQ ID NO: 436424 - DNA, 75 bp, synthetic construct
  source 1..75: mol_type = other DNA
cattatggcgctgaccgctggcgtcagcatgaccgtttcattttccacaccatttgccctggggatctttaagcc

SEQ ID NO: 436425 - DNA, 75 bp, synthetic construct
  source 1..75: mol_type = other DNA
ttggcgtagcgatgagtcaggcgttagggccgttttcattacgcgcgggcgtagccagctcgaccttaggtattg

SEQ ID NO: 436426 - DNA, 75 bp, synthetic construct
  source 1..75: mol_type = other DNA
ccagatacggcaacgaccgcgccttatctgctggctggagcccctactttcgatctctccatcagccagtttcga

SEQ ID NO: 436427 - DNA, 75 bp, synthetic construct
  source 1..75: mol_type = other DNA
atttgcgccggtttctcggtaggttttggtgtggcgatgagtcaggcgttagggccgttttcattacgcgcgggc

SEQ ID NO: 436428 - DNA, 75 bp, synthetic construct
  source 1..75: mol_type = other DNA
gttatttcttgcagggcgatttctacaggggttaggcgcaggctgttgttacgtggtggcgttcgccattttacg

SEQ ID NO: 436429 - DNA, 75 bp, synthetic construct
  source 1..75: mol_type = other DNA
aaagccggtcgccatccccggcgcgacgctatttattatcgcctcagtgttctgttcactggctgaaaccagcac

SEQ ID NO: 436430 - DNA, 75 bp, synthetic construct
  source 1..75: mol_type = other DNA
tatcaccatcgcttttgtgcgcttacctgaactggtgcaggggatcattctcactgtgggttcggcggcgtatct

SEQ ID NO: 436431 - DNA, 75 bp, synthetic construct
  source 1..75: mol_type = other DNA
ctggtaacggctatctggatggcggtcaccatctggggcggttttgtgctggtggcgcgggtatacaaacatatg

SEQ ID NO: 436432 - DNA, 75 bp, synthetic construct
  source 1..75: mol_type = other DNA
ttgccggagtttcttggcttactgctgttgctgatggcggtcaccctcggatcgcaactggcgcttaccacgctg

SEQ ID NO: 436433 - DNA, 75 bp, synthetic construct
  source 1..75: mol_type = other DNA
ctgctgtttctgattggcggcaacggtagcggaaaatcgacgctggcgatgttgctgacgggcttgtaccagcca

SEQ ID NO: 436434 - DNA, 75 bp, synthetic construct
  source 1..75: mol_type = other DNA
ccgcctgctggaaatgcgcagtgggctgcttagcgaactaaccggcgaagagcgtgatgccgcttcgcgtgatgc

SEQ ID NO: 436435 - DNA, 75 bp, synthetic construct
  source 1..75: mol_type = other DNA
ttctggatggcgaacagtctcggttgggctgataccaacgttgccgcgacctattcgctaacgctgttattcctg

SEQ ID NO: 436436 - DNA, 75 bp, synthetic construct
  source 1..75: mol_type = other DNA
aggctggtattacagcggcgatctctgccgtatggatgaggctggctatataaaaattaccggacgcaaaaaaga

SEQ ID NO: 436437 - DNA, 75 bp, synthetic construct
  source 1..75: mol_type = other DNA
cccgtggcgcagataacaaagctgtaacactggaatttaaacttgaaccagatggcgggattttggcaaggggta

SEQ ID NO: 436438 - DNA, 75 bp, synthetic construct
  source 1..75: mol_type = other DNA
gatgcttacgtcacatcacataaaacccgtggtagcgataacaaagcggtaacactggaatttaaacttgaacca

SEQ ID NO: 436439 - DNA, 75 bp, synthetic construct
  source 1..75: mol_type = other DNA
tgtatttttcatcaatgaatattgggctgacgcagagagatatctggcgatttatgaaggtttattttgggatgc

SEQ ID NO: 436440 - DNA, 75 bp, synthetic construct
  source 1..75: mol_type = other DNA
agatgagcgaagacgcctggctgttcagggttgtcggacttgtgcgagttgccaggaggagatcgaacttaagaa

SEQ ID NO: 436441 - DNA, 75 bp, synthetic construct
  source 1..75: mol_type = other DNA
gctggcgttggtgtttttcctggtgttattgatagcgaatctctatctggaaaccgcttcgtaacgtataaggga

SEQ ID NO: 436442 - DNA, 75 bp, synthetic construct
  source 1..75: mol_type = other DNA
tatatttctcatcaatgaatattggtctgacgcagagagatatctggcgatttatgaaggtttattttgggatgc

SEQ ID NO: 436443 - DNA, 75 bp, synthetic construct
  source 1..75: mol_type = other DNA
ggcgaggtctttcgtgaactcgagacgcgtcgcacattacgctttgaactggccgggaaaagctatttcctcaaa

SEQ ID NO: 436444 - DNA, 75 bp, synthetic construct
  source 1..75: mol_type = other DNA
accgtcatttacagatctgtccggatgctcagctcggcctggcggaacaactgttgctcggtgtcgttgatacgg

SEQ ID NO: 436445 - DNA, 75 bp, synthetic construct
  source 1..75: mol_type = other DNA
gatacgtgcaaaagtaccgcgtcgttggcgggataaagatttgattggtttgtatttttcatcaatgaatattgg

SEQ ID NO: 436446 - DNA, 75 bp, synthetic construct
  source 1..75: mol_type = other DNA
gattacacgagtggcaaccatggtgcgtaaaatgcacgccgcagggataaatcaccgcgactgctacatttgcca

SEQ ID NO: 436447 - DNA, 75 bp, synthetic construct
  source 1..75: mol_type = other DNA
tcccacaattagccttgaagattattgtgccgattgggcagtcaacccgcctgatatacgtgttaagcgtatgct

SEQ ID NO: 436448 - DNA, 75 bp, synthetic construct
  source 1..75: mol_type = other DNA
cgcagcgaggatgatgcggctgacgacgctgaccgcacggaacaggtgcaggataaagcggcggtggaggaaatc

SEQ ID NO: 436449 - DNA, 75 bp, synthetic construct
  source 1..75: mol_type = other DNA
tccggcagcatgagccggatccggaaaacgtttaatggacacgaccatcccggagacagtgggggaaccacgaaa

SEQ ID NO: 436450 - DNA, 75 bp, synthetic construct
  source 1..75: mol_type = other DNA
tgccgctgaacatgcagagttccacatgaaagacaaccgctgggtgcctggctggatgggttcaccacgtccaca

SEQ ID NO: 436451 - DNA, 75 bp, synthetic construct
  source 1..75: mol_type = other DNA
cgcagcgaggatgatgcggctgacgacgctgaccgcacggaacaggtgcgggataaagcggcagtggaggaaatc

SEQ ID NO: 436452 - DNA, 75 bp, synthetic construct
  source 1..75: mol_type = other DNA
cgcagcgaggatgatgcggctgacgacgctgaccgcacggaacaggtgctggagaaagcggcagtggaggaaatc

SEQ ID NO: 436453 - DNA, 75 bp, synthetic construct
  source 1..75: mol_type = other DNA
cgcagcgaggatgatgcggctgacgacgctgaccgcacggaacaggtgctggaaaaagcggcggtggaggaaatc

SEQ ID NO: 436454 - DNA, 75 bp, synthetic construct
  source 1..75: mol_type = other DNA
gcaagggaggccggtcatgccgtccgtgagatggagcggtggatggtgccgaacaaactccgggaggcagcgtga

SEQ ID NO: 436455 - DNA, 75 bp, synthetic construct
  source 1..75: mol_type = other DNA
agggtacgcttgatggtccggttgaaatcaccgataccctgactgtacaggggaaaacgcagattaacgccgata

SEQ ID NO: 436456 - DNA, 75 bp, synthetic construct
  source 1..75: mol_type = other DNA
gcagcagagcggttgtttccgtcggtgcggtttcgtgtcagggagcgcagtcgccataaatccgcgctggtcatg

SEQ ID NO: 436457 - DNA, 75 bp, synthetic construct
  source 1..75: mol_type = other DNA
aacgcagactggcaaatctggtacgacgcggtgtgattcattctgtccggcatgatggtatccccaaatgccggg

SEQ ID NO: 436458 - DNA, 75 bp, synthetic construct
  source 1..75: mol_type = other DNA
gtgtttgacagcggagcgtacagtaaaccagcacaaatcagcctggaatgtaaacattattcgctgaccagcgat

SEQ ID NO: 436459 - DNA, 75 bp, synthetic construct
  source 1..75: mol_type = other DNA
ggcggtggcggggaacagtaaattccgcttcgtgggggctgatgccttctcgccagacgaactgcgcaccgattt

SEQ ID NO: 436460 - DNA, 75 bp, synthetic construct
  source 1..75: mol_type = other DNA
gcatcgatgaccgagaacggtcatcgtcgggatatgcacccagccgaacagattgccggattccgcgcaatggcg

SEQ ID NO: 436461 - DNA, 75 bp, synthetic construct
  source 1..75: mol_type = other DNA
cgcacgctggcagtccaggcggcactcatgcagcaaccggacaaatctctggcactgctggcatggacgctctgc

SEQ ID NO: 436462 - DNA, 75 bp, synthetic construct
  source 1..75: mol_type = other DNA
ctcagtcaggaggtgctgttgtccctgctcagtttctgcactgcgtgcagcatccacggtgttcagacccgtgag

SEQ ID NO: 436463 - DNA, 75 bp, synthetic construct
  source 1..75: mol_type = other DNA
gggcgtcgggccttaggtgttgagcttgagtcagagcggtttaatcagacagtgaaagagataaacgagctggtg

SEQ ID NO: 436464 - DNA, 75 bp, synthetic construct
  source 1..75: mol_type = other DNA
atgtcagtagcaaagtctgaaccaaaatctacccgtaaagcaagccgtaaacctgcaaaaacgcaggaaactgtc

SEQ ID NO: 436465 - DNA, 75 bp, synthetic construct
  source 1..75: mol_type = other DNA
gaaggaaggtgccgcactcatggcgctgatggcagaaaaagcccggcttgcagccctgctgccggagggatggac

SEQ ID NO: 436466 - DNA, 75 bp, synthetic construct
  source 1..75: mol_type = other DNA
agacaaatccctggcacttctggcatggacactctgtctgaatgtatttggcagtggagcgtacagcaatcccgc

SEQ ID NO: 436467 - DNA, 75 bp, synthetic construct
  source 1..75: mol_type = other DNA
gctaaaaacgacaaaaaaccaaaagatccgctcactaacgccgaaactgaacagttagtccatatcagcccggca

SEQ ID NO: 436468 - DNA, 75 bp, synthetic construct
  source 1..75: mol_type = other DNA
gaacccgctgacgaaatcagcctgcctctccttacgaaaatgtcgtctgaacgtacactggcagtccaggcggcg

SEQ ID NO: 436469 - DNA, 75 bp, synthetic construct
  source 1..75: mol_type = other DNA
tgcagagttccatatgaaagacaaccagtgggtgcctggctggatgtgtgcaccacatccacagacggatgccac

SEQ ID NO: 436470 - DNA, 75 bp, synthetic construct
  source 1..75: mol_type = other DNA
gagctgaataacggtcgtgtttttcccggctggaacaccggtgcggcaccggctccgcagggcagcgacagtgag

SEQ ID NO: 436471 - DNA, 75 bp, synthetic construct
  source 1..75: mol_type = other DNA
gtaaagaccgtatggcggtagatatcgctatgtttggtcgtatgctggcgaaaaaacccgggtttaatgtagaag

SEQ ID NO: 436472 - DNA, 75 bp, synthetic construct
  source 1..75: mol_type = other DNA
aaaaattgcggattatcttgggaaagctaaaaacgacaaaaaaccaaaagatccgctcactaacgccgaaactga

SEQ ID NO: 436473 - DNA, 75 bp, synthetic construct
  source 1..75: mol_type = other DNA
tcgcggaagccagtatggcggcaagggaggccggtcatgctgtccgtgagatggagcggtggatggtgccgaaca

SEQ ID NO: 436474 - DNA, 75 bp, synthetic construct
  source 1..75: mol_type = other DNA
cttccgaacgcacgctggcagtccaggcagcactgatgcagcaaccggacaaatctctggcactgctggcatgga

SEQ ID NO: 436475 - DNA, 75 bp, synthetic construct
  source 1..75: mol_type = other DNA
gcccgtcttgctgccctgctgccggaggggtggtcacggaacatgacgacgttcatgtcactcagtcaggaggtg

SEQ ID NO: 436476 - DNA, 75 bp, synthetic construct
  source 1..75: mol_type = other DNA
ctgcctgaatgtgtttggcagcggagcgtacagtaaaccagcacaaatcagcctggaatgtaaacattattcgct

SEQ ID NO: 436477 - DNA, 75 bp, synthetic construct
  source 1..75: mol_type = other DNA
cgctgggtgcctgactggatgtgtgcaccacgtccacaggcagagacggaaaccacggaataccgtgacaaccag

SEQ ID NO: 436478 - DNA, 75 bp, synthetic construct
  source 1..75: mol_type = other DNA
ctgtcactcagtcaggaggtgctgttatccctgctcagtttctgcaccgcatgcagccttaacggtgtccagacc

SEQ ID NO: 436479 - DNA, 75 bp, synthetic construct
  source 1..75: mol_type = other DNA
ggggaacagtaaattccgcttcgtgggggctgatgccttctcgccagatgaactgcgcaccgatttgttcagcga

SEQ ID NO: 436480 - DNA, 75 bp, synthetic construct
  source 1..75: mol_type = other DNA
tattctatccggtaagctcagatcttcattttctccgcccctgaaccgtaagtcccgtgatgcatcccggcaatg

SEQ ID NO: 436481 - DNA, 75 bp, synthetic construct
  source 1..75: mol_type = other DNA
gtgtcagtgaaacgattgtcgaagatgattttttcaccgccgttgatgattttcgccaggcttctgaagatgccg

SEQ ID NO: 436482 - DNA, 75 bp, synthetic construct
  source 1..75: mol_type = other DNA
ttgttacgtaaagatcgcatggcggtagatatcgctatgtttggtcgtatgctggcgaataaacccgagtttaat

SEQ ID NO: 436483 - DNA, 75 bp, synthetic construct
  source 1..75: mol_type = other DNA
ttcattacttttgccacgcactctgctggaacaatattttccccatcaaaaacctgtctgcgcagagagactggc

SEQ ID NO: 436484 - DNA, 75 bp, synthetic construct
  source 1..75: mol_type = other DNA
tgaaaaaattaatgccgaagtagcccagcttgacgatattctcagaaacataccttccgggattactatcaagga

SEQ ID NO: 436485 - DNA, 75 bp, synthetic construct
  source 1..75: mol_type = other DNA
cgaggatttaaacgcccatttatcattgctatcttaattgttgtatcttcagtgattggttatgttggtgtgtac

SEQ ID NO: 436486 - DNA, 75 bp, synthetic construct
  source 1..75: mol_type = other DNA
gatttttgtgcagatgcgattcgccatgccgcagatgatgaaaaactggcaggcattggctttcattggggattt

SEQ ID NO: 436487 - DNA, 75 bp, synthetic construct
  source 1..75: mol_type = other DNA
ttaccgccccgaataccacgctcaatttcaatgcctggcttcaggttgaaccgggcgtcacgattgtaccaggcg

SEQ ID NO: 436488 - DNA, 75 bp, synthetic construct
  source 1..75: mol_type = other DNA
aggtggccacgtcagaaagctggcgcgacaaacagacgggggagatgcgggagcagacggaatggcaccgcgtgg

SEQ ID NO: 436489 - DNA, 75 bp, synthetic construct
  source 1..75: mol_type = other DNA
caacagttcagcggtcagcctcagccggaatcacagccggaaccgaaaaaaggaggcgcgaaaacgaaaggccgt

SEQ ID NO: 436490 - DNA, 75 bp, synthetic construct
  source 1..75: mol_type = other DNA
tcgcagaggcaggtatggcagccagagaggccggtcatgctgtccgtgagatggaacggtggatggtgccgaaca

SEQ ID NO: 436491 - DNA, 75 bp, synthetic construct
  source 1..75: mol_type = other DNA
tcaggaactaaccgtgctgattcaaatccttatgccgtgggggatgcggttacggtcctgtccgaagccggagaa

SEQ ID NO: 436492 - DNA, 75 bp, synthetic construct
  source 1..75: mol_type = other DNA
ttattgtgagatccccgaaaaggttttcggggtctggtcgccgcgtctgggggatgcctcccgtatttgcacccg

SEQ ID NO: 436493 - DNA, 75 bp, synthetic construct
  source 1..75: mol_type = other DNA
caacagttcagcggtcagcctcagccgcaactgccggagggtgacgattacgggttttcagacgatatcccgttc

SEQ ID NO: 436494 - DNA, 75 bp, synthetic construct
  source 1..75: mol_type = other DNA
agccggaatcacagccggaaccgaaaaaaggtggcgcgaaaacgaaaggccgtggacgtaaggccgcgcagccgg

SEQ ID NO: 436495 - DNA, 75 bp, synthetic construct
  source 1..75: mol_type = other DNA
ctgattgcgctggccagcgtaaacgacgacctgcgggaatggcggctggaacaggaaaaccgtggcacaacttgc

SEQ ID NO: 436496 - DNA, 75 bp, synthetic construct
  source 1..75: mol_type = other DNA
aggccgtggacgtaaggccgcgcagcccgagcctcagcctcagccgccggagggggaggattacggattttcaga

SEQ ID NO: 436497 - DNA, 75 bp, synthetic construct
  source 1..75: mol_type = other DNA
caacagttcagcggtcagcctcagccggaaccacaggcggaggccggtacgaaaaaaggtggcgcaaaaacgaaa

SEQ ID NO: 436498 - DNA, 75 bp, synthetic construct
  source 1..75: mol_type = other DNA
gtgattcttgcccggactgttttaccacgcagcgagaatgtatctacattaatgaaagtcgtaatatcgatgtgg

SEQ ID NO: 436499 - DNA, 75 bp, synthetic construct
  source 1..75: mol_type = other DNA
tgtttactgtcatgattggcagactcattctgtttgccgaacaacagggttacggcctgaccttcggagaagcct

SEQ ID NO: 436500 - DNA, 75 bp, synthetic construct
  source 1..75: mol_type = other DNA
aatttaccgtcatgatcggaaaactcatccagtttgcccatcagcgcggttatggcctgacgttcggtgaggcgt

SEQ ID NO: 436501 - DNA, 75 bp, synthetic construct
  source 1..75: mol_type = other DNA
actgggaatcactgggcggaagctggggcgggcgcttcaaatccagaccggatggtaatcatttcagcctggaac

SEQ ID NO: 436502 - DNA, 75 bp, synthetic construct
  source 1..75: mol_type = other DNA
accgccaatacgaatcagatggtggtggagtttatggggatgcagttgccgggctcttcttttgttcatccggac

SEQ ID NO: 436503 - DNA, 75 bp, synthetic construct
  source 1..75: mol_type = other DNA
gccgggaacatgtactttctacggtactgccaacaccaaccagatggtggtggaatttatggggatgcagttgcc

SEQ ID NO: 436504 - DNA, 75 bp, synthetic construct
  source 1..75: mol_type = other DNA
gatttacatcaatgatcgctttattaatccagtacgccaacgcgaatggcttttggctgacatttggtgaagcgt

SEQ ID NO: 436505 - DNA, 75 bp, synthetic construct
  source 1..75: mol_type = other DNA
actgggaatcactgggtggtgcctggggcggacgcttcaaatccagaccggatggcaatcatttcagtctggaac

SEQ ID NO: 436506 - DNA, 75 bp, synthetic construct
  source 1..75: mol_type = other DNA
actgggaatcactgggtggttcctggggcggacgcttcaaatccagacctgatggtaatcatttcagcctggaac

SEQ ID NO: 436507 - DNA, 75 bp, synthetic construct
  source 1..75: mol_type = other DNA
taatgctgaccgtataaatccagagaattcaatttatctgaccatggcgggcaacgaagtcttcaaagttgcggt

SEQ ID NO: 436508 - DNA, 75 bp, synthetic construct
  source 1..75: mol_type = other DNA
tatcgcctgaccttcggcgaggcataccgcacgccggagcaggccgcactgaatgcgaaaagcggaaaaggcatt

SEQ ID NO: 436509 - DNA, 75 bp, synthetic construct
  source 1..75: mol_type = other DNA
tgtttgccgtcatgattgccgaccttattcactgggcgcaggagcacggctatcgcctgaccttcggtgaggcat

SEQ ID NO: 436510 - DNA, 75 bp, synthetic construct
  source 1..75: mol_type = other DNA
cgtaacagccttcacacgctgcgcctcgcggtggacttcaacctgttcattaacggcaaataccaggccgacacc

SEQ ID NO: 436511 - DNA, 75 bp, synthetic construct
  source 1..75: mol_type = other DNA
gtcggtcaggttgctggtggtgttccggctatgtgcgatggtgtaacccaggggcaggacggcatggaactgtcg

SEQ ID NO: 436512 - DNA, 75 bp, synthetic construct
  source 1..75: mol_type = other DNA
gtctgaagggcagtggttcaggtgtcctgaataactttaatccgggagaggttattcccggctataccgaaaatc

SEQ ID NO: 436513 - DNA, 75 bp, synthetic construct
  source 1..75: mol_type = other DNA
acttaccagaaggttgtcacgcttggttacaacgccagaaacgtaaaatggagtggagcattcaatatcccggaa

SEQ ID NO: 436514 - DNA, 75 bp, synthetic construct
  source 1..75: mol_type = other DNA
aaaccgtgaatgtcagtaaaacggaaatcacgtcacatgtctgtgagaggacgccggcagcggaactgacctgca

SEQ ID NO: 436515 - DNA, 75 bp, synthetic construct
  source 1..75: mol_type = other DNA
gatctcggcactgtgacgctggactattttgctgacaatgtgaccccaacgacggattacgcgggtggcaaaacg

SEQ ID NO: 436516 - DNA, 75 bp, synthetic construct
  source 1..75: mol_type = other DNA
gtgatgtaatagcaattaaatcagaagataaaaaacgctgccgccagaacgtaaagaaagcgagaatggctaaaa

SEQ ID NO: 436517 - DNA, 75 bp, synthetic construct
  source 1..75: mol_type = other DNA
tgaataattcggaagtgggaaaactgacgtcagaagtcatcatgaatcgccccaaagaccccatttccatggatg

SEQ ID NO: 436518 - DNA, 75 bp, synthetic construct
  source 1..75: mol_type = other DNA
ccgaaagaccccatttccatggatgcgccgtttatcagcggcggctttgatgtccaggataaagccgatatcgtc

SEQ ID NO: 436519 - DNA, 75 bp, synthetic construct
  source 1..75: mol_type = other DNA
ggtgattgaagcgcctgcggttgtttttgaaagccagcatgacgttatgccggcctttgaagcgggtttgctgga

SEQ ID NO: 436520 - DNA, 75 bp, synthetic construct
  source 1..75: mol_type = other DNA
cagccgcagcgcgccaggttacacgcatgactggcaacggtaatgaatggatgccgatcggtaagatgatcgacg

SEQ ID NO: 436521 - DNA, 75 bp, synthetic construct
  source 1..75: mol_type = other DNA
gccatgaatgatgtgaatgtccgggcattcaccggtaaaccagtggagtgccggatggccattgccggattcagc

SEQ ID NO: 436522 - DNA, 75 bp, synthetic construct
  source 1..75: mol_type = other DNA
ctgtcagagaaaccatcagtcttatggggcgggactttcctgtcgacgttgtggtgtatccccgcagggatacta

SEQ ID NO: 436523 - DNA, 75 bp, synthetic construct
  source 1..75: mol_type = other DNA
aggaaaccgtgttatcagcatgggaggaaaagagtacacggtatacagcgactgctgggcctggaaagacacgta

SEQ ID NO: 436524 - DNA, 75 bp, synthetic construct
  source 1..75: mol_type = other DNA
atggcgcgggtgctgcagtgctggctgcctctgaagagccaggaattatctcaacgcatcttcatgctgatggca

SEQ ID NO: 436525 - DNA, 75 bp, synthetic construct
  source 1..75: mol_type = other DNA
ttcatgactgaagatggtagctggctggccggtgtggcgatgtcttctgcgaaaggtgacatgaccaccatgcag

SEQ ID NO: 436526 - DNA, 75 bp, synthetic construct
  source 1..75: mol_type = other DNA
gccgccctgaggggagcggctggagctggaaggattttgcctgggataccgccggtgaaagccccggctataccg

SEQ ID NO: 436527 - DNA, 75 bp, synthetic construct
  source 1..75: mol_type = other DNA
ctcggcgatgctttccgccgccggaaatgaatatgcacagcatcaggggatgagtcgcgatcgcagtgccacttt

SEQ ID NO: 436528 - DNA, 75 bp, synthetic construct
  source 1..75: mol_type = other DNA
agtccgtctgggtgatgagtctgtcaatgccagcattgacggtgcagcattccgcgtgggtgcaggtgtacaggc

SEQ ID NO: 436529 - DNA, 75 bp, synthetic construct
  source 1..75: mol_type = other DNA
gacagctataactctgtgctgggtgaggccggtacgcgcgtgggttatgacttcgctgtgggcaacgcgagcgtt

SEQ ID NO: 436530 - DNA, 75 bp, synthetic construct
  source 1..75: mol_type = other DNA
ttgaatggttttaacggtgatgcaacagacaacattacccttgctggctcaaatattattaatggtcggattgaa

SEQ ID NO: 436531 - DNA, 75 bp, synthetic construct
  source 1..75: mol_type = other DNA
aatggtatcaggaaatcgctctgattttgtggtacccatatctttttgttggtttcccaattacccttttctttt

SEQ ID NO: 436532 - DNA, 75 bp, synthetic construct
  source 1..75: mol_type = other DNA
cggataagctggtagcaaaaggtttgccgcctgagatgatggagatggcgaagcagaaagcgcaggaaattcagc

SEQ ID NO: 436533 - DNA, 75 bp, synthetic construct
  source 1..75: mol_type = other DNA
acttacatacctgttttgttaacgctactattgcaaatagtctgaaaccagagttacttgcggcagttatttcag

SEQ ID NO: 436534 - DNA, 75 bp, synthetic construct
  source 1..75: mol_type = other DNA
agggccatgcgtgacgtctggcgcagacagattgacaaaagggccgctgagaaaatcagcgccagtcagtcagcc

SEQ ID NO: 436535 - DNA, 75 bp, synthetic construct
  source 1..75: mol_type = other DNA
cttctttcgggtgggtacagggcagtgcgcgatttctggcgcaggcagattgataaaagggccgcagagaaaatc

SEQ ID NO: 436536 - DNA, 75 bp, synthetic construct
  source 1..75: mol_type = other DNA
acttccctgctggacttgatagtttatatcagtctatcattaacactccttttgatagtgataaaggctggggat

SEQ ID NO: 436537 - DNA, 75 bp, synthetic construct
  source 1..75: mol_type = other DNA
gcagagatcgactttgttaccgaccagttgggttctcagttaacgctgaaagccccgaacgccaaaatgcgtaaa

SEQ ID NO: 436538 - DNA, 75 bp, synthetic construct
  source 1..75: mol_type = other DNA
acttctgctacgcacgctttcccgagcgcagcttgtcagattcaaagcatgctgggcattaaaggttgcccggca

SEQ ID NO: 436539 - DNA, 75 bp, synthetic construct
  source 1..75: mol_type = other DNA
gtgaaatctggggcggtgaagtatgctctggtcgtcggttccgatgtactggcgcgcacctgcgatccaacagat

SEQ ID NO: 436540 - DNA, 75 bp, synthetic construct
  source 1..75: mol_type = other DNA
atggcgcgggcgctgcggtgttggctgcctctgaagagccgggaatcatctctacccatctgcacgccgatggta

SEQ ID NO: 436541 - DNA, 75 bp, synthetic construct
  source 1..75: mol_type = other DNA
tctgccgcttctgtaccgtgcgcgctggatgaagccgtacgcgacgggcgtattaagccggggcagttggttctg

SEQ ID NO: 436542 - DNA, 75 bp, synthetic construct
  source 1..75: mol_type = other DNA
tccgcatcaggctaacctgcgtattatcagtgcaacggcgaaaaaactcggtatgtcgatggacaatgtcgtggt

SEQ ID NO: 436543 - DNA, 75 bp, synthetic construct
  source 1..75: mol_type = other DNA
accgttctcaactggactggctggttccgcatcaggcaaacctgcgtattatcagtgcaacggcgaaaaaactcg

SEQ ID NO: 436544 - DNA, 75 bp, synthetic construct
  source 1..75: mol_type = other DNA
caattacaaaaatggtcacgggcgcggatcgacgatcgtatcgacgaattaatggcgctactggggctggagccg

SEQ ID NO: 436545 - DNA, 75 bp, synthetic construct
  source 1..75: mol_type = other DNA
aatttacgcgagcgttatccccatcaactttctggtggtcagcagcagcgagtcggcgttgctcgtgcgctggct

SEQ ID NO: 436546 - DNA, 75 bp, synthetic construct
  source 1..75: mol_type = other DNA
aagtgctgccggtggttaacgctcaaggccaaccttgcggcacactgcattttcaggatctgctgatggaggcgt

SEQ ID NO: 436547 - DNA, 75 bp, synthetic construct
  source 1..75: mol_type = other DNA
cctcaactgttgatgctctggcaataaaagacagtacggttaatatcacgaaggctacagtcaatactggcacgt

SEQ ID NO: 436548 - DNA, 75 bp, synthetic construct
  source 1..75: mol_type = other DNA
tcacgctcaatggcacaaccataaatgctcaaggtaaaaatgattcgagcaacagctctaaggcaatttttgctc

SEQ ID NO: 436549 - DNA, 75 bp, synthetic construct
  source 1..75: mol_type = other DNA
caattacaaaaatggtcgcgggcgcggattgacgatcgtatcgacgaattaatggcgctactggggctggagtca

SEQ ID NO: 436550 - DNA, 75 bp, synthetic construct
  source 1..75: mol_type = other DNA
acctcctagaatgggggagttaatgtcaatatcaaaaaaaacgataaactctcacattgaaaacatacgggtaaa

SEQ ID NO: 436551 - DNA, 75 bp, synthetic construct
  source 1..75: mol_type = other DNA
gaaggtaaacgatgtgtttgcttcaatagtgactactttcaatataaagcgggtgtgccttatctctatgtaatg

SEQ ID NO: 436552 - DNA, 75 bp, synthetic construct
  source 1..75: mol_type = other DNA
tgcggcgttgaaactacaagaagatgaaagctttaccaacaagaatattgtggttattctaccgtcatcgggtga

SEQ ID NO: 436553 - DNA, 75 bp, synthetic construct
  source 1..75: mol_type = other DNA
gcaagggttggcatggttccggtaccgtctgacgccttcgggtgaggcgcatcgtcaggcgattcatcccggaga

SEQ ID NO: 436554 - DNA, 75 bp, synthetic construct
  source 1..75: mol_type = other DNA
tagggcaaacattaagattgcatattgctcatgcgtttaaaatggacgagtcgggatggtgttttaactcaaaaa

SEQ ID NO: 436555 - DNA, 75 bp, synthetic construct
  source 1..75: mol_type = other DNA
ttatgcggttgattttttgtcagatctaagggtattcttcatgattcgattaaagcttgaccaggctaagcatgg

SEQ ID NO: 436556 - DNA, 75 bp, synthetic construct
  source 1..75: mol_type = other DNA
gattccacgggtaccaaaatcgcgggcaatatcggcattgtaaatctggatggtagcctgactgttacaggcggt

SEQ ID NO: 436557 - DNA, 75 bp, synthetic construct
  source 1..75: mol_type = other DNA
caataacgggaaagtgattcaggacggcgatctggatgtcagcggcggcggtcacggtattgatatcaccggcga

SEQ ID NO: 436558 - DNA, 75 bp, synthetic construct
  source 1..75: mol_type = other DNA
ccaacggcggcaccggcacgcagattaacggtgacgacgccacggcgaataacagcggcaaaaccaccgttgacg

SEQ ID NO: 436559 - DNA, 75 bp, synthetic construct
  source 1..75: mol_type = other DNA
ggtccgtcgtggcgctggacggtctggcgggcgaaccgctggatattctgatcaacggttatttaatcgcccagg

SEQ ID NO: 436560 - DNA, 75 bp, synthetic construct
  source 1..75: mol_type = other DNA
aaagagctgttgcgcctgacgcaaggatcagtggtggcgctggacggtctggctggcgaaccgctggatattctg

SEQ ID NO: 436561 - DNA, 75 bp, synthetic construct
  source 1..75: mol_type = other DNA
tggtggcggcgacgtcagtggaacattgcaggatatcgacctgattatggatattccggtcaaactgaccgtcga

SEQ ID NO: 436562 - DNA, 75 bp, synthetic construct
  source 1..75: mol_type = other DNA
tcatggggcgattcgcgttgggactgcacaagagcttgctactcttcggcggatgtttgccattatggggatgta

SEQ ID NO: 436563 - DNA, 75 bp, synthetic construct
  source 1..75: mol_type = other DNA
tatcaccattgcttttgtgcgtctgccggaactggtgcaggggatcattctcactatcggttcagcggcgtatct

SEQ ID NO: 436564 - DNA, 75 bp, synthetic construct
  source 1..75: mol_type = other DNA
tagatttaattctggatgaacatgagaaaactttcaaaaaacataatcatttatatatattgctaggcaatggtt

SEQ ID NO: 436565 - DNA, 75 bp, synthetic construct
  source 1..75: mol_type = other DNA
tatgtcttcgcggtcttcttcgctgggtaggaacggggtctccttcaccctactcgggaagcgtggagactttaa

SEQ ID NO: 436566 - DNA, 75 bp, synthetic construct
  source 1..75: mol_type = other DNA
gccgcagagttttcataatttatgtcaacgtgcggctacggcggcgggctatccagatttccagccagatgcttg

SEQ ID NO: 436567 - DNA, 75 bp, synthetic construct
  source 1..75: mol_type = other DNA
cgccatcagtcatgatgatcattactttatccacgccgaccgcctgctggaaatgcgcaacgggcaacttagcga

SEQ ID NO: 436568 - DNA, 75 bp, synthetic construct
  source 1..75: mol_type = other DNA
cgaacaaccggaagattatcgcaaactgttttcggcagtgtttaccgatgtctggctgtttgatcaactgctggg

SEQ ID NO: 436569 - DNA, 75 bp, synthetic construct
  source 1..75: mol_type = other DNA
agattcgggaacagttttcgcaggcaatgtcagccatgtaccagcaagaagttccgcagtatggcacgctgctgg

SEQ ID NO: 436570 - DNA, 75 bp, synthetic construct
  source 1..75: mol_type = other DNA
agctggcgcgacttaacgttgaacgtcatggcgcgatacgtgtgggaactgcgcaggagcttgctacattacggc

SEQ ID NO: 436571 - DNA, 75 bp, synthetic construct
  source 1..75: mol_type = other DNA
tgtgctggaaaacaatccccaactgcatgaaaaaatggttaatgcggatgagctggcgcgacttaacgttgaacg

SEQ ID NO: 436572 - DNA, 75 bp, synthetic construct
  source 1..75: mol_type = other DNA
gatgaaagtctggttcagcggttgaacatactgcatgaaaatggttttgtcatcgcgctggatgatttcggtact

SEQ ID NO: 436573 - DNA, 75 bp, synthetic construct
  source 1..75: mol_type = other DNA
gaatagttaacgctctcaatgggagctttgttagtcgaaacaacgactttagaggatactgggctattgggcagt

SEQ ID NO: 436574 - DNA, 75 bp, synthetic construct
  source 1..75: mol_type = other DNA
atcgtcaggcaatccatcccggtgacgatccacaacctttgatcgaacgtggttgggtagtggcgcaacctatta

SEQ ID NO: 436575 - DNA, 75 bp, synthetic construct
  source 1..75: mol_type = other DNA
cgcgggtaacaacgcggtggtgaaccaggacggcgagctggatgtgagcggcggtggtcacggtatagatatcac

SEQ ID NO: 436576 - DNA, 75 bp, synthetic construct
  source 1..75: mol_type = other DNA
ggtgattatggatgtggaaaatcacctgtatgcgcgcaaagacattaaacagctgggcattgcgccgatgaccag

SEQ ID NO: 436577 - DNA, 75 bp, synthetic construct
  source 1..75: mol_type = other DNA
acacttacaccgacagtaaagaagagttccccgactttaccgccttctggtttgatacggtaaaaccgggggcaa

SEQ ID NO: 436578 - DNA, 75 bp, synthetic construct
  source 1..75: mol_type = other DNA
atgcttttacggcatcataatttcgcattctttttagagctggcaacagccctctattcctccattagctatgct

SEQ ID NO: 436579 - DNA, 75 bp, synthetic construct
  source 1..75: mol_type = other DNA
cgtggtgcgccgcgtccgttacctgacactctggcgacaatgacgccgcaggcttataacagtattcaatacgac

SEQ ID NO: 436580 - DNA, 75 bp, synthetic construct
  source 1..75: mol_type = other DNA
cgcaaaaattgcagttcaatgcttacaccgacaacaacccgaaagggtttggtttattgcaactggatcgtgatt

SEQ ID NO: 436581 - DNA, 75 bp, synthetic construct
  source 1..75: mol_type = other DNA
gactttaccgctttctggttcgatacggtaaaaccgggtgcaaccacctttaccgtttatgcgttgctcgatagt

SEQ ID NO: 436582 - DNA, 75 bp, synthetic construct
  source 1..75: mol_type = other DNA
gatctcggcacagtgacgctggactattttgccgacaatgtaaccccgacaacggattatgcgggcggcaaaacg

SEQ ID NO: 436583 - DNA, 75 bp, synthetic construct
  source 1..75: mol_type = other DNA
agccgaatcagcagacctttaacgtgcggggaacggacggttcctcaacggcgatttattctgtcgctccaggca

SEQ ID NO: 436584 - DNA, 75 bp, synthetic construct
  source 1..75: mol_type = other DNA
aatgaaattagattttcagccgcaggcgggatcgcttgcgcaggtgaataatcaaatttttagtaatgaatatga

SEQ ID NO: 436585 - DNA, 75 bp, synthetic construct
  source 1..75: mol_type = other DNA
gattaaattcgattttcaaccacaaactggatctcttgcccaagcaaatcaacaagttttcagtaaccaatacga

SEQ ID NO: 436586 - DNA, 75 bp, synthetic construct
  source 1..75: mol_type = other DNA
actggatctcttgcccaagcaaatcaacaagttttcagtaaccaatacgagttacaggtaatgactccaacttat

SEQ ID NO: 436587 - DNA, 75 bp, synthetic construct
  source 1..75: mol_type = other DNA
tacgctttttagggctggtagcagcccttattacgcctttcggctatgccggtcaggatgtgaatctcacggcgc

SEQ ID NO: 436588 - DNA, 75 bp, synthetic construct
  source 1..75: mol_type = other DNA
cagaaaaagcagtaaaagccggtgatgagtttgcattccagtatcgtctgtactggagtgctctgcctcccgttc

SEQ ID NO: 436589 - DNA, 75 bp, synthetic construct
  source 1..75: mol_type = other DNA
ttgatggcggcaccggaacccgcattacgggtgatgatgcgacggccaacaacagcggcaataccaccgtagacg

SEQ ID NO: 436590 - DNA, 75 bp, synthetic construct
  source 1..75: mol_type = other DNA
tcggtattctgatcgacggtgataaagccatcgtcaacaatgacggcgacaacgccatcagcaacggcggcaccg

SEQ ID NO: 436591 - DNA, 75 bp, synthetic construct
  source 1..75: mol_type = other DNA
gatgtgagcggcggcggtcacggtattgatatcaccggcgacagcgcaacggtggataacaaaggcggtatgacc

SEQ ID NO: 436592 - DNA, 75 bp, synthetic construct
  source 1..75: mol_type = other DNA
gtgatcgagcgacctttgccaatacgggtcatattgacgtcaataattcagctactggcatgagcatcacgacca

SEQ ID NO: 436593 - DNA, 75 bp, synthetic construct
  source 1..75: mol_type = other DNA
gtggacaacaaaggcggcatgacttgtcaccgatccggattccatcggtattcagatcgacggcgacaaggcggt

SEQ ID NO: 436594 - DNA, 75 bp, synthetic construct
  source 1..75: mol_type = other DNA
aacagcggcaataccaccgttgatggtcagggttcgaccggaactgaaatcgcgggtaacaacgcggtggtgaac

SEQ ID NO: 436595 - DNA, 75 bp, synthetic construct
  source 1..75: mol_type = other DNA
cggcgaaatgcatcaaggttaatattgacgaaaaggtaactgataagttctatagagcgacggctacactagaca

SEQ ID NO: 436596 - DNA, 75 bp, synthetic construct
  source 1..75: mol_type = other DNA
gtaatgacattaacatcactatcgaaatgatcggtgacgagaatttctacgttcgcgtgcctaattactacctaa

SEQ ID NO: 436597 - DNA, 75 bp, synthetic construct
  source 1..75: mol_type = other DNA
gttatcgtattcagtttgactggtatccgacttcggactccactgatccggtcgatatgcggatgtatctgcgtt

SEQ ID NO: 436598 - DNA, 75 bp, synthetic construct
  source 1..75: mol_type = other DNA
gtcatgggccatgacgaatgctgatgttcctgagttgatcaacgaactgattacccgcgtttcggataacaaatg

SEQ ID NO: 436599 - DNA, 75 bp, synthetic construct
  source 1..75: mol_type = other DNA
ctgttagactccgtagtaaccagttcaattgttctgttactggtaggctgctcgatggggatgtcatgggccatg

SEQ ID NO: 436600 - DNA, 75 bp, synthetic construct
  source 1..75: mol_type = other DNA
tctgttgatcgtcggtacctttatggatatcacgccggcgatcctgatatttacacctattttcctgccgatcgc

SEQ ID NO: 436601 - DNA, 75 bp, synthetic construct
  source 1..75: mol_type = other DNA
tgttcgcgggttcgctgcggggtggagagcggatggcggagctgctgacgctgctgcatacggcccggctgaacg

SEQ ID NO: 436602 - DNA, 75 bp, synthetic construct
  source 1..75: mol_type = other DNA
gatacgggcgctgtatatcctggagcagaccatccggcagcgtccggcagagcagaaatggcgatggcgacggcg

SEQ ID NO: 436603 - DNA, 75 bp, synthetic construct
  source 1..75: mol_type = other DNA
ctgatggacgagctgggagtgaaatcaagcaggaaactatgacttgggtgatgtccgatgaggtgcatccattct

SEQ ID NO: 436604 - DNA, 75 bp, synthetic construct
  source 1..75: mol_type = other DNA
tggccgggcaatgagtaaacttggaatacttaactctttgtgggatggtggttctcttttcatcgacaggaaatc

SEQ ID NO: 436605 - DNA, 75 bp, synthetic construct
  source 1..75: mol_type = other DNA
ttaagacattgccgggaatatgctgctaaaaatgcagagtatatggcaagactggcaggacttatttaccattcg

SEQ ID NO: 436606 - DNA, 75 bp, synthetic construct
  source 1..75: mol_type = other DNA
tgatgtactggagaagctgccgtcgtggccggcctcacgactggacgaactgctgccttaccgccgtcagacaga

SEQ ID NO: 436607 - DNA, 75 bp, synthetic construct
  source 1..75: mol_type = other DNA
cagatattgtttacgactctatcggtgttggtgcgtctgccggtgctaaattctctgaaattaacgctgaccgga

SEQ ID NO: 436608 - DNA, 75 bp, synthetic construct
  source 1..75: mol_type = other DNA
acaaccgctgggtgcctggctggatgtgtgcaccacgtccacagacggataccactgaacgcaccgataacctgg

SEQ ID NO: 436609 - DNA, 75 bp, synthetic construct
  source 1..75: mol_type = other DNA
ggcgcatggagcctgtcggtgagtgccgtgaggatgccggaacataccgctgtctgccggagccggaagcggtgc

SEQ ID NO: 436610 - DNA, 75 bp, synthetic construct
  source 1..75: mol_type = other DNA
ttatgtgatgccctgcatgggacggattccggcgatggcgtgatctttttcacggatatcgcgggcgcagcgcct

SEQ ID NO: 436611 - DNA, 75 bp, synthetic construct
  source 1..75: mol_type = other DNA
atgaattggcctgctttgtaacacactccggtctatcccgtagcgccgggcatatcctgtcgcaatgtgcaaatc

SEQ ID NO: 436612 - DNA, 75 bp, synthetic construct
  source 1..75: mol_type = other DNA
aatcttaaggctcaggcatggtggctgaccgtttcagaaatacgtttaacgccattaacaacggagaacagtatc

SEQ ID NO: 436613 - DNA, 75 bp, synthetic construct
  source 1..75: mol_type = other DNA
gggaatgttaaaatattattccgacagcaatcgctcttttgctcttgtatccagtgaaggaggaataatttttga

SEQ ID NO: 436614 - DNA, 75 bp, synthetic construct
  source 1..75: mol_type = other DNA
agagaaagcgtcaactccggcacaacgccaacaggcgtctctggaagagcaaaacaacgatgccttaagcccggc

SEQ ID NO: 436615 - DNA, 75 bp, synthetic construct
  source 1..75: mol_type = other DNA
gcatggccggtgaatacgattatctgatgcgcgtccaggttgccgacatgaaacgctacgacgagttttataagc

SEQ ID NO: 436616 - DNA, 75 bp, synthetic construct
  source 1..75: mol_type = other DNA
gaccgattcttagggatggaagaacgttacaaagacgtaaaccggagctatggccatagcgatggccaacaggaa

SEQ ID NO: 436617 - DNA, 75 bp, synthetic construct
  source 1..75: mol_type = other DNA
cacctgtcgacgcactgtgtgcagtactggtgtcagtggtgtcggtgaagattctctcgttcatccaccagcagg

SEQ ID NO: 436618 - DNA, 75 bp, synthetic construct
  source 1..75: mol_type = other DNA
gctgatgtcagtgatgtcggtaaagattctggcattcatccaccagcaggatattgcagcgctgatatccggttt

SEQ ID NO: 436619 - DNA, 75 bp, synthetic construct
  source 1..75: mol_type = other DNA
gtcgtttatccaccaacaggatatcgcatcactggtgtccggcctgttctcccgcttgcgtggcggaggaggcgg

SEQ ID NO: 436620 - DNA, 75 bp, synthetic construct
  source 1..75: mol_type = other DNA
gtcacacgatctcaacggtcgaatgaccaatctggctggtgtatacggtacgttgctggaagacaacaacctcag

SEQ ID NO: 436621 - DNA, 75 bp, synthetic construct
  source 1..75: mol_type = other DNA
gtgaaaacgtcaggacatcatgcaaggtttttgatgtgtcaaccaacatcaacgcaggggacaaggataatgatc

SEQ ID NO: 436622 - DNA, 75 bp, synthetic construct
  source 1..75: mol_type = other DNA
ccaagactgacgatatcggtgatgattcagcctgatgtttaccacaaaggtttttgtacgcgaaaaaaagaaatt

SEQ ID NO: 436623 - DNA, 75 bp, synthetic construct
  source 1..75: mol_type = other DNA
aatcgagctggaccagaagcaggccgcctatctttcgtatgcctatgcaacgaccgtccataaagcgcaggggct

SEQ ID NO: 436624 - DNA, 75 bp, synthetic construct
  source 1..75: mol_type = other DNA
ccgatcagctgaaaaaggtctgccagaagccacgggggaaagcatggcgtttaaccagaaacccgatgaacataa

SEQ ID NO: 436625 - DNA, 75 bp, synthetic construct
  source 1..75: mol_type = other DNA
tgatgcgtaacaaaatgcacctgggcgatgtttacaaacaggagctggcgctggagttgaccaaagccggttatg

SEQ ID NO: 436626 - DNA, 75 bp, synthetic construct
  source 1..75: mol_type = other DNA
agacccgcgagcatggtcacacgtcacgcagtccgctggactcgctggagagcgctatcggattccacatgcgcg

SEQ ID NO: 436627 - DNA, 75 bp, synthetic construct
  source 1..75: mol_type = other DNA
gctgttatccctgctcagtttctgcaccgcgtgcagcatccacggcgttcagacccgcgagtgtggtcacacgtc

SEQ ID NO: 436628 - DNA, 75 bp, synthetic construct
  source 1..75: mol_type = other DNA
ccgtcagcgaactggctgagtccattaagggcgttggcctgctgcagaatctggttgttcatgccctgcctggtg

SEQ ID NO: 436629 - DNA, 75 bp, synthetic construct
  source 1..75: mol_type = other DNA
gaacagtaaattccgcttcgtgggggctgatgctttctcacctgacgaactgcgtactgatttgttcagcgatga

SEQ ID NO: 436630 - DNA, 75 bp, synthetic construct
  source 1..75: mol_type = other DNA
aatctggttgttcatgccctgccaggtgaccgttacggtgtcgccgcaggcggtcgccgactggcagcactcaac

SEQ ID NO: 436631 - DNA, 75 bp, synthetic construct
  source 1..75: mol_type = other DNA
aaattccgcttcgtgggggctgatgccttctcgccagatgaactgcgcaccgatttgttcagcgacgacgagggt

SEQ ID NO: 436632 - DNA, 75 bp, synthetic construct
  source 1..75: mol_type = other DNA
tcaccgctgaatgtgcgcacggtgccgtattccgcagagtccgtcagcgaactggcggagtccattaagggcgtt

SEQ ID NO: 436633 - DNA, 75 bp, synthetic construct
  source 1..75: mol_type = other DNA
cgctgggtgcctgactggatgtgtgcaccacgtccacaggcagagacggaagccacggaatgccgtgacaaccag

SEQ ID NO: 436634 - DNA, 75 bp, synthetic construct
  source 1..75: mol_type = other DNA
cggctgactggcctgtccgcgtgaaggttatcccgcaggaactggcgactgccgcatcaatgactgaaaacggtc

SEQ ID NO: 436635 - DNA, 75 bp, synthetic construct
  source 1..75: mol_type = other DNA
agggcgtggacgccggagatgcgtgccggaagtggcgtggtggtgtcctggcgttatggcaacgtgtgtgtccag

SEQ ID NO: 436636 - DNA, 75 bp, synthetic construct
  source 1..75: mol_type = other DNA
tcgcagaggctggtatggcggcaagggaggccggtcatgccgtccgtgagatggagagatggatggtgccgaaca

SEQ ID NO: 436637 - DNA, 75 bp, synthetic construct
  source 1..75: mol_type = other DNA
ctgtgttcttcccctgccatccgatgctgggcatcgtctgttcccgtccgttccttttcgtgaaggtgagcggcg

SEQ ID NO: 436638 - DNA, 75 bp, synthetic construct
  source 1..75: mol_type = other DNA
tgcgatttttcatgccgtccctgaccgcagaagaactgcgtggcaaccgttctcagtggctgtatgccgtcgatg

SEQ ID NO: 436639 - DNA, 75 bp, synthetic construct
  source 1..75: mol_type = other DNA
cgacgagggtggctatgtggactgtgttgcgctcgatgccgccctgctggaaaaactccaggctgtcgctgaaca

SEQ ID NO: 436640 - DNA, 75 bp, synthetic construct
  source 1..75: mol_type = other DNA
cagtccaggcagcactgatgcagcaaccggacaaatccctggcactgctggcatggacgctctgcctgaatgtgt

SEQ ID NO: 436641 - DNA, 75 bp, synthetic construct
  source 1..75: mol_type = other DNA
gattccgcaggagctggcgacagcggcatcaatgactgaaaacggtcatcgtcgggatatgcaccctgccgaaca

SEQ ID NO: 436642 - DNA, 75 bp, synthetic construct
  source 1..75: mol_type = other DNA
cattccgcaggagctggcgacggcagcatcaatgactgaaaacggtcatcgtcgggatatgcaccctgccgaaca

SEQ ID NO: 436643 - DNA, 75 bp, synthetic construct
  source 1..75: mol_type = other DNA
cacacgtcacgcagtccgcttgactcgctggaaaccgctatcggctttcacatgcgcgactggtggcagccgaca

SEQ ID NO: 436644 - DNA, 75 bp, synthetic construct
  source 1..75: mol_type = other DNA
gtaccaggcgctggtcgctcaggctgaaatcgaactggcattccattcgccggaaacagtcggaagctggcatgc

SEQ ID NO: 436645 - DNA, 75 bp, synthetic construct
  source 1..75: mol_type = other DNA
gccggaagaggggcaacagttcagcggtcagcctcagccggaaccacaggcggaggccggtacgaaaaaaggtgg

SEQ ID NO: 436646 - DNA, 75 bp, synthetic construct
  source 1..75: mol_type = other DNA
atgtgtccagcgtggtgtgcagttgcgcagtgaagatgacgtggctgacgacgctgaacgcacggaacaggtgcg

SEQ ID NO: 436647 - DNA, 75 bp, synthetic construct
  source 1..75: mol_type = other DNA
tcgccgactggcagcactcaacatgctggcagagcgtggcatccttccggctgactggcctgtccgtgtgaaggt

SEQ ID NO: 436648 - DNA, 75 bp, synthetic construct
  source 1..75: mol_type = other DNA
gcgaggtctgtctccttccccttcccggcgatgcagcagagcggttattcccgtcggtgcggttccgcgtcaggg

SEQ ID NO: 436649 - DNA, 75 bp, synthetic construct
  source 1..75: mol_type = other DNA
aattccgcaggagctggcgacggccgcatcaatgactgaaaacggtcatcgtcgggatatgcaccctgccgaaca

SEQ ID NO: 436650 - DNA, 75 bp, synthetic construct
  source 1..75: mol_type = other DNA
tcgccgactggctgcactcaacatgctggcagagcgtggcatcattccggctgactggcctgtgcgagtgaaggt

SEQ ID NO: 436651 - DNA, 75 bp, synthetic construct
  source 1..75: mol_type = other DNA
tcgccataaatccgcgctggtcatgcagaagtacagccgtcagcaggctcgggaggcagagcagaaagcccgtgc

SEQ ID NO: 436652 - DNA, 75 bp, synthetic construct
  source 1..75: mol_type = other DNA
ataggtgaagtgaacggcgatcgcggcaactttatgtacagccagtggaatggcggcgagggtcagtatgggcag

SEQ ID NO: 436653 - DNA, 75 bp, synthetic construct
  source 1..75: mol_type = other DNA
aaaatcaactggcagggtaaaaaaggcatcgtggatctggagtcgtgcggataccaagtgcgcaaaaatgaaaac

SEQ ID NO: 436654 - DNA, 75 bp, synthetic construct
  source 1..75: mol_type = other DNA
tcaccagcgccagtgctggcaggacggtggacgtaaaaattgcgccaaagatccggtctatcgcaagatggaaag

SEQ ID NO: 436655 - DNA, 75 bp, synthetic construct
  source 1..75: mol_type = other DNA
ggtgaagaaagcgagcaaatcgagttactcaacattcgtcaggaaacgcacgaagagcacgagcttagccgcccg

SEQ ID NO: 436656 - DNA, 75 bp, synthetic construct
  source 1..75: mol_type = other DNA
aaagatgactgtgtgcgactgaaaaatgcgctggtcaatctcggcaacagtaaagactgggacgcgctggtaaaa

SEQ ID NO: 436657 - DNA, 75 bp, synthetic construct
  source 1..75: mol_type = other DNA
tactgaataacgccttaaaaatcgccgttatgaaaaatggtgatttgtctcttattcaacttggtcttgataaag

SEQ ID NO: 436658 - DNA, 75 bp, synthetic construct
  source 1..75: mol_type = other DNA
cgatcagcaagcgttagattatgcgctttatcatctgcgcatcatgacgcctgctcacgacgagcgcagcagtat

SEQ ID NO: 436659 - DNA, 75 bp, synthetic construct
  source 1..75: mol_type = other DNA
ttgcgctcgatacgcaacagctgcgtgaacaggtgaccaacggcgttttgggagagatttacgttaccaccgccc

SEQ ID NO: 436660 - DNA, 75 bp, synthetic construct
  source 1..75: mol_type = other DNA
atccatgctgccgcaactggcgctatctggctgggggcgattcagggttttgccggggtgagcgtgcgtgacggt

SEQ ID NO: 436661 - DNA, 75 bp, synthetic construct
  source 1..75: mol_type = other DNA
atgtatccggttaccgactgggagtgcgagcgcgatgaacgcatcgcgaaggtgcagggcaatcataacccgtat

SEQ ID NO: 436662 - DNA, 75 bp, synthetic construct
  source 1..75: mol_type = other DNA
tgcgcgtggcgccattgctcgtacctacttctatatgcgcgaccagtacaatctgacgctttcccgccagcagac

SEQ ID NO: 436663 - DNA, 75 bp, synthetic construct
  source 1..75: mol_type = other DNA
aaaaagtcgccgagccaccagctcgtgcacgcggtgccattgcgcgcacatacttctatatgcgtgaccaataca

SEQ ID NO: 436664 - DNA, 75 bp, synthetic construct
  source 1..75: mol_type = other DNA
gtggcaacctccacggccccatttatcacgcatgaaacggcacgagcggcacaatcactgaatagccctgctccg

SEQ ID NO: 436665 - DNA, 75 bp, synthetic construct
  source 1..75: mol_type = other DNA
cctggctaccatctggtgcgtacctgccgtgaagcggggattcgtgtggtgccgctacccgggccgtgtgctgct

SEQ ID NO: 436666 - DNA, 75 bp, synthetic construct
  source 1..75: mol_type = other DNA
acctgggaaaacattcacggcgcgcccgtaggcgaactgctggcgtgggtaaaagaagatgaaaatcgccgcaaa

SEQ ID NO: 436667 - DNA, 75 bp, synthetic construct
  source 1..75: mol_type = other DNA
gtgggaacaagagcagacagaaggcgtctcagatccatttgccggactggaaaacgcgcttttaatagtgtctca

SEQ ID NO: 436668 - DNA, 75 bp, synthetic construct
  source 1..75: mol_type = other DNA
gcgctggccgcagagattcacggcgtgaagaaaaatgcgctgtataagtatgcgctggagcagcagggagagtga

SEQ ID NO: 436669 - DNA, 75 bp, synthetic construct
  source 1..75: mol_type = other DNA
ttactgctgcaacattttggcataaacgcccggttgttcgcgcttcatgaccataatgaacaacaaaaagccgaa

SEQ ID NO: 436670 - DNA, 75 bp, synthetic construct
  source 1..75: mol_type = other DNA
gccactaccggggccgtgtgctgctatcactgcattaagtgctgcgggtttaccatccgatcgtttttgttatga

SEQ ID NO: 436671 - DNA, 75 bp, synthetic construct
  source 1..75: mol_type = other DNA
aacctcctgtctgatgtgatcaatttacttgtgaaacgcgctgtatttcacaagcaaatttcctcagtggatgaa

SEQ ID NO: 436672 - DNA, 75 bp, synthetic construct
  source 1..75: mol_type = other DNA
catgacgaagtgaaaaacttcccgctgcaacactggctacgcagtacggttatcgctgccggatcgctgctggtg

SEQ ID NO: 436673 - DNA, 75 bp, synthetic construct
  source 1..75: mol_type = other DNA
gcctggcgacgttaccagcgtcatcgtattcgtatgctgaaaattcaggaatattacgaaagctgcctgaatcct

SEQ ID NO: 436674 - DNA, 75 bp, synthetic construct
  source 1..75: mol_type = other DNA
tgcggcggcaacagggctagtgcctcgacagtacagcacgggaggtcggacgacattgctgggaattagtaagcg

SEQ ID NO: 436675 - DNA, 75 bp, synthetic construct
  source 1..75: mol_type = other DNA
cgttatgaaaaatggcgatttatctcttattcaacttggtcttgataaagaaaaacgcgaaataactgaatctgt

SEQ ID NO: 436676 - DNA, 75 bp, synthetic construct
  source 1..75: mol_type = other DNA
caagcaaatttcctccgtggatgaactgacaaaattaacgacagaaatcgccagctattgcgctgatgaatttaa

SEQ ID NO: 436677 - DNA, 75 bp, synthetic construct
  source 1..75: mol_type = other DNA
ccaggtgcgggtgtttggtcagcatctgatgcaggggatctacaccacccaggatggacgcagtgatgtggccat

SEQ ID NO: 436678 - DNA, 75 bp, synthetic construct
  source 1..75: mol_type = other DNA
caaactttgccatatcatctggcgggaataaataatcgctttcggcgtgaaaaagggctgacaactgtcagccct

SEQ ID NO: 436679 - DNA, 75 bp, synthetic construct
  source 1..75: mol_type = other DNA
tttgatccggcggaagactggcaagagcatgttgattttgacctgaatccagatttttttgctgaagtggtcatt

SEQ ID NO: 436680 - DNA, 75 bp, synthetic construct
  source 1..75: mol_type = other DNA
atgcagactaagaaggcggctgtcgggcaatgggggcgaatttttgaatattacggcatgcctcctgttactggt

SEQ ID NO: 436681 - DNA, 75 bp, synthetic construct
  source 1..75: mol_type = other DNA
cgaactgggtgggccggaggtgagtagtctttggcaccaacaacaaaaaatccgcctttcgtcctcaaacataat

SEQ ID NO: 436682 - DNA, 75 bp, synthetic construct
  source 1..75: mol_type = other DNA
acgatgaccgggcgcaagagatactggatgcgctggagaaaaaacatggggcacttcttcagtgccgggccgtga

SEQ ID NO: 436683 - DNA, 75 bp, synthetic construct
  source 1..75: mol_type = other DNA
ggcaggaacatgttgatttcgatttgaacccggacttttttgccgaagtggtgattggtctggcggacagtgaag

SEQ ID NO: 436684 - DNA, 75 bp, synthetic construct
  source 1..75: mol_type = other DNA
gctggtctccgtggtatcggtaaagattctgtcgtttattcaccagcaggatattgcatcactggtatccggttt

SEQ ID NO: 436685 - DNA, 75 bp, synthetic construct
  source 1..75: mol_type = other DNA
agcgcgtgtgctgtctgcctggatagcggcaaaaacaggttatgacggcacatcggcagatgcgctgtgtgcggt

SEQ ID NO: 436686 - DNA, 75 bp, synthetic construct
  source 1..75: mol_type = other DNA
attctgtcgttcatccaccagcaggatatcgcatcgctggtgtcaggactgttctcccgcctgcgaggcggagga

SEQ ID NO: 436687 - DNA, 75 bp, synthetic construct
  source 1..75: mol_type = other DNA
attctgtcgtttattcaccaacaggatattgcatcactggtatccggtctgttatcccgcctgaggggcggagga

SEQ ID NO: 436688 - DNA, 75 bp, synthetic construct
  source 1..75: mol_type = other DNA
gacggtattcgggctgtttaccggaacggatttcgggattgtgtttggtgcatttgccggtgcgctgtttgtggc

SEQ ID NO: 436689 - DNA, 75 bp, synthetic construct
  source 1..75: mol_type = other DNA
tgcgcgtttgctttcagcctgggtggcatcaaaaactggttatgacggcacgtctgcagatgcattgtgtgcggt

SEQ ID NO: 436690 - DNA, 75 bp, synthetic construct
  source 1..75: mol_type = other DNA
taaaccgcctgtgatctgtacgtcggaaagcctgagatcgcgcgttcagcgtcgattttcagcgctcacggcgct

SEQ ID NO: 436691 - DNA, 75 bp, synthetic construct
  source 1..75: mol_type = other DNA
acgaaattaacgacagaaattgccagctattgcgctgatgaatttaaaaaacttaacgacaaaaggagctggtaa

SEQ ID NO: 436692 - DNA, 75 bp, synthetic construct
  source 1..75: mol_type = other DNA
aaacgcgctgtattccacaagcaaatttcctcagtggatgaactgacaaaattaacgacagaacttgccagttat

SEQ ID NO: 436693 - DNA, 75 bp, synthetic construct
  source 1..75: mol_type = other DNA
tactgaataacgccttaaaaatcgccgttatggaaaatggcgatttgtctcttattcaactttgtcttgataaag

SEQ ID NO: 436694 - DNA, 75 bp, synthetic construct
  source 1..75: mol_type = other DNA
ccgaagcgacgactaataatattgcaccacgtttactggaaaatattttagcgctactaaacaatcctgacttcg

SEQ ID NO: 436695 - DNA, 75 bp, synthetic construct
  source 1..75: mol_type = other DNA
cgactgggcgcggcggcatgattgttcgattcacccggttaccggcgcaattcaggttattgatattagctatat

SEQ ID NO: 436696 - DNA, 75 bp, synthetic construct
  source 1..75: mol_type = other DNA
cactttctgatggttttctgggcgcattcgcgcggatcccaaaggcacagcaaaaaaaggtgcaggaattcatct

SEQ ID NO: 436697 - DNA, 75 bp, synthetic construct
  source 1..75: mol_type = other DNA
tctgccggatttaggcatggcacctgaaaatcatgatggggaaaaacactttgctgaaattgtgaaagatttcgg

SEQ ID NO: 436698 - DNA, 75 bp, synthetic construct
  source 1..75: mol_type = other DNA
tcgaccatcctgattctgaatcagcggaaaatacagaaaatctaaaaaaatattgggaaggattgacttcaactg

SEQ ID NO: 436699 - DNA, 75 bp, synthetic construct
  source 1..75: mol_type = other DNA
ataatatcgtttacccctatgcagtctggcaaagcataggcggcaaccctgaaaattatctgaaccagcggccag

SEQ ID NO: 436700 - DNA, 75 bp, synthetic construct
  source 1..75: mol_type = other DNA
tcagggggacagacgccatgcgggaacgccggaagatggtgttatctcccgggagcaaatcgcccaggttcttgt

SEQ ID NO: 436701 - DNA, 75 bp, synthetic construct
  source 1..75: mol_type = other DNA
aggttaatcagcacgtagagtcctggctatcaccgtggggaaatgccagtgttgacgtcaaagtggataacgaag

SEQ ID NO: 436702 - DNA, 75 bp, synthetic construct
  source 1..75: mol_type = other DNA
cagtattttggtgatcgtgttgatttgtttaactctggtacgggttatcacaatcccgtcgcgttgagtctggga

SEQ ID NO: 436703 - DNA, 75 bp, synthetic construct
  source 1..75: mol_type = other DNA
gagcagaccgaatggcagcgcgtggtgctgttcggcaagctcgcggaagtggcaggtgaatatctgcgcaagggg

SEQ ID NO: 436704 - DNA, 75 bp, synthetic construct
  source 1..75: mol_type = other DNA
gagcagaccgaatggcatcgcgtggtgctgttcggcaagctcgcggaagtggcaggagaatatctgcgcaagggg

SEQ ID NO: 436705 - DNA, 75 bp, synthetic construct
  source 1..75: mol_type = other DNA
gagcagactgaatggcagcgcgtggtgctgttcggcaagctcgcggaagtggcaggcgaatatctgcgcaagggg

SEQ ID NO: 436706 - DNA, 75 bp, synthetic construct
  source 1..75: mol_type = other DNA
gacgcatggaggccgttggtgagtgccgtgaagatgcccgggcataccgcaacctgccgcagccggaagcagtgc

SEQ ID NO: 436707 - DNA, 75 bp, synthetic construct
  source 1..75: mol_type = other DNA
aaaacgccgccatcaggggaacacgctggcggaatatccgtatgcgggggcgtttttccgctgtctgaacggaag

SEQ ID NO: 436708 - DNA, 75 bp, synthetic construct
  source 1..75: mol_type = other DNA
cccctcagcacagagcaacaggccgcatggcaggcggtggcggagacggaaaaacgccgccatcaggggaacacg

SEQ ID NO: 436709 - DNA, 75 bp, synthetic construct
  source 1..75: mol_type = other DNA
tgacaaacagacaggggagatgcgggagcagacggaatggcagcgcgtggtgctgttcggcaagctcgcggaagt

SEQ ID NO: 436710 - DNA, 75 bp, synthetic construct
  source 1..75: mol_type = other DNA
gcaagggaggccggtcatgctgtccgtgagatggagcggtggatggtgccgaacaaactccgggaggtggcgtga

SEQ ID NO: 436711 - DNA, 75 bp, synthetic construct
  source 1..75: mol_type = other DNA
cttcagtggttgtatgccatcgatgtgctgattgaaacacagggcgaggtctgcctccttccccttcctggagat

SEQ ID NO: 436712 - DNA, 75 bp, synthetic construct
  source 1..75: mol_type = other DNA
gagcagacagaatggcatcgcgtggtgctgttcggcaagctcgcggaagtggcaggcgaatatctgcgcaagggg

SEQ ID NO: 436713 - DNA, 75 bp, synthetic construct
  source 1..75: mol_type = other DNA
tgacaaacagacgggggagatgcgggagcagaccgaatggcaacgcgtggtgctgttcggcaagctcgcggaagt

SEQ ID NO: 436714 - DNA, 75 bp, synthetic construct
  source 1..75: mol_type = other DNA
tgacaaacagaccggggagatgcgggagcagactgaatggcatcgcgtggtgctgttcggcaagctcgcggaagt

SEQ ID NO: 436715 - DNA, 75 bp, synthetic construct
  source 1..75: mol_type = other DNA
tcagtggaggaaataagtctgccactgctgacgaaaatgtcttccgaacgcacgctggcagtccaggcagcactg

SEQ ID NO: 436716 - DNA, 75 bp, synthetic construct
  source 1..75: mol_type = other DNA
tgctgttatccctgctcagtttctgcaccgcatgcagccttaacggtgtccagacccgcgagtgtggtcgcacgt

SEQ ID NO: 436717 - DNA, 75 bp, synthetic construct
  source 1..75: mol_type = other DNA
aaggccgcgcagccggagcctccgtcgcaaccgccggagggtgacgattacgggttttcagatgatatcccgttc

SEQ ID NO: 436718 - DNA, 75 bp, synthetic construct
  source 1..75: mol_type = other DNA
tgacaaacagacgggggagatgcgggagcaaacggaatggcaccgcgtggtgctgttcggcaagctcgcggaagt

SEQ ID NO: 436719 - DNA, 75 bp, synthetic construct
  source 1..75: mol_type = other DNA
ccttcgggaagccgaaggctggggatggtgcgccggacgcatggagcctgtcggtgagtgccgtgaagatgcccg

SEQ ID NO: 436720 - DNA, 75 bp, synthetic construct
  source 1..75: mol_type = other DNA
atggcagttcgtggcattaacaaggtcattctcgtcgggcgtctgggaaaagatccggaagtccgttacatcccc

SEQ ID NO: 436721 - DNA, 75 bp, synthetic construct
  source 1..75: mol_type = other DNA
cacctgcgcgactggtggcagccaacggcgaaaaacttcctcgggctgctcagtaagaaacagattgtggaagcg

SEQ ID NO: 436722 - DNA, 75 bp, synthetic construct
  source 1..75: mol_type = other DNA
ctgactggcctgtccgcgtgaaaattattccgcaggaactggcgacggccgcatcgatgaccgagaacggtcatc

SEQ ID NO: 436723 - DNA, 75 bp, synthetic construct
  source 1..75: mol_type = other DNA
acatgacgacgttcctgtcactcagtcaggaggtgctgttatccctgctcagtttctgcaccgcgtgcagcatcc

SEQ ID NO: 436724 - DNA, 75 bp, synthetic construct
  source 1..75: mol_type = other DNA
atttgttcagcgacgacgagggtggctatgtggactgcgtggcgctcgatgccgccctgctggaaaaactccagg

SEQ ID NO: 436725 - DNA, 75 bp, synthetic construct
  source 1..75: mol_type = other DNA
ccgccacgttcagcgaatgctgaaactggctgaccttgctccggttatcctcgatgcgctggcagaagaccgcat

SEQ ID NO: 436726 - DNA, 75 bp, synthetic construct
  source 1..75: mol_type = other DNA
atgccggaacataccgctgtctgccggagccggaagcggtgctgacggaggcggaagaagaacgcctgaacgaac

SEQ ID NO: 436727 - DNA, 75 bp, synthetic construct
  source 1..75: mol_type = other DNA
ctgtctgccctgctggcgcagacggaggaagtgagtgtgccgctggcttcactgattaaatcaccgctgaatgtg

SEQ ID NO: 436728 - DNA, 75 bp, synthetic construct
  source 1..75: mol_type = other DNA
cttcagtggatgtatgccatcgatgtgctgattgaaacacagggcgaggtctgcctccttcctcttcctggggat

SEQ ID NO: 436729 - DNA, 75 bp, synthetic construct
  source 1..75: mol_type = other DNA
atgaacttatctctgagacgctctacttgcgcccttctcgcctcgtcgttgttattaactatcggacgcggtgcc

SEQ ID NO: 436730 - DNA, 75 bp, synthetic construct
  source 1..75: mol_type = other DNA
tggtgagtacatgttgattgaccatattgcgccgccggggatgaaagccagttatttttccgcccagtcattagg

SEQ ID NO: 436731 - DNA, 75 bp, synthetic construct
  source 1..75: mol_type = other DNA
tgaaaaagtggtcgcagtggtcctgcctgttaatgccgcgatggtagtgacgttgcagtattccgttgggcggcg

SEQ ID NO: 436732 - DNA, 75 bp, synthetic construct
  source 1..75: mol_type = other DNA
cggccgggaaagtgccaccggcaaaagtgatggtgattggtgcgggtgttgcaggtctggccgccattggcgcag

SEQ ID NO: 436733 - DNA, 75 bp, synthetic construct
  source 1..75: mol_type = other DNA
tatgccaaagtgatgtcggacgcgttcatcaaagcagaaatggcgctctttgccgcgcaggccaaagaggttgat

SEQ ID NO: 436734 - DNA, 75 bp, synthetic construct
  source 1..75: mol_type = other DNA
cgcgtttcccatgcttttcattcaaatttgggtaaagcgcagcgagaaaatcatcgccacggaaacaggcagtgt

SEQ ID NO: 436735 - DNA, 75 bp, synthetic construct
  source 1..75: mol_type = other DNA
ttagtgagtggcgtagtgctaaccagcctgccgccttcctcgctgtttatcatcttagcgttggtgatcattgct

SEQ ID NO: 436736 - DNA, 75 bp, synthetic construct
  source 1..75: mol_type = other DNA
acgctgccatttatgaccatttacttgagtcgccagtacagcctgagtgtcgatctaatcggttatgcgatgaca

SEQ ID NO: 436737 - DNA, 75 bp, synthetic construct
  source 1..75: mol_type = other DNA
gcacgctggcagtccaggcggcactcatgcagcaaccggacaaatctctggcactgctggcatggacgctctgcc

SEQ ID NO: 436738 - DNA, 75 bp, synthetic construct
  source 1..75: mol_type = other DNA
tctcgctgtttatcatcttagcgttggtgatcgttgctgcgtgggtgctgatgttaaaaggaattcgtgcaagac

SEQ ID NO: 436739 - DNA, 75 bp, synthetic construct
  source 1..75: mol_type = other DNA
gcgatcattgctgcatgggtgctgatgttaaaaggcattcacgcaagaccctgggggcagccggttctttgttga

SEQ ID NO: 436740 - DNA, 75 bp, synthetic construct
  source 1..75: mol_type = other DNA
tttcgatcaactacaccatgctgaatattggctggactatcggcccaccactcggcacattgctggttatgcaga

SEQ ID NO: 436741 - DNA, 75 bp, synthetic construct
  source 1..75: mol_type = other DNA
cgaatatcgccggttatcgcgccattgttgaagcggcacatgaatttgggcgcttctttaccggacaaatcactg

SEQ ID NO: 436742 - DNA, 75 bp, synthetic construct
  source 1..75: mol_type = other DNA
gtgctgacgcgacgaaaaaaggtggcgcgaaaacgaaaggccgtggacgtaaggccgcgcagccagagcctcagc

SEQ ID NO: 436743 - DNA, 75 bp, synthetic construct
  source 1..75: mol_type = other DNA
ccggaagcggtgctgacggaggcagaagaagaacgcctgaacgaactgatgacgcgttacgacgcgctggaaaac

SEQ ID NO: 436744 - DNA, 75 bp, synthetic construct
  source 1..75: mol_type = other DNA
ccttcgggaagccgagggctggggatggtgtgccggacgcatggaggccgttggtgagtgccgtgaagatgcctg

SEQ ID NO: 436745 - DNA, 75 bp, synthetic construct
  source 1..75: mol_type = other DNA
cttcagtggatgtatgccatcgatgtgctgattgaaacacagggcgaggtctgcctccttccacttcctggtgat

SEQ ID NO: 436746 - DNA, 75 bp, synthetic construct
  source 1..75: mol_type = other DNA
cgtagctgggaggataacggtatcacccgttacgtcaccgaaattcttgttaagaccacgggcaccatgcagatg

SEQ ID NO: 436747 - DNA, 75 bp, synthetic construct
  source 1..75: mol_type = other DNA
gtcggaagaggcgcaacagttcagcgggcagcctcagccgcaaccgccggaaggtgacgattacgggtcttcaga

SEQ ID NO: 436748 - DNA, 75 bp, synthetic construct
  source 1..75: mol_type = other DNA
gtcatcgtcgggatatgcaccctgccgaacagattgccggattccgcgcaatggcgcaggaaggcaaaacacctg

SEQ ID NO: 436749 - DNA, 75 bp, synthetic construct
  source 1..75: mol_type = other DNA
cgaaaaaagggagcgcgaaaacgaaaggccgtggacgtaaggctgcgcagccggagcctcagccgcaaccaccgg

SEQ ID NO: 436750 - DNA, 75 bp, synthetic construct
  source 1..75: mol_type = other DNA
gggcacttcaccgttttcgcgctggcctgcgttgtcggttattacgtggtgtggaatgtatcgcatgcgctgcat

SEQ ID NO: 436751 - DNA, 75 bp, synthetic construct
  source 1..75: mol_type = other DNA
gaagatgaagaaaggcgatgcggctgaacatgcagagttccacatgaaagacaaccgctgggtgcctggctggat

SEQ ID NO: 436752 - DNA, 75 bp, synthetic construct
  source 1..75: mol_type = other DNA
atgcctgtaacgaagtgtgaaccagaaaccacccgcaaagcaagccgtaaatctgcaaaaacgcaggaaactgtc

SEQ ID NO: 436753 - DNA, 75 bp, synthetic construct
  source 1..75: mol_type = other DNA
aaattccgctttgtgggggctgatgccttctcgccagatgaactgcgcactgatttgttcagcgacgacgagggt

SEQ ID NO: 436754 - DNA, 75 bp, synthetic construct
  source 1..75: mol_type = other DNA
ccgtcagtgaactggctgattccattaagggagtcggcctgctgcagaatctggttgttcatgccctgccaggtg

SEQ ID NO: 436755 - DNA, 75 bp, synthetic construct
  source 1..75: mol_type = other DNA
cgctctgcctgaatgtgtttggcagcggggcgtacagtaaaccagcacaaatcagcctggaatgtaaacattatt

SEQ ID NO: 436756 - DNA, 75 bp, synthetic construct
  source 1..75: mol_type = other DNA
ccgccacgttcagcgaatgctggaactggctgaccttgcgcctgtcatcctcgatgcgccgtcggggaaggacgg

SEQ ID NO: 436757 - DNA, 75 bp, synthetic construct
  source 1..75: mol_type = other DNA
atgaagaaaggcgatgccgctgaacatgcagagttccacatgaaagacaaccgctgggtgcctggctggatgtgt

SEQ ID NO: 436758 - DNA, 75 bp, synthetic construct
  source 1..75: mol_type = other DNA
ctgctcagtttctgcaccgcatgcagccttaacggtgtccagacccgcgagtgtggtcgcacgtcacgcagtccg

SEQ ID NO: 436759 - DNA, 75 bp, synthetic construct
  source 1..75: mol_type = other DNA
gtgatttgctgggctattcccccgccacgttcagcgaatgctgaaactggcagaccttgccctgtcatcctcgat

SEQ ID NO: 436760 - DNA, 75 bp, synthetic construct
  source 1..75: mol_type = other DNA
atcattaaagaaagccgctgtagattcaatctgtcaatgcaacacccctttcaattatctctttcggtgttttga

SEQ ID NO: 436761 - DNA, 75 bp, synthetic construct
  source 1..75: mol_type = other DNA
ggcctgcggataatccggatcttaagccgcgtttaccggcctccattttggtgcatgaaaacagctatcaaccgc

SEQ ID NO: 436762 - DNA, 75 bp, synthetic construct
  source 1..75: mol_type = other DNA
agaagatgaagaaaggcgatgcggctgaacatgcagagcaccatatgaaagacaaccgctgggtgcctggctgga

SEQ ID NO: 436763 - DNA, 75 bp, synthetic construct
  source 1..75: mol_type = other DNA
ccgtcagcgaactggcggagtccattaagggcgtcggactgctgcagaatctggtcgtgcataccctgcctggtg

SEQ ID NO: 436764 - DNA, 75 bp, synthetic construct
  source 1..75: mol_type = other DNA
atgtgtccagcgtggtgtgcagttgcgcagtgaagatgacgcgactgatgacgctgaccgcacggaacaggtgca

SEQ ID NO: 436765 - DNA, 75 bp, synthetic construct
  source 1..75: mol_type = other DNA
actgatggcacgttacgacgcgctggaaaaccagtgtgaggaatctgacctgctggaagcagaaatgaagctgat

SEQ ID NO: 436766 - DNA, 75 bp, synthetic construct
  source 1..75: mol_type = other DNA
gcggcagaacgcttgtttccgtcggtgcggtttcgtgtcagggagcgcagtcgccataaatccgcgctggtcatg

SEQ ID NO: 436767 - DNA, 75 bp, synthetic construct
  source 1..75: mol_type = other DNA
atgagtgcacgtggtatcaacaaggtcatcgtggttggtcgtctgggtaaagatccggaagtctgttacatcccc

SEQ ID NO: 436768 - DNA, 75 bp, synthetic construct
  source 1..75: mol_type = other DNA
tcatccttgtcgggcgtctgggaaaagatccggaagtccgttacatcccaaacgggggcgcagtggcaaacctgc

SEQ ID NO: 436769 - DNA, 75 bp, synthetic construct
  source 1..75: mol_type = other DNA
aaggccgcgcagcccgatcctcagcctcatccgccggagggggaggattacggattttcagacgatatcccgttc

SEQ ID NO: 436770 - DNA, 75 bp, synthetic construct
  source 1..75: mol_type = other DNA
ggcagaagaccgcatcaccaccgagcactgtcaggcgctggcgctggagaacgacaccgcgcgtcaggtgcaggt

SEQ ID NO: 436771 - DNA, 75 bp, synthetic construct
  source 1..75: mol_type = other DNA
tgcagagcaccatatgaaagacaaccgctgggtgcctggctggatgtgtgcaccacgtccacagacggatgccac

SEQ ID NO: 436772 - DNA, 75 bp, synthetic construct
  source 1..75: mol_type = other DNA
atgtcatccgtgatttcgggattcttaagtaagagaggtgccggacgcgcgaacgtccggcaggacataagcaat

SEQ ID NO: 436773 - DNA, 75 bp, synthetic construct
  source 1..75: mol_type = other DNA
gcgtgattcagtttcgcgtagtctgggttgacgatcgcaatcaggtacaggttaaccgcgcatggcgtgtccagt

SEQ ID NO: 436774 - DNA, 75 bp, synthetic construct
  source 1..75: mol_type = other DNA
gcgtgatccagtttcgcgtggtatgggttgacgatcgcaaccaggtacaggtcaaccgtgcatggcgtgtgcagt

SEQ ID NO: 436775 - DNA, 75 bp, synthetic construct
  source 1..75: mol_type = other DNA
aggaagtgagcgtgccgctggattcactgattaaatcaccgctgaatgtgcgcacggtgccgtattctgcggagt

SEQ ID NO: 436776 - DNA, 75 bp, synthetic construct
  source 1..75: mol_type = other DNA
atgccattctggcaggtcatcacagaggctggtatggcggcaagggaggccggtcatgccgtccgtgagatggag

SEQ ID NO: 436777 - DNA, 75 bp, synthetic construct
  source 1..75: mol_type = other DNA
gcgcggataccgacgttccggcaggtgatatcggggttggtggtcgtgaagtcggctttatggcgggggtgatga

SEQ ID NO: 436778 - DNA, 75 bp, synthetic construct
  source 1..75: mol_type = other DNA
gcgtgatccagtttcgcgtggtatgggttgacgaccgtaatcaagtacaggtcaaccgcgcatggcgtgtccagt

SEQ ID NO: 436779 - DNA, 75 bp, synthetic construct
  source 1..75: mol_type = other DNA
catcggctttcacatgcgcgactggtggcagccgacgaaagcaaactttttcggacacctgaaaaagccgcagat

SEQ ID NO: 436780 - DNA, 75 bp, synthetic construct
  source 1..75: mol_type = other DNA
aaatccctggcacttctggcatggacactctgtctgaatgtatttggcagtggagcgtacagcaatcccgccaga

SEQ ID NO: 436781 - DNA, 75 bp, synthetic construct
  source 1..75: mol_type = other DNA
gaaggaaggtgccgcgttcatggcgatgatggcagaaaaagcccgtcttgcggccctgttaccggagggatggtc

SEQ ID NO: 436782 - DNA, 75 bp, synthetic construct
  source 1..75: mol_type = other DNA
ctgatggcagaaaaagcccgtcttgcagccctgttaccggagggatggtcacgggatatgacgacgttcctgtca

SEQ ID NO: 436783 - DNA, 75 bp, synthetic construct
  source 1..75: mol_type = other DNA
tggcagaagaccgcatcaccacagaacactgtcaggcgctggcgctggagaacgacaccgcgcgtcaggtgcaga

SEQ ID NO: 436784 - DNA, 75 bp, synthetic construct
  source 1..75: mol_type = other DNA
atgtcagttacagagtctaaggcaaaaacgggacataaatccagctgtaaacctgcaaaaacgcaggatactgtc

SEQ ID NO: 436785 - DNA, 75 bp, synthetic construct
  source 1..75: mol_type = other DNA
tcagtttctgcaccgcatgcagccttaacggtgtccagacccgtgagtgtggtcacacgtcacgcagtccgcttg

SEQ ID NO: 436786 - DNA, 75 bp, synthetic construct
  source 1..75: mol_type = other DNA
cgacgcgctggaaaaccagtgtgaggaatccgacctgctggaagcagaaatgaagctgatgcgctgtatagcgaa

SEQ ID NO: 436787 - DNA, 75 bp, synthetic construct
  source 1..75: mol_type = other DNA
acgttacgacgcgctggaaaaccagtgtgaggaatctgacctgctggaagcagaaatgaagctgatgcgctgcat

SEQ ID NO: 436788 - DNA, 75 bp, synthetic construct
  source 1..75: mol_type = other DNA
gtacggctgggacggcgaccggctgaccacgatacagaacgacaggagccgcatccagacgatttatcagccggg

SEQ ID NO: 436789 - DNA, 75 bp, synthetic construct
  source 1..75: mol_type = other DNA
tgacgacgctgaccgcacggaacaggggctggagagcgcgtcagtggaggaaatcagtctgccgttgctgactaa

SEQ ID NO: 436790 - DNA, 75 bp, synthetic construct
  source 1..75: mol_type = other DNA
agctcgcggaagtggctggtgaatatctgcgcaagggcgcgcaggtctacatcgaaggtcagcttcgcacccgta

SEQ ID NO: 436791 - DNA, 75 bp, synthetic construct
  source 1..75: mol_type = other DNA
aacgggggcgcagtggcaaacctgcaggtcgctacgtcggaaacctggcgtgacaaacagacaggggagatgcgg

SEQ ID NO: 436792 - DNA, 75 bp, synthetic construct
  source 1..75: mol_type = other DNA
gcctgaacgaactgatggcacgttacgacgcgctggaaaaccagtgtgaggaatctgacctgctggaagcagaaa

SEQ ID NO: 436793 - DNA, 75 bp, synthetic construct
  source 1..75: mol_type = other DNA
gaatgtgtttggcagcggagcgtacagtaaaccagcacaaatcagcctggaatgtgaacattattcgctgaccag

SEQ ID NO: 436794 - DNA, 75 bp, synthetic construct
  source 1..75: mol_type = other DNA
gaaggaaggtgccgcattcatggcgatgatggcagaaaaatcccgtcttgcagccctgctgccggagggatggtc

SEQ ID NO: 436795 - DNA, 75 bp, synthetic construct
  source 1..75: mol_type = other DNA
aaaaactccaggctgtcgcagagttccttcgggaagccgagggctggggatggtgcgccggacgcatggagcctg

SEQ ID NO: 436796 - DNA, 75 bp, synthetic construct
  source 1..75: mol_type = other DNA
cgcagtgaggatgatgtggctgacgacgctgaccacacggaacaggtgcaggagaaagcctccgtggaggaaatc

SEQ ID NO: 436797 - DNA, 75 bp, synthetic construct
  source 1..75: mol_type = other DNA
cgacgagggtggctatgtggactgtgttgcgctcgatgctgccctgctggaaaaactccaggctgttgctgaaca

SEQ ID NO: 436798 - DNA, 75 bp, synthetic construct
  source 1..75: mol_type = other DNA
tgcagagcaccatatgaaagacaaccgctgggttccaggctggatgtgtgcaccacatccacagacagatgccac

SEQ ID NO: 436799 - DNA, 75 bp, synthetic construct
  source 1..75: mol_type = other DNA
tgccgcacgggacgcggagaagatgaagaaaggtgatgcggctgaacatgcagagcaccatatgaaagacaaccg

SEQ ID NO: 436800 - DNA, 75 bp, synthetic construct
  source 1..75: mol_type = other DNA
ctggctgaccttgccccggttatcctcgatgcgctggcagaagaccgcatcaccaccgaacactgtcaggcgctg

SEQ ID NO: 436801 - DNA, 75 bp, synthetic construct
  source 1..75: mol_type = other DNA
ctggaatgtaaacattattcgctgaccagcgatgcgccatcggggaaggaaggtgccgcattcctggcgctgatg

SEQ ID NO: 436802 - DNA, 75 bp, synthetic construct
  source 1..75: mol_type = other DNA
accgggtggcagagcatgacctggaaaccctgttctggcagtggggcgagcgtttcccgtcactggccggaatgg

SEQ ID NO: 436803 - DNA, 75 bp, synthetic construct
  source 1..75: mol_type = other DNA
aaaaagcccgtcttgcagccctgttaccggagggatggtcacgggacatgacgacgttcctgtcactcagccagg

SEQ ID NO: 436804 - DNA, 75 bp, synthetic construct
  source 1..75: mol_type = other DNA
agcaatcccgcaaaaattcgtctggaatgtgagcattatgcgctgaccagcgatgcgccatcggggaaggaaggt

SEQ ID NO: 436805 - DNA, 75 bp, synthetic construct
  source 1..75: mol_type = other DNA
aaatggcttcctggctggttgagtggaaaaatgccactgaaacgcaatggcttaaagattcccccagtcacagcc

SEQ ID NO: 436806 - DNA, 75 bp, synthetic construct
  source 1..75: mol_type = other DNA
atgacaaaaatgagtcgctacgccttgattaccgcgctggcgatgtttctcgccgggtgtgtggggcaacgtgaa

SEQ ID NO: 436807 - DNA, 75 bp, synthetic construct
  source 1..75: mol_type = other DNA
gtttcgttttcaaccgtgctctggcgcttcagaatgagaatcatgaggccggtaaaaaatacatcccttacacga

SEQ ID NO: 436808 - DNA, 75 bp, synthetic construct
  source 1..75: mol_type = other DNA
cggtatacagcctgattaaccgggatgtggaaagggcactgtccgggcttgagagtgtgaaaccgtctcaggtgc

SEQ ID NO: 436809 - DNA, 75 bp, synthetic construct
  source 1..75: mol_type = other DNA
aatggtgtgattgaacgggcacgcgccggtatcgatgaggccatcagtcgtgagcagcttatccccctcgaccgt

SEQ ID NO: 436810 - DNA, 75 bp, synthetic construct
  source 1..75: mol_type = other DNA
tcaggttcaggggcagttgacatttaatgtcttagacgagcgactggatgcggcaatatgcggttacggcattgc

SEQ ID NO: 436811 - DNA, 75 bp, synthetic construct
  source 1..75: mol_type = other DNA
cagtgagccaggttctggatgagatgcgcgagcgccctatccctctgggcgtctccagtcgtcatattcaccttt

SEQ ID NO: 436812 - DNA, 75 bp, synthetic construct
  source 1..75: mol_type = other DNA
ggctttaccgtggtggtgctggatagcaaaaatctggaggggatattgtgcggggagcctattacaacgaaatag

SEQ ID NO: 436813 - DNA, 75 bp, synthetic construct
  source 1..75: mol_type = other DNA
gaatgtaaatcccccggcaagccaccacggcctgaccagttgcgcgaacacggacggttgcgcgcgctgggcttt

SEQ ID NO: 436814 - DNA, 75 bp, synthetic construct
  source 1..75: mol_type = other DNA
accggggcgcaaatatccgcagccgtatgtggcactgccggcgtttgaccgtaacggcaagtcagccggtatctg

SEQ ID NO: 436815 - DNA, 75 bp, synthetic construct
  source 1..75: mol_type = other DNA
cgtggaatcccggtgccatcaccggtggccgcgtgtggggggatatcccggacaacagcgtccagccgggagccg

SEQ ID NO: 436816 - DNA, 75 bp, synthetic construct
  source 1..75: mol_type = other DNA
gaccacggatgacggaaacgggctgcggggattcagtggtgaaggccgggtgaaaggcagcggggatgcgcagtt

SEQ ID NO: 436817 - DNA, 75 bp, synthetic construct
  source 1..75: mol_type = other DNA
aatggtgtgattgaacgggcacgcgccggtatcgacgaggccatcagccgtgagcaactcatcccccttgaccgt

SEQ ID NO: 436818 - DNA, 75 bp, synthetic construct
  source 1..75: mol_type = other DNA
ttgatacccaatcgctggtcgcgctgattcgtcgtcatgaaccggcattattgattggcaactggtttagccagc

SEQ ID NO: 436819 - DNA, 75 bp, synthetic construct
  source 1..75: mol_type = other DNA
atccttacgatatgaataaaatcattgaactccgacgcgccaaaatgctggcgctctctttgctgctcgtcgccg

SEQ ID NO: 436820 - DNA, 75 bp, synthetic construct
  source 1..75: mol_type = other DNA
atgaataaactcattgaactcagacgcgccaaaatgttggcgctctctttattgcttatcgccgctgctaccttt

SEQ ID NO: 436821 - DNA, 75 bp, synthetic construct
  source 1..75: mol_type = other DNA
tgaagcttttaaccgctatctcagtgaattgtggggggatttacgggaatggctgaagcggatatcaacagtgaa

SEQ ID NO: 436822 - DNA, 75 bp, synthetic construct
  source 1..75: mol_type = other DNA
atttttgggtgagcggcgtgaaggcgattgctgaagcggcgatggtgggcgcgctggcggactggtttgcggtgg

SEQ ID NO: 436823 - DNA, 75 bp, synthetic construct
  source 1..75: mol_type = other DNA
attattccgcgtaataaagaccggattggcgaaaatctcggccagttcgtgcaggaaaaatttctcgatacccaa

SEQ ID NO: 436824 - DNA, 75 bp, synthetic construct
  source 1..75: mol_type = other DNA
tgaacatgctgccggagagtgagcgtccccgtgtcgttgggctgggtcccacgcaccgtgcggtcggggagatgc

SEQ ID NO: 436825 - DNA, 75 bp, synthetic construct
  source 1..75: mol_type = other DNA
gaatggatgcagacgctgaaggaaaccgggttcgacatccgggcatatcgtgacgcggtggatcaacgggccgct

SEQ ID NO: 436826 - DNA, 75 bp, synthetic construct
  source 1..75: mol_type = other DNA
ccgtggattttgctgttcgtcaggtggaggcgctggcctccacacgggttatgacggacggacagtcagaaacgg

SEQ ID NO: 436827 - DNA, 75 bp, synthetic construct
  source 1..75: mol_type = other DNA
aagtggatctttccggcaccagtgcattgatgctggagagcatgaccaaaaacaatcgtcatcaggtgcttctgg

SEQ ID NO: 436828 - DNA, 75 bp, synthetic construct
  source 1..75: mol_type = other DNA
atacatttttatggaagatatctcgatttttacgcgcccccggcaccaggctctattcttaatgttatgaataaa

SEQ ID NO: 436829 - DNA, 75 bp, synthetic construct
  source 1..75: mol_type = other DNA
tgttcagtacggcacgggaactgcgggacgtggcggcaggccgtgccgttctccgtcaggcggggctggccgggg

SEQ ID NO: 436830 - DNA, 75 bp, synthetic construct
  source 1..75: mol_type = other DNA
gcacgaacggctgcgcgcgttgggctttaccgtggtggtattagatagcaaaaatctggaggggatattgtgcgg

SEQ ID NO: 436831 - DNA, 75 bp, synthetic construct
  source 1..75: mol_type = other DNA
agcaggtcatggtgcctgtcctgaacacagcgaatatacgcgacggagagctgcgtcgtctctccacctgggaga

SEQ ID NO: 436832 - DNA, 75 bp, synthetic construct
  source 1..75: mol_type = other DNA
cggttacagcgatgcggtcagtgttctggcacaggaccgtccgccgctggctattgtgtcagggcagggtggcgc

SEQ ID NO: 436833 - DNA, 75 bp, synthetic construct
  source 1..75: mol_type = other DNA
agaattgccggtgaaggtcgtccgtggaatcccggtgccatcaccggcggtcgcgtgtggggggatatcccggac

SEQ ID NO: 436834 - DNA, 75 bp, synthetic construct
  source 1..75: mol_type = other DNA
gtcagcctacgtggccctgtcgcgtatgaagcagcatgtgcaggtgtacaccgataaccgtcagggctggacgga

SEQ ID NO: 436835 - DNA, 75 bp, synthetic construct
  source 1..75: mol_type = other DNA
agtggtgtggtggtaagaatcgccggtgaaggccgtccgtggaatcccggtgccataaccggtggtcgcgtgtgg

SEQ ID NO: 436836 - DNA, 75 bp, synthetic construct
  source 1..75: mol_type = other DNA
aattgtccgtaaaatggcagagaacaaacctgacctgccggacgacaaaacagagcaggcagtcagggaggttgc

SEQ ID NO: 436837 - DNA, 75 bp, synthetic construct
  source 1..75: mol_type = other DNA
tcccccttgaccgtgagaaggggctgttcacatccgggattcatgtgctcgatgagctgtcagtccgggcactca

SEQ ID NO: 436838 - DNA, 75 bp, synthetic construct
  source 1..75: mol_type = other DNA
atgccgtacagaaaggaacggcccacgatgtatttgagccgaaaccggaccgggaggtcatgaatgcagagcggc

SEQ ID NO: 436839 - DNA, 75 bp, synthetic construct
  source 1..75: mol_type = other DNA
taccgacaaggataattactatgtactgggcagcatgggagaacgctgggccggcaagggggctgaacagctggg

SEQ ID NO: 436840 - DNA, 75 bp, synthetic construct
  source 1..75: mol_type = other DNA
ttgaccgtaacggcaagtccgccggtatctggctgaacccactgaccacggatgacggaaacgggctgcggggat

SEQ ID NO: 436841 - DNA, 75 bp, synthetic construct
  source 1..75: mol_type = other DNA
gccatcaccgcccacggtgcgcagggggcgagtgaaacctttgccatcgcgcttgaaggcacggaaggtaaccgg

SEQ ID NO: 436842 - DNA, 75 bp, synthetic construct
  source 1..75: mol_type = other DNA
ggtatcagcagggatgacgggctgataaccctggaggatgcggaaggtaacacgcggctgatttcgccccgggag

SEQ ID NO: 436843 - DNA, 75 bp, synthetic construct
  source 1..75: mol_type = other DNA
gatggccggctttgagtcagcctacgttgccctgtcgcgtatgaagcagcatgtgcaggtgtacactgatgaccg

SEQ ID NO: 436844 - DNA, 75 bp, synthetic construct
  source 1..75: mol_type = other DNA
ttccattctcgcgtttgtcgaacaaggcgatcatgtgttgatgaccaacacagcctacgaaccgagtcaggattt

SEQ ID NO: 436845 - DNA, 75 bp, synthetic construct
  source 1..75: mol_type = other DNA
cgggaccttgattcgcctgcatattggtctggaagatgtcgatgatttgattgccgatctggacgccggttttgc

SEQ ID NO: 436846 - DNA, 75 bp, synthetic construct
  source 1..75: mol_type = other DNA
gtcagtccgttcctttgcggtgttatcgctctgtcactgctgtatgccgcttatgcttcgcaaactctgcgtggc

SEQ ID NO: 436847 - DNA, 75 bp, synthetic construct
  source 1..75: mol_type = other DNA
tggctggcagaacatccgcaagtagcgcgagttaaccaccctgctctgcctggcagtaaaggacacgaattctgg

SEQ ID NO: 436848 - DNA, 75 bp, synthetic construct
  source 1..75: mol_type = other DNA
tggctggcagcgcatccgctggttgagcgggttaaccaccctgctctgccggaaagtaaaggccatgagttctgg

SEQ ID NO: 436849 - DNA, 75 bp, synthetic construct
  source 1..75: mol_type = other DNA
gggagaatgcctatctgatgggccagatggtcgatgccgataccgcctatataaccagccgtggcctgcgcactt

SEQ ID NO: 436850 - DNA, 75 bp, synthetic construct
  source 1..75: mol_type = other DNA
cctctaaacacctggcggatactggcgtactcgggggattatctccggtgcgatcgcagcgtacatgtttaaccg

SEQ ID NO: 436851 - DNA, 75 bp, synthetic construct
  source 1..75: mol_type = other DNA
gctgccggtatccgtactgcctatcgcaggtattctgctgggcgtcggttccgcgaatttcagctggctgcccgc

SEQ ID NO: 436852 - DNA, 75 bp, synthetic construct
  source 1..75: mol_type = other DNA
atgtttaagaatgcatttgctaacctgcaaaaggtcggtaaatcgctgatgctgccggtatccgtactgcctatc

SEQ ID NO: 436853 - DNA, 75 bp, synthetic construct
  source 1..75: mol_type = other DNA
gcgccgccgggatgaccgtcggccttgccgtttgtgcattgattgtcggactggcgctggcgatgttcttcgcgg

SEQ ID NO: 436854 - DNA, 75 bp, synthetic construct
  source 1..75: mol_type = other DNA
gacgttaaaaaatggcgatagcaaaacggttattgttctcgtaatgcacagtttccacttaaggcaagagctatc

SEQ ID NO: 436855 - DNA, 75 bp, synthetic construct
  source 1..75: mol_type = other DNA
ctgtccttcatttggccgccgattggttctgcaatccagaccttctctcagtgggctgcttaccagaacccggta

SEQ ID NO: 436856 - DNA, 75 bp, synthetic construct
  source 1..75: mol_type = other DNA
ggcgagcttattcaggttttacaggagtggtgtccaacttttcccggatattacctttactatcccagccgtaag

SEQ ID NO: 436857 - DNA, 75 bp, synthetic construct
  source 1..75: mol_type = other DNA
cagagagtatcccgaaatcaatgtcgaactggtggtggataacggttttgtcgatattgttgaaggtcgttttga

SEQ ID NO: 436858 - DNA, 75 bp, synthetic construct
  source 1..75: mol_type = other DNA
gaactggtggttgataacggttttgtcgatattgttgaggggcgttttgatgccgggatccgcctgggcgaaagc

SEQ ID NO: 436859 - DNA, 75 bp, synthetic construct
  source 1..75: mol_type = other DNA
aggaagttgcggcatcacgcaataacgatacgtaccaggagtatgcgggggctgcactggcccgcatggtgagcg

SEQ ID NO: 436860 - DNA, 75 bp, synthetic construct
  source 1..75: mol_type = other DNA
aaagcagctttcgtggaaatggacagcctggcgttacgtgaaagcctggcgcggtacgaagagtacgaagaagtt

SEQ ID NO: 436861 - DNA, 75 bp, synthetic construct
  source 1..75: mol_type = other DNA
actacactcctggtgatgaagtacttgtggttacccgggacggtgaggtcatggttaaaaccttcttgttcgaac

SEQ ID NO: 436862 - DNA, 75 bp, synthetic construct
  source 1..75: mol_type = other DNA
tgtcgatattgttgaaggccgttttgatgccgggatacgtctgggtgaaactgtagataaagatatgattgcagt

SEQ ID NO: 436863 - DNA, 75 bp, synthetic construct
  source 1..75: mol_type = other DNA
tgtcgatattgttgaaggacgttttgatgccgggatacgtctgggtgaaactgtcgataaagatatgattgcagt

SEQ ID NO: 436864 - DNA, 75 bp, synthetic construct
  source 1..75: mol_type = other DNA
tccatcaattcacatgccgcgctgggcttcgcgtattttgctggaaattaccgacgtgcgtgtggaacggctgcg

SEQ ID NO: 436865 - DNA, 75 bp, synthetic construct
  source 1..75: mol_type = other DNA
tgtcgatattgttgaagggcgttttgatgccgggatacgtctgggtgaaactgtcgataaggatatgattgcagt

SEQ ID NO: 436866 - DNA, 75 bp, synthetic construct
  source 1..75: mol_type = other DNA
tgtcgatattgttgaaggccgttttgatgccgggatacgtctgggtgaaactgtggataaggatatgattgcagt

SEQ ID NO: 436867 - DNA, 75 bp, synthetic construct
  source 1..75: mol_type = other DNA
tgtcgatattgttgaaggccgttttgatgccgggatacgtctgggtgaaactgtcgataacgatatgattgcagt

SEQ ID NO: 436868 - DNA, 75 bp, synthetic construct
  source 1..75: mol_type = other DNA
cattgaacgaaagagaaaaaatgagaacgaaaccaatgcgatacaggatggagcaaacgccgcaaatgaaaccta

SEQ ID NO: 436869 - DNA, 75 bp, synthetic construct
  source 1..75: mol_type = other DNA
agccgctgtattaccagttctggcactacatcagcaacgccgtacagggggattttggtctgtcgatggtgtcgc

SEQ ID NO: 436870 - DNA, 75 bp, synthetic construct
  source 1..75: mol_type = other DNA
atggtgacagaatcgcgtttacaactgtgattgagagaaaaaatacaattgaaaaacaagaggataaatctagtt

SEQ ID NO: 436871 - DNA, 75 bp, synthetic construct
  source 1..75: mol_type = other DNA
acccatttttagaaggaatggttgtacctgtcaaggggaagcaagttaggctttcgcgtctaggtcgtgatgata

SEQ ID NO: 436872 - DNA, 75 bp, synthetic construct
  source 1..75: mol_type = other DNA
taatggtcgggtagtcgctaaaccctgcactattcaaaccaaagaagctaacgttaatctcggggatctttatac

SEQ ID NO: 436873 - DNA, 75 bp, synthetic construct
  source 1..75: mol_type = other DNA
gacgttaaaaaatggcgatagcaaaacggttatagttgctggaatgattacggcggctggtacgacactgatcat

SEQ ID NO: 436874 - DNA, 75 bp, synthetic construct
  source 1..75: mol_type = other DNA
atgcttaattacgttatcaaacgcttactggggttgattccaacgctgtttatcgtctcggtgctggtgttttta

SEQ ID NO: 436875 - DNA, 75 bp, synthetic construct
  source 1..75: mol_type = other DNA
ggatggacgtttttgagaacgagtttgaaaacacgaccgtttcggttcgcatcctgtacgccgaacgtattcaac

SEQ ID NO: 436876 - DNA, 75 bp, synthetic construct
  source 1..75: mol_type = other DNA
aagaagcagtctcgcgtgaaagccgctctggagctggctgagcagcgtgaaaagccaacctgggctggaagttga

SEQ ID NO: 436877 - DNA, 75 bp, synthetic construct
  source 1..75: mol_type = other DNA
tcaagctgagccgtcgtgagggcaccgacttattccttaagtctgacgttcgcgcgatcgataccaagtgtaaaa

SEQ ID NO: 436878 - DNA, 75 bp, synthetic construct
  source 1..75: mol_type = other DNA
tgctcagctcggcctggcggaacaactgttgctcggtgctgatgaatcccctaatgattttggtaaaaatcatta

SEQ ID NO: 436879 - DNA, 75 bp, synthetic construct
  source 1..75: mol_type = other DNA
aatcttaccgcagagccagtgtggtcagtgcggttatcccggctgtcgcccctacgcggaagccatcagctgtaa

SEQ ID NO: 436880 - DNA, 75 bp, synthetic construct
  source 1..75: mol_type = other DNA
aatatgtatattccctgctcggtgcaggggaaggggataccctcctggagcctaatattggccatgcggatttgc

SEQ ID NO: 436881 - DNA, 75 bp, synthetic construct
  source 1..75: mol_type = other DNA
cccgatgatgccgactggaaacctcacactgtgaatgaaaagtttgatggcgggtggtgtccatcaattcacatg

SEQ ID NO: 436882 - DNA, 75 bp, synthetic construct
  source 1..75: mol_type = other DNA
gatctccgcgaacgtcttcagtcttcatctctgggagatctgacaaataatattaagtccggcatcagttctgcg

SEQ ID NO: 436883 - DNA, 75 bp, synthetic construct
  source 1..75: mol_type = other DNA
cgccggtgtctgatatgctttcgggaatgaaagggaagttaagttcggtctggaataccacagtaagcggcgtaa

SEQ ID NO: 436884 - DNA, 75 bp, synthetic construct
  source 1..75: mol_type = other DNA
acaggacgcccctggcctctgattgatggtgtcgggcagatttacggcatgtatgtactgactgaaacgaatacg

SEQ ID NO: 436885 - DNA, 75 bp, synthetic construct
  source 1..75: mol_type = other DNA
ggggcacgccgttcttgcctgtggagagatggtgcagtcaggccgctcgttgaagcaggaacccaccgaaatgat

SEQ ID NO: 436886 - DNA, 75 bp, synthetic construct
  source 1..75: mol_type = other DNA
gcagaaggcgatctgcgtcgctcgttaggaaaagtgttgctggcgctggagcactggcaggcgcagccagagccg

SEQ ID NO: 436887 - DNA, 75 bp, synthetic construct
  source 1..75: mol_type = other DNA
tatcggtgcaggtgatgatcgcatcgttctttctggtgttctttatcctgagattactggtggcgaagtgtcgct

SEQ ID NO: 436888 - DNA, 75 bp, synthetic construct
  source 1..75: mol_type = other DNA
ttttgtagtcggaatgcatcttttttataaaaggaaagagtatattaaaggagttttatgtcataaaaatgcttc

SEQ ID NO: 436889 - DNA, 75 bp, synthetic construct
  source 1..75: mol_type = other DNA
atgacgttatgtataaaaaggccgctgcggtggagagtatcgcagcggccttttcaacataacgcgtgtcacatt

SEQ ID NO: 436890 - DNA, 75 bp, synthetic construct
  source 1..75: mol_type = other DNA
ggcggcgtttcagaccatcgtggaaattggcgacgagctgctgctgatgcgcatcctcgaccaggccttccccgg

SEQ ID NO: 436891 - DNA, 75 bp, synthetic construct
  source 1..75: mol_type = other DNA
gatttgcgggaacgcctgcaatcctcatcgttcagcgatatgctgtccggcttcaaagataaggtgacatcatct

SEQ ID NO: 436892 - DNA, 75 bp, synthetic construct
  source 1..75: mol_type = other DNA
gtacgttttaacacgtctggagcggggaaagtccgagttcgaccgatttgggaatccaaaaaaaatcgaatttac

SEQ ID NO: 436893 - DNA, 75 bp, synthetic construct
  source 1..75: mol_type = other DNA
tgttattgctggtggtactgggtatcgccgctggtgtgggcgtctggaaggttcgccatcttgccgacagcaaat

SEQ ID NO: 436894 - DNA, 75 bp, synthetic construct
  source 1..75: mol_type = other DNA
ttaccgcctgcccgccgttaaatcacgggcgggcgagaagatccgcgcccggcttaagggtgtgggtgtgctgcg

SEQ ID NO: 436895 - DNA, 75 bp, synthetic construct
  source 1..75: mol_type = other DNA
gggcacgccgttcttgcctgtggagagatggtgcagtcaggccgcccgttgaagcaggaacccaccgaaatgatt

SEQ ID NO: 436896 - DNA, 75 bp, synthetic construct
  source 1..75: mol_type = other DNA
aatgtccgggcaaaatcaggtttaaaccgtccgatactggatcagggctggtatgaaatacgccgccagcttgag

SEQ ID NO: 436897 - DNA, 75 bp, synthetic construct
  source 1..75: mol_type = other DNA
tagcggcggggcacgccgttcttgcctgtggagggatggtgcagtcaggccgcccgttgaagcaggaacccaccg

SEQ ID NO: 436898 - DNA, 75 bp, synthetic construct
  source 1..75: mol_type = other DNA
ttatcgcgttggttttggtgatatctggcgcggtatttacgggcaagagaactggctatctaacccgtgggtatg

SEQ ID NO: 436899 - DNA, 75 bp, synthetic construct
  source 1..75: mol_type = other DNA
cgtacaagattacaccgccggaagcggtttatcgcgttggctttggtgatatctggcgcggtatttacgggcaag

SEQ ID NO: 436900 - DNA, 75 bp, synthetic construct
  source 1..75: mol_type = other DNA
atgccgcgctgggcttcacgtattttgctggaaattaccgacgtgcgtgtggaacggctgcatgacatgagcgag

SEQ ID NO: 436901 - DNA, 75 bp, synthetic construct
  source 1..75: mol_type = other DNA
atctgcgtaaaggcacggcgttacatctgtacctgcccggcgctcacggcggtgtgtggaacgagcaggcgctga

SEQ ID NO: 436902 - DNA, 75 bp, synthetic construct
  source 1..75: mol_type = other DNA
gtgccaggtggcagagccggaacgggcgttcagtctgttgctggatggcgcggttccggtggctgacgtcgtggg

SEQ ID NO: 436903 - DNA, 75 bp, synthetic construct
  source 1..75: mol_type = other DNA
cgctgatccaggcgatcgcgctgctgcaccagtatcagcgggagatcaaacgtgtggagcatcgcgggcaggtgg

SEQ ID NO: 436904 - DNA, 75 bp, synthetic construct
  source 1..75: mol_type = other DNA
tgcttcggctgtaacgcgggcggatcggtgctgaactgggtgatgcagacggaaaaactcagcctgcgtaaggcg

SEQ ID NO: 436905 - DNA, 75 bp, synthetic construct
  source 1..75: mol_type = other DNA
ctcacgttcatgagcgacaaaacccgcacccggcgcgaccacatgaaatacctgacgctgatccaggcgatcgcg

SEQ ID NO: 436906 - DNA, 75 bp, synthetic construct
  source 1..75: mol_type = other DNA
gccgatgcggcgagtatcgcgccgcaggccagcgcagagcctgcacaccttaccgctttagccgctgatgtcgcc

SEQ ID NO: 436907 - DNA, 75 bp, synthetic construct
  source 1..75: mol_type = other DNA
tcctgaatccacgggcgcggcggcaacggttacgctgacggtgaccggggcggcaaccgaaaccggcacggtgaa

SEQ ID NO: 436908 - DNA, 75 bp, synthetic construct
  source 1..75: mol_type = other DNA
ccgggagccggacagactcactgactatctgaccggggagattcttgcagcactggctgactggttttatctcag

SEQ ID NO: 436909 - DNA, 75 bp, synthetic construct
  source 1..75: mol_type = other DNA
ccgcccgtatgatgctctccctggacagggagcgaatttgcgaatgcctgctcagtcatcgccagctgcagtcca

SEQ ID NO: 436910 - DNA, 75 bp, synthetic construct
  source 1..75: mol_type = other DNA
atgaaaactgacagcacagctcttgccgcccgtatgatactctccctggacagggagcgaatttgcgaatgcctg

SEQ ID NO: 436911 - DNA, 75 bp, synthetic construct
  source 1..75: mol_type = other DNA
ctgcaggattatttcagcccgcgagaatatggacattattctctggcatggttttccgtttgccggaacgcattc

SEQ ID NO: 436912 - DNA, 75 bp, synthetic construct
  source 1..75: mol_type = other DNA
tcataaggggctttgcgggaatgaaattcctgtcagcctcaattactacggctttggtgggggcgaagtgctgcc

SEQ ID NO: 436913 - DNA, 75 bp, synthetic construct
  source 1..75: mol_type = other DNA
agcactggatgtccgtactggcgcacagccaaccggctgaactggcagcccgcctgaaagcactgaacatcaccg

SEQ ID NO: 436914 - DNA, 75 bp, synthetic construct
  source 1..75: mol_type = other DNA
atggttctggtggtggtgagattctgccagcagggcttcgggtggtgacggaagtcggtgctgccggtagcggag

SEQ ID NO: 436915 - DNA, 75 bp, synthetic construct
  source 1..75: mol_type = other DNA
aaatgccgattgatatggcatttgctgctgcgggctatggctttatttatggattatggccaatagcgtggatta

SEQ ID NO: 436916 - DNA, 75 bp, synthetic construct
  source 1..75: mol_type = other DNA
tggtcccggtcaggcgattgtcaccccggcggtgatcaaaggggaactgctggcaacctaccgtcagcttgagcg

SEQ ID NO: 436917 - DNA, 75 bp, synthetic construct
  source 1..75: mol_type = other DNA
tgtttatgtgggacgtacccgcgtgcaggctccggtgaccaacggcgataacgtcgcgacgattgccagcagtat

SEQ ID NO: 436918 - DNA, 75 bp, synthetic construct
  source 1..75: mol_type = other DNA
tgaaactggcctggtacagattcaggcgcggatgggcggcaccggcgaacgcttttttgccggcgacgccacgct

SEQ ID NO: 436919 - DNA, 75 bp, synthetic construct
  source 1..75: mol_type = other DNA
ggcttccatttatagtcacaatacctctattctggtgtgggttattattttcaccttttgaacctgatgcctaca

SEQ ID NO: 436920 - DNA, 75 bp, synthetic construct
  source 1..75: mol_type = other DNA
cgaagatcatcagcgcagcgatattcgccatctcatctggtcggtgaatgaaaccatcagctacctgtcaggctt

SEQ ID NO: 436921 - DNA, 75 bp, synthetic construct
  source 1..75: mol_type = other DNA
cgaaacgctggcgctgccgtatccggcgcagaccgataactatcattacgaaattgaactggtggtggcgattgg

SEQ ID NO: 436922 - DNA, 75 bp, synthetic construct
  source 1..75: mol_type = other DNA
gcgcgtataattgcttgaagtcatatgcatattacgagaatttaaacttctatctgaaagctgaaatagcaaaat

SEQ ID NO: 436923 - DNA, 75 bp, synthetic construct
  source 1..75: mol_type = other DNA
ataccttggtttgggagaaacgataaataaagcctccggagctatgcagaaatcggctaatggatctgatatttc

SEQ ID NO: 436924 - DNA, 75 bp, synthetic construct
  source 1..75: mol_type = other DNA
gttgaacttgatgataatgtgtggttttttgcgatgaatatggatatgcccacatcggatggtttagggctgcgc

SEQ ID NO: 436925 - DNA, 75 bp, synthetic construct
  source 1..75: mol_type = other DNA
ccctttgccgtgtcacagaacagtgccgacgcctcttatttacagcagatggcgctgtcatttattgccctccgt

SEQ ID NO: 436926 - DNA, 75 bp, synthetic construct
  source 1..75: mol_type = other DNA
gatgttgatgctgttccggcacgtaacgttggactgctactgggggctaaacccgggaataattactttacccgg

SEQ ID NO: 436927 - DNA, 75 bp, synthetic construct
  source 1..75: mol_type = other DNA
cgccagcaagcagctgacctggagcgatatcaacgccgttccggcgcgtaacgtgggtttattgctgggagcgag

SEQ ID NO: 436928 - DNA, 75 bp, synthetic construct
  source 1..75: mol_type = other DNA
gtttgttttttatgcattaccgtggcgtcttaaaggtgttcgctatgtacccatgggacctgctatatcggtagg

SEQ ID NO: 436929 - DNA, 75 bp, synthetic construct
  source 1..75: mol_type = other DNA
tgtgtatgtgggacgtacccgcgtgcaggcaccggtgaccaacggcgataacgtcacgacgattgccagcagtat

SEQ ID NO: 436930 - DNA, 75 bp, synthetic construct
  source 1..75: mol_type = other DNA
acggttacgctgacggtgaccggggcggcaaccgaaaccggcacggtgaatgtgtatgtgggacgtacccgcgtg

SEQ ID NO: 436931 - DNA, 75 bp, synthetic construct
  source 1..75: mol_type = other DNA
ttctccgtatttgtttttctcgccggactcttaagattggctgtttattgttgcttatagcaggagcgaccattt

SEQ ID NO: 436932 - DNA, 75 bp, synthetic construct
  source 1..75: mol_type = other DNA
caggcaccggtgaccaatggcgataacgtcacgatgattgccagcagtatccaggatgccatcaatgccgttccg

SEQ ID NO: 436933 - DNA, 75 bp, synthetic construct
  source 1..75: mol_type = other DNA
cgataaacgccgcgaggccaaacagaaggtcaatatgggctgggaagcgctgattcgcactatgcctatgcaaaa

SEQ ID NO: 436934 - DNA, 75 bp, synthetic construct
  source 1..75: mol_type = other DNA
ttttagcgctgataatggcctgttgttgactccaacgatacacgacttactagacgcagagctgatggccgtcaa

SEQ ID NO: 436935 - DNA, 75 bp, synthetic construct
  source 1..75: mol_type = other DNA
cggcggcttccacaccggacaactgcttacctccatgcgcattatcgccgggaaatctcgccaggttcggctcta

SEQ ID NO: 436936 - DNA, 75 bp, synthetic construct
  source 1..75: mol_type = other DNA
tctgaaaacgtctcggcgatcgtgggcgtaggctctgtgggcctggcggcgctggtaactgcctttatcggcgtt

SEQ ID NO: 436937 - DNA, 75 bp, synthetic construct
  source 1..75: mol_type = other DNA
aattcacgctcacgccgtgaaaggggtaactcacagcctgccgctgattgtgctgctgatcctttccaccttcgt

SEQ ID NO: 436938 - DNA, 75 bp, synthetic construct
  source 1..75: mol_type = other DNA
ctgggaaggcgtgggcctgtgctcctatctgctgatcggtttctattacaccgatccgaagaatggcgcagcggc

SEQ ID NO: 436939 - DNA, 75 bp, synthetic construct
  source 1..75: mol_type = other DNA
gcgcactaacaacaaggccatgataacgctgagtgaggcgattgacgcctacgtaaaaaatcgtggccaccgcct

SEQ ID NO: 436940 - DNA, 75 bp, synthetic construct
  source 1..75: mol_type = other DNA
taccggatccgccgactctggtactgagcaccaaacgccagtggcacggaacggtaagaaaaacggaacgtatcc

SEQ ID NO: 436941 - DNA, 75 bp, synthetic construct
  source 1..75: mol_type = other DNA
tgcgcaattgctttctgcactggagagcatgagtgatgatgaaaaacgccaattaattttcaaaatcataaacaa

SEQ ID NO: 436942 - DNA, 75 bp, synthetic construct
  source 1..75: mol_type = other DNA
gagctgctgacgctgctgcacacggcgaggctgaacggtctggagccagtagtctggctgcgtgatgtgctggag

SEQ ID NO: 436943 - DNA, 75 bp, synthetic construct
  source 1..75: mol_type = other DNA
agaaattcggcattaatgaaaacatgacgcacgtagaaaaaggtctgcccgaagaggtgattcctgatttggcgg

SEQ ID NO: 436944 - DNA, 75 bp, synthetic construct
  source 1..75: mol_type = other DNA
atttcagcagcattccttggcaacacggcggaacaggtgattgatcatcttcgctgcgacctgctggtcattaaa

SEQ ID NO: 436945 - DNA, 75 bp, synthetic construct
  source 1..75: mol_type = other DNA
tcgtacccacggcctgttcctgatgaccccggaaatcctgcatctggtgggtattgtcggggcggttacgctgct

SEQ ID NO: 436946 - DNA, 75 bp, synthetic construct
  source 1..75: mol_type = other DNA
taccgatgtttcgtctcagacagccagacaccttgattgagctggtgagtttaatcaccacgcaacaggaggaaa

SEQ ID NO: 436947 - DNA, 75 bp, synthetic construct
  source 1..75: mol_type = other DNA
tgcagcaggctttgatcgctaaaggcgtaccggcgaaagtgatcttctgcgactatgccggattctcaacgctgg

SEQ ID NO: 436948 - DNA, 75 bp, synthetic construct
  source 1..75: mol_type = other DNA
atctcaagggttatgattacccggatatccagcgcgcggttctggcagaaaaagccgatgcgccgttgattcagt

SEQ ID NO: 436949 - DNA, 75 bp, synthetic construct
  source 1..75: mol_type = other DNA
cagcaaccgaaaccggcacggtgaatgtgtatgtgggacgtacccgcgtgcaggcaccggtgaccaacggcgata

SEQ ID NO: 436950 - DNA, 75 bp, synthetic construct
  source 1..75: mol_type = other DNA
gaccaccaccagcggtagcctttggtatcagggatttctgtgtaaaggaaacagaagagttacgctgttttcgcg

SEQ ID NO: 436951 - DNA, 75 bp, synthetic construct
  source 1..75: mol_type = other DNA
caggcaccggtgaccaacggcgataacgtcgcgaccattgccagcagtatccaggatgccatcaatgccgttccg

SEQ ID NO: 436952 - DNA, 75 bp, synthetic construct
  source 1..75: mol_type = other DNA
cgactcgtgaattgattcgccaggtgaatcgtgccggagggcctgaaaccttaatgaagattaaagggctgatac

SEQ ID NO: 436953 - DNA, 75 bp, synthetic construct
  source 1..75: mol_type = other DNA
aaatgttgaaaccgcatcaggaaccgacgctgtatggggcgaacggtcagacctcaaccccctatcgcggcagta

SEQ ID NO: 436954 - DNA, 75 bp, synthetic construct
  source 1..75: mol_type = other DNA
aagacttcgcgttgatacccgcaaatgggcgctggcccgaatgaatccccgtaagtatggcgacaaggtaactaa

SEQ ID NO: 436955 - DNA, 75 bp, synthetic construct
  source 1..75: mol_type = other DNA
ctgagttttccgcattcctgacgcgccacatcagcgatacggtaaaaagctgggatgccagggatatgtcgcggc

SEQ ID NO: 436956 - DNA, 75 bp, synthetic construct
  source 1..75: mol_type = other DNA
gcgggcgtcgttaaatggtcatctggaacaagccgcacaccgcgttgcgcctgagttttccgcattcctgactcg

SEQ ID NO: 436957 - DNA, 75 bp, synthetic construct
  source 1..75: mol_type = other DNA
aatgtttgtatgttgtatgataaaatggcattaatacatcttgttaaaacaagggcggctcatcctttgagcagg

SEQ ID NO: 436958 - DNA, 75 bp, synthetic construct
  source 1..75: mol_type = other DNA
atggctatgtatcagaacatgctcgttgttatcgatcctaaccaggacgatcaaccggcattacggcgagctgtt

SEQ ID NO: 436959 - DNA, 75 bp, synthetic construct
  source 1..75: mol_type = other DNA
gacgcacgtcgaaaaaggtctgccggaagaagtgattcctgatctggcggaacatttgcaggcaggaattgtcgt

SEQ ID NO: 436960 - DNA, 75 bp, synthetic construct
  source 1..75: mol_type = other DNA
cagtaaatctcgccagcgaagagccgtatcataatgcgctcaatgaaaaactggtgaaagagacgattgaactgg

SEQ ID NO: 436961 - DNA, 75 bp, synthetic construct
  source 1..75: mol_type = other DNA
actgtttaaccatgacaccagtcgcgatcaggacccacagttacacacgcatgtggtggtggccggtcttgtgat

SEQ ID NO: 436962 - DNA, 75 bp, synthetic construct
  source 1..75: mol_type = other DNA
gggatgcgcagggcgaaacgcaggtggtgcgtatttcttctctggacagcagctggtcgctgttccggcaggaaa

SEQ ID NO: 436963 - DNA, 75 bp, synthetic construct
  source 1..75: mol_type = other DNA
caggacgccggaagcacgggagcagacgctgattgtcacgcatctgaatgaggaccggcgcgtactgaacagcat

SEQ ID NO: 436964 - DNA, 75 bp, synthetic construct
  source 1..75: mol_type = other DNA
ccgtcagggctggacggatgccatcaacaatgccgtacagaaaggaactgcccacgatgtgtttgagccgaaacc

SEQ ID NO: 436965 - DNA, 75 bp, synthetic construct
  source 1..75: mol_type = other DNA
ccggattacgctattccgcgaataactacgtgaaatggaaggacgagtatctggatcagggtaaccaaacccaac

SEQ ID NO: 436966 - DNA, 75 bp, synthetic construct
  source 1..75: mol_type = other DNA
tccggttatgcattgcctggtaaatatctggtcgatatatatatgaatggtcagtttttgaaaactgagaatctg

SEQ ID NO: 436967 - DNA, 75 bp, synthetic construct
  source 1..75: mol_type = other DNA
ccaacatgaccgtctggaagcggtgatttttacgccaacggactggcatctgttacgcaaatgcccaagcccggt

SEQ ID NO: 436968 - DNA, 75 bp, synthetic construct
  source 1..75: mol_type = other DNA
tggatacgcgtaaatccaaacagcatgtcgatccggagatcaaaatggccgagtggatgcagacgctgaaggaaa

SEQ ID NO: 436969 - DNA, 75 bp, synthetic construct
  source 1..75: mol_type = other DNA
ccggtgccatcaccggtggccgcgtgtggggggatatcccggacaacagcgtccagccgggagccggaaatggtg

SEQ ID NO: 436970 - DNA, 75 bp, synthetic construct
  source 1..75: mol_type = other DNA
cacggtttattgcaccggggcgcaaatatccgcagccgtatgtggcactgccggcgtttgaccgtaacggcaagt

SEQ ID NO: 436971 - DNA, 75 bp, synthetic construct
  source 1..75: mol_type = other DNA
tatgaagcagcatgtgcaggtgtacaccgataaccgtcagggctggacggatgccatcagcaaagccgtacagaa

SEQ ID NO: 436972 - DNA, 75 bp, synthetic construct
  source 1..75: mol_type = other DNA
ttaatatataaagtaaatataattaatgctagttcaaaaaagatgtatttttttatgaaagcccaacatcaaccc

SEQ ID NO: 436973 - DNA, 75 bp, synthetic construct
  source 1..75: mol_type = other DNA
gggacgcacttgccctggtggataatgtgtatcaccggattgccggtatcagcaaggatgacgggctgataaccc

SEQ ID NO: 436974 - DNA, 75 bp, synthetic construct
  source 1..75: mol_type = other DNA
taaatatccgcagccgtatgtggcactgccggcgtttgaccgtaacggcaagtccgccggtatctggctgaaccc

SEQ ID NO: 436975 - DNA, 75 bp, synthetic construct
  source 1..75: mol_type = other DNA
ctgaccacggatgacggaaacgggctgcggggattcagcggtgaaggacgggtgaaaggcagcggggatgcgcag

SEQ ID NO: 436976 - DNA, 75 bp, synthetic construct
  source 1..75: mol_type = other DNA
ggacggcaaaacagagcaggctgtcagggagattgccgggcaggagcgtgaccggtctgccatatctgaacggga

SEQ ID NO: 436977 - DNA, 75 bp, synthetic construct
  source 1..75: mol_type = other DNA
gtgattgaacgggcacgcgccggtatcgatgaggccatcagtcgtgagcagcttatccccctcgaccgtgagaag

SEQ ID NO: 436978 - DNA, 75 bp, synthetic construct
  source 1..75: mol_type = other DNA
aaacctgacctgccggacggcaaaacagagctggctgtcagggatattgccgggcaggaacgtgaccggactgcc

SEQ ID NO: 436979 - DNA, 75 bp, synthetic construct
  source 1..75: mol_type = other DNA
cattcatctggcccttcctgtagtggaaagtaaaaacctggccttcagccaggtggacctgctgacagaggcgaa

SEQ ID NO: 436980 - DNA, 75 bp, synthetic construct
  source 1..75: mol_type = other DNA
tttccggacgctcacagactatccgggaggccgtcggggaagacgcctcgctgaaatcccgggatgtggcggcac

SEQ ID NO: 436981 - DNA, 75 bp, synthetic construct
  source 1..75: mol_type = other DNA
cttcaataaatctttacatttcctataataaatcttctttaaacaatctggtgttctcccgatttattgaccgtc

SEQ ID NO: 436982 - DNA, 75 bp, synthetic construct
  source 1..75: mol_type = other DNA
gggatgcgcagggcgaaacgcaggtggtgcgtatttcctccctggacagcagctggtcgctgttccggcaggaaa

SEQ ID NO: 436983 - DNA, 75 bp, synthetic construct
  source 1..75: mol_type = other DNA
ctggggactgcgctttctctgggctcaataggttctgttttggcgacggtcacgtcttctgaaaccaaaacagag

SEQ ID NO: 436984 - DNA, 75 bp, synthetic construct
  source 1..75: mol_type = other DNA
tgccttcggcgggatgttagaagccggacgtatcggctctgccaccaacaacctcggctttatgtatgagctgga

SEQ ID NO: 436985 - DNA, 75 bp, synthetic construct
  source 1..75: mol_type = other DNA
ggacggtgattggcgtggtgaccggggtaattatttttaccgtcatcaactatggcctgacgtatatcggcgtaa

SEQ ID NO: 436986 - DNA, 75 bp, synthetic construct
  source 1..75: mol_type = other DNA
cagtacatcatcaaaggggcgattattatcttcgccgtggcgctggattcactgaagtacgcgcgtaagaagtga

SEQ ID NO: 436987 - DNA, 75 bp, synthetic construct
  source 1..75: mol_type = other DNA
gtagctgagaaactcatcgccaaaattcaaagtgataatgatatgccaatagtcattgttcatggaccaaaaggg

SEQ ID NO: 436988 - DNA, 75 bp, synthetic construct
  source 1..75: mol_type = other DNA
cattttcattatcgattgcagaaaatctaatagcaaaaattcaaagtgaaacagatatgccaatagtgatcgttc

SEQ ID NO: 436989 - DNA, 75 bp, synthetic construct
  source 1..75: mol_type = other DNA
atatcaatgcaatatgacaccgatgacctgacccgattttttgctaaatacaatacgggtggaacgaatgcttca

SEQ ID NO: 436990 - DNA, 75 bp, synthetic construct
  source 1..75: mol_type = other DNA
gtgcccctgggtcaaatgcatcgatgaatgtcggtccagaagggactcaacaaattagaattcagaactatgcac

SEQ ID NO: 436991 - DNA, 75 bp, synthetic construct
  source 1..75: mol_type = other DNA
tcacgtttcaatgatcgtggatgatcaggtaacaaataccggtttttatgcccgctgccagatgtacgacggcag

SEQ ID NO: 436992 - DNA, 75 bp, synthetic construct
  source 1..75: mol_type = other DNA
tctgatttattcaacaaagccggtgcccgtttaagtaccagtcgtgtaatggccatcacctttatatttatgtcg

SEQ ID NO: 436993 - DNA, 75 bp, synthetic construct
  source 1..75: mol_type = other DNA
ggtgatcggtttgatcaacggtctgattatcgcttatctcaacgtgacgccgttcattaccacgctcggcacgat

SEQ ID NO: 436994 - DNA, 75 bp, synthetic construct
  source 1..75: mol_type = other DNA
attatcgcttatctcaacgtgacgccgttcattaccacgctcggcacgatgattatcgtctacggcattaactcg

SEQ ID NO: 436995 - DNA, 75 bp, synthetic construct
  source 1..75: mol_type = other DNA
ttcttacttacctgaaagagggtggtatttacgtcgttcttttagttttgctggcgattattattttccaggacc

SEQ ID NO: 436996 - DNA, 75 bp, synthetic construct
  source 1..75: mol_type = other DNA
aatattacatatggcaagtgcctatggaaggtgcgaacaagttcctgatatgagatcatcatattcatccggagc

SEQ ID NO: 436997 - DNA, 75 bp, synthetic construct
  source 1..75: mol_type = other DNA
atttgcaacccgacaaactttactcgacctgaattatgcccgtcaggttaacgaaatttctttgtataccgcact

SEQ ID NO: 436998 - DNA, 75 bp, synthetic construct
  source 1..75: mol_type = other DNA
gtctgaatagtaacgctcttgagtcaataaattttcctcaaggcagaaatgtaagcattacacatatatctatga

SEQ ID NO: 436999 - DNA, 75 bp, synthetic construct
  source 1..75: mol_type = other DNA
caccctgaggtgaccatgactgcactgtcaccggtctggctggacagccggagccgttatctgcgggatatgtac

SEQ ID NO: 437000 - DNA, 75 bp, synthetic construct
  source 1..75: mol_type = other DNA
cgggaggttgcccgggaaaatctgctgcaggagcgtctgcagcagatggagcgggatatggttcgtgacctgcag

SEQ ID NO: 437001 - DNA, 75 bp, synthetic construct
  source 1..75: mol_type = other DNA
agggagattgccgggcaggagcgtgaacgggctgtcacttctgaacgggaagccgcgctgccggagagtgtactg

SEQ ID NO: 437002 - DNA, 75 bp, synthetic construct
  source 1..75: mol_type = other DNA
tgggcgactaccgaacaacaccttataccgatcagatgattgaagggttttccttcagaggcatcagtctggcat

SEQ ID NO: 437003 - DNA, 75 bp, synthetic construct
  source 1..75: mol_type = other DNA
tcagaaaaggttgtacgcagacttatggtggaggaacagcttgtcgtcagccgtaaccgtcgtcgccgctacagc

SEQ ID NO: 437004 - DNA, 75 bp, synthetic construct
  source 1..75: mol_type = other DNA
atgatatttatcagtcagttgaaagcaaaaacgaatttccaggtcgtcggtttaaccatgaagtgggtgatgctg

SEQ ID NO: 437005 - DNA, 75 bp, synthetic construct
  source 1..75: mol_type = other DNA
gaaggtaaagccagggaactagtgaatagttataataatgtctaccgtttatccttgtcaccatcgattaaacgt

SEQ ID NO: 437006 - DNA, 75 bp, synthetic construct
  source 1..75: mol_type = other DNA
atgttcccatgacactgtatgaagccattgtccgcgactataccggcaggacaccggaagcacgggagcagacgc

SEQ ID NO: 437007 - DNA, 75 bp, synthetic construct
  source 1..75: mol_type = other DNA
atggctggctttgagtcagcctacgtggccctgtcgcgtatgaagcagcatgtgcaggtgtacaccgataaccgt

SEQ ID NO: 437008 - DNA, 75 bp, synthetic construct
  source 1..75: mol_type = other DNA
ggtcaacactatgctggatagcgctgtcgaaacgttaaatgctggcgaacgaccggtgatacacagtgacagagg

SEQ ID NO: 437009 - DNA, 75 bp, synthetic construct
  source 1..75: mol_type = other DNA
cgctgtctgttcacacagcagggaaatgtcggccatggccccgaatgccactggtcggtacaggatcgtcagcag

SEQ ID NO: 437010 - DNA, 75 bp, synthetic construct
  source 1..75: mol_type = other DNA
attttactgatgcgcaaaaataaccataacgcccggagcgtcagcattatttctgattcattagcaagatttgca

SEQ ID NO: 437011 - DNA, 75 bp, synthetic construct
  source 1..75: mol_type = other DNA
ggtatcgcttacgggccggaaatggcagcaaaagcgcaggcagacgctaaagcggcaattgacgcaattgttgca

SEQ ID NO: 437012 - DNA, 75 bp, synthetic construct
  source 1..75: mol_type = other DNA
caccagcttgcagacaccgtggtaaacggtttttctgccgatccactccaggcacttcagtccgaaagcctgatt

SEQ ID NO: 437013 - DNA, 75 bp, synthetic construct
  source 1..75: mol_type = other DNA
tggatctgccgcccatttatgccagccccggcgatcgtaatgacgacgtctctgcggcagaaatggcgcaacgcc

SEQ ID NO: 437014 - DNA, 75 bp, synthetic construct
  source 1..75: mol_type = other DNA
agcattccggcactggcttttaccgtagtcctgcacgagggttcattttgcctgcatccgcaaactgcgcaactg

SEQ ID NO: 437015 - DNA, 75 bp, synthetic construct
  source 1..75: mol_type = other DNA
tccttgagcaactgcgccagatgaaaaatatgggcggcatggccagcctgatgggcaaactgccgggcatggggc

SEQ ID NO: 437016 - DNA, 75 bp, synthetic construct
  source 1..75: mol_type = other DNA
cggcgatgggcgaagagaaccagaccctgaatctggctgcgcaaccgccagcggtggtactgatggcgggcctgc

SEQ ID NO: 437017 - DNA, 75 bp, synthetic construct
  source 1..75: mol_type = other DNA
atgatgaagaaaatgaaaaagggcgggatggcgaagatgatgagaagcatgaaagggatgatgcgccgggatttc

SEQ ID NO: 437018 - DNA, 75 bp, synthetic construct
  source 1..75: mol_type = other DNA
ctatctgtatattgctgagggtaacttaactcccttattcaacagttcctgggggaggatattgcttgccaagac

SEQ ID NO: 437019 - DNA, 75 bp, synthetic construct
  source 1..75: mol_type = other DNA
gggtttctctgagtttgaacgcttgactgctcagggagtagatttcaggactgctcaggaagctggtctggtgca

SEQ ID NO: 437020 - DNA, 75 bp, synthetic construct
  source 1..75: mol_type = other DNA
tggtttgtcgtaaatggtcggcaagcgtgggggcgttgtgggtgaccataacggcagattttgaacaggtcgtgg

SEQ ID NO: 437021 - DNA, 75 bp, synthetic construct
  source 1..75: mol_type = other DNA
cggtacaggatcgtcagcagagcattccggcccaggcttttaccgttatcctgcacgatggcacattttgtctgc

SEQ ID NO: 437022 - DNA, 75 bp, synthetic construct
  source 1..75: mol_type = other DNA
gatggttcgctttgtttcgtctgcaggctatagttcaacggttttttatggtgatcgaaaagtcacactctcggt

SEQ ID NO: 437023 - DNA, 75 bp, synthetic construct
  source 1..75: mol_type = other DNA
tcaatggaacgaaaaagatcattaatacggttgttgaagtgaacaaactcagtgataccagcgggagttccatta

SEQ ID NO: 437024 - DNA, 75 bp, synthetic construct
  source 1..75: mol_type = other DNA
attcgtttggggcaaacacatgtagttcatgctgaaggtgattgtagtgcatgcttatctgatggagttgattca

SEQ ID NO: 437025 - DNA, 75 bp, synthetic construct
  source 1..75: mol_type = other DNA
tgatccttgcctctctggcaatggggtcattttctgtaactgctgctgacaataatttagctatttatttcaata

SEQ ID NO: 437026 - DNA, 75 bp, synthetic construct
  source 1..75: mol_type = other DNA
ggataacctgtcctataacaggattggtgagtttgtaggtaatgtgaacccagctgatatgaaaaaagttaaagc

SEQ ID NO: 437027 - DNA, 75 bp, synthetic construct
  source 1..75: mol_type = other DNA
gttcaggagaaagcagccatccttatgtggctgcgcaactgaccgcacatacaaaccgcggtaactactccaatg

SEQ ID NO: 437028 - DNA, 75 bp, synthetic construct
  source 1..75: mol_type = other DNA
ctacaagcgcaccaaatttttcaccagttgatatcgatgctgcactggcggcgaatgccgctcatcatgctgaaa

SEQ ID NO: 437029 - DNA, 75 bp, synthetic construct
  source 1..75: mol_type = other DNA
taatgaggctctgtcatctgtagatgatggagtaacggcgcgcgctatagaaaatcggttgcttgaagaacaggc

SEQ ID NO: 437030 - DNA, 75 bp, synthetic construct
  source 1..75: mol_type = other DNA
aggcaattgctattgatgctgttcttggggtggcgtttggtggtgtcggcagatttattaactctcgcggcgagt

SEQ ID NO: 437031 - DNA, 75 bp, synthetic construct
  source 1..75: mol_type = other DNA
ggtggcctggtgccttgctgaccgactccgcggcgaaagctaaagcgcttaaagactaccaacatgtcatggcac

SEQ ID NO: 437032 - DNA, 75 bp, synthetic construct
  source 1..75: mol_type = other DNA
gcctgagggtgagactgtcgtcgcccctgttgccctgtggaataaaagacatgtggaaccaccgcctggcagcca

SEQ ID NO: 437033 - DNA, 75 bp, synthetic construct
  source 1..75: mol_type = other DNA
ttcacctgtttaagcccctgtcgccgggggcaaagacagccacaaccgtctccgccagtccaggggtgaaatgta

SEQ ID NO: 437034 - DNA, 75 bp, synthetic construct
  source 1..75: mol_type = other DNA
gtaagtaacacaggattaaccggatacatcgaaggctataacgactgtttacaggatcatagcgatggcaaataa

SEQ ID NO: 437035 - DNA, 75 bp, synthetic construct
  source 1..75: mol_type = other DNA
aaagccgctaaatgtaagtccggttatccaaaccgtatgcctgttggtagtggtaaccagttggcgaagtggaac

SEQ ID NO: 437036 - DNA, 75 bp, synthetic construct
  source 1..75: mol_type = other DNA
aagacggcgtcaacgaccttgaaatgatgatggctgaatggcttggcggtgatgcgtcacctggtatcaacgttg

SEQ ID NO: 437037 - DNA, 75 bp, synthetic construct
  source 1..75: mol_type = other DNA
gatgcgtcaccaggtatcaacgttggctacattttcgctgatgcagatgtcgctccagatccgggcgatgagcac

SEQ ID NO: 437038 - DNA, 75 bp, synthetic construct
  source 1..75: mol_type = other DNA
atgcaagcctgttcgatacctcaattacagaggcaagattcggcattccttctgttccacaccctccccgtatcc

SEQ ID NO: 437039 - DNA, 75 bp, synthetic construct
  source 1..75: mol_type = other DNA
gccgttccccatcctccccgtatcctcatgctgtacggctctgtacgcgaacgttcctacagccgactggcaact

SEQ ID NO: 437040 - DNA, 75 bp, synthetic construct
  source 1..75: mol_type = other DNA
aaaagttgaatcgaatgctggaggaaatgtttgaagaggccgatatgtggctggtgtctgaattcccgacggttc

SEQ ID NO: 437041 - DNA, 75 bp, synthetic construct
  source 1..75: mol_type = other DNA
ggttatatatcgaaaatatataatgaacttttgggcattaatattataaatatagaatcaaacaatatcggtgat

SEQ ID NO: 437042 - DNA, 75 bp, synthetic construct
  source 1..75: mol_type = other DNA
atgagtattgtaaaagaggagcacaaagctacgctgcgcaaatggcacaaagagttgcaggaaaaacgcggcaat

SEQ ID NO: 437043 - DNA, 75 bp, synthetic construct
  source 1..75: mol_type = other DNA
ttgatctggcatccacgttgcagacatgaatgtattttcacgcaaataacacgtaaagagctatatgcgagaggt

SEQ ID NO: 437044 - DNA, 75 bp, synthetic construct
  source 1..75: mol_type = other DNA
gatgatggctgaatggcttggcggtgatgcgtcacctggtatcaacgttggctacatttttgctgatgcagatgt

SEQ ID NO: 437045 - DNA, 75 bp, synthetic construct
  source 1..75: mol_type = other DNA
aatgatgatggctgaatggcttggcggtgatgtgtcacctggcatcaacgttggctacattttcgctgatgcaga

SEQ ID NO: 437046 - DNA, 75 bp, synthetic construct
  source 1..75: mol_type = other DNA
ttgatgccactttacatccttctttacaaataaggttattagataaaatttatcaatacgcaaaagattataaga

SEQ ID NO: 437047 - DNA, 75 bp, synthetic construct
  source 1..75: mol_type = other DNA
tcgttggtccgaagggatggtgtggtgttcacctgaacgccatggtgcaatgaccggcataatgaaggctcaaat

SEQ ID NO: 437048 - DNA, 75 bp, synthetic construct
  source 1..75: mol_type = other DNA
aggccatcggtaccgttagtgcagtcaatattggttcgatgttccgtaatggttgggaaaacaatgtgaaatcta

SEQ ID NO: 437049 - DNA, 75 bp, synthetic construct
  source 1..75: mol_type = other DNA
acgcgcaaaccggtgcaactcatttccggttatcgttccattgataccaacaatgaactacgcgcccgcagccgt

SEQ ID NO: 437050 - DNA, 75 bp, synthetic construct
  source 1..75: mol_type = other DNA
accgccatcatcacgagaacttcggaacaaaaggggagcctgatcaaaaagatagcaactaaacgcatcacagat

SEQ ID NO: 437051 - DNA, 75 bp, synthetic construct
  source 1..75: mol_type = other DNA
ctgcttttcccctggcatactcttgagcgccaggtgatggttatcggtaaagcggaacgtctttcgcctctcgaa

SEQ ID NO: 437052 - DNA, 75 bp, synthetic construct
  source 1..75: mol_type = other DNA
gggcggtgagcatcgcctgcatgaccgctttttgtaccagcgtgaaaatgatgcgtggaagattgatcgtcttgc

SEQ ID NO: 437053 - DNA, 75 bp, synthetic construct
  source 1..75: mol_type = other DNA
atgaacatggtcagccttatcagcgcatcgttttactcaaacattacgacgaaaaaggcatggtgttttacacca

SEQ ID NO: 437054 - DNA, 75 bp, synthetic construct
  source 1..75: mol_type = other DNA
aggcacagatcgactggatacccttaagtgaaggtgcggttcgcccttcgcagggcaaaactcttgcggtaatgc

SEQ ID NO: 437055 - DNA, 75 bp, synthetic construct
  source 1..75: mol_type = other DNA
ccgaatgctttgatctacacatcgctgaacgcctgcacctgcaggagccgccacggattctaatcctgtatggct

SEQ ID NO: 437056 - DNA, 75 bp, synthetic construct
  source 1..75: mol_type = other DNA
ccacggattctgatcctgtatggctcagtaagggagcgctcctacagtcgctttgccgcggaggaagcaggtcgc

SEQ ID NO: 437057 - DNA, 75 bp, synthetic construct
  source 1..75: mol_type = other DNA
cgacattttagtcagcgataggaaaataattgttgaaggagaggaaatgctaactaaagcacttgcttatgatgc

SEQ ID NO: 437058 - DNA, 75 bp, synthetic construct
  source 1..75: mol_type = other DNA
aaccgtcatcatattacgaccgcatcgtagatgtgatggaagaattgatgaagtttacattgttgacccgggcaa

SEQ ID NO: 437059 - DNA, 75 bp, synthetic construct
  source 1..75: mol_type = other DNA
atggggataccggcaatatctcacccacctcgtattctaatgctttatggctcagttcgtgagcgctcatacagt

SEQ ID NO: 437060 - DNA, 75 bp, synthetic construct
  source 1..75: mol_type = other DNA
cattgccggaaatgtgccttccattgctttactgatggcgtggaagaaaggggagatgaagccggcattacgcga

SEQ ID NO: 437061 - DNA, 75 bp, synthetic construct
  source 1..75: mol_type = other DNA
ggtttttacgccaacgttaatccgcatgttgatcacccgcgctggtcacaggctaccgaacgatttattggttca

SEQ ID NO: 437062 - DNA, 75 bp, synthetic construct
  source 1..75: mol_type = other DNA
agccaggcagggagcaaatggatgagtgacgacctgtacgatcgagcatcaagccaggataaacgctatcacatt

SEQ ID NO: 437063 - DNA, 75 bp, synthetic construct
  source 1..75: mol_type = other DNA
caaccgtggccggttaacctcggtgaaagacgcacagggccgtgaaacgcggtatgaatacaacgccgcaggcga

SEQ ID NO: 437064 - DNA, 75 bp, synthetic construct
  source 1..75: mol_type = other DNA
ccgagaaaacttgttaaagagcgatccagactgaaaagggctacggtcagaaatccgaacgcaaaaattatcgtt

SEQ ID NO: 437065 - DNA, 75 bp, synthetic construct
  source 1..75: mol_type = other DNA
ccgagaaaacttgttaaagagcgatccagactgaaacgggctacggtaagaaatccgaacgcaaaaattatcgtt

SEQ ID NO: 437066 - DNA, 75 bp, synthetic construct
  source 1..75: mol_type = other DNA
accgctggggagcatgggctgcagcagataacagtggtgtggactggcagcctgttgctgcagggtttaaaggtt

SEQ ID NO: 437067 - DNA, 75 bp, synthetic construct
  source 1..75: mol_type = other DNA
gcattcgcttcttgtggcccattacctatacggtatctctaaaagaaagctcgctaaagctcgcaaaaaggatga

SEQ ID NO: 437068 - DNA, 75 bp, synthetic construct
  source 1..75: mol_type = other DNA
ctggcaaaataacctgccactgacgccggaagataaagtttctggctataacaacttctatgagttcggactgga

SEQ ID NO: 437069 - DNA, 75 bp, synthetic construct
  source 1..75: mol_type = other DNA
agtagcggtgcacatgccaccatgccgctggcgccaatgaaggagtctgatgctccaaatgaagaattgcgtcag

SEQ ID NO: 437070 - DNA, 75 bp, synthetic construct
  source 1..75: mol_type = other DNA
ccagactgaaacgggcgacggtcagaaatccgaatgccagaattatcgttaaccgcggtgatctccctgctatta

SEQ ID NO: 437071 - DNA, 75 bp, synthetic construct
  source 1..75: mol_type = other DNA
agttcggacaggatttcacattgtacgaagcacttcgtacagttgatcgtctgcttcgcggacaaagttttatta

SEQ ID NO: 437072 - DNA, 75 bp, synthetic construct
  source 1..75: mol_type = other DNA
gaaggaaaatacggccagcgcctgtacagccttaccagttacggcatgcgcttcgcccctgacactataccgggc

SEQ ID NO: 437073 - DNA, 75 bp, synthetic construct
  source 1..75: mol_type = other DNA
cgcagtaacatccgctacagcctgagtgatacacacgcaacgccggatggctacccagtaaaacaaatcggcgag

SEQ ID NO: 437074 - DNA, 75 bp, synthetic construct
  source 1..75: mol_type = other DNA
acttcggacaggatttcacattttttgaagccttaagaacggcagacagattaatcaacggcctgcgttttcaat

SEQ ID NO: 437075 - DNA, 75 bp, synthetic construct
  source 1..75: mol_type = other DNA
cagcatactcaaagccggtcagcatcgttatcagcgggcatttatccagcgattaaataatgggcgctggcatgt

SEQ ID NO: 437076 - DNA, 75 bp, synthetic construct
  source 1..75: mol_type = other DNA
aacgggcgacggtcagaaatccgaatgccagaattatcgttaaccgcggtgatctccctgtgattaagctgggga

SEQ ID NO: 437077 - DNA, 75 bp, synthetic construct
  source 1..75: mol_type = other DNA
tttccggttataacaacttctatgaattcgggctggataaagccgatcccgccgctaatgctggtagcctgaaaa

SEQ ID NO: 437078 - DNA, 75 bp, synthetic construct
  source 1..75: mol_type = other DNA
cactgggcatcagcgcggctgcactttctttgcctcacgctgcgcatgccgatctgcttagctggtttaaaggga

SEQ ID NO: 437079 - DNA, 75 bp, synthetic construct
  source 1..75: mol_type = other DNA
ttatccagcgattaaataatgggcgctggcatgttatgcaacgtcttccccaggccagatatgaggagggcaatg

SEQ ID NO: 437080 - DNA, 75 bp, synthetic construct
  source 1..75: mol_type = other DNA
aaccggaaactggtaaaggaacggtccagactgaaacgggccacggtcagaaatccgaatgccagaattatcgtt

SEQ ID NO: 437081 - DNA, 75 bp, synthetic construct
  source 1..75: mol_type = other DNA
tcgcaaagaagcagaagtgttctgatggtaccatccgaaaagaattacagactgcaatgggattcatcgatggct

SEQ ID NO: 437082 - DNA, 75 bp, synthetic construct
  source 1..75: mol_type = other DNA
cataaaaaagacagccacatcaaagggcaacagcgttatgtaccgcacaaacgcatgaacaacgcctttatgatg

SEQ ID NO: 437083 - DNA, 75 bp, synthetic construct
  source 1..75: mol_type = other DNA
ctatcttgatacccggcgagccggtgatttcatgctatcgcggcagtcgtgggatgcgacgtacaatgatgcttc

SEQ ID NO: 437084 - DNA, 75 bp, synthetic construct
  source 1..75: mol_type = other DNA
tgcgcgagctgctgggcctgaacgggaaagacaaacagcaaatcacagaaaccgtgatagccggactggggaaag

SEQ ID NO: 437085 - DNA, 75 bp, synthetic construct
  source 1..75: mol_type = other DNA
caggttgcgccgggcattttcaccgattacccggtacgtgagctgctgggtatcagccaggcagatgagcgcctg

SEQ ID NO: 437086 - DNA, 75 bp, synthetic construct
  source 1..75: mol_type = other DNA
cgttcatcagttcggtgagcgcgatcaggttgcgccgggcattttcaccgattacccggtacgtgagctgttggg

SEQ ID NO: 437087 - DNA, 75 bp, synthetic construct
  source 1..75: mol_type = other DNA
ggtcgtaatatgtggatggattgtgtggtaaatggcattaatgcccgcaaactgatcctcgataactgtcagcat

SEQ ID NO: 437088 - DNA, 75 bp, synthetic construct
  source 1..75: mol_type = other DNA
gactggacggtctctttcaggagatcctcagtggtctgtccgctgccggtataaacaaaacagcacgtgctgtcg

SEQ ID NO: 437089 - DNA, 75 bp, synthetic construct
  source 1..75: mol_type = other DNA
gacaacgttgtccctggtgtaacaacacaatatccggcccgtgaactgctggggttgtcagtaaaagataaagca

SEQ ID NO: 437090 - DNA, 75 bp, synthetic construct
  source 1..75: mol_type = other DNA
cgctggcagacacactgatcgcactggcgccgcctgtgtgcaggcgcgtaatgatttcccctgacgtatatacaa

SEQ ID NO: 437091 - DNA, 75 bp, synthetic construct
  source 1..75: mol_type = other DNA
ccatctttcaggacattctttccggcctgtcggctgctggcattcagcgcacagcaatgaacgtgggtaagatta

SEQ ID NO: 437092 - DNA, 75 bp, synthetic construct
  source 1..75: mol_type = other DNA
agaggataagtggcggactgtagttacccgtgaaaaaaacacagtggagtggatgaaacaacaggtacccaacat

SEQ ID NO: 437093 - DNA, 75 bp, synthetic construct
  source 1..75: mol_type = other DNA
gcagggaaaccagcccggacatgtaacggttaatcggctggttttgtcccgggatgacataaacagggatacttc

SEQ ID NO: 437094 - DNA, 75 bp, synthetic construct
  source 1..75: mol_type = other DNA
tctggaaatacgcacccggcgcatcaaccaggacagcacaaagcgcgtccccatgttcgtaaaactgcgcaccgc

SEQ ID NO: 437095 - DNA, 75 bp, synthetic construct
  source 1..75: mol_type = other DNA
cgcgatcctggagatctgacgaccattgatgatcctgcgtcattggatcagatccgccaggcgatggaagagtaa

SEQ ID NO: 437096 - DNA, 75 bp, synthetic construct
  source 1..75: mol_type = other DNA
aaaatggcgcgcgtcagcgggcgggatgtcgatttcgcgtcgttgcgctatcaacacatcggcgcgcgggtacca

SEQ ID NO: 437097 - DNA, 75 bp, synthetic construct
  source 1..75: mol_type = other DNA
ggcgctggcgctgattgccgtctcttcggaaacagaagaagagcgcacctttacctttcgccagctgcatgacga

SEQ ID NO: 437098 - DNA, 75 bp, synthetic construct
  source 1..75: mol_type = other DNA
agaaggcgattatggcgctggtggacagtcagattggcaactttggccgcccggcgcacgtctggtttgtctcgc

SEQ ID NO: 437099 - DNA, 75 bp, synthetic construct
  source 1..75: mol_type = other DNA
aggcgcagcaccagccgcgccacgttttgctggtggatcgcgggctggcgaaaatggcgcgcgtcagcgggcggg

SEQ ID NO: 437100 - DNA, 75 bp, synthetic construct
  source 1..75: mol_type = other DNA
gttggggtgaaagatgcgctgaaagggcaggtggcggtggcgtttgttattccgaaagagagcgacagtctggaa

SEQ ID NO: 437101 - DNA, 75 bp, synthetic construct
  source 1..75: mol_type = other DNA
acggcggttctgtaaacgcgtctaacgctgcagaactgttcgctcagccggacatcgacggtgcgctggttggcg

SEQ ID NO: 437102 - DNA, 75 bp, synthetic construct
  source 1..75: mol_type = other DNA
ggtgaaacttctgccgctatgctgaaagacatcggcgcacagtacatcatcatcggtcactctgaacgtcgtact

SEQ ID NO: 437103 - DNA, 75 bp, synthetic construct
  source 1..75: mol_type = other DNA
actggaaactgaacggcagccgccacatggttcacgagctggtttctaacctgcgtaaagagctggcaggtgttg

SEQ ID NO: 437104 - DNA, 75 bp, synthetic construct
  source 1..75: mol_type = other DNA
tgaaagatgacccgttctccgggcatatcttcgtcttccggggccgcagtggcaaaatggtgaatactgtgggcc

SEQ ID NO: 437105 - DNA, 75 bp, synthetic construct
  source 1..75: mol_type = other DNA
cactggttgatttgaaattcatcatggctgatactggcttcggtaagaccttcatctatgaccggattaagtccg

SEQ ID NO: 437106 - DNA, 75 bp, synthetic construct
  source 1..75: mol_type = other DNA
cactggttgatttgaaattcatcatggctgatactggctttggtaaaaccttcatctacgaccggattaagtccg

SEQ ID NO: 437107 - DNA, 75 bp, synthetic construct
  source 1..75: mol_type = other DNA
atgaaagtaaaaggtgttccattcagccaggtaaagcaaaaactactcagtactccagaagctgtcaaagggtat

SEQ ID NO: 437108 - DNA, 75 bp, synthetic construct
  source 1..75: mol_type = other DNA
aagcaatcctttaggggcaagcatgaaaactttatcaaaatatgcccaagcatgtggcgcaacaattaatattaa

SEQ ID NO: 437109 - DNA, 75 bp, synthetic construct
  source 1..75: mol_type = other DNA
ttttgaaatttgatctggatatgcttaaaaaacatcggagagcaatccagtttattgcggtgctgctgtttattg

SEQ ID NO: 437110 - DNA, 75 bp, synthetic construct
  source 1..75: mol_type = other DNA
tctcacggctaaagtctccaccgctatcccggcttcatttttatggctgcataaccatttcacatgcgtgattga

SEQ ID NO: 437111 - DNA, 75 bp, synthetic construct
  source 1..75: mol_type = other DNA
cggaactgcgccaacaggtgaccgatattactggtacgttaagcacttctgaacaacaatcactgacacagcaac

SEQ ID NO: 437112 - DNA, 75 bp, synthetic construct
  source 1..75: mol_type = other DNA
gcgctggccgaacgaatgggattacgcccgtcagccatcagccggctggaaagtaatcctttaggagccagtatg

SEQ ID NO: 437113 - DNA, 75 bp, synthetic construct
  source 1..75: mol_type = other DNA
cgccaacgcggcatcagcccggcaggtcttgccaccagctttgaaaaactggcgaagctggaagaaggccgtcaa

SEQ ID NO: 437114 - DNA, 75 bp, synthetic construct
  source 1..75: mol_type = other DNA
aacgcggtgcgtgtcgcagcagcatctgcgggcgggattgtcggcagtttatcgcaatcacaactcggcgatctg

SEQ ID NO: 437115 - DNA, 75 bp, synthetic construct
  source 1..75: mol_type = other DNA
caatgagcgtggcaacggtactgaccggttgccagaatatggactccagtggactgctctcatcaggagcggaag

SEQ ID NO: 437116 - DNA, 75 bp, synthetic construct
  source 1..75: mol_type = other DNA
ggtgccctcgctgcgtgtgagcaggtagcgagccatgtccaggggtctgacgctcagtggaacgaaaactcacgt

SEQ ID NO: 437117 - DNA, 75 bp, synthetic construct
  source 1..75: mol_type = other DNA
cacaagagtggcgttttaccgcactggcgctggtcgccgcagttagcgccaatgtaaaagccattgatgaacggc

SEQ ID NO: 437118 - DNA, 75 bp, synthetic construct
  source 1..75: mol_type = other DNA
atgatccggtaatgcggcaggtcttcgagaatgatcgggttattcagcgtgctggtgggcttccttcccttgagc

SEQ ID NO: 437119 - DNA, 75 bp, synthetic construct
  source 1..75: mol_type = other DNA
caatgggttatgtcatcgtgcaaatttgcactctgccagccaacgcaatttctcgttggcggaaatatcaggtat

SEQ ID NO: 437120 - DNA, 75 bp, synthetic construct
  source 1..75: mol_type = other DNA
gtacagccgctttgctgactggcacgacgagcgtaaccgccccggcaatatggtgggctggcgcagggtggagaa

SEQ ID NO: 437121 - DNA, 75 bp, synthetic construct
  source 1..75: mol_type = other DNA
ctgcacccggccatgataaaccaaatcctgatggcgaagtatgtcgcttccaaagctgcggtggacgtggccggg

SEQ ID NO: 437122 - DNA, 75 bp, synthetic construct
  source 1..75: mol_type = other DNA
atgacggcagggttcaactttaataactatgcagcagttttttgttccgctaccccggcgttaaggggaaacaga

SEQ ID NO: 437123 - DNA, 75 bp, synthetic construct
  source 1..75: mol_type = other DNA
ccctggcggcattagttcgacgtacctttgatgttggtttgtcttctgagtggcattatcgacaactggcgattg

SEQ ID NO: 437124 - DNA, 75 bp, synthetic construct
  source 1..75: mol_type = other DNA
tcttcgttccggtattctttgtggtggttcgccgccgctttagccgcaagaatgaagatatcgagcacagccata

SEQ ID NO: 437125 - DNA, 75 bp, synthetic construct
  source 1..75: mol_type = other DNA
gggaagatacgtggggtgagcgccgccgctgggcgatgccgatggaaatgctgagcggcagcggtgaggagctgc

SEQ ID NO: 437126 - DNA, 75 bp, synthetic construct
  source 1..75: mol_type = other DNA
aaaacaaaagaagactccgcaggttcgtgaatcaggacgaaattcattgtttgtcgtgatgctgataattattgt

SEQ ID NO: 437127 - DNA, 75 bp, synthetic construct
  source 1..75: mol_type = other DNA
catatgcaaccggaattcaaaaaaaataatctcttctccgggttaacgcagggaattgaaggcatcgcacagttt

SEQ ID NO: 437128 - DNA, 75 bp, synthetic construct
  source 1..75: mol_type = other DNA
ctgcgaatgatttcgaaaggggcttattactggtatcgccgtgaacaagagaaaaccgcaattattccgggaaat

SEQ ID NO: 437129 - DNA, 75 bp, synthetic construct
  source 1..75: mol_type = other DNA
atagccgttcctacgcatgaattagccacagagacgcgtaataagatgttagacgcgggaatacatggttatcat

SEQ ID NO: 437130 - DNA, 75 bp, synthetic construct
  source 1..75: mol_type = other DNA
cgcgtatttcctatgatgctggccccaaaaaataaaaacgctaaagtgaaaaaacaaaagaagactccgcaggtt

SEQ ID NO: 437131 - DNA, 75 bp, synthetic construct
  source 1..75: mol_type = other DNA
ttccaggtggccgtgttggttacgccgaccacagggggcaaaaacattaaacttgcagcctcgcagagatacggg

SEQ ID NO: 437132 - DNA, 75 bp, synthetic construct
  source 1..75: mol_type = other DNA
agagtgaggtaggagatatcttaagtgaagaggaattaaataatttaccactctttattgatcctaattttttta

SEQ ID NO: 437133 - DNA, 75 bp, synthetic construct
  source 1..75: mol_type = other DNA
atgttgctaaatgcagtgatggatcttcgtgcaagaggggaagagtggcgctctgtgcacctttatggtcaggaa

SEQ ID NO: 437134 - DNA, 75 bp, synthetic construct
  source 1..75: mol_type = other DNA
ctggaactccatgaaggtgatgttgaatacgccgccatgccgatgtttcatcgtttcaacattccctctgaagct

SEQ ID NO: 437135 - DNA, 75 bp, synthetic construct
  source 1..75: mol_type = other DNA
aatagtaatgaagagcatgatttagaacatgccattgaggcgtggaaggttagccgtttgcaattacaaaaacag

SEQ ID NO: 437136 - DNA, 75 bp, synthetic construct
  source 1..75: mol_type = other DNA
aaaagttctaaacaccaacaaggaattcatttcttctggtgcaaatacaatacaacatcaggaatgtaagtcttt

SEQ ID NO: 437137 - DNA, 75 bp, synthetic construct
  source 1..75: mol_type = other DNA
atataaaatcaatttctgtgagagatccatctcctcttccaaaagaagtattggttcagtcatccgatatgaaat

SEQ ID NO: 437138 - DNA, 75 bp, synthetic construct
  source 1..75: mol_type = other DNA
ccgcagggctgcgctgattatgcgttttatacccatataatcaaaagcttaaaacccgataccggtcgtgcagcc

SEQ ID NO: 437139 - DNA, 75 bp, synthetic construct
  source 1..75: mol_type = other DNA
tgctctggggagccgccgaatttcttcgtggccaaattgacgcatcagactacaagcagtatatcttcccgttgc

SEQ ID NO: 437140 - DNA, 75 bp, synthetic construct
  source 1..75: mol_type = other DNA
atcgcaatcacaactcggtgatctgggcgagaaattagtcaattcgcaattctcccagcgccaggaagcagaagc

SEQ ID NO: 437141 - DNA, 75 bp, synthetic construct
  source 1..75: mol_type = other DNA
aatgaatgaggttcgtcaggcaattgagcgtggcgaagaaagcgactttcagcaagtgtctccttggactatgcg

SEQ ID NO: 437142 - DNA, 75 bp, synthetic construct
  source 1..75: mol_type = other DNA
catgcttatttaaatgatattaatataatgaatatctataactcttacattagtttgaaggatgtctctaatatt

SEQ ID NO: 437143 - DNA, 75 bp, synthetic construct
  source 1..75: mol_type = other DNA
tgtcggtgttatgcgaggcttatttcaatcctgaaaagcaaagtgacatcactgcgttagtcagcattgatatta

SEQ ID NO: 437144 - DNA, 75 bp, synthetic construct
  source 1..75: mol_type = other DNA
accgctttagtggatatcgaagctattaaagaaaatttctataatttatcgatttcactttatgtgaaatctcaa

SEQ ID NO: 437145 - DNA, 75 bp, synthetic construct
  source 1..75: mol_type = other DNA
actgcttctccgtatgccagttatctgcaatatgggcatatcgccggtattgatgaaattcttgaagggaaaaaa

SEQ ID NO: 437146 - DNA, 75 bp, synthetic construct
  source 1..75: mol_type = other DNA
tggtgggcgtgctgggtgcgattttgctggcgtatggtgcctggctgatttatcccccggcggggtttgttgttg

SEQ ID NO: 437147 - DNA, 75 bp, synthetic construct
  source 1..75: mol_type = other DNA
cttaaacccggccagcaaactggcttatctagttccgcgcgacggcatggtttgccttgatatcagctatatggg

SEQ ID NO: 437148 - DNA, 75 bp, synthetic construct
  source 1..75: mol_type = other DNA
ggtgttatctcatggggtcaggcaaaacttgttcatgctaacgatacctatgagtcaaacgggcttgataaagca

SEQ ID NO: 437149 - DNA, 75 bp, synthetic construct
  source 1..75: mol_type = other DNA
aggacaacaacttcggcaaacgtgttaacgcatcgctgggcggcgtccagttcctgcgcgacggtgacgccttcg

SEQ ID NO: 437150 - DNA, 75 bp, synthetic construct
  source 1..75: mol_type = other DNA
ctgcatgatggtgatgaaaaagcagagtatgaaggcttccccggcaatttcttcctgaatgctgctaacaaagcg

SEQ ID NO: 437151 - DNA, 75 bp, synthetic construct
  source 1..75: mol_type = other DNA
acattcgtatcccacacaaaggcaacgttaccgagcgtgttattgagggcgcttttgaagtgctggatcagttcg

SEQ ID NO: 437152 - DNA, 75 bp, synthetic construct
  source 1..75: mol_type = other DNA
tggagcttgcgctgaggtctgcccggctggcgcgatggtccagtcaggtaagaaaatgtcggtggtggaggttat

SEQ ID NO: 437153 - DNA, 75 bp, synthetic construct
  source 1..75: mol_type = other DNA
aaggcgtcatatttaatattcaacgctattctttgcatgatggtccaggcattcgaaccattcctttttttaaag

SEQ ID NO: 437154 - DNA, 75 bp, synthetic construct
  source 1..75: mol_type = other DNA
tcgccggtattgatgaaattcttgaagggaaaaaaccggactggccccctgaatctccagacaaccaatatcact

SEQ ID NO: 437155 - DNA, 75 bp, synthetic construct
  source 1..75: mol_type = other DNA
ctcaaggatgtgtcaacggttggcggcgtcctgattggcgtgctgatgctggcgatcaactggtactacaaacac

SEQ ID NO: 437156 - DNA, 75 bp, synthetic construct
  source 1..75: mol_type = other DNA
agagatatattttctcaactgaaaaagaaagactaaatttatttactaaagatattactccacaatcgaaatcta

SEQ ID NO: 437157 - DNA, 75 bp, synthetic construct
  source 1..75: mol_type = other DNA
gcgcggatctgccgatgattggcgtttccacgctcatgacaatggcgcaaggggcgtggcgcaaaaacggcgcaa

SEQ ID NO: 437158 - DNA, 75 bp, synthetic construct
  source 1..75: mol_type = other DNA
aatgttaaagccattgatgaacggcagccttttgccgcacagctggcggcggtaatgtcagaggggcgttttact

SEQ ID NO: 437159 - DNA, 75 bp, synthetic construct
  source 1..75: mol_type = other DNA
acactggcaaagatggcgtttacttccatctacaaggccaaccagataatttcttgtcactatcagctactgaga

SEQ ID NO: 437160 - DNA, 75 bp, synthetic construct
  source 1..75: mol_type = other DNA
acagcctcagctaatgagcaagcttcaaaggtgcttaagtcgggtaatgctctgcgaaagtactctgtgaatccg

SEQ ID NO: 437161 - DNA, 75 bp, synthetic construct
  source 1..75: mol_type = other DNA
tttgcagaatgctgttccgatgaaatcgcaaacatcattctggaagccgtgaaacgttacaccagtacggagcct

SEQ ID NO: 437162 - DNA, 75 bp, synthetic construct
  source 1..75: mol_type = other DNA
ctatccactgcagttaacgggcttccactacaaagcgcgtacccactccagctacggcaatattgatgtgttaca

SEQ ID NO: 437163 - DNA, 75 bp, synthetic construct
  source 1..75: mol_type = other DNA
actcaggtaaagatggtatctattttcaccttagagataatgtggaatcttttcttgccttaacagctactgaac

SEQ ID NO: 437164 - DNA, 75 bp, synthetic construct
  source 1..75: mol_type = other DNA
atagtggcaaagatggcatctatttccacttaagagataatgtagatgccttcttaaccttatcagcaactgaaa

SEQ ID NO: 437165 - DNA, 75 bp, synthetic construct
  source 1..75: mol_type = other DNA
agggtcaattagtagagaacttcatcgacactcttgaaaactggcgtgaccagaaacaaattatttcggtcatct

SEQ ID NO: 437166 - DNA, 75 bp, synthetic construct
  source 1..75: mol_type = other DNA
atatggaatttgacagccctatgcaggtgactacacagaacatgcaatcagggcaaaccgtcacagataatgttc

SEQ ID NO: 437167 - DNA, 75 bp, synthetic construct
  source 1..75: mol_type = other DNA
ttcttaaccttatcagcaactgaaaacatggaatttgacagccctatgcaggtaactacacagaacatgcaatca

SEQ ID NO: 437168 - DNA, 75 bp, synthetic construct
  source 1..75: mol_type = other DNA
gccagccgctgcaaattctttatcactttaattacggctggcctttattatcgccacaggcagaaatcttgctgt

SEQ ID NO: 437169 - DNA, 75 bp, synthetic construct
  source 1..75: mol_type = other DNA
gcgctggatattgcatgggccagctacaaggacactgcgctctcttttatcacccccaacggtgttgtcgccccc

SEQ ID NO: 437170 - DNA, 75 bp, synthetic construct
  source 1..75: mol_type = other DNA
gaagccctgttaccaccgtcagtgctctcaacagagggacgctgcccctgctgtcgcaggaccgtcacccaccgc

SEQ ID NO: 437171 - DNA, 75 bp, synthetic construct
  source 1..75: mol_type = other DNA
atcagcattatgtgataaatttaagttgataaatgagttggctgtagctcaatcaatatataataattatatatc

SEQ ID NO: 437172 - DNA, 75 bp, synthetic construct
  source 1..75: mol_type = other DNA
atgatggacaaaagggttcagttaatgaggtactaatcgatattattacttccttacaggaaagacccgctatta

SEQ ID NO: 437173 - DNA, 75 bp, synthetic construct
  source 1..75: mol_type = other DNA
gcaaaaatagttgctgaattacgctacgaatatgctttgaatttattaggtagactcggtgtatcaaaatctcga

SEQ ID NO: 437174 - DNA, 75 bp, synthetic construct
  source 1..75: mol_type = other DNA
ttaactggtttatgaacggcgtggagacggcaaacgaatgccgattaatcacgcgcgggcgtctggcgtttatca

SEQ ID NO: 437175 - DNA, 75 bp, synthetic construct
  source 1..75: mol_type = other DNA
atgaaaaatgattacggcggcagccatacgccgaaagaaataaaagacttatggcaaacgccaaaacccgttttt

SEQ ID NO: 437176 - DNA, 75 bp, synthetic construct
  source 1..75: mol_type = other DNA
tcgtcccgtagataaaatcattatcagggctgcggattattacaacgtttacgacactaatttcattttctctga

SEQ ID NO: 437177 - DNA, 75 bp, synthetic construct
  source 1..75: mol_type = other DNA
ccaaacggcaacaaaaagccattgatacagcggcgttaatccggcaggagccgccgcagggtgaagatatggcat

SEQ ID NO: 437178 - DNA, 75 bp, synthetic construct
  source 1..75: mol_type = other DNA
tacgggaacagttcgcccaagagtacatgggtaaagaccctgacaaggatttcaaaaagaaatttcttccagctc

SEQ ID NO: 437179 - DNA, 75 bp, synthetic construct
  source 1..75: mol_type = other DNA
atcctcttatgctctccgcaaaaagacccgcgaaataccgatcggtaagagtgcaaacgaatttctgcaattaat

SEQ ID NO: 437180 - DNA, 75 bp, synthetic construct
  source 1..75: mol_type = other DNA
agcgagccccgggcagccacaaccgctggcacaggggacgtcgttcccgccatcagcatctgcaggactggctat

SEQ ID NO: 437181 - DNA, 75 bp, synthetic construct
  source 1..75: mol_type = other DNA
tgcaaatactggtcgtcgacgcacactgcaaacgcaggctgttttcaacgaaaacaccgacagaccccgatgagc

SEQ ID NO: 437182 - DNA, 75 bp, synthetic construct
  source 1..75: mol_type = other DNA
atgccgtgcgccacaacactcgcgaaatcccgataggtgatagtgcagccgagtttttgagcttgatgggattgg

SEQ ID NO: 437183 - DNA, 75 bp, synthetic construct
  source 1..75: mol_type = other DNA
gtctgagaatccagttaacttttcaggaaattaacttcaaagccattgtagggcaaactgatgtttcggctgcga

SEQ ID NO: 437184 - DNA, 75 bp, synthetic construct
  source 1..75: mol_type = other DNA
tgacgttctgttgttgccaaatatcactctgaccagcctgctggaggttgggctggatttaagctacgaaactgg

SEQ ID NO: 437185 - DNA, 75 bp, synthetic construct
  source 1..75: mol_type = other DNA
cactaccgccagcgcatcgacaccagcccggattgcggcgtgattctaatcgctcacggggcgaccaccgcaacg

SEQ ID NO: 437186 - DNA, 75 bp, synthetic construct
  source 1..75: mol_type = other DNA
ataagccttgataaaacgctcttgcattggttgttaagtaaacccctggaaggcaatatcggccagcttaaaagt

SEQ ID NO: 437187 - DNA, 75 bp, synthetic construct
  source 1..75: mol_type = other DNA
ggggcgtggcgcaaaaacggcgcaacgcgcgtgctgtcagccattgatgcgcggatgggcgaagtttactgggcc

SEQ ID NO: 437188 - DNA, 75 bp, synthetic construct
  source 1..75: mol_type = other DNA
atgtttgccgagggaaaaaccgtcgcggtagaacatgccgaaccggtttatttacgtaacaacgtcgcgtggaag

SEQ ID NO: 437189 - DNA, 75 bp, synthetic construct
  source 1..75: mol_type = other DNA
accgtttatctcgctggaggaactgttttccgagcaagggccggagctggtgctcagcctgctgacgccggatct

SEQ ID NO: 437190 - DNA, 75 bp, synthetic construct
  source 1..75: mol_type = other DNA
attgatgacgctaaaccggtgctgattgtctcggctgatgccggggcgcgcggcggtaaaatcattccgtataaa

SEQ ID NO: 437191 - DNA, 75 bp, synthetic construct
  source 1..75: mol_type = other DNA
atgagcaaagcagttattgtcattccggctcgttatggctcatcgcgcctgccgggtaagccgctacttgatatt

SEQ ID NO: 437192 - DNA, 75 bp, synthetic construct
  source 1..75: mol_type = other DNA
tttacgagcgtgcgttacaggtggcgggcgttgcggaagtttgggtggcaacagacgacccgcgtgttgaacagg

SEQ ID NO: 437193 - DNA, 75 bp, synthetic construct
  source 1..75: mol_type = other DNA
agattgaagagagtatctccagtcatccgggcgttgccgaagtggcggtggttggggtgaaagatgcgctgaaag

SEQ ID NO: 437194 - DNA, 75 bp, synthetic construct
  source 1..75: mol_type = other DNA
ttgtctcggctgatgccggggcgcgcggtggcaaaatcattccgtataaaaaattgctcgacgatgcgataagtc

SEQ ID NO: 437195 - DNA, 75 bp, synthetic construct
  source 1..75: mol_type = other DNA
tcggaaacagaagaagagcgcacctttacctttcgtcagctgcatgacgaagtgaacgcggtggcctcaatgttg

SEQ ID NO: 437196 - DNA, 75 bp, synthetic construct
  source 1..75: mol_type = other DNA
ctgaccgagccggacagcaacctgacggcggacggtgaagccgcgccggtggatgtccagttggtgtatctgagc

SEQ ID NO: 437197 - DNA, 75 bp, synthetic construct
  source 1..75: mol_type = other DNA
ctgctggagcataaagcggagcttgagtctaaagcaatgcagcagactgaacaggaatcccagcaacaaacccag

SEQ ID NO: 437198 - DNA, 75 bp, synthetic construct
  source 1..75: mol_type = other DNA
gaagcccatctgccaaaaattaaaaatattgttgataacaaaacaggtgaacttgtggagcgtaaaccacatatt

SEQ ID NO: 437199 - DNA, 75 bp, synthetic construct
  source 1..75: mol_type = other DNA
gcacaggtcgcagagcaagcacaggtcgcagagcaagcacaggtcgcagagcaggcacaggtcgcagagcaggca

SEQ ID NO: 437200 - DNA, 75 bp, synthetic construct
  source 1..75: mol_type = other DNA
gctgcaaaggtgcttaagtcgggtaatgctttacgaaagtactctgtgaatccgaataagaagggcacttattga

SEQ ID NO: 437201 - DNA, 75 bp, synthetic construct
  source 1..75: mol_type = other DNA
ggtcaaactgatatttcggctgccactggcaaaacggctaccacgaatgatggtggtgctaccagtaaaaagaat

SEQ ID NO: 437202 - DNA, 75 bp, synthetic construct
  source 1..75: mol_type = other DNA
aagcatgatgattccgttaatccgactgacatcgcccaactccatcttgctgttaccccgctactgcgtgggctg

SEQ ID NO: 437203 - DNA, 75 bp, synthetic construct
  source 1..75: mol_type = other DNA
gcaaatcaagatagaggtacgctgctgctggcgttagttgctggcttatcgattaatggtactttcgcagcgctg

SEQ ID NO: 437204 - DNA, 75 bp, synthetic construct
  source 1..75: mol_type = other DNA
ggcaattagaagagcgactggtactgcaactgcgaatgatttcgaaaggggcttattactggtatcgccgtgaac

SEQ ID NO: 437205 - DNA, 75 bp, synthetic construct
  source 1..75: mol_type = other DNA
gagtttgcgtgaagtggcgcgtgaagcgggcattgctcccacctctttttatcggcatttccgcgacgtagacga

SEQ ID NO: 437206 - DNA, 75 bp, synthetic construct
  source 1..75: mol_type = other DNA
ctgtaatgaaaaatgctgaacgcgtggagcgtcatgaaattgagaaagcacagggacgggattgcacgccggaag

SEQ ID NO: 437207 - DNA, 75 bp, synthetic construct
  source 1..75: mol_type = other DNA
aggaatttattaataataaatataatcttgatagccctaaagactatccgcgtaaagatgcggattacggaaaaa

SEQ ID NO: 437208 - DNA, 75 bp, synthetic construct
  source 1..75: mol_type = other DNA
cggtctccacatttatggagttcatcggtaataatcctaacgccttccggttattattgcgggaacgctccggca

SEQ ID NO: 437209 - DNA, 75 bp, synthetic construct
  source 1..75: mol_type = other DNA
agcctgtccggacggctggcaataaaaattattgcagagccaccggataagcgtcgtcgtgacctggacaatatt

SEQ ID NO: 437210 - DNA, 75 bp, synthetic construct
  source 1..75: mol_type = other DNA
cgagcagtttgatgaaatcaatattgtgcgcggtcagctcgttcctggtgggcggctgggcgtgaagatttacga

SEQ ID NO: 437211 - DNA, 75 bp, synthetic construct
  source 1..75: mol_type = other DNA
gtctgcggtaactgacgcccagcaaacgcaaattacagagcaacaggcgcagatcgtagccacacaaaaaacgct

SEQ ID NO: 437212 - DNA, 75 bp, synthetic construct
  source 1..75: mol_type = other DNA
cgcatgacgcattatttaagtcctttctcacgcaccctgacaccgcgcgggattttatggagatccacttaccta

SEQ ID NO: 437213 - DNA, 75 bp, synthetic construct
  source 1..75: mol_type = other DNA
aagggtttactcgactcccttatccatgccggatttgcggaagacgacgagcaattcgatgacattcgcgtaatt

SEQ ID NO: 437214 - DNA, 75 bp, synthetic construct
  source 1..75: mol_type = other DNA
gccgttaaaaaaatcgccttaggcgtagcttatgcgctgtgggaaggtatcggtattttatttattaccttgttt

SEQ ID NO: 437215 - DNA, 75 bp, synthetic construct
  source 1..75: mol_type = other DNA
cgcatattgcagtgatgggaatggagcgtattgcccccacgtttgccgaggtagatgtattgatcaccatgctgg

SEQ ID NO: 437216 - DNA, 75 bp, synthetic construct
  source 1..75: mol_type = other DNA
gtgatcatgttctgagtaatctcgacgcttatctgtaccagctctcagaaaaagtgacgcaaaacggcggtcacg

SEQ ID NO: 437217 - DNA, 75 bp, synthetic construct
  source 1..75: mol_type = other DNA
ccggacttctcatagacgacgagcagtttgatgaaatcaatattgtgcgcggtcagctcgtttctggtgggcggc

SEQ ID NO: 437218 - DNA, 75 bp, synthetic construct
  source 1..75: mol_type = other DNA
cgcagtgatttcgccactgcttggcggctataaagattttaaagatctcccctacgcctgttctttatgtacagc

SEQ ID NO: 437219 - DNA, 75 bp, synthetic construct
  source 1..75: mol_type = other DNA
tggcgcgatcgtgccagccagatacgtgatcatgttctgagtaatctggacgcttatctgtatcaactttcagaa

SEQ ID NO: 437220 - DNA, 75 bp, synthetic construct
  source 1..75: mol_type = other DNA
gattagcgactggatggaagcacgcgatcttcctgaagctgacggagagagtttccgtagttggtttaagaaaca

SEQ ID NO: 437221 - DNA, 75 bp, synthetic construct
  source 1..75: mol_type = other DNA
agattattgcagagccaccggataagcgccgtcgtgacctggacaatattctgaaagctccactggatgcactga

SEQ ID NO: 437222 - DNA, 75 bp, synthetic construct
  source 1..75: mol_type = other DNA
atccgccgacggtaaatacttactggcgacgtcgtggcaacacatattttgtatcaaaagtcggtgagcgttatc

SEQ ID NO: 437223 - DNA, 75 bp, synthetic construct
  source 1..75: mol_type = other DNA
tattttgtatcaaaagccggtgagcgttatcgccgggctgtggcgcttattgttcgccagcagcggctgaaatta

SEQ ID NO: 437224 - DNA, 75 bp, synthetic construct
  source 1..75: mol_type = other DNA
tcctcagtgaagcatagccgtcagcggatgtatctggtgcccccggttttttcacaactgaccgaacaacatcag

SEQ ID NO: 437225 - DNA, 75 bp, synthetic construct
  source 1..75: mol_type = other DNA
acgtgccgggcgatctcttctccgttaaccatctcaccgctcagaacgtgccgaatctgtttgcccgtaacgaac

SEQ ID NO: 437226 - DNA, 75 bp, synthetic construct
  source 1..75: mol_type = other DNA
aacggtattctgcgtgagatgatctacgtgccgggcgatctcttctccgttaaccatctcaccgctcagaacgtg

SEQ ID NO: 437227 - DNA, 75 bp, synthetic construct
  source 1..75: mol_type = other DNA
gcaagcaagcgggcaggatggctgacaaaactggttatcgatctgttcgttaaatactacaaggtcgacatgaaa

SEQ ID NO: 437228 - DNA, 75 bp, synthetic construct
  source 1..75: mol_type = other DNA
tgggcgtgaagatttacaaaattgagagtgagcgtaaatatgatatatccggaaattacaggcaaaagcggcgaa

SEQ ID NO: 437229 - DNA, 75 bp, synthetic construct
  source 1..75: mol_type = other DNA
ggtccgggtgctggcggctgacggcaagctggaaaccaggaatgtgacaactggcataaccaacggattggatat

SEQ ID NO: 437230 - DNA, 75 bp, synthetic construct
  source 1..75: mol_type = other DNA
gtatcaaaagccggtgagcgttatcgccgtgatgtggcgctcattgttcgccagcagcgactgagattaaacctg

SEQ ID NO: 437231 - DNA, 75 bp, synthetic construct
  source 1..75: mol_type = other DNA
gcgctggcaaaactggtgagcgaaggcgtgctgcttagtcgacgcggcggcgggacgtttattcgctggcgtcat

SEQ ID NO: 437232 - DNA, 75 bp, synthetic construct
  source 1..75: mol_type = other DNA
cgcatgcggggcttctcatagacgacgagcagtttgatgaaatcaatattgtgcgcggtcagctcgttcctggtg

SEQ ID NO: 437233 - DNA, 75 bp, synthetic construct
  source 1..75: mol_type = other DNA
tcaatatcgttcgtggtcagccagtatctggtggacgtatgggggtgaagatttaccccataatgcatgaagagc

SEQ ID NO: 437234 - DNA, 75 bp, synthetic construct
  source 1..75: mol_type = other DNA
aaactaatcgaaagacttaaaggtcagaatgaactctacaaagaagcatttgaaaatatgctggcagctcaaaaa

SEQ ID NO: 437235 - DNA, 75 bp, synthetic construct
  source 1..75: mol_type = other DNA
cgaacgagctggcaattctgttgcggcagatggacgaggcgttcgggagcgactgcaaacgttcgggctctccgg

SEQ ID NO: 437236 - DNA, 75 bp, synthetic construct
  source 1..75: mol_type = other DNA
cgatggccgaacacttccgcgccgatccgacctatgcagcggagctgcttgctgaagttcgccgcgacggcaacc

SEQ ID NO: 437237 - DNA, 75 bp, synthetic construct
  source 1..75: mol_type = other DNA
cgacggccgagcacttccgcgccgatccgacctatgcggcggaattgcttgtgagggtccgtcgcaaaggtgatc

SEQ ID NO: 437238 - DNA, 75 bp, synthetic construct
  source 1..75: mol_type = other DNA
gcgaaattgaagccagcaaagccatcggcgaccagtgggttgtcacctctggcttgcaggctggcgatcgggtga

SEQ ID NO: 437239 - DNA, 75 bp, synthetic construct
  source 1..75: mol_type = other DNA
ttttttgcgcatgaaagaggaagtcgccagtgggcaaatcaaacaggttcagggcagtacgccagtgcagcttaa

SEQ ID NO: 437240 - DNA, 75 bp, synthetic construct
  source 1..75: mol_type = other DNA
atgattcccgcatgctgttcctgtcagcactgagcgcactgttaggttgtgcaacctggcgtctgacctattcgc

SEQ ID NO: 437241 - DNA, 75 bp, synthetic construct
  source 1..75: mol_type = other DNA
ttgccgcaagcaagctggcaaccgagggacttcagttcaccgcaaaattgaagggtggtaccactccgggtgact

SEQ ID NO: 437242 - DNA, 75 bp, synthetic construct
  source 1..75: mol_type = other DNA
tttgttaggcatcaaaggcaccgagatgagtgccgatatcgccaaagccttcaaccttgacgtgcagcgtggcgc

SEQ ID NO: 437243 - DNA, 75 bp, synthetic construct
  source 1..75: mol_type = other DNA
aatgtattaattgcatatcaacttagccaagacgctcaaaagatattcaaattaatacagtccggaaatcatgaa

SEQ ID NO: 437244 - DNA, 75 bp, synthetic construct
  source 1..75: mol_type = other DNA
tagctgaagggcaaaaaacgcatgtgttacgtcatacatttgcgagtcactttatgatgaatggtgggaacattt

SEQ ID NO: 437245 - DNA, 75 bp, synthetic construct
  source 1..75: mol_type = other DNA
tttacaataatgggcatctggattgcttatgtttatccaaatgctgttttaaaaattgttcaaccctcaaaagtg

SEQ ID NO: 437246 - DNA, 75 bp, synthetic construct
  source 1..75: mol_type = other DNA
cttttgatgcagcaaaagcgactacggatggtttccagttcaaagcaacactacatggtggggataccgctggtg

SEQ ID NO: 437247 - DNA, 75 bp, synthetic construct
  source 1..75: mol_type = other DNA
gggctccgtgacgttacgggcgattttccccaacccaaatggtgacttgctgcctggcatgtatgtcacggcatt

SEQ ID NO: 437248 - DNA, 75 bp, synthetic construct
  source 1..75: mol_type = other DNA
caatcaggtcagaatgttttttaccctttggtgcgggatgggattgtcctacgccagaagaaattcgtactttga

SEQ ID NO: 437249 - DNA, 75 bp, synthetic construct
  source 1..75: mol_type = other DNA
tcaatttaaaagtttgatgctcaaagaattaaacttcgtaatgaattacgtgttcactcttgagacttggtattc

SEQ ID NO: 437250 - DNA, 75 bp, synthetic construct
  source 1..75: mol_type = other DNA
aatgagccgaaaaccgaagcacagccagaacaaccagacccggctcagcccggaactgacagcaccatgatgtaa

SEQ ID NO: 437251 - DNA, 75 bp, synthetic construct
  source 1..75: mol_type = other DNA
ctgataatgagccgaaaaccgaaacacaaccagagcaaccagaaccggctcagcccggaactgacagcaccatga

SEQ ID NO: 437252 - DNA, 75 bp, synthetic construct
  source 1..75: mol_type = other DNA
atgcaaactaaaccctaccctgtctcaatcaggtcagaatgttttttaccctttggtgcgggatgggtttgtccg

SEQ ID NO: 437253 - DNA, 75 bp, synthetic construct
  source 1..75: mol_type = other DNA
tcccggttcggtcaatgtgatgagcgaactgcccggcagaactgttccttatgaagttgctgagatacgccccca

SEQ ID NO: 437254 - DNA, 75 bp, synthetic construct
  source 1..75: mol_type = other DNA
tgcgtgaaattcctcccgccccggaaaaaaacagcgaccatgccgttctgcaagtcgccattcagagtcgtatca

SEQ ID NO: 437255 - DNA, 75 bp, synthetic construct
  source 1..75: mol_type = other DNA
tgcgcccgtctctgatggtagattgcagccacggtaattccaataaagattatcgccgtcagcctgcggtggcag

SEQ ID NO: 437256 - DNA, 75 bp, synthetic construct
  source 1..75: mol_type = other DNA
aaaccggcatctctaactggtgcgttcagaaaagcacgtgactcagttgactacgactggtcaagcaaaggtgct

SEQ ID NO: 437257 - DNA, 75 bp, synthetic construct
  source 1..75: mol_type = other DNA
cgcctttcagatatttgcaaaatgcaattttcggatatccgggatggttatcttcatgtcgaacagcaaaaacag

SEQ ID NO: 437258 - DNA, 75 bp, synthetic construct
  source 1..75: mol_type = other DNA
atgatgcgctacgcttatcaggccttgtattatccctcctgtgcagagaaaatcggccagttttctctgcctgca

SEQ ID NO: 437259 - DNA, 75 bp, synthetic construct
  source 1..75: mol_type = other DNA
ctctgcgttgcgacaaattaaatctgaccctaggtgacgtggtgtcatcctgtcgtgattacatccttagtccgt

SEQ ID NO: 437260 - DNA, 75 bp, synthetic construct
  source 1..75: mol_type = other DNA
ttttgacaaaagaaataacaaagtttactggcgttacaggcatcccataacaggcaaaaatcacggtctcggcag

SEQ ID NO: 437261 - DNA, 75 bp, synthetic construct
  source 1..75: mol_type = other DNA
gcgacgtcgtggcaacacatattttgtatcaaaagtcggtgagcgttatcgccgtgatgtggcactaattgttcg

SEQ ID NO: 437262 - DNA, 75 bp, synthetic construct
  source 1..75: mol_type = other DNA
tattttgtatcaaaagctggtgagcgttatcgccatgatgtggagcttattgttcgccagcagcgactgaaatta

SEQ ID NO: 437263 - DNA, 75 bp, synthetic construct
  source 1..75: mol_type = other DNA
ggtcagccagtatctggtggacgtctgggggtgaagatttaccccataatgcatgaagagcaggtcaaaaaatga

SEQ ID NO: 437264 - DNA, 75 bp, synthetic construct
  source 1..75: mol_type = other DNA
aagagagtgcataatatttttatggttaacatccataatattatatggcctctagagtactttttttatcttaag

SEQ ID NO: 437265 - DNA, 75 bp, synthetic construct
  source 1..75: mol_type = other DNA
acccaccctctttccatgagcagagatctttatcagagcgattgttcagagagcagggggttgataccaaaattt

SEQ ID NO: 437266 - DNA, 75 bp, synthetic construct
  source 1..75: mol_type = other DNA
atggggatagaatttgttttgccttaccctccgacggtgaatacctactggcgtcgtcgtagcagcacatatttt

SEQ ID NO: 437267 - DNA, 75 bp, synthetic construct
  source 1..75: mol_type = other DNA
aaactgatttaacaaatggttggtctgccttagaaagtatatttgaacattatcttgattatattattgataata

SEQ ID NO: 437268 - DNA, 75 bp, synthetic construct
  source 1..75: mol_type = other DNA
ggaaggcgcaatcaacgccaagaccgtaacctatgacttcgaacgtctgatggaaggcgctaaactgttgaaatg

SEQ ID NO: 437269 - DNA, 75 bp, synthetic construct
  source 1..75: mol_type = other DNA
gacttcgaacgtctgatggaaggcgctaagctgctgaaatgttcagagtttggtgacgcgatcatcaagaaaatg

SEQ ID NO: 437270 - DNA, 75 bp, synthetic construct
  source 1..75: mol_type = other DNA
gacttcgaacgtctgatggaaggcgctaagctgctgaaatgttcagagtttggtgaagcgatcatcaagaacatg

SEQ ID NO: 437271 - DNA, 75 bp, synthetic construct
  source 1..75: mol_type = other DNA
aaaacttgaagcagctgcagcggcggcgcgtgaggcatataaaccaaaaagaaaaattagcctggcaaaaaatga

SEQ ID NO: 437272 - DNA, 75 bp, synthetic construct
  source 1..75: mol_type = other DNA
tccctgcgcttatcaccgtccgtcagcacgtacaccgaaaaacgcgaagacccgtacttcaaatccagttacgac

SEQ ID NO: 437273 - DNA, 75 bp, synthetic construct
  source 1..75: mol_type = other DNA
gtaacctatgacttcgaacgtctgatggaaggcgctaaactgctgaaatgcagcgagtttggtgacgcgatcatc

SEQ ID NO: 437274 - DNA, 75 bp, synthetic construct
  source 1..75: mol_type = other DNA
ggtcacacagaaggccataccttaattgtcggcacaaccggtgccggaaaaacccgttgctttgatgcgatgatc

SEQ ID NO: 437275 - DNA, 75 bp, synthetic construct
  source 1..75: mol_type = other DNA
ggcgcaaaaatgcgttgtgtgattgctactcagacctttgctgactttgccgctcgtacaggcagtgaggctaag

SEQ ID NO: 437276 - DNA, 75 bp, synthetic construct
  source 1..75: mol_type = other DNA
gtgaccaaaggtgccttttatcatcactttaaaaataaaaaacaattactcagtgcctgttataagcagcaatta

SEQ ID NO: 437277 - DNA, 75 bp, synthetic construct
  source 1..75: mol_type = other DNA
atgttacgccatatgggttggactgaagcggctgacctgattgttaaaggtatggaaggcgcaatcaatgcgaag

SEQ ID NO: 437278 - DNA, 75 bp, synthetic construct
  source 1..75: mol_type = other DNA
catgaatatgctgacgtccggggagctaggccctctgctgtctccagactcatctgatctgagcgacgaacgcca

SEQ ID NO: 437279 - DNA, 75 bp, synthetic construct
  source 1..75: mol_type = other DNA
cagccctggattcacggggtagagccaaaagaagagaagttgatgcagccgctcaagcacaccgaggggcattcg

SEQ ID NO: 437280 - DNA, 75 bp, synthetic construct
  source 1..75: mol_type = other DNA
ttgcagagccaccggataagcgtcgtcgtgacctggacaacattctgaaagcaccgctggatgcgctgacgcatg

SEQ ID NO: 437281 - DNA, 75 bp, synthetic construct
  source 1..75: mol_type = other DNA
gtggcaaatttgcgttatactcaactcactttggcttgctgcggcagctttgttactggagagttatatgagtca

SEQ ID NO: 437282 - DNA, 75 bp, synthetic construct
  source 1..75: mol_type = other DNA
aaatcaatattgtgcgcggtcagctcgtttctggtgggcggctgggcgtgaagataaaaatcacagaactggagt

SEQ ID NO: 437283 - DNA, 75 bp, synthetic construct
  source 1..75: mol_type = other DNA
tcgtgacctggacaatatcctgaaagcaccactggatgcgctgacgcatgccggacttctcatagacgacgagca

SEQ ID NO: 437284 - DNA, 75 bp, synthetic construct
  source 1..75: mol_type = other DNA
ggcgatggacagctatctcatcgatccgaaacgtaaattgcatgtctgcggtaataacccaacctgcgatggtta

SEQ ID NO: 437285 - DNA, 75 bp, synthetic construct
  source 1..75: mol_type = other DNA
cttctcggatttcacccagcagttagataaagctgaaaaagatccggaagaggggggtatgcgcccgaaccagat

SEQ ID NO: 437286 - DNA, 75 bp, synthetic construct
  source 1..75: mol_type = other DNA
atgaaatcaatatcgttcgtgctcagccagtatctggtggacgtctggggggtgaagatttaccccataatgctt

SEQ ID NO: 437287 - DNA, 75 bp, synthetic construct
  source 1..75: mol_type = other DNA
tcaggcgcttattccgctggcgaaagatattattgcccgttatcacatcaagccggaaaacgtagtggcacatgc

SEQ ID NO: 437288 - DNA, 75 bp, synthetic construct
  source 1..75: mol_type = other DNA
ctgccgctctgttactggcagggtgtgcaggcgaaaaaggcattgtcgagaaagagggatatcagcttgataccc

SEQ ID NO: 437289 - DNA, 75 bp, synthetic construct
  source 1..75: mol_type = other DNA
ggtagagcaactggaaagcctgtcggtcacgaaaattggccagccgctggcagtatctaccgaaacctttgttgc

SEQ ID NO: 437290 - DNA, 75 bp, synthetic construct
  source 1..75: mol_type = other DNA
tccggacggctggcaataaaaattattgcagagccaccggataagcgtcgtcgtgacctggacaatattctgaaa

SEQ ID NO: 437291 - DNA, 75 bp, synthetic construct
  source 1..75: mol_type = other DNA
gttatcgccgtgatgtggcgcttattgttcgccagcagaggttgaaattaaacctgtccggaaggctggcaataa

SEQ ID NO: 437292 - DNA, 75 bp, synthetic construct
  source 1..75: mol_type = other DNA
ggctatgacgtgaaaccagaaatgactcctggcgaacagcaacgagtgattatggcgttccagatgcatttccgc

SEQ ID NO: 437293 - DNA, 75 bp, synthetic construct
  source 1..75: mol_type = other DNA
gtttgctggaaaaagcgcgttacagcgttctggaacgcgaagataaacctaccagcagcaagcctggtgcgccgt

SEQ ID NO: 437294 - DNA, 75 bp, synthetic construct
  source 1..75: mol_type = other DNA
cgcgctttatcaggaaaccaaatccttattgcaaccagaaaaactgaccgcatttttaatcgaaaaaatgaaatc

SEQ ID NO: 437295 - DNA, 75 bp, synthetic construct
  source 1..75: mol_type = other DNA
tggaagcggtgtggatgatggaagtggaaaatctgcccgcattcatcctggtagatgataaaggcaataatttct

SEQ ID NO: 437296 - DNA, 75 bp, synthetic construct
  source 1..75: mol_type = other DNA
gcgtgcaccgctggtggaagagctttatcgcttccgcgaccgtttaccagaaaaattgcgttatctggctgatgc

SEQ ID NO: 437297 - DNA, 75 bp, synthetic construct
  source 1..75: mol_type = other DNA
aagatcaggcacgccgcgcacgcattacccgcctgcccggtgagcatcatgagcattcgagggagaaaaacgcat

SEQ ID NO: 437298 - DNA, 75 bp, synthetic construct
  source 1..75: mol_type = other DNA
gcaatatattcctgtatcaatgcgggaagaaaatcgcacgcatcatgtgcatctcgatctgaatcgtccattgcg

SEQ ID NO: 437299 - DNA, 75 bp, synthetic construct
  source 1..75: mol_type = other DNA
gctgggcaccgccgcctgtccgccctaccatatcgcctttgtcgtcggaggactttctgccgatcaggcgttaaa

SEQ ID NO: 437300 - DNA, 75 bp, synthetic construct
  source 1..75: mol_type = other DNA
aaaacagcctcgaccaggtggcaaatcacgaagcagagtggaaagctgtactggatcacttcttctcggatttca

SEQ ID NO: 437301 - DNA, 75 bp, synthetic construct
  source 1..75: mol_type = other DNA
tttacgtaacggcgaagtggcaccaccgaaagaagatccggtgccattaccggagctgccgtgcgaaaaatcaga

SEQ ID NO: 437302 - DNA, 75 bp, synthetic construct
  source 1..75: mol_type = other DNA
agagttctgggaggtggatgccagcacgaccacaccatcaggcgaagcgttggccttgcaggtgacccatcagaa

SEQ ID NO: 437303 - DNA, 75 bp, synthetic construct
  source 1..75: mol_type = other DNA
ccgaaagaagatccggttccgctgccagaattaccgtgcgaaaaatcggatgcttatttcgtgctgcgtgatggc

SEQ ID NO: 437304 - DNA, 75 bp, synthetic construct
  source 1..75: mol_type = other DNA
ttgatcgtgttaatgcccagcaggcgcgtcgctttatggatcgcgtcgtgggttatatggtttctccgctgctgt

SEQ ID NO: 437305 - DNA, 75 bp, synthetic construct
  source 1..75: mol_type = other DNA
aagagctggaaaaacgcggcatcggtcgtccgtctacctatgcgtcgatcatttcgaccattcaggatcgtggct

SEQ ID NO: 437306 - DNA, 75 bp, synthetic construct
  source 1..75: mol_type = other DNA
acctttaaacccgatcatgaccttaatccagacttgcttgttcgctattgcgctaaccgtttacgagtagtacct

SEQ ID NO: 437307 - DNA, 75 bp, synthetic construct
  source 1..75: mol_type = other DNA
atgcgcactaaaactaaagtcatcagaacatcctacatttttccacgaccaagctatccctataaatggtgaaca

SEQ ID NO: 437308 - DNA, 75 bp, synthetic construct
  source 1..75: mol_type = other DNA
cgcctgatcacggccattgtgacaagacctgtgatgtggctgaaagatgcactggtcaatgtcgtcatgaaaaat

SEQ ID NO: 437309 - DNA, 75 bp, synthetic construct
  source 1..75: mol_type = other DNA
gaactggttaatctctgctacttacaattgtggatggagaagagtcaacaaatgtgcaaacacatctacccagga

SEQ ID NO: 437310 - DNA, 75 bp, synthetic construct
  source 1..75: mol_type = other DNA
ccaccgaactagctaaggctctcggctataaaaaaactgatgccatcagccaaatttatgcccgtaatgctgacg

SEQ ID NO: 437311 - DNA, 75 bp, synthetic construct
  source 1..75: mol_type = other DNA
gaacagcgtatcgaagaagatgagattgatttaagcaacgtggagatgagccattatcgcctgtcgaaactccac

SEQ ID NO: 437312 - DNA, 75 bp, synthetic construct
  source 1..75: mol_type = other DNA
cggcgcttatcacacagatgctgtttaccggggattaattgccggcgttgccggcatcagtgccgaccgcatcta

SEQ ID NO: 437313 - DNA, 75 bp, synthetic construct
  source 1..75: mol_type = other DNA
gcgtcgcttttgatctcgacggtacgctggttgacagtgcccccggtcttgctgctgcggtagatatggcgctgt

SEQ ID NO: 437314 - DNA, 75 bp, synthetic construct
  source 1..75: mol_type = other DNA
cacaacagatgctgtttgtcggcgactcacgcaatgatattcaggcggcaaaagcggcaggttgcccatccgttg

SEQ ID NO: 437315 - DNA, 75 bp, synthetic construct
  source 1..75: mol_type = other DNA
acggcggcatttaaagccaccgtgcaggcggaagggttcgtcacaaacacgtcgagaatgtcacctttctggcgg

SEQ ID NO: 437316 - DNA, 75 bp, synthetic construct
  source 1..75: mol_type = other DNA
gggccaggaatgagtctccgcgactgatgcgccagtgggcagatgtcatgcgtgaatgctgtgataccggagcag

SEQ ID NO: 437317 - DNA, 75 bp, synthetic construct
  source 1..75: mol_type = other DNA
gccgcaatcagttcaatctggtggggaattaccacactgacgccgtttaccggtcgatgattgccggcgttgcag

SEQ ID NO: 437318 - DNA, 75 bp, synthetic construct
  source 1..75: mol_type = other DNA
aattgtggatggagaagagtcaacaaatgtgcaaacacatctacccaggaatgaagcaaattggttctgagcttt

SEQ ID NO: 437319 - DNA, 75 bp, synthetic construct
  source 1..75: mol_type = other DNA
attatcaaaacctattatgtcgaaaaaggttttgaacggattgttgccggatgtccggtacccattgttattgct

SEQ ID NO: 437320 - DNA, 75 bp, synthetic construct
  source 1..75: mol_type = other DNA
tcgagtcctacctgaatcaagccgcgaactcggcggcagtcccggcgtgggatcgttatcagaagtggtcagagc

SEQ ID NO: 437321 - DNA, 75 bp, synthetic construct
  source 1..75: mol_type = other DNA
caactccatgttcggcagcatcgcggccgacctgcaaagcgtggtgaatatctacacgaagtcgcaggccttggg

SEQ ID NO: 437322 - DNA, 75 bp, synthetic construct
  source 1..75: mol_type = other DNA
atgccggatgcagcagagggtatcagcgtgccgctcctgaaaaaaatgtcttcagaaaggacactggcggttcag

SEQ ID NO: 437323 - DNA, 75 bp, synthetic construct
  source 1..75: mol_type = other DNA
agattggtgaccagctgggatacagctcacgccacgtccagcgcatgctgaaactggcgaaccttgccccggaac

SEQ ID NO: 437324 - DNA, 75 bp, synthetic construct
  source 1..75: mol_type = other DNA
ggagcagtacgatacatatgacagcgtttgcgacgagtcagatgcgatcgaagcggacatcctcgccattcaggc

SEQ ID NO: 437325 - DNA, 75 bp, synthetic construct
  source 1..75: mol_type = other DNA
cagacggcggaactgaccgatgtcagcgatccgcagcaggttttcgatctgtttgaaaaactgcgcgccacgcag

SEQ ID NO: 437326 - DNA, 75 bp, synthetic construct
  source 1..75: mol_type = other DNA
ggctttatcctcgacgtgctgaaaaactacaccaactacaaagtggcgtatcagttgctgcaaaagctggaagac

SEQ ID NO: 437327 - DNA, 75 bp, synthetic construct
  source 1..75: mol_type = other DNA
gccgtatcgtgccggaactggtctacagcctgtatgcctcaaatagcgtctttgcagaaacgggcgtgaaagcca

SEQ ID NO: 437328 - DNA, 75 bp, synthetic construct
  source 1..75: mol_type = other DNA
caggcgtacatcgaagctgcgctggaggtctgccagaagcatatcggcaagcgatttgataacggtctggagttc

SEQ ID NO: 437329 - DNA, 75 bp, synthetic construct
  source 1..75: mol_type = other DNA
atgtcggacctttacggatgcaatattaaaaaaaacaaaaagttatattcgagaagtaccgacacgattttccct

SEQ ID NO: 437330 - DNA, 75 bp, synthetic construct
  source 1..75: mol_type = other DNA
caggcgctttgatgacgggctggagttcacgccagccataaagattggctgcatgatgtttatcgctcacctgta

SEQ ID NO: 437331 - DNA, 75 bp, synthetic construct
  source 1..75: mol_type = other DNA
ggacgtttttgttcccgcacgttgccgatacgctgggcgcattgcaggctaaaggcctgccgctaggcctggtca

SEQ ID NO: 437332 - DNA, 75 bp, synthetic construct
  source 1..75: mol_type = other DNA
agtcgcattaaaaacaggtctgaatattgttgcttcctccggtccctacctggaaaaatttgaaagccagagaat

SEQ ID NO: 437333 - DNA, 75 bp, synthetic construct
  source 1..75: mol_type = other DNA
aggttcgtgaactggtgggaacagatgcaacagaagtagcagcagatttcccgaccgttgaagcattacgccagc

SEQ ID NO: 437334 - DNA, 75 bp, synthetic construct
  source 1..75: mol_type = other DNA
atgattaaagttctttttttcgcccaggtgcgcgagttggtgggaacagatgcaaccgaagtggctgcggatttc

SEQ ID NO: 437335 - DNA, 75 bp, synthetic construct
  source 1..75: mol_type = other DNA
gctcaacgccttctcggacataaatcagattcaatggcggcgcggtatagggacagccgagggagagaatgggac

SEQ ID NO: 437336 - DNA, 75 bp, synthetic construct
  source 1..75: mol_type = other DNA
gcaacgattgataaagaattgaatcaagggattggcgatacggatattcgtgccggaatgatcggtgaaataggt

SEQ ID NO: 437337 - DNA, 75 bp, synthetic construct
  source 1..75: mol_type = other DNA
gacatttaccgaagccgagcataacagcttgcgggctgcctcgctggcacagattaacaatcctcatgtggcgat

SEQ ID NO: 437338 - DNA, 75 bp, synthetic construct
  source 1..75: mol_type = other DNA
tatcaagggattgagtatgacgtagaaacaatgcgccctgtagcatactggtttagaaaaatcaatctactgact

SEQ ID NO: 437339 - DNA, 75 bp, synthetic construct
  source 1..75: mol_type = other DNA
aagcgccggaagtagtacaggattttgcaccgggcactattcaggaattgccggaaggggcaacgattaaatcaa

SEQ ID NO: 437340 - DNA, 75 bp, synthetic construct
  source 1..75: mol_type = other DNA
aaacaatgcgccctgttgcatactggtttcgtaaaatcaacctactgactcagacttacacaggtgataactatc

SEQ ID NO: 437341 - DNA, 75 bp, synthetic construct
  source 1..75: mol_type = other DNA
ggtttcgtaaaatcaacctactgactcagacttacacaggtgataactatcgcgtagatgcatcgcaagtatgtc

SEQ ID NO: 437342 - DNA, 75 bp, synthetic construct
  source 1..75: mol_type = other DNA
gaaagattctggtgacgattttgatactggtgaagatgatgaacaatatcaagcgccggaagtagtacaggattt

SEQ ID NO: 437343 - DNA, 75 bp, synthetic construct
  source 1..75: mol_type = other DNA
aagcgccggaagttattcacgatttcgcgcctggtactattcaggaattgccggaaggggcaacaatcaagtcaa

SEQ ID NO: 437344 - DNA, 75 bp, synthetic construct
  source 1..75: mol_type = other DNA
aaggtaaaacggcttccgcaaaattaatcaggtcaacccttgttgacgtttttcgtgaggcaatagccgaggggc

SEQ ID NO: 437345 - DNA, 75 bp, synthetic construct
  source 1..75: mol_type = other DNA
taatatttctgtcttctgctgcttatgcagatatcaatctgtatggaccaggtggtccacatacagccttgctcg

SEQ ID NO: 437346 - DNA, 75 bp, synthetic construct
  source 1..75: mol_type = other DNA
ggcaattgcggcaggcgtcccgattattcccgtgtgcgtctctacaacttcgaataagattaatcttaatcggct

SEQ ID NO: 437347 - DNA, 75 bp, synthetic construct
  source 1..75: mol_type = other DNA
ggttaaccggcaacttattgatcgacagaaacaatcgcactaaagctcacggcactattgcggaagtagtgaatc

SEQ ID NO: 437348 - DNA, 75 bp, synthetic construct
  source 1..75: mol_type = other DNA
tatccgttttgccgacgttcgccgcaaaatgcatgacgccttattggattacatggacaaaattcgcgatccgtt

SEQ ID NO: 437349 - DNA, 75 bp, synthetic construct
  source 1..75: mol_type = other DNA
cgctgaatacgcaaaatattgatagtctggcggcggaaggtattcgctttaattccgcctacacctgttcaccgg

SEQ ID NO: 437350 - DNA, 75 bp, synthetic construct
  source 1..75: mol_type = other DNA
ggcgacaacgatcgataaagaattgaatcaagggattggcgatacggataaacgacagggtcagttcactggtca

SEQ ID NO: 437351 - DNA, 75 bp, synthetic construct
  source 1..75: mol_type = other DNA
atcaggccgaaaactctactcgactacgccagcaaaatcagggcaatccgaagaaaattgccggacaaaccgctc

SEQ ID NO: 437352 - DNA, 75 bp, synthetic construct
  source 1..75: mol_type = other DNA
gacaaccatcttcacattgagcagggtaaaacaggggctaagctcgccattccgctgacgctaacgattgacgcg

SEQ ID NO: 437353 - DNA, 75 bp, synthetic construct
  source 1..75: mol_type = other DNA
ctgcgaaaaagtattttactggtaaagaaaggtaatcctaaaaatatccggagtattgacgacctgaccagacct

SEQ ID NO: 437354 - DNA, 75 bp, synthetic construct
  source 1..75: mol_type = other DNA
tacgggccacagaagaagtggaatgaagaagccagacaaaacgctgatattctgtttggtgcttccgagcagtct

SEQ ID NO: 437355 - DNA, 75 bp, synthetic construct
  source 1..75: mol_type = other DNA
ttgacgtggttgataatgaattgtctatgttcgccactaacgggaaacgcgttgtgatcgctacatggacacgta

SEQ ID NO: 437356 - DNA, 75 bp, synthetic construct
  source 1..75: mol_type = other DNA
ctgtattaatacctgtcccgcttatcgccaaataggtgggcatggctatggctcaatctacccgggtccaatcgg

SEQ ID NO: 437357 - DNA, 75 bp, synthetic construct
  source 1..75: mol_type = other DNA
caaggagtgctgtcggggccagactgacgggttataacacctggcttacaggtccaagagaagaaggacatgttg

SEQ ID NO: 437358 - DNA, 75 bp, synthetic construct
  source 1..75: mol_type = other DNA
cgccagattggtggacatggctatggctcaatctacccgggcccaatcggagcagttatttccccgttgcttggt

SEQ ID NO: 437359 - DNA, 75 bp, synthetic construct
  source 1..75: mol_type = other DNA
gaaaatcacggacctgctgaccgcggagaaagcgcgcgggatgaagggcgatgaaattaacgcgtggcgtaatgc

SEQ ID NO: 437360 - DNA, 75 bp, synthetic construct
  source 1..75: mol_type = other DNA
ccgttgcagaaacaggctcagtttgccttgtgacaaacgaaggtaacgcacgtatgtgcaccacgttacctaaaa

SEQ ID NO: 437361 - DNA, 75 bp, synthetic construct
  source 1..75: mol_type = other DNA
gataaaagaatggactgaagccagagatctaccatcacctgatggagaaagcttccgtagttggttcaagagata

SEQ ID NO: 437362 - DNA, 75 bp, synthetic construct
  source 1..75: mol_type = other DNA
tcatggtgaaccaggtattgaccgccgccccttctcttcccttgatcaaaccgtcgatgaaatgttcgacaccct

SEQ ID NO: 437363 - DNA, 75 bp, synthetic construct
  source 1..75: mol_type = other DNA
accacacgttgccagcaagcgggattgactatcgaacgtaatttaattggcgcgtactgcacctcactggatatg

SEQ ID NO: 437364 - DNA, 75 bp, synthetic construct
  source 1..75: mol_type = other DNA
tagcgctcgtgttttgaaaagtctggaggataatctctttactgctatcggtaagcggaacattgcggaactgaa

SEQ ID NO: 437365 - DNA, 75 bp, synthetic construct
  source 1..75: mol_type = other DNA
tggcgttcacgtgctgaacaaattcgtcggcatgttctggaaaatcttgatgcttatttgtatcaattgtccgaa

SEQ ID NO: 437366 - DNA, 75 bp, synthetic construct
  source 1..75: mol_type = other DNA
tgcaaccagttacatactgaaggtggcgaaagaaaaaaacgccaggaaggttgttaaatccaaatcaatggtgac

SEQ ID NO: 437367 - DNA, 75 bp, synthetic construct
  source 1..75: mol_type = other DNA
acagtggtgggcagattatctggatgcgaatagagagaaaggtatctgcccgtttgactatgcaaaaattaacaa

SEQ ID NO: 437368 - DNA, 75 bp, synthetic construct
  source 1..75: mol_type = other DNA
atgaagaaggagctggaaaagctgaccagtgcggatgagatactggcatacagggttggctgggcacaggaataa

SEQ ID NO: 437369 - DNA, 75 bp, synthetic construct
  source 1..75: mol_type = other DNA
taacgggcaaaaagccagccataacagagcgggaaaacaacggtgtccgctggcgctggctgggcgacgggctgc

SEQ ID NO: 437370 - DNA, 75 bp, synthetic construct
  source 1..75: mol_type = other DNA
tactgtgactcatgatgttgagtatgtgttattccctaatccattggtggcgacgggattacgtgcgggattaat

SEQ ID NO: 437371 - DNA, 75 bp, synthetic construct
  source 1..75: mol_type = other DNA
tggtgaaatctaaatcgatggtgaccgaagagattggtgtcaatcatgtgttgcaggatgccgggattcaggtga

SEQ ID NO: 437372 - DNA, 75 bp, synthetic construct
  source 1..75: mol_type = other DNA
tttttcggcctgcgcgggcgggtgatcccaacctccagcgcctgtacctccggcagccaggcgatcggttatgcg

SEQ ID NO: 437373 - DNA, 75 bp, synthetic construct
  source 1..75: mol_type = other DNA
atgacacgtcgcgtagtgattacaggaatgggcggcgtgactgcctttggtgaaaactggcaggacgtttctgca

SEQ ID NO: 437374 - DNA, 75 bp, synthetic construct
  source 1..75: mol_type = other DNA
aatcgctgaaaatcgccgggttaagcgcacaagatatcggctatatttcggcgcatggtacggcgaccgatcgtg

SEQ ID NO: 437375 - DNA, 75 bp, synthetic construct
  source 1..75: mol_type = other DNA
gagtgtggtggaggttgaggatacagaagaaaaccgcaaagctgatatctccgggcgctggaagtttgacgggga

SEQ ID NO: 437376 - DNA, 75 bp, synthetic construct
  source 1..75: mol_type = other DNA
agaaaaataatattactaatatattaaaacttgcaaaaccgttggtatcatcgccttttatcataaggaatattg

SEQ ID NO: 437377 - DNA, 75 bp, synthetic construct
  source 1..75: mol_type = other DNA
gcgcacgatgaaaaaagagattgaagcgctggatgatgcggaagctatactggcgtataaggtcggcatggctga

SEQ ID NO: 437378 - DNA, 75 bp, synthetic construct
  source 1..75: mol_type = other DNA
agaactggagcacgccaaagcgcgcggcgcgaccatttacggtgaaatcgtcggctttgcgactaactgcgacgc

SEQ ID NO: 437379 - DNA, 75 bp, synthetic construct
  source 1..75: mol_type = other DNA
atgtgaatcaagaacacggcagagggaatatgaaaaataacacacaagcctttattaaggcaattgacaggatga

SEQ ID NO: 437380 - DNA, 75 bp, synthetic construct
  source 1..75: mol_type = other DNA
gcacgaagtctgttttatgctgttacagttatcgttatattccttactggatggggaattggtattattttcttt

SEQ ID NO: 437381 - DNA, 75 bp, synthetic construct
  source 1..75: mol_type = other DNA
gctccaaatactggcggctacgttatcgctttggcggtaaagagaagatgctggcattggggaaataccccgaag

SEQ ID NO: 437382 - DNA, 75 bp, synthetic construct
  source 1..75: mol_type = other DNA
actgcgtttttcccgctggtcagaagtggattttgaaacggccatgtggacgattcctggtgagcgtgaaccctt

SEQ ID NO: 437383 - DNA, 75 bp, synthetic construct
  source 1..75: mol_type = other DNA
gctcaaaatactggcggctacgttatcgctttggtggtaaagagaagatgctggcgctgggaaaataccccgaag

SEQ ID NO: 437384 - DNA, 75 bp, synthetic construct
  source 1..75: mol_type = other DNA
acccgactggcggttgaactgactttgttggttttcatccgctcaagcgagcagcgctttgctcgctggtctgaa

SEQ ID NO: 437385 - DNA, 75 bp, synthetic construct
  source 1..75: mol_type = other DNA
ggttcgaagatgcgcactccacatcttgttcctttgtcgcgacaagctctcgctatcttggaaaagatcaaaagc

SEQ ID NO: 437386 - DNA, 75 bp, synthetic construct
  source 1..75: mol_type = other DNA
gcattcccgaattacttcatcgaattgatcactactccggtaggccgttaacccggttagctgttgaactcacct

SEQ ID NO: 437387 - DNA, 75 bp, synthetic construct
  source 1..75: mol_type = other DNA
atggctctgagtgatgtgaaggttcgttcggctaagcctgaagcaaaagcctataaacttactgatggtgacggt

SEQ ID NO: 437388 - DNA, 75 bp, synthetic construct
  source 1..75: mol_type = other DNA
ctgaagaaaaacagcgagtggccgccctagaaaaaagattagaggaattggctttagaactcgaaagcctaaaac

SEQ ID NO: 437389 - DNA, 75 bp, synthetic construct
  source 1..75: mol_type = other DNA
cccgctgggtaccaggctggatgcagccacgggatacgaaaaaatcgggttcgacaacgacgcccgataccgatg

SEQ ID NO: 437390 - DNA, 75 bp, synthetic construct
  source 1..75: mol_type = other DNA
tcatggtcgctggcacgggagggggcagtcagaaactacggtgacgaccgcgaacattatctgctgttaccagag

SEQ ID NO: 437391 - DNA, 75 bp, synthetic construct
  source 1..75: mol_type = other DNA
gttcggcaaagcctgaagcaaaagcctacaaactaactgacggtgaaggcatggttttgctggttcaccctaacg

SEQ ID NO: 437392 - DNA, 75 bp, synthetic construct
  source 1..75: mol_type = other DNA
ataacattgctaatatgttaaaacttgcaaagccttttgttaattccccatttattataagaaatatttttgtaa

SEQ ID NO: 437393 - DNA, 75 bp, synthetic construct
  source 1..75: mol_type = other DNA
atgaaatagtaaatgattactttcataagccacttaacgaagttgaaggactgacagaaatcgccgttaacagac

SEQ ID NO: 437394 - DNA, 75 bp, synthetic construct
  source 1..75: mol_type = other DNA
ccgggatgaggcccgtaagctgttagctaacggcgtcgaccctagtgagaataagaaagctgttaaggtagaaca

SEQ ID NO: 437395 - DNA, 75 bp, synthetic construct
  source 1..75: mol_type = other DNA
acactaaagttgaggtttgcggtcacggcttccgcacaatggcctgtagttcgttaattgagtcagggctatggt

SEQ ID NO: 437396 - DNA, 75 bp, synthetic construct
  source 1..75: mol_type = other DNA
gttctgcgaaacctgaagcaaaggaatactcgcttgtagacggcgacggcatgtccttacttgtaaagccaacgg

SEQ ID NO: 437397 - DNA, 75 bp, synthetic construct
  source 1..75: mol_type = other DNA
tttcagaacaatggcctgtagttcattgatagaatcgggattgtggtcgagggatgcggttgaacggcagatgag

SEQ ID NO: 437398 - DNA, 75 bp, synthetic construct
  source 1..75: mol_type = other DNA
tcgttggcgatcacgatccgcgtaagccgatgagtgagaacacggtaaacaaggcactgagagtgatgggctata

SEQ ID NO: 437399 - DNA, 75 bp, synthetic construct
  source 1..75: mol_type = other DNA
atgagtggaaaccgtgagctgatctttgtgggcgatcacgatccgcgtaaacctatgagtgaaaacacggtgaac

SEQ ID NO: 437400 - DNA, 75 bp, synthetic construct
  source 1..75: mol_type = other DNA
acgacacacaaacggaagtatgtgggcatggttttagaacaatggcgcgtggtgctttgggggagtcagggcttt

SEQ ID NO: 437401 - DNA, 75 bp, synthetic construct
  source 1..75: mol_type = other DNA
gccgtccaaagtggcttaattgattacaacccagcccaagagatggctggcgcagttgcttccagtaaccgtgcc

SEQ ID NO: 437402 - DNA, 75 bp, synthetic construct
  source 1..75: mol_type = other DNA
ttgtgggcgatcacgatccgcgtaagccgatgagtgagaatacggttaacaaggctctgcgagtgatgggctacg

SEQ ID NO: 437403 - DNA, 75 bp, synthetic construct
  source 1..75: mol_type = other DNA
gaagtggtagccagagagtggcacgccagcaatcagaagtggtctgcatcgcatagcgctcgtgtattgaaaagc

SEQ ID NO: 437404 - DNA, 75 bp, synthetic construct
  source 1..75: mol_type = other DNA
cagctatacgggtagacctttgacccgccttgccgttgagctaaccctccttgtatttattcgttcaagtgaact

SEQ ID NO: 437405 - DNA, 75 bp, synthetic construct
  source 1..75: mol_type = other DNA
ggttctcagagcttttagagcgcattgaaagctttaaaggtaggaaacttactaaattagctgtgaagctgacat

SEQ ID NO: 437406 - DNA, 75 bp, synthetic construct
  source 1..75: mol_type = other DNA
ggttctaaaatgcgcacacctcatttggtgccattgtctcaccagtctctagcaatcctcaaacaagttcacaag

SEQ ID NO: 437407 - DNA, 75 bp, synthetic construct
  source 1..75: mol_type = other DNA
agtcatccatgcatggcaaacgctgaaacacgatgcggtgctcatcgaggcgatggaaagtcgctcgttacgtta

SEQ ID NO: 437408 - DNA, 75 bp, synthetic construct
  source 1..75: mol_type = other DNA
tttcagcgacaactatagatgccataaacgttattggtcgatggctggcgcaggatgatttctctggtgaggtgc

SEQ ID NO: 437409 - DNA, 75 bp, synthetic construct
  source 1..75: mol_type = other DNA
ggacaaggataataaccggagataattattcatcacagtatcaggatttgtttgaacagaggatcaatgagctta

SEQ ID NO: 437410 - DNA, 75 bp, synthetic construct
  source 1..75: mol_type = other DNA
actctgatataaactttagtgtttatcgttctggcggacttaatatatggtatgaaaatccgggcctgttttttc

SEQ ID NO: 437411 - DNA, 75 bp, synthetic construct
  source 1..75: mol_type = other DNA
tttacatggcctcttgaaacggtcaggtatgacagttcgatactcgacgtgcataccttgaataagactcaagaa

SEQ ID NO: 437412 - DNA, 75 bp, synthetic construct
  source 1..75: mol_type = other DNA
cctgaaaataaagtaacctgtaatgactctgatataaactttagtgtttatcgttctggcggacttaatatatgg

SEQ ID NO: 437413 - DNA, 75 bp, synthetic construct
  source 1..75: mol_type = other DNA
cgaggcggctgacagggtgtacgacatccggaatcgggcgattgaagctgttgtgaccggtgggagagcggaaca

SEQ ID NO: 437414 - DNA, 75 bp, synthetic construct
  source 1..75: mol_type = other DNA
acgtgcaaccggcgcgctggatcaggcgcgtgcgctggcaattggttcgaatggttatatctggcgtacagccga

SEQ ID NO: 437415 - DNA, 75 bp, synthetic construct
  source 1..75: mol_type = other DNA
ttgtgaccggtgggagagcggaacattttgctaaagaaatagccgcatcgggtgatatagcaaagtccagagctg

SEQ ID NO: 437416 - DNA, 75 bp, synthetic construct
  source 1..75: mol_type = other DNA
tgtgcgctgggatagcccgccaacgcttgacggcatgaccggacacgccggatgcctgcctaactgcaagtgttg

SEQ ID NO: 437417 - DNA, 75 bp, synthetic construct
  source 1..75: mol_type = other DNA
acgcaccaccgatcgcgaactgttatctcacggtttgttgccgggtgtggtgcaagtgccacataacgggcagcc

SEQ ID NO: 437418 - DNA, 75 bp, synthetic construct
  source 1..75: mol_type = other DNA
tgtataccgctgtgcaagatggcggtcgtcacggttttcgccagtcaggtatcagccactgcggcgcactggata

SEQ ID NO: 437419 - DNA, 75 bp, synthetic construct
  source 1..75: mol_type = other DNA
tcaataacgcgttgcaacgttatcactttgaactcgcaaaccggggcgtaactaaggatgaaagccttcgtaact

SEQ ID NO: 437420 - DNA, 75 bp, synthetic construct
  source 1..75: mol_type = other DNA
tggacgacgacgttcgcgcgtatctggaaaataacgacgctctggcaccatcgcccatcgaacgactgcaacgaa

SEQ ID NO: 437421 - DNA, 75 bp, synthetic construct
  source 1..75: mol_type = other DNA
tatcagaccgaccatgacgaagccggacgcgcaacctcctgtgggccgcgcacttctcgtctgatggtgaaagta

SEQ ID NO: 437422 - DNA, 75 bp, synthetic construct
  source 1..75: mol_type = other DNA
cccaaagggttttgcacaggcagagcccgcatgggttgtcacggtagacggtgttgattacccactctggcaaac

SEQ ID NO: 437423 - DNA, 75 bp, synthetic construct
  source 1..75: mol_type = other DNA
cgccattccagtgttgaccagtgcaacagtgattaaactgctgcatcagcgtgacgaaaacggcgaagaccgcgt

SEQ ID NO: 437424 - DNA, 75 bp, synthetic construct
  source 1..75: mol_type = other DNA
gcggtggcgcaagagcagcaacatggtcgtcgggtgtttatggatttcaatcgcaatcctgaagcggtgcctggt

SEQ ID NO: 437425 - DNA, 75 bp, synthetic construct
  source 1..75: mol_type = other DNA
atagcacagctggtagctcaggcactggcttctataagagagatcattactcaggcgcacgataacgggaccggg

SEQ ID NO: 437426 - DNA, 75 bp, synthetic construct
  source 1..75: mol_type = other DNA
taccctggatatgctcaggagcggtgaaagcagcaagtgttcgatttttgccaagcttgcccggttgatggtaga

SEQ ID NO: 437427 - DNA, 75 bp, synthetic construct
  source 1..75: mol_type = other DNA
atacgctgttggtggttaataacggcgttaaattcagcgccacgcaagaagcttatttctttgacgcattagcca

SEQ ID NO: 437428 - DNA, 75 bp, synthetic construct
  source 1..75: mol_type = other DNA
gccgtcgatgtatttaaccacccgttaactggtgcttacctcaatagcttcaccctggatatgctcaggagcggc

SEQ ID NO: 437429 - DNA, 75 bp, synthetic construct
  source 1..75: mol_type = other DNA
gggaagttgctggcacacacggcgttacccgacctggcggtgcggcgctgaatgccggacaggtatttgccgtgc

SEQ ID NO: 437430 - DNA, 75 bp, synthetic construct
  source 1..75: mol_type = other DNA
gaaaaaactggcctggttttcttaatgggacaatttaccagccacaggatgaatgatattgcaaaggttaatcac

SEQ ID NO: 437431 - DNA, 75 bp, synthetic construct
  source 1..75: mol_type = other DNA
aacagtaagatacgccgaacgaaaaccgaactatggttcaaagaaagcttactcaatcagcatcacatcctccta

SEQ ID NO: 437432 - DNA, 75 bp, synthetic construct
  source 1..75: mol_type = other DNA
ggcgatgttgctaagtctagggccgatctgattgcccgaacggaactgggaagagcaacgggcgcgctggatatg

SEQ ID NO: 437433 - DNA, 75 bp, synthetic construct
  source 1..75: mol_type = other DNA
ccagcgcagggcaaccacactggcgcttaggtagcatggggatggcacaggcgcggcaggttatcggtcagcttg

SEQ ID NO: 437434 - DNA, 75 bp, synthetic construct
  source 1..75: mol_type = other DNA
aaaaagatttttttgccagcgaacagcaggcggtcgctgtggctgatcgttatccgcaggatgtctttgccgagc

SEQ ID NO: 437435 - DNA, 75 bp, synthetic construct
  source 1..75: mol_type = other DNA
tcccgatggtttatgcagtgacggcaaccacggaatgcatttttctggcagccggttacgaaactacatggattg

SEQ ID NO: 437436 - DNA, 75 bp, synthetic construct
  source 1..75: mol_type = other DNA
taatcagcacatgaatggcggcattgaagtcgatatctggggacaaacatctctgcccggttgttttgcggtggg

SEQ ID NO: 437437 - DNA, 75 bp, synthetic construct
  source 1..75: mol_type = other DNA
atttcgccagcagactggcatgaccatcaatcaatatctgcggcaggtcagagtgtgtcatgcgcaatatcttct

SEQ ID NO: 437438 - DNA, 75 bp, synthetic construct
  source 1..75: mol_type = other DNA
aattcagcatgtgggttacagacaaggacgcctggtacttcgccaactacgatccacgcatgaagcgtgaaggcc

SEQ ID NO: 437439 - DNA, 75 bp, synthetic construct
  source 1..75: mol_type = other DNA
aactacgacccgcgcatgaaacgcgaaggtattcaccacgtcgtcgttgagcgggatccgcagtacatatccgat

SEQ ID NO: 437440 - DNA, 75 bp, synthetic construct
  source 1..75: mol_type = other DNA
ccgcctgccatcgtcaatgaaatggtgatgaccggcagacgaatgggcgcagaagaggcgctgcgttggggggta

SEQ ID NO: 437441 - DNA, 75 bp, synthetic construct
  source 1..75: mol_type = other DNA
ttttgatttttgtttttattgtgtcgtacgttaagcaaattaagtttattacattaagagtgagtaaggctaata

SEQ ID NO: 437442 - DNA, 75 bp, synthetic construct
  source 1..75: mol_type = other DNA
ctcggcgttgaggaagtggtcgccaaagttttcgatgtcaatgagcctctgagtcaactcaatcaggcaaaactc

SEQ ID NO: 437443 - DNA, 75 bp, synthetic construct
  source 1..75: mol_type = other DNA
tttccttaatgatgggggagtgcgtaatacatttaatttttcgcaggctggtcaagagcgggggccacatgagta

SEQ ID NO: 437444 - DNA, 75 bp, synthetic construct
  source 1..75: mol_type = other DNA
atcatgtttgttgcaacatttcttctgatgtggatattcacccttccaggtgatttctatagaaaaaaaaccaga

SEQ ID NO: 437445 - DNA, 75 bp, synthetic construct
  source 1..75: mol_type = other DNA
gtgccgcaggtgctgccaccggcgaggtggtggggatgatagccacagagatgtgcggaatatcccctggtactg

SEQ ID NO: 437446 - DNA, 75 bp, synthetic construct
  source 1..75: mol_type = other DNA
cgtcttataatatatttaacaatctctttcccggtgctttgtttatttatttgtttgagcgggcaaccaatgtga

SEQ ID NO: 437447 - DNA, 75 bp, synthetic construct
  source 1..75: mol_type = other DNA
aaaagcaaatggaactactcgccaagaagctgcctgaaatcaagctggagcctggcgtacaacggatcacctata

SEQ ID NO: 437448 - DNA, 75 bp, synthetic construct
  source 1..75: mol_type = other DNA
tcatgatcaccagtgacatcagcactccggatggcacggcactgttgcaaatagtcggtggtgataaacttatca

SEQ ID NO: 437449 - DNA, 75 bp, synthetic construct
  source 1..75: mol_type = other DNA
gagaagaagaaacaggctatagagcgcttctggaccaagcagaatttcaatgagctgcccagagcgccaaaatct

SEQ ID NO: 437450 - DNA, 75 bp, synthetic construct
  source 1..75: mol_type = other DNA
ccagattgcttctaaatggctcaccgaacatgagcttgttaagagcaactctcacctgtggcgtcctgtttgctg

SEQ ID NO: 437451 - DNA, 75 bp, synthetic construct
  source 1..75: mol_type = other DNA
caagaagctgcctgaaattaagaaggagcctggagttcagcggatcacctatatcgctacaaagttcgacaaaga

SEQ ID NO: 437452 - DNA, 75 bp, synthetic construct
  source 1..75: mol_type = other DNA
gaagctgcctgaaatcaagctggagcctggcgtacaacggatcacctatatcgccacagagttcgacaaagggca

SEQ ID NO: 437453 - DNA, 75 bp, synthetic construct
  source 1..75: mol_type = other DNA
cattgatgatattaaccttgccgggtacaggctgcaccagttgcagggggacagatccgatacatggtctgtcac

SEQ ID NO: 437454 - DNA, 75 bp, synthetic construct
  source 1..75: mol_type = other DNA
ccgatttaaccgttgaacagttaaaaaatcagggcttccactatgttctgattgccaccggcactgataaaaata

SEQ ID NO: 437455 - DNA, 75 bp, synthetic construct
  source 1..75: mol_type = other DNA
gattaaaaagctgcgtgaaattatcgccacaggcggtaaagcgtttgaggcgcttatcaagaatatggaaatggt

SEQ ID NO: 437456 - DNA, 75 bp, synthetic construct
  source 1..75: mol_type = other DNA
agcagataagcggtgccgttggtatcccgctggtgcgccttttcgggcagtccccgaagggattttctaccggcg

SEQ ID NO: 437457 - DNA, 75 bp, synthetic construct
  source 1..75: mol_type = other DNA
gactgatttgcgcgaaaattctgacgtaaccggcatcggcgaacctgatgacgaaccgcaggaaccgtcaggcgg

SEQ ID NO: 437458 - DNA, 75 bp, synthetic construct
  source 1..75: mol_type = other DNA
gtctgatgacactgaaagccgctatgactgatttgcgcgaaaattctgacgtaaccggcatcggggcatccatta

SEQ ID NO: 437459 - DNA, 75 bp, synthetic construct
  source 1..75: mol_type = other DNA
cgggtacatcagccgtaacagggtgatgctggagtttgcgtatcgttcatcgttcctcgttggtgccggtgtgga

SEQ ID NO: 437460 - DNA, 75 bp, synthetic construct
  source 1..75: mol_type = other DNA
tctgcggagatcaaatacagcaaggcaggtcattcctatcatctcgttaatccgggccagctggataaaaagacc

SEQ ID NO: 437461 - DNA, 75 bp, synthetic construct
  source 1..75: mol_type = other DNA
tgagtccacagggaaggtcgtactcgataaggataaaaaaacagctgtgtcattatcgctacgcatgcggattct

SEQ ID NO: 437462 - DNA, 75 bp, synthetic construct
  source 1..75: mol_type = other DNA
agtcgagcgtatctacgagcgcattcaggcgttcgataccgcaaccgtcggcactacacagctgattcacaaggc

SEQ ID NO: 437463 - DNA, 75 bp, synthetic construct
  source 1..75: mol_type = other DNA
ggagatagcgcgtcagtgcggcgcgatagtaactggttcctacgatggttcggaagcgagcgccgagcaggttaa

SEQ ID NO: 437464 - DNA, 75 bp, synthetic construct
  source 1..75: mol_type = other DNA
cgaaaccttctgggacgatatcgcgatctgggacggcctcaacgataccctgaagtggtcaaggctttatggcgg

SEQ ID NO: 437465 - DNA, 75 bp, synthetic construct
  source 1..75: mol_type = other DNA
ggattttctaccggtgatgcagaccttgccaactattacgatcgcatcagttcgttgcaggagaggcgtttacgt

SEQ ID NO: 437466 - DNA, 75 bp, synthetic construct
  source 1..75: mol_type = other DNA
agtgagcgctgctcactcgcttatgggcagccgtcatgactttgttgaacgtaacaactttattgttctggaata

SEQ ID NO: 437467 - DNA, 75 bp, synthetic construct
  source 1..75: mol_type = other DNA
gagtcccaggccagaagctatctgcaaagtcaaattacctctacgacacaatcttatattgaggatacactctcc

SEQ ID NO: 437468 - DNA, 75 bp, synthetic construct
  source 1..75: mol_type = other DNA
tcattaactctgccacgcaagggtttgaaaacctgacacccgaggcgctggagtcccaggccagaagctatctgc

SEQ ID NO: 437469 - DNA, 75 bp, synthetic construct
  source 1..75: mol_type = other DNA
ctgtttatttcagccaattttctgcgcaacgaaaagaagatcgtacgatcgggaatattggccttggggtaaggt

SEQ ID NO: 437470 - DNA, 75 bp, synthetic construct
  source 1..75: mol_type = other DNA
gatgcgctgccggaagataacctcacgccgcagctttacgacgcgcaggacaaacgagtgacgttaaccaacaag

SEQ ID NO: 437471 - DNA, 75 bp, synthetic construct
  source 1..75: mol_type = other DNA
cactggaatctggtgctgcctgcctggcagtacagctctgataaagccgaccaggaaaaactcaatacctggcgg

SEQ ID NO: 437472 - DNA, 75 bp, synthetic construct
  source 1..75: mol_type = other DNA
cccacccttttcaacgtcatttattgctgataatatgcgttccgacattttattcctcgcaacagaatcaagtgt

SEQ ID NO: 437473 - DNA, 75 bp, synthetic construct
  source 1..75: mol_type = other DNA
gatggtgttctgggatcgcttaaaccgggcaaacgcgccagcgtcgttgcgctggatagcgggctgcatgtgcaa

SEQ ID NO: 437474 - DNA, 75 bp, synthetic construct
  source 1..75: mol_type = other DNA
tgggatgcgctgaatgacgtgctgaaatggtcgcgcctctatggcggtgcggttggcttcatcatgattgagggg

SEQ ID NO: 437475 - DNA, 75 bp, synthetic construct
  source 1..75: mol_type = other DNA
tcggacgggatacgtccggcagcgtgatccagtcatcgtcacaggtgcgtatccgctccggctcccgtcagttcg

SEQ ID NO: 437476 - DNA, 75 bp, synthetic construct
  source 1..75: mol_type = other DNA
ttgcgctgccgggcattgtcacaggcctggcgttattaaccgcgtttaaaactatcaatctggagccggggtttt

SEQ ID NO: 437477 - DNA, 75 bp, synthetic construct
  source 1..75: mol_type = other DNA
tggttcagcatagcagcacagcgtagcgatattcttgatgccgtgacactgtcacttaaagtggcgacgctggcg

SEQ ID NO: 437478 - DNA, 75 bp, synthetic construct
  source 1..75: mol_type = other DNA
cagcttgcctatatgcagaaaattaagcggaactataacccttctctccagtttatggggacgtatgtgacccag

SEQ ID NO: 437479 - DNA, 75 bp, synthetic construct
  source 1..75: mol_type = other DNA
cggatttgatatcagtattccattttctaccaaaataattattgggctggaatcagatggggtgatcacctggtt

SEQ ID NO: 437480 - DNA, 75 bp, synthetic construct
  source 1..75: mol_type = other DNA
ttaaaaatgaaataaatatgccaattgtcattgttcatggcccgaatggtactgaaaaagcagtagaactaactc

SEQ ID NO: 437481 - DNA, 75 bp, synthetic construct
  source 1..75: mol_type = other DNA
gaacttacctcattgggcgcatatattgctcttaatcttgatggtagtgttcaggagcgaactttttcaggctca

SEQ ID NO: 437482 - DNA, 75 bp, synthetic construct
  source 1..75: mol_type = other DNA
catgttgccgaaatttaacaaggaactgacgcgtaaactctttaaattacaagaaatgttgccatttcttaatct

SEQ ID NO: 437483 - DNA, 75 bp, synthetic construct
  source 1..75: mol_type = other DNA
gaaaccaccaaaggcggcagcaaactagcgattttactgggaccgggacgaccgaaaagtcggttaccgggatga

SEQ ID NO: 437484 - DNA, 75 bp, synthetic construct
  source 1..75: mol_type = other DNA
gcatatgtcgcccgaacgaatgcttcagcggatggattcggaaaaagttgtcgccttcaccacggcgctgatgac

SEQ ID NO: 437485 - DNA, 75 bp, synthetic construct
  source 1..75: mol_type = other DNA
tgcagttcgtcaggcaaagagaaaggccaatacgacatacatgaaggcgtatcgaaaagcatggaaagaacaccg

SEQ ID NO: 437486 - DNA, 75 bp, synthetic construct
  source 1..75: mol_type = other DNA
tccatcgacgttattcttcggatcatcggtgagcaggacgaaattgaccaggttgaaaccgtcatcctggagcac

SEQ ID NO: 437487 - DNA, 75 bp, synthetic construct
  source 1..75: mol_type = other DNA
gcaaagaaggtgaagtggccgaagccgctccggaatctgcaaccggcgacaaggaaatcgcagacgaagccgaga

SEQ ID NO: 437488 - DNA, 75 bp, synthetic construct
  source 1..75: mol_type = other DNA
agcgtgctggcctctctggggctgaacgttcccgctgcgatggcgggtgcgtccatgccgtccatcggcctggag

SEQ ID NO: 437489 - DNA, 75 bp, synthetic construct
  source 1..75: mol_type = other DNA
gccagttgcttcgttcttacgcttgaactcttcgaatttcttcgcgtctgcacattctacccagcggcggtggca

SEQ ID NO: 437490 - DNA, 75 bp, synthetic construct
  source 1..75: mol_type = other DNA
gccaatatgacatacatgaaggcgtatcaaaaagcatggaaagaacaccgcgatcgataccaacaagacatggaa

SEQ ID NO: 437491 - DNA, 75 bp, synthetic construct
  source 1..75: mol_type = other DNA
tgttttttctggcggcaacgctgtgcagtcatgcagcgctacaacccgatcgtactcgcgtagtgtttaatggta

SEQ ID NO: 437492 - DNA, 75 bp, synthetic construct
  source 1..75: mol_type = other DNA
ctatcagttgctcaaggcatatgatgtcaatatctccggtctggtaagcaccaccatgcagaatgaagcccgtcg

SEQ ID NO: 437493 - DNA, 75 bp, synthetic construct
  source 1..75: mol_type = other DNA
atatcgcaataactcctgacacctcaatattacatatggcaagtgcctataatacccctgttgttgcaatttatg

SEQ ID NO: 437494 - DNA, 75 bp, synthetic construct
  source 1..75: mol_type = other DNA
tctccatacggtaaagtccgctcaaatctttctctcggtcaggatggctcgctggacggtagttcaatcgactat

SEQ ID NO: 437495 - DNA, 75 bp, synthetic construct
  source 1..75: mol_type = other DNA
atgacttaccttatgagatagagcgtgaacctttaagtaacagtttcacacctggtgaggcgaatacatatcagc

SEQ ID NO: 437496 - DNA, 75 bp, synthetic construct
  source 1..75: mol_type = other DNA
ttatcctcttaaaaggaatgcgagctaagaaggttttcccaagaggtgatgtgccactcaaagtttcatttttga

SEQ ID NO: 437497 - DNA, 75 bp, synthetic construct
  source 1..75: mol_type = other DNA
taacgtataatccagttttaagtgtgttggatgatctaattggaaagataaaaaaagctaaatataatttagaaa

SEQ ID NO: 437498 - DNA, 75 bp, synthetic construct
  source 1..75: mol_type = other DNA
tcaatcgcatgtggactgaaaaagaatatctatggtcatagcttcggcgctccccatgacgcagccgatttccga

SEQ ID NO: 437499 - DNA, 75 bp, synthetic construct
  source 1..75: mol_type = other DNA
tgcttatatcgaaaaagaggggaacggcctgatgcaggctctggaggcagaagggtatctgactggtcttgagaa

SEQ ID NO: 437500 - DNA, 75 bp, synthetic construct
  source 1..75: mol_type = other DNA
ggatattttcgactgggcggggcaactgcgcgaagtcgatatttatcagggcgatacgccgttctgccactttgc

SEQ ID NO: 437501 - DNA, 75 bp, synthetic construct
  source 1..75: mol_type = other DNA
gctcaggcggatggcgtcgatggcgtggtgatggatctcgatgttaccgatagctttggtgatgacactgaccgt

SEQ ID NO: 437502 - DNA, 75 bp, synthetic construct
  source 1..75: mol_type = other DNA
cctggcagtacagctctgatcccgccgaacaggaaaaactcaatacctggcgcgtgcgtctggctctggaagatg

SEQ ID NO: 437503 - DNA, 75 bp, synthetic construct
  source 1..75: mol_type = other DNA
tgataatgtttctgatattgacgaagattggatagaggctttcttcagggagtgtgaggatattagtgacgaaca

SEQ ID NO: 437504 - DNA, 75 bp, synthetic construct
  source 1..75: mol_type = other DNA
agatcacgcagaaagcgtgcaaaaactgcggctggcgggatgtcggatcgtattcagtcaggtgggccgcgatct

SEQ ID NO: 437505 - DNA, 75 bp, synthetic construct
  source 1..75: mol_type = other DNA
gccagcatgccgaaaaagtgattcgtgattcgttgcaatcacgctcgccctttaagctggaatttcgcattgccg

SEQ ID NO: 437506 - DNA, 75 bp, synthetic construct
  source 1..75: mol_type = other DNA
gtatgcctttcgtgcggaacgcaaacacatttccgaaagcgaaacccgctttcggaacgccatggaatattccgc

SEQ ID NO: 437507 - DNA, 75 bp, synthetic construct
  source 1..75: mol_type = other DNA
taattaccctgcctcatccactgcttcacctcgtcagtttaggtttagtctcgtttatctttaccctcttctcac

SEQ ID NO: 437508 - DNA, 75 bp, synthetic construct
  source 1..75: mol_type = other DNA
atggttacgttttggggaaattatgaggggatctctcagggtttagtctcgtttatctttacccttttctcgctt

SEQ ID NO: 437509 - DNA, 75 bp, synthetic construct
  source 1..75: mol_type = other DNA
gtggcgttttatcgccatgccgggcgcatgtggccgggaattgcgctgagctgttcgctgggaaatatcgccgca

SEQ ID NO: 437510 - DNA, 75 bp, synthetic construct
  source 1..75: mol_type = other DNA
ccttcccgcataaactgattcgtctctgttttgccaagaaggaatcgacgctgctggcggcggctgaacgcctgc

SEQ ID NO: 437511 - DNA, 75 bp, synthetic construct
  source 1..75: mol_type = other DNA
tgcgctacaaccgccgcattttcgtgttgactggcaagaatttgctgagctactgagcgagcgcacccggctggt

SEQ ID NO: 437512 - DNA, 75 bp, synthetic construct
  source 1..75: mol_type = other DNA
atggctatcaaccagatgccgatagcgatatcaccgtaacggcaggggcgacggaagcgttatatgcagcgatta

SEQ ID NO: 437513 - DNA, 75 bp, synthetic construct
  source 1..75: mol_type = other DNA
gtgaagatttgaaggtgtggttaattgttgagcaccacgcttacaacaagttatgcggggtgaagggtgcgcata

SEQ ID NO: 437514 - DNA, 75 bp, synthetic construct
  source 1..75: mol_type = other DNA
atctgaaagcacagaaaaacgcacaggatcggatcatcaagaaaggtaaggaattacttaaagcctttctgagaa

SEQ ID NO: 437515 - DNA, 75 bp, synthetic construct
  source 1..75: mol_type = other DNA
gcgaagacctaaaagtctggttaattatcgatcatctggaatataacaggcactgtggagtcaaaggggtgcata

SEQ ID NO: 437516 - DNA, 75 bp, synthetic construct
  source 1..75: mol_type = other DNA
cacggtgtcgcttcgccgcggatcccggaagcgcgtaatttgtggctgatttcgcttaagctctggagttgcgaa

SEQ ID NO: 437517 - DNA, 75 bp, synthetic construct
  source 1..75: mol_type = other DNA
gtgaactgcatctcattgctccctacaaccaggccgacgccgtacgcggcctggaagcgttcagccatttatgga

SEQ ID NO: 437518 - DNA, 75 bp, synthetic construct
  source 1..75: mol_type = other DNA
ctggtcgatggtacgccggtggtagatataaaaccttacctcccctttgccgaatcgcttcccgatgccagcgcc

SEQ ID NO: 437519 - DNA, 75 bp, synthetic construct
  source 1..75: mol_type = other DNA
tccttttcgtctttcatcaaacgatggaaggcggctggcgtccgactgtgcgtccacctcgcctcggcggtaatg

SEQ ID NO: 437520 - DNA, 75 bp, synthetic construct
  source 1..75: mol_type = other DNA
ttgcacttacgcttttaatgccctcgaaaaaacacgccatcacaccaatgccattggcaaaaacggagcaacaga

SEQ ID NO: 437521 - DNA, 75 bp, synthetic construct
  source 1..75: mol_type = other DNA
ttttttgaagcggggggcggctcaatccagatcgtgctgttgcatcgccgtattgaggagatttttaaggttacg

SEQ ID NO: 437522 - DNA, 75 bp, synthetic construct
  source 1..75: mol_type = other DNA
ggcgttaccctatgcgtcggcccatcttgaaggagggccgaattacggggtcattaaacgattgttagccgatgc

SEQ ID NO: 437523 - DNA, 75 bp, synthetic construct
  source 1..75: mol_type = other DNA
tccgctatcgaacaagatgtcgttctccactgccgtagcggcggcagctacgacgtccattacagcattacgccg

SEQ ID NO: 437524 - DNA, 75 bp, synthetic construct
  source 1..75: mol_type = other DNA
ttgatgaacagtggcggatgattaaagagaatcagttgatgatgatcgcccacggtgtcgcttcgccacggatcc

SEQ ID NO: 437525 - DNA, 75 bp, synthetic construct
  source 1..75: mol_type = other DNA
taaaagatggcatccgccatattcgcgccctcgccaatcgtgtgctgaataaagagggcgaagtcgagcgcctgc

SEQ ID NO: 437526 - DNA, 75 bp, synthetic construct
  source 1..75: mol_type = other DNA
agctatgcgcaaagtgcaccagcggcagagatggcggtgagttttaccttagaggtcgaaaagcagcttttgaca

SEQ ID NO: 437527 - DNA, 75 bp, synthetic construct
  source 1..75: mol_type = other DNA
ctggagaagcgttatccgcagttaacgctgtttatccgcgaagtactggcgcaggacccgcgcccggcctatcgt

SEQ ID NO: 437528 - DNA, 75 bp, synthetic construct
  source 1..75: mol_type = other DNA
ctccggaccagcccggaagcgcaaatccgcattgccacatgggaggactgtcgcgcaacgccttaccgggatatt

SEQ ID NO: 437529 - DNA, 75 bp, synthetic construct
  source 1..75: mol_type = other DNA
ggacttttatcgccagaagcgcgatattctggtgaacgccttaagtgagagtcggctggagattttaccctgcga

SEQ ID NO: 437530 - DNA, 75 bp, synthetic construct
  source 1..75: mol_type = other DNA
atgagcagcaagcttcatggtcttgtctgggaagggtgcgccttcaccggcatgatcttatccagggtggcagtt

SEQ ID NO: 437531 - DNA, 75 bp, synthetic construct
  source 1..75: mol_type = other DNA
gttgacccctcaaattttgatggatcaaccgttgataaaaaacattcggttagggggacgatggttggccccgat

SEQ ID NO: 437532 - DNA, 75 bp, synthetic construct
  source 1..75: mol_type = other DNA
gcaatatctaccgtcttaatgtggaaaaactcgaagcagcagcagcggcggcgcgtgaggcatataaaccgaaaa

SEQ ID NO: 437533 - DNA, 75 bp, synthetic construct
  source 1..75: mol_type = other DNA
tctataaatcacaagaatacctggcaacgttgggcacaattgaataccgatcattgtttggcagttacagcctga

SEQ ID NO: 437534 - DNA, 75 bp, synthetic construct
  source 1..75: mol_type = other DNA
atgaaaagcctctcctataagcggatctataaatcacaagaatacctggcaacgttgggcacaattgaataccga

SEQ ID NO: 437535 - DNA, 75 bp, synthetic construct
  source 1..75: mol_type = other DNA
gttggcccgtcaaattttgatggatcaactgttgataaaaaactgccgattaggggggcgatgattgaccccgat

SEQ ID NO: 437536 - DNA, 75 bp, synthetic construct
  source 1..75: mol_type = other DNA
ttcggtgatgattctccgttctgccaggacggttctccgttccagagctctccgttctgccagggcgggcagggc

SEQ ID NO: 437537 - DNA, 75 bp, synthetic construct
  source 1..75: mol_type = other DNA
tgcgcgtgggggattacaccgtcgctatcggtaacccgtttggtctgggcgagacggtaacttccggtatcgtct

SEQ ID NO: 437538 - DNA, 75 bp, synthetic construct
  source 1..75: mol_type = other DNA
cgtaaggtcggtgggcgtaatgtaagcaatatctatcgacttaatgtggaaaaactcgaagcagctgcggcggcg

SEQ ID NO: 437539 - DNA, 75 bp, synthetic construct
  source 1..75: mol_type = other DNA
ggttgtgttcagtgtgaaaaaacgccagtggggaactcaggaagatttgacgtgtgcgcagtggatctggtggcg

SEQ ID NO: 437540 - DNA, 75 bp, synthetic construct
  source 1..75: mol_type = other DNA
agtggagaccattcgtcgtcagattggggcaaagagtgaatcaacggttaaagctgcgatagcggaactggaaaa

SEQ ID NO: 437541 - DNA, 75 bp, synthetic construct
  source 1..75: mol_type = other DNA
ctgacctcgcagatggtggaatacggccaggtgaaacgtggtgagctgggtattatgggcactgagctgaactcc

SEQ ID NO: 437542 - DNA, 75 bp, synthetic construct
  source 1..75: mol_type = other DNA
ggtttctgatggtgagttgtatcttcgggcttgtgagcaaagtgcacagtactgtgtaaaacatccgcctgtctg

SEQ ID NO: 437543 - DNA, 75 bp, synthetic construct
  source 1..75: mol_type = other DNA
atgacaaataaccctctgattccacaaagcaaacttccacaacttggcaccactattttcacccagatgagcgcg

SEQ ID NO: 437544 - DNA, 75 bp, synthetic construct
  source 1..75: mol_type = other DNA
agtcttttgacaataaatatgtggcagaaatcatttctcatttacatacaaaaaattttggcactgaactggctg

SEQ ID NO: 437545 - DNA, 75 bp, synthetic construct
  source 1..75: mol_type = other DNA
catagcgccaatcagatgctttttctgactggtgaactccgtcagataaaaggaataaccgagaacgcctaccag

SEQ ID NO: 437546 - DNA, 75 bp, synthetic construct
  source 1..75: mol_type = other DNA
gagcgggcagtggcggtttcttcatttggcaagacctatcatatgaccggtgaaccgccccgggaatcctggaga

SEQ ID NO: 437547 - DNA, 75 bp, synthetic construct
  source 1..75: mol_type = other DNA
ccgctgtcggtgttttgcgccgatcccttcccacataaactgattcgtctctgttttgccaagaaggaatcgacg

SEQ ID NO: 437548 - DNA, 75 bp, synthetic construct
  source 1..75: mol_type = other DNA
aggtacatactttttgctggtggattacagcgaggtttctaccctggatgatgttgagttttgccagtggctgac

SEQ ID NO: 437549 - DNA, 75 bp, synthetic construct
  source 1..75: mol_type = other DNA
atggtctgctttaacccgtcacaaccacatcacacctgttttcacttttatcttctgtcttcagaggtatcccac

SEQ ID NO: 437550 - DNA, 75 bp, synthetic construct
  source 1..75: mol_type = other DNA
gtgagaataataacagcattactgatgtcattttttattttacctgttcatgccggtgtggtcatctatggtacg

SEQ ID NO: 437551 - DNA, 75 bp, synthetic construct
  source 1..75: mol_type = other DNA
cggtggcacgccgccaggagcttgctgaatgggctgattctattacgccaaagcaggagtttcctgtggaacttg

SEQ ID NO: 437552 - DNA, 75 bp, synthetic construct
  source 1..75: mol_type = other DNA
atggcaaatcaattgtataaccagtgccgggtttattgcgcaccctggcgattagatgctttaaatttaaatgat

SEQ ID NO: 437553 - DNA, 75 bp, synthetic construct
  source 1..75: mol_type = other DNA
aacggaagggatcaccatgagccccgaacatcgtcaggcactggttgattcactgaataagatgacacttcccgc

SEQ ID NO: 437554 - DNA, 75 bp, synthetic construct
  source 1..75: mol_type = other DNA
tcttctgtcttcagaggtatcccactatgaaaatcatcacccgtggcgaagccatgcgtattcaccgtcagcatc

SEQ ID NO: 437555 - DNA, 75 bp, synthetic construct
  source 1..75: mol_type = other DNA
atgataaaggggagaaaagcgacgatcttctggtcgccctgccaccaatacagcgcctggaaccaaaagcaacat

SEQ ID NO: 437556 - DNA, 75 bp, synthetic construct
  source 1..75: mol_type = other DNA
gcagccagaagaacaatctctggtaggaaaagctactgactggctcactggtggtcaaagtgcagggcaaattgc

SEQ ID NO: 437557 - DNA, 75 bp, synthetic construct
  source 1..75: mol_type = other DNA
gcgcacaggagctggcgagtcatgccagagcctacggtgactggctggcaaatccgctccctgcgggaggtcgct

SEQ ID NO: 437558 - DNA, 75 bp, synthetic construct
  source 1..75: mol_type = other DNA
gtttgctgcgcgttgtcgtcagtatgacagctttggtttttacgcggcactaagccagttattgctggtgttagt

SEQ ID NO: 437559 - DNA, 75 bp, synthetic construct
  source 1..75: mol_type = other DNA
tttgcggcctgtttctgatgaccgacaaacaagcggcgctgccgtatgcatcggcctacaaacaggacgagcaag

SEQ ID NO: 437560 - DNA, 75 bp, synthetic construct
  source 1..75: mol_type = other DNA
gtgatcctgatggtgttgttcaatattccgggctgcgaaaatgcgtaccagcaaatggaagaattactctttgaa

SEQ ID NO: 437561 - DNA, 75 bp, synthetic construct
  source 1..75: mol_type = other DNA
gaagagtgtgaacgactggatgccagctgccgtgggtttctgcttttccttgagcagattcaggtgctcaacctt

SEQ ID NO: 437562 - DNA, 75 bp, synthetic construct
  source 1..75: mol_type = other DNA
gttgccgtgggttcctgcttttcctcgagcagattcaggtgctcaaccttgaaactcgtgaaatggtgatagagc

SEQ ID NO: 437563 - DNA, 75 bp, synthetic construct
  source 1..75: mol_type = other DNA
agggttctctggaggaggcgttattggagcaatagcgggtggcgctgcaggtggggcaattgatgcaatggcaaa

SEQ ID NO: 437564 - DNA, 75 bp, synthetic construct
  source 1..75: mol_type = other DNA
tggatctatagctaaagggacgatagaaaagttagctgcatctcgcagtggtcgttacgctattgaaaaggctgt

SEQ ID NO: 437565 - DNA, 75 bp, synthetic construct
  source 1..75: mol_type = other DNA
gatgctgcaaatcaggagggcgactttgcacaaaatgctgccattaacggtggtatcaatattggtgctcagggg

SEQ ID NO: 437566 - DNA, 75 bp, synthetic construct
  source 1..75: mol_type = other DNA
cctttgagctgacggcagggatgtgccggatgcactggttaaaccccatcatcatttactgggccaggcggcaaa

SEQ ID NO: 437567 - DNA, 75 bp, synthetic construct
  source 1..75: mol_type = other DNA
tcgcccatcgaacgactgcaacgaatgaatccgctgtctatctcgctgtataagatgcacggttacgatctcacc

SEQ ID NO: 437568 - DNA, 75 bp, synthetic construct
  source 1..75: mol_type = other DNA
gtatcgcccgctggacagcaactgggcgtttggtctggatgccaactacgttaaacagcgcgactggcgtagtgc

SEQ ID NO: 437569 - DNA, 75 bp, synthetic construct
  source 1..75: mol_type = other DNA
agcgtgaaaaccggacatctgaccgcgtactggacgccatctttcgcccaggacgtgttagtgaaagcgagcgtc

SEQ ID NO: 437570 - DNA, 75 bp, synthetic construct
  source 1..75: mol_type = other DNA
acgcagccattgcagtttgccatgaataatcagcacatgaatggcggcattgaagtcgatatctggggacaaaca

SEQ ID NO: 437571 - DNA, 75 bp, synthetic construct
  source 1..75: mol_type = other DNA
tgtggcggcatatggcgctgacgtctgccgccgtattgacacagttgacgcattatattgatgcaggcggcggca

SEQ ID NO: 437572 - DNA, 75 bp, synthetic construct
  source 1..75: mol_type = other DNA
atcttccgtaagggctatcagtggccgttccatgccacgcgggtaatggattttggctcaagcttgctggatatg

SEQ ID NO: 437573 - DNA, 75 bp, synthetic construct
  source 1..75: mol_type = other DNA
gcgcacaggagctggcaagccacgccagagcctacggcgactggctggcaaatccggttcccgtgggaggtcgct

SEQ ID NO: 437574 - DNA, 75 bp, synthetic construct
  source 1..75: mol_type = other DNA
aacgatgtctatgtgaataacctgcaagccaactacttccagcatctgggcaacggcttctacggtcaggtctac

SEQ ID NO: 437575 - DNA, 75 bp, synthetic construct
  source 1..75: mol_type = other DNA
catggcgagttttgatgagatggtgccggagttcatcgacaaaatggacgaagcactggcggaaattggttttgt

SEQ ID NO: 437576 - DNA, 75 bp, synthetic construct
  source 1..75: mol_type = other DNA
tggcgtggcaccggaagttaacgctaagtcgctcgcatggggaaagcaatatgaagatgatgcccgtgccctctt

SEQ ID NO: 437577 - DNA, 75 bp, synthetic construct
  source 1..75: mol_type = other DNA
atggcctatagtcgtgaacagttgatgacagcattaaggaacgctgatgcggcaggcgatacagaaggagcacgt

SEQ ID NO: 437578 - DNA, 75 bp, synthetic construct
  source 1..75: mol_type = other DNA
tggcagcacgaccagtaaaagcgattacgccccccgcccctgcggtacgagcatcatgggtacataaaacaggcg

SEQ ID NO: 437579 - DNA, 75 bp, synthetic construct
  source 1..75: mol_type = other DNA
tgagctttgaacaggcgatgcaaactcgtgtttttcaaccactcaaactcacccatacgtggattaatgtgccgc

SEQ ID NO: 437580 - DNA, 75 bp, synthetic construct
  source 1..75: mol_type = other DNA
tactgctcgccatctcttactccacacttgccgcctcccacagcgaacaacagatcaacgagattgtgcatcgca

SEQ ID NO: 437581 - DNA, 75 bp, synthetic construct
  source 1..75: mol_type = other DNA
taagatgcacggttacgatctcatcacgcagccattgcagtttgccatgaataatcagcacatgaatggcggcat

SEQ ID NO: 437582 - DNA, 75 bp, synthetic construct
  source 1..75: mol_type = other DNA
cgcgcatcatgggtacataaaacaggggcgaccggcggatttggtagctatgtcgcgtttattccagaaaaagag

SEQ ID NO: 437583 - DNA, 75 bp, synthetic construct
  source 1..75: mol_type = other DNA
gtatcagggcctgggctgggaaatgctggactggccggtaaatcctgacagcatcattaacggcagcgacaataa

SEQ ID NO: 437584 - DNA, 75 bp, synthetic construct
  source 1..75: mol_type = other DNA
aggtggccgctctctggtgcgaggtactacaacgagaacagatcggactgaatgacaacttttttgaagcggggg

SEQ ID NO: 437585 - DNA, 75 bp, synthetic construct
  source 1..75: mol_type = other DNA
cgcttgccagcgccactctctgcggcgcggcggcgttgtttattgctgcgcttatcagcacagtgcaattattta

SEQ ID NO: 437586 - DNA, 75 bp, synthetic construct
  source 1..75: mol_type = other DNA
cctgctgttttcattcggcgcgtttcatttaccctcacgcctgcgcccgttcctgttagcttccgccctcgcaac

SEQ ID NO: 437587 - DNA, 75 bp, synthetic construct
  source 1..75: mol_type = other DNA
tcaagcgacttgctgcgcttctatcaaaactggcagcctgcatgggctccaggaacacaacgtctgtatgccaac

SEQ ID NO: 437588 - DNA, 75 bp, synthetic construct
  source 1..75: mol_type = other DNA
accattgatacattaactggtgcaatggcagggggaggtactggaaagtcaaaacagccgcgtagcagaaaaaca

SEQ ID NO: 437589 - DNA, 75 bp, synthetic construct
  source 1..75: mol_type = other DNA
gcgtgatgctctcggacctcattcagggcctatcctaaaagctcttgagctacatcatcaacagggaacaggtta

SEQ ID NO: 437590 - DNA, 75 bp, synthetic construct
  source 1..75: mol_type = other DNA
gcgtttacgcgatgatagcgatggctacggcccccgcgggcgagattttatcgttcacgttgattttccggcaga

SEQ ID NO: 437591 - DNA, 75 bp, synthetic construct
  source 1..75: mol_type = other DNA
gttaccgttgaaaggtgccgagctggatcttttaatcgtgatgaaacggacgactgcccgtccgcgtccgccgat

SEQ ID NO: 437592 - DNA, 75 bp, synthetic construct
  source 1..75: mol_type = other DNA
ggctacaaaggccacgttttctgggatacagaagtatttttgttaccgtttcatctgtttagcgatccgacggtt

SEQ ID NO: 437593 - DNA, 75 bp, synthetic construct
  source 1..75: mol_type = other DNA
tgcggcaaaaagtggcctcggcgcaggcggaacatcatctggtggccgatatcgcctgggcggttattcaatact

SEQ ID NO: 437594 - DNA, 75 bp, synthetic construct
  source 1..75: mol_type = other DNA
tcgcgatgcactaggaaacgaagagttccagcgtttgtcgagggctggcattgtagcgtcgctaagcggaatagc

SEQ ID NO: 437595 - DNA, 75 bp, synthetic construct
  source 1..75: mol_type = other DNA
ttcaggaagcaactaaagcagtaagagcaggcggaagcaaagaagcattagcggcggcggaacgcagatttatgg

SEQ ID NO: 437596 - DNA, 75 bp, synthetic construct
  source 1..75: mol_type = other DNA
gatagagaaagcagttcaggaagccacgaaagcagtaagagctggcggaagtaaagaagcattagcggcggcgga

SEQ ID NO: 437597 - DNA, 75 bp, synthetic construct
  source 1..75: mol_type = other DNA
cccgccatccctttgtccttgcggcgctattttctggtgttggcgtcggcatcgctctgggcaatgaatatgtgc

SEQ ID NO: 437598 - DNA, 75 bp, synthetic construct
  source 1..75: mol_type = other DNA
atgccgtctggaccggctggcgattgccaatgagagcaggccagcgtttaacgcttaaacgcccgcagcacggga

SEQ ID NO: 437599 - DNA, 75 bp, synthetic construct
  source 1..75: mol_type = other DNA
cccgcgctggagatcacgctcggtcagttaacggttgagttcgaaactgatgggtggtttgccctgacgggtgcc

SEQ ID NO: 437600 - DNA, 75 bp, synthetic construct
  source 1..75: mol_type = other DNA
cgcccgccaactgagcgtaccgggaaatctcaatcttttaggctttgtgacgctcatttacggcattgggcaaat

SEQ ID NO: 437601 - DNA, 75 bp, synthetic construct
  source 1..75: mol_type = other DNA
tatcgggcaaattcttggcccggcgctgaccagtatgctcggcaacggaacgtcggccctcgccagtgccacgct

SEQ ID NO: 437602 - DNA, 75 bp, synthetic construct
  source 1..75: mol_type = other DNA
tctgtacggcctggcgggatttggttatatcatcgtcgcgacttacctgccgctcatggcgaaagatgcaggctc

SEQ ID NO: 437603 - DNA, 75 bp, synthetic construct
  source 1..75: mol_type = other DNA
ttctgacagggaaaaatgtttttcagagcgccacagagcgtattgaatgggtttttgatactttctctgatattt

SEQ ID NO: 437604 - DNA, 75 bp, synthetic construct
  source 1..75: mol_type = other DNA
agaacctgtgccatctacaatcccctgtatgacctgatgtaccgtgccggcgtgccgttacgcaacatgcgtgtc

SEQ ID NO: 437605 - DNA, 75 bp, synthetic construct
  source 1..75: mol_type = other DNA
gttccggcattttcttcctggtttgccggtaaccggtgtggagtggcagtgctgactggtgtccgggcggatgag

SEQ ID NO: 437606 - DNA, 75 bp, synthetic construct
  source 1..75: mol_type = other DNA
atgtgtgagcgggtgtcaggtgctgccagcggggcgctttatgccaatgaaagcggtgcctattttgccctgcgt

SEQ ID NO: 437607 - DNA, 75 bp, synthetic construct
  source 1..75: mol_type = other DNA
ttactgggtggcgttacctctgaccacagttaatggtgtgtctcagtttcagccggagtggatatgctgggaacg

SEQ ID NO: 437608 - DNA, 75 bp, synthetic construct
  source 1..75: mol_type = other DNA
ccattgtttttattggcgctgtagcagcattgtcactggctaatgcgcaatcagtactggctgctaatgaatccg

SEQ ID NO: 437609 - DNA, 75 bp, synthetic construct
  source 1..75: mol_type = other DNA
aagccatgttagggcagattgagcgcaatgagtccagcccgacggtcgcgacactctggaaaattgccaccggga

SEQ ID NO: 437610 - DNA, 75 bp, synthetic construct
  source 1..75: mol_type = other DNA
ccaccacacttaaacaactacgtcagcagcgcggctggagtctttcgcgactggcagaagcgacgggcgtttcta

SEQ ID NO: 437611 - DNA, 75 bp, synthetic construct
  source 1..75: mol_type = other DNA
atggaaaatctcgctcgctttttatccaccacacttaaacaactacgccagcagcgcggctggagtctttcgcga

SEQ ID NO: 437612 - DNA, 75 bp, synthetic construct
  source 1..75: mol_type = other DNA
aaattcttatcggagaaaatgttctgcgtgtagcaacaactcgtatggagtggatttttgaaacatttccgtttg

SEQ ID NO: 437613 - DNA, 75 bp, synthetic construct
  source 1..75: mol_type = other DNA
tcaatacggggcagagtgtacttgatgcagcgagagaacgtatcgaatggatcttcgatacattttcatctgtct

SEQ ID NO: 437614 - DNA, 75 bp, synthetic construct
  source 1..75: mol_type = other DNA
gttcacagtcaggcgttccgtactgaaaaagcctgtcgggatgccttcaccgcgctgaaaaaagaaaacgtgggg

SEQ ID NO: 437615 - DNA, 75 bp, synthetic construct
  source 1..75: mol_type = other DNA
gggatgtcccgtcctggcgacgtatcagcagggcactcataaagaatgatttctggtgccggacactctccttca

SEQ ID NO: 437616 - DNA, 75 bp, synthetic construct
  source 1..75: mol_type = other DNA
cggatggcgatgtcgccgccagcgtgctgacctgctggcaggataatccttacgatgtgatgtacaccatcggcg

SEQ ID NO: 437617 - DNA, 75 bp, synthetic construct
  source 1..75: mol_type = other DNA
ggcgatggggcagagcaatgcgctggcggtcatggctttcgcccctcgagatagcctgttacatgcgcccgatat

SEQ ID NO: 437618 - DNA, 75 bp, synthetic construct
  source 1..75: mol_type = other DNA
atgatgtccctggcgtggccattatttcgcgttacggaacaggcagcgttggctgcctggccgcaaaccggatgt

SEQ ID NO: 437619 - DNA, 75 bp, synthetic construct
  source 1..75: mol_type = other DNA
tcgcccgaagggttttactacactatgtatccgttatatgactggaaagcccgtgatatctggatatataacgcc

SEQ ID NO: 437620 - DNA, 75 bp, synthetic construct
  source 1..75: mol_type = other DNA
gtatatgaaaaaactggttgttaatcggctggcggcgggcgcgattgatctgtctttgcctctggcggacaactt

SEQ ID NO: 437621 - DNA, 75 bp, synthetic construct
  source 1..75: mol_type = other DNA
ctgtgccgttaaagcattaggcggggatatgcaggccgagctgattgacttttgccaggctaaaggggattacac

SEQ ID NO: 437622 - DNA, 75 bp, synthetic construct
  source 1..75: mol_type = other DNA
ccggatgacatcccggatgaacaggagaatgacctggggagccgggatattccgtcctggcggcgtatctgtaag

SEQ ID NO: 437623 - DNA, 75 bp, synthetic construct
  source 1..75: mol_type = other DNA
ttgttcgcaccttcccttactggagagaatgttctgcgtgcagcaattgctcgtattgagtggatttttgaaaca

SEQ ID NO: 437624 - DNA, 75 bp, synthetic construct
  source 1..75: mol_type = other DNA
acctgatgtaccgtgccggcgtgtcgttacgcaacatgcgtgtctgtgagccttttggcccggaacagcgtaagg

SEQ ID NO: 437625 - DNA, 75 bp, synthetic construct
  source 1..75: mol_type = other DNA
aaacgtatatcaaaaccggcccatcatacctggcgcagctatgcgatgttcctgctggatgtgatgccggaaaga

SEQ ID NO: 437626 - DNA, 75 bp, synthetic construct
  source 1..75: mol_type = other DNA
gttacgcaacatgcgtgtctgtgagccttttggtcctgaacagcgtaaggggctgtggctttatcatgttctgga

SEQ ID NO: 437627 - DNA, 75 bp, synthetic construct
  source 1..75: mol_type = other DNA
ggcggctgggttggcaatggcgtctacgtttctggtgtgcagcgtgagtatgatacgtttattaccaaccagtta

SEQ ID NO: 437628 - DNA, 75 bp, synthetic construct
  source 1..75: mol_type = other DNA
tatttatcttgtcggaaagtttcaagagaattatgtaaatgatagaatgattcggttgaaaaatctagctgaagc

SEQ ID NO: 437629 - DNA, 75 bp, synthetic construct
  source 1..75: mol_type = other DNA
atgacattagctgcaatcaccatgaccgcccaggaagccgccagcccggtgcagatgtaccgcgcgacctattca

SEQ ID NO: 437630 - DNA, 75 bp, synthetic construct
  source 1..75: mol_type = other DNA
gatgctctttgaacgtgcggaatactgggaagagcgggcgcggtcggcactgcttcacgcgaagtataaagaacg

SEQ ID NO: 437631 - DNA, 75 bp, synthetic construct
  source 1..75: mol_type = other DNA
atccaggaagagtgggtaaaaggcgtgaactgcgttggcgtgactgcgggcgcatcggctccggatattctggtg

SEQ ID NO: 437632 - DNA, 75 bp, synthetic construct
  source 1..75: mol_type = other DNA
cttcgaaataatggcgcatatggcgttattcagtatagatataaatctaatggctttggtgttcgttcaaccaat

SEQ ID NO: 437633 - DNA, 75 bp, synthetic construct
  source 1..75: mol_type = other DNA
tggaaacagaatcccgaaacggtgaatgcacaattaatggactggcaaccgacatattcagtcattaaatcagat

SEQ ID NO: 437634 - DNA, 75 bp, synthetic construct
  source 1..75: mol_type = other DNA
atgaaacgagccgtgatgctctttgaacgtgcggaatactgggaagagcgggcgcggtcggcactgcttcacgcg

SEQ ID NO: 437635 - DNA, 75 bp, synthetic construct
  source 1..75: mol_type = other DNA
ctcgggtacagcggcacgatgaaagtgacgcccgatcgcatcacggactacagagcgccatcggcagaagaggcc

SEQ ID NO: 437636 - DNA, 75 bp, synthetic construct
  source 1..75: mol_type = other DNA
tggctacagtatgttccacgttgagtgcatgctctgtggaagagatggctgctgtgaacaagaaaatcagtgacg

SEQ ID NO: 437637 - DNA, 75 bp, synthetic construct
  source 1..75: mol_type = other DNA
caaagatgacatttgctacgccaccactaaccgtcaggaagcggtacgcgctctggcagaacaggcggaagtagt

SEQ ID NO: 437638 - DNA, 75 bp, synthetic construct
  source 1..75: mol_type = other DNA
cagaatgtggttgcacgtttacagcagcttggcggcggcgaagctattccgctggaaggccgcgaagaaaacatc

SEQ ID NO: 437639 - DNA, 75 bp, synthetic construct
  source 1..75: mol_type = other DNA
ttctcgggtacagcggcacgatgaaagtgacgcccgatcgcatcacggactacaaagcaccatcggcagaagagg

SEQ ID NO: 437640 - DNA, 75 bp, synthetic construct
  source 1..75: mol_type = other DNA
aaagtaacttcaacttggatgaaggttattactaatttctcgcctgaaaatcgcctgtatgacgactctgttttc

SEQ ID NO: 437641 - DNA, 75 bp, synthetic construct
  source 1..75: mol_type = other DNA
gcaagtactgccgcgataggctgggctgttttgggttatggtacgcttaaagcgaagttcttaccctataaactc

SEQ ID NO: 437642 - DNA, 75 bp, synthetic construct
  source 1..75: mol_type = other DNA
tgtcttataatcttgcattaatagaaagatcatatagaaattactgtgttgattcaaaattagacggtgagttat

SEQ ID NO: 437643 - DNA, 75 bp, synthetic construct
  source 1..75: mol_type = other DNA
tgctgtgcgctgctttccccctcagggcgattactacgccggagatcgcagcctctgcgcttacgccggactgtg

SEQ ID NO: 437644 - DNA, 75 bp, synthetic construct
  source 1..75: mol_type = other DNA
aagagcagatgggggctttcatgcatcagatgacggcttccggaaatctgatgtcactggcaacgcgaatgctgg

SEQ ID NO: 437645 - DNA, 75 bp, synthetic construct
  source 1..75: mol_type = other DNA
tttaaagacggtaaagagttttctgttgcccgtgaaaataatatttcgaatgttactgattacgccaaatttgcc

SEQ ID NO: 437646 - DNA, 75 bp, synthetic construct
  source 1..75: mol_type = other DNA
tctatggtatttggggagtatttttattccttgcgtcaatggagaaatttggtgatcttttcgcaatcggtacgg

SEQ ID NO: 437647 - DNA, 75 bp, synthetic construct
  source 1..75: mol_type = other DNA
accagtttaatgaaaaacaatttaagtcaggcaaagttaatgtgctgaactgttccacgaccatggagatggggg

SEQ ID NO: 437648 - DNA, 75 bp, synthetic construct
  source 1..75: mol_type = other DNA
accgggccgggaagatgtacttctctcacttgccggagagattgtggatgaagacagcacgcttgctgaacgtca

SEQ ID NO: 437649 - DNA, 75 bp, synthetic construct
  source 1..75: mol_type = other DNA
acaatggacaataatttccgcctggtgaatgtgtatatcaccgacatgaaaatcacggaaatcccgcagaaataa

SEQ ID NO: 437650 - DNA, 75 bp, synthetic construct
  source 1..75: mol_type = other DNA
agcacagcaaagtccgcttcaagaacgccgatgcgataggctttcctgccagtgatgcactggcaaatttcttct

SEQ ID NO: 437651 - DNA, 75 bp, synthetic construct
  source 1..75: mol_type = other DNA
ggccacgccgctggcaaacttaactgatagctccagacatcagctttccgcgttggcggcgatgccgggaggtcg

SEQ ID NO: 437652 - DNA, 75 bp, synthetic construct
  source 1..75: mol_type = other DNA
ggtgtggttcagcttatttgtctgccaaagaggagatgcgcggtgatggaacgaactggttggtagcgcaaccag

SEQ ID NO: 437653 - DNA, 75 bp, synthetic construct
  source 1..75: mol_type = other DNA
cgcactggcggcggtgcgtgaacataccacgctggtggtgatagctcaccgcttatcaaccattgtcgatgccga

SEQ ID NO: 437654 - DNA, 75 bp, synthetic construct
  source 1..75: mol_type = other DNA
tgctggcgctggcgcgcgtgctggtggagacgccgcaaatcctgatccttgatgaggcaaccgccagcattgatt

SEQ ID NO: 437655 - DNA, 75 bp, synthetic construct
  source 1..75: mol_type = other DNA
tttggtgaacgcatgggtgaggccagtcggtcgcactatatggcgaggatgcaaaccctgcgcctcgacggtttt

SEQ ID NO: 437656 - DNA, 75 bp, synthetic construct
  source 1..75: mol_type = other DNA
gaccgttactgccgttatcgaatacctcggtttacgagaactcggcacaagcggggagaaaataccgttactcag

SEQ ID NO: 437657 - DNA, 75 bp, synthetic construct
  source 1..75: mol_type = other DNA
cgttgataacgtgtcgtttgcttaccgtggcgacaatatggtgttgaaaaatattcatctcactgtttctttacg

SEQ ID NO: 437658 - DNA, 75 bp, synthetic construct
  source 1..75: mol_type = other DNA
tttcgtcgctcattctttgtggcttattgatgttgtttggcttctccgccagcggcaccattgaggtgggcgtgc

SEQ ID NO: 437659 - DNA, 75 bp, synthetic construct
  source 1..75: mol_type = other DNA
tcatgaaatattttttcctgaatcatcaacggcaatggcgttaattctggcaatgggaacctatggtgcaggtta

SEQ ID NO: 437660 - DNA, 75 bp, synthetic construct
  source 1..75: mol_type = other DNA
cgttatttaatctggttgtcattcaggccggtattccgttgcaccggcctcgttctgtcaaacaggccagagaag

SEQ ID NO: 437661 - DNA, 75 bp, synthetic construct
  source 1..75: mol_type = other DNA
gtatgcagaaccggaactggcggcgaaactgaccgcgctgggcgatgaattacgatttgtcctgttgacctccgg

SEQ ID NO: 437662 - DNA, 75 bp, synthetic construct
  source 1..75: mol_type = other DNA
cacagtcgctgctgtttaatcgggcggcggttggcgtggtacaacagttgcgaacggatgtgatggatgccgcat

SEQ ID NO: 437663 - DNA, 75 bp, synthetic construct
  source 1..75: mol_type = other DNA
agtcgataacgtgtcatttgcttatcgcgatgacaatctggtgctaaagaacattaatctctctgtgccttcgcg

SEQ ID NO: 437664 - DNA, 75 bp, synthetic construct
  source 1..75: mol_type = other DNA
cgtgaacataccacgctggtggtgattgctcaccgcttatcgaccattgttgatgccgacaccattctggtgctt

SEQ ID NO: 437665 - DNA, 75 bp, synthetic construct
  source 1..75: mol_type = other DNA
ttttgatggttctagcgatatttcaattagtgccaaaaatgtcaatgcatttgcactccgacaaacaggtaatac

SEQ ID NO: 437666 - DNA, 75 bp, synthetic construct
  source 1..75: mol_type = other DNA
tattggaagaagaaactacgggagattcccgtagtattcctgtcatcaccattcaggggcgcaatggtgggacgt

SEQ ID NO: 437667 - DNA, 75 bp, synthetic construct
  source 1..75: mol_type = other DNA
caccagtcctgcaaatccgcgcgagacgcagccgcacttcttcgaatcccgattccctgagctgttaaagctgct

SEQ ID NO: 437668 - DNA, 75 bp, synthetic construct
  source 1..75: mol_type = other DNA
gcatatcaccagatggcgaagctggggatcgttgaacaacgcgaacgatacagccctaccgcgattaacaacatc

SEQ ID NO: 437669 - DNA, 75 bp, synthetic construct
  source 1..75: mol_type = other DNA
caatgagcaaactgaacatttaataagcgagttgcagatttgcaactcggtcaatatagagccagttaacgttat

SEQ ID NO: 437670 - DNA, 75 bp, synthetic construct
  source 1..75: mol_type = other DNA
tgctgcattgcctggtgatcccgcgtatcccgttagcaccaggcctggcaccggctgttgcggcgggtctgctgg

SEQ ID NO: 437671 - DNA, 75 bp, synthetic construct
  source 1..75: mol_type = other DNA
tttattccgttgctgcggcgatgggtcgacctggcgcttactcgttggttgatcacggtatcaaagccatgaacg

SEQ ID NO: 437672 - DNA, 75 bp, synthetic construct
  source 1..75: mol_type = other DNA
aagacaaccaagctttatttagcgcactttctcttgaagaagcggcagtatctttgtctacaaaaattatttccg

SEQ ID NO: 437673 - DNA, 75 bp, synthetic construct
  source 1..75: mol_type = other DNA
gggacgagctgttgaaagtgcgtggcgaagtgaacaaagtcattgagcaagcgcgtgccgacaagaaagtgggtg

SEQ ID NO: 437674 - DNA, 75 bp, synthetic construct
  source 1..75: mol_type = other DNA
gtctcaattcgtcatttctgatgaggctggcggtatcaatgatgacaatatccagtataaccctggtaatacaac

SEQ ID NO: 437675 - DNA, 75 bp, synthetic construct
  source 1..75: mol_type = other DNA
tcaagccgccccacgctgtcactgagtgcactgctgaagcagtatggtatccgcctgacagctaatcaggcatat

SEQ ID NO: 437676 - DNA, 75 bp, synthetic construct
  source 1..75: mol_type = other DNA
atggcagttcgtggcattaacaaggtcatcctcgtaggacgcctgggaaaggatccggaagtccgttacatcccc

SEQ ID NO: 437677 - DNA, 75 bp, synthetic construct
  source 1..75: mol_type = other DNA
cagagagtcccggcattattgataaagaattcttcaataaaatcggtgaggatttcaaccctaaggaaggtgcga

SEQ ID NO: 437678 - DNA, 75 bp, synthetic construct
  source 1..75: mol_type = other DNA
ggtcacctgcacaaaggcgcgaagccggtgcactggtgcgttgactgccgttctgcgctggcggaagcggaagtt

SEQ ID NO: 437679 - DNA, 75 bp, synthetic construct
  source 1..75: mol_type = other DNA
gtgattcttgccgcatcactgctattactgttctcgattaacactctgcaaagtcgctttggtcggcgtgtggta

SEQ ID NO: 437680 - DNA, 75 bp, synthetic construct
  source 1..75: mol_type = other DNA
cctacaaagtaacgttgctgtcggcgtttgtggcgtcgatttttaacggtgttttcggtctgctgatggcgtgga

SEQ ID NO: 437681 - DNA, 75 bp, synthetic construct
  source 1..75: mol_type = other DNA
ccgcgatatctggatatataacgccagagcttgtgccatttacaatcctctgtatgaccagatgtaccgtgccga

SEQ ID NO: 437682 - DNA, 75 bp, synthetic construct
  source 1..75: mol_type = other DNA
ggaatatgtacggggatgtgacggagaccttttactgggtggcgcttcccctgaccacggtaaacggtgtatcgc

SEQ ID NO: 437683 - DNA, 75 bp, synthetic construct
  source 1..75: mol_type = other DNA
tatcgccggaaatatcgcgtggaagacggaagtgacgtcgctgatgatttttgtgcgcttacaggagtttgatta

SEQ ID NO: 437684 - DNA, 75 bp, synthetic construct
  source 1..75: mol_type = other DNA
cttcccggatgacatcccggatgaacaggagaatgacctggggagccgggatatcccgtcctggcgacgtatctg

SEQ ID NO: 437685 - DNA, 75 bp, synthetic construct
  source 1..75: mol_type = other DNA
ggggcacgtatcggttgacgacttcgcgatcatcggcggcatgaccgcagtccatcagttctgcatcattggtgc

SEQ ID NO: 437686 - DNA, 75 bp, synthetic construct
  source 1..75: mol_type = other DNA
gtgacatgggttcgccagccaccggaagaagctattactgatatggagtatttccccttttatcagtatgccatg

SEQ ID NO: 437687 - DNA, 75 bp, synthetic construct
  source 1..75: mol_type = other DNA
attgcccgcaagaaaaaacgtcgtttctcggtactgttcattgactgggaggctcagtatcagtgcaccattcag

SEQ ID NO: 437688 - DNA, 75 bp, synthetic construct
  source 1..75: mol_type = other DNA
gttccggcattttcttcctggtttgccggtaaccgatgtggagtggcaatactgactggtgtccgtgctgatgaa

SEQ ID NO: 437689 - DNA, 75 bp, synthetic construct
  source 1..75: mol_type = other DNA
tcatacctggcgtagctatgcgatgttcctgctggatgtgatgccggaaagaacggcagaacattaccgtaataa

SEQ ID NO: 437690 - DNA, 75 bp, synthetic construct
  source 1..75: mol_type = other DNA
aagtggtgcttattttgcgcttcgcaaacgtatatcaaagcctgaccatcatacctggcgcagctatgcgatgtt

SEQ ID NO: 437691 - DNA, 75 bp, synthetic construct
  source 1..75: mol_type = other DNA
aacgtcgtttctctgtattattcattgactgggaagctcagtaccagtgcactattgaacatgttcagaagatgc

SEQ ID NO: 437692 - DNA, 75 bp, synthetic construct
  source 1..75: mol_type = other DNA
aatgatttctggtgccggaccctctccttcagtccgaacaaaccccggcactatgaacgttacctgcagcgtatg

SEQ ID NO: 437693 - DNA, 75 bp, synthetic construct
  source 1..75: mol_type = other DNA
tggtgttcgtgctgatgaatcgctcaatcgctttatgggactggtgtctcagcgcaaactgagatatgcagatga

SEQ ID NO: 437694 - DNA, 75 bp, synthetic construct
  source 1..75: mol_type = other DNA
gtcctgactggtgtatctcccgtcagcgcacctggggcgtaccgatgtcactgttcgtgcacaaagacacggaag

SEQ ID NO: 437695 - DNA, 75 bp, synthetic construct
  source 1..75: mol_type = other DNA
cgatcaggatgcactgaaagcaaaatttggcgtaagcaacgttaacggtccaatctcgctggtgatctggaccac

SEQ ID NO: 437696 - DNA, 75 bp, synthetic construct
  source 1..75: mol_type = other DNA
gctttatgggactggtgtcccagcgcaaactgagatatgccgatgataaaccctggactacggcatcgcctgaag

SEQ ID NO: 437697 - DNA, 75 bp, synthetic construct
  source 1..75: mol_type = other DNA
gtccgtgctgatgaatcgctcaatcgctttatgggactggtatctcagcgcaaactgagatatgccgatgataag

SEQ ID NO: 437698 - DNA, 75 bp, synthetic construct
  source 1..75: mol_type = other DNA
atggatatataacgccagaacccgagctatctacaatcccctgtatgacctgatgtaccgtgccggcgtgccgtt

SEQ ID NO: 437699 - DNA, 75 bp, synthetic construct
  source 1..75: mol_type = other DNA
ggatgataaaccatggacgactgcatcacaggacggtttttactacacgatgtaccctctgtatgactggaaaac

SEQ ID NO: 437700 - DNA, 75 bp, synthetic construct
  source 1..75: mol_type = other DNA
ttactgggtggcacttcccctgaccacggtaaacggggtctcgcagttccagcctgagtggatatgctgggagct

SEQ ID NO: 437701 - DNA, 75 bp, synthetic construct
  source 1..75: mol_type = other DNA
tttactgggtggcacttcccctgaccacggtaaacggcgtctcgcagtttcagccggagtggatatgctgggagc

SEQ ID NO: 437702 - DNA, 75 bp, synthetic construct
  source 1..75: mol_type = other DNA
tattttgccctgtgtaagcgtatcacgaagccgcctcatcatacctggcgcagctatgcgatgttcctgctggat

SEQ ID NO: 437703 - DNA, 75 bp, synthetic construct
  source 1..75: mol_type = other DNA
ggaagccgggatacgtaacaggatgatcctgaaatcccgacagattggggcgacctggtattttgcacaggaagc

SEQ ID NO: 437704 - DNA, 75 bp, synthetic construct
  source 1..75: mol_type = other DNA
agggagattgatgtgtcccaccgcgccctgaagagtggagtgctgtgccccgacagtgcgtggcggcaaatcgtg

SEQ ID NO: 437705 - DNA, 75 bp, synthetic construct
  source 1..75: mol_type = other DNA
gcagcctttaacgccgtgcgtaaggtgaaaacaccgggcggctttatcacttacgaaacggaccgcgcgaggggg

SEQ ID NO: 437706 - DNA, 75 bp, synthetic construct
  source 1..75: mol_type = other DNA
ctgacggaaaagccagacctgacggcgcatgacttcaaaaccattgacctgttaacccgtcaactggtgaggatg

SEQ ID NO: 437707 - DNA, 75 bp, synthetic construct
  source 1..75: mol_type = other DNA
cagcgtgtcactcagtccatcgatgcgcgactgatccagcttaccgccaagtccgataagacggggggcgatttt

SEQ ID NO: 437708 - DNA, 75 bp, synthetic construct
  source 1..75: mol_type = other DNA
tgcgggcgaaacagctttactggcaggggtacactccggcagatatcgctcaactgatggggattaaccagaaca

SEQ ID NO: 437709 - DNA, 75 bp, synthetic construct
  source 1..75: mol_type = other DNA
gcggcaggtacggcagcgggctttaccgggctgtttggttacctgggcggttcggtggcggcgagcgcgattgtt

SEQ ID NO: 437710 - DNA, 75 bp, synthetic construct
  source 1..75: mol_type = other DNA
tttactggatgaacccggcaggtaacccaaccgtcgatatgatttgtatgattgttatcggcttcctgatctacg

SEQ ID NO: 437711 - DNA, 75 bp, synthetic construct
  source 1..75: mol_type = other DNA
gcgccgaaaaaggcggcaggtactgcggctggttttaccggactgtttggttacctgggcggttctgtagcggca

SEQ ID NO: 437712 - DNA, 75 bp, synthetic construct
  source 1..75: mol_type = other DNA
gaaggtctcttccggcagggctgcaggcgggtatcaccaccggcatacagggtacacctggtctgtttctgtgaa

SEQ ID NO: 437713 - DNA, 75 bp, synthetic construct
  source 1..75: mol_type = other DNA
cagcgggtgcaggatcgcacgcacgttcgttacttgcgcctggtggaaaaggacgacaaaaccccgaaggacttc

SEQ ID NO: 437714 - DNA, 75 bp, synthetic construct
  source 1..75: mol_type = other DNA
aaatgattacccggacgactataacgaaaaagcggaacaggaactgacggcgaagcagatcttcatgcagtacgt

SEQ ID NO: 437715 - DNA, 75 bp, synthetic construct
  source 1..75: mol_type = other DNA
attcactcaacagcccccggatttcattacgcaacgccgttcgctcgcggatgattctggcccggacccggtatt

SEQ ID NO: 437716 - DNA, 75 bp, synthetic construct
  source 1..75: mol_type = other DNA
ccggatgtgatgaacagggtgatccggatgtttaacgccacaggggttaaacaccggatgctgcctcagagccgg

SEQ ID NO: 437717 - DNA, 75 bp, synthetic construct
  source 1..75: mol_type = other DNA
ccaggtggctgattactggaccaccctgctgcatgagctggtacacagtaccggtcatgaaaagcgcctgcggcg

SEQ ID NO: 437718 - DNA, 75 bp, synthetic construct
  source 1..75: mol_type = other DNA
ttcagtgagcgggtgctgccggtactgaatggcagcggcgtcagcgtctcgtcacttccacaggacagggcattc

SEQ ID NO: 437719 - DNA, 75 bp, synthetic construct
  source 1..75: mol_type = other DNA
gccacagcttaccgtgacgcaggatattcagatttaggtcaggggctgtacgcaaatgccagtcgcctgataaga

SEQ ID NO: 437720 - DNA, 75 bp, synthetic construct
  source 1..75: mol_type = other DNA
ggaggaaatatcattctgtcccgatgaatttggcatttctgaccagcaggcaaaattcgccatgctggttgccca

SEQ ID NO: 437721 - DNA, 75 bp, synthetic construct
  source 1..75: mol_type = other DNA
gtctggctgtacggagaaaagagccaccgcaccgcgctactgctggactattcacacggtggtaaaaactttccc

SEQ ID NO: 437722 - DNA, 75 bp, synthetic construct
  source 1..75: mol_type = other DNA
cattccgcttcgccaaaaagctgcgttaaaacgcattaatcagctattaagctggatggtctatctcattctctt

SEQ ID NO: 437723 - DNA, 75 bp, synthetic construct
  source 1..75: mol_type = other DNA
tcaacgtactggcgggctggatatggtcccggcggcgattgttcacggttttattcttagcctgttagtgccgat

SEQ ID NO: 437724 - DNA, 75 bp, synthetic construct
  source 1..75: mol_type = other DNA
tggcgatcctgcattattccgccgtcagtattaccgttattttgctatgcaatattgtcgccttgctgtggctgg

SEQ ID NO: 437725 - DNA, 75 bp, synthetic construct
  source 1..75: mol_type = other DNA
cgtaaaagcccggaatatgcgttcgaagagctgattgccgagatgggcagtgcttttctgtgcgcacatctgggg

SEQ ID NO: 437726 - DNA, 75 bp, synthetic construct
  source 1..75: mol_type = other DNA
ttcggtggccgattactggaccaccctgctgcatgaactggtacacagtaccggtcatgaaaagcgtctgcggcg

SEQ ID NO: 437727 - DNA, 75 bp, synthetic construct
  source 1..75: mol_type = other DNA
taaaactgtgcggcgtagtcgtaattggttttgccattggccttagcggattaggtttcttacaacacgccactg

SEQ ID NO: 437728 - DNA, 75 bp, synthetic construct
  source 1..75: mol_type = other DNA
gactggcagcaatacaccaaattgcagggtggggcgctggttgcccgccgtgatctaccgttgcgcatctggtac

SEQ ID NO: 437729 - DNA, 75 bp, synthetic construct
  source 1..75: mol_type = other DNA
agatggacgttatgtcaaaacctttaccgatatgcagcaggttgaccacgacgccctggtgcaggcgatggtcgg

SEQ ID NO: 437730 - DNA, 75 bp, synthetic construct
  source 1..75: mol_type = other DNA
atcgaagatgaaagcttctttgcccttggttacgctaactggttcggtctgcctgcgccaatctggctcaccgtc

SEQ ID NO: 437731 - DNA, 75 bp, synthetic construct
  source 1..75: mol_type = other DNA
tgctctgtccagaagatcgtaaagcggaaggcattattccggtgcattccgtccgtgacaatatcaacatcagcg

SEQ ID NO: 437732 - DNA, 75 bp, synthetic construct
  source 1..75: mol_type = other DNA
gttgttactaaaacgactttatatcttaagaacggattcgctggagacgatgtcgcggctggtgagtaaccagcc

SEQ ID NO: 437733 - DNA, 75 bp, synthetic construct
  source 1..75: mol_type = other DNA
acctcacgcatcaaacgtcacccgcagaagtggaacccaaaatcgctgcaatttatgagcgtttctgagcttaac

SEQ ID NO: 437734 - DNA, 75 bp, synthetic construct
  source 1..75: mol_type = other DNA
gcggtgctgtttgcctccagcgacttacctgaagtcctcggcgttgccgaccggattgtggtgatgcgcgaaggc

SEQ ID NO: 437735 - DNA, 75 bp, synthetic construct
  source 1..75: mol_type = other DNA
gaagagtggtgtattaattacaaagcaagactatatcagaagcaaatctaaatatataaagaaagcttttgatga

SEQ ID NO: 437736 - DNA, 75 bp, synthetic construct
  source 1..75: mol_type = other DNA
cgattgagatgtacaaaccaacagtgcgcatcgtggaagttaatgtgccacgcgccgctggcatcggtaaggggg

SEQ ID NO: 437737 - DNA, 75 bp, synthetic construct
  source 1..75: mol_type = other DNA
atggacacccgataaatgcagatgagcgacatgtcatgatacctaaagaaaatggcagttggctttacctgattg

SEQ ID NO: 437738 - DNA, 75 bp, synthetic construct
  source 1..75: mol_type = other DNA
cgccatgctgggcatcaccgaggcggcgatttttggtattaacctgcgctttgtgaagccatttattgcggcgct

SEQ ID NO: 437739 - DNA, 75 bp, synthetic construct
  source 1..75: mol_type = other DNA
ttgtaaaaccgtttatcgcagccctgattggcggcgcggtgggcggcgcgtgggtggtatccatgcatgtttaca

SEQ ID NO: 437740 - DNA, 75 bp, synthetic construct
  source 1..75: mol_type = other DNA
gatggtgataaaaacaaaaaaataaaaccagtaagaattagtgaaattgctgatgctgatttagttaatacaatg

SEQ ID NO: 437741 - DNA, 75 bp, synthetic construct
  source 1..75: mol_type = other DNA
gatctgaaaagcgaagtgtcttcaatgctgacaccaggtacaggacgcatgtacctgtccactggctcgctgacc

SEQ ID NO: 437742 - DNA, 75 bp, synthetic construct
  source 1..75: mol_type = other DNA
ctataccgcgtttggacaccgcaaccacaagtggaacggggcaagccctcgccgatcacagcggtatctcaatca

SEQ ID NO: 437743 - DNA, 75 bp, synthetic construct
  source 1..75: mol_type = other DNA
aacgccacactggcagaaattgccgcagattgtgaacacctggacgaaatcgaaactggccggcggttttacgct

SEQ ID NO: 437744 - DNA, 75 bp, synthetic construct
  source 1..75: mol_type = other DNA
cgttccagccgtggcggcgtgtgctggcgaaaaaacaaactgtggagctgatggcgcgctggcgggctgtggtaa

SEQ ID NO: 437745 - DNA, 75 bp, synthetic construct
  source 1..75: mol_type = other DNA
ccgtctggcgctacgcgatatcattcgcagggatctgccacccatcaacatggttaatgagcaatacgctattgc

SEQ ID NO: 437746 - DNA, 75 bp, synthetic construct
  source 1..75: mol_type = other DNA
gcaaaaatcacgttaaacagtgggatgcgcgtcgcaaacgtagcagggcaatcatgagccgcctggaacttgaag

SEQ ID NO: 437747 - DNA, 75 bp, synthetic construct
  source 1..75: mol_type = other DNA
gcggaagagttaactggcaagtctggtaagcagccccgctttgaacttaagccgattgatccggctttgggtagc

SEQ ID NO: 437748 - DNA, 75 bp, synthetic construct
  source 1..75: mol_type = other DNA
gaaaccaaagaacgcatttcactcattgagcaaatagataagagcatatctaacccagctttgcgccgcgttgag

SEQ ID NO: 437749 - DNA, 75 bp, synthetic construct
  source 1..75: mol_type = other DNA
aggacttttaggtaaccctgcaatcggtgttaatttcctgctgcctatttgggcaatggcaaacgttgcgcaagg

SEQ ID NO: 437750 - DNA, 75 bp, synthetic construct
  source 1..75: mol_type = other DNA
ttttagcctctctttattactcaaatacaaaacggacgaggagtatgaaccgccccgggtttcctggagagtgtt

SEQ ID NO: 437751 - DNA, 75 bp, synthetic construct
  source 1..75: mol_type = other DNA
gtggctggcgtctatcaattgacgcgcggacgctacgccccaacgccgccgcccccgtttctggggagcggcgca

SEQ ID NO: 437752 - DNA, 75 bp, synthetic construct
  source 1..75: mol_type = other DNA
atgcggtcggtgctgagcgaggtacacgaaacggtagagacgcaaagtgatcgccggtatgccgaatacctttac

SEQ ID NO: 437753 - DNA, 75 bp, synthetic construct
  source 1..75: mol_type = other DNA
gatctattcgaattgggtcaagaacaagagtttttgtcgtgggtgaaacttaccctttcgagacttcctcgcttt

SEQ ID NO: 437754 - DNA, 75 bp, synthetic construct
  source 1..75: mol_type = other DNA
ggatattgaggggatcaacaaggaaaccaatttacctgtcagaacgggagacataacgatttatggcaagcggct

SEQ ID NO: 437755 - DNA, 75 bp, synthetic construct
  source 1..75: mol_type = other DNA
agcggatttgcgcaaggctgaaaagaccatcgcgcagtcgcagaaatatctgacgatgtggcgggctgaatcgct

SEQ ID NO: 437756 - DNA, 75 bp, synthetic construct
  source 1..75: mol_type = other DNA
agagacagaagaccacggggcataccgctaccgccgcacaatggacaataatttccgcctggtgaatgtgtatat

SEQ ID NO: 437757 - DNA, 75 bp, synthetic construct
  source 1..75: mol_type = other DNA
tgaccatcatccgcgtgaacaaaagcaacggggcggtgagttcagtcacaacgccgaattacagttttctcgggt

SEQ ID NO: 437758 - DNA, 75 bp, synthetic construct
  source 1..75: mol_type = other DNA
cgggatgacctgacgcgtctgcggataatcgccgcttcagcgactgcactggctcgctgggagccgcgtttaaag

SEQ ID NO: 437759 - DNA, 75 bp, synthetic construct
  source 1..75: mol_type = other DNA
gaaaacgcctgtccggcgtcgcccatttgcgccagtcggtcagcgacatactgaccacgcccatcgggagccggg

SEQ ID NO: 437760 - DNA, 75 bp, synthetic construct
  source 1..75: mol_type = other DNA
gccacagtgctgtgtgatctcgccgttgctgtcgaacatcatgctgaatgagttcgaccagtatctgaataagcg

SEQ ID NO: 437761 - DNA, 75 bp, synthetic construct
  source 1..75: mol_type = other DNA
catcgactgctgatgaaggctgtatgccgcaggatcagtgacgcacgtttcatgactctgctgtggaaaaccatc

SEQ ID NO: 437762 - DNA, 75 bp, synthetic construct
  source 1..75: mol_type = other DNA
cttcagttatatcgaccgtgtcgtgttctggaagctggctcactggctggcccgcaaataccgtacaggtatcgc

SEQ ID NO: 437763 - DNA, 75 bp, synthetic construct
  source 1..75: mol_type = other DNA
tttttttaatctttttgggatttaaattcctatcgatcaaggcgggacatatcgatgtcggtctctttcgggcgg

SEQ ID NO: 437764 - DNA, 75 bp, synthetic construct
  source 1..75: mol_type = other DNA
ggcaaactgcgaccactgggtatccccgcgttgcgggatcgtattgttcagcgggccatgctgatggcgatggag

SEQ ID NO: 437765 - DNA, 75 bp, synthetic construct
  source 1..75: mol_type = other DNA
tcgttacggcgatatgcgggtggtttcgacgatcccgaaggagaaagccagaaacttcgccgcgtcactaacggc

SEQ ID NO: 437766 - DNA, 75 bp, synthetic construct
  source 1..75: mol_type = other DNA
gggtacagcggcacgatgaaagtgacgcccgatcgcatcacggactacaaagcgccatcggcagaagaggtcgtt

SEQ ID NO: 437767 - DNA, 75 bp, synthetic construct
  source 1..75: mol_type = other DNA
actttcctacatttttgatggtttttctggtatcgttagttcttattagtgcaaaaataaagtcgaatggcctgt

SEQ ID NO: 437768 - DNA, 75 bp, synthetic construct
  source 1..75: mol_type = other DNA
actttcttacatttttgatggtctttctggtatcgttagttcttattagtgcaaaaataaagtcgaatggcctgt

SEQ ID NO: 437769 - DNA, 75 bp, synthetic construct
  source 1..75: mol_type = other DNA
gccagaatatcagtacttcggcgatggtagccgggttgaaactaaccctctgagtttacgtattgcgcaatgcct

SEQ ID NO: 437770 - DNA, 75 bp, synthetic construct
  source 1..75: mol_type = other DNA
agaaaacgtcattgtgcacagcgatagtaataatgccgatgtcagtctttaccaccacttagtttgccgtttaac

SEQ ID NO: 437771 - DNA, 75 bp, synthetic construct
  source 1..75: mol_type = other DNA
aatccggatgctccggatgagcgttgggtaacggacataacctacatcaggacccacgaaggctggctgtatctt

SEQ ID NO: 437772 - DNA, 75 bp, synthetic construct
  source 1..75: mol_type = other DNA
atggtaaaacccaaccaggtgtgggtgactgatattacctacatccgcacctggcagggttggctgtatctggcg

SEQ ID NO: 437773 - DNA, 75 bp, synthetic construct
  source 1..75: mol_type = other DNA
gccgtcgccagacaggccgcgaagcgtccgccggtagtcaactatccgggggaaggtttccgggaaatgacaaag

SEQ ID NO: 437774 - DNA, 75 bp, synthetic construct
  source 1..75: mol_type = other DNA
tgacgcccgatcgcatcacggactacaaagcaccatcggcagaagaggctgccgtcgccagtcaggccgcgaagc

SEQ ID NO: 437775 - DNA, 75 bp, synthetic construct
  source 1..75: mol_type = other DNA
gggcggacaggttttcagccggggcgagtggctgaccatcatccgcgtgaacaaaagcaacggggcggtgagttc

SEQ ID NO: 437776 - DNA, 75 bp, synthetic construct
  source 1..75: mol_type = other DNA
acaaaacgagtgtgctatttattataattcatcgctgatgctggaaaataccgttgatttacgggtctcctggaa

SEQ ID NO: 437777 - DNA, 75 bp, synthetic construct
  source 1..75: mol_type = other DNA
agtattgttcaacgacatgttaatgccctggttttaggtctgtttttacgagctgaagttcctgatgcgacaaaa

SEQ ID NO: 437778 - DNA, 75 bp, synthetic construct
  source 1..75: mol_type = other DNA
atacgtatccgcgcccggcagaaaaaagccagtatgaagggagtcggtcgttatggtcggccctggatgatgaca

SEQ ID NO: 437779 - DNA, 75 bp, synthetic construct
  source 1..75: mol_type = other DNA
gataacaattctctccttaaccctgcgaagaagtttacgtaccaggctccacaaaacgttgatgatacatatgtc

SEQ ID NO: 437780 - DNA, 75 bp, synthetic construct
  source 1..75: mol_type = other DNA
ggtatcttcatgatatgggtgatgggtatgtcggctgtacgacatatgatggcaaagaggtggcatttctatcct

SEQ ID NO: 437781 - DNA, 75 bp, synthetic construct
  source 1..75: mol_type = other DNA
aaacgtcgatgccatgacaaatcttggcattatgtatgagaatggcgagggtgttaaaaaggattataaaaaagc

SEQ ID NO: 437782 - DNA, 75 bp, synthetic construct
  source 1..75: mol_type = other DNA
ggccgactcgccaggaaacattgcacaccacgctgattgtggctgtggttaccgcagtaatgtcactgatcctgt

SEQ ID NO: 437783 - DNA, 75 bp, synthetic construct
  source 1..75: mol_type = other DNA
cccgcggtggcgtactgccgctatgccgatgattttgtcctcatcgtcaaaggcaccaaagcacaggcggaagcc

SEQ ID NO: 437784 - DNA, 75 bp, synthetic construct
  source 1..75: mol_type = other DNA
tttttgcggcctgtctaccgtatccgaagctgggaacaagtctataacgcgctgtacaagggcgttgtcgcaact

SEQ ID NO: 437785 - DNA, 75 bp, synthetic construct
  source 1..75: mol_type = other DNA
gcttgatgcgattcacgccattctggaacagcagcagaacagctttccgtcccgtgtattccgcccgctgtttgg

SEQ ID NO: 437786 - DNA, 75 bp, synthetic construct
  source 1..75: mol_type = other DNA
tcgccatgttggttgctcaggggaaaaagccgacagaggcataccgactggctggttatgaggggcaaggtgcga

SEQ ID NO: 437787 - DNA, 75 bp, synthetic construct
  source 1..75: mol_type = other DNA
attcggcgttgagatcctgctggaggataaggctgccgcccggcgtgaattgttgcgtttgctttctgctggcgg

SEQ ID NO: 437788 - DNA, 75 bp, synthetic construct
  source 1..75: mol_type = other DNA
attacgcaacagcccgtcgttacatcaaaaaaactccgaaaaatgcgcagacagaaatgcgcaaaactgcgcaaa

SEQ ID NO: 437789 - DNA, 75 bp, synthetic construct
  source 1..75: mol_type = other DNA
taaaatggataaatttaacagcatgagtaccgatgaaattatcgaccattataaaaaagtaaccgactatttgag

SEQ ID NO: 437790 - DNA, 75 bp, synthetic construct
  source 1..75: mol_type = other DNA
agagccagagtttgcgatgttcctgattgagaacggcatcatgtaccggcttaaccgtgttctcacaccaaagag

SEQ ID NO: 437791 - DNA, 75 bp, synthetic construct
  source 1..75: mol_type = other DNA
gaacagaaacagcgcctgagtgaagaactggcagtagcggcaccgaaggccgagttcgttgatcggtatgtgacg

SEQ ID NO: 437792 - DNA, 75 bp, synthetic construct
  source 1..75: mol_type = other DNA
atcggtatccagatcgagttcccgaaagtgatcctggctggcgaagtaacgactccggtaactgttcgtggcctg

SEQ ID NO: 437793 - DNA, 75 bp, synthetic construct
  source 1..75: mol_type = other DNA
caaacggcagcagtggcaacggcgacagcggcgctgtgtccgtggtggttcctccggctgttcctggtggccgtt

SEQ ID NO: 437794 - DNA, 75 bp, synthetic construct
  source 1..75: mol_type = other DNA
aactcaggctacctcacactgctgatggcgctgcgtgacgatgtggcgcaaccttaccagcgtaaccagattttt

SEQ ID NO: 437795 - DNA, 75 bp, synthetic construct
  source 1..75: mol_type = other DNA
gccggatgagacggcaacaggaaagaaaggccgggcgaaaaaacacaaaaatcatttcacgccggaacagatcgc

SEQ ID NO: 437796 - DNA, 75 bp, synthetic construct
  source 1..75: mol_type = other DNA
catttgcgcagctgaaaaaagaagccgacatgaaagtgccacgccgtcacgtagagctgtacgacaccatcatgg

SEQ ID NO: 437797 - DNA, 75 bp, synthetic construct
  source 1..75: mol_type = other DNA
atgccattctatttcaggaaggagtgtccgttaaactcaggctacctcacactgctgatggcgctgcgtgacgat

SEQ ID NO: 437798 - DNA, 75 bp, synthetic construct
  source 1..75: mol_type = other DNA
aaatcccgacagattggggcgacctggtattttgcacaggaagcactgctgatggcgctgcgtgacgatgtggcg

SEQ ID NO: 437799 - DNA, 75 bp, synthetic construct
  source 1..75: mol_type = other DNA
ggcgccggaaactaaaccgatgtctgtagggttaccgctggatctgcgtgaattccagcagcagcaagagaaaga

SEQ ID NO: 437800 - DNA, 75 bp, synthetic construct
  source 1..75: mol_type = other DNA
acaccggagattaaaattgttgctgagcaaccgggcattacgcgtgctgaagcgttaacgacggcacaaaatatt

SEQ ID NO: 437801 - DNA, 75 bp, synthetic construct
  source 1..75: mol_type = other DNA
ttgccacatgggcagccaccgatccgtccctacgggattcaacggctgctgcgtctgataacacaaccagaatgg

SEQ ID NO: 437802 - DNA, 75 bp, synthetic construct
  source 1..75: mol_type = other DNA
tctttcgggcggccagtgaaggtgtgccacagggcggtgttatatcgccgctattgtcgaacatcatgctgaatg

SEQ ID NO: 437803 - DNA, 75 bp, synthetic construct
  source 1..75: mol_type = other DNA
agctgcaaatcctcagggatgaattactctcaggccactaccaacccttgcccgccagacgggtttacatcccta

SEQ ID NO: 437804 - DNA, 75 bp, synthetic construct
  source 1..75: mol_type = other DNA
tggtagaagttatcattcagacaacagcggttccggtggcggctcaagtggcggcggatttagcggcgggggcgg

SEQ ID NO: 437805 - DNA, 75 bp, synthetic construct
  source 1..75: mol_type = other DNA
atggtggcgttttcgatgtttgaagcggcctactattcagagattatccgcgccggtattcaaagtatttctcgt

SEQ ID NO: 437806 - DNA, 75 bp, synthetic construct
  source 1..75: mol_type = other DNA
atgtacgagtttgactggagttccattgtcccttccctgccatatctgctcgacgggctggtgatcaccctgaaa

SEQ ID NO: 437807 - DNA, 75 bp, synthetic construct
  source 1..75: mol_type = other DNA
ggtcagtcgagcgccgcgctggcgttggggatgactcactggcagtcgatgaaactgattattctgccgcaggcg

SEQ ID NO: 437808 - DNA, 75 bp, synthetic construct
  source 1..75: mol_type = other DNA
tacgttgaggcctccggtggcaagctacgcctcgatgttgaacttccggacggcacccactacggctttgccgtt

SEQ ID NO: 437809 - DNA, 75 bp, synthetic construct
  source 1..75: mol_type = other DNA
ctgggtgtgagacagccgacagtctccgagatggaaaaacctggacgagatctcaagctgtcgtccattaagcgg

SEQ ID NO: 437810 - DNA, 75 bp, synthetic construct
  source 1..75: mol_type = other DNA
ggtgatgcgcttatccagctttgcgcccgtagcgtggtttgccaaagcctacgttaacgtattccgctcgattcc

SEQ ID NO: 437811 - DNA, 75 bp, synthetic construct
  source 1..75: mol_type = other DNA
cgatcgtctggcggagcttgcggttcaggtctggcaagcgccttctcttcctgaagaggttttagctgtttatcg

SEQ ID NO: 437812 - DNA, 75 bp, synthetic construct
  source 1..75: mol_type = other DNA
attccgacgaattctcttaacaagacgtttgccactttttataaagtcattaataaagaaaaatatctggaaagt

SEQ ID NO: 437813 - DNA, 75 bp, synthetic construct
  source 1..75: mol_type = other DNA
atccttatcaaacacctgaacttctggttttacctgttacacatggagacacagattacctctcatggctcaacg

SEQ ID NO: 437814 - DNA, 75 bp, synthetic construct
  source 1..75: mol_type = other DNA
cgccggtattcaaagtatttcccgtggtcagtcgagcgccgcgctggcgctcggcatgacccactggcagtcgat

SEQ ID NO: 437815 - DNA, 75 bp, synthetic construct
  source 1..75: mol_type = other DNA
ttgtcccttccctgccttatctactggatggactggtgatcaccctgaaaatcaccgtcacggcagtagtgattg

SEQ ID NO: 437816 - DNA, 75 bp, synthetic construct
  source 1..75: mol_type = other DNA
ttgctgatggcttgcatagccggttgttatttgatcatcttcgcgatgaaattatgcgcctggacgcagggatca

SEQ ID NO: 437817 - DNA, 75 bp, synthetic construct
  source 1..75: mol_type = other DNA
ttgcggatgaaaaacctgaagtcgtggacgaagctcaggcgatggcgacggacatcctgctcaacattcatcttg

SEQ ID NO: 437818 - DNA, 75 bp, synthetic construct
  source 1..75: mol_type = other DNA
agtgacccggtggttcataccatcttcaacgaaagaatattatcttgcctctcttgtcgcctttgctttatggaa

SEQ ID NO: 437819 - DNA, 75 bp, synthetic construct
  source 1..75: mol_type = other DNA
tggaagggtgaaacaacacagatttacgaagggtatcaaccattctgggaagtgctcattccattgccagttatt

SEQ ID NO: 437820 - DNA, 75 bp, synthetic construct
  source 1..75: mol_type = other DNA
aaagtcggaataatagcgcttgttgatgaagcgacggggtaccagcgagatagagaaaaagatgcgctcgccaaa

SEQ ID NO: 437821 - DNA, 75 bp, synthetic construct
  source 1..75: mol_type = other DNA
ttgcgcctgacaacccacaaaactgtatcagaaatgttaatttgtttttaaaagaaaagtattgtgatacttcaa

SEQ ID NO: 437822 - DNA, 75 bp, synthetic construct
  source 1..75: mol_type = other DNA
ttgcgcctgacaacccacaaaactgtatcagaaatgttaatgcatttttaaaagaaaagtattgtaatacttcag

SEQ ID NO: 437823 - DNA, 75 bp, synthetic construct
  source 1..75: mol_type = other DNA
cgcactcctggcggcagactcattaactgaactgaggaaaatgatccatgagccagaccgcactgctggcccttg

SEQ ID NO: 437824 - DNA, 75 bp, synthetic construct
  source 1..75: mol_type = other DNA
ccgggcttgttgctgaaagtaaatgaagcaataactgatttgcaaacactggcagcttcatatagcgcatcggca

SEQ ID NO: 437825 - DNA, 75 bp, synthetic construct
  source 1..75: mol_type = other DNA
tctctgaaaggtggcatcggaaaaatctcatatgtggtggcgggtatcttaattttaggcaccgtggaaaacgcc

SEQ ID NO: 437826 - DNA, 75 bp, synthetic construct
  source 1..75: mol_type = other DNA
tggaaaactcaaagaaaaataaaaaaataccatacatgataaaaaacaaaagcacatcggaagtgactaataatg

SEQ ID NO: 437827 - DNA, 75 bp, synthetic construct
  source 1..75: mol_type = other DNA
ttaaagatcggtgatgcggaattagatgtcgcggttctcgaaaatggacggcgtatcatatcacaagcttctgtt

SEQ ID NO: 437828 - DNA, 75 bp, synthetic construct
  source 1..75: mol_type = other DNA
gttgaagccagaacaggttaagagcggtttgaagaacaactggagtgtaaaaaaaggccaaactctgtatggtat

SEQ ID NO: 437829 - DNA, 75 bp, synthetic construct
  source 1..75: mol_type = other DNA
aaaagattaaaggattcggcatggggctggcggttagtttaatgtggattgcgaattttctaatatcactgttgt

SEQ ID NO: 437830 - DNA, 75 bp, synthetic construct
  source 1..75: mol_type = other DNA
ctaatcttcttaagtactggaagttagtcagaggtacaaccaagacaagattaacactaatggaaattatgagct

SEQ ID NO: 437831 - DNA, 75 bp, synthetic construct
  source 1..75: mol_type = other DNA
tcgcaccacaccacaactttcggtctgctgctgctattactttcatggctggcgatctggtttggtcacacttcc

SEQ ID NO: 437832 - DNA, 75 bp, synthetic construct
  source 1..75: mol_type = other DNA
ccacctcaactacccacagttgttaggttccgttttcagcatgtttatcagcgataagatcctgcgcacccgcgc

SEQ ID NO: 437833 - DNA, 75 bp, synthetic construct
  source 1..75: mol_type = other DNA
tgttgaatgaaaactgtgacttgttaataacagatgaaattcgtgtctacagaaaaactgttaatggtactcaat

SEQ ID NO: 437834 - DNA, 75 bp, synthetic construct
  source 1..75: mol_type = other DNA
ggttacatgaccagctactttattggcggtgccgccggttcgctaatttcagcctcagcctggcaacatggcggt

SEQ ID NO: 437835 - DNA, 75 bp, synthetic construct
  source 1..75: mol_type = other DNA
ggtctgtttggccttgcgggagctgccggggcgttgggcgctcgcccggcgggcggttttgccgataaaggaaaa

SEQ ID NO: 437836 - DNA, 75 bp, synthetic construct
  source 1..75: mol_type = other DNA
tggcttttttgctcgccgcgccgccttttaattacagcgatggcgtgattggtctgtttggccttgcgggagctg

SEQ ID NO: 437837 - DNA, 75 bp, synthetic construct
  source 1..75: mol_type = other DNA
ccgtcgcccggccagttcgtagcgtggtgtaagcagagtggcggggcgttagggatcactgttgaccaagtcata

SEQ ID NO: 437838 - DNA, 75 bp, synthetic construct
  source 1..75: mol_type = other DNA
atatatccatggaaaagcatcatcagatcaacagttgattttaggtcatggtattgaccctatcaactttgaaga

SEQ ID NO: 437839 - DNA, 75 bp, synthetic construct
  source 1..75: mol_type = other DNA
atctccttatttccccctttgtaagtgtctggaaaaatgctgttttactccggaccaactggcatcgactgacta

SEQ ID NO: 437840 - DNA, 75 bp, synthetic construct
  source 1..75: mol_type = other DNA
gaacgacgttagctcgaaacactatgatcgttatgattacctgcctgaaaagcgtagggcgcttgagatctggga

SEQ ID NO: 437841 - DNA, 75 bp, synthetic construct
  source 1..75: mol_type = other DNA
gacaatattctgaaagcaccgctggatgcgctgacgcatgcgggagtgcttattgatgacgagcagtttgatgaa

SEQ ID NO: 437842 - DNA, 75 bp, synthetic construct
  source 1..75: mol_type = other DNA
atcgccgcgccggctaaagccagcggccccacaccagcagagatgctgatggccgaatacaaaaaacgcaaagca

SEQ ID NO: 437843 - DNA, 75 bp, synthetic construct
  source 1..75: mol_type = other DNA
gtaatcgcctgacggcaggatatatgaccagctattttattggcggcgccgccggttcactgatttcagcctcag

SEQ ID NO: 437844 - DNA, 75 bp, synthetic construct
  source 1..75: mol_type = other DNA
gatggatacccagcgcgcgctcaacttcctggtacgtaaagcacgcttaccgggtggacaactggagcaggcgcg

SEQ ID NO: 437845 - DNA, 75 bp, synthetic construct
  source 1..75: mol_type = other DNA
aattaattaaattaggatgtgttcaggctcaggggtatctgtaccagaaacccatgccattctccgcctgggata

SEQ ID NO: 437846 - DNA, 75 bp, synthetic construct
  source 1..75: mol_type = other DNA
gcaacacgcccggaactggaagacatcgaagcatcagcgcgtttctttgaagacgatgacggcctgcatattcac

SEQ ID NO: 437847 - DNA, 75 bp, synthetic construct
  source 1..75: mol_type = other DNA
gcggcgatgggctttatcaacatcgagcagaaccgcatcatcaaaatcttctcggtggtatccgtggtattcctg

SEQ ID NO: 437848 - DNA, 75 bp, synthetic construct
  source 1..75: mol_type = other DNA
acaatctgaacttggccagagcctggcaacccgcccggaactggaagacatcgaagcatcggcacgtttctttga

SEQ ID NO: 437849 - DNA, 75 bp, synthetic construct
  source 1..75: mol_type = other DNA
cagagttgaagtggagttacggctacccaggcgcgattatctttatgatcctcgcgggcctggcaccgtatctgt

SEQ ID NO: 437850 - DNA, 75 bp, synthetic construct
  source 1..75: mol_type = other DNA
aggcagaatgtacttttacgaatcacgctttcgacagcctgatcccgtcactgaaattcagaaaatatgacgccg

SEQ ID NO: 437851 - DNA, 75 bp, synthetic construct
  source 1..75: mol_type = other DNA
atggccgtcaatctaactgaaacagctattcgagcattaaaagcaaaaaagacatcgttctatgtctggagcaat

SEQ ID NO: 437852 - DNA, 75 bp, synthetic construct
  source 1..75: mol_type = other DNA
ggcaatctggtttggtcacacttccgtactggcgttgattatcggcattctggtgctggacctcaccgtacaggg

SEQ ID NO: 437853 - DNA, 75 bp, synthetic construct
  source 1..75: mol_type = other DNA
tccttcttcttctttgaagatgcggaagatcacgccggtaactccactgtggcatttaccatccgtgatggtcgt

SEQ ID NO: 437854 - DNA, 75 bp, synthetic construct
  source 1..75: mol_type = other DNA
atgaaaaagttagttcttgccgctttactggcatcctgtgcgttcggcgcttctgccgcagagaaaatcaatttt

SEQ ID NO: 437855 - DNA, 75 bp, synthetic construct
  source 1..75: mol_type = other DNA
gtctcttatgacagttatcagaatgcatttatcgacctgaaaaatggtcgtattgatggggtatttggtgataca

SEQ ID NO: 437856 - DNA, 75 bp, synthetic construct
  source 1..75: mol_type = other DNA
cgcgattaccgcaaaactttaaaacgtttgattattatgatgaagcatcaagagttgctgtaagtgctaaatcaa

SEQ ID NO: 437857 - DNA, 75 bp, synthetic construct
  source 1..75: mol_type = other DNA
acaactggggcgtggataaatacgaactcggcactgcttatggtcacatcgcgcttagcgtagataacgccgctg

SEQ ID NO: 437858 - DNA, 75 bp, synthetic construct
  source 1..75: mol_type = other DNA
atggtggaagatgacttcagtgaggtttacagaaaaataaaagaaatttcaccacgagtgaataatacaggttaa

SEQ ID NO: 437859 - DNA, 75 bp, synthetic construct
  source 1..75: mol_type = other DNA
aatacgtcttcaccggtgagtggtacgaaggcctgtttggtctggcagacagcgaagcgatgaacgatgcgttct

SEQ ID NO: 437860 - DNA, 75 bp, synthetic construct
  source 1..75: mol_type = other DNA
tacgatttgtcctgttgacctccggcgctaccgttgcagactataacgacgcacctgctgatgctcagcagagcg

SEQ ID NO: 437861 - DNA, 75 bp, synthetic construct
  source 1..75: mol_type = other DNA
attaaatctgactcaccgtagtttactttcggttgttaagtatcccgcccctcgcactgcaactactgccggcaa

SEQ ID NO: 437862 - DNA, 75 bp, synthetic construct
  source 1..75: mol_type = other DNA
tatcccgaatctggcgtggagattgcccaccgttcgttgtttgcacagcaccctgaattacgcccggcaggaaat

SEQ ID NO: 437863 - DNA, 75 bp, synthetic construct
  source 1..75: mol_type = other DNA
acattacaggaatgagctttggctttcgcgcattatgcgaagaatggaatatcgcgcaaaaaccgtatttgcgta

SEQ ID NO: 437864 - DNA, 75 bp, synthetic construct
  source 1..75: mol_type = other DNA
ggataccagcacagggcgtgacgttatcgaactggttaaacgtggtgatatatccggcatgagctttggctttcg

SEQ ID NO: 437865 - DNA, 75 bp, synthetic construct
  source 1..75: mol_type = other DNA
gctctactggggcggtattcgcctcaatcttggtgcattttttaaatggaccagcctgtttattctcttcgtcgc

SEQ ID NO: 437866 - DNA, 75 bp, synthetic construct
  source 1..75: mol_type = other DNA
cacgctgcgcgcgctggagctgggggcgatagattttgtcaccaaaccgcaactgggtattcgcgaaggtatgct

SEQ ID NO: 437867 - DNA, 75 bp, synthetic construct
  source 1..75: mol_type = other DNA
ggattggtgtgatgtgggttggcgtgttgcttgccgctgcgttgtgcctggggctgggtatcttcattaatgaaa

SEQ ID NO: 437868 - DNA, 75 bp, synthetic construct
  source 1..75: mol_type = other DNA
gcgctgtatcacatcgcagaagcgctggttcgctggatggcgccgattctttccttcaccgctgatgaagtgtgg

SEQ ID NO: 437869 - DNA, 75 bp, synthetic construct
  source 1..75: mol_type = other DNA
aagtttaatattttgagccgaattcataaagagctcctgatctctgtacctttttctaaaaaaggtcgtctggtt

SEQ ID NO: 437870 - DNA, 75 bp, synthetic construct
  source 1..75: mol_type = other DNA
tgatcgcattgttgctggaagacgctaaacgtttgcagcagatagagccaaatgcaggcactgaggcccgtattt

SEQ ID NO: 437871 - DNA, 75 bp, synthetic construct
  source 1..75: mol_type = other DNA
cgtgacctatcaccgctgggggctgatgacggccagggtctggttgctattgagtgcctgcctaaacggctatgc

SEQ ID NO: 437872 - DNA, 75 bp, synthetic construct
  source 1..75: mol_type = other DNA
ttgaaagagtcaaagaagaattctcatcaaccatgaaaactatgaatggatggatattaaactctgaacattatg

SEQ ID NO: 437873 - DNA, 75 bp, synthetic construct
  source 1..75: mol_type = other DNA
cgtaaatgttgatgtttatgaacatgcttctgaagaagataaacggtacatccttcaaaactgcctggtactacg

SEQ ID NO: 437874 - DNA, 75 bp, synthetic construct
  source 1..75: mol_type = other DNA
tgatactgcaattcaatatgatattattccatttatgaaaatatcagagattgaagaatcttgcggttatgaaaa

SEQ ID NO: 437875 - DNA, 75 bp, synthetic construct
  source 1..75: mol_type = other DNA
tgctgatttgggtgtcgtgctgtttaccagtcgcgatgccagtcactatcaacaagggcagggaacgcagttact

SEQ ID NO: 437876 - DNA, 75 bp, synthetic construct
  source 1..75: mol_type = other DNA
ctgcgtattcagcgtctggggcaggaacagcactatcttgggccgcttaacgggccggagttgctggtggtgcta

SEQ ID NO: 437877 - DNA, 75 bp, synthetic construct
  source 1..75: mol_type = other DNA
ggtcacctgcacaaaggtgcgaagccggtacactggtgcgttgactgccgttctgcgctggctgaagcggaagtt

SEQ ID NO: 437878 - DNA, 75 bp, synthetic construct
  source 1..75: mol_type = other DNA
accgagcgtcagcgaagtcgccgtctggtttatttatctcatcccggcgctggtggcatttgctctgccaccacg

SEQ ID NO: 437879 - DNA, 75 bp, synthetic construct
  source 1..75: mol_type = other DNA
agggctgaccgggcacaatggattctggaagccgacattcgcagttgttttgatgagatttcacatgaatggcta

SEQ ID NO: 437880 - DNA, 75 bp, synthetic construct
  source 1..75: mol_type = other DNA
cggtagatgtgttgttccattctgtcgccaaacaggcggggcgtaatgcggttggggtgatcctaaccggtatgg

SEQ ID NO: 437881 - DNA, 75 bp, synthetic construct
  source 1..75: mol_type = other DNA
aatcacaataacgtcgatgcctgcttatccagaatctggcgtggagattgcccaccgttcgttgtttgcacagca

SEQ ID NO: 437882 - DNA, 75 bp, synthetic construct
  source 1..75: mol_type = other DNA
catcggctggcatgagcgtatgaaaacgctgctggacggcaatcagattatgaccgatccagtggtgctcgatga

SEQ ID NO: 437883 - DNA, 75 bp, synthetic construct
  source 1..75: mol_type = other DNA
gcaatggcttctgacctgattaacgccaagattcctgcccagttccgcaatgacccgcgtctggtggttctggtc

SEQ ID NO: 437884 - DNA, 75 bp, synthetic construct
  source 1..75: mol_type = other DNA
atgcaccttaataatcgtgcgcgggatttactggataaatattcggcggggatggcgcagcattttggcgcccgt

SEQ ID NO: 437885 - DNA, 75 bp, synthetic construct
  source 1..75: mol_type = other DNA
atcgtcaaaacgcgtacgcctgcccaaatcatcaccgatacggtcacgctgggcggtgctggtgcggattatgtg

SEQ ID NO: 437886 - DNA, 75 bp, synthetic construct
  source 1..75: mol_type = other DNA
ccggccgcacggcttacgtaccgccgtttatgccaggcaaacgcatgattgttacgacactgccaaacctgcaca

SEQ ID NO: 437887 - DNA, 75 bp, synthetic construct
  source 1..75: mol_type = other DNA
aggcgtttgcgctggatatgctgcgtatcggctttaacggtaccaaagtggccgagaccacgaacgcggaaacca

SEQ ID NO: 437888 - DNA, 75 bp, synthetic construct
  source 1..75: mol_type = other DNA
tggagctatggtgaagaaaccggtgaaattctcacttcctgcctgcagttgcgtgaaaaactgaaaccttatatc

SEQ ID NO: 437889 - DNA, 75 bp, synthetic construct
  source 1..75: mol_type = other DNA
tgacagcatacaccccgccgttcatgccggaaggacgcctgattgtcaccacgctggcaaaccttcacatctaca

SEQ ID NO: 437890 - DNA, 75 bp, synthetic construct
  source 1..75: mol_type = other DNA
gttcataccatcttcaacgaaagaatattatcttgcctctctcgtcgcctttgctttatggaaagaggcacctga

SEQ ID NO: 437891 - DNA, 75 bp, synthetic construct
  source 1..75: mol_type = other DNA
atgcaccttaataatcgtgcacgggatttactggataaatattcgagtggtatggcgcagcagtttggtgcacgt

SEQ ID NO: 437892 - DNA, 75 bp, synthetic construct
  source 1..75: mol_type = other DNA
aaaaagtggggagaacagcccggcaatacctcccgtattctgacggacgccgttaccctgggcgaaggcggtgat

SEQ ID NO: 437893 - DNA, 75 bp, synthetic construct
  source 1..75: mol_type = other DNA
aaattctcacttcctgcctgcagttgcgtgaaaaactgaaaccttatatcagtaaaattatggctgagacgcacg

SEQ ID NO: 437894 - DNA, 75 bp, synthetic construct
  source 1..75: mol_type = other DNA
tacttgcttcctttactttcggtgcttctgccgcagagaaaatcaattttggcgtttcagccacctatccaccct

SEQ ID NO: 437895 - DNA, 75 bp, synthetic construct
  source 1..75: mol_type = other DNA
gctgaacagcagtgaattgcatgcgccgctgcaaaagaatcaggtcgtcggaactatcaacttccagcttgatgg

SEQ ID NO: 437896 - DNA, 75 bp, synthetic construct
  source 1..75: mol_type = other DNA
cgctgaccgagccacgcagtattgctctgcgtaaagccctgctggaaagcacggagtttctgagtttcatcacct

SEQ ID NO: 437897 - DNA, 75 bp, synthetic construct
  source 1..75: mol_type = other DNA
tggcggaactccaggaattgctcgagaaattacagcaggcgcaagaaaagggcgacggtgatgctgccaacttac

SEQ ID NO: 437898 - DNA, 75 bp, synthetic construct
  source 1..75: mol_type = other DNA
atggcaacagtgataactcaggatcgacagatagcaagccttgttccccctgtaggaaaaaaccggattgtcgtc

SEQ ID NO: 437899 - DNA, 75 bp, synthetic construct
  source 1..75: mol_type = other DNA
aaggccagatgcgcttgatttctgcggtgatgggcggacgtacttttaaaggccgtgaagccgaaagtaaaaaac

SEQ ID NO: 437900 - DNA, 75 bp, synthetic construct
  source 1..75: mol_type = other DNA
gttgtgttgcaagaaatcccggaaggtaacttcttcggcaaaatcattgattacattaaattaatgttccatcac

SEQ ID NO: 437901 - DNA, 75 bp, synthetic construct
  source 1..75: mol_type = other DNA
acgaagaaattactgcaacctgctcttgcggtaatgtgatgaaaatccgctccacagttggtcatgacctgaacc

SEQ ID NO: 437902 - DNA, 75 bp, synthetic construct
  source 1..75: mol_type = other DNA
acgaagaaattactgctagctgctcttgcggtaacgtaatgaaaatccgctccaccgttggtcatgacctgaacc

SEQ ID NO: 437903 - DNA, 75 bp, synthetic construct
  source 1..75: mol_type = other DNA
tattgatggggtatttggtgacacagcggtggtaaacgaatggctgaaaaccaatccacaacttggtgttgctac

SEQ ID NO: 437904 - DNA, 75 bp, synthetic construct
  source 1..75: mol_type = other DNA
tgattgagcaactgtgggtcaggatggggcctggtttacattatctctatgaagcgattaatccagcggaattac

SEQ ID NO: 437905 - DNA, 75 bp, synthetic construct
  source 1..75: mol_type = other DNA
gttgaaaacctcaccccgcaagacctggtagaacttcaggaattgctcgagaaattacagcaggcgcaagaaaag

SEQ ID NO: 437906 - DNA, 75 bp, synthetic construct
  source 1..75: mol_type = other DNA
tggtccgacagtatatcgacgccgttcatcgcaatttccgcaattgccagacctctgacgggaaatcattctcat

SEQ ID NO: 437907 - DNA, 75 bp, synthetic construct
  source 1..75: mol_type = other DNA
atcgccgatgcccacccttataaaatccctgcgactgttatcgcccacgagatcatggagcacagctaccgtggt

SEQ ID NO: 437908 - DNA, 75 bp, synthetic construct
  source 1..75: mol_type = other DNA
aaattaaaatcctacacaagcagggtatgagcagtcgggcgatcgccaggtacttagatatctctcgtaatatcg

SEQ ID NO: 437909 - DNA, 75 bp, synthetic construct
  source 1..75: mol_type = other DNA
atctggaaacaccgccaacgcgcgatcaactggtcaaactcattgccgatatggggcttaccgtacgcgcgctgc

SEQ ID NO: 437910 - DNA, 75 bp, synthetic construct
  source 1..75: mol_type = other DNA
tttataggtccgtttcctagtagaaagaatcatatagttgttcttagaataggtaatactgataaagaaaatgga

SEQ ID NO: 437911 - DNA, 75 bp, synthetic construct
  source 1..75: mol_type = other DNA
tgagccgccaaaatatacgccgcgacctgttgttgtcatcactcgggccgccagagcaacctttcagcattcacc

SEQ ID NO: 437912 - DNA, 75 bp, synthetic construct
  source 1..75: mol_type = other DNA
ggaactgggccttgcagaagataaatttactgacgatcggttaatcgactttatgcttcagcacccgattctgat

SEQ ID NO: 437913 - DNA, 75 bp, synthetic construct
  source 1..75: mol_type = other DNA
cgtcgtgaacagtgcgaaaccggtgcgcgtttcttccagcagccagccctgcgcgatgtcaccattgaagagttc

SEQ ID NO: 437914 - DNA, 75 bp, synthetic construct
  source 1..75: mol_type = other DNA
aaacatctgcaactgcgtaacaacagcttcggcggcgtggacatggtgattagcggcaatgtgccgcagggtgcc

SEQ ID NO: 437915 - DNA, 75 bp, synthetic construct
  source 1..75: mol_type = other DNA
gccagcgcgctggagcaaggcgacctgaaacgtatgggcgagttgatggcggaatctcatgcctctatgcgcgat

SEQ ID NO: 437916 - DNA, 75 bp, synthetic construct
  source 1..75: mol_type = other DNA
atggggctattagcagacaaaacaaaatgggttctttttttggcttccagcagtgagccggaagatcggcatgtt

SEQ ID NO: 437917 - DNA, 75 bp, synthetic construct
  source 1..75: mol_type = other DNA
atacgatattaaaaaaggcttctcaccgatggtcatcgcaacacgacgccagccaatcatggtgccaatgccgag

SEQ ID NO: 437918 - DNA, 75 bp, synthetic construct
  source 1..75: mol_type = other DNA
cctattactccagaccagcaacgtatccgcgaactggaaaagcaggttcgccgcctggaggaacaaaatacgata

SEQ ID NO: 437919 - DNA, 75 bp, synthetic construct
  source 1..75: mol_type = other DNA
gccaatcaacgtaagcatgaaactatccagacccgcccctgcgatcgctgggtggaggaacagcaatccatgctg

SEQ ID NO: 437920 - DNA, 75 bp, synthetic construct
  source 1..75: mol_type = other DNA
tgatgcacagagaggtgaatttactaaagaagacggtgaaaaggtgatcgacgcacatgggcagcgtgtaatcaa

SEQ ID NO: 437921 - DNA, 75 bp, synthetic construct
  source 1..75: mol_type = other DNA
aaatgcgcaacaaggcgcgttcaccaaggaagatggcgagaaagtggttgatgaggcgggtaagcggttgaaata

SEQ ID NO: 437922 - DNA, 75 bp, synthetic construct
  source 1..75: mol_type = other DNA
ttgcagcagctttatcatctgccgctggacggcgcacaaatcgcgcttaacggtcaggaagcagaaaaccagttt

SEQ ID NO: 437923 - DNA, 75 bp, synthetic construct
  source 1..75: mol_type = other DNA
aatcgtaaaagcagtgattggcgacaaagggggcgtgcgcatgaccggtggtgggtttggcggctgtattgttgc

SEQ ID NO: 437924 - DNA, 75 bp, synthetic construct
  source 1..75: mol_type = other DNA
cgccctataggttacttaatcgtataaaaacaacgccagatttagatagagcgatagtatatatggggcagtgtt

SEQ ID NO: 437925 - DNA, 75 bp, synthetic construct
  source 1..75: mol_type = other DNA
tgaatggtattgcgccgggagcaatattaacggatgccctcaaatccgttattacaccagaaatcgaacaaaaaa

SEQ ID NO: 437926 - DNA, 75 bp, synthetic construct
  source 1..75: mol_type = other DNA
cctaaaccgtttgatatgccaatggcggattttcgccgtgcttatgaactgaatgtgttttcttttttccatctg

SEQ ID NO: 437927 - DNA, 75 bp, synthetic construct
  source 1..75: mol_type = other DNA
gtgtttaattctgacaacctgagactcgacggaaaatgcgccatcatcacaggtgcgggtgcaggtattggtaaa

SEQ ID NO: 437928 - DNA, 75 bp, synthetic construct
  source 1..75: mol_type = other DNA
aaaccgccagagtggtgtttaatgaattaagcgtcaccgaaccggcgaccgtcggggaaattgtgcagaatactt

SEQ ID NO: 437929 - DNA, 75 bp, synthetic construct
  source 1..75: mol_type = other DNA
aatagatagggccatttataatggcttatgttttatcatgtgcattgattacttatataacaaagaaaaaaatct

SEQ ID NO: 437930 - DNA, 75 bp, synthetic construct
  source 1..75: mol_type = other DNA
tcacaactcattgcgccagaaatggaaaaaaatggcggaggcgttattctgactatcacttctatggctgcagaa

SEQ ID NO: 437931 - DNA, 75 bp, synthetic construct
  source 1..75: mol_type = other DNA
atccctctaatcctcttgatatgggtaatccacaagttctaagaggtctgtttaatgaaggtaaagttgctgctg

SEQ ID NO: 437932 - DNA, 75 bp, synthetic construct
  source 1..75: mol_type = other DNA
accgcgattaacaacatcaaaaaattctggtcgctgaccgcgaaaggctgcatgttcggcaagaacatcaccagt

SEQ ID NO: 437933 - DNA, 75 bp, synthetic construct
  source 1..75: mol_type = other DNA
accagtcccgcaaatccgcgcgagacgcagccgcatttcttcgaatcccgattccctgagctgttaaagctgctc

SEQ ID NO: 437934 - DNA, 75 bp, synthetic construct
  source 1..75: mol_type = other DNA
gttgttgaggaaattcatcgccatggcgggcaagcatttgcctttcattgcgatattacttccgaacaggagctc

SEQ ID NO: 437935 - DNA, 75 bp, synthetic construct
  source 1..75: mol_type = other DNA
ttgggtaaagttgatatcctggttaacaacgccggtggcggtgggcctaaaccgtttgatatgccaatggcagat

SEQ ID NO: 437936 - DNA, 75 bp, synthetic construct
  source 1..75: mol_type = other DNA
aaaacatggtctcagctgagcgcattaaaaaaacatttattccaggcgcagtatcggcagctacatataataaca

SEQ ID NO: 437937 - DNA, 75 bp, synthetic construct
  source 1..75: mol_type = other DNA
cccaggatgcccgtgaactgggcaacgcttttagcgctgatatccctgatttcgatctttattccagtaataccg

SEQ ID NO: 437938 - DNA, 75 bp, synthetic construct
  source 1..75: mol_type = other DNA
atgagcaacatcactatttatcacaacccggcctgcggcacgtcgcgtaatacgctggagatgatccgcaacagc

SEQ ID NO: 437939 - DNA, 75 bp, synthetic construct
  source 1..75: mol_type = other DNA
atgggtatttcagtacgagcgctgctgcgtaaaaacgttgagccttacgagcaactgggtcttgcagaagataaa

SEQ ID NO: 437940 - DNA, 75 bp, synthetic construct
  source 1..75: mol_type = other DNA
aaaccgccagagttgtgttttatgaattaagcgttaccgaaccggcgacagtcggggagattgcgcagaatactt

SEQ ID NO: 437941 - DNA, 75 bp, synthetic construct
  source 1..75: mol_type = other DNA
atggagttgatttttaaatataatcaaacgtcatttatccgtgcatcgcaaatagatagggccatttataatggc

SEQ ID NO: 437942 - DNA, 75 bp, synthetic construct
  source 1..75: mol_type = other DNA
taaccgtccgatcgtggttacgccgctgggaaccagactgtgccgtccttctgaagtggttctggatatcctgca

SEQ ID NO: 437943 - DNA, 75 bp, synthetic construct
  source 1..75: mol_type = other DNA
atgctgaaacagcaggatatgacagaaactgccagagtggtgtttaatgaattaagcgtcaccgaaccggcgaca

SEQ ID NO: 437944 - DNA, 75 bp, synthetic construct
  source 1..75: mol_type = other DNA
gcagtgagatttataacacaataaaaaatgtgcaaacaaaatcacccgataaaaacatcgtcattttcactcata

SEQ ID NO: 437945 - DNA, 75 bp, synthetic construct
  source 1..75: mol_type = other DNA
ccagattatctggatgggctggtaatgcatgtggaaaaaggcaacgttttactggatggtgaatttgctaatcgc

SEQ ID NO: 437946 - DNA, 75 bp, synthetic construct
  source 1..75: mol_type = other DNA
gacgccacaatcaatacacctaacggcgttctggttgccagtggtaaacatgaagatatgtacaccgcaattaac

SEQ ID NO: 437947 - DNA, 75 bp, synthetic construct
  source 1..75: mol_type = other DNA
atgctaaaacagcaggatatgacagaaaccgccagagtggtgtttaatgaattaagcgttaacgacccggcgaca

SEQ ID NO: 437948 - DNA, 75 bp, synthetic construct
  source 1..75: mol_type = other DNA
cggtctttcagcttgctggctttttcgacaagagttattggtgtgtcacgttaaccggaaaagggaaaaagacat

SEQ ID NO: 437949 - DNA, 75 bp, synthetic construct
  source 1..75: mol_type = other DNA
aggttttactctaacgcagacgtatacccgtgcggtgaaaaatgctgatgaagttgcgggtgatgctgccaactt

SEQ ID NO: 437950 - DNA, 75 bp, synthetic construct
  source 1..75: mol_type = other DNA
acctgggacacgggccaatgttcaatgcctcctttcgccaggcactgttagatatcagtggtgaaaacgcaaatt

SEQ ID NO: 437951 - DNA, 75 bp, synthetic construct
  source 1..75: mol_type = other DNA
aatgacacccctgtaactgacgcgaacggcaataccagcatccctggcgttagcgtggcgtggcgcaatggtact

SEQ ID NO: 437952 - DNA, 75 bp, synthetic construct
  source 1..75: mol_type = other DNA
tggcatgacagcaaacgcacaggccgccctggttgggtagttatgtgggatggctggttcagacttcaggatatg

SEQ ID NO: 437953 - DNA, 75 bp, synthetic construct
  source 1..75: mol_type = other DNA
accccactatcacttatcttccatgttcagctatgagttggagggaagagtttttcggattaaattgatcaagcc

SEQ ID NO: 437954 - DNA, 75 bp, synthetic construct
  source 1..75: mol_type = other DNA
tattaagcaccaatttcatgaaaaatcgaagtgagattagaggtgaagtctttggtgatgttggtagtattgagg

SEQ ID NO: 437955 - DNA, 75 bp, synthetic construct
  source 1..75: mol_type = other DNA
aaacgaaggcacgcactgacgcgataagtagtcttaactcatcgcttaccagtacgattaactctaaggtgtctg

SEQ ID NO: 437956 - DNA, 75 bp, synthetic construct
  source 1..75: mol_type = other DNA
aatcaaccgccacgcagatcgaaagtatcacggcctcaatcgacgggcaatcggtatcaatcgaggaaaacaaaa

SEQ ID NO: 437957 - DNA, 75 bp, synthetic construct
  source 1..75: mol_type = other DNA
gcgcgttcactcgttcgagtatcgcccgtgcggaatgctacaacgccgtgatcgtatcctggactgacccggaaa

SEQ ID NO: 437958 - DNA, 75 bp, synthetic construct
  source 1..75: mol_type = other DNA
caatataaaaaccagaaagcagaaacgaaggcggaaatcgagcgcattgattcagttattgctacagagaaggaa

SEQ ID NO: 437959 - DNA, 75 bp, synthetic construct
  source 1..75: mol_type = other DNA
gcgagataatcgacgataacttgtcttatcctcataccgctgtcgctggcgcggtaattgaccacgatcagtata

SEQ ID NO: 437960 - DNA, 75 bp, synthetic construct
  source 1..75: mol_type = other DNA
gtgaacgcatcgatcgctgatcttgacaagaaaactgacgccagcgtgaaccgccttgatcaagcaatcgctgac

SEQ ID NO: 437961 - DNA, 75 bp, synthetic construct
  source 1..75: mol_type = other DNA
gccctggttgggtagttatgtgggatggctggttcagacttcaggatatggttgagggttatccggtgatgaagt

SEQ ID NO: 437962 - DNA, 75 bp, synthetic construct
  source 1..75: mol_type = other DNA
atgaaagggggattgaaacaccggtagctgtagaaacccgtacacgtggatggcagcgtgaagaagctgctgttg

SEQ ID NO: 437963 - DNA, 75 bp, synthetic construct
  source 1..75: mol_type = other DNA
atcgtcttgttggtacatatggtatgcctgatgacccgtcttcgtttttgttcgtgctggcgcttttctgcggga

SEQ ID NO: 437964 - DNA, 75 bp, synthetic construct
  source 1..75: mol_type = other DNA
tgcgtttctgcgtagcgccaactttgtcaccaagctgggcggtatgaccgtttccgctattcctgatctcgcccg

SEQ ID NO: 437965 - DNA, 75 bp, synthetic construct
  source 1..75: mol_type = other DNA
gggtttgatgttgcccttccggaaggggctaatcctgagccattgccaccggagccttccgtatggggggctgca

SEQ ID NO: 437966 - DNA, 75 bp, synthetic construct
  source 1..75: mol_type = other DNA
atcttaataacggactgatcccgtcaggtaatgttttgccggaacaaactgggtttgatgttgcccttccggaag

SEQ ID NO: 437967 - DNA, 75 bp, synthetic construct
  source 1..75: mol_type = other DNA
tgtcggtgatcgtattgtacataatgtacgaactacgatccccggcaataacctgttctggattgcgccactaat

SEQ ID NO: 437968 - DNA, 75 bp, synthetic construct
  source 1..75: mol_type = other DNA
ctgctgcactggggagtgattatacgatttcaccagatattgttgtcgaaagagaacctgaatgcgatcaagtga

SEQ ID NO: 437969 - DNA, 75 bp, synthetic construct
  source 1..75: mol_type = other DNA
tgcccatgaattaggccactttattcgacatactctcaatagaaatagttttacagacacggttttcttcaggaa

SEQ ID NO: 437970 - DNA, 75 bp, synthetic construct
  source 1..75: mol_type = other DNA
cgcggtgcgggtgctgggcctgcggcagggcggtatcagtgaagaaacacaaaatgacagctgtgagaaaatact

SEQ ID NO: 437971 - DNA, 75 bp, synthetic construct
  source 1..75: mol_type = other DNA
caaaattccgcaggagtttgccagcgtctttatggtgaaagcgccgggcagcaccaaatcgcgtacgttgagcgt

SEQ ID NO: 437972 - DNA, 75 bp, synthetic construct
  source 1..75: mol_type = other DNA
gagttggcggagaataacttcacgctggaaggcaacctgcgcggtatcgaaacaccggtagcagccgagacgcgc

SEQ ID NO: 437973 - DNA, 75 bp, synthetic construct
  source 1..75: mol_type = other DNA
ggaagtggcggaggcgctcgataacatgaatgccgcgccaacgattaacaacgcagctgacgccctggcggatac

SEQ ID NO: 437974 - DNA, 75 bp, synthetic construct
  source 1..75: mol_type = other DNA
cgccgaccttaaaacagctacagacggccttaaagctgatacagatacacttaaaaaagacaccgaagacctcta

SEQ ID NO: 437975 - DNA, 75 bp, synthetic construct
  source 1..75: mol_type = other DNA
tgatatagagcaagctaaaactgttttgagacatatttgcgcaggggttaaagctgctacgaaattttttgactc

SEQ ID NO: 437976 - DNA, 75 bp, synthetic construct
  source 1..75: mol_type = other DNA
ctgaaatttaaaaatcgtggggttgatgagaagatttctttttctatcccagtccggattgatgggactgtcgta

SEQ ID NO: 437977 - DNA, 75 bp, synthetic construct
  source 1..75: mol_type = other DNA
agtctcgattggctttgcgccaggaaccgctgcgtcatccatcaccatgcccttatttgtcacgaacggtgcaat

SEQ ID NO: 437978 - DNA, 75 bp, synthetic construct
  source 1..75: mol_type = other DNA
acaggaaaggacaaacaaaaacaaaagcggaaatagcaagggtagacacagcaatcgcagatgaggcgagcgcac

SEQ ID NO: 437979 - DNA, 75 bp, synthetic construct
  source 1..75: mol_type = other DNA
acctaggacacgggccgatgttcaatgcctcctttcgccaggcactgttagatatcagtggtgaaaacgcaaatt

SEQ ID NO: 437980 - DNA, 75 bp, synthetic construct
  source 1..75: mol_type = other DNA
acggctaatcaggcatatcaccagatggcgaagctggggatcgtcgaacagcgcgaacgatacagccgtacagcg

SEQ ID NO: 437981 - DNA, 75 bp, synthetic construct
  source 1..75: mol_type = other DNA
aagcaggttcgccgcctggaggaacaaaatacgatattaaaaaaggccccatgttttcacataactgttgcgttg

SEQ ID NO: 437982 - DNA, 75 bp, synthetic construct
  source 1..75: mol_type = other DNA
caggttcgccgactggaggaacaaaatacgatattaaaaaaggctactgcgctcttgatgtccgactcactgaac

SEQ ID NO: 437983 - DNA, 75 bp, synthetic construct
  source 1..75: mol_type = other DNA
cgctggccaccgatatctccgcgaaagggaaagcatcagggaagaagaaagcggataaaaaaggcgtgaattatt

SEQ ID NO: 437984 - DNA, 75 bp, synthetic construct
  source 1..75: mol_type = other DNA
gttaagaaatattttaactttacaccattacataattataatcatttttgtgactttattgagtttaaacaccct

SEQ ID NO: 437985 - DNA, 75 bp, synthetic construct
  source 1..75: mol_type = other DNA
agccaggtgcggggcgtactgctggacattgacagtccgggcgggcaggccgccggcgcgtttgactgcgctgac

SEQ ID NO: 437986 - DNA, 75 bp, synthetic construct
  source 1..75: mol_type = other DNA
tactcatatcgacaagccagtgaagcgatgaatgtcggttcgactacccttgagacctgggtacgccagctcagg

SEQ ID NO: 437987 - DNA, 75 bp, synthetic construct
  source 1..75: mol_type = other DNA
ttatcctcataccgctgtagctggcgccgtaattgaccatgatcagtatactgatacgcctacccgcacctatca

SEQ ID NO: 437988 - DNA, 75 bp, synthetic construct
  source 1..75: mol_type = other DNA
tatcaactgacgcagcaaaacccgtcctgtgccgaatcatcagcgtagcagaaactgaaaacaacagcgtgtaca

SEQ ID NO: 437989 - DNA, 75 bp, synthetic construct
  source 1..75: mol_type = other DNA
ttgattcggaatacatcgccgcaggcgataccattagtttacttgatagtgatggcaagtttaaaaaacaccaga

SEQ ID NO: 437990 - DNA, 75 bp, synthetic construct
  source 1..75: mol_type = other DNA
ttaccctcataccgctgtagctggtgctgtaattgaccatgaccagtatactgatacacctacccgcacctatca

SEQ ID NO: 437991 - DNA, 75 bp, synthetic construct
  source 1..75: mol_type = other DNA
acacgcttaatcacttccgcgtgccgaacattgaaaatctgaaggttgtaaacattggatctgaaacggttcaat

SEQ ID NO: 437992 - DNA, 75 bp, synthetic construct
  source 1..75: mol_type = other DNA
ggaccaggcaattgctgacgaggcaagcgccagagcacaagccatcagtggcgtgaatgcgtcaatttcaaccct

SEQ ID NO: 437993 - DNA, 75 bp, synthetic construct
  source 1..75: mol_type = other DNA
gacaacgcatcgcctgacctttgaaatacgcgtatataacgccgaaggccgcgtggtggcaacttatgaaacaac

SEQ ID NO: 437994 - DNA, 75 bp, synthetic construct
  source 1..75: mol_type = other DNA
cataaacattaacggaaattcaaagactatagacatagaaagggcggcatcaacgccccacaagtcagacgttgc

SEQ ID NO: 437995 - DNA, 75 bp, synthetic construct
  source 1..75: mol_type = other DNA
gcacttattccggtttgtggcttggcggcttcaagaaggcgtacaccaataacccagcatggatcttccgttacc

SEQ ID NO: 437996 - DNA, 75 bp, synthetic construct
  source 1..75: mol_type = other DNA
ggcccgtgacgccattcactttacgccgggggatataatcgagatcctcgataataatcgcgcaggcgctcgttt

SEQ ID NO: 437997 - DNA, 75 bp, synthetic construct
  source 1..75: mol_type = other DNA
acgcttgaaaatagcacaaacgccagcgttaaacgtcttgatcaggcaattgcagatgaatcaagcgcccgtgca

SEQ ID NO: 437998 - DNA, 75 bp, synthetic construct
  source 1..75: mol_type = other DNA
agacgctatcagtagcgtgaatgcaagtattagcacacttgaaaacaatacagaatcagaagtaagcagactgga

SEQ ID NO: 437999 - DNA, 75 bp, synthetic construct
  source 1..75: mol_type = other DNA
gaaacaagtgcgcgtactcaggctatcagcgacgtgaacgcaagtatctcaacacttgacaagaaaactgacgcc

SEQ ID NO: 438000 - DNA, 75 bp, synthetic construct
  source 1..75: mol_type = other DNA
cggcgtggttagccataacttccgtccggaattcataaaccgtattgatgaagttgtggtcttccacccgttggg

SEQ ID NO: 438001 - DNA, 75 bp, synthetic construct
  source 1..75: mol_type = other DNA
gtcactctctggcacccagaccattaaagccgaactggaacaggcgaaaatcgccattgaacaggcgcgccgtgt

SEQ ID NO: 438002 - DNA, 75 bp, synthetic construct
  source 1..75: mol_type = other DNA
ggtgaactggattatgcgcacatgaaagagctggtgctcggtgtggtaagccataacttccgtccggaattcatt

SEQ ID NO: 438003 - DNA, 75 bp, synthetic construct
  source 1..75: mol_type = other DNA
atggcactgtttaactatcaggcgctggcgcgtaatgggcgtaaaatcagaggtatgattgaggcggattccgcg

SEQ ID NO: 438004 - DNA, 75 bp, synthetic construct
  source 1..75: mol_type = other DNA
gcggttgatgcggtatctaacgctattcgtcgtagccgtgcggggcttgcggatccaaatcgcccgattggttca

SEQ ID NO: 438005 - DNA, 75 bp, synthetic construct
  source 1..75: mol_type = other DNA
gttcagaagccattgtgctggccgtgggcggacgacgtgacgggctggttgccatcgcggtggaggacaagcgat

SEQ ID NO: 438006 - DNA, 75 bp, synthetic construct
  source 1..75: mol_type = other DNA
gttctgaagccattgtgctggccgttggcggacggcgtgacgggctggttgccatcgcggtggaggacaagcgat

SEQ ID NO: 438007 - DNA, 75 bp, synthetic construct
  source 1..75: mol_type = other DNA
atgaattaaaaattagaacaagaatgatgaaaatcctccggaatggcaaaatcaatatatatgaatatattaata

SEQ ID NO: 438008 - DNA, 75 bp, synthetic construct
  source 1..75: mol_type = other DNA
ccttaccgaacgtgccgaacaaggtaaactcgatccggtaattggtcgtgatgaagaaattcgtcgtaccattca

SEQ ID NO: 438009 - DNA, 75 bp, synthetic construct
  source 1..75: mol_type = other DNA
ggtactggatgatgggcgtctgactgacgggcaagggagaacggtcgacttccgtaatacggttgtcattatgac

SEQ ID NO: 438010 - DNA, 75 bp, synthetic construct
  source 1..75: mol_type = other DNA
ggtgtctcgtctggttggtgcgcctccgggatatgtcggttatgaagaaggtggctacctgaccgaagctgtgcg

SEQ ID NO: 438011 - DNA, 75 bp, synthetic construct
  source 1..75: mol_type = other DNA
ggcgtttattggctggcgggattgctggggcttctggtgctggggcaacggctactcaaaaagccgactatgcgg

SEQ ID NO: 438012 - DNA, 75 bp, synthetic construct
  source 1..75: mol_type = other DNA
cactggcagacgacgcagccgctgtttttgagcctgccgcagctgaggcactctgtcccgctgccgtttcagaag

SEQ ID NO: 438013 - DNA, 75 bp, synthetic construct
  source 1..75: mol_type = other DNA
tgcggcgttgttatgcgcgcgtattaatggcagtcctgcttgttttgccgcctgtatgaattcatcgaatgaata

SEQ ID NO: 438014 - DNA, 75 bp, synthetic construct
  source 1..75: mol_type = other DNA
gctttttgaggactctgcagcggcagcactttttgatgcttcagtggcctttgttgatgccgttactgcgctgga

SEQ ID NO: 438015 - DNA, 75 bp, synthetic construct
  source 1..75: mol_type = other DNA
ccgttagccaggtcatacgcggccttaacggcttttggcgttgccgcctgtgactcggaagtgctgttggtcgca

SEQ ID NO: 438016 - DNA, 75 bp, synthetic construct
  source 1..75: mol_type = other DNA
ggaatttcctgccgctgttgccgaggaggctgcactactggcgctcgaggctgcgctcgtttctgatgattttgc

SEQ ID NO: 438017 - DNA, 75 bp, synthetic construct
  source 1..75: mol_type = other DNA
atgaagatgacagtttctacgctgccaacggcatctctaccgatgatattgtcgctttaggtctggtttatcagt

SEQ ID NO: 438018 - DNA, 75 bp, synthetic construct
  source 1..75: mol_type = other DNA
ctacgccagaagcatgggtgatgccactgggagacctacactacggttttccgtacttatccggagccgggcgtc

SEQ ID NO: 438019 - DNA, 75 bp, synthetic construct
  source 1..75: mol_type = other DNA
atgcacttccgagtcacaggtgaatggaatggagagccattcgacagggtcgtcgaagcagagggcatcaacgac

SEQ ID NO: 438020 - DNA, 75 bp, synthetic construct
  source 1..75: mol_type = other DNA
agtggctgccgatttttgtgatgctgcggcattcgtttctgacgttttcgcggcactggcgctggtagctgccgc

SEQ ID NO: 438021 - DNA, 75 bp, synthetic construct
  source 1..75: mol_type = other DNA
gaaaatcaagattttgttattgcttgccaaaattggcaagcaaaaggtagaggcggtcacaaccgcaaggaatac

SEQ ID NO: 438022 - DNA, 75 bp, synthetic construct
  source 1..75: mol_type = other DNA
tggtgttaaaagacacgttaatgctggcaggtgcggtaatgatcatcgcggattcagcccgctcaataatcaagc

SEQ ID NO: 438023 - DNA, 75 bp, synthetic construct
  source 1..75: mol_type = other DNA
attctctcaggtataaggaattaactgaaatactgacaaaaatatcttttcctgagaaatccgggagcaatccgg

SEQ ID NO: 438024 - DNA, 75 bp, synthetic construct
  source 1..75: mol_type = other DNA
atggagcgtctgtgtggttgcggaaagcatgatgactgtgaacacgggcagtcgcttacagcacagctgcgactg

SEQ ID NO: 438025 - DNA, 75 bp, synthetic construct
  source 1..75: mol_type = other DNA
ataaaaagcagatacagtgcgtggtaagaccgctgcaaatcctgcgtgctgacgggaggtgggaaaatattggcg

SEQ ID NO: 438026 - DNA, 75 bp, synthetic construct
  source 1..75: mol_type = other DNA
agagtctgtgcggttgcggaaagcatgatgactgtgaaaacgggcagtcacttacagcacaactgcgactggggc

SEQ ID NO: 438027 - DNA, 75 bp, synthetic construct
  source 1..75: mol_type = other DNA
ccacaggaggatatgtgtcagacattcggtttaccttcatcggtgaaatatgaatcagatggaggccaggcatcg

SEQ ID NO: 438028 - DNA, 75 bp, synthetic construct
  source 1..75: mol_type = other DNA
agaagaaaatgactttcgcatctcggttgctggcgcacaggagaagacagcactgctcagaataggcaatgactg

SEQ ID NO: 438029 - DNA, 75 bp, synthetic construct
  source 1..75: mol_type = other DNA
agcgtctgtgcggttgcggaaagcatgatgaccgtgaacacgggcagtcgcttacagcacaactgcgtctggggc

SEQ ID NO: 438030 - DNA, 75 bp, synthetic construct
  source 1..75: mol_type = other DNA
caggcagaacaggagaatgacatgaacatactaaaaaaacttatgcagcgtctgtgcggttgcggaaagcatgat

SEQ ID NO: 438031 - DNA, 75 bp, synthetic construct
  source 1..75: mol_type = other DNA
ggccggattaacgtccagcaatgggcggcagattttgccgaacgtcagcgccagcgtagcgatggcacatcggtt

SEQ ID NO: 438032 - DNA, 75 bp, synthetic construct
  source 1..75: mol_type = other DNA
tttcaggcgccagcaaaggtgctgaaattaccggaagtgcagattcatgaaatcgttagtcactgtgcgagaatg

SEQ ID NO: 438033 - DNA, 75 bp, synthetic construct
  source 1..75: mol_type = other DNA
atgaatattttgagaaagcttatgcagagtctgtgcggttgcggaaagcatgatggccgtgaaaacgggcagtca

SEQ ID NO: 438034 - DNA, 75 bp, synthetic construct
  source 1..75: mol_type = other DNA
gaatggcattattccggagcaggacagggtaatcacgcaggtggtgatactggatgcggataaaaagcagataca

SEQ ID NO: 438035 - DNA, 75 bp, synthetic construct
  source 1..75: mol_type = other DNA
tgatgaccgtgaacacggggagttacttacagcacagctgcgactgggaccggcagacattctggagtccgatga

SEQ ID NO: 438036 - DNA, 75 bp, synthetic construct
  source 1..75: mol_type = other DNA
gtgaacacggggagttacttacagcacaactgcgactgggaccggcagacattctggagtccgatgagaatggta

SEQ ID NO: 438037 - DNA, 75 bp, synthetic construct
  source 1..75: mol_type = other DNA
gaatggcattattccggagcaggacggggtaatcacgcaggtggtgatactggatgcagataaaaagcagataca

SEQ ID NO: 438038 - DNA, 75 bp, synthetic construct
  source 1..75: mol_type = other DNA
agcgtcccgtggggaatcaaagcgtttagcacctatttaggtgaggacaaaaatgcatgctggaatgggatagtt

SEQ ID NO: 438039 - DNA, 75 bp, synthetic construct
  source 1..75: mol_type = other DNA
cagccgggatatgatcacagttactacttcatcgcctcttttatagaggatcatttgcgcttccatgcgcaatat

SEQ ID NO: 438040 - DNA, 75 bp, synthetic construct
  source 1..75: mol_type = other DNA
tggatgcggataaaaagcagatacagtgcgtggtaagaccgctgcaaattctgcgtggtgacgggacgtgggaaa

SEQ ID NO: 438041 - DNA, 75 bp, synthetic construct
  source 1..75: mol_type = other DNA
aaaaagcagatacagtgcgtggtaagaccgctgcaaatcctgcgtgctgacggggtgtgggaaaatattggcggg

SEQ ID NO: 438042 - DNA, 75 bp, synthetic construct
  source 1..75: mol_type = other DNA
tggatgcagataaaaagcagatacagtgcgtggtaagaccgctgcaaatcctgcgtgctgacggggtgtgggaaa

SEQ ID NO: 438043 - DNA, 75 bp, synthetic construct
  source 1..75: mol_type = other DNA
aagcatgatggccgtgaacacgtgcagtcgcttacagcacaactgcgactggggccggcagacatcctggagtca

SEQ ID NO: 438044 - DNA, 75 bp, synthetic construct
  source 1..75: mol_type = other DNA
aggtggtgatactggatgcggataaaaagcagatacagtgcgtggtaagaccgctgcaaattctgcgtgctgacg

SEQ ID NO: 438045 - DNA, 75 bp, synthetic construct
  source 1..75: mol_type = other DNA
atcgcaccgcgttcacaacaggcactcgaatttagcgttccctactctttcttccactggggcatcagcgcctga

SEQ ID NO: 438046 - DNA, 75 bp, synthetic construct
  source 1..75: mol_type = other DNA
ggattaacctgcaatgacgagaacttcaccaccaaggcgggtgcccagcgggtagcggcggaactggggattgta

SEQ ID NO: 438047 - DNA, 75 bp, synthetic construct
  source 1..75: mol_type = other DNA
ttagcacttatctgggtgaggataaaaatgactggatggaatgggacagttgcgcgctgatgtatgcgagtaatg

SEQ ID NO: 438048 - DNA, 75 bp, synthetic construct
  source 1..75: mol_type = other DNA
aaaaatagtaccggtaaggctaccgacgctgtcgtaaaactgacagcaatgaatgcacaaaacacagcaaatact

SEQ ID NO: 438049 - DNA, 75 bp, synthetic construct
  source 1..75: mol_type = other DNA
ttcagatggttttaaattccaggcaaaattgaaaggtggaaccaccccaggcgattatcagggcgttgctgctta

SEQ ID NO: 438050 - DNA, 75 bp, synthetic construct
  source 1..75: mol_type = other DNA
atgaataaattatatcctggttctcttatcgctctggtattcgctactgctactgttaacgcagcacagcaaagc

SEQ ID NO: 438051 - DNA, 75 bp, synthetic construct
  source 1..75: mol_type = other DNA
atgccaaagttggtggatattttaataacctgagggcggcaaatcaggcgtttgtgatggagcgacacgatcacg

SEQ ID NO: 438052 - DNA, 75 bp, synthetic construct
  source 1..75: mol_type = other DNA
tggcttttgccatcgctgcggcaatcgctgttaacgtcgccttgttcggcggtctgtacctgctaatcaatccat

SEQ ID NO: 438053 - DNA, 75 bp, synthetic construct
  source 1..75: mol_type = other DNA
gattcggcgcgggaaattcttaaacaacgcagttgtagattcaatctgtcaatgcaacacccctttcaattatct

SEQ ID NO: 438054 - DNA, 75 bp, synthetic construct
  source 1..75: mol_type = other DNA
tggcggctttcgccattatggcgaatacggtcacttatgcttcagagcaggtcctaactaatagtgatgctgctg

SEQ ID NO: 438055 - DNA, 75 bp, synthetic construct
  source 1..75: mol_type = other DNA
tacctttaggaaacccaaaactcaaacgtcaagcggcaatatttattacgcttgattgtgacggttgtcaggatt

SEQ ID NO: 438056 - DNA, 75 bp, synthetic construct
  source 1..75: mol_type = other DNA
acatgaagaagctgttaaccgcgaatacccggaactgcgggttactgatgcggaacagtattatcgcctgcttct

SEQ ID NO: 438057 - DNA, 75 bp, synthetic construct
  source 1..75: mol_type = other DNA
gctgaactgattatgcgagccgaaaatgctgtcaagggtacccaacctaaggtgttcaatagaacagaccttggc

SEQ ID NO: 438058 - DNA, 75 bp, synthetic construct
  source 1..75: mol_type = other DNA
tttacagggatgccaaaaaattgattaaaaaggcattgctgatttccctatctttgttagccattgccattgttt

SEQ ID NO: 438059 - DNA, 75 bp, synthetic construct
  source 1..75: mol_type = other DNA
tagtaaagaaaaaggaaaaataaacaacctcgatattcttcgttggctaatgggaagcaaatccgacattgaaaa

SEQ ID NO: 438060 - DNA, 75 bp, synthetic construct
  source 1..75: mol_type = other DNA
ccgtcaggccggggtcatcgaacgcgttccagaaaaacggggcgtctggagatacgcctctaagacgaaaacaaa

SEQ ID NO: 438061 - DNA, 75 bp, synthetic construct
  source 1..75: mol_type = other DNA
atgacagacaaagagttagaggggttcattgaagtgcgtcacgctgttgacgcggttccatacccaaaatttgca

SEQ ID NO: 438062 - DNA, 75 bp, synthetic construct
  source 1..75: mol_type = other DNA
gccaagatgattggccgcaaagaatcaaccgtcagaaccatgattgacgccgcaaagctaccaacaattgacttt

SEQ ID NO: 438063 - DNA, 75 bp, synthetic construct
  source 1..75: mol_type = other DNA
taacacgtaaagagggcgattacctgccgcgttatgccgccaatatgttgccgctgcgctatcagacggggaact

SEQ ID NO: 438064 - DNA, 75 bp, synthetic construct
  source 1..75: mol_type = other DNA
agcgaaagcggaagcccaggtaatcatcgagcaggcgaacaaacgccgctcgcagattctggacgaagctaaagc

SEQ ID NO: 438065 - DNA, 75 bp, synthetic construct
  source 1..75: mol_type = other DNA
caatgaaaagatttctgtaatgctcgattctggagcaattggtgttgatcagtttattgaaaaattagagttaag

SEQ ID NO: 438066 - DNA, 75 bp, synthetic construct
  source 1..75: mol_type = other DNA
tcggatttagatttagaacctaaaaatagcgattttcatattgatgcgaaaggaaatcagtgtgaagagttagaa

SEQ ID NO: 438067 - DNA, 75 bp, synthetic construct
  source 1..75: mol_type = other DNA
atggactggatctgccattagtgaacactctgggctgcggttttgccgaagattacccggaagagcaacaaccgg

SEQ ID NO: 438068 - DNA, 75 bp, synthetic construct
  source 1..75: mol_type = other DNA
gcaactgatcatgccgggcgaagtggcaccgagtcatcgtcataaccaatcggcgctgcgttttattgttgaagg

SEQ ID NO: 438069 - DNA, 75 bp, synthetic construct
  source 1..75: mol_type = other DNA
ctactcgcgagcgtgccagtttaatcctgacgaaaagtgctaatcatgcagtagaagaggtcagactacgcaaat

SEQ ID NO: 438070 - DNA, 75 bp, synthetic construct
  source 1..75: mol_type = other DNA
caaaggggcattcactgccgttgacggtgaacgcacgccaatgaatgagggcgattttatcctgactccgcagtg

SEQ ID NO: 438071 - DNA, 75 bp, synthetic construct
  source 1..75: mol_type = other DNA
ccggcgctgcgcgggcagtcttccattaccgcgactttatatgccggtttgcaactgatcatgccgggcgaagtg

SEQ ID NO: 438072 - DNA, 75 bp, synthetic construct
  source 1..75: mol_type = other DNA
ggcacggcgtgtcattccagactacgcaagataccgttttattcagttttcggacagaccggtacaagaagccct

SEQ ID NO: 438073 - DNA, 75 bp, synthetic construct
  source 1..75: mol_type = other DNA
taattcttctttggttgataatccattagggggggtctccagagttcttaactctttaattagtgatatgccatc

SEQ ID NO: 438074 - DNA, 75 bp, synthetic construct
  source 1..75: mol_type = other DNA
gctgttgaagcagacgaggcggcactttctgccgactttccggcagcggtggcactggctgaggcctgcccggca

SEQ ID NO: 438075 - DNA, 75 bp, synthetic construct
  source 1..75: mol_type = other DNA
cgcattcgtttctgacgttttcgccgcaccggcactggtagctgccgcgctttttgaggactctgcagcagcagc

SEQ ID NO: 438076 - DNA, 75 bp, synthetic construct
  source 1..75: mol_type = other DNA
atatcctctgcacgttttgccgctgtctcagcgcgcgttgctgcggattctgccgtacttttgctctgtgctgcc

SEQ ID NO: 438077 - DNA, 75 bp, synthetic construct
  source 1..75: mol_type = other DNA
tttctgatgatttcgctgcctcttttgaggccgccgcatcccgggctgaggtggcagcttctgacgctttcgtgg

SEQ ID NO: 438078 - DNA, 75 bp, synthetic construct
  source 1..75: mol_type = other DNA
gccgtttcagaagacttagcgttcgtctcggacgtttttgccgccttcgcggaatttcctgccgccgttgccgag

SEQ ID NO: 438079 - DNA, 75 bp, synthetic construct
  source 1..75: mol_type = other DNA
gcgccaccaatcaacgtaattgaaacaacagaactcgcctgtggcatggttaccgttgctaatttgaaccaacca

SEQ ID NO: 438080 - DNA, 75 bp, synthetic construct
  source 1..75: mol_type = other DNA
tgcggaggcactctgttccgctgccgtttcagaagacttagcgtttgtctcagacgtctttgccgccttcgcgga

SEQ ID NO: 438081 - DNA, 75 bp, synthetic construct
  source 1..75: mol_type = other DNA
tgcttcatcctggaaagtcacatcgatgcgaattgataataattcaaccgcaacagcagtattgtataaataagg

SEQ ID NO: 438082 - DNA, 75 bp, synthetic construct
  source 1..75: mol_type = other DNA
cttcgctgcggacgcttgtctggtcgcctcatcttttgaagcagacgccgatgatgccgatgacgccgccgaact

SEQ ID NO: 438083 - DNA, 75 bp, synthetic construct
  source 1..75: mol_type = other DNA
cgcctcttttgaagccgacgcatcccgtgctgaagtggctgcttctgacgctttcgtggtcgcggtggatgcaga

SEQ ID NO: 438084 - DNA, 75 bp, synthetic construct
  source 1..75: mol_type = other DNA
cgcctcttttgaagccgacgcatcccgggctgaggtggcagcttctgacgctttcgtagtcgcggtggatgcaga

SEQ ID NO: 438085 - DNA, 75 bp, synthetic construct
  source 1..75: mol_type = other DNA
ggcactggctgaggcctgcccggcacttgttgatgcggcactggcagatgatgcagccgctgtttttgagcctgc

SEQ ID NO: 438086 - DNA, 75 bp, synthetic construct
  source 1..75: mol_type = other DNA
ggctgaggtggcagcttctgacgctttcgtggtcgcggtggatgcagaagtggcggctgattgttgtgacgctgc

SEQ ID NO: 438087 - DNA, 75 bp, synthetic construct
  source 1..75: mol_type = other DNA
attggtcccgccacaattggcgtgctgctgggtgaagttcctgaactgggcagactgaaccgccgtcagattagt

SEQ ID NO: 438088 - DNA, 75 bp, synthetic construct
  source 1..75: mol_type = other DNA
gtgcagcggtacgcacaaaagcgcgcgagctgaaaatctgtatgtatctgcggggtaattatcaccagtcagtga

SEQ ID NO: 438089 - DNA, 75 bp, synthetic construct
  source 1..75: mol_type = other DNA
agaaacattacgttcattctttcttcagacaaaaaaaacttatccctcgttttacaaaggcagatctcggtgagc

SEQ ID NO: 438090 - DNA, 75 bp, synthetic construct
  source 1..75: mol_type = other DNA
tcgaatccacgggcggttatgaagatgctgttgtctgtttcctgcagtctcttggctatgacgtttctgtcatta

SEQ ID NO: 438091 - DNA, 75 bp, synthetic construct
  source 1..75: mol_type = other DNA
atcaaaactcactcttgatgttcatgtgtctcctgcacagcttcatcagactgtatcaaacaacgagtcaggctt

SEQ ID NO: 438092 - DNA, 75 bp, synthetic construct
  source 1..75: mol_type = other DNA
cgtgcaatggtcaggaatgcgctttatatgccgacactttctgccgtgcgttttaacccggctatccgggtgttt

SEQ ID NO: 438093 - DNA, 75 bp, synthetic construct
  source 1..75: mol_type = other DNA
acgcggccttaacggcttttggcgttgccgccagtgactcggaagtgctgttagtcgcactgctgagctgtacta

SEQ ID NO: 438094 - DNA, 75 bp, synthetic construct
  source 1..75: mol_type = other DNA
gctggaaaagatttagaagaaagtgatcggttgtaccgctacagtgtccccggaagaccagatttaaaccgaatg

SEQ ID NO: 438095 - DNA, 75 bp, synthetic construct
  source 1..75: mol_type = other DNA
gacctggcgtttgtctcagacgtctttgccgccttcgcggaattgcctgccgccgttgccgaggaagcggcacta

SEQ ID NO: 438096 - DNA, 75 bp, synthetic construct
  source 1..75: mol_type = other DNA
tttgtggtcgcggcggatgcagaagtggctgcagattgttgtgacgctgccgcattcgtttctgacgttttcgcc

SEQ ID NO: 438097 - DNA, 75 bp, synthetic construct
  source 1..75: mol_type = other DNA
cgctttttgaggactctgcagcggcagcactttttgatgcttcagtggcctttgttgatgccgttcctgcgctgg

SEQ ID NO: 438098 - DNA, 75 bp, synthetic construct
  source 1..75: mol_type = other DNA
atgcgttcgtttctgatgatttcgcagcctcttttgaggccgccgcatcccgtgccgaggtggcagcttctgacg

SEQ ID NO: 438099 - DNA, 75 bp, synthetic construct
  source 1..75: mol_type = other DNA
atcaagtacagattgatttaattaaaggaagatttaaaactaagattctaaaatgttttgaaaaagcattagtca

SEQ ID NO: 438100 - DNA, 75 bp, synthetic construct
  source 1..75: mol_type = other DNA
tatttcatctttgatttacaatgcgctccctctcacagatgcacatattactccccctggagagtcatcactacc

SEQ ID NO: 438101 - DNA, 75 bp, synthetic construct
  source 1..75: mol_type = other DNA
agaatttgcaacatcgttagcctataagcacaggttaaagctaccaaatggtattgaggcatatttttctaagaa

SEQ ID NO: 438102 - DNA, 75 bp, synthetic construct
  source 1..75: mol_type = other DNA
ttaacacctgggcttaaattggtgttcaacaccttgttgatgcaaggtgcagaaacgacaacgccccgcagtggt

SEQ ID NO: 438103 - DNA, 75 bp, synthetic construct
  source 1..75: mol_type = other DNA
atgtttaagcgtttctgttatttgttaccaaattgtctgccggtcatgttgctggcgctgattctgattattagc

SEQ ID NO: 438104 - DNA, 75 bp, synthetic construct
  source 1..75: mol_type = other DNA
taatgccattgattttcttggtggcctcgtcgggttaagtctttcggctattgcaaccgggcttttagaagaagc

SEQ ID NO: 438105 - DNA, 75 bp, synthetic construct
  source 1..75: mol_type = other DNA
gccgcggcggtggagggggaacgccagaagggcttcaccatgattgaatcggtgctgaaccgcatccgggagggc

SEQ ID NO: 438106 - DNA, 75 bp, synthetic construct
  source 1..75: mol_type = other DNA
ctcgctgattgatgatggttatcaggtactggcgctctctacctgtaccagtatcgatcgttataaccgtgatga

SEQ ID NO: 438107 - DNA, 75 bp, synthetic construct
  source 1..75: mol_type = other DNA
aatcgcccggtgatgggcgacccgctctatttgcagatgaaagcgcacaacaatgcgccgggcatggtcgggcga

SEQ ID NO: 438108 - DNA, 75 bp, synthetic construct
  source 1..75: mol_type = other DNA
caacctgttcgacaaagattatgagacagtctatggctaccaaactgcaggacgggaatacaccttgtctggcag

SEQ ID NO: 438109 - DNA, 75 bp, synthetic construct
  source 1..75: mol_type = other DNA
atgaaattacttattctgggcaaccacacttgcggcaatcgtggcgacagcgccatcttgcgcggcttacttgat

SEQ ID NO: 438110 - DNA, 75 bp, synthetic construct
  source 1..75: mol_type = other DNA
aaccgcccggtaatgggtgatccgctgttccttcaaatgaaacaacacaatagcgcggcgggcgttgtcgggcgc

SEQ ID NO: 438111 - DNA, 75 bp, synthetic construct
  source 1..75: mol_type = other DNA
aactctggccgctgcgcaaagtgagtgaaaaaattggtctgcaactgccgtatggcaccatgacctttaccgttg

SEQ ID NO: 438112 - DNA, 75 bp, synthetic construct
  source 1..75: mol_type = other DNA
ttgcattaggcgtcgctattattttgactctctcaatattgttttatttttaccacaaaaaaactgctattgctc

SEQ ID NO: 438113 - DNA, 75 bp, synthetic construct
  source 1..75: mol_type = other DNA
caggacttgagatcatggtgtctattgacgaaataagttatatatcatggtttgattttgaagtatataaagcaa

SEQ ID NO: 438114 - DNA, 75 bp, synthetic construct
  source 1..75: mol_type = other DNA
aggtacatattgccttattgcttcagtaataattgcagccgctataaaatataaatggcctgattttcacctagt

SEQ ID NO: 438115 - DNA, 75 bp, synthetic construct
  source 1..75: mol_type = other DNA
gtgctagaagaataccgtaagcacgtagctgagcgtgccgctgaggggattgcgcccaaacccctggatgcaaac

SEQ ID NO: 438116 - DNA, 75 bp, synthetic construct
  source 1..75: mol_type = other DNA
agttagctggttctccatccattattgatgaacgttctcgccagcatcttaacgatgtcgggctgacagcatggg

SEQ ID NO: 438117 - DNA, 75 bp, synthetic construct
  source 1..75: mol_type = other DNA
cgtttacagacattcaccgcctatgaacgcctgtcgaccgctctgaccgttgctcaggtctgcggcgtccagcgt

SEQ ID NO: 438118 - DNA, 75 bp, synthetic construct
  source 1..75: mol_type = other DNA
gcgctggtgatggttactcctgctctttggccttgcgacgctggcggtattcaacttctcgctttaatgctgctg

SEQ ID NO: 438119 - DNA, 75 bp, synthetic construct
  source 1..75: mol_type = other DNA
gcagtgctggaacactaaccgggcttctaaccaccaacgatagcagaagtatcgaggtagctatgagaaatcata

SEQ ID NO: 438120 - DNA, 75 bp, synthetic construct
  source 1..75: mol_type = other DNA
tttaaggaatttctcaagagcaaacgaacaaggtgcgaatctttctgattcatgttcatgcgctatatttttgcg

SEQ ID NO: 438121 - DNA, 75 bp, synthetic construct
  source 1..75: mol_type = other DNA
caaataataaagtagaaacaaagggatatgttgtcaatgtgactaaaaatggtcgcaacatataccacagaagtg

SEQ ID NO: 438122 - DNA, 75 bp, synthetic construct
  source 1..75: mol_type = other DNA
caatctaatgtctgatttcgttctggataaaacaaaggcgactgcagagggccaccagtgggaaagctacacact

SEQ ID NO: 438123 - DNA, 75 bp, synthetic construct
  source 1..75: mol_type = other DNA
atggtgattactctggttctttggccttgcgccgctggcgatattcaacttctcgttttaatgccgcagtaacaa

SEQ ID NO: 438124 - DNA, 75 bp, synthetic construct
  source 1..75: mol_type = other DNA
cattgtgacgcgctgttcctgcgcgagtcggtcagccttgatttgatgaaacgcagcgacattgacacctcgaaa

SEQ ID NO: 438125 - DNA, 75 bp, synthetic construct
  source 1..75: mol_type = other DNA
ccgatccttgaaggtggcatggactataagcagcttggcatgagcaatcaggatgctgagtggctggcctcccgg

SEQ ID NO: 438126 - DNA, 75 bp, synthetic construct
  source 1..75: mol_type = other DNA
catcaaattcctgttcgagaaagtgccggtcggtactcgcgtacagtttattgatgagccggtaaaagcgaccac

SEQ ID NO: 438127 - DNA, 75 bp, synthetic construct
  source 1..75: mol_type = other DNA
agaacgtaagaaagccggcccgacctggacaccgaccgccaaaatgcatgcggaataccgtgcagcaggcgaacc

SEQ ID NO: 438128 - DNA, 75 bp, synthetic construct
  source 1..75: mol_type = other DNA
aggcgaatatgtgtctgcgggtactgcggaatctctgccggcggtcatgaacgccgtgtcagttatcagtgaggc

SEQ ID NO: 438129 - DNA, 75 bp, synthetic construct
  source 1..75: mol_type = other DNA
atgaccattgatgagtttctggcgatggcagggattccaaataccggatcaggcgaatatgtgtctgcgggtact

SEQ ID NO: 438130 - DNA, 75 bp, synthetic construct
  source 1..75: mol_type = other DNA
gcttatgcggtgattcagtgggggcgtgatggttttccggtcgctttgcatccttacccgccgcagtcggtgaac

SEQ ID NO: 438131 - DNA, 75 bp, synthetic construct
  source 1..75: mol_type = other DNA
cgatggggtcaataacaaaacaaaatgtggttctggtagctgctctctgaattttgataatgatagttcatctaa

SEQ ID NO: 438132 - DNA, 75 bp, synthetic construct
  source 1..75: mol_type = other DNA
gtaatgcatggcctggagtttattatctcaatctaccgataaaagttgcttatgaagagaataaaggtaactatt

SEQ ID NO: 438133 - DNA, 75 bp, synthetic construct
  source 1..75: mol_type = other DNA
gaagacagttgtgactcctgcaaatactcataagtgggagaatacttatggatgcaggagcgttggagaaactta

SEQ ID NO: 438134 - DNA, 75 bp, synthetic construct
  source 1..75: mol_type = other DNA
gcaacgccaatacagggaaatatatcgctctcgatctctcgctaccactgggcaactggtttagcgcagggatga

SEQ ID NO: 438135 - DNA, 75 bp, synthetic construct
  source 1..75: mol_type = other DNA
tgcgtaacggcgggagcaacacatccagctatctgtcgctgaataacgttactgcgctgcgcgaacatcatgtgg

SEQ ID NO: 438136 - DNA, 75 bp, synthetic construct
  source 1..75: mol_type = other DNA
ggtgatattcaacaccgggctggaggacgacggtcagatcagcgccaaaatcaacggacggattttcccgcttaa

SEQ ID NO: 438137 - DNA, 75 bp, synthetic construct
  source 1..75: mol_type = other DNA
tggctggcacatcgaacacgggggcgggtgagtacgtatcatcggggacagcggaatcactccccgccgtcatga

SEQ ID NO: 438138 - DNA, 75 bp, synthetic construct
  source 1..75: mol_type = other DNA
gaacttcgaacagcaaatcaaggccgctttgctggtggcttctcccgtacctggtacccgttatctggttgagtt

SEQ ID NO: 438139 - DNA, 75 bp, synthetic construct
  source 1..75: mol_type = other DNA
cactttcctatcgaagcgccggacccgattgaagctattaagttcaggatggaacagcaggggctgacggtaaaa

SEQ ID NO: 438140 - DNA, 75 bp, synthetic construct
  source 1..75: mol_type = other DNA
gcgtgaaggtggtgacgagttcagccaggcatggaagcaggaagtgacaatcagcaagaacagtaagggcggtga

SEQ ID NO: 438141 - DNA, 75 bp, synthetic construct
  source 1..75: mol_type = other DNA
catgacattttggtcacaaacttatctgataatactcagatacggtgcaaaagaaactctgtcgtaattgttggt

SEQ ID NO: 438142 - DNA, 75 bp, synthetic construct
  source 1..75: mol_type = other DNA
tggaacgctacaagggggcgaaaaatgccggaaaaacgccaatccttgaagggggcatggattacaggcaactgg

SEQ ID NO: 438143 - DNA, 75 bp, synthetic construct
  source 1..75: mol_type = other DNA
aacgcataaaagagtctttcgaggaaattgttaaagcagacggtactcataacagagttatatcgtttatgtttt

SEQ ID NO: 438144 - DNA, 75 bp, synthetic construct
  source 1..75: mol_type = other DNA
tgattcagccgatttattacgcgccacccctaccgaacgttacgccacgtatgagaaagggattaagaacgggat

SEQ ID NO: 438145 - DNA, 75 bp, synthetic construct
  source 1..75: mol_type = other DNA
cagcaacagcacctacagcaatttcagcgaggcaagccgcgcatttctcaccatgacgatgcgcccgtggctggc

SEQ ID NO: 438146 - DNA, 75 bp, synthetic construct
  source 1..75: mol_type = other DNA
ctaagggtgtgacggtgggtaaattaagttatcagacaataaatgattatggggctaacactcccgttacacaag

SEQ ID NO: 438147 - DNA, 75 bp, synthetic construct
  source 1..75: mol_type = other DNA
ccgcagtcggtgaacgtggagcagacaggcgaacacaactggcgctattgcatcactgacgcctacaccggaaac

SEQ ID NO: 438148 - DNA, 75 bp, synthetic construct
  source 1..75: mol_type = other DNA
atgccatgctacctgtacctggtacgcaatgagaaggggaaggaggcccgcgagtggcttgattctcatccggtc

SEQ ID NO: 438149 - DNA, 75 bp, synthetic construct
  source 1..75: mol_type = other DNA
taattcatgccagacaccttaccagtttaaacgcacaatgatgcgtcactgcctgctgaacggtaacgcctatgc

SEQ ID NO: 438150 - DNA, 75 bp, synthetic construct
  source 1..75: mol_type = other DNA
cgttagcggtcgaacgttttgacaggcgttggaatgctgagcgaacggttttacttcgcttgccacaggaggata

SEQ ID NO: 438151 - DNA, 75 bp, synthetic construct
  source 1..75: mol_type = other DNA
aggcaatgactggtgcattccgaaaggaataacgccgacgacgcacatcattaaattaccgattggcgaaatcag

SEQ ID NO: 438152 - DNA, 75 bp, synthetic construct
  source 1..75: mol_type = other DNA
gaagacttcattaccgacagattttccggagaacgtggtgacggcagttgaaaccaatgtgttgaggttgcaccg

SEQ ID NO: 438153 - DNA, 75 bp, synthetic construct
  source 1..75: mol_type = other DNA
ctgggttatcagattattaaaacggcaatgggtgaattcagacattttagtcagcgtgcgtcgctgaaggatgat

SEQ ID NO: 438154 - DNA, 75 bp, synthetic construct
  source 1..75: mol_type = other DNA
cggagcgggggatcatttcaccgctgaagttcattaccattgctgaagatatcgggtttatcaatgagctgggtt

SEQ ID NO: 438155 - DNA, 75 bp, synthetic construct
  source 1..75: mol_type = other DNA
ttggagtcattacctgctgaagatatcgggtttatcaatgagctgggttatcagattattaaaacggcaatgggt

SEQ ID NO: 438156 - DNA, 75 bp, synthetic construct
  source 1..75: mol_type = other DNA
gggggaatgttgcagcatcggcggcacgcacatcgtcgcgtggcggcggcagatctggcgctgttcacccgccaa

SEQ ID NO: 438157 - DNA, 75 bp, synthetic construct
  source 1..75: mol_type = other DNA
aatgcttatctctctgagcaatacgttactgtcaggtggcctttactggctggccggatttctgcttctttcttt

SEQ ID NO: 438158 - DNA, 75 bp, synthetic construct
  source 1..75: mol_type = other DNA
cattacgtgcatctctctgctgatgaagcgacagctcgcaaagtaggagccagacatggatcgccggttatctta

SEQ ID NO: 438159 - DNA, 75 bp, synthetic construct
  source 1..75: mol_type = other DNA
ctccgcacgtctcggtattgccacgatggcgatatgcccaattatggtttcctttagcgtggcagcgatcaattc

SEQ ID NO: 438160 - DNA, 75 bp, synthetic construct
  source 1..75: mol_type = other DNA
aatagggcgagacagcgttggtgccgtgacgttaatacccgaagatgaaaccgtaacgcatccgataatggcatg

SEQ ID NO: 438161 - DNA, 75 bp, synthetic construct
  source 1..75: mol_type = other DNA
gagcctgcgctggtggtgatgatggcgggcgtggtgctgtttattgtcatcgccatcctggagccgatgctgcaa

SEQ ID NO: 438162 - DNA, 75 bp, synthetic construct
  source 1..75: mol_type = other DNA
atgtctggaaatataggggcaaatccaatcgagcgaattaatgaacatttttatctcaatattgaacaactgcgt

SEQ ID NO: 438163 - DNA, 75 bp, synthetic construct
  source 1..75: mol_type = other DNA
tttcaggcgccagcaaaggtgctgaaattaccggaagtgcaaattcatgacatcgttagtcactctgcgagaatg

SEQ ID NO: 438164 - DNA, 75 bp, synthetic construct
  source 1..75: mol_type = other DNA
tttcaggcgccagcaaaggtgctgaaattaccggaagtgcaaattcatgaaatcgttagtcactatgcgagaatg

SEQ ID NO: 438165 - DNA, 75 bp, synthetic construct
  source 1..75: mol_type = other DNA
attttcaggcggcagcaaaggtgctgaaattcccggaagtgcaaattcaggaaatcatgagtaactgtgcgagac

SEQ ID NO: 438166 - DNA, 75 bp, synthetic construct
  source 1..75: mol_type = other DNA
tttcaggcgccagcaaaggtgctgaaattaccggaagtgcacattcatgaaatcgttagtcactctgcgagaatg

SEQ ID NO: 438167 - DNA, 75 bp, synthetic construct
  source 1..75: mol_type = other DNA
tttcaggcgccagcaaaggtgctgaaattaccggaagtgcatattcatgaaatcgttagtcactttgcgagaatg

SEQ ID NO: 438168 - DNA, 75 bp, synthetic construct
  source 1..75: mol_type = other DNA
tttcaggcgccagcaaaggtgctgaaattaccggaagtgcaaattcatgagatcgttagtcactgtgcgagaatg

SEQ ID NO: 438169 - DNA, 75 bp, synthetic construct
  source 1..75: mol_type = other DNA
attttcaggcgtcagcaaaggtgctgaaattcccggaagtgcaaattcaggaaatcattagtaactgtgcgagac

SEQ ID NO: 438170 - DNA, 75 bp, synthetic construct
  source 1..75: mol_type = other DNA
attttcaggcgacagcaaaggtgctgaaattcccggaagtgcaaattcaggaaatcatcagtaactgtgcgagaa

SEQ ID NO: 438171 - DNA, 75 bp, synthetic construct
  source 1..75: mol_type = other DNA
attttcaggcgacagcaaaggtgctgaaattcccggaagtgcaaattcaggaaatcataagtaactgtgcgagac

SEQ ID NO: 438172 - DNA, 75 bp, synthetic construct
  source 1..75: mol_type = other DNA
attttcaggcggcagcaaaggtgctgaaattcccggaagtgcaaattcaggaaatcatcagtaactgtgcgagag

SEQ ID NO: 438173 - DNA, 75 bp, synthetic construct
  source 1..75: mol_type = other DNA
attttcaggcgccagcaaaggtgctgaaattcccggaagtgcaaattcaggaaatcatcagtaactgtgcgagac

SEQ ID NO: 438174 - DNA, 75 bp, synthetic construct
  source 1..75: mol_type = other DNA
attttcaggcgtcagcaaaggtgctgaaattcccggaagtgcaaattcaggaaatcatcagtaactgtgcgagat

SEQ ID NO: 438175 - DNA, 75 bp, synthetic construct
  source 1..75: mol_type = other DNA
ggctgattgcaggggagcgtcattacgtacatctctctgctgatgaagcaacggcacgcaaagtgggagcaagac

SEQ ID NO: 438176 - DNA, 75 bp, synthetic construct
  source 1..75: mol_type = other DNA
aagcgctcggtctgccgcagagcgatgtgttccgtcaggcgaaagatgtcgctgaaagcgatcgtggcttctcgc

SEQ ID NO: 438177 - DNA, 75 bp, synthetic construct
  source 1..75: mol_type = other DNA
cgtggcctgaccaccaaagcgcgtgaagcactcggcctgccgcacagcgatgtgttccgtcaggcgaaagatgtc

SEQ ID NO: 438178 - DNA, 75 bp, synthetic construct
  source 1..75: mol_type = other DNA
tggtccgatcaagcaaatcgaagctctgcaacagaaaggtttcccgctggcatatgtcggtgacgttgtgggtac

SEQ ID NO: 438179 - DNA, 75 bp, synthetic construct
  source 1..75: mol_type = other DNA
taaccacgaaaccaacgaactgctggcgaccttcgaactgaaaaccgacgtgctgattgatgaagtgcgtgctgg

SEQ ID NO: 438180 - DNA, 75 bp, synthetic construct
  source 1..75: mol_type = other DNA
gccaaatccccgctgctgactccggaaaaagccattgaactgctgggcactatgcagggtggttacaacattcat

SEQ ID NO: 438181 - DNA, 75 bp, synthetic construct
  source 1..75: mol_type = other DNA
cgtttcccgatcggtatctccttcccggcaggttctggtctggtcgcgtttgctgcggcgactggcgtcatgccg

SEQ ID NO: 438182 - DNA, 75 bp, synthetic construct
  source 1..75: mol_type = other DNA
ttcgataacttctatgacgtagaagagaaagccaaagcaggcaacgaatacgcgaagcaggttatgcagtcctgg

SEQ ID NO: 438183 - DNA, 75 bp, synthetic construct
  source 1..75: mol_type = other DNA
aagatcgacgaagtatttatcggttcctgcatgaccaacatcggtcacttccgtgctgcgggtaaactgctggat

SEQ ID NO: 438184 - DNA, 75 bp, synthetic construct
  source 1..75: mol_type = other DNA
ctgcaacagaaaggtttcccgctggcgtacgtcggtgacgttgtgggtacgggttcttcgcgtaaatctgccact

SEQ ID NO: 438185 - DNA, 75 bp, synthetic construct
  source 1..75: mol_type = other DNA
ttgagccagatcagcctggtgttgttggcccgatcaaacagattgaagctctgcaacagaaaggtttcccgctgg

SEQ ID NO: 438186 - DNA, 75 bp, synthetic construct
  source 1..75: mol_type = other DNA
tggctggcgaatcctgagctgctggaagccgatgctgatgcagaatacgcagcagtaatcgacatcgatctggct

SEQ ID NO: 438187 - DNA, 75 bp, synthetic construct
  source 1..75: mol_type = other DNA
tttacccgtacaaaggtgaagtgcgtaaccacgaaaccggcgaactgctggcgaccttcgaactgaaaaccgacg

SEQ ID NO: 438188 - DNA, 75 bp, synthetic construct
  source 1..75: mol_type = other DNA
ctggccacagataatgcaggaagttcgctcccccaaaaatcctcccaataatctgtacattggtgaagacaggca

SEQ ID NO: 438189 - DNA, 75 bp, synthetic construct
  source 1..75: mol_type = other DNA
aggccacctggtcagcggaaggcgatgtctcttccagtgacgatctctatacctgggttggtcaactggcagact

SEQ ID NO: 438190 - DNA, 75 bp, synthetic construct
  source 1..75: mol_type = other DNA
cggcgctgcttatgttgatgactggtaatgcctgggcagatggcgaaccgccaactgaaaatatcttaaaagatc

SEQ ID NO: 438191 - DNA, 75 bp, synthetic construct
  source 1..75: mol_type = other DNA
agaaagcggcagatgcttattggggaaaaaatgcaaatggcaaacaaatgacccgggaagatgcatttaaaaaga

SEQ ID NO: 438192 - DNA, 75 bp, synthetic construct
  source 1..75: mol_type = other DNA
ttcatatgaaacaggcattaccgctctctacccgcatgttgatgggcatgagcgagtgggtacatacgtttagcc

SEQ ID NO: 438193 - DNA, 75 bp, synthetic construct
  source 1..75: mol_type = other DNA
agacctggacgaaagataaaccggtgaaattctcggcgatgttaaccagtaaaggaacgcccgcgtctggctggt

SEQ ID NO: 438194 - DNA, 75 bp, synthetic construct
  source 1..75: mol_type = other DNA
tgacaaagaggtttatcaaccggcgattgcggcatgtcataaacagagtgaagagtgttatgaagtgccgattca

SEQ ID NO: 438195 - DNA, 75 bp, synthetic construct
  source 1..75: mol_type = other DNA
gctgactgaggtctgccagacttggggcccgtggctgctgctagccgcagccacgggctggatagcggggcgtat

SEQ ID NO: 438196 - DNA, 75 bp, synthetic construct
  source 1..75: mol_type = other DNA
tgatgactgtgaaaacgggcagtcgcttacagcacaactgcgactgggaccggcagacattctggagtcagatga

SEQ ID NO: 438197 - DNA, 75 bp, synthetic construct
  source 1..75: mol_type = other DNA
tccattagcactcactgcagataccattaaaacaggtaacagcgccattcctgttgcacaattagtacaattagg

SEQ ID NO: 438198 - DNA, 75 bp, synthetic construct
  source 1..75: mol_type = other DNA
gtgttatgaagtgccgattcagcagaaacgagatttcgatatcaacgaacaacggcgacagacttttctgcaatc

SEQ ID NO: 438199 - DNA, 75 bp, synthetic construct
  source 1..75: mol_type = other DNA
tgaagattgacgatatcaaccaggcctgcgatcgctggaaaaaagatactgacgatttacggcgtaatggagtga

SEQ ID NO: 438200 - DNA, 75 bp, synthetic construct
  source 1..75: mol_type = other DNA
gcgcggtctgaataccgcacgttatgcccgcacgctgagcattcttaatgccagtgcggtaccgctgctccaggc

SEQ ID NO: 438201 - DNA, 75 bp, synthetic construct
  source 1..75: mol_type = other DNA
gaagctcggagaacagaccgcgcgacagagacagattattgacctgctcgacaacgaagccggactcacagaaca

SEQ ID NO: 438202 - DNA, 75 bp, synthetic construct
  source 1..75: mol_type = other DNA
gccaaccaaaaacggatggaggggaaaacacaacgacgggaacgcaatcaccgcctgtttcttgcggcggggtta

SEQ ID NO: 438203 - DNA, 75 bp, synthetic construct
  source 1..75: mol_type = other DNA
ctggagagctttctgaatgaagactgtcttgtctggtacgatatcccggtgggtcgaaaaaacagacatccagac

SEQ ID NO: 438204 - DNA, 75 bp, synthetic construct
  source 1..75: mol_type = other DNA
gtagacacaaaaacaggcgagctatgctataaaaaagacaggatattacaggcacttaaggaaattaagtacgat

SEQ ID NO: 438205 - DNA, 75 bp, synthetic construct
  source 1..75: mol_type = other DNA
aaataaggctatgattaatcgacgtaatttatcaggttttgttcatgcgctaaaagcaggtgaggccgtttggtt

SEQ ID NO: 438206 - DNA, 75 bp, synthetic construct
  source 1..75: mol_type = other DNA
acaaaaacaggcgagctatgctataaaaaagacaggatattacaggcacttaaggaaattaagtacgatctggag

SEQ ID NO: 438207 - DNA, 75 bp, synthetic construct
  source 1..75: mol_type = other DNA
ttgcctttacttagctgaaaccacatccggaaagattctggtgctgtgttacaacattacgttagccagctatct

SEQ ID NO: 438208 - DNA, 75 bp, synthetic construct
  source 1..75: mol_type = other DNA
gacgcaaggatgtggtgcatttactgacgtaccagagcagtaaggggctggagttcccgtatgtggcagttatca

SEQ ID NO: 438209 - DNA, 75 bp, synthetic construct
  source 1..75: mol_type = other DNA
tggcaggtaaatttaattgatgacgactccggcaatatattactgacctgtgagactgatcaaggctgtgtgatg

SEQ ID NO: 438210 - DNA, 75 bp, synthetic construct
  source 1..75: mol_type = other DNA
tcccgtgagtattttgagaagcatcagaaccgtgaaataccgtttgttcagccacaggcgggcggtgaagagggc

SEQ ID NO: 438211 - DNA, 75 bp, synthetic construct
  source 1..75: mol_type = other DNA
gtcacgggttacggtatctcattttcacagctggtgtgcctcaatggtaaaacgccacggtattaaggtgacggc

SEQ ID NO: 438212 - DNA, 75 bp, synthetic construct
  source 1..75: mol_type = other DNA
tcaaaaacatcagaatcgtgaaataccactccttcagccacaggcgggcggtgaagagggcacagagccgaaaat

SEQ ID NO: 438213 - DNA, 75 bp, synthetic construct
  source 1..75: mol_type = other DNA
atgtacaaaccaactgtgcgcatcgtggaagttaatgtgccacgcgccgcaggcattcgcatcaaaggagagtga

SEQ ID NO: 438214 - DNA, 75 bp, synthetic construct
  source 1..75: mol_type = other DNA
attgaacataggaataaagataaaactgacaagatttataagaataaggttactgaggctagtattttatatcct

SEQ ID NO: 438215 - DNA, 75 bp, synthetic construct
  source 1..75: mol_type = other DNA
tgacagcaattgagatgtacaaaccaactgtgcgcatcgtggaagttaatgtgccacgtgccgcaggcattcgca

SEQ ID NO: 438216 - DNA, 75 bp, synthetic construct
  source 1..75: mol_type = other DNA
agaaaggtctggaagacttctactacagcgtcggtaaatatagcgccagcgttaaagctgtcgtgaccccgctgc

SEQ ID NO: 438217 - DNA, 75 bp, synthetic construct
  source 1..75: mol_type = other DNA
ttgaggtcatgaaaattgctggagatgcccagctttctaccccatgcactgacagcatcataaacagcattgcaa

SEQ ID NO: 438218 - DNA, 75 bp, synthetic construct
  source 1..75: mol_type = other DNA
gcagaactggaggagcgggaaatactgctcccggaacgtagcagcatgcttcatcgaacagattttcacgaggat

SEQ ID NO: 438219 - DNA, 75 bp, synthetic construct
  source 1..75: mol_type = other DNA
aaatcggatgatgctgtaggcggtaacgctatggcggttgccagcctcgagttcatcaccccgacgccgttcatt

SEQ ID NO: 438220 - DNA, 75 bp, synthetic construct
  source 1..75: mol_type = other DNA
aacccggatgataataatagcgactatgaagcctgtaccgacgctaatggttgtaaatcagacgacgccgtaggt

SEQ ID NO: 438221 - DNA, 75 bp, synthetic construct
  source 1..75: mol_type = other DNA
ttatgtgccgatcgatgacgatcacaaatgggttgttctgggtcgtacccgctggggttatggtgatggtttagg

SEQ ID NO: 438222 - DNA, 75 bp, synthetic construct
  source 1..75: mol_type = other DNA
atggtacagacgtgacgttgggcttcccgatcaacgaatataactcgctgcgtgcaggtctgggttatgtacata

SEQ ID NO: 438223 - DNA, 75 bp, synthetic construct
  source 1..75: mol_type = other DNA
catcgaaagatgccgtcctgcgccgtgaaatgcgccagatggaaggtgcctggttaggcagcgatctggttgatc

SEQ ID NO: 438224 - DNA, 75 bp, synthetic construct
  source 1..75: mol_type = other DNA
aaaagcttctcggtcgctatggttatgcctatccgcgcgtacagtcgatgcctgaaattaacgatgccgacaaaa

SEQ ID NO: 438225 - DNA, 75 bp, synthetic construct
  source 1..75: mol_type = other DNA
cctctccaggagcgagtggatttattacgacatgccagttttttattggattatccagcggtttatcgtggctgg

SEQ ID NO: 438226 - DNA, 75 bp, synthetic construct
  source 1..75: mol_type = other DNA
gtgttaccgaggagcggatgactgccggggaaaagcgggttgcatcccgtcttgaggcatttatgagtaatgagt

SEQ ID NO: 438227 - DNA, 75 bp, synthetic construct
  source 1..75: mol_type = other DNA
attacccgtcagcaactgaagacactggcagggaatgatgagaatgcggtggaaaaaatttttccttcagcacag

SEQ ID NO: 438228 - DNA, 75 bp, synthetic construct
  source 1..75: mol_type = other DNA
ggggtgttgcagcctccatcaacggaaaagattattacctctttaccggtgaatacggtaaaaaaggcttcccag

SEQ ID NO: 438229 - DNA, 75 bp, synthetic construct
  source 1..75: mol_type = other DNA
aaaacatcagaaccgtgaaataccgctcgttcagccacaggcgggcggcgaagagggcacagagccggaaatcct

SEQ ID NO: 438230 - DNA, 75 bp, synthetic construct
  source 1..75: mol_type = other DNA
atatggctgttttgtgtcctgcagagttttcagtgaaacatctgaaagaggtcatgacacaacgcgggatacctt

SEQ ID NO: 438231 - DNA, 75 bp, synthetic construct
  source 1..75: mol_type = other DNA
tcagcaactgaagacactggcagggaatgatgagaatgcggtggaaaaaatttttccttcagcacagacaatctg

SEQ ID NO: 438232 - DNA, 75 bp, synthetic construct
  source 1..75: mol_type = other DNA
tgcgctgatgctgttattcagcgccctgttgtactggcgcggtgaacaggtagcgcaaggtattcgccattttgc

SEQ ID NO: 438233 - DNA, 75 bp, synthetic construct
  source 1..75: mol_type = other DNA
cgcgtgggtggaagaggtcccaccgccgacggatcaaccggaagaaattctcgaagaacttggcgaaatccagaa

SEQ ID NO: 438234 - DNA, 75 bp, synthetic construct
  source 1..75: mol_type = other DNA
gaacggtattgttagtttggagcggtgtggttggcacgctcgataacgtcatccgcccaatgttaattcgcatgg

SEQ ID NO: 438235 - DNA, 75 bp, synthetic construct
  source 1..75: mol_type = other DNA
atgatgaaagtttggtacgtgagggagctaagtatgtttttgagcatacaaaagcaactcaggcctcatttggat

SEQ ID NO: 438236 - DNA, 75 bp, synthetic construct
  source 1..75: mol_type = other DNA
tgccggtactgattccggcgattatctggctctactggaccggtgataccacctggggaacggtattgttagtgt

SEQ ID NO: 438237 - DNA, 75 bp, synthetic construct
  source 1..75: mol_type = other DNA
atgacgctgttattagtgatggtgtttatcatccctattgctttgctggttaacagtatcgtcgacggcagcggc

SEQ ID NO: 438238 - DNA, 75 bp, synthetic construct
  source 1..75: mol_type = other DNA
gtgatactggttgtctggagatccagggggccagtctatgatgactgccttgtctggtacgatattccggtggga

SEQ ID NO: 438239 - DNA, 75 bp, synthetic construct
  source 1..75: mol_type = other DNA
tacgacatgccagtttttttgtcggtttagccagtggattgtcatggctggcatgggcctgccgcatccctgtgg

SEQ ID NO: 438240 - DNA, 75 bp, synthetic construct
  source 1..75: mol_type = other DNA
tgccctgctgctaccgggcggccattcaccggattatctgcgtggcgacaaccgttttgtcacctttacccgtga

SEQ ID NO: 438241 - DNA, 75 bp, synthetic construct
  source 1..75: mol_type = other DNA
agcgtgaccatcgataaatccatcgatgaagtgacgccagcggagtttgatgctctgctgctaccgggcggccat

SEQ ID NO: 438242 - DNA, 75 bp, synthetic construct
  source 1..75: mol_type = other DNA
tgtgacacccaggctggttgggtgacaagcacaaaaaaatactatgtcaaattcagaatacaggcatttaaaaag

SEQ ID NO: 438243 - DNA, 75 bp, synthetic construct
  source 1..75: mol_type = other DNA
taccaacaataaaagcagagaatggcacctattatgattttaacaatggtgcaaggatattattcccgaaaggag

SEQ ID NO: 438244 - DNA, 75 bp, synthetic construct
  source 1..75: mol_type = other DNA
agagtttttaattcacatggctgtaatggatgctgggataatacaaattacaacttcgatcatactgactttctc

SEQ ID NO: 438245 - DNA, 75 bp, synthetic construct
  source 1..75: mol_type = other DNA
gcgttgtgcttctgaacgtgatgaagccagacaggttgcagactggctggagaagcgccatgccctgtgcggtca

SEQ ID NO: 438246 - DNA, 75 bp, synthetic construct
  source 1..75: mol_type = other DNA
gccagacaagttgcagactggctggagaagcgccatgccctgtgtggtcactggagtgatatggctgtgctgtgt

SEQ ID NO: 438247 - DNA, 75 bp, synthetic construct
  source 1..75: mol_type = other DNA
ggtaaaacgccacggtattaaggtgacggccgacagaaaagaatatcctgataaatgcttcagtgcactggaaga

SEQ ID NO: 438248 - DNA, 75 bp, synthetic construct
  source 1..75: mol_type = other DNA
aaaagggagatttgctatttagtcgcgcaaataccagagagttagttgctgcgatatgcatggttcatcaggatt

SEQ ID NO: 438249 - DNA, 75 bp, synthetic construct
  source 1..75: mol_type = other DNA
aaataaatttgaagaaactgagattatcttcccagagatcaatgttcaaaaatatttttgcaatactttcagaaa

SEQ ID NO: 438250 - DNA, 75 bp, synthetic construct
  source 1..75: mol_type = other DNA
cagtcgctggctggctctaattgcccgtctatttgataattcatcccgttcattactcctgatgtacgatgatgc

SEQ ID NO: 438251 - DNA, 75 bp, synthetic construct
  source 1..75: mol_type = other DNA
tgcaaaatccagactcaacgagcagcgcgagtattacgaaggtgttatctcggatggggaaggggagtatattag

SEQ ID NO: 438252 - DNA, 75 bp, synthetic construct
  source 1..75: mol_type = other DNA
ttaccaaacggtaatggcatacaaagtttctgaagtcatcgctgcaatccgcgccgcaggcattcgcatcaaagg

SEQ ID NO: 438253 - DNA, 75 bp, synthetic construct
  source 1..75: mol_type = other DNA
gcaggcgcaatcgtccaaatggtgcgaagccttccataaagccgtttccgttggcgctcggtatgaggagcggat

SEQ ID NO: 438254 - DNA, 75 bp, synthetic construct
  source 1..75: mol_type = other DNA
cattgttctatcaagtcgccagctacagtcagcacccaacttacagcctggtgtgcattctggcggttatcctgt

SEQ ID NO: 438255 - DNA, 75 bp, synthetic construct
  source 1..75: mol_type = other DNA
agctaacgagaatgtggaactggtgcattacgcacagccgctgctcaacgaagcagattcactggcaaaagtgat

SEQ ID NO: 438256 - DNA, 75 bp, synthetic construct
  source 1..75: mol_type = other DNA
cgcgagtattacgaaggtgttatctcggatggggaaggggagtatattagctatttagaatcccacgatctcttg

SEQ ID NO: 438257 - DNA, 75 bp, synthetic construct
  source 1..75: mol_type = other DNA
cctcaaactaatgaatatggtctgattagcaatgtcacacactggatgccactaccagaaccgccgcaggaggca

SEQ ID NO: 438258 - DNA, 75 bp, synthetic construct
  source 1..75: mol_type = other DNA
attgcggaatgtcatattaactgcctgattgaaacagatgctcaggcttatgcaaacgctgaattcatagcagag

SEQ ID NO: 438259 - DNA, 75 bp, synthetic construct
  source 1..75: mol_type = other DNA
tacgtgaacgtttttcaccgaaaccagcgcctaaatgctctgtttgtggcgaggaaatgtcaatacagcgcatat

SEQ ID NO: 438260 - DNA, 75 bp, synthetic construct
  source 1..75: mol_type = other DNA
gagttaagcgaattaacgtggtgcagccacaatcagcaccatgatgacacgctatatgttcgagctgaccttgtg

SEQ ID NO: 438261 - DNA, 75 bp, synthetic construct
  source 1..75: mol_type = other DNA
caagcgcatagcagaactggaagcacgggaaataaaaccagccaaaggcgaagttcttgtcgttgtatctggttt

SEQ ID NO: 438262 - DNA, 75 bp, synthetic construct
  source 1..75: mol_type = other DNA
atcgcctgtcactacattttgagtggcgacgccgatctgctgattaacgtggtggatgcgtctaaccttgagcgt

SEQ ID NO: 438263 - DNA, 75 bp, synthetic construct
  source 1..75: mol_type = other DNA
caggtcgggctggaaaattatgcccacagctacccggatgaactctctggcgggatgcgtcaacgtgtgggatta

SEQ ID NO: 438264 - DNA, 75 bp, synthetic construct
  source 1..75: mol_type = other DNA
tcaaacgccgcgaccaggagaacgaggatattgcgctaacggtagggaagttgcgcgttgagcttgaggcagaaa

SEQ ID NO: 438265 - DNA, 75 bp, synthetic construct
  source 1..75: mol_type = other DNA
aatactgcgttcggtatggaattggccggaattaatgccgaagaacgccgggaaaaagcccttgatgcactgcgt

SEQ ID NO: 438266 - DNA, 75 bp, synthetic construct
  source 1..75: mol_type = other DNA
cggcttcggcccgcgttcggcgctgaaattattgcaggatgaagaccgcgaatatggttacgtcatcgaacgcgg

SEQ ID NO: 438267 - DNA, 75 bp, synthetic construct
  source 1..75: mol_type = other DNA
ttgtctttatttcccacgatctcgatgaagctatgcgtattggcgaccgaattgccattatgcaaaatggtgaag

SEQ ID NO: 438268 - DNA, 75 bp, synthetic construct
  source 1..75: mol_type = other DNA
gttgtttctggttttactggttgcggaaaaagcgccattgccggggaaatagaaatcgcgatgaaggctattggt

SEQ ID NO: 438269 - DNA, 75 bp, synthetic construct
  source 1..75: mol_type = other DNA
caaccctgaagtagtgcaggcgttgctggatgaacgggaaagaaaccagcaatacatcaaacgccgtgaccagga

SEQ ID NO: 438270 - DNA, 75 bp, synthetic construct
  source 1..75: mol_type = other DNA
taagcgggaaaatcgtcgacaacatcaacgactcagcgctggcttctgtcagccgtgtgatcaccccggtcttca

SEQ ID NO: 438271 - DNA, 75 bp, synthetic construct
  source 1..75: mol_type = other DNA
atgctacatcgtagggcatacatcgggcaatcagcatgggaatataacaggagttttttttgtcaaaaatggaaa

SEQ ID NO: 438272 - DNA, 75 bp, synthetic construct
  source 1..75: mol_type = other DNA
agcgattgagatgtacaaaccaactgtgcgcatcgtggaagttaatgtgccacgcgccgctggcattcgcatcaa

SEQ ID NO: 438273 - DNA, 75 bp, synthetic construct
  source 1..75: mol_type = other DNA
tctcggatgggggtaagcgtattgctgaactggaaaaacaatgcgccgaatgggagcgaaaagcattaagcaact

SEQ ID NO: 438274 - DNA, 75 bp, synthetic construct
  source 1..75: mol_type = other DNA
ttgtgcttccgcaatgctatagcatgttgcatcgcgtcgattttgacgagccttaccacactgaaatggtttaca

SEQ ID NO: 438275 - DNA, 75 bp, synthetic construct
  source 1..75: mol_type = other DNA
ctacttccaactggtcgaggagtgcgaaattcctgctggcggttctctggtcgagtacgttgacgatatgcgcga

SEQ ID NO: 438276 - DNA, 75 bp, synthetic construct
  source 1..75: mol_type = other DNA
aaagcagtgcgcttctatgaacaggttaagcgtgaaaatccgccagtcgaaaccggagcatggaaagacgctgtt

SEQ ID NO: 438277 - DNA, 75 bp, synthetic construct
  source 1..75: mol_type = other DNA
ggactaatggcgatgcagaaaagcgcatgactggcgctgactggctgactgcgattgagatgtacaaaccaactg

SEQ ID NO: 438278 - DNA, 75 bp, synthetic construct
  source 1..75: mol_type = other DNA
atgacaaacaaaattgactatcaaaaacttcgtgaaatcgctgaaaaaacaaaaattgctggtgaagcacctgta

SEQ ID NO: 438279 - DNA, 75 bp, synthetic construct
  source 1..75: mol_type = other DNA
tggaatgccgacgctccagaaatggaaaccagagcttacgcggttccgacaaaatatggtcgggtggagacgcgg

SEQ ID NO: 438280 - DNA, 75 bp, synthetic construct
  source 1..75: mol_type = other DNA
gatacccacgatcgcattatgcgcctactggcaaagtacacccagtgtacggtgattggtattgattacaccctt

SEQ ID NO: 438281 - DNA, 75 bp, synthetic construct
  source 1..75: mol_type = other DNA
tgctggaactgatatctgccgaaatgaaggccgttgttaatacgattcagccagatttaccgccctggcccgcaa

SEQ ID NO: 438282 - DNA, 75 bp, synthetic construct
  source 1..75: mol_type = other DNA
gaggtcatgagaattgctggagatgcccagctttctaccccatgcactgacagcatcataaacagcattgcaaca

SEQ ID NO: 438283 - DNA, 75 bp, synthetic construct
  source 1..75: mol_type = other DNA
ttgtggctgcgtgataagcagatcgattgcggtaagattgctggtgttttactgtggtatggactttatgggttg

SEQ ID NO: 438284 - DNA, 75 bp, synthetic construct
  source 1..75: mol_type = other DNA
ttgccacttccaccagcaggcagaggattatcaaatcaatatgtcacgcattggttttgctggtgattctgcagg

SEQ ID NO: 438285 - DNA, 75 bp, synthetic construct
  source 1..75: mol_type = other DNA
gatataaactttaagctttttgatgtgctaggtcgtttatccgtcaagggacactggattttagatttgttgtct

SEQ ID NO: 438286 - DNA, 75 bp, synthetic construct
  source 1..75: mol_type = other DNA
gattttcacgatgattaccaaacggtaatggcatacaaagtttctgaagtcatcgctgcaatccgcgccgcaggc

SEQ ID NO: 438287 - DNA, 75 bp, synthetic construct
  source 1..75: mol_type = other DNA
tattacgagggagtaatcgcggatggaagtaagcgcatagcagaactggaagcacgggaaataaaaccagccaaa

SEQ ID NO: 438288 - DNA, 75 bp, synthetic construct
  source 1..75: mol_type = other DNA
caacgcgagtattacgaaggtgttatctcggatgggagtaagcgtattgctgaactggaagcacgggaaataaag

SEQ ID NO: 438289 - DNA, 75 bp, synthetic construct
  source 1..75: mol_type = other DNA
aattgagatgtacaaaccaactgtgcgcattgtggaagttaatgtgccacgcgtcgctggcgttcgcatcaaagg

SEQ ID NO: 438290 - DNA, 75 bp, synthetic construct
  source 1..75: mol_type = other DNA
agttcttgtcgttgtatctggttttactggttgcggaaaaagcgccattgccggggaaatagaaatcgcgatgaa

SEQ ID NO: 438291 - DNA, 75 bp, synthetic construct
  source 1..75: mol_type = other DNA
ttcaaatttctgaccggaccagaaaccgtgctggcactactggatgaacgggaaagaaacctgcaatacatcaaa

SEQ ID NO: 438292 - DNA, 75 bp, synthetic construct
  source 1..75: mol_type = other DNA
tgcgtgaggcggcggagaaggctacgaaaggtaagtgggctgttgaattcgacgatgagatttactccactgacg

SEQ ID NO: 438293 - DNA, 75 bp, synthetic construct
  source 1..75: mol_type = other DNA
tcgaaagaatgcattgacgtaattcgtgaagaagtaaagcgatggaatgattcccgtgccgctggcattcgcatc

SEQ ID NO: 438294 - DNA, 75 bp, synthetic construct
  source 1..75: mol_type = other DNA
agatgtacaaaccaacagtgcgcatcgtggaagttaatgtgccacgcgcccctggcattcgcatcaaaggagagt

SEQ ID NO: 438295 - DNA, 75 bp, synthetic construct
  source 1..75: mol_type = other DNA
cattgcagaactggaagcacgggaaataaaaccagccaaaggcgaagttcttgtcgttgtttctggttttactgg

SEQ ID NO: 438296 - DNA, 75 bp, synthetic construct
  source 1..75: mol_type = other DNA
atccggctaccgtcttggcgctgctggatgaacgggaaaggaaccagcaatacatcaaatcccgcgatcaggaga

SEQ ID NO: 438297 - DNA, 75 bp, synthetic construct
  source 1..75: mol_type = other DNA
tctcatgatgtaattttgaaaaaatcaggaatacctgcgtttatattaaatttttttcttataaaaatatcatta

SEQ ID NO: 438298 - DNA, 75 bp, synthetic construct
  source 1..75: mol_type = other DNA
aactggcgactgcagctacaatattaaccactcctgattgggaaatatcaaaagatgattgcgaagagtcatcct

SEQ ID NO: 438299 - DNA, 75 bp, synthetic construct
  source 1..75: mol_type = other DNA
tattagagtctattattgatggtagcattcatcctacaaatgaatgttataaacaattctcaataatattcgata

SEQ ID NO: 438300 - DNA, 75 bp, synthetic construct
  source 1..75: mol_type = other DNA
cgaaccagagaaagcagacaagaagacgatgaaagacttagagtcaaaatcggttgaagacgaagatattattcg

SEQ ID NO: 438301 - DNA, 75 bp, synthetic construct
  source 1..75: mol_type = other DNA
cgaaccagagaaagcagacaagaagacgattaaagactgagagtcaaaatcggttgaagacgaagatattattcg

SEQ ID NO: 438302 - DNA, 75 bp, synthetic construct
  source 1..75: mol_type = other DNA
cgaaccagagaaagcagacaataagacgatcaaagactcagagtcaaaatcggttgaagacgaagatattattcg

SEQ ID NO: 438303 - DNA, 75 bp, synthetic construct
  source 1..75: mol_type = other DNA
tggaaaaatatccagaccctttctgaaacgtcgggaaggaattgcgattagaaatatcgaactctgctttcccga

SEQ ID NO: 438304 - DNA, 75 bp, synthetic construct
  source 1..75: mol_type = other DNA
aggatttacatgaaaaatacctcctggaattaatggatatcattgataaggggtttggcggtaatgactccaact

SEQ ID NO: 438305 - DNA, 75 bp, synthetic construct
  source 1..75: mol_type = other DNA
ttggagggtgagaccgcgaaatctgagcgggtgaacgaccggaaaatcacggcagacgggaaggagggaccgggt

SEQ ID NO: 438306 - DNA, 75 bp, synthetic construct
  source 1..75: mol_type = other DNA
tggctggtggacagcgccctgtacaacctactcatcttccggtgccggaagccctggattttattaacgagaaac

SEQ ID NO: 438307 - DNA, 75 bp, synthetic construct
  source 1..75: mol_type = other DNA
ggatctaatggacatcattgataaggggtttggcttgttaatgaaaaagaaagggattcgaatagaaccccttga

SEQ ID NO: 438308 - DNA, 75 bp, synthetic construct
  source 1..75: mol_type = other DNA
gcgtcgtgcctttatcggtctgtacgaagagaagcagctctctgataaccaggatttacatgaagaaaaatactt

SEQ ID NO: 438309 - DNA, 75 bp, synthetic construct
  source 1..75: mol_type = other DNA
aatggtcctggcacgatcaggttgatattgcccgcggtggtaacagcaaaggtaaacgcctgacgaaatgggttg

SEQ ID NO: 438310 - DNA, 75 bp, synthetic construct
  source 1..75: mol_type = other DNA
cgcgctaagctgctgcaatatgctgaacgcgtctggaacatcactgaaggttccgacgatgagcgtattgacgcc

SEQ ID NO: 438311 - DNA, 75 bp, synthetic construct
  source 1..75: mol_type = other DNA
tgggctccggcgcgttctcaggcgtatctcggcgtactggttgatgacctgtgcactttaggaaccaaagaaccg

SEQ ID NO: 438312 - DNA, 75 bp, synthetic construct
  source 1..75: mol_type = other DNA
cgtgacctgaaacctacgctggagagcaagtttatccatgggctgttctttgccggtcaaattaatggcactaca

SEQ ID NO: 438313 - DNA, 75 bp, synthetic construct
  source 1..75: mol_type = other DNA
acatattcaaaaatattttatggaaaactatactagaacaaagatggttgattgtttaatcgaagttataaagag

SEQ ID NO: 438314 - DNA, 75 bp, synthetic construct
  source 1..75: mol_type = other DNA
aagaaaggattgatgagaaactaagggaattaggatcatatgagtacgaagaacagccagaagaagatgatgaag

SEQ ID NO: 438315 - DNA, 75 bp, synthetic construct
  source 1..75: mol_type = other DNA
ctggatgcgctgaaaggaatggacgtactggagtttgggggtatcgaacccaacccggcttatgaaacgctgatg

SEQ ID NO: 438316 - DNA, 75 bp, synthetic construct
  source 1..75: mol_type = other DNA
caggcgggtattcagtttaggatactaaacgccagcaaagggccggcggttcgtgcaacccgagcacaggcggat

SEQ ID NO: 438317 - DNA, 75 bp, synthetic construct
  source 1..75: mol_type = other DNA
atgcccgttaataaagccctgcaactcattgagatgctgaatgaacaccacattcacggtctgatgtatgtggat

SEQ ID NO: 438318 - DNA, 75 bp, synthetic construct
  source 1..75: mol_type = other DNA
catcctttttatcaggcgctggcgctggatacacctgctatttgctgtaatggcacctatttgtatgattatcat

SEQ ID NO: 438319 - DNA, 75 bp, synthetic construct
  source 1..75: mol_type = other DNA
aatatcgtctgatgctacgcgaagataatgcggatctgcgtttgactgaaatcggtcgtgaactgggcctagtgg

SEQ ID NO: 438320 - DNA, 75 bp, synthetic construct
  source 1..75: mol_type = other DNA
cattgagtatgatttcttcgacccgcgtgatctgaaaccgacgctggagagtaagtttatcgaaggcttgttctt

SEQ ID NO: 438321 - DNA, 75 bp, synthetic construct
  source 1..75: mol_type = other DNA
gcgtggtcggtgctgttacccaaatgggactgaagttccgtgccaaagccgtcgtgctcaccgttgggacgttcc

SEQ ID NO: 438322 - DNA, 75 bp, synthetic construct
  source 1..75: mol_type = other DNA
aagccgcagcctgacgcacacggctggcgggagttggagggtgagaccgcgaaatctgagcgggtgaacgaccgg

SEQ ID NO: 438323 - DNA, 75 bp, synthetic construct
  source 1..75: mol_type = other DNA
agacatggtatatcaaccgttttctgaaattccgcgaagggcttttaccgacccggattcctattttcataacta

SEQ ID NO: 438324 - DNA, 75 bp, synthetic construct
  source 1..75: mol_type = other DNA
tatttgtttctgattttgtcgatttttcgatatatgttgatgcaccggaagacttacttcagacgtggtatatca

SEQ ID NO: 438325 - DNA, 75 bp, synthetic construct
  source 1..75: mol_type = other DNA
tttagcattagcggtaaaacgtgggtgaataatcatgctcatgtacttaaattcaaaaactacactgaacaaaaa

SEQ ID NO: 438326 - DNA, 75 bp, synthetic construct
  source 1..75: mol_type = other DNA
cgctgagcttaccgctgagcttaacatgcgtaaaaaacagtacaactactatcgcgaccagttgttgagttttga

SEQ ID NO: 438327 - DNA, 75 bp, synthetic construct
  source 1..75: mol_type = other DNA
aattgctggatggggttgaggttgagtggttgtcactctcaaaagtattcaacttaaggaatggttatacaccgt

SEQ ID NO: 438328 - DNA, 75 bp, synthetic construct
  source 1..75: mol_type = other DNA
gtctcccgcgtgaaatcgagttacgccagaaacaatacgagtactatcgtgatttactgttcagtttcccaaaac

SEQ ID NO: 438329 - DNA, 75 bp, synthetic construct
  source 1..75: mol_type = other DNA
gctcctctgtttcactcccagtctaaatatgattctggctgcggctggccgagtttctacgagccagtgagtgag

SEQ ID NO: 438330 - DNA, 75 bp, synthetic construct
  source 1..75: mol_type = other DNA
acagtaccagtttgattttggtctgcgtccggcagtctctttcctgatgtctaaaggccgtgacctgcacgctgc

SEQ ID NO: 438331 - DNA, 75 bp, synthetic construct
  source 1..75: mol_type = other DNA
atcgtggcccaggcgcaggcagaaattgaagccgagcgtaaacgtgcccgtgaagagctgcgtaagcaagttgct

SEQ ID NO: 438332 - DNA, 75 bp, synthetic construct
  source 1..75: mol_type = other DNA
agttgcgccagaaacaatacgaatactaccgtgatttactgttcagtttcccgaaacctgaaactgccagtaatt

SEQ ID NO: 438333 - DNA, 75 bp, synthetic construct
  source 1..75: mol_type = other DNA
aattgctggatggggttgaggttgagtggagcaacctgggaaatctttgtgatatattcaccggaggggaggctc

SEQ ID NO: 438334 - DNA, 75 bp, synthetic construct
  source 1..75: mol_type = other DNA
agaaggctcaaaagggaaatttgattatcgcaaccaccagtgagaatgatgaggatgtatgtaaagctgttgcat

SEQ ID NO: 438335 - DNA, 75 bp, synthetic construct
  source 1..75: mol_type = other DNA
atgatataaccagagtatcaaaacgcggtaaattccatactgacaaacttcctgataatgaaatacgaagtcact

SEQ ID NO: 438336 - DNA, 75 bp, synthetic construct
  source 1..75: mol_type = other DNA
aaatcggcagttggtttgcgccgctgtttccggatgcgctggtggtgagtgtcggcggcgcggagccgagtggta

SEQ ID NO: 438337 - DNA, 75 bp, synthetic construct
  source 1..75: mol_type = other DNA
gccctggatcacttgcgttataccattccgaaacattacttcgacgaggcgttaagcggcggtaagcctggcgat

SEQ ID NO: 438338 - DNA, 75 bp, synthetic construct
  source 1..75: mol_type = other DNA
gcgcggagccgagcggtaatccggcggggcgtcagtggttttcggtgcagggtattacggaagataatcgccagg

SEQ ID NO: 438339 - DNA, 75 bp, synthetic construct
  source 1..75: mol_type = other DNA
gtaatggttgacacttatattgcgaattctgaacatggtatatttcaatggacagtgacagcccgccgcactggt

SEQ ID NO: 438340 - DNA, 75 bp, synthetic construct
  source 1..75: mol_type = other DNA
aacagggtctagagcgtgctagagttcaaggtaaggtacttggaagacctatagcgagtgacacaactagagcgg

SEQ ID NO: 438341 - DNA, 75 bp, synthetic construct
  source 1..75: mol_type = other DNA
cttctcgttcaacttccttacccggttttacatattctgggctctggccttggaaaaatatcaagaccctttctg

SEQ ID NO: 438342 - DNA, 75 bp, synthetic construct
  source 1..75: mol_type = other DNA
gagtaaaggaagctcactgacgcaaacagaactattcgcagtgaagcgccagatttcggagcttcgcatgaacct

SEQ ID NO: 438343 - DNA, 75 bp, synthetic construct
  source 1..75: mol_type = other DNA
caaggaataataataacaggaataccccaaacaaatcactgagaactcattgcatcagtgttcgactaaaccacg

SEQ ID NO: 438344 - DNA, 75 bp, synthetic construct
  source 1..75: mol_type = other DNA
cagaactctttgccctgcgcagacaaataaaaactcttcgcgatcaccttattcctacaacctttctggagtcag

SEQ ID NO: 438345 - DNA, 75 bp, synthetic construct
  source 1..75: mol_type = other DNA
attccgaaacattatttcgacgaagcgctaagtggcggtaagcctggcgatgatgatgtgattgaaatgatgtaa

SEQ ID NO: 438346 - DNA, 75 bp, synthetic construct
  source 1..75: mol_type = other DNA
atgcctgggctgaatcaccgagaaatatgattaccctcgctaaagggatttctatgcacgcacaccactacgcca

SEQ ID NO: 438347 - DNA, 75 bp, synthetic construct
  source 1..75: mol_type = other DNA
atggggccagtctattatcgtaatactgatttcttcggtctggtaaatggtctgaacttcgcggtgcagtatcaa

SEQ ID NO: 438348 - DNA, 75 bp, synthetic construct
  source 1..75: mol_type = other DNA
tagcaaagaagatgtcaaaattcaggataataaagatacgattggtgttcttcgcgctacaaatgtaacaggaaa

SEQ ID NO: 438349 - DNA, 75 bp, synthetic construct
  source 1..75: mol_type = other DNA
ataaaaaaatcgccctcaacaaccgcatcaacacggaactggaagcgatggcgaaaacactgtatgactactggt

SEQ ID NO: 438350 - DNA, 75 bp, synthetic construct
  source 1..75: mol_type = other DNA
caaactggagttgatctagtttctttaaaagaatatccagtcaggatacctgaagaaattgaatgtcaagaaaaa

SEQ ID NO: 438351 - DNA, 75 bp, synthetic construct
  source 1..75: mol_type = other DNA
aacgaagccgtcagtcgcgaacgtcagacgggaatgcagatggtgcagtccgtactggaacgcattggggaggta

SEQ ID NO: 438352 - DNA, 75 bp, synthetic construct
  source 1..75: mol_type = other DNA
caagccaaatgttgaggaagtttgacgttttgatagtaatgtcaagtggtagtaaagagcatgtaggaaaaaatg

SEQ ID NO: 438353 - DNA, 75 bp, synthetic construct
  source 1..75: mol_type = other DNA
caagagtattaaaaatactggataaaaaaatcgctctcaacaatcgtatcaacgccgagctggaagcgatggcga

SEQ ID NO: 438354 - DNA, 75 bp, synthetic construct
  source 1..75: mol_type = other DNA
ttagggcaaccatatgctatgtcggctatagcatcgcaaatccttatttgtaggacagatttgaaagatcctgaa

SEQ ID NO: 438355 - DNA, 75 bp, synthetic construct
  source 1..75: mol_type = other DNA
gaagctaaattagtcagacttcagggggagcttgcgctgttgacacaggaaaaatccaatgttttacgtcaagag

SEQ ID NO: 438356 - DNA, 75 bp, synthetic construct
  source 1..75: mol_type = other DNA
caggcccttctggcaccggtaaaacggaaacagccagggcgctggccgagcttgtttatggggacgagaataaac

SEQ ID NO: 438357 - DNA, 75 bp, synthetic construct
  source 1..75: mol_type = other DNA
gagaataaaatgatgccaatttataataaactggcatcaaacactcaagagaatagtcatttaatccaactccgc

SEQ ID NO: 438358 - DNA, 75 bp, synthetic construct
  source 1..75: mol_type = other DNA
aatcgaaatggtttaagtcttatataaacaatcagtgcttgggaactaatattaataacctgaccaatacgcata

SEQ ID NO: 438359 - DNA, 75 bp, synthetic construct
  source 1..75: mol_type = other DNA
gcctcattagccagacaccagggagaacttgcgctgctgacacaggaaaaatcaaatgttctgcgtcaggaaatg

SEQ ID NO: 438360 - DNA, 75 bp, synthetic construct
  source 1..75: mol_type = other DNA
cgaactggcaccgttcgacaaacgtctcggcaccacccaacaagcgtatgaaaaagcctttgccggggtggtcaa

SEQ ID NO: 438361 - DNA, 75 bp, synthetic construct
  source 1..75: mol_type = other DNA
gacttagcgaagccgtcagtcgtgagcgtcagacaggaatgcagatggtgcagtccgtactggaacgcattgggg

SEQ ID NO: 438362 - DNA, 75 bp, synthetic construct
  source 1..75: mol_type = other DNA
ttcatcgtaaaaatacctggcaggcgctcaacctcaaacgctatggtgccgagtcgcggaatctgattttgtctg

SEQ ID NO: 438363 - DNA, 75 bp, synthetic construct
  source 1..75: mol_type = other DNA
gccgtcagtcgtgagcgtcagacgggaatgcagatggtgcagtccgtactggaacgcatcggggaggcgaaatga

SEQ ID NO: 438364 - DNA, 75 bp, synthetic construct
  source 1..75: mol_type = other DNA
tatcggcctcgccgtatccggcgtaccttatgcaactttgctaacggtgttaatgatcctctcctgccttgtcca

SEQ ID NO: 438365 - DNA, 75 bp, synthetic construct
  source 1..75: mol_type = other DNA
gcgataatcgctgaatccttaagttatgcatggattatcgaagagttgcggggaatcattgccggtcaggataaa

SEQ ID NO: 438366 - DNA, 75 bp, synthetic construct
  source 1..75: mol_type = other DNA
atggcatttaaggactcgtggaacaaatgggaaccgattgccggatacggatgggaaagtacctggcgaccgctg

SEQ ID NO: 438367 - DNA, 75 bp, synthetic construct
  source 1..75: mol_type = other DNA
tcgcattctcgatgaagggtatcaggtgattgcgctctccacctgtacgggtatcgacagctataacaaagacga

SEQ ID NO: 438368 - DNA, 75 bp, synthetic construct
  source 1..75: mol_type = other DNA
gcgttagcgtcgcatcaggcaaaaaacggcaacgaacacaacaaacatagcctcacctggcatcaaatttatgag

SEQ ID NO: 438369 - DNA, 75 bp, synthetic construct
  source 1..75: mol_type = other DNA
tcgacagctataacaaagacgaccgcatggtggcgctcaacctgcgccagcacatcagcgatcctgcccgttacc

SEQ ID NO: 438370 - DNA, 75 bp, synthetic construct
  source 1..75: mol_type = other DNA
cgacttaacgaagccgtcagtcgcgaacgtcagacgggaatgcagatggtgcaatctgtgcttgaacgcatcggg

SEQ ID NO: 438371 - DNA, 75 bp, synthetic construct
  source 1..75: mol_type = other DNA
gtacgggcatcgacagctataacaaagacgaccgcatggtggcgctcaatctgcgccagcacatcagcgatcctg

SEQ ID NO: 438372 - DNA, 75 bp, synthetic construct
  source 1..75: mol_type = other DNA
gtggaacatggcgtcgataccgcgtggctggtcgatcaccacacagaagatttcaccgccagctatgccgtccaa

SEQ ID NO: 438373 - DNA, 75 bp, synthetic construct
  source 1..75: mol_type = other DNA
gaaagtttctctctactggcagaaacagggaaattagatccgattactggcagagagaaggaaatcagacaactt

SEQ ID NO: 438374 - DNA, 75 bp, synthetic construct
  source 1..75: mol_type = other DNA
tgcaccagaccaggattatgggtctaaaggaagcgtttttgcaccttttttctcggtaaaaaaagcagccacgac

SEQ ID NO: 438375 - DNA, 75 bp, synthetic construct
  source 1..75: mol_type = other DNA
caggaaagagaacaggtggctcttgcagaagcggagaacagttttgtggttagcgttggtggtcaggatgtggat

SEQ ID NO: 438376 - DNA, 75 bp, synthetic construct
  source 1..75: mol_type = other DNA
atgaaatgtattattggaaataaaaaatgggtttatggattcagggatgaattaaaagtatcacaaaatattata

SEQ ID NO: 438377 - DNA, 75 bp, synthetic construct
  source 1..75: mol_type = other DNA
tggcgacgctgtgtgaggcagaagagctggatattcacaaagatccgaaagaaacggctgaggcattccgtatcc

SEQ ID NO: 438378 - DNA, 75 bp, synthetic construct
  source 1..75: mol_type = other DNA
gcgcgcttgcctggcagttgctggcctttccggatgtctgggttcgtcatgaagagcttgatggtgtgctcaaaa

SEQ ID NO: 438379 - DNA, 75 bp, synthetic construct
  source 1..75: mol_type = other DNA
ctgttcccacgtcttgagccggtgcatgttgacagcgcgatggcctggcaactgctggggtttccggatgtctgg

SEQ ID NO: 438380 - DNA, 75 bp, synthetic construct
  source 1..75: mol_type = other DNA
cgattccgccgacggatgagaagaatacccagaaaaacacattacaactggcgttacaaaacaggattaaattat

SEQ ID NO: 438381 - DNA, 75 bp, synthetic construct
  source 1..75: mol_type = other DNA
tttacctaaccctttagctgttctcgctatatatctttttcctccaaaaggtaaaattgtattacattggcatag

SEQ ID NO: 438382 - DNA, 75 bp, synthetic construct
  source 1..75: mol_type = other DNA
aaaatagtctgttaagtaactgcgataaaataattgcaaccagtcaggtgtatgctaattcatctctcgacctaa

SEQ ID NO: 438383 - DNA, 75 bp, synthetic construct
  source 1..75: mol_type = other DNA
cttacagtgcgactccaccagatttacgtcctgtagtgaaaaaaattcagtatgcctctcctggctttattgaat

SEQ ID NO: 438384 - DNA, 75 bp, synthetic construct
  source 1..75: mol_type = other DNA
tgaacgataccgatatggcaatcatcgataaacgtcgtccgcgtgcgaacgtttcccaggtgatgcatatcatcg

SEQ ID NO: 438385 - DNA, 75 bp, synthetic construct
  source 1..75: mol_type = other DNA
acgcgtctggtttatccatctgacagtcagcaaattacgttaagtgtacagaatggtggggctaacaccagctat

SEQ ID NO: 438386 - DNA, 75 bp, synthetic construct
  source 1..75: mol_type = other DNA
ttgcggaggaatgcaccagatgatttttattattttctcaacaacaaatacaatatgaatgacattatggaaagt

SEQ ID NO: 438387 - DNA, 75 bp, synthetic construct
  source 1..75: mol_type = other DNA
atacttgtaaataaaattactcaacttgagaagaatcttgagcaacttaaatcagcatggcgtcatcaacgtgaa

SEQ ID NO: 438388 - DNA, 75 bp, synthetic construct
  source 1..75: mol_type = other DNA
tcgggcagatcttaaagatcctgtaaaacctgatggggtatttttacttgcgggcccttctggcacaggcaaaac

SEQ ID NO: 438389 - DNA, 75 bp, synthetic construct
  source 1..75: mol_type = other DNA
ggccagactggcgacttacgccagtgaagatttacatgccattgcgccgacgcagccgcgcgtctcaacacagcc

SEQ ID NO: 438390 - DNA, 75 bp, synthetic construct
  source 1..75: mol_type = other DNA
cccggatgtcattcagggtattgaagcctcattaaccagacaccagggagaacttgcactgctgaaacaagaaaa

SEQ ID NO: 438391 - DNA, 75 bp, synthetic construct
  source 1..75: mol_type = other DNA
cgagactgccagggcactggccgagtttgtttatggagatgaaaataaactgatcactattaatatgacagaatt

SEQ ID NO: 438392 - DNA, 75 bp, synthetic construct
  source 1..75: mol_type = other DNA
ctatagcatcacaaatccttatttgccgggcagatcttaaagatccggtaaaaccagatggggtatttttactcg

SEQ ID NO: 438393 - DNA, 75 bp, synthetic construct
  source 1..75: mol_type = other DNA
tccgtgccgttaacaattattgtcaaaattgcgcttgaacaaacagcgggaggtcaaagcatcgccgttctgtta

SEQ ID NO: 438394 - DNA, 75 bp, synthetic construct
  source 1..75: mol_type = other DNA
gggctttccacattggtggtatttttgtcgttgattttttggggatggttgttaggaccggtgggtatgctgctt

SEQ ID NO: 438395 - DNA, 75 bp, synthetic construct
  source 1..75: mol_type = other DNA
atgaagatagagcttattacgacaaaacagtttattgaacaagccgaatgttatttcaggaactatatggacgga

SEQ ID NO: 438396 - DNA, 75 bp, synthetic construct
  source 1..75: mol_type = other DNA
cagccgtattttctgagtctatgcaactcttactagaaaaaacatggttacatgccagcactaaatgggcatgca

SEQ ID NO: 438397 - DNA, 75 bp, synthetic construct
  source 1..75: mol_type = other DNA
aattgaaaaatttggtgcgaggaatattgatactgtacttaacacatctctgcttcctctgcttgctagatattt

SEQ ID NO: 438398 - DNA, 75 bp, synthetic construct
  source 1..75: mol_type = other DNA
ttgaagaacgacacagaggttcggttgaagaaatcaagcgccgcttgagtttttatttaccttttcttgcaggtc

SEQ ID NO: 438399 - DNA, 75 bp, synthetic construct
  source 1..75: mol_type = other DNA
gatggaaagtttctctcctctgtacggtattttttccttaccgtatctttttagtaatgccgatgaatattataa

SEQ ID NO: 438400 - DNA, 75 bp, synthetic construct
  source 1..75: mol_type = other DNA
aaagaattatctttctctacattcaatctcaaaagactagataaagaaatagaattcatctattccactctctaa

SEQ ID NO: 438401 - DNA, 75 bp, synthetic construct
  source 1..75: mol_type = other DNA
cacaggaaaacgcatctacgaaacacttgcttacctctataaaggaaagccaacaccgctaaaatatagcgatgt

SEQ ID NO: 438402 - DNA, 75 bp, synthetic construct
  source 1..75: mol_type = other DNA
gaagctcgctcacaaaaacgaggtttatgggctgaccccaatcccgttccaccgtgggaatggcgacataaatag

SEQ ID NO: 438403 - DNA, 75 bp, synthetic construct
  source 1..75: mol_type = other DNA
tacgttctcttttatcggctgattttgaacagctaccaaatgggccactgacgcttggtaacaatggtgacatta

SEQ ID NO: 438404 - DNA, 75 bp, synthetic construct
  source 1..75: mol_type = other DNA
ttcctgacgttttactaatgagcactgcaacattagcaaaactgacgctgaacagcgtaccattgttaaagatgc

SEQ ID NO: 438405 - DNA, 75 bp, synthetic construct
  source 1..75: mol_type = other DNA
attaactgtgaagatttatcctttatctctacgccaccaccagatagatttcacaaactaaaaaaaggagaatgg

SEQ ID NO: 438406 - DNA, 75 bp, synthetic construct
  source 1..75: mol_type = other DNA
attccgccaggtttaatgtggaaaactaaaaatgacggtctgatcgagttaaccaacgaaatcgccgcccagttt

SEQ ID NO: 438407 - DNA, 75 bp, synthetic construct
  source 1..75: mol_type = other DNA
ccaggttactttccagtatgatgacggcaaaatcgtcggcatcgatgcggtggtgctttccactcagcactctga

SEQ ID NO: 438408 - DNA, 75 bp, synthetic construct
  source 1..75: mol_type = other DNA
atgatgacgccagagcattttatgagcgttttggttttgttcagtcagttgtggcacctaataccttgttttata

SEQ ID NO: 438409 - DNA, 75 bp, synthetic construct
  source 1..75: mol_type = other DNA
cgccatatcgcggcggtggaagctctggacgatattcaggcggtgctcgactacgactactccacaggctggcaa

SEQ ID NO: 438410 - DNA, 75 bp, synthetic construct
  source 1..75: mol_type = other DNA
aaccgatgctaaagaggcgaaatactctgcaatcaaaaatcaacgcgatgccatcacaaccgattacatcatcat

SEQ ID NO: 438411 - DNA, 75 bp, synthetic construct
  source 1..75: mol_type = other DNA
ggggagctctggcaacctatattccagcagatcagattgccagagtggagatcaggcgcgttcgtgcaacgaacg

SEQ ID NO: 438412 - DNA, 75 bp, synthetic construct
  source 1..75: mol_type = other DNA
ggggatttgcgcatgggcgatctctatgtcacaggcgtttgcaaaaaggtgaaagacaaagaaaaggactacacc

SEQ ID NO: 438413 - DNA, 75 bp, synthetic construct
  source 1..75: mol_type = other DNA
gctaactgatatgtttaatagattgtggccaaatacacctgaatatcctggaaccaaaaagcttttcgaagtaat

SEQ ID NO: 438414 - DNA, 75 bp, synthetic construct
  source 1..75: mol_type = other DNA
ggttgtggctgcagatggtcagtatgtcaatccggtcaccgttgacgaattcaggattgcagttgccgaaaccta

SEQ ID NO: 438415 - DNA, 75 bp, synthetic construct
  source 1..75: mol_type = other DNA
cgttacgttatattcatcagcaaagcgaagagtttgcgaaggggaatattagctctcaacgtatgaatgcgctta

SEQ ID NO: 438416 - DNA, 75 bp, synthetic construct
  source 1..75: mol_type = other DNA
catcctcgaaatctacaatgcgttacgcccttatcgttcgactaagcaagaactcattgccattgccgacgatct

SEQ ID NO: 438417 - DNA, 75 bp, synthetic construct
  source 1..75: mol_type = other DNA
actttatgcgagaagagatcaatctggtgcgtccgacctatgtactgacgtgtggcagccgggcgacgtcgctct

SEQ ID NO: 438418 - DNA, 75 bp, synthetic construct
  source 1..75: mol_type = other DNA
tggcgtagccggaagtcttggcgtatggagctttaatgcgcgctccaccctgagtctgccacctgcagcgtccct

SEQ ID NO: 438419 - DNA, 75 bp, synthetic construct
  source 1..75: mol_type = other DNA
ccatggacaggaccggttacgctcgagggacactggccacgagagaggggttaagtgctgccgttccccccctcg

SEQ ID NO: 438420 - DNA, 75 bp, synthetic construct
  source 1..75: mol_type = other DNA
ctttcctacaacctcaatgtcacagtgaaagtccaggcagaacaaatgacagtatctacgcggcattcaacggtg

SEQ ID NO: 438421 - DNA, 75 bp, synthetic construct
  source 1..75: mol_type = other DNA
tccgggatgccggacagcgcggcaccctccacgccaatggatcacagcagtatggccggtatggatcattcccgg

SEQ ID NO: 438422 - DNA, 75 bp, synthetic construct
  source 1..75: mol_type = other DNA
atccgcgtccattgctgacaatggatgatatgggtatggggggaatgagccatgatatgtcagggatggatcacg

SEQ ID NO: 438423 - DNA, 75 bp, synthetic construct
  source 1..75: mol_type = other DNA
tacgctcgagggacactggccacgagagaggggttaagtgctgccgttcccccctcgatccccgtcctctgttga

SEQ ID NO: 438424 - DNA, 75 bp, synthetic construct
  source 1..75: mol_type = other DNA
gacttctgccaccaaattcttcatcaacccgaccggtcgttttgttatcggtggcccgatgggtgactgcggtct

SEQ ID NO: 438425 - DNA, 75 bp, synthetic construct
  source 1..75: mol_type = other DNA
aaaaaattgcaagacagataatcagaggcgttccgcaggctatatccgcaaaattcgggcaatgttagttgccgg

SEQ ID NO: 438426 - DNA, 75 bp, synthetic construct
  source 1..75: mol_type = other DNA
tgaatcacagctctacaactggcgcagtaaactggctacaaagagagaaaggtatcaattaaaaccggataactt

SEQ ID NO: 438427 - DNA, 75 bp, synthetic construct
  source 1..75: mol_type = other DNA
ttaagggcgtggaagaacggcgcgtaacctaccgccgtgaaggctacgaatatgattgcgtgatgcctgtttatc

SEQ ID NO: 438428 - DNA, 75 bp, synthetic construct
  source 1..75: mol_type = other DNA
atggcaatggtacaaccgaaatcgcaaaaagcacgtttaattatcactcacctgctactactgcttttcatcgcg

SEQ ID NO: 438429 - DNA, 75 bp, synthetic construct
  source 1..75: mol_type = other DNA
ctttcgcccgtatgcgctttcctggcaaagcgacactgctgaaaggcatgctgattttccagatgttcccggcgg

SEQ ID NO: 438430 - DNA, 75 bp, synthetic construct
  source 1..75: mol_type = other DNA
attcatgcgcggggatatttaccgcgaccagtacggcggcacggtaatgattaagggcgtggaggaacggcgcgt

SEQ ID NO: 438431 - DNA, 75 bp, synthetic construct
  source 1..75: mol_type = other DNA
tgcgggatattgagcaggcgacgctcgaataccccggcatccggcaggccagagcggaaataaccgaacagggcg

SEQ ID NO: 438432 - DNA, 75 bp, synthetic construct
  source 1..75: mol_type = other DNA
tactgcatggacaacgtgctggaacccggcgctgccgaggcgatgtttaatgactattgcgccatcctgcaagcc

SEQ ID NO: 438433 - DNA, 75 bp, synthetic construct
  source 1..75: mol_type = other DNA
taacattacctgttgctgcaatttgtcatggcccacaaattctggccgctgctggggtattaaaaggccggaaac

SEQ ID NO: 438434 - DNA, 75 bp, synthetic construct
  source 1..75: mol_type = other DNA
tgccacgctcgaccagatgatcgatgagtatgtcgggtgcatccgtcgtcagcagcctcacggcccttatgtgct

SEQ ID NO: 438435 - DNA, 75 bp, synthetic construct
  source 1..75: mol_type = other DNA
tgtgatgtgggcgatgccgggcaactggccacggttcttgacgatctggcggccaacggcggcattgccggagcg

SEQ ID NO: 438436 - DNA, 75 bp, synthetic construct
  source 1..75: mol_type = other DNA
ctgttccgcgtgctgctgccgatgtcctggccgtcggtgctggccttcgctaccgtcagcattacctaccactgg

SEQ ID NO: 438437 - DNA, 75 bp, synthetic construct
  source 1..75: mol_type = other DNA
tatgctggatttacattcgataactctactgtaatgcactataaacctggtgatcagttacaaggttcgataatt

SEQ ID NO: 438438 - DNA, 75 bp, synthetic construct
  source 1..75: mol_type = other DNA
tgaatcacaggcgaacgatgctgttaaccgctacaaactgctgaaaaaagatgcgcgtaccgtcgccgcccagca

SEQ ID NO: 438439 - DNA, 75 bp, synthetic construct
  source 1..75: mol_type = other DNA
cggtactgtgctgagtgtgcagattttctccaccaccatgcgtactgcagacggtaaaattatcgttattccgaa

SEQ ID NO: 438440 - DNA, 75 bp, synthetic construct
  source 1..75: mol_type = other DNA
atagcttatgctttatggtctgttattgatgctttttcgaatacatttgcaagctttttaaatggtttgaacata

SEQ ID NO: 438441 - DNA, 75 bp, synthetic construct
  source 1..75: mol_type = other DNA
aaaacatcgttgctgctggcctggccgatcgttgtgaaattcaggtttcctacgcaattggcgtggctgaaccga

SEQ ID NO: 438442 - DNA, 75 bp, synthetic construct
  source 1..75: mol_type = other DNA
gggtaaatacctgatgaaaatacccgctttaccgttgttttatcaaccctcattatggacacgcccgaaactcaa

SEQ ID NO: 438443 - DNA, 75 bp, synthetic construct
  source 1..75: mol_type = other DNA
taccgtcgccgcccagcaggtagcaaggctggaatccgccatgtgcctgcgccgccgctggtcgccggaaaactt

SEQ ID NO: 438444 - DNA, 75 bp, synthetic construct
  source 1..75: mol_type = other DNA
aagacttccggtgccacggtgtttggttatcaggtgctggatccggagcgcttcggggtggtggagttcgatgag

SEQ ID NO: 438445 - DNA, 75 bp, synthetic construct
  source 1..75: mol_type = other DNA
gttataaagtacaggatcctgagcgttttggtgtggttgaatttgatgcgaactacaaggcattgtccattgaag

SEQ ID NO: 438446 - DNA, 75 bp, synthetic construct
  source 1..75: mol_type = other DNA
cgaagccacgcttacgctaacttttggaagtgagccattgcctggtatttggcaattgtgcggactgatccccca

SEQ ID NO: 438447 - DNA, 75 bp, synthetic construct
  source 1..75: mol_type = other DNA
acagggacatgaggctatgccacattcccgtctggtgtacgtagtttctgaaacaaaagcagagcccacatcctc

SEQ ID NO: 438448 - DNA, 75 bp, synthetic construct
  source 1..75: mol_type = other DNA
ttaatcacaacacctgaagatttgccttcttttaaacgtttactgggtgatggcagtcgtttcggaattaattta

SEQ ID NO: 438449 - DNA, 75 bp, synthetic construct
  source 1..75: mol_type = other DNA
tggttttgcctggctggacaccggtacgcatgacagcctgattgaggcctcacagttcattcataccattgagaa

SEQ ID NO: 438450 - DNA, 75 bp, synthetic construct
  source 1..75: mol_type = other DNA
aagagtgcctgacgattaccgccgctttcgggatttcaggcgtgcaggtcacgcgtattctggacagcattgcac

SEQ ID NO: 438451 - DNA, 75 bp, synthetic construct
  source 1..75: mol_type = other DNA
cagaacgtctgccgctgctccgcccgatggcgcccaatctgacctggtcaatggatttcgtcatggacgcactgg

SEQ ID NO: 438452 - DNA, 75 bp, synthetic construct
  source 1..75: mol_type = other DNA
gaccacattcatcactgaattacctgacgccggctgaatttgcagcgggctggcgaaacgggaaatatgaagaaa

SEQ ID NO: 438453 - DNA, 75 bp, synthetic construct
  source 1..75: mol_type = other DNA
tcgctatgctatttgccggttgtgtttcttcagcctggggcgcgcaattaatccagccgttaacgctgaaagacg

SEQ ID NO: 438454 - DNA, 75 bp, synthetic construct
  source 1..75: mol_type = other DNA
ttcgaagcgcaaaaaggcaaatacactgtacatattaagcaaaagaacggccctaagtgctgcgtgggtgatatt

SEQ ID NO: 438455 - DNA, 75 bp, synthetic construct
  source 1..75: mol_type = other DNA
tttgaagcgcaaaaaggcaaatacaccgtacacatcaagcaaaagaacggccccaagtgctgcgtgggtgatatc

SEQ ID NO: 438456 - DNA, 75 bp, synthetic construct
  source 1..75: mol_type = other DNA
tggagtttattaaaacgcacaagctggggagtaaaacccacccagaataaaggcgaaaataatgagattggtggc

SEQ ID NO: 438457 - DNA, 75 bp, synthetic construct
  source 1..75: mol_type = other DNA
tacagggatgaatttgaccgttttataaagcgttttccgattattggtagcagtacgcattcgattattaactct

SEQ ID NO: 438458 - DNA, 75 bp, synthetic construct
  source 1..75: mol_type = other DNA
cttgactttcaacagtgttcagcatttacagagcatgccgtgtttaattacttgtgcagggtggctgacgaacgt

SEQ ID NO: 438459 - DNA, 75 bp, synthetic construct
  source 1..75: mol_type = other DNA
tgtttcgaggctatcctgcaacgataagaactgatcagggcccggaatttacctgccgcgcgctcgaacaatggg

SEQ ID NO: 438460 - DNA, 75 bp, synthetic construct
  source 1..75: mol_type = other DNA
tggaaaatgcagatccctaacgacggcgatattacggcgaccgtaacctttgccgggctggactgggaatcaaag

SEQ ID NO: 438461 - DNA, 75 bp, synthetic construct
  source 1..75: mol_type = other DNA
ggggagtaaaacccacccagaataaaggcgaaaataatgagattggtggctcccggatggctcagggggcgacgc

SEQ ID NO: 438462 - DNA, 75 bp, synthetic construct
  source 1..75: mol_type = other DNA
tgaataacggtgattcagaggcatccgatgatccgcaggttatcatcgctaaggtatatgtcccaaaagccgtca

SEQ ID NO: 438463 - DNA, 75 bp, synthetic construct
  source 1..75: mol_type = other DNA
cgcggttctaagctgaaaccaggtcaaagtctgacaattggcgctggtagtagcgcacagcggttggcaaacaac

SEQ ID NO: 438464 - DNA, 75 bp, synthetic construct
  source 1..75: mol_type = other DNA
gtggttcgcggcttaatcctgctggcagcggtgattttcgaccgttacaagcaaaaagcgaaacgcactgtctga

SEQ ID NO: 438465 - DNA, 75 bp, synthetic construct
  source 1..75: mol_type = other DNA
tctccgcctgcgttttaggtggcgtttctctgaaaggtggcatcggaaaaatctcatatgtggtggcgggtatct

SEQ ID NO: 438466 - DNA, 75 bp, synthetic construct
  source 1..75: mol_type = other DNA
cagcctgattgagcgggatgtgcaccgcgccctgaccaccattgagcaggtcacgccggagcaggtgccgagaaa

SEQ ID NO: 438467 - DNA, 75 bp, synthetic construct
  source 1..75: mol_type = other DNA
acacagcttctgatgcgaagcggccagactccggatttcagcaacacacttttcctggtggatgagagttcgatg

SEQ ID NO: 438468 - DNA, 75 bp, synthetic construct
  source 1..75: mol_type = other DNA
tgttcagaaagtggtagccgataatcagcagcaggacagattgcagcaaattgaacgggatatggtccgggatct

SEQ ID NO: 438469 - DNA, 75 bp, synthetic construct
  source 1..75: mol_type = other DNA
agtcgctggatattcagcttaaccgcgatcctaagctgattattcagcgtaaagccgtactcaaaaaagagaatg

SEQ ID NO: 438470 - DNA, 75 bp, synthetic construct
  source 1..75: mol_type = other DNA
caatgatccgcaggttattatcgctaaggtctatgccccaaaagccgtcacagcgaaagcggtggtacgttatat

SEQ ID NO: 438471 - DNA, 75 bp, synthetic construct
  source 1..75: mol_type = other DNA
agtatggtggtgtaagcggctcgctttcagcaacacccgtaatggaacagcattcaccagagtcgtctgaccagg

SEQ ID NO: 438472 - DNA, 75 bp, synthetic construct
  source 1..75: mol_type = other DNA
ggtatatctttatttatttcttaactttaattggggcatattgttgttattatttaggtgtcaatttcataacct

SEQ ID NO: 438473 - DNA, 75 bp, synthetic construct
  source 1..75: mol_type = other DNA
gtttgctaaattagcgattataggaatatgttttattatgttttatattaatatatatcatcttgagattttaaa

SEQ ID NO: 438474 - DNA, 75 bp, synthetic construct
  source 1..75: mol_type = other DNA
ttatctccgcttgctttcatcatattatcttctatgccagtattcgctttacgtgttagtgaactttttgctatt

SEQ ID NO: 438475 - DNA, 75 bp, synthetic construct
  source 1..75: mol_type = other DNA
tatactgaagaaatgcggcctgccattgctaagattacgtactatagacagtgatatagaagggaagttgggagc

SEQ ID NO: 438476 - DNA, 75 bp, synthetic construct
  source 1..75: mol_type = other DNA
cctctggtatgcagcaactgaacattgtccccggcgcgcttccagactggcttatcagcgtcgaaaacctgaaaa

SEQ ID NO: 438477 - DNA, 75 bp, synthetic construct
  source 1..75: mol_type = other DNA
tttcacaggcagatgttggcgtggttgatgactggaaagtggtgctggaggcactggtgacaaacattcacgcag

SEQ ID NO: 438478 - DNA, 75 bp, synthetic construct
  source 1..75: mol_type = other DNA
atgcaacagaaaagcgacaacgttgtcagccactatgtctttgaagcgccagtccgtatctggcactggctgacg

SEQ ID NO: 438479 - DNA, 75 bp, synthetic construct
  source 1..75: mol_type = other DNA
atgaatatcgccatcgtgacaatcaatcaggatcattccgcaatggcaggctggctggcagaacaggatttcagc

SEQ ID NO: 438480 - DNA, 75 bp, synthetic construct
  source 1..75: mol_type = other DNA
cggacatctgctggcacctgaggtgtgtattgttgttggcgcttctggcgcagcagcgttaatggcgggcgtgcg

SEQ ID NO: 438481 - DNA, 75 bp, synthetic construct
  source 1..75: mol_type = other DNA
aaaagtgattggtatttccggacatctgctggcacctgaggtgtgtattgttgttggcgcttccggcgcagcagc

SEQ ID NO: 438482 - DNA, 75 bp, synthetic construct
  source 1..75: mol_type = other DNA
gcgtcactattaccatcagtggtttgcctcttcgaccgtttcgacgggcggggatcatgctgattttttaagttg

SEQ ID NO: 438483 - DNA, 75 bp, synthetic construct
  source 1..75: mol_type = other DNA
cggccgctgcggcggctgccggtctcagcgtgccgggcgttgcccgcgccgttgttggtcagcaggaagccatta

SEQ ID NO: 438484 - DNA, 75 bp, synthetic construct
  source 1..75: mol_type = other DNA
accggcagtatgactcgccgtgtaccggaactgcaccgcgccttcccggaagcggtcctgtttattcacccgctg

SEQ ID NO: 438485 - DNA, 75 bp, synthetic construct
  source 1..75: mol_type = other DNA
taatctggctgaaaaagtgctgcctgctgattttgtgaaatcgacggtgcataaatttcagggacgggagtgcga

SEQ ID NO: 438486 - DNA, 75 bp, synthetic construct
  source 1..75: mol_type = other DNA
ttgatttttccgtttggtcttaatgaaagtcagttgctggctgtcgaacgggcattttcctcacagatttcagtt

SEQ ID NO: 438487 - DNA, 75 bp, synthetic construct
  source 1..75: mol_type = other DNA
agcagccagcacagtcggaacatcgcgtttgttgataatcctgaactggtgaatgtcgctgtttcaagggcccga

SEQ ID NO: 438488 - DNA, 75 bp, synthetic construct
  source 1..75: mol_type = other DNA
aaaaaggctaacactaagttttctaatagtatattggcgcaactagacaataaccgttttttgacagaacgccag

SEQ ID NO: 438489 - DNA, 75 bp, synthetic construct
  source 1..75: mol_type = other DNA
cgcactttccaccggtcgcaggatcaagtgtcttacctgcgtcgatgatttcacaaaggaatgcctgacggtcac

SEQ ID NO: 438490 - DNA, 75 bp, synthetic construct
  source 1..75: mol_type = other DNA
gctgacggtcaaacccatcagggcgcgtttgatctctcttacctgcgctgcattccggaaatggtcattatgacc

SEQ ID NO: 438491 - DNA, 75 bp, synthetic construct
  source 1..75: mol_type = other DNA
agcggcgaaagtcgccgaatcgctgaacgctacgctagttgatatgcgttttgttaagccacttgatgaagcgtt

SEQ ID NO: 438492 - DNA, 75 bp, synthetic construct
  source 1..75: mol_type = other DNA
cgttttggctaccgtcgtatttggcagttgctgcgccgtgaagtgcttcatgttaatcataagcgcgtgtaccgg

SEQ ID NO: 438493 - DNA, 75 bp, synthetic construct
  source 1..75: mol_type = other DNA
cgcaaagtggctgatttctttatggacttcctcggtgccagcgaagggttgaatgcgaaagcgcaaaaccgtggt

SEQ ID NO: 438494 - DNA, 75 bp, synthetic construct
  source 1..75: mol_type = other DNA
aggaaagtgaactggcgcagacgctgcgcttacagcgtcagggcgaagaagactttctggcatttagtcgggcag

SEQ ID NO: 438495 - DNA, 75 bp, synthetic construct
  source 1..75: mol_type = other DNA
tcgtcaacaccgtaactttcaccgttgacaaagggagtattgcagaggctaaggccgcagcggataaccttcaaa

SEQ ID NO: 438496 - DNA, 75 bp, synthetic construct
  source 1..75: mol_type = other DNA
gcctgatgaatggcgggccgttcgcagcgatatccagatgattttccaggatccgctggcgtcgctgaacccacg

SEQ ID NO: 438497 - DNA, 75 bp, synthetic construct
  source 1..75: mol_type = other DNA
gcacgtgcacttattcttgaaccaaaactgattatttgcgatgaacccgtttcggcgctggatgtttcgattcag

SEQ ID NO: 438498 - DNA, 75 bp, synthetic construct
  source 1..75: mol_type = other DNA
cagttcctgcatatcatgaccaaaaaaggtcgtggttatgaaccggcagaaaaagacccaatcaccttccacgcc

SEQ ID NO: 438499 - DNA, 75 bp, synthetic construct
  source 1..75: mol_type = other DNA
ctacatgcccgggaaatcattaatgaatggcggcaggattataacgagtgtcgaccacattcatcgctgaattac

SEQ ID NO: 438500 - DNA, 75 bp, synthetic construct
  source 1..75: mol_type = other DNA
cctttgaacatggtgttgagttgcgcttaatccagccgggcaagccaacgcagaacggatttattgagagtttca

SEQ ID NO: 438501 - DNA, 75 bp, synthetic construct
  source 1..75: mol_type = other DNA
cataggtatagaaccattgaatccaatgataagacaagatctgacacttggatatatcgtggtcatcagaaacgg

SEQ ID NO: 438502 - DNA, 75 bp, synthetic construct
  source 1..75: mol_type = other DNA
atgataagacaagatctgactcttggatatatagtggtcgtcagaaacgggaaaacatcacaggagattaatggt

SEQ ID NO: 438503 - DNA, 75 bp, synthetic construct
  source 1..75: mol_type = other DNA
ccggccagctaagcacaggtcaaaccgtatgcctgggcaaagcggcggatggaaaacggttttatgtcggcgggg

SEQ ID NO: 438504 - DNA, 75 bp, synthetic construct
  source 1..75: mol_type = other DNA
tgcgggaggaactgtatcaggttaaacaggtggtgaaggggatgcggaacgggatgtttagtgtgctgaacgaac

SEQ ID NO: 438505 - DNA, 75 bp, synthetic construct
  source 1..75: mol_type = other DNA
tcagcgcacgacaacgagctggtgtgaagaccgtcgacagaacgaagaccttgagctgattccttttgcatacgt

SEQ ID NO: 438506 - DNA, 75 bp, synthetic construct
  source 1..75: mol_type = other DNA
aaccgcaagaggaacgtgacaatgttaactttgaccttgctgcgtctggtgttgcatataaagaacgctccaaaa

SEQ ID NO: 438507 - DNA, 75 bp, synthetic construct
  source 1..75: mol_type = other DNA
tgatccgccgtctggcacgcgagtttggcgttaacctggcgaaagtgaagggcactggccgtaaaggtcgtatcc

SEQ ID NO: 438508 - DNA, 75 bp, synthetic construct
  source 1..75: mol_type = other DNA
ggggacgaattaatttcccgaataacgccgcggcggtatctacaaatgtgactttcaccattccttttacgcagg

SEQ ID NO: 438509 - DNA, 75 bp, synthetic construct
  source 1..75: mol_type = other DNA
acctcaccggcgagcgatgaatttgatctcgtgcgcggctggcaacaattgaatacacagcacaacgtggcgctg

SEQ ID NO: 438510 - DNA, 75 bp, synthetic construct
  source 1..75: mol_type = other DNA
agcgtctggtcgttgtttctcagaagaatacaggaaagggcggagctctgatgcatgggttgtcatatgcaacat

SEQ ID NO: 438511 - DNA, 75 bp, synthetic construct
  source 1..75: mol_type = other DNA
tcgccgtcatgagcggcgcagaaagctggctattgagcgtgatgctatctgtaacatcattgattctatcttcgg

SEQ ID NO: 438512 - DNA, 75 bp, synthetic construct
  source 1..75: mol_type = other DNA
ggcgtttccaagtccgcgatggagccggtgtggaatggtaaagagttcgtgccgcgtctgatgctgccgatttct

SEQ ID NO: 438513 - DNA, 75 bp, synthetic construct
  source 1..75: mol_type = other DNA
ggaggaactttatcaggttaaacaggtggttaaggggatgcggaacgggatgtttagtatgctggacgaaagcta

SEQ ID NO: 438514 - DNA, 75 bp, synthetic construct
  source 1..75: mol_type = other DNA
aaaactactggctggcgtttggcgaaaaacgcgcctgggataaaaatgagctggcgtacattactgaagcgcctt

SEQ ID NO: 438515 - DNA, 75 bp, synthetic construct
  source 1..75: mol_type = other DNA
tttcgaatcagagattaataatgaagatatttcaaaaataaaaacaatgattttgtcaatggcgctaaaaagtgg

SEQ ID NO: 438516 - DNA, 75 bp, synthetic construct
  source 1..75: mol_type = other DNA
aaaatcaataaggcaaataagaaaagttagagatattaagaaattaaggtttttgtattcaaagttaaaaccatt

SEQ ID NO: 438517 - DNA, 75 bp, synthetic construct
  source 1..75: mol_type = other DNA
ccgaacggttacagctggaacgggagcgttaataaagacggacagtgtacgctcaacagcgactcggatgacatg

SEQ ID NO: 438518 - DNA, 75 bp, synthetic construct
  source 1..75: mol_type = other DNA
tttggtggcaagaattactgtgctgaatccaacggtaacgctgccgacacgctgatgctgtgtgcctcctgggtc

SEQ ID NO: 438519 - DNA, 75 bp, synthetic construct
  source 1..75: mol_type = other DNA
tgactgttaccgtggcgctggctgacgacctgaccggacgtgagaagcatgaagttgcgctgaaccgtccgccaa

SEQ ID NO: 438520 - DNA, 75 bp, synthetic construct
  source 1..75: mol_type = other DNA
gaactgcgcagggaactttatcaggttaaacaggtggttaagggtatgcgtgacgggatatttagtgtactgaac

SEQ ID NO: 438521 - DNA, 75 bp, synthetic construct
  source 1..75: mol_type = other DNA
aagcatgtgcatcgcctgtggggatttgatgtgatgctcgaacagcaaaacgaagacggcagcgtcgagttgctg

SEQ ID NO: 438522 - DNA, 75 bp, synthetic construct
  source 1..75: mol_type = other DNA
tgcgggaggaactttatcaggttaaacagtcagttaaggggatgcggaacgggatgtttagtgtgctgaacgaga

SEQ ID NO: 438523 - DNA, 75 bp, synthetic construct
  source 1..75: mol_type = other DNA
cgaagtacaggaactgaggaaggaactttatcaggttaaacagtctgttaaggagatgcgggatgggatgtttag

SEQ ID NO: 438524 - DNA, 75 bp, synthetic construct
  source 1..75: mol_type = other DNA
cgaagtacaggaactgcgcagggaactgtatcaggttaaacaggctgttaaggggatgcgtgacgggatgtttag

SEQ ID NO: 438525 - DNA, 75 bp, synthetic construct
  source 1..75: mol_type = other DNA
gctcgcggataacaacgaagtacaggaactgcgcagggaactttatcagtttaagcaggcggttaaggggatacg

SEQ ID NO: 438526 - DNA, 75 bp, synthetic construct
  source 1..75: mol_type = other DNA
gtttgaaatctgtaagggtgggcttttacacaagctctgagaatattcgcactagtaacaaggggttaaccgcag

SEQ ID NO: 438527 - DNA, 75 bp, synthetic construct
  source 1..75: mol_type = other DNA
ttcgaaagcggtcagttgccgattgcaacttatggttgggtggttgatcaggtgtatgcggcgttaaagcagtaa

SEQ ID NO: 438528 - DNA, 75 bp, synthetic construct
  source 1..75: mol_type = other DNA
gagcgaaggcaaactgcatcctgacgatctgattgcgaagtatattccagggtttgccgatagcccgagcgatac

SEQ ID NO: 438529 - DNA, 75 bp, synthetic construct
  source 1..75: mol_type = other DNA
aatggtaatgccaccatgacgccgacgtttggcacgctggcaagcccgcaaacctacggtcacactggctggacc

SEQ ID NO: 438530 - DNA, 75 bp, synthetic construct
  source 1..75: mol_type = other DNA
agcgtgatggcaccatgacgctggttggtgcgcctgcgacaccgcataaatcgccggaagttttcaacctgatca

SEQ ID NO: 438531 - DNA, 75 bp, synthetic construct
  source 1..75: mol_type = other DNA
cttctgaggcaaaacgcgaagcggcaaaagccctgggggccgatgaagttgttaactcacgcaatgccgatgaga

SEQ ID NO: 438532 - DNA, 75 bp, synthetic construct
  source 1..75: mol_type = other DNA
aatcccaatatgttcgaaagcggtcagttgccgattgcaacttatggttgggtagttgatcaggtgtatgcggcg

SEQ ID NO: 438533 - DNA, 75 bp, synthetic construct
  source 1..75: mol_type = other DNA
atgaaaagtaaccgcaagcgccttgtaagggcatacgacaaagcattaaaggcttttgatgatctgcgacacaat

SEQ ID NO: 438534 - DNA, 75 bp, synthetic construct
  source 1..75: mol_type = other DNA
ggcttttgatgatctgcgacacaataagcgccagcgccgcaaatgggcgcgtatgcttgtttatgagtggcatta

SEQ ID NO: 438535 - DNA, 75 bp, synthetic construct
  source 1..75: mol_type = other DNA
tgaggattttttccttgaggccagacacatgacgcaggatgtggctgacatgttagctgacgagaacgtttatta

SEQ ID NO: 438536 - DNA, 75 bp, synthetic construct
  source 1..75: mol_type = other DNA
cggcgtttccgggcacgcaggtttgttttccaataccggcgatattgcggtgttaatgcaaacgatgctgaacgg

SEQ ID NO: 438537 - DNA, 75 bp, synthetic construct
  source 1..75: mol_type = other DNA
aagcaacaagccacattcgccagttgccgatccacaaaaaaaatcccaatatgttcgaaagcggtcagctaccga

SEQ ID NO: 438538 - DNA, 75 bp, synthetic construct
  source 1..75: mol_type = other DNA
aaaaatcccaatatgttcgaaagcggtcagttaccgattgcaacttatggttgggtagttgatcaggtgtatgcg

SEQ ID NO: 438539 - DNA, 75 bp, synthetic construct
  source 1..75: mol_type = other DNA
tattcgtcacccgcaagagcagctggcggcggtggctcctttgttgtgtgcagggatcaccacgtactcgccgct

SEQ ID NO: 438540 - DNA, 75 bp, synthetic construct
  source 1..75: mol_type = other DNA
tctctgatctttctgaggcagaagaagcacaggaacaacctaaaggccataaacagccttcttttgatgttcttg

SEQ ID NO: 438541 - DNA, 75 bp, synthetic construct
  source 1..75: mol_type = other DNA
aaacgtccggtaagttccgacgacgtcgaaatggcgatcaaccatataaagtcacagctccgcgccaccggtgag

SEQ ID NO: 438542 - DNA, 75 bp, synthetic construct
  source 1..75: mol_type = other DNA
atgctggaacagcaaaacgaagacggcagcgtcgagttgctggaacgttgcccgccgagaatgggaaatctgtaa

SEQ ID NO: 438543 - DNA, 75 bp, synthetic construct
  source 1..75: mol_type = other DNA
tttacactctcatatcgcaaacatccgccgcgattaccttcataaaaccacgacgacgatcagcaaaaaccacgc

SEQ ID NO: 438544 - DNA, 75 bp, synthetic construct
  source 1..75: mol_type = other DNA
aggacgcaggcgagctttatctgtaccgcgtgcggctatacggcaaacgccgatgtaaacggcgctcgcaatata

SEQ ID NO: 438545 - DNA, 75 bp, synthetic construct
  source 1..75: mol_type = other DNA
cccggctacgttaatgcaggcgctcaatctgaatattgatgatgaagtgaagattgacctggtggatggcaaatt

SEQ ID NO: 438546 - DNA, 75 bp, synthetic construct
  source 1..75: mol_type = other DNA
agggatcaccacgtattcgccgctacgtcactggcaggccgggccgggtaaaaaagtgggcgtggtcggcatcgg

SEQ ID NO: 438547 - DNA, 75 bp, synthetic construct
  source 1..75: mol_type = other DNA
gggggccgatgaagttgttaactcacgcaatgccgatgagatggcggctcatgtgaagagtttcgatttcatttt

SEQ ID NO: 438548 - DNA, 75 bp, synthetic construct
  source 1..75: mol_type = other DNA
ctgggcggctactcacaacagattgtcgttcacgagcgatatgttctgcgtattcgtcacccgcaagcgcaactg

SEQ ID NO: 438549 - DNA, 75 bp, synthetic construct
  source 1..75: mol_type = other DNA
agtgatgcgtgatttccgcttcttcaccgtgctggatgacgatcggcataattatctggagatatccgctattca

SEQ ID NO: 438550 - DNA, 75 bp, synthetic construct
  source 1..75: mol_type = other DNA
tgaagttgaacggcttctggactcgtgccacgcactgatgaactacggcgtggaccgctacaaacgtccgcaaaa

SEQ ID NO: 438551 - DNA, 75 bp, synthetic construct
  source 1..75: mol_type = other DNA
tcgccaacggaagaagacaaatactggttcccggatatcgccggttctgactggctggacacattacattttgcg

SEQ ID NO: 438552 - DNA, 75 bp, synthetic construct
  source 1..75: mol_type = other DNA
ccccgcccgacctttcgctgttagccccgctttgttatgccgcgacaacatggagaatgaccattattaccggcc

SEQ ID NO: 438553 - DNA, 75 bp, synthetic construct
  source 1..75: mol_type = other DNA
gccatacatcataattaaacatgaggcttttagctggcttaaaaaagatatcccagaagggtatgttgtttatta

SEQ ID NO: 438554 - DNA, 75 bp, synthetic construct
  source 1..75: mol_type = other DNA
accattcataataataaagcatgaagaattcgattggatgggtgaaaaagaagatagtggttacgtaatttatta

SEQ ID NO: 438555 - DNA, 75 bp, synthetic construct
  source 1..75: mol_type = other DNA
ggcgatgacgggctggaacgaaggcatgatccgcttacagcagttggctgagcgcctgaaccgtcaggatgaaca

SEQ ID NO: 438556 - DNA, 75 bp, synthetic construct
  source 1..75: mol_type = other DNA
gcagtgaacagcagcaaaaacaggctgaaatggcactgaatcagctgattaatcgttatcaggtggaacacgctg

SEQ ID NO: 438557 - DNA, 75 bp, synthetic construct
  source 1..75: mol_type = other DNA
aatgcccgtggtaacagtgcactatgggatgaatatggtcgtctcatcttcgcgccgatcgtggttcattattgt

SEQ ID NO: 438558 - DNA, 75 bp, synthetic construct
  source 1..75: mol_type = other DNA
atctgttcaaccgaaatgctttagaggccagactgcctgctgaagatgaaaatccggggaaggcaatcacggatt

SEQ ID NO: 438559 - DNA, 75 bp, synthetic construct
  source 1..75: mol_type = other DNA
aaatgtcgcttcaggagctgctgattgcggctaaggagaaaattgttgaactggaaaatgagaaagtaaagcaag

SEQ ID NO: 438560 - DNA, 75 bp, synthetic construct
  source 1..75: mol_type = other DNA
gcctggaactacgggctggcggcggcgggcacgtttattaccttgctaccgttgttaagccttccggcactgcca

SEQ ID NO: 438561 - DNA, 75 bp, synthetic construct
  source 1..75: mol_type = other DNA
ttgatgagatccacaccattatcggtgcgggtgcagcgtctggtggtcaggtcgatgcggctaacctgatcaaac

SEQ ID NO: 438562 - DNA, 75 bp, synthetic construct
  source 1..75: mol_type = other DNA
taccgagattgcacgtctcaaacgccagctggcagaacggatgaagagctggctatcctccaaaacggccgcgac

SEQ ID NO: 438563 - DNA, 75 bp, synthetic construct
  source 1..75: mol_type = other DNA
gctacagaacacttgagaaacaattaacagacgcggcgcgggatttattccctgatgctgattatgtgtatgtgg

SEQ ID NO: 438564 - DNA, 75 bp, synthetic construct
  source 1..75: mol_type = other DNA
ccggtggtgaccagaaagtgcgtggtgattacggcggctataaagatgattccggcgtacatcacctgaacgtgc

SEQ ID NO: 438565 - DNA, 75 bp, synthetic construct
  source 1..75: mol_type = other DNA
gccattcttactaaaccaactggtaccatgacggctggtccattcagtgcatctgcaagctatgttgtaacctat

SEQ ID NO: 438566 - DNA, 75 bp, synthetic construct
  source 1..75: mol_type = other DNA
gcataaacggcgcgggaagctggctggtggctaaccaggcgctgctgctaagttatgcagtaaacatcgtggcgg

SEQ ID NO: 438567 - DNA, 75 bp, synthetic construct
  source 1..75: mol_type = other DNA
aagtcctccttgaaatcgccgatcttaaagtgcactttgaaatcaaagatggcaaacagtggttctggcaaccgc

SEQ ID NO: 438568 - DNA, 75 bp, synthetic construct
  source 1..75: mol_type = other DNA
atggccttcccgaactggctttttggcctcagcctaaatatgaacggaataaatggtcgatgttctgtctgaaac

SEQ ID NO: 438569 - DNA, 75 bp, synthetic construct
  source 1..75: mol_type = other DNA
atgaaaatgccatcaggatatacccgtattctcattgcggcggccattatgggctgctcaggaatggtatttgct

SEQ ID NO: 438570 - DNA, 75 bp, synthetic construct
  source 1..75: mol_type = other DNA
atctccagtgttgatttggggacgcttgcaagcactgcaactacaaatggcaccgcagtatcatttaaactggta

SEQ ID NO: 438571 - DNA, 75 bp, synthetic construct
  source 1..75: mol_type = other DNA
gaaccgatggtcatctgtaacgaagagcatcgcttcctggtggctgaacagctgcgccagctaaataagctgtcg

SEQ ID NO: 438572 - DNA, 75 bp, synthetic construct
  source 1..75: mol_type = other DNA
ctgtccgaaaccggttgtcgcgatggtggctggctactccatcggcggcggtcacgttctgcacatgatgtgcga

SEQ ID NO: 438573 - DNA, 75 bp, synthetic construct
  source 1..75: mol_type = other DNA
tgaccgaagaaggtcaggaagggcgcaatgctttcaaccagaaacgccagcctgatttcagcaaattcaaacgga

SEQ ID NO: 438574 - DNA, 75 bp, synthetic construct
  source 1..75: mol_type = other DNA
agctggccaaattccgcccggatatcctcgaagcctgccaggccgcggtgaatgccgccgacaacggcagcgact

SEQ ID NO: 438575 - DNA, 75 bp, synthetic construct
  source 1..75: mol_type = other DNA
ctgcgagtgcccggatgagtccgtggactacgccgttatggagaaaaccgctgatgcggtggtggtcggtctcga

SEQ ID NO: 438576 - DNA, 75 bp, synthetic construct
  source 1..75: mol_type = other DNA
ccccggccatcgccctggcggccctccaggccacccgccacggcgacgacccgctgatgctggtcctcgccgccg

SEQ ID NO: 438577 - DNA, 75 bp, synthetic construct
  source 1..75: mol_type = other DNA
gccattggtctgtttggcctgatgccgatgtggattttaggcgtggtttgtctggcgctgttcggctggctgagc

SEQ ID NO: 438578 - DNA, 75 bp, synthetic construct
  source 1..75: mol_type = other DNA
gattttgccggtatctctgttaagcatttgagcagctatggcgatctgaatccggaagaggttccattgctgatc

SEQ ID NO: 438579 - DNA, 75 bp, synthetic construct
  source 1..75: mol_type = other DNA
tttcactggtggcgtagcagaattcgctaaagatctggatacctttgccagctcgatgaatgacttctacggtcg

SEQ ID NO: 438580 - DNA, 75 bp, synthetic construct
  source 1..75: mol_type = other DNA
gacgttgggcggaagccagcgggtaacgggggctacctgtaatggtgaaaccagcgacggctttacctttacgcc

SEQ ID NO: 438581 - DNA, 75 bp, synthetic construct
  source 1..75: mol_type = other DNA
catatcactatgaggtcaactgcctggaatatcgtcctggcacgggggttccggttactggtggcatgtatgttc

SEQ ID NO: 438582 - DNA, 75 bp, synthetic construct
  source 1..75: mol_type = other DNA
cggaacagttttatcagtatcaacccactgaaatcattctttccgaaggccaactggtggatagcctggggaacg

SEQ ID NO: 438583 - DNA, 75 bp, synthetic construct
  source 1..75: mol_type = other DNA
gacaggacgagagaagcatgaagttagcctgaatcgtccacccagagtgacaaaaacctatgacctgaaagccaa

SEQ ID NO: 438584 - DNA, 75 bp, synthetic construct
  source 1..75: mol_type = other DNA
gatgtggagaagtacccaggatccgtatcggcaaagggtgagagcgttacggaaaacatcagcctgtactcgaat

SEQ ID NO: 438585 - DNA, 75 bp, synthetic construct
  source 1..75: mol_type = other DNA
atctggcaacagacaatttcagcaagctggtcaatgaagaggtggaaaacaatgctgcgactgataaagcgccgt

SEQ ID NO: 438586 - DNA, 75 bp, synthetic construct
  source 1..75: mol_type = other DNA
atccgtttgttgatggtaaaccgccgtataccattgatgaaacaacgaaagaagttatctggaaataccagcaag

SEQ ID NO: 438587 - DNA, 75 bp, synthetic construct
  source 1..75: mol_type = other DNA
aaacgggtcaggccaaagagatcgatactgcaatctgtgcgaaaaccgacggttgtaactctccgcgctggttct

SEQ ID NO: 438588 - DNA, 75 bp, synthetic construct
  source 1..75: mol_type = other DNA
cggactggagcaattcgctaacgatctggatacctttgccagctcgatgaatgacttctacggccgtgatagcga

SEQ ID NO: 438589 - DNA, 75 bp, synthetic construct
  source 1..75: mol_type = other DNA
gggcgcgcggcggtgcgggtgaccgtctgctgatgtacgcacagttgaaggagtgggcagagaaaaactttgata

SEQ ID NO: 438590 - DNA, 75 bp, synthetic construct
  source 1..75: mol_type = other DNA
gactcgctgtataagcaaatcgatctggcaccggaagagttcaaaaagctggtcaatgaagaggtggaaaacaat

SEQ ID NO: 438591 - DNA, 75 bp, synthetic construct
  source 1..75: mol_type = other DNA
gacgctggcggcgcttggtctgccgaaaccgcagcaagggccggaaaccattaatcaggttaccgagcataagat

SEQ ID NO: 438592 - DNA, 75 bp, synthetic construct
  source 1..75: mol_type = other DNA
gactgaatctctggatgctgcgaagaagaaaattctggaaaaattcaagggattagaggagtgtaaggactcgac

SEQ ID NO: 438593 - DNA, 75 bp, synthetic construct
  source 1..75: mol_type = other DNA
cctgagccaacaccagaacctgttcctacgaaaacgggttatctgaccctgggcggaagcctgcgggtaactggt

SEQ ID NO: 438594 - DNA, 75 bp, synthetic construct
  source 1..75: mol_type = other DNA
gtttattgacgatggcgagcgcggtgcgggtcctgtatccggcgctggctgacaactggcagatgtcggcggcac

SEQ ID NO: 438595 - DNA, 75 bp, synthetic construct
  source 1..75: mol_type = other DNA
aaacttaatgcaggccggggcgatcaccatgttgaccgtgcgtctgggatcggtgatttcgcccatgattggcgg

SEQ ID NO: 438596 - DNA, 75 bp, synthetic construct
  source 1..75: mol_type = other DNA
gtgggcactaacctggatacggtttatttcaaaaaagcgggtcaggtattaggaaatagtgcaccgtttgctttc

SEQ ID NO: 438597 - DNA, 75 bp, synthetic construct
  source 1..75: mol_type = other DNA
aatatcgctatgaaaacgacaaggatgacgagctgggctttaaaacgttcaccgagttcctgaactgctacgcca

SEQ ID NO: 438598 - DNA, 75 bp, synthetic construct
  source 1..75: mol_type = other DNA
cttcacctttaccggtgtagtaaaagcgccgttctataaagacggtaagtggcaacacgatctgaactcccctgc

SEQ ID NO: 438599 - DNA, 75 bp, synthetic construct
  source 1..75: mol_type = other DNA
cctttagctggggcgaaaccatctcctttggtatcgatacctttgaactgggctcagtgcgcggcaataagtcga

SEQ ID NO: 438600 - DNA, 75 bp, synthetic construct
  source 1..75: mol_type = other DNA
aaccgtccgccaagagtcactaaaacctattctctggcggctaacggtgaattgacgttcaaggtgccttacggt

SEQ ID NO: 438601 - DNA, 75 bp, synthetic construct
  source 1..75: mol_type = other DNA
ccggaaaaaatgatgagcgtgaagtgccggacgtagtgcgccaggtctttgccgagtatcccaacgtgatcaacg

SEQ ID NO: 438602 - DNA, 75 bp, synthetic construct
  source 1..75: mol_type = other DNA
cgggtaactggtgctacctgtaatggtgaatccagcgacggctttacctttacgccaggcaataccgtgagttgt

SEQ ID NO: 438603 - DNA, 75 bp, synthetic construct
  source 1..75: mol_type = other DNA
ctgtttgccacccactatttcgagctgacccagctaccggagaaaatggaaggcgtcgccaacgtgcatctcgat

SEQ ID NO: 438604 - DNA, 75 bp, synthetic construct
  source 1..75: mol_type = other DNA
cccatacgccaatgatgcagcaatatctcaagctgaaagcccagcatcccgagatcctgctgttttaccggatgg

SEQ ID NO: 438605 - DNA, 75 bp, synthetic construct
  source 1..75: mol_type = other DNA
gatcgtatctttacccgtgtgggcgcggctgacgatctggcatccgggcgttcaacctttatggtggagatgacc

SEQ ID NO: 438606 - DNA, 75 bp, synthetic construct
  source 1..75: mol_type = other DNA
cggctatctggcaggacagcaaaggtttcggttacgcgacgctggatatcagttccggtcgttttcgtctgagcg

SEQ ID NO: 438607 - DNA, 75 bp, synthetic construct
  source 1..75: mol_type = other DNA
accctgccgcatattcgttctatcactatggaacgtgagcaggacagcatcattatggatgccgcgacgcgtcgt

SEQ ID NO: 438608 - DNA, 75 bp, synthetic construct
  source 1..75: mol_type = other DNA
ccgggtattcgcatcaccgaaggccgccatccggtggttgaacaggtgctgaacgagccatttatcgccaacccg

SEQ ID NO: 438609 - DNA, 75 bp, synthetic construct
  source 1..75: mol_type = other DNA
aacccgctgaatctgtcgccgcagcgtcgcatgttgatcatcaccggtccgaacatgggcggtaaaagtacctat

SEQ ID NO: 438610 - DNA, 75 bp, synthetic construct
  source 1..75: mol_type = other DNA
gaaaacctcgacccggattcactgactccgcgtcaggcgctggaatggatttatcgcttgaagagtctggtgtaa

SEQ ID NO: 438611 - DNA, 75 bp, synthetic construct
  source 1..75: mol_type = other DNA
gggcgtgcgcagaaaatctggcgaataagattaaagcgttgacgctgttcgccacccactatttcgagctaacgc

SEQ ID NO: 438612 - DNA, 75 bp, synthetic construct
  source 1..75: mol_type = other DNA
cccatacgccaatgatgcagcagtatctcaagctgaaagcccagcatcccgagctcctgctgttctatcggatgg

SEQ ID NO: 438613 - DNA, 75 bp, synthetic construct
  source 1..75: mol_type = other DNA
atgcaagagtctatcgacaaggatctctcagaccatacgccaatgatgcagcagtatctcaagctgaaagcccag

SEQ ID NO: 438614 - DNA, 75 bp, synthetic construct
  source 1..75: mol_type = other DNA
tggcactcgcgatctggtcggttttggcgtcgagaacgcgccgcgcggactttgtgccgccggttgtctgttgca

SEQ ID NO: 438615 - DNA, 75 bp, synthetic construct
  source 1..75: mol_type = other DNA
cgtatgcggcgaagtggtgaacgtgcagattatcagcccggacggtcgaaaaatgtttctccgtgatggtcaggt

SEQ ID NO: 438616 - DNA, 75 bp, synthetic construct
  source 1..75: mol_type = other DNA
tcaggacaaaatatctcaatgtaagtttcctgttagttcaggaaatttccagtgcccgcttgaggctattcaatg

SEQ ID NO: 438617 - DNA, 75 bp, synthetic construct
  source 1..75: mol_type = other DNA
gtgtttgccgatcttgctgaattactcaaacctggcggaaaagagatctataccgaaggtaaagatgaaatggcg

SEQ ID NO: 438618 - DNA, 75 bp, synthetic construct
  source 1..75: mol_type = other DNA
atgcgctgggtacgccaagcggcaaaattgaaatctattcaaaaacgttggaaaaatttggctataaggattgcc

SEQ ID NO: 438619 - DNA, 75 bp, synthetic construct
  source 1..75: mol_type = other DNA
gccaaccattgcgccttttaaagcgggtctgatcgtggcgggcgtagcgttaatcctcaacgcagccagcgatac

SEQ ID NO: 438620 - DNA, 75 bp, synthetic construct
  source 1..75: mol_type = other DNA
aaatggctatagtaaattgtgattcacaattagaggatggagtcgtaattaatactagagccttgatagaacatg

SEQ ID NO: 438621 - DNA, 75 bp, synthetic construct
  source 1..75: mol_type = other DNA
gtgcgggtggtttttcaaaatctataattgacagcttaaatcataaacattacgagttaataggatttatcgata

SEQ ID NO: 438622 - DNA, 75 bp, synthetic construct
  source 1..75: mol_type = other DNA
cctatgctgaaatgctaaatatagcaattgaaaagctaataataaaaaacgaaagcatggatgaaagtgatttaa

SEQ ID NO: 438623 - DNA, 75 bp, synthetic construct
  source 1..75: mol_type = other DNA
agtaaaaccacagccaattgcagttctttttaaaacaatgggtgcgtgggctgttttatgcttcgccgctgacga

SEQ ID NO: 438624 - DNA, 75 bp, synthetic construct
  source 1..75: mol_type = other DNA
gcattgtctggtttgatcaggccctcagtgatgcgcagcgcgataatgccaaccgcagcgctgtggccactgctt

SEQ ID NO: 438625 - DNA, 75 bp, synthetic construct
  source 1..75: mol_type = other DNA
ggtgagttcggcatgacgccagccagccgcacgaaagtgaatgcaaaaggtcctgatgcggttgacccgctggcc

SEQ ID NO: 438626 - DNA, 75 bp, synthetic construct
  source 1..75: mol_type = other DNA
ccgccgccatcatgaaagctgatgcctggaaacgtctgcgcgccatgcttggtgagttcggcatgacgccagcca

SEQ ID NO: 438627 - DNA, 75 bp, synthetic construct
  source 1..75: mol_type = other DNA
atcccgactctgttgctgttcaaaaacggtgaagtggcggcaaccaaagtgggtgcactgtctaaaggtcagttg

SEQ ID NO: 438628 - DNA, 75 bp, synthetic construct
  source 1..75: mol_type = other DNA
gctggctgcatatgccagtgcgcgatacccgcgtgttgcttgagcgccagcaaactattggcgcattgcaggatt

SEQ ID NO: 438629 - DNA, 75 bp, synthetic construct
  source 1..75: mol_type = other DNA
tggtggtcccgaaagattcccgtggcggcatccggttatgtactgggtcgtatgtgatatccatatgtggttttt

SEQ ID NO: 438630 - DNA, 75 bp, synthetic construct
  source 1..75: mol_type = other DNA
aatgctaaaaaagctaatgcaggtattgcttccgtagcagcaatgaccaatatcccgtatgtgaataaccagaca

SEQ ID NO: 438631 - DNA, 75 bp, synthetic construct
  source 1..75: mol_type = other DNA
gcgtttgccgaagggggaatacgtacccgtgaacaggtttctgctggtatgcgccacgcccgcgccagtgaatct

SEQ ID NO: 438632 - DNA, 75 bp, synthetic construct
  source 1..75: mol_type = other DNA
aatggcgtggaatgttgaagagagagcacgattgtggctggaagcatggcgtttatcattgtcaggatggcatat

SEQ ID NO: 438633 - DNA, 75 bp, synthetic construct
  source 1..75: mol_type = other DNA
ggcacaacttgcctggcgcgcaggagaaagcgcgacgcaacggctggcagggcgctctgtttccgtgggaaagcg

SEQ ID NO: 438634 - DNA, 75 bp, synthetic construct
  source 1..75: mol_type = other DNA
acggtcgccagcatctcgacgaaacccaggtgcgggtgtttggtcagcatctgatgcaggggatctacaccaccc

SEQ ID NO: 438635 - DNA, 75 bp, synthetic construct
  source 1..75: mol_type = other DNA
gagaaatccggaaaactgaagaaaaacgttgttgtcgtcacccagaaaagtcgccgtcgcggtgaaatttcatct

SEQ ID NO: 438636 - DNA, 75 bp, synthetic construct
  source 1..75: mol_type = other DNA
gagagaattgcctttatttatgaagatatttcctgggagcatacgttagccggtacgaatgcaatgagtaaatga

SEQ ID NO: 438637 - DNA, 75 bp, synthetic construct
  source 1..75: mol_type = other DNA
cagtaaagcgggtatttaccagccttattataaaataaatctgtcaaaagcccgaatatcaagtattgattttgt

SEQ ID NO: 438638 - DNA, 75 bp, synthetic construct
  source 1..75: mol_type = other DNA
aagttctcaccggcgacagtcctttcgcagcgaatgcgttgggtaaactggcggcgcaggaaatgctggcagctt

SEQ ID NO: 438639 - DNA, 75 bp, synthetic construct
  source 1..75: mol_type = other DNA
ttgtacgctgcaggaatcacatcatcagcagggtttaccatattcagtacgataatcccgctgacggaattaagt

SEQ ID NO: 438640 - DNA, 75 bp, synthetic construct
  source 1..75: mol_type = other DNA
ggtaagaaagtgtcgcaggctctggacattttgacctacaccaacaagaaagcggctgtactggtcaagaaagtt

SEQ ID NO: 438641 - DNA, 75 bp, synthetic construct
  source 1..75: mol_type = other DNA
atgctgtttctggtaatttcaatggaagtgccattctatctgttaacattctttaatgttatctgttttcataaa

SEQ ID NO: 438642 - DNA, 75 bp, synthetic construct
  source 1..75: mol_type = other DNA
tcatttatgacgctacggatggcacgcttacgctaccgcaaagcactgagccagactgccaactctcgataacgt

SEQ ID NO: 438643 - DNA, 75 bp, synthetic construct
  source 1..75: mol_type = other DNA
gagcgttctttatttgcaacccgacaaactttacttgacctgaattatgcccgtcaggttaacgaaatttcttta

SEQ ID NO: 438644 - DNA, 75 bp, synthetic construct
  source 1..75: mol_type = other DNA
atggagcgtaaaggctacaaccgcgcgtttgccgccgccattaccgctggtggctcgttagtcaccccgatcata

SEQ ID NO: 438645 - DNA, 75 bp, synthetic construct
  source 1..75: mol_type = other DNA
tctctagccatacgcccatgatgcagcagtatctcaggctgaaagcccagcatcccgagatcctgctgttttacc

SEQ ID NO: 438646 - DNA, 75 bp, synthetic construct
  source 1..75: mol_type = other DNA
tacattattccggagctgaaagagtacgaagacaaagtactgacttcaaaaggtaaagcactgacgctggaaaaa

SEQ ID NO: 438647 - DNA, 75 bp, synthetic construct
  source 1..75: mol_type = other DNA
ttcggtcagtgaagagtcctacggcaaaaacttcgatgaggtacgccagcggctgaatattgcctgtaaacccgg

SEQ ID NO: 438648 - DNA, 75 bp, synthetic construct
  source 1..75: mol_type = other DNA
atatcaacattacaaattacaagttgggacgatattttatccttgcgtgtattatttttttcggggcgatcgttg

SEQ ID NO: 438649 - DNA, 75 bp, synthetic construct
  source 1..75: mol_type = other DNA
ctgcaaccggccacgctggagatgtaccgcgtccttaaaaaagacgcgctgatggtgagcttctacggctggaac

SEQ ID NO: 438650 - DNA, 75 bp, synthetic construct
  source 1..75: mol_type = other DNA
gactgccggaaacggaagcccatttttgccttcaattacagcaagccttatctgaaactgatggttttagaagac

SEQ ID NO: 438651 - DNA, 75 bp, synthetic construct
  source 1..75: mol_type = other DNA
tcttacgcaaattcagccgctggcattaactcttcccgttggcctaatgaccgggattatcggcggcgtttattt

SEQ ID NO: 438652 - DNA, 75 bp, synthetic construct
  source 1..75: mol_type = other DNA
tccacttaaagatcatcttggttatgcatatattgatttaacgctatctttgttttgctgcagccagtattctta

SEQ ID NO: 438653 - DNA, 75 bp, synthetic construct
  source 1..75: mol_type = other DNA
tttacttctataaagggatggcaattggtgacgtctttggattagcaagatatagtgattggactatttgtaatc

SEQ ID NO: 438654 - DNA, 75 bp, synthetic construct
  source 1..75: mol_type = other DNA
aacaggtaacaatgtcaccagtgacgggaatgacacctacacattaacattccctggtactattggcctggacaa

SEQ ID NO: 438655 - DNA, 75 bp, synthetic construct
  source 1..75: mol_type = other DNA
gtcgttgataatggcaatgatagttataccctgataatccccaatatgggactggataaaatagtcaataaagcg

SEQ ID NO: 438656 - DNA, 75 bp, synthetic construct
  source 1..75: mol_type = other DNA
tattgatactacattgtcaggtaatgggtcccgaacctttgatagacttgttataccgctgtcttcagacaccac

SEQ ID NO: 438657 - DNA, 75 bp, synthetic construct
  source 1..75: mol_type = other DNA
atgccgcagccatcaaagcgaaagtgacaaaattgctggagatggtgcagcttgcgcatctggcggatcgttatc

SEQ ID NO: 438658 - DNA, 75 bp, synthetic construct
  source 1..75: mol_type = other DNA
ccttcaggtcagatggtcgcgttgctggggccgtccggttccgggaaaaccacgctgctgcgcattatcgccggg

SEQ ID NO: 438659 - DNA, 75 bp, synthetic construct
  source 1..75: mol_type = other DNA
cttcgggcgatacgtttctgaaacccaatagcgcggaatacatccgctggaaaaccacagaaattagcaccagtg

SEQ ID NO: 438660 - DNA, 75 bp, synthetic construct
  source 1..75: mol_type = other DNA
ttagctataccgctacggaagatcagcttgagcaggcgaagtcctggtataaccagatgatggattccgcagaaa

SEQ ID NO: 438661 - DNA, 75 bp, synthetic construct
  source 1..75: mol_type = other DNA
aatcgtggcccagataaaactgctgacgccgcaaaaactggccgatttcttccatcaggcggtggtcgagccgca

SEQ ID NO: 438662 - DNA, 75 bp, synthetic construct
  source 1..75: mol_type = other DNA
tgacgatttctcgctgattaagtcagagaagaaatacgaccatccagagctgattgttgatgagtcgaatctgcg

SEQ ID NO: 438663 - DNA, 75 bp, synthetic construct
  source 1..75: mol_type = other DNA
atgataaaaaccacaccacataaaataacaatactcatgggactattgttatcgccttcggtatttgcaacggat

SEQ ID NO: 438664 - DNA, 75 bp, synthetic construct
  source 1..75: mol_type = other DNA
gcaaccaggcgtcggttggtggcataagtttttccaccaatgctaacaacggccttatggttaatgctaatggtt

SEQ ID NO: 438665 - DNA, 75 bp, synthetic construct
  source 1..75: mol_type = other DNA
aaagcaatgataaacagccttcattcttgtgggagcgttacaaggcgtttttcccaaccgcagaggcaaaattgc

SEQ ID NO: 438666 - DNA, 75 bp, synthetic construct
  source 1..75: mol_type = other DNA
ttcgcttccacggtaccgacgtgagccgtctgcacgcgcgggaccgtaaagtcggtttcgtgttccagcattacg

SEQ ID NO: 438667 - DNA, 75 bp, synthetic construct
  source 1..75: mol_type = other DNA
ggcatggtgcaggcattgggggcgaagctaagcgatgccaatggcaatgaaataggctttggcggcggcagcctt

SEQ ID NO: 438668 - DNA, 75 bp, synthetic construct
  source 1..75: mol_type = other DNA
ctgaatctggaggaacatattcacgattgtacgctggtgatcaccggtgaagggcgtattgacagccagagtata

SEQ ID NO: 438669 - DNA, 75 bp, synthetic construct
  source 1..75: mol_type = other DNA
ccgaacgtcacgcctgggttacagggccactgggcgagaaggtgaatgccagttgggggatctctggcgatggta

SEQ ID NO: 438670 - DNA, 75 bp, synthetic construct
  source 1..75: mol_type = other DNA
gacgagatgcagcccgataagggtcttgaaatgaccgttgcgctacgtgaaacagatgcagggcaaggcgtaccg

SEQ ID NO: 438671 - DNA, 75 bp, synthetic construct
  source 1..75: mol_type = other DNA
aataaaaacctggcaacagctaaaatcaacttctgtgctaaacgcattctgatacgtaatcaaatgagtaaaata

SEQ ID NO: 438672 - DNA, 75 bp, synthetic construct
  source 1..75: mol_type = other DNA
gtgctctgcaccgaatgtcctggtctcagctggcaaaagccgcggaagagtcgacagtacatcatgattatgccc

SEQ ID NO: 438673 - DNA, 75 bp, synthetic construct
  source 1..75: mol_type = other DNA
ggccgctgggatatacccctgcgtatcaggggccggtggatctcttcctgcgcccgtgggaagtggatatcagcc

SEQ ID NO: 438674 - DNA, 75 bp, synthetic construct
  source 1..75: mol_type = other DNA
gcagcgtgtggcactggcgcgtgcgcttgccgttgaaccgcaaattctgctgctcgatgaaccgtttggcgcgct

SEQ ID NO: 438675 - DNA, 75 bp, synthetic construct
  source 1..75: mol_type = other DNA
tgatgagccagggcaatattgaacaggctgacgcgccggatcaggtatggcgcgaaccggcgacccgttttgtgc

SEQ ID NO: 438676 - DNA, 75 bp, synthetic construct
  source 1..75: mol_type = other DNA
cgacggtggcgaaggaacggtggaagcgatgattgcagccacccagggttctgaacgtcacgcctgggttacagg

SEQ ID NO: 438677 - DNA, 75 bp, synthetic construct
  source 1..75: mol_type = other DNA
atatcaatgaattccgtaaattaatgaaagcctgccctgccggactttataagcaggatgacgcaggaaacattc

SEQ ID NO: 438678 - DNA, 75 bp, synthetic construct
  source 1..75: mol_type = other DNA
tgccgccacgctgactattaataaaaacctggcaaccgctaaaatcaacttctgtgctaagcgcattctgatgcg

SEQ ID NO: 438679 - DNA, 75 bp, synthetic construct
  source 1..75: mol_type = other DNA
tgcccgcgcaaatgctctcgcaggtgccatacttctcgcgagatgagcgacgtaaaattttgccctccatcactc

SEQ ID NO: 438680 - DNA, 75 bp, synthetic construct
  source 1..75: mol_type = other DNA
tcttgatacgcatatggcgagcaatctcaaagttatccagacgctgaatgaaaaaaatagttgcctgagaaaata

SEQ ID NO: 438681 - DNA, 75 bp, synthetic construct
  source 1..75: mol_type = other DNA
cgtgatatgctggttttccgacaaaccgtggaatttaagtgcattgaacttgctgcacagcacgcagatgatgaa

SEQ ID NO: 438682 - DNA, 75 bp, synthetic construct
  source 1..75: mol_type = other DNA
tatgcatcttagtgaagctgcgtttcgtgatatgctggttttccgacaaaccgtggaatttaagtgcattgaact

SEQ ID NO: 438683 - DNA, 75 bp, synthetic construct
  source 1..75: mol_type = other DNA
gaaggaaaacgatgcctgactgaaaaactcggttcctgcagctctcatctgtgctggccagaaggatattataat

SEQ ID NO: 438684 - DNA, 75 bp, synthetic construct
  source 1..75: mol_type = other DNA
cccagactacccaataattaattatgaaaactttatttacagaatcttcaccaaatattggtgggcaagagttgc

SEQ ID NO: 438685 - DNA, 75 bp, synthetic construct
  source 1..75: mol_type = other DNA
cctaggtttatggcctgaaagagggttattccgtcatcacagaattgaggatcgtaaacggcttactgatgcatt

SEQ ID NO: 438686 - DNA, 75 bp, synthetic construct
  source 1..75: mol_type = other DNA
agatgctgaaaggccacaaagaggtgctgatttttggcggccaggaagtggaaacgaagcgttttgataaggtca

SEQ ID NO: 438687 - DNA, 75 bp, synthetic construct
  source 1..75: mol_type = other DNA
gccgctggtggttattgggctgatgattttacgtggtatcaccagttatatttccagttactgcatctcctgggt

SEQ ID NO: 438688 - DNA, 75 bp, synthetic construct
  source 1..75: mol_type = other DNA
gaaaacggcgtgttgctctctggcggtcagcgtcagcgtattgctatcgctcgagccttgttgcgtgatagcccg

SEQ ID NO: 438689 - DNA, 75 bp, synthetic construct
  source 1..75: mol_type = other DNA
atgaagtatgtaagttttagaataagtaatgatgattatgaaaaattatttaccgttattaaagacgtttcaaat

SEQ ID NO: 438690 - DNA, 75 bp, synthetic construct
  source 1..75: mol_type = other DNA
atagtggttatcgacaatgtttagttgggctggtcacaataaacaattcaaatgcaaattctccgtacctatcta

SEQ ID NO: 438691 - DNA, 75 bp, synthetic construct
  source 1..75: mol_type = other DNA
gcaaaattggcaatatgtaacgttaactgtacatgatttaaaattggctggcggggaagtagtaaaatattttat

SEQ ID NO: 438692 - DNA, 75 bp, synthetic construct
  source 1..75: mol_type = other DNA
cctgattgtacaggggcgggctgatgatgtcatgctgcgctggtctgaggtcagggaaatgagccggagcgggct

SEQ ID NO: 438693 - DNA, 75 bp, synthetic construct
  source 1..75: mol_type = other DNA
atcatcgaagccatcctggagcgtactggcgcgcaagatggcgatatgattttcttcggtgccgacaacaagaaa

SEQ ID NO: 438694 - DNA, 75 bp, synthetic construct
  source 1..75: mol_type = other DNA
cgaagaagcgcgtctgaaataccgctatcttgatctgcgtcgcccggaaatggctcagcgcctgaaaacccgtgc

SEQ ID NO: 438695 - DNA, 75 bp, synthetic construct
  source 1..75: mol_type = other DNA
tacctcgacctgcgtcgcccggaaatggctcagcgcctgaaaacccgcgctaaaatcaccagcctggtgcgccgt

SEQ ID NO: 438696 - DNA, 75 bp, synthetic construct
  source 1..75: mol_type = other DNA
ctgaaagctgcaccggaaaatgcggtggcgaacgcttacgatatggtcatcaatggttacgaagtgggcggtggt

SEQ ID NO: 438697 - DNA, 75 bp, synthetic construct
  source 1..75: mol_type = other DNA
gaccgacgttgccgatctgctgaaatctgttgagtttgcagtatttgcaggtccggcgaacgatccgaaaggccg

SEQ ID NO: 438698 - DNA, 75 bp, synthetic construct
  source 1..75: mol_type = other DNA
tctttccatggcggcctgattggcgtaattgtggtgatgattatctttgctcgccgcaccaaacgttctttcttc

SEQ ID NO: 438699 - DNA, 75 bp, synthetic construct
  source 1..75: mol_type = other DNA
acgacgggcgaatcgtccgggcagcggctggaccaaaaatgaagttgaaaacttactctatgcgggcttcctcgg

SEQ ID NO: 438700 - DNA, 75 bp, synthetic construct
  source 1..75: mol_type = other DNA
aaggattatattcagatcgctgaagaacttggattccattatttatatacaacagaaagaagaatgaatgctcct

SEQ ID NO: 438701 - DNA, 75 bp, synthetic construct
  source 1..75: mol_type = other DNA
tgcgcctgaaagtgggtaaagaccttggtctgaccgacgaaagcaaatgggcaccgctgtgggttatcgacttcc

SEQ ID NO: 438702 - DNA, 75 bp, synthetic construct
  source 1..75: mol_type = other DNA
tcgacgaatacggtaacttcgttaaaatctacggcgcgaaaggtctggcttacatcaaagttaacgaacgcgcga

SEQ ID NO: 438703 - DNA, 75 bp, synthetic construct
  source 1..75: mol_type = other DNA
agccacgccggaaggcgcgcgtgactacctggtgccttctcgtgtgcacaaaggtaaattctacgcactgccgca

SEQ ID NO: 438704 - DNA, 75 bp, synthetic construct
  source 1..75: mol_type = other DNA
cccaacgctggcaaactgtcgcgctggggatgccacggctctgctcagcacagcgtctggcgggggcgatggtag

SEQ ID NO: 438705 - DNA, 75 bp, synthetic construct
  source 1..75: mol_type = other DNA
aaagtatcaacgcagcaccgactactcgtcattattaccctcagtggtttacctctcccactaccccgactggcg

SEQ ID NO: 438706 - DNA, 75 bp, synthetic construct
  source 1..75: mol_type = other DNA
cgttgttgctggaaggaaaaagcgttaatgcaacgaggattactggtgcaggcgggcgagcagagcgcgcaagtt

SEQ ID NO: 438707 - DNA, 75 bp, synthetic construct
  source 1..75: mol_type = other DNA
ttctgctgcagcaaaaggaacggctggacgcgatagaatcaacttctaaaaatggaatgatgatcctttccagtc

SEQ ID NO: 438708 - DNA, 75 bp, synthetic construct
  source 1..75: mol_type = other DNA
catcagaacatcatttgccgtgagtgccggcagagtgaggttatgcagcgtgtgctggcgttctatcagggtaat

SEQ ID NO: 438709 - DNA, 75 bp, synthetic construct
  source 1..75: mol_type = other DNA
ggcgttgttgcttgacgatttacgcctgaaagcgacgcaatatctggctgaaagtatcaatgcggcaccgactac

SEQ ID NO: 438710 - DNA, 75 bp, synthetic construct
  source 1..75: mol_type = other DNA
atttattgcgatatttcatcggctgggtatcggttatgtggagcttcaggaacggcagcagggaaaggactggga

SEQ ID NO: 438711 - DNA, 75 bp, synthetic construct
  source 1..75: mol_type = other DNA
cactttcctgaaagggcgagtagggcgcaaagtggcggatttctttatggatttcctcggtgccagcgaagggtt

SEQ ID NO: 438712 - DNA, 75 bp, synthetic construct
  source 1..75: mol_type = other DNA
gtcaaagcctgaacgatcaaatcagcgcccagcagcgttatcttgcgtcgctgcaaattactttgcaacgggcgc

SEQ ID NO: 438713 - DNA, 75 bp, synthetic construct
  source 1..75: mol_type = other DNA
gggtgaatgtcaccactcagggccgacgggccattgaataccactaccccgatgaacacaccgtcatccgctgta

SEQ ID NO: 438714 - DNA, 75 bp, synthetic construct
  source 1..75: mol_type = other DNA
atgacgcccgtggaatatattttaaaagagaataaaaattgcaatatgtggtggacccatacatctccttgcctt

SEQ ID NO: 438715 - DNA, 75 bp, synthetic construct
  source 1..75: mol_type = other DNA
atgacgcccgtggaatatattttaaaagagaataaaaattgcaatatgtggtggacccatacaattaatttaaat

SEQ ID NO: 438716 - DNA, 75 bp, synthetic construct
  source 1..75: mol_type = other DNA
atgaaattttactctttgaggatctggcgttgtttaacctgaaactggcggaatatctggcgctgtataacagca

SEQ ID NO: 438717 - DNA, 75 bp, synthetic construct
  source 1..75: mol_type = other DNA
atcaaaaagggactttgaaaaagcaaatcagcagataggtatttcagaaaagaaattagttactataactaatgg

SEQ ID NO: 438718 - DNA, 75 bp, synthetic construct
  source 1..75: mol_type = other DNA
tgtactcaaggagatcaggcgtctgagaactgagttacccaatctcggcaaagagcagatttttgtcaggctgaa

SEQ ID NO: 438719 - DNA, 75 bp, synthetic construct
  source 1..75: mol_type = other DNA
gctattttgggtattaccgagcaactgcttatgcgatgaaacactctcttatgcccgagattgcgaagttaagaa

SEQ ID NO: 438720 - DNA, 75 bp, synthetic construct
  source 1..75: mol_type = other DNA
attacggcagcctgacgcccgcatggcacgttacttccgcttgttcagccagttcacgatcatactggcaagaat

SEQ ID NO: 438721 - DNA, 75 bp, synthetic construct
  source 1..75: mol_type = other DNA
gccctggtgcgaacagcgctatctggcctgtccgagtgtttccaccatcggcagaatgatcgctgccgcacatga

SEQ ID NO: 438722 - DNA, 75 bp, synthetic construct
  source 1..75: mol_type = other DNA
ccctgtcgggatatattgctaactggaacaattctccccaaaaagattatcccgcttcggatctgtttgcctttt

SEQ ID NO: 438723 - DNA, 75 bp, synthetic construct
  source 1..75: mol_type = other DNA
tgcattgacagaattagcgaatcaattttttttacaccgcaagaattcaatcttgcagatcaccacattgaagga

SEQ ID NO: 438724 - DNA, 75 bp, synthetic construct
  source 1..75: mol_type = other DNA
atagatgacatttccacgagcgatagcaataaaacatcagagcagtcttctcgcttagaaaaagctttattaggt

SEQ ID NO: 438725 - DNA, 75 bp, synthetic construct
  source 1..75: mol_type = other DNA
agtgtttccaccatcggcagaatgatcgctgccgcacatgataaaatgcggatgatacctgtgcgtctgggatcg

SEQ ID NO: 438726 - DNA, 75 bp, synthetic construct
  source 1..75: mol_type = other DNA
aaactttacttgacctgaattatgcccgtcaggttaacgaaatttctttatataccgccttaggggcggttggca

SEQ ID NO: 438727 - DNA, 75 bp, synthetic construct
  source 1..75: mol_type = other DNA
taaatatgcctcttactgtgccagtttaaccaaagcgcaaatagttgaaatttatcagcagtacttagaccgcta

SEQ ID NO: 438728 - DNA, 75 bp, synthetic construct
  source 1..75: mol_type = other DNA
ttctccctctggcttaaatgaaattcactacagagtgatggagttgttaactaattttgcaaattcatcaagata

SEQ ID NO: 438729 - DNA, 75 bp, synthetic construct
  source 1..75: mol_type = other DNA
aaaattgcagatgcagttcctgaaaaaacaagtgatgtgtctgaggctgaaatgccttcaccttcagataatcat

SEQ ID NO: 438730 - DNA, 75 bp, synthetic construct
  source 1..75: mol_type = other DNA
tgaaaaagcacgcttaaaggatcaggcgcagctacagaaacggcaggaaacagccgagctaaaatttcgtcatgc

SEQ ID NO: 438731 - DNA, 75 bp, synthetic construct
  source 1..75: mol_type = other DNA
aatattgaccagatcatcccaacgccggaagcgaaagagttgatgatcggcattaatgccaaggaagcggaagaa

SEQ ID NO: 438732 - DNA, 75 bp, synthetic construct
  source 1..75: mol_type = other DNA
tggttattgggtcaaggaattagcattgcctgcttcaaaatcacgccttattcactgggtgaacagctactgatt

SEQ ID NO: 438733 - DNA, 75 bp, synthetic construct
  source 1..75: mol_type = other DNA
ccatcagtctgctgccggaagagacccgcccgcgcgtcatcggtctggcgccgacgcatcgcgcggtcggggaaa

SEQ ID NO: 438734 - DNA, 75 bp, synthetic construct
  source 1..75: mol_type = other DNA
ctcggcacagataagatcggtaaaacaggttttatcgagaacgtgtacgcgaaccagatagcgttcgggaagctt

SEQ ID NO: 438735 - DNA, 75 bp, synthetic construct
  source 1..75: mol_type = other DNA
cgccctgcaggacgggacggcgtttattccgggcggaacactcatcgtggatcaggcggagaagctgagcctgaa

SEQ ID NO: 438736 - DNA, 75 bp, synthetic construct
  source 1..75: mol_type = other DNA
attatgggtattattggtctgaggattgggtgtgaaatgataattcttctttttaatatttataagcaggttaaa

SEQ ID NO: 438737 - DNA, 75 bp, synthetic construct
  source 1..75: mol_type = other DNA
ttttaatatttataagcaggttaaaaagattgctgatgcggtaccggataaaataaacgaacaggctgaggatag

SEQ ID NO: 438738 - DNA, 75 bp, synthetic construct
  source 1..75: mol_type = other DNA
tattctggaaccccgtaacgaccgggcggtgaaaagcgcagatctgctgttcggtcgggcaaggccactggatga

SEQ ID NO: 438739 - DNA, 75 bp, synthetic construct
  source 1..75: mol_type = other DNA
cgatttcacggctaaagcctcacaagccagcttcatgcaatcgctcacgttgtcagcattaagcggtcaatcttc

SEQ ID NO: 438740 - DNA, 75 bp, synthetic construct
  source 1..75: mol_type = other DNA
tgccttcctggatgaataaaggcgaaccggggaaattgctgaaaacggcgcggcggttctgggctgaggtttacg

SEQ ID NO: 438741 - DNA, 75 bp, synthetic construct
  source 1..75: mol_type = other DNA
aaaatgcctacctttcagccacccgctcggggctggaatcgaacgagatcgctactcttcagcgctccttgcctt

SEQ ID NO: 438742 - DNA, 75 bp, synthetic construct
  source 1..75: mol_type = other DNA
gcggcacccgctgataacaaactcgaacagcatgcctttgcgcatgccagagactacgaacgatacctggactga

SEQ ID NO: 438743 - DNA, 75 bp, synthetic construct
  source 1..75: mol_type = other DNA
aaaatggcgatctcctgctggaaattatccgtaaatatgggcgtacatgccgccgttaccagtttgaagtgatca

SEQ ID NO: 438744 - DNA, 75 bp, synthetic construct
  source 1..75: mol_type = other DNA
cagagatgatcgttattagttattcgactaatgttccttccggctacgaccgcgtttatagcattcgtattaacg

SEQ ID NO: 438745 - DNA, 75 bp, synthetic construct
  source 1..75: mol_type = other DNA
gggatgggatcagggagaatatgtggcgtatccggcagcgttaaacagtacggaaacagacagcgcgacgttcag

SEQ ID NO: 438746 - DNA, 75 bp, synthetic construct
  source 1..75: mol_type = other DNA
agcaataaaaggttttttatttatatcattagcactcgcaatgtgtgggccattgtattatggcgaatttattta

SEQ ID NO: 438747 - DNA, 75 bp, synthetic construct
  source 1..75: mol_type = other DNA
agcaaaccattctcgatcttacctattcccggcaggttaacgaaattaatctgtttaccgcgctgggtggcggtt

SEQ ID NO: 438748 - DNA, 75 bp, synthetic construct
  source 1..75: mol_type = other DNA
cgaacaaaaaattcagtcagcctttaaggatgtttccgacacgcttgcgctgcgcgacagccttagccagcaact

SEQ ID NO: 438749 - DNA, 75 bp, synthetic construct
  source 1..75: mol_type = other DNA
gcagagcgcatgggtattaaagcgcctaccatttcacgcatggaaaagaacgcatcacggatgagcattgataca

SEQ ID NO: 438750 - DNA, 75 bp, synthetic construct
  source 1..75: mol_type = other DNA
gcgggtgaaaaacacttcgctgctaccggtaagccgctgttctcttctcacatgatcgacctgtctgaagaatct

SEQ ID NO: 438751 - DNA, 75 bp, synthetic construct
  source 1..75: mol_type = other DNA
cattgataagtatagccaaaatagctagttatgctatgcctgtattcatggttttttggttgggttcactgttcg

SEQ ID NO: 438752 - DNA, 75 bp, synthetic construct
  source 1..75: mol_type = other DNA
taatccgccgcgttgccggaatcagccagcaggttgacgaacaggccatgcagccggacagcgtgaccgctgaaa

SEQ ID NO: 438753 - DNA, 75 bp, synthetic construct
  source 1..75: mol_type = other DNA
aacggcgtggatatgcgcgacatacgaatcagagtactagagttgctggcataccgtcgacgcgtggcgatgtat

SEQ ID NO: 438754 - DNA, 75 bp, synthetic construct
  source 1..75: mol_type = other DNA
gatgcgcggtgatggtatccagcttaatgatgtggatatgcgcaatatacgaaccagagtccttgagttgctggc

SEQ ID NO: 438755 - DNA, 75 bp, synthetic construct
  source 1..75: mol_type = other DNA
gcctccttttcgcaatgtcgtcgcctgacggtcttctctaaaaaagaggggataacgaccatcctgcggtgggat

SEQ ID NO: 438756 - DNA, 75 bp, synthetic construct
  source 1..75: mol_type = other DNA
ccagatgagcagaaaggggatatcactgctggtatggaggctataactccaatttggcgtgaatctttgcaggaa

SEQ ID NO: 438757 - DNA, 75 bp, synthetic construct
  source 1..75: mol_type = other DNA
taatccgtcgcgttaccggaatcagccaggaagcaggcaaacaggaggccacgcagccggacagcgtgatagccg

SEQ ID NO: 438758 - DNA, 75 bp, synthetic construct
  source 1..75: mol_type = other DNA
tgattcgccagattgccgggatcagaccaccagcaggcaaacaggaggccacgcagccggacagcgttatcgctg

SEQ ID NO: 438759 - DNA, 75 bp, synthetic construct
  source 1..75: mol_type = other DNA
taatccgccgcgtatctggaatcagccagcaggctgacgaacagaccacgcagccggacagcgtgacagccgaaa

SEQ ID NO: 438760 - DNA, 75 bp, synthetic construct
  source 1..75: mol_type = other DNA
atgaccgaagccgaaatgctcaaaatgattcgccgcgttaccggagccaaccaggcagcaggcaaacaggaggcc

SEQ ID NO: 438761 - DNA, 75 bp, synthetic construct
  source 1..75: mol_type = other DNA
accccctcaaaaaatctcataaatagcgaaaaaccgcgaggtcgccgccccgtaacgggccataattccaggaag

SEQ ID NO: 438762 - DNA, 75 bp, synthetic construct
  source 1..75: mol_type = other DNA
acgacaccagactatcagaacgatgggggcacaatgacagaagccgaactactgcgattaatccgtcgcgttgcc

SEQ ID NO: 438763 - DNA, 75 bp, synthetic construct
  source 1..75: mol_type = other DNA
ggatccgcgttcttgaaatgcaggcctacaatcgccgcgttgagatgtatcgggagaaggagaaaattacgtacc

SEQ ID NO: 438764 - DNA, 75 bp, synthetic construct
  source 1..75: mol_type = other DNA
tcgttcaaaacatcatttgttaatgctttttcatacaagtgggatgcatagtttatttcttgatgagttgtgttt

SEQ ID NO: 438765 - DNA, 75 bp, synthetic construct
  source 1..75: mol_type = other DNA
agatgaagtattaaaatcacgtgttgatgacaggaggtatccattacccgcaattccaaaaggggatgctgataa

SEQ ID NO: 438766 - DNA, 75 bp, synthetic construct
  source 1..75: mol_type = other DNA
tcgggcgtgtggtcaaaaggtaaaaaggttctccccggaacttctggaaacgcaccactggaaccctttgcgggt

SEQ ID NO: 438767 - DNA, 75 bp, synthetic construct
  source 1..75: mol_type = other DNA
aacactctattttgccgggcaggggatccagcaacaatggcagatgaagcgagccatgctttcaccacgttatac

SEQ ID NO: 438768 - DNA, 75 bp, synthetic construct
  source 1..75: mol_type = other DNA
catttatttatgaaacaatttcatgggagcatacattagccgggacaaatgcaatgagtaaatggcaggatcgta

SEQ ID NO: 438769 - DNA, 75 bp, synthetic construct
  source 1..75: mol_type = other DNA
tgttggtgttcaatacaaacttaatgaaaacaccaatattcgtgcatcgtcttcatggaataatactgatggagc

SEQ ID NO: 438770 - DNA, 75 bp, synthetic construct
  source 1..75: mol_type = other DNA
gtctaaaggtagagagttctctacattaatgtcctttgtaacaggccgcttaagcctatatggtgagaagcttgt

SEQ ID NO: 438771 - DNA, 75 bp, synthetic construct
  source 1..75: mol_type = other DNA
ggccagggcggtgttcttcaaccggcttggggaaatcagggatcggagcttcgagcagcagcgctaccgggccag

SEQ ID NO: 438772 - DNA, 75 bp, synthetic construct
  source 1..75: mol_type = other DNA
agtggctccggtcgcccctgaaccaatacaggaaggtcaaccggaagagcagccgcaaaccacacagacgcaacc

SEQ ID NO: 438773 - DNA, 75 bp, synthetic construct
  source 1..75: mol_type = other DNA
atcgtcgggggatcattattgccgccattgtattggtggtcggatttctgcttccatctgatgatacgcccaacg

SEQ ID NO: 438774 - DNA, 75 bp, synthetic construct
  source 1..75: mol_type = other DNA
ctgcaaagtgttgaactgcgccgccgcgtgcatgccggcctgaacaaggggtctgacgctcagtggaacgaaaac

SEQ ID NO: 438775 - DNA, 75 bp, synthetic construct
  source 1..75: mol_type = other DNA
tcgcgccgcgcatccgcgacctcggcgaaaccaagctgtacgtgccgcagggcgtgcaagcctacccgacgttgc

SEQ ID NO: 438776 - DNA, 75 bp, synthetic construct
  source 1..75: mol_type = other DNA
aacacggtctatctggaacgggctgcgcacgcgctgcgtggcaacggccatgccgttgatgacgcgctgttgcag

SEQ ID NO: 438777 - DNA, 75 bp, synthetic construct
  source 1..75: mol_type = other DNA
gcgttgaacaacatctggcgatggtatttcaccgattccttgaggggcactctcccataagcgctaacttaaggg

SEQ ID NO: 438778 - DNA, 75 bp, synthetic construct
  source 1..75: mol_type = other DNA
cgaagccgatgatgcatcataaaggtaagtttggtccgcatcaggatatgatgtttaaagacctgaacctgaccg

SEQ ID NO: 438779 - DNA, 75 bp, synthetic construct
  source 1..75: mol_type = other DNA
ggctaacctggcccatgccgctgataccactaccgcagcaccggctgacgccaagccgatgatgcaccataaagg

SEQ ID NO: 438780 - DNA, 75 bp, synthetic construct
  source 1..75: mol_type = other DNA
gattatgaggttgttgaatatttgagccgacccgatccggtgagcgcaaaatctcgccagcaaacagctcttgag

SEQ ID NO: 438781 - DNA, 75 bp, synthetic construct
  source 1..75: mol_type = other DNA
tcgtcagccggatgaagtgctcgatcgcgaagcgggtaatcgtctactggcgtcagaaaaagatcgccatgaaca

SEQ ID NO: 438782 - DNA, 75 bp, synthetic construct
  source 1..75: mol_type = other DNA
gccgtggatcgacggtctgttggacgcgggtgaaaaacacttcgcagctaccggtaagccgctgttctcttctca

SEQ ID NO: 438783 - DNA, 75 bp, synthetic construct
  source 1..75: mol_type = other DNA
ctgcaagagaacatcgaaatctgctctaaatacctggagcgtatgtccaaaatcggcatgactctggaaatcgaa

SEQ ID NO: 438784 - DNA, 75 bp, synthetic construct
  source 1..75: mol_type = other DNA
atagttattttcgcgttgacccaagggatcagaagtgtttcattttttattttatttgccgcatttttttgttta

SEQ ID NO: 438785 - DNA, 75 bp, synthetic construct
  source 1..75: mol_type = other DNA
gttcgtaactatagccgtaacactaactatgagatcgttgccacagttgatgggctggatgttctgaacggcaag

SEQ ID NO: 438786 - DNA, 75 bp, synthetic construct
  source 1..75: mol_type = other DNA
actacgagatcgttgctactgttgatggcctggatgtgctgaacggcaagcaaggttcgctgaataacaacggct

SEQ ID NO: 438787 - DNA, 75 bp, synthetic construct
  source 1..75: mol_type = other DNA
gatgatacgcccaacgcgccggtggtgacgcgtgaagcgcagttagatattcagtcgcaatcacaaccaccgaca

SEQ ID NO: 438788 - DNA, 75 bp, synthetic construct
  source 1..75: mol_type = other DNA
atgcccgggcgctttgaactaaaaccaaccctggagaaagtctggcacgcgccggataactttcgcctcatggac

SEQ ID NO: 438789 - DNA, 75 bp, synthetic construct
  source 1..75: mol_type = other DNA
gatgtgaatgttgtggccattcagcatgcgctacagcagaccggcctgaaagcgcagcctgttgatgtcatcgtc

SEQ ID NO: 438790 - DNA, 75 bp, synthetic construct
  source 1..75: mol_type = other DNA
gctggaacggttgattgcgcaaaacccggttagttacaacttccatgtgccgttggcagatggtggcgtcctgct

SEQ ID NO: 438791 - DNA, 75 bp, synthetic construct
  source 1..75: mol_type = other DNA
tacggtcgcgtcaatcgagaaggttataccgtagtagcgctctccctgtactggaaaaatgcctggtgcaaagtg

SEQ ID NO: 438792 - DNA, 75 bp, synthetic construct
  source 1..75: mol_type = other DNA
aaccagtggcgctcttaccgtgtcgaacccggcaaaacgatggcgcaactgttccgcgaccacggtctacccgcc

SEQ ID NO: 438793 - DNA, 75 bp, synthetic construct
  source 1..75: mol_type = other DNA
ccgacagaagaacagctgcgggcgcaattagtcacaccacaaaatgatcctgatcaggtggctccggtcgctcca

SEQ ID NO: 438794 - DNA, 75 bp, synthetic construct
  source 1..75: mol_type = other DNA
tgatggatggcgttgaacaacatctggcgatggtatttcaccgattccttgaggggaacgctcccataagcgcta

SEQ ID NO: 438795 - DNA, 75 bp, synthetic construct
  source 1..75: mol_type = other DNA
atgacagaagccgaaatactgcgattaatccgccgcgttgccggaatcagccagcagcatgacgaacaggccacg

SEQ ID NO: 438796 - DNA, 75 bp, synthetic construct
  source 1..75: mol_type = other DNA
gtcatatcgtcgccgcgtggagatgtatcgggagagcgagaaaaagacttaccagtggaagaaaccggagcggct

SEQ ID NO: 438797 - DNA, 75 bp, synthetic construct
  source 1..75: mol_type = other DNA
attgtcggattacgttgggctgttaacacgtaacccgcgctacgccgccgtgacgaccgccgcgagtgcggaaca

SEQ ID NO: 438798 - DNA, 75 bp, synthetic construct
  source 1..75: mol_type = other DNA
agttacacgttccttcctctccacaactgatcaccacgccgacgctgtggcatctcgcaacgccctttgaaggta

SEQ ID NO: 438799 - DNA, 75 bp, synthetic construct
  source 1..75: mol_type = other DNA
atcctggcagtcgttctcccgccaggaaaaacagacctcagcccgccgttttacccgcagccagtcgctgaacgt

SEQ ID NO: 438800 - DNA, 75 bp, synthetic construct
  source 1..75: mol_type = other DNA
aaaatccgccagaacgccagcggcgtagtgacgggcttaaccattgatacggggaataatcaacaggttctgttt

SEQ ID NO: 438801 - DNA, 75 bp, synthetic construct
  source 1..75: mol_type = other DNA
cagcagattgcccaacagatgacggcgggcaaagggctggggctggcagagatgatggttaaacagatgacgcca

SEQ ID NO: 438802 - DNA, 75 bp, synthetic construct
  source 1..75: mol_type = other DNA
cgggcaaaggtctggggcttgcagagatgatggttaaacagatgacgccagaacaaccattgccagaggagtcca

SEQ ID NO: 438803 - DNA, 75 bp, synthetic construct
  source 1..75: mol_type = other DNA
tggtgctgctcgatcttgggaaactagccaaagttcgccaaattattgaacatatgtggtttcaacgtaaggcat

SEQ ID NO: 438804 - DNA, 75 bp, synthetic construct
  source 1..75: mol_type = other DNA
attgccattatcataaaagaaatacagctccatctgattaagaacagaaactgtcagtatatcattcaggcagat

SEQ ID NO: 438805 - DNA, 75 bp, synthetic construct
  source 1..75: mol_type = other DNA
gatataatgtctctgcattgtttatttcaaacacattcaaaaacagagttaatgtatttaaaaagacaagcaagt

SEQ ID NO: 438806 - DNA, 75 bp, synthetic construct
  source 1..75: mol_type = other DNA
ctgtgtgcagcgtttaatgcctggttgttaccggcatggaaactctctaccgtgcgcacgccaatccgcgaaggc

SEQ ID NO: 438807 - DNA, 75 bp, synthetic construct
  source 1..75: mol_type = other DNA
ctggagtgaaaagcattttcgtctggaacaccggttgatggctgggctgttgataatgtcattaagcatgatgcc

SEQ ID NO: 438808 - DNA, 75 bp, synthetic construct
  source 1..75: mol_type = other DNA
aattacacagcttccagatggtatcagcgataccgtgcatttacgactttgctacagcaaacctcaacttttgct

SEQ ID NO: 438809 - DNA, 75 bp, synthetic construct
  source 1..75: mol_type = other DNA
cagtaccgccacagtacaacacatggctgcagttgcttctggcctcccctgtcgtgttgtggtgtggctggccat

SEQ ID NO: 438810 - DNA, 75 bp, synthetic construct
  source 1..75: mol_type = other DNA
agtgccggagtcacccttctcaaaggcgacttgatgatactgaacagtaagcgtgcagtgagaaccgtattgacg

SEQ ID NO: 438811 - DNA, 75 bp, synthetic construct
  source 1..75: mol_type = other DNA
gaggctctgttacgtgtgacggccgccgtagaaaaaggatcacagcatccgctgggtatggcagtggtcaacgcc

SEQ ID NO: 438812 - DNA, 75 bp, synthetic construct
  source 1..75: mol_type = other DNA
ttaaatcacatatcaatgcacgacagatataatgtctctgcattgtttatttcaaacacattcaaaaacagagtt

SEQ ID NO: 438813 - DNA, 75 bp, synthetic construct
  source 1..75: mol_type = other DNA
gaagatgccagtgaacgttcccatcaccatcaccatcaccacgaagtcaaccctgatcagataaaacagcctcac

SEQ ID NO: 438814 - DNA, 75 bp, synthetic construct
  source 1..75: mol_type = other DNA
ccgccagctgtgagagcaaatttaaagctcatcccgatcattatcttacagaagatgccagtgaacattcccatc

SEQ ID NO: 438815 - DNA, 75 bp, synthetic construct
  source 1..75: mol_type = other DNA
gctggtcgtgctggggttctttgttgtcttcccgctgatctctatccgcttcgttgatcaaatgggctgggccgc

SEQ ID NO: 438816 - DNA, 75 bp, synthetic construct
  source 1..75: mol_type = other DNA
atgaatatcgacacgacaataacgatcgatacgctcctaaattccggtctggcacttctcggttggttttacatc

SEQ ID NO: 438817 - DNA, 75 bp, synthetic construct
  source 1..75: mol_type = other DNA
gtgaatatcgacacgacaataacgatcgatacgctcctgaataccggtctggcacttctcggttggtttttcatc

SEQ ID NO: 438818 - DNA, 75 bp, synthetic construct
  source 1..75: mol_type = other DNA
cataactatgaagaagcgtcaccacaaccatgcgccatgacattacggccttttgaggctgtctggtggttacag

SEQ ID NO: 438819 - DNA, 75 bp, synthetic construct
  source 1..75: mol_type = other DNA
aaccgaacctcggcgtgcgcactaacgccttgatcgacacgccgttcctgatgaaaaccgccgaaaccattcgcc

SEQ ID NO: 438820 - DNA, 75 bp, synthetic construct
  source 1..75: mol_type = other DNA
ccccattaatgtcaaaacatatcatgggggaaatttatgatgcattaaataatattgaaacgaatgctattaagg

SEQ ID NO: 438821 - DNA, 75 bp, synthetic construct
  source 1..75: mol_type = other DNA
aagatagcgacaaaaggcgacctgatgatagtgatgttccgacaggagagagcagagaaaggggaatcagcatga

SEQ ID NO: 438822 - DNA, 75 bp, synthetic construct
  source 1..75: mol_type = other DNA
agcattccacaaagcgcattaattattggcggcggcgatgtcgcgatggacgttgccagtacgctgaaagttctc

SEQ ID NO: 438823 - DNA, 75 bp, synthetic construct
  source 1..75: mol_type = other DNA
tcgatggattcacgccagtagccgtggaaggcaataaagtcacgtttaagcatgtacggttaccgggcgaactga

SEQ ID NO: 438824 - DNA, 75 bp, synthetic construct
  source 1..75: mol_type = other DNA
ctgccgagacaattcgcgaaaataatgccctcggtgccgtttgtgccagagtgtgcccgacggagaaattatgcc

SEQ ID NO: 438825 - DNA, 75 bp, synthetic construct
  source 1..75: mol_type = other DNA
aaaacactccaaaaggagtacgaaatggtaaagaagtctaaaaagaccgagcaagagattgaggatttcataaag

SEQ ID NO: 438826 - DNA, 75 bp, synthetic construct
  source 1..75: mol_type = other DNA
gagttagatgagtttccggcaagcgaaaaagagtttgccagcgcccgggagctgggcgtttcgatcatcgatgga

SEQ ID NO: 438827 - DNA, 75 bp, synthetic construct
  source 1..75: mol_type = other DNA
ggcaagcaagaaagagttcaccggtgctcagaaattgggggtatcgattatcgatggctttacgcctgtggcggt

SEQ ID NO: 438828 - DNA, 75 bp, synthetic construct
  source 1..75: mol_type = other DNA
ttaccaaaacggaaaatgaccgcgttatcggaggaaccataaatcagaccggtagcctcatcatgcaggcggaga

SEQ ID NO: 438829 - DNA, 75 bp, synthetic construct
  source 1..75: mol_type = other DNA
aaatcgtgtcggtacttctcgaatataactttttgtttttttttaatattgcattcataaatgtccgacatgaaa

SEQ ID NO: 438830 - DNA, 75 bp, synthetic construct
  source 1..75: mol_type = other DNA
gtgaaaactgaaatcgcaaaagcctccaacgttgcagctaaagctggtgagaacgtaggcggggggattgatgat

SEQ ID NO: 438831 - DNA, 75 bp, synthetic construct
  source 1..75: mol_type = other DNA
ctattttaacgatgcctacttctgggttgtaaaccgttctctgggggttaccgaagtacaggaacagatccgggt

SEQ ID NO: 438832 - DNA, 75 bp, synthetic construct
  source 1..75: mol_type = other DNA
gggaatgtcaagattggctttcaaggacaaactactgaaaaatcaacttactccacgttaggaagcaggtttaga

SEQ ID NO: 438833 - DNA, 75 bp, synthetic construct
  source 1..75: mol_type = other DNA
ttaaaagagagctagctgccatatttcagtacgagctatgtgaaacaaatattgatactgattattcgttcagct

SEQ ID NO: 438834 - DNA, 75 bp, synthetic construct
  source 1..75: mol_type = other DNA
aacgattgaacgctggcagtctcaggggctatcttgcgtctccggaggtagcaagggtgttgaatcggtgtttga

SEQ ID NO: 438835 - DNA, 75 bp, synthetic construct
  source 1..75: mol_type = other DNA
caactgcccgccacatttggcccccgggatctgtctgcactgtggcactttctcgattcccttcctcgcgaattt

SEQ ID NO: 438836 - DNA, 75 bp, synthetic construct
  source 1..75: mol_type = other DNA
catttcgcatcaggcagcattgcggcattgcgatgatttagtgactgaatttttgacccgtatgtcgccgttagc

SEQ ID NO: 438837 - DNA, 75 bp, synthetic construct
  source 1..75: mol_type = other DNA
aaagccggaagtggttctgcgctggcgcgagcaaaccagcgatgattttcgtttttgttttaaatttccggcgac

SEQ ID NO: 438838 - DNA, 75 bp, synthetic construct
  source 1..75: mol_type = other DNA
cgccatcattacgggttcattaggagggatgaagagtgacctgatgattcagtctattacgaaaggatttggcgg

SEQ ID NO: 438839 - DNA, 75 bp, synthetic construct
  source 1..75: mol_type = other DNA
ggaactggtacatactctgtgggaagacttgcgtaaaacactcccagagatcggagcagttccggctattccaca

SEQ ID NO: 438840 - DNA, 75 bp, synthetic construct
  source 1..75: mol_type = other DNA
aagttccggttcatgccgtattaacagcgacaaacccactgatccgttttatcggcagcgatgatatgacgcaaa

SEQ ID NO: 438841 - DNA, 75 bp, synthetic construct
  source 1..75: mol_type = other DNA
cgatgaaaagggaataaaacatgatataggtaacgtaaagatcgcctttaaaggtcaaacgacagatacgcctac

SEQ ID NO: 438842 - DNA, 75 bp, synthetic construct
  source 1..75: mol_type = other DNA
gatgggcggtgcgctggcattctggatggggaatccgttgttaaacccggcgacgctggtgtttatggggtttgt

SEQ ID NO: 438843 - DNA, 75 bp, synthetic construct
  source 1..75: mol_type = other DNA
gttttcgctaccaggtatgatgtgtacctgctgtgcggcaccggtcgcggcggggatgcgtcgccagcaagtgtc

SEQ ID NO: 438844 - DNA, 75 bp, synthetic construct
  source 1..75: mol_type = other DNA
gcggtatggaaagcggcggtgctgggggtgatgcttgggtcgttgattcaggtgctgattccacgtgactggctg

SEQ ID NO: 438845 - DNA, 75 bp, synthetic construct
  source 1..75: mol_type = other DNA
gtcgataatggtgggggtgggcaaaggcgcccaggccggggtgttaatcaagaatgccgaagcccttgagcgtct

SEQ ID NO: 438846 - DNA, 75 bp, synthetic construct
  source 1..75: mol_type = other DNA
cagcccagaccagataaaacagcctcaccatcaggcggagaaagatatttctgaaggtgtgtggacatgtccgat

SEQ ID NO: 438847 - DNA, 75 bp, synthetic construct
  source 1..75: mol_type = other DNA
gcggtatggaaagcggcggtgctgggggtgatcctcggttcgttgattcaggtgctgatcccgcgtgactggttg

SEQ ID NO: 438848 - DNA, 75 bp, synthetic construct
  source 1..75: mol_type = other DNA
taaaagatacgctcaaccgaaaagggttaatcatcgtatcaatggatttgcctacgagctggcagatggttgaga

SEQ ID NO: 438849 - DNA, 75 bp, synthetic construct
  source 1..75: mol_type = other DNA
ctcttcttttaaagaactatgattctttaaaagttgaaccaccaaaatttagcagcctttataataatgatggcg

SEQ ID NO: 438850 - DNA, 75 bp, synthetic construct
  source 1..75: mol_type = other DNA
ttattcaaaattgccaagcagttttcaaaaacttgatgatgaattcttttcgttaggagaaggacttgcgtttta

SEQ ID NO: 438851 - DNA, 75 bp, synthetic construct
  source 1..75: mol_type = other DNA
gatgggcggtgcgctggcattctggatgggcaatccggtgttaaacccggcgacgctggtgtttatggggttcgt

SEQ ID NO: 438852 - DNA, 75 bp, synthetic construct
  source 1..75: mol_type = other DNA
cggcaacgcccattcagtggtggaaacccgcgcttttctttctcgttgtcattgccggtctctggtatgtgaaat

SEQ ID NO: 438853 - DNA, 75 bp, synthetic construct
  source 1..75: mol_type = other DNA
ttgatagatatccttgccacaatggcgcgacaggattacgaaacacgccgtaaacgccaacagcaaggcatagag

SEQ ID NO: 438854 - DNA, 75 bp, synthetic construct
  source 1..75: mol_type = other DNA
tcatcggcctggcgatgaatagtctggatccggtaaaagcagccgattattcacgcaccattactcagacgctta

SEQ ID NO: 438855 - DNA, 75 bp, synthetic construct
  source 1..75: mol_type = other DNA
aaaccatcggtaacgaccagaagataacggtggggttggggcagacggtgaatgtggggagcaaaaaggaaggtg

SEQ ID NO: 438856 - DNA, 75 bp, synthetic construct
  source 1..75: mol_type = other DNA
ctgccgaacaactttatggtcgtgctatttcagcggcgtttactgctcgtcataaagggaagaatcaaattcagt

SEQ ID NO: 438857 - DNA, 75 bp, synthetic construct
  source 1..75: mol_type = other DNA
cccagaccagcaggtttatgggagatggtgctactaaaaatatcggtgacagcatggcacggcacatcgaaaaat

SEQ ID NO: 438858 - DNA, 75 bp, synthetic construct
  source 1..75: mol_type = other DNA
gccgatccgtggaccattatccctatgaaaatcccctactggcggcctaagtcaaaccttatgcctgtgcacact

SEQ ID NO: 438859 - DNA, 75 bp, synthetic construct
  source 1..75: mol_type = other DNA
gatggattccatcatcaaaacaccgccacaggaactggcgcaaatccttgaatcggtctttaaagagggaaacga

SEQ ID NO: 438860 - DNA, 75 bp, synthetic construct
  source 1..75: mol_type = other DNA
aaattatgcgcggcgaaaccctcgaaatgatttatggcatcccgatgggtattctgccgcatccggcgggtgctg

SEQ ID NO: 438861 - DNA, 75 bp, synthetic construct
  source 1..75: mol_type = other DNA
ttgacgtgctggcgctggtgcatcgtttaagtcaggaacgtggtctgacggtcattgccgtgctgcacgatatta

SEQ ID NO: 438862 - DNA, 75 bp, synthetic construct
  source 1..75: mol_type = other DNA
ttgtacaagattgggtcaatccaattaagcgtgctgaagacaagaacaaaacaggcagggaggcgaagaaaaata

SEQ ID NO: 438863 - DNA, 75 bp, synthetic construct
  source 1..75: mol_type = other DNA
gtaaaagtttcataccagagcgtccggtgccggtgatggtcacccgactgtttgagctaccggtacaaatctcgc

SEQ ID NO: 438864 - DNA, 75 bp, synthetic construct
  source 1..75: mol_type = other DNA
gctggaactgttaacccgctatcgcattcagccgggaacactgattctggaagtgacagaaagccgacgtattga

SEQ ID NO: 438865 - DNA, 75 bp, synthetic construct
  source 1..75: mol_type = other DNA
tatctcaaacattttctttagaaacaaaaaggatttagagaaaataatgggaaaaagcctttattcatattatac

SEQ ID NO: 438866 - DNA, 75 bp, synthetic construct
  source 1..75: mol_type = other DNA
acggtgacgacgttattgcattgatgcacgatacaggtgaaaccacctttaaaaggttgatagaagacggaacac

SEQ ID NO: 438867 - DNA, 75 bp, synthetic construct
  source 1..75: mol_type = other DNA
ctggccgtgcgtgctgagcgtgagcaattgaaagcggaactggcgaagctggaaacagagatggcggggtatttg

SEQ ID NO: 438868 - DNA, 75 bp, synthetic construct
  source 1..75: mol_type = other DNA
agtgctgatacctataaagactttatccttaccatgctgttccttaagtacatttcggatgtctggcaggatcat

SEQ ID NO: 438869 - DNA, 75 bp, synthetic construct
  source 1..75: mol_type = other DNA
gcagttgctggaagacttcgccggtgaagatcttaacctgaagccaagccgtgtcggtatgctggacattatcgg

SEQ ID NO: 438870 - DNA, 75 bp, synthetic construct
  source 1..75: mol_type = other DNA
aactttgcggccagcggcgggcagaaagccggggagttctatactccgccggaagtatcagacctgattgctgaa

SEQ ID NO: 438871 - DNA, 75 bp, synthetic construct
  source 1..75: mol_type = other DNA
aagcaggagagttctataccccacctgaagtttcggacctgattgctgagctgcttgacccgcaacccggtgaca

SEQ ID NO: 438872 - DNA, 75 bp, synthetic construct
  source 1..75: mol_type = other DNA
acaactactggaagatttcgccggcgaagctcttaacctaaagccgagccgcgtgggtacgctggacgtgatcgg

SEQ ID NO: 438873 - DNA, 75 bp, synthetic construct
  source 1..75: mol_type = other DNA
ttgttgtatctggctgagaaaacaggactctttttgagtcatgaaacgcgtgagcgcgccgccacattacagtgg

SEQ ID NO: 438874 - DNA, 75 bp, synthetic construct
  source 1..75: mol_type = other DNA
tggcacgatgatcttacagagaatacaacagagagtactacagagattacaggtaaagactcttgtccggttgcg

SEQ ID NO: 438875 - DNA, 75 bp, synthetic construct
  source 1..75: mol_type = other DNA
ggccggagagctgctaccggtatgatgataccggtcgggtgacggagcaggtcaacccggaggggctggactacc

SEQ ID NO: 438876 - DNA, 75 bp, synthetic construct
  source 1..75: mol_type = other DNA
atcaaaacgagtgcgaatttagaagggagtggcgaggcggtaaggaagtgcaaggatattttgcacctaaacacg

SEQ ID NO: 438877 - DNA, 75 bp, synthetic construct
  source 1..75: mol_type = other DNA
aaaattccggcgattgttgatcatgtcccgactgacggcggagaaccattaagcctctttgaatcaggtgcgatt

SEQ ID NO: 438878 - DNA, 75 bp, synthetic construct
  source 1..75: mol_type = other DNA
aggtagaaacccggcgcctttatcatgtcgtgaacaagcgtctggaaaactcgccctggttgggcggcgaaaatt

SEQ ID NO: 438879 - DNA, 75 bp, synthetic construct
  source 1..75: mol_type = other DNA
aattgccaagtggtctggtcgggcagatatgaaacagaatcgagcttacaaccacatgactgaatatgagttggt

SEQ ID NO: 438880 - DNA, 75 bp, synthetic construct
  source 1..75: mol_type = other DNA
ggaactgagacggaaactgccccaacgaataatatcattagcagtgtaatggctaacaacccaaaatacgccgca

SEQ ID NO: 438881 - DNA, 75 bp, synthetic construct
  source 1..75: mol_type = other DNA
ctgggccaggacgcacaagggccaacagcggtactgaagtcagtaagctcgataacacgctgctgtctaacggta

SEQ ID NO: 438882 - DNA, 75 bp, synthetic construct
  source 1..75: mol_type = other DNA
gctgttactgctggaagcttcacaaaaacacattttgcgttacgccgaactggcggaaacgatggcggcaaactg

SEQ ID NO: 438883 - DNA, 75 bp, synthetic construct
  source 1..75: mol_type = other DNA
aacgtggtttgcgaaggcaaaggcttattacagccgatgcacacgccagatgccgatactgcagaacatcctgac

SEQ ID NO: 438884 - DNA, 75 bp, synthetic construct
  source 1..75: mol_type = other DNA
tcgcttaatcctgataagatttgtgttgatgatattataacgcaagttcatagaaaaaatcttagtgagatgttt

SEQ ID NO: 438885 - DNA, 75 bp, synthetic construct
  source 1..75: mol_type = other DNA
atataatttaaatataacggattcagccttggcgatacttacaaaaatactttcatcacctgataaaaggatgtt

SEQ ID NO: 438886 - DNA, 75 bp, synthetic construct
  source 1..75: mol_type = other DNA
taacccagggcgaagatccggcgttcctgaaagaactgctcgaatctttatgggtgaaatgcaacgacatcgtgc

SEQ ID NO: 438887 - DNA, 75 bp, synthetic construct
  source 1..75: mol_type = other DNA
cttcacgccgggatcgtataccgtttctgctcacgtcccgttgggatcggtggttggcgcgacgccagacggtcg

SEQ ID NO: 438888 - DNA, 75 bp, synthetic construct
  source 1..75: mol_type = other DNA
cactgatggccagcgtcgcgaagaactgctgactattgcggagatctcccgccataacgccgaacataagccgca

SEQ ID NO: 438889 - DNA, 75 bp, synthetic construct
  source 1..75: mol_type = other DNA
gcacaagggccaacggcggtactgaagtcagtcagtaagctcgataatacgctgctgtctaacggtacgttgctg

SEQ ID NO: 438890 - DNA, 75 bp, synthetic construct
  source 1..75: mol_type = other DNA
taacttttccggcgtgcaggggattggtatcgctaacctgagtgattcactccatgcgttgaaagggatggtttt

SEQ ID NO: 438891 - DNA, 75 bp, synthetic construct
  source 1..75: mol_type = other DNA
tcgcgatgtttaacctgctgaaagtgatggaaatctgcctgcatgagaatgaaggtaattccgcattgagttatg

SEQ ID NO: 438892 - DNA, 75 bp, synthetic construct
  source 1..75: mol_type = other DNA
agaacaattacgacaatatgtgtaatgaaatgaatcactttgcgaagcatgtgatcattactggcggcggttcga

SEQ ID NO: 438893 - DNA, 75 bp, synthetic construct
  source 1..75: mol_type = other DNA
acgagcagaaaggcgaagaaaaatagggaagataaacttccgagtgatattgctcttaatgcgttggcggaaatt

SEQ ID NO: 438894 - DNA, 75 bp, synthetic construct
  source 1..75: mol_type = other DNA
gggggccaaccactggatgcgcctcatccaacagaaactggcagcacttccaccatcatcccgtaacaggctata

SEQ ID NO: 438895 - DNA, 75 bp, synthetic construct
  source 1..75: mol_type = other DNA
cgttcaccgggaggaaggcatcagcacttacagcagttataacccgcgtgggcaactggtcagtcagagggatgc

SEQ ID NO: 438896 - DNA, 75 bp, synthetic construct
  source 1..75: mol_type = other DNA
caaaggctacgctgacagcagcacaaaaccttggagtattcatatccaagtgccgagtacaattgattgtattcg

SEQ ID NO: 438897 - DNA, 75 bp, synthetic construct
  source 1..75: mol_type = other DNA
aacccgttcagggagaggtacaagaccctgagttcattgattttgctaaagcctatttccgttaccagcaagtgc

SEQ ID NO: 438898 - DNA, 75 bp, synthetic construct
  source 1..75: mol_type = other DNA
caaaggctattctgacggcagcagaaaaccttggagcattcatagccaagtgccgagatcaactgactgtattcg

SEQ ID NO: 438899 - DNA, 75 bp, synthetic construct
  source 1..75: mol_type = other DNA
gacgatttatggacatcattatgcttcgccggtcacgatttgatgagccagtttgccgggaataaagaagatatt

SEQ ID NO: 438900 - DNA, 75 bp, synthetic construct
  source 1..75: mol_type = other DNA
tggctacgcgacatgttgggcgagtcgttaattcaggatgccaaagcgcagaatctgtcgccggaagatttgctc

SEQ ID NO: 438901 - DNA, 75 bp, synthetic construct
  source 1..75: mol_type = other DNA
ttgggcatatcacaccacaagctgcactggcgacacatttcccggccgggctgccggttgtgtgtaccaccagtg

SEQ ID NO: 438902 - DNA, 75 bp, synthetic construct
  source 1..75: mol_type = other DNA
cactacgtttacgggacggggaagaaccgcttaacgagctgcggcgcaagattcgtcaggacttatgtcattttg

SEQ ID NO: 438903 - DNA, 75 bp, synthetic construct
  source 1..75: mol_type = other DNA
ccacaagccgcactggcgacacatttcccggcaggactgccggttgtttgtaccaccagtgataaaccggtagaa

SEQ ID NO: 438904 - DNA, 75 bp, synthetic construct
  source 1..75: mol_type = other DNA
tacgcaacggctgtcgacaaaatggttcgcgtgaaagatatctttatgcctgttgagagcaatgccaaacgctac

SEQ ID NO: 438905 - DNA, 75 bp, synthetic construct
  source 1..75: mol_type = other DNA
tgcacaaaacgttatgacgcctgtaatgcgcgtcggaattattttgccgacggtgtgatccattttggcgggttt

SEQ ID NO: 438906 - DNA, 75 bp, synthetic construct
  source 1..75: mol_type = other DNA
aatgtggttctggagagaaaggtccgggaactcaatggagaaagctgtatttcactggaggaagaaccgcccccc

SEQ ID NO: 438907 - DNA, 75 bp, synthetic construct
  source 1..75: mol_type = other DNA
gctgtcactgcagctggcgcacgaaccctatatttatcaggaagaacttcaatgtggttctggagagaaaggtcc

SEQ ID NO: 438908 - DNA, 75 bp, synthetic construct
  source 1..75: mol_type = other DNA
cgctgattgacggattatggctgcgcgcggcactgagcggcaaaccgctggataaacctctcgcacactcgctga

SEQ ID NO: 438909 - DNA, 75 bp, synthetic construct
  source 1..75: mol_type = other DNA
tggcggaaacttcgatgaaacgcaggtgagcagtgcggcgatgaaagcctggctggcgttctgggccagcagtat

SEQ ID NO: 438910 - DNA, 75 bp, synthetic construct
  source 1..75: mol_type = other DNA
caccggactacatggtacaaaagaactgtccatcaattatcatactctctgtttttatattaacaataatatgca

SEQ ID NO: 438911 - DNA, 75 bp, synthetic construct
  source 1..75: mol_type = other DNA
tgcgaccgtcactgcagaggaagcgcagtacgccagtgagcgcatgatgaaggagctgctgcgagctgaacgaaa

SEQ ID NO: 438912 - DNA, 75 bp, synthetic construct
  source 1..75: mol_type = other DNA
tagatggacaagcgtttctgacaaccaaatatctcggtgcacaagggctgtttgttgccgttatcgtgtcgctga

SEQ ID NO: 438913 - DNA, 75 bp, synthetic construct
  source 1..75: mol_type = other DNA
ttgcttatgccgtgccctggactacgcccggacctttaattgctttcctcggaaccgggggaactggctggcttt

SEQ ID NO: 438914 - DNA, 75 bp, synthetic construct
  source 1..75: mol_type = other DNA
ggccatcaatatgggtggtgtttgcgaagtggtcgatcttagcctggtaagccagcaaatgttggcaaaaattag

SEQ ID NO: 438915 - DNA, 75 bp, synthetic construct
  source 1..75: mol_type = other DNA
gatcatgacggaaatcatcaacagccatagcgatatggaaatggtggcaacggcgcccgatccgctggtcgcgcg

SEQ ID NO: 438916 - DNA, 75 bp, synthetic construct
  source 1..75: mol_type = other DNA
ttaaatgccttaaaagtattacacggtctgaactttacttgtcatcgatgatcgccggtgctgaacgagttgact

SEQ ID NO: 438917 - DNA, 75 bp, synthetic construct
  source 1..75: mol_type = other DNA
caggaagcgggctacggccttgccgcgctgattgacggattatggctgcgcgcggcactgagcggcaaagcgctg

SEQ ID NO: 438918 - DNA, 75 bp, synthetic construct
  source 1..75: mol_type = other DNA
acgaaaacggcctcagtttgcttaagcgcctgcgtgcacaaaaaccgcaatttcgcgccattattcttagcattt

SEQ ID NO: 438919 - DNA, 75 bp, synthetic construct
  source 1..75: mol_type = other DNA
aattcgtcgcaacggcgtaccccgcttgataaatgtttccgtcgcggaacttacaggaatgaatggacagcgcaa

SEQ ID NO: 438920 - DNA, 75 bp, synthetic construct
  source 1..75: mol_type = other DNA
tgctaactatctgcatggtgtacttttcaatttatttttgtgcatacatgatagtcccagatgagtttgaacatg

SEQ ID NO: 438921 - DNA, 75 bp, synthetic construct
  source 1..75: mol_type = other DNA
ttggaaataaggttgttgatcagacaacgaaagaacagtggcttagcctgtttgactctatgggaagaagggtag

SEQ ID NO: 438922 - DNA, 75 bp, synthetic construct
  source 1..75: mol_type = other DNA
tcaaagacggctcggtagtaccgctgaagacgctgttcctgcatgatccggataaaaaggtgccgttccacatca

SEQ ID NO: 438923 - DNA, 75 bp, synthetic construct
  source 1..75: mol_type = other DNA
atggaacgatttgagtcctgctttgaagcagcgctttttgctattggtgaatggcaaataaaagttgatgcgatg

SEQ ID NO: 438924 - DNA, 75 bp, synthetic construct
  source 1..75: mol_type = other DNA
actttggcgttctatctgcctgctctgacctttatcggcagtgaactggtcgccaaaagaaaagatgcggtaaag

SEQ ID NO: 438925 - DNA, 75 bp, synthetic construct
  source 1..75: mol_type = other DNA
gaagagaaatttacctttggtcagcaatggccgttggctaaaatgattggccatacactcgattctgctgaccgc

SEQ ID NO: 438926 - DNA, 75 bp, synthetic construct
  source 1..75: mol_type = other DNA
cgagcggaatgtacaacctcgcctactttcaacaagaagcctgcaaaaacgtactgcgcggattgcagcagagcc

SEQ ID NO: 438927 - DNA, 75 bp, synthetic construct
  source 1..75: mol_type = other DNA
aaggtgccacgctcgatatgttgacacctaatgtactcagttggctgactgaagaagacgacccgacgcgctatc

SEQ ID NO: 438928 - DNA, 75 bp, synthetic construct
  source 1..75: mol_type = other DNA
tgttttccgggtgcgtcgatgtatgaagcaggtagcggtagattcatgcttagtaataatactacggctcttaca

SEQ ID NO: 438929 - DNA, 75 bp, synthetic construct
  source 1..75: mol_type = other DNA
ttcctgtatgaagtcagccacgacgaggcaatcagtgttaatactttcctcggcggttggctggcagaaactgtc

SEQ ID NO: 438930 - DNA, 75 bp, synthetic construct
  source 1..75: mol_type = other DNA
acaaaagcgatatgctctgaacgatgccctggagtcagcaccggcaacattcatccgaaaaataaataaaaccag

SEQ ID NO: 438931 - DNA, 75 bp, synthetic construct
  source 1..75: mol_type = other DNA
ttgttgaatctgttagagaaagaactgagggaaatttcaaaggcgcaggattctttgatttctatgtatgcaaag

SEQ ID NO: 438932 - DNA, 75 bp, synthetic construct
  source 1..75: mol_type = other DNA
caagtgattacaaaaccgggaaatcagtaaggcgagcactgcctgttgctgcggtaaggatgatggaatcaataa

SEQ ID NO: 438933 - DNA, 75 bp, synthetic construct
  source 1..75: mol_type = other DNA
ccatcctgcataaactgtttgatattccactgccggtagtgctggggattttttccggcgcggtcaccaatacgc

SEQ ID NO: 438934 - DNA, 75 bp, synthetic construct
  source 1..75: mol_type = other DNA
ggcgttggcaaaatctctcgaatatggaaatccaacattcaagagtaaaggcatatttatcccggagcgtgtgaa

SEQ ID NO: 438935 - DNA, 75 bp, synthetic construct
  source 1..75: mol_type = other DNA
atataatatgtgaacaaaagttacgaactgaagacgaaagagatgaatacttgttgaatctgttagagaaagagc

SEQ ID NO: 438936 - DNA, 75 bp, synthetic construct
  source 1..75: mol_type = other DNA
ggcaggagaaatctttagatgcacagataacacaaagaatcatggaattttatccggtgaggggtgtatatatct

SEQ ID NO: 438937 - DNA, 75 bp, synthetic construct
  source 1..75: mol_type = other DNA
atgaaagaaaatggcctgaaggcgaacagcctctgtgttgagatcactgaaaccgtgatcgagcgaattaatgaa

SEQ ID NO: 438938 - DNA, 75 bp, synthetic construct
  source 1..75: mol_type = other DNA
atgaaaaaagacatcatttataccaccggggctcctgcccccggtggggcattatctcaggcggtgaaagccggg

SEQ ID NO: 438939 - DNA, 75 bp, synthetic construct
  source 1..75: mol_type = other DNA
ccatcaccccgaaaatgactatcaattattcatgagaggtaatattactccttcagaatattatgaaaggaatat

SEQ ID NO: 438940 - DNA, 75 bp, synthetic construct
  source 1..75: mol_type = other DNA
atgagtgatatagcattaacggtcagtattctggctttggtggcggtcgtcgggttgtttatcggcaacgtcaag

SEQ ID NO: 438941 - DNA, 75 bp, synthetic construct
  source 1..75: mol_type = other DNA
gttgcttgccgctgcgttgtgcctgggcttgggtatcttcattaacgaaaccaccggcgaatttccgcaaaaaga

SEQ ID NO: 438942 - DNA, 75 bp, synthetic construct
  source 1..75: mol_type = other DNA
gcaggggcgacagcgtctcgctccgcgtagcaaatacgacgcaaactcttgcttagttacaacatactttaaagg

SEQ ID NO: 438943 - DNA, 75 bp, synthetic construct
  source 1..75: mol_type = other DNA
gatcctgaaacagatcgaagccctctccgggcatctggcctttatttttcctggtgagtacgatcaggacaagtg

SEQ ID NO: 438944 - DNA, 75 bp, synthetic construct
  source 1..75: mol_type = other DNA
tgcgtaaaatccttaaactacgcggtatttccggcgaaatgctgaaaacagcctggcgaggaaacgtccgtcgct

SEQ ID NO: 438945 - DNA, 75 bp, synthetic construct
  source 1..75: mol_type = other DNA
cggtcattggtcatcttgatagtccggtttatctgggcggcgtggcggttggcgcaacggcgaccagctttctct

SEQ ID NO: 438946 - DNA, 75 bp, synthetic construct
  source 1..75: mol_type = other DNA
gcttatggtgccaaaaatcctcaggcattagcccgtgcgctggtgcaaccgttgctgttggcgttgggggccggg

SEQ ID NO: 438947 - DNA, 75 bp, synthetic construct
  source 1..75: mol_type = other DNA
ggccagcttcgatctcggtgaaaaacacaaagtggcggtgctttccgttaccgaaggtgaagacaaaccgctgaa

SEQ ID NO: 438948 - DNA, 75 bp, synthetic construct
  source 1..75: mol_type = other DNA
tggcctgacacagaaagaatgtgccgaaatattcagcatgagtccgcgtacctggcgtcgcaaagaagaacctgt

SEQ ID NO: 438949 - DNA, 75 bp, synthetic construct
  source 1..75: mol_type = other DNA
atatgaacgtgcagggtgcggcgctggcaacggtcatcgcagaatatgcgacgttgctgatcggcctgctaatgg

SEQ ID NO: 438950 - DNA, 75 bp, synthetic construct
  source 1..75: mol_type = other DNA
tggttactcggcgtgcaatatgcccgtgcgccagtaattttgttagtggtcggcaatatcctcaacattgtgctg

SEQ ID NO: 438951 - DNA, 75 bp, synthetic construct
  source 1..75: mol_type = other DNA
tggttttgttatttatcactctgcttatttgtttgtggcaaggggcgatgttgttggatgcgatctttatgggtc

SEQ ID NO: 438952 - DNA, 75 bp, synthetic construct
  source 1..75: mol_type = other DNA
tagctactgcggcaggctgctgacaaaatacgcgctcaagctgtcgctgatgttttttgtgcgctccagcgagct

SEQ ID NO: 438953 - DNA, 75 bp, synthetic construct
  source 1..75: mol_type = other DNA
ggcgacggttgttgcagaatatgcgacgttgctgattggtctgctcatggtacgtaaaatcctcaaactgcgcgg

SEQ ID NO: 438954 - DNA, 75 bp, synthetic construct
  source 1..75: mol_type = other DNA
tggttgctcggtgtgcaatatgcccgtgcgccagtgattttgttagtggttggcaatatcctcaacattgtgctg

SEQ ID NO: 438955 - DNA, 75 bp, synthetic construct
  source 1..75: mol_type = other DNA
gaacaggcgcgtcgtttccttgaaattcgctggctaagcgcgccggcgtcgctggcaaatctggtgttactcggc

SEQ ID NO: 438956 - DNA, 75 bp, synthetic construct
  source 1..75: mol_type = other DNA
cgcgctggcgcaaaccatcgatcagttgattgtgatgcgtttctttcacggtctggcggcggcagcggccagcgt

SEQ ID NO: 438957 - DNA, 75 bp, synthetic construct
  source 1..75: mol_type = other DNA
ttatatgctggccagcggtttcagctttgccgggatgttctcgttcttaagcgccggaccgtttgtctacattga

SEQ ID NO: 438958 - DNA, 75 bp, synthetic construct
  source 1..75: mol_type = other DNA
ctccgcatggccgatgatctggtcgattgcgttctgtgcgacctgctccattctcttctgtctgtacgccagtcg

SEQ ID NO: 438959 - DNA, 75 bp, synthetic construct
  source 1..75: mol_type = other DNA
gccaccccgaaaaccgtaggtgcaaacccacgtgattttaaaaatattatttatcactatcccctttcgcgtgca

SEQ ID NO: 438960 - DNA, 75 bp, synthetic construct
  source 1..75: mol_type = other DNA
tggtcatctggtgactcagaaaaggctaaaactgccgcccacgctatttatcgcgacgctggaagaagagttaga

SEQ ID NO: 438961 - DNA, 75 bp, synthetic construct
  source 1..75: mol_type = other DNA
ggttatcaacgctttaatgcgtgatatctacccgaaagaagagttctcgcggatgatgtcgtttgtcatgctggt

SEQ ID NO: 438962 - DNA, 75 bp, synthetic construct
  source 1..75: mol_type = other DNA
tgattggcgatggcgttgcctttgcggtacgtcacctgatgaccggcagctttgctccgattggcgcagcattgt

SEQ ID NO: 438963 - DNA, 75 bp, synthetic construct
  source 1..75: mol_type = other DNA
ggtaaaaaaagccgcccggcagaatatgaaatggcatgagcagttgatctctcatttcgcagagatcttcttccc

SEQ ID NO: 438964 - DNA, 75 bp, synthetic construct
  source 1..75: mol_type = other DNA
ttcttttgatattctgactgctgtgcataaacactattctgtcgaagagtggcaagcgtttatcaacaattcttc

SEQ ID NO: 438965 - DNA, 75 bp, synthetic construct
  source 1..75: mol_type = other DNA
tgtggctgagctggcattacatcttctggatcctggcattagcggcgattctggcttcggcaatgattttcttcc

SEQ ID NO: 438966 - DNA, 75 bp, synthetic construct
  source 1..75: mol_type = other DNA
tacgtgatccccttatccagtgcggcaatcaatgcggtgagtattccagactatttcgcctggggcgggattgca

SEQ ID NO: 438967 - DNA, 75 bp, synthetic construct
  source 1..75: mol_type = other DNA
aaattattaatcacaataccgcagcaggaatgtttatgggaaccgccgcactggctggtggtatttttaacgcag

SEQ ID NO: 438968 - DNA, 75 bp, synthetic construct
  source 1..75: mol_type = other DNA
aaccttttatgctagtcgttgcgcaggataccgatcatgcggacaggctaaaagtacgcattgaacacgacgatt

SEQ ID NO: 438969 - DNA, 75 bp, synthetic construct
  source 1..75: mol_type = other DNA
gggtttacggctggcgaaccgtggattggcctgggcgataactatcaacaaatcaacgtagaagccgcgctggcc

SEQ ID NO: 438970 - DNA, 75 bp, synthetic construct
  source 1..75: mol_type = other DNA
tgcggcaaaaatgctggcgatggtgctgcatggcatgcagggaacgccgtatatctaccagggcgaagagattgg

SEQ ID NO: 438971 - DNA, 75 bp, synthetic construct
  source 1..75: mol_type = other DNA
gattaccaggatctgctgccaaacagccctgtattgtggtgctatcgccgtgaatggaaggggcaaaccttgctg

SEQ ID NO: 438972 - DNA, 75 bp, synthetic construct
  source 1..75: mol_type = other DNA
gcccgccactttaactgtgtggagggcaacaccaccctttatgctctgccaaagcaggaagtggttctgcgttgg

SEQ ID NO: 438973 - DNA, 75 bp, synthetic construct
  source 1..75: mol_type = other DNA
atgatttacatcggtctgccgcaatggtcgcatccaaaatgggtgcgtttggggatctccagcctggaagagtat

SEQ ID NO: 438974 - DNA, 75 bp, synthetic construct
  source 1..75: mol_type = other DNA
attaccgattaccgcgacgtggaaagcctcaacatgtttgccgaactgcgcaactgcgggtgtgacgccgaagag

SEQ ID NO: 438975 - DNA, 75 bp, synthetic construct
  source 1..75: mol_type = other DNA
cttcttctgacgcatctggagaataacgaacagcggacaatcagttggcaggaaggcggtgaaacggaagaacgg

SEQ ID NO: 438976 - DNA, 75 bp, synthetic construct
  source 1..75: mol_type = other DNA
gcctgattgaaccgaaaaaagcgacagaaatcgacgcgccagaagttcaggccaaaacgcgagcggctatccgtt

SEQ ID NO: 438977 - DNA, 75 bp, synthetic construct
  source 1..75: mol_type = other DNA
aatactggagaatgatccttcagtaattcgttggatgaaacctcgtccaggtcagtttcgcatcgaatatgctaa

SEQ ID NO: 438978 - DNA, 75 bp, synthetic construct
  source 1..75: mol_type = other DNA
tgaagtgtccgaagcggacatggtctttggtgaactgctgaagaagcgcaaaagccaaacccatttgctgtatta

SEQ ID NO: 438979 - DNA, 75 bp, synthetic construct
  source 1..75: mol_type = other DNA
cgatttagttattttgatggatgaagcccatcgttactatgccagcgcgggcgcacaggcacttaacgatctgaa

SEQ ID NO: 438980 - DNA, 75 bp, synthetic construct
  source 1..75: mol_type = other DNA
ttgccaatcggattagtgcacgactgtcactacgcgatcctcaggatgaatcattgcggatcttatgcgacgtac

SEQ ID NO: 438981 - DNA, 75 bp, synthetic construct
  source 1..75: mol_type = other DNA
cagcgatggtggctgcaccacgccgggcgatgtcgcgaaagcctttggcggcggtgccgatttcgtcatgcttgg

SEQ ID NO: 438982 - DNA, 75 bp, synthetic construct
  source 1..75: mol_type = other DNA
ctttttttccctgcctcgcatatggcaacctacactatgttccttgcagctatttttgcgattgcgattgcgatt

SEQ ID NO: 438983 - DNA, 75 bp, synthetic construct
  source 1..75: mol_type = other DNA
catggtctatagctttgcctgcttctttattggcaagtttatagccaacatccttatgacgcgttttaatccgga

SEQ ID NO: 438984 - DNA, 75 bp, synthetic construct
  source 1..75: mol_type = other DNA
agtttccttgaaactgcagcgaacacatacagttcaatgatcggtccaaaagcctatgccacattgcggctcaat

SEQ ID NO: 438985 - DNA, 75 bp, synthetic construct
  source 1..75: mol_type = other DNA
gtggggcagcgaatacctgtaacgcttggtaatattgcgccgttgtcgctaaggccgttccagcctggacgaata

SEQ ID NO: 438986 - DNA, 75 bp, synthetic construct
  source 1..75: mol_type = other DNA
agttcctggctatatcatcaggcaaattcaactacatcctgaaatacccagcgaagaaattaaatatgcagccat

SEQ ID NO: 438987 - DNA, 75 bp, synthetic construct
  source 1..75: mol_type = other DNA
attattctggggattttattacaggccacaaggttgaatcagaattaaataatacaagttatattcgaaggatag

SEQ ID NO: 438988 - DNA, 75 bp, synthetic construct
  source 1..75: mol_type = other DNA
tggtcgcgccagccgtgggcgattgaccctgccgcgccgttggcaaaattaagtgaactgccaatgatgaccgcc

SEQ ID NO: 438989 - DNA, 75 bp, synthetic construct
  source 1..75: mol_type = other DNA
tgacgcgacgatcctcgatgaagaatttggtttgaaagagaaaggttacaccagtctggtggtcgtaccggtagg

SEQ ID NO: 438990 - DNA, 75 bp, synthetic construct
  source 1..75: mol_type = other DNA
atgatgcgcagtggatggccaaacaggtttatctcaacgtcggcaacttcctgctgggcgttgcggcgctgggtc

SEQ ID NO: 438991 - DNA, 75 bp, synthetic construct
  source 1..75: mol_type = other DNA
ctcaattcctttatgtgggtatgcaggtcgcagtatggtcatttaccatccgtctggcactggagttgggcgata

SEQ ID NO: 438992 - DNA, 75 bp, synthetic construct
  source 1..75: mol_type = other DNA
tgccgcaaagcatgttgtttttacagcactatttacaaaattcagatgctttttcacttcctggtgagcgcgtac

SEQ ID NO: 438993 - DNA, 75 bp, synthetic construct
  source 1..75: mol_type = other DNA
tagtgaaacgctgcaatggcaggagtggtcacgtcagcctcaggcaattgacccgacagcaccgttggcaaaatt

SEQ ID NO: 438994 - DNA, 75 bp, synthetic construct
  source 1..75: mol_type = other DNA
gccgttgcaaatggataccgcagcgcggttgtttgacagcggcaaatcgttttatatgtgcgcctgtcgtcagga

SEQ ID NO: 438995 - DNA, 75 bp, synthetic construct
  source 1..75: mol_type = other DNA
attggtatcggtcttggcgtgttgttaggctccattcccgtgtttgtgcctggattcccggcggcattgaagctg

SEQ ID NO: 438996 - DNA, 75 bp, synthetic construct
  source 1..75: mol_type = other DNA
tgcgggagctggggatcgtgctgttcctctcggtcgttggtctgaaatctggtggggattttgtgaataccctgg

SEQ ID NO: 438997 - DNA, 75 bp, synthetic construct
  source 1..75: mol_type = other DNA
gtattctggctttggtggcggtcgtcggtttgtttatcggcaacgtcaagtttcgcggcataggattaggcattg

SEQ ID NO: 438998 - DNA, 75 bp, synthetic construct
  source 1..75: mol_type = other DNA
atggcttttaaacttctcagtgttaccgaagcaatataccagccgcccggagaacgccacgaatacaggatgaat

SEQ ID NO: 438999 - DNA, 75 bp, synthetic construct
  source 1..75: mol_type = other DNA
ttcttatccttgccattatttgcgctgtggggattatgcgggtaattaacagcattaacaccattgaatcgttat

SEQ ID NO: 439000 - DNA, 75 bp, synthetic construct
  source 1..75: mol_type = other DNA
gtattctggctttggtggcagtcgtcggtttgtttatcggcaatgtcaaatttcgcggcataggattaggtattg

SEQ ID NO: 439001 - DNA, 75 bp, synthetic construct
  source 1..75: mol_type = other DNA
tattaattcaacatggctcgttactggcgttaaagactaagggttatgaatttttctctctctcatataaactga

SEQ ID NO: 439002 - DNA, 75 bp, synthetic construct
  source 1..75: mol_type = other DNA
agctgcggatattcgaaatttatccgccgaagccattgcatagtatcgcgctcggcagtcggattccggcgctgc

SEQ ID NO: 439003 - DNA, 75 bp, synthetic construct
  source 1..75: mol_type = other DNA
gatacgctggttgccgaagtgagcgacgctccgcaggcgaacgacccgacatttaacaatgaggatctggcttga

SEQ ID NO: 439004 - DNA, 75 bp, synthetic construct
  source 1..75: mol_type = other DNA
gtcatcatcggtggtctggttaccgccatcctgcataaactgtttgatattccactgccggtagtgctggggatt

SEQ ID NO: 439005 - DNA, 75 bp, synthetic construct
  source 1..75: mol_type = other DNA
acacgttaacggaaccgcagcttaccgcaccgctgaaaaaaggtcaggttgtcggcaccattgatttccagctta

SEQ ID NO: 439006 - DNA, 75 bp, synthetic construct
  source 1..75: mol_type = other DNA
cagctgaaaaacctgaaagcgagctatacgttaacggaaccgcagcttaccgcaccgctgaaaaaaggtcaggtt

SEQ ID NO: 439007 - DNA, 75 bp, synthetic construct
  source 1..75: mol_type = other DNA
ttgcgacgtgacggcggtggcaggcgacacggcatttcaggctggtataaggagcatcgctcatgcagtggcaaa

SEQ ID NO: 439008 - DNA, 75 bp, synthetic construct
  source 1..75: mol_type = other DNA
cactctgaagcgcaccttcacccggctgaagagcctgggcgtgcttaaagttgagcagctgaacaagtcccaacg

SEQ ID NO: 439009 - DNA, 75 bp, synthetic construct
  source 1..75: mol_type = other DNA
cgagcagtttgatgaaatcaatattgtgcgcggtcagctcgttcctggtgggcggctggggataaaaaatcacag

SEQ ID NO: 439010 - DNA, 75 bp, synthetic construct
  source 1..75: mol_type = other DNA
cgcggttctgtctctcgaagaacatcagaaagcgtggttgctatggaactatagcgagaacgtgcgctggtgcta

SEQ ID NO: 439011 - DNA, 75 bp, synthetic construct
  source 1..75: mol_type = other DNA
tgttaaatatgatgattgaatctggcgagcaatatactcacgccagcctggaagcggcgattaaagcgcgttttg

SEQ ID NO: 439012 - DNA, 75 bp, synthetic construct
  source 1..75: mol_type = other DNA
gcgtggccttaatgcgcccgccatattgccgcagctttttgaagttcgcgcctcgcatgtgctgggaacacttcc

SEQ ID NO: 439013 - DNA, 75 bp, synthetic construct
  source 1..75: mol_type = other DNA
tggagcgagtttaaggcgctgttaggtacaagaaaaattgccagtaagacactggaacgcttaaagaagttgatt

SEQ ID NO: 439014 - DNA, 75 bp, synthetic construct
  source 1..75: mol_type = other DNA
tggaatgaatttaatactcaatccggtatcagaaaaattgcagggaaaacgcaggaacgcctgaaaaaattaatc

SEQ ID NO: 439015 - DNA, 75 bp, synthetic construct
  source 1..75: mol_type = other DNA
atgatgcgggaaaaatcccgacgtccgtcgccactgcagcggcgggtgctgattgtgctggccgccctcgatgcg

SEQ ID NO: 439016 - DNA, 75 bp, synthetic construct
  source 1..75: mol_type = other DNA
ttcgactggcacaagaaaaagcgcaatctctggcgtcacgttatccggatcatttaattattggttcagaccagg

SEQ ID NO: 439017 - DNA, 75 bp, synthetic construct
  source 1..75: mol_type = other DNA
atctctggcgtcacgttatccggatcatttaattattggttcagaccaggtatgtgttcttgatggcgaaatcac

SEQ ID NO: 439018 - DNA, 75 bp, synthetic construct
  source 1..75: mol_type = other DNA
tgcaatgaaacacacttttcatcggctggatagtgaggctttattgttcgtgacgagaacacgttcaaaacaaaa

SEQ ID NO: 439019 - DNA, 75 bp, synthetic construct
  source 1..75: mol_type = other DNA
atgcacaatttgatactggtacatacaaacgaaagaagccgcgcattctggatgtggtaactggcaggatgatta

SEQ ID NO: 439020 - DNA, 75 bp, synthetic construct
  source 1..75: mol_type = other DNA
cgccgtcctgtcgctggaagaacaccagaaagcgtggctgctgtggaactatagcgagaacgtccgcttcgaata

SEQ ID NO: 439021 - DNA, 75 bp, synthetic construct
  source 1..75: mol_type = other DNA
tctggatgtcagcaaagccgaagctttaccgggcgtcgttcacgttattactcacctgaattgcccggacatcta

SEQ ID NO: 439022 - DNA, 75 bp, synthetic construct
  source 1..75: mol_type = other DNA
aacgccgggcgtcgtgcgcggcaagaaaggcgaagttagtttcggggatattgctcataaaggcgaaaccggcac

SEQ ID NO: 439023 - DNA, 75 bp, synthetic construct
  source 1..75: mol_type = other DNA
tgctggcgaagatgacgccgaatatcggtgatatgtgcgaagtggcgctggcggcgaagcgcggcggcgcagatg

SEQ ID NO: 439024 - DNA, 75 bp, synthetic construct
  source 1..75: mol_type = other DNA
cggcgccgatggcattgcggcaattaacaccgtcaaatccatcaccaatatcgaccttaatcaaaagatcggtat

SEQ ID NO: 439025 - DNA, 75 bp, synthetic construct
  source 1..75: mol_type = other DNA
tgcccggtgggttgtattgagctcggggaagtgaagtttaagaagggagagaaagaacacccggtaacgttgtaa

SEQ ID NO: 439026 - DNA, 75 bp, synthetic construct
  source 1..75: mol_type = other DNA
ctacactcctggtggtcaaagcgcgccagaaccttcaccgctcgaccgtcgcatgttcggcaaaaaaatgcgtca

SEQ ID NO: 439027 - DNA, 75 bp, synthetic construct
  source 1..75: mol_type = other DNA
cggtcgtggtgtcgccattatcatgcagaaatcagggatcccggatatcgatcaggctaactgcatgatcaaact

SEQ ID NO: 439028 - DNA, 75 bp, synthetic construct
  source 1..75: mol_type = other DNA
gatgaagtgaccggaaaaatgatcacgctggataatccaccaatcccggggaaacaatcgctggcaaagaagacg

SEQ ID NO: 439029 - DNA, 75 bp, synthetic construct
  source 1..75: mol_type = other DNA
tgcatgttatctctggtgataccgatcatgcactgtttgataaaggcgcatatgcctcgtccggtacttgcttct

SEQ ID NO: 439030 - DNA, 75 bp, synthetic construct
  source 1..75: mol_type = other DNA
gaagaaattgcgctcgaagcattgaagctcatcgacgttgaatatgaagtgcttaagccggtaatgtcgatcgac

SEQ ID NO: 439031 - DNA, 75 bp, synthetic construct
  source 1..75: mol_type = other DNA
gaaggtaaagcgccgacctccgttccttccgccgccagctgcgcactggaagagatcctgcgtcagggtcgcgag

SEQ ID NO: 439032 - DNA, 75 bp, synthetic construct
  source 1..75: mol_type = other DNA
gaatacccgcagtatccgaatggcacatttggtgatgcagttccccgcggtggtaatgcgggtggggcggtcagc

SEQ ID NO: 439033 - DNA, 75 bp, synthetic construct
  source 1..75: mol_type = other DNA
actggtttcgccagcgtttatttcctggcgatgccgaaagccagccgttgaccgacgatcgttgtagtgtagccg

SEQ ID NO: 439034 - DNA, 75 bp, synthetic construct
  source 1..75: mol_type = other DNA
caccggtggttgaaaatgcctgggaaaaatcacgctcaaatagtttaagccgcagtacggaagatcagtttttgg

SEQ ID NO: 439035 - DNA, 75 bp, synthetic construct
  source 1..75: mol_type = other DNA
ctgccactgagcgcgaagcacgcgcccagctgccgcacgcacatctgatttttgtcgcccgtatccgtcaggagg

SEQ ID NO: 439036 - DNA, 75 bp, synthetic construct
  source 1..75: mol_type = other DNA
ttgttgagatgtcatgcctgatgcacgatatcggcaatccgccgtttggtcattttggcgaagcggcgataaatg

SEQ ID NO: 439037 - DNA, 75 bp, synthetic construct
  source 1..75: mol_type = other DNA
tttttgccggaacgtttaatcatgccctgttagaagatgccagtgaatgtagtgaacttttaaaattatataaaa

SEQ ID NO: 439038 - DNA, 75 bp, synthetic construct
  source 1..75: mol_type = other DNA
ttttaaaatatacccgtccggcgtggtggcgtggtgaaacgcctgagacacatcactatttaatgaaaaagccgg

SEQ ID NO: 439039 - DNA, 75 bp, synthetic construct
  source 1..75: mol_type = other DNA
tagatgcatttcctaaaattatcaggaatgcaatttatgaagtggaacagcatacgcaggcccctcaaggtttga

SEQ ID NO: 439040 - DNA, 75 bp, synthetic construct
  source 1..75: mol_type = other DNA
tctatcggtattatgtctgatgaggctggtaccatttttaatggttatacgctgaacgaactcccttttatcaac

SEQ ID NO: 439041 - DNA, 75 bp, synthetic construct
  source 1..75: mol_type = other DNA
gaaactaatcagagatgccaggctgacgctagcacttatggttcagcctgatgtgtttaaaggttatctgcaacg

SEQ ID NO: 439042 - DNA, 75 bp, synthetic construct
  source 1..75: mol_type = other DNA
attgaaaactggtatctgaaaaccgagcacaaacgccgcccgccgattacggtttttgataatttctggaagaaa

SEQ ID NO: 439043 - DNA, 75 bp, synthetic construct
  source 1..75: mol_type = other DNA
gatggcggtacggacattaacccgctgtatcgtctgaacaaacgtcagggtaaacagctgctggcagcattaggt

SEQ ID NO: 439044 - DNA, 75 bp, synthetic construct
  source 1..75: mol_type = other DNA
ctgtatcagtttatctgataacactggctgagtctggggagcggaaaagtacagttgataagatgctgatggcac

SEQ ID NO: 439045 - DNA, 75 bp, synthetic construct
  source 1..75: mol_type = other DNA
cgtgtgcagaggaaggcctaactcaggcagagttgatagaaaggcttatcgagaaagtagcctgtcaccgaaata

SEQ ID NO: 439046 - DNA, 75 bp, synthetic construct
  source 1..75: mol_type = other DNA
tgccgggtcatgaaattgtggggcgcgtggtagccgttggtgatcaggtagaaaaacatgcgccgggcgatctgg

SEQ ID NO: 439047 - DNA, 75 bp, synthetic construct
  source 1..75: mol_type = other DNA
gatggtcctgacagtttgcatgccccattaccgatgcgtgcgggcgaactactggtcaggcatggtttgattgaa

SEQ ID NO: 439048 - DNA, 75 bp, synthetic construct
  source 1..75: mol_type = other DNA
tcagatcctgaggcattacagatgtcagcctgtgcattcgatttgattatcgatacggttcccgttaaacacgac

SEQ ID NO: 439049 - DNA, 75 bp, synthetic construct
  source 1..75: mol_type = other DNA
gctgggaaaccgatcctaacgcctatatttatttcactattcaggagcaaaactgggtaatgactccaacttatt

SEQ ID NO: 439050 - DNA, 75 bp, synthetic construct
  source 1..75: mol_type = other DNA
acagcgggagtatttgctgggagtatcaggtcactataacccactgggcatgggaagagtttaaggcccattgtg

SEQ ID NO: 439051 - DNA, 75 bp, synthetic construct
  source 1..75: mol_type = other DNA
ctggatagtgaggctttattgtttgtaatgagaacacgttcaaaacaaaagacggcattttcaaagcaaagtgtt

SEQ ID NO: 439052 - DNA, 75 bp, synthetic construct
  source 1..75: mol_type = other DNA
aaggctatgaccatctggaactgagcggcaaagtgaccgcgctgtttgtcgatggcaaagcggttgatgttatca

SEQ ID NO: 439053 - DNA, 75 bp, synthetic construct
  source 1..75: mol_type = other DNA
aacgaagcgatgaaaccagaagagattcgtgcggtcgaagacctggtgaacgcacagattcgccgtaacttgccg

SEQ ID NO: 439054 - DNA, 75 bp, synthetic construct
  source 1..75: mol_type = other DNA
attcctgatagcagatggtgtcatgccatccaatgaaaaccgtggttatgtactgcgtcgtatcattcgtcgcgc

SEQ ID NO: 439055 - DNA, 75 bp, synthetic construct
  source 1..75: mol_type = other DNA
catcggcggtattgcagaaacacaggaagtgctggatttctgcgcgaagcataatatctatcccgaatgtgaaat

SEQ ID NO: 439056 - DNA, 75 bp, synthetic construct
  source 1..75: mol_type = other DNA
tgctgaagactgaagaagagcagtttgcccgtactctggaacgcggtctggcgctgctggacgaagagctggcga

SEQ ID NO: 439057 - DNA, 75 bp, synthetic construct
  source 1..75: mol_type = other DNA
gttaactctaactatgacatcgacttgttccgcacgttgatccaggcggtagcgaaagtcactggcgcgaccgat

SEQ ID NO: 439058 - DNA, 75 bp, synthetic construct
  source 1..75: mol_type = other DNA
cgaagcccggaaagcaatggcatagcagaaagcttcgtgatgacgataaaacgggactacatcagcatcaggatt

SEQ ID NO: 439059 - DNA, 75 bp, synthetic construct
  source 1..75: mol_type = other DNA
ttggttgacggcaccggtacggtagaagtggcacagttggaaatccaggaggtgacatataccgttacggctgcc

SEQ ID NO: 439060 - DNA, 75 bp, synthetic construct
  source 1..75: mol_type = other DNA
caatgcagcccaattcatgacgcaggatatgagctgcacaggccaagatggggatgacaatcctaccggggatga

SEQ ID NO: 439061 - DNA, 75 bp, synthetic construct
  source 1..75: mol_type = other DNA
cgttttgcctctgtctatcgcagtttcgaagatatcaaagaatttggcgaagagatcgcgcgcctggaggactaa

SEQ ID NO: 439062 - DNA, 75 bp, synthetic construct
  source 1..75: mol_type = other DNA
cgctaccaaccgtggactgtacctggcaacttgttttgagtgttgccggtgtggcattgatgcgcagcaattctg

SEQ ID NO: 439063 - DNA, 75 bp, synthetic construct
  source 1..75: mol_type = other DNA
gttatcaccgttccagaacaaaggcaaagcgcagctggaagtgaaaataggcgaaaccaatggtcgtctggaagg

SEQ ID NO: 439064 - DNA, 75 bp, synthetic construct
  source 1..75: mol_type = other DNA
cgtgggaaccaattgcaccctctgatggtgctcaaaaagttgcgcaaataccaaaagtagatttcaatgccatgt

SEQ ID NO: 439065 - DNA, 75 bp, synthetic construct
  source 1..75: mol_type = other DNA
gaaccgtcgcctcattgctttccataaccatttccgcgttgccggtacatggttatgccagtagttcgagtgcgg

SEQ ID NO: 439066 - DNA, 75 bp, synthetic construct
  source 1..75: mol_type = other DNA
taccgaatgggcaaagttcgctaagccaggtaaaaagaccaatgtcaatgatgaccaatatattgtcattaatgc

SEQ ID NO: 439067 - DNA, 75 bp, synthetic construct
  source 1..75: mol_type = other DNA
tttgcagcaaaatggcaagttccctacgcctggttcaataaatattgactcgctaactggcgctggtagtgactt

SEQ ID NO: 439068 - DNA, 75 bp, synthetic construct
  source 1..75: mol_type = other DNA
caaattcggccacaactcggccaatcttttggtgatccaaaaagtccccagtgtggtggtatttctctggagaaa

SEQ ID NO: 439069 - DNA, 75 bp, synthetic construct
  source 1..75: mol_type = other DNA
gtgttactgagggggccagaaatgaaaacgactgtattacagttaatggctccagcatttgccctggtgatccat

SEQ ID NO: 439070 - DNA, 75 bp, synthetic construct
  source 1..75: mol_type = other DNA
cagtggggtaacatcacttctggtatcgacctgacccgtcgcctgcatcagaatcaggtgtttggcctgaccgtt

SEQ ID NO: 439071 - DNA, 75 bp, synthetic construct
  source 1..75: mol_type = other DNA
cattgggttatgtggtgaaaaacaatatcgaagattataacgccggtgttgctaacgatctggataagattgttt

SEQ ID NO: 439072 - DNA, 75 bp, synthetic construct
  source 1..75: mol_type = other DNA
acaaccaacaaatgcgcggcgtggcgcgtgtacagggtgagatccctgaagataccgatctgaaaacactggtcg

SEQ ID NO: 439073 - DNA, 75 bp, synthetic construct
  source 1..75: mol_type = other DNA
acaaccagcagatgcgtggcgtggcgcgcgtacagggcgaaattccggaaaatgctgacctgaaaacgctggttg

SEQ ID NO: 439074 - DNA, 75 bp, synthetic construct
  source 1..75: mol_type = other DNA
accgtgctggatgacgatcggcataattatctggagatttccgccattcataatgaggaaggttatcgggagatc

SEQ ID NO: 439075 - DNA, 75 bp, synthetic construct
  source 1..75: mol_type = other DNA
gccgtggcccaaatcaaagccgcctttgaggaatttaaaaaccacgaaaactacgttgtgatctcagatgatggc

SEQ ID NO: 439076 - DNA, 75 bp, synthetic construct
  source 1..75: mol_type = other DNA
ttctgtttttagaaactttccgcttgcatcacgatgaagaccttacctttaaagatgatgagggaaataccctgc

SEQ ID NO: 439077 - DNA, 75 bp, synthetic construct
  source 1..75: mol_type = other DNA
cattgtctcggatgtgcgttcatttgctcaggatccccgattttgtcttagcgtcatggccgaaatagcctgcag

SEQ ID NO: 439078 - DNA, 75 bp, synthetic construct
  source 1..75: mol_type = other DNA
atgatttcacgctggaaatggattctgaagcagacatttaaaaagctatggttcagggcaacattattcgccatt

SEQ ID NO: 439079 - DNA, 75 bp, synthetic construct
  source 1..75: mol_type = other DNA
tgacttttctaactatgctattcctcttaaggttctttatgaggagaataaaggcggatatactgatcacataag

SEQ ID NO: 439080 - DNA, 75 bp, synthetic construct
  source 1..75: mol_type = other DNA
gcgcgtgcagggcgaaattccggaaaatgccgacctgaaaacgctggtcggcaatggttacgtggtgatcaccat

SEQ ID NO: 439081 - DNA, 75 bp, synthetic construct
  source 1..75: mol_type = other DNA
aaacgtgctggcagaactgctggttgcgaccagcctgttaaccgctacgttgaagtttgatggtgatatcaccgt

SEQ ID NO: 439082 - DNA, 75 bp, synthetic construct
  source 1..75: mol_type = other DNA
taaccactatctgttcaatgcgatggatattgctgaaatccgcaacaacgcgtctccggcagatccgcaagttca

SEQ ID NO: 439083 - DNA, 75 bp, synthetic construct
  source 1..75: mol_type = other DNA
cccgaaaaagaagccgcgataaaaattgccaacgaaaaaatggcgaaaggggataaaaagggcgcaatggaagag

SEQ ID NO: 439084 - DNA, 75 bp, synthetic construct
  source 1..75: mol_type = other DNA
cgcgggataatccaccaatcccgggaaagcaatcgctggcgaaggggacatcaattcctctggtcagtccggttg

SEQ ID NO: 439085 - DNA, 75 bp, synthetic construct
  source 1..75: mol_type = other DNA
cgctgatttgagtgaggcaacaaaaggtcagcttgaagcctggcaggagaatgccatgttcgatacagggcgtta

SEQ ID NO: 439086 - DNA, 75 bp, synthetic construct
  source 1..75: mol_type = other DNA
acagagacatacctgcctcactggttggcaatgcgtagctgctttatgcgactcgatagcggtgcgcttatctca

SEQ ID NO: 439087 - DNA, 75 bp, synthetic construct
  source 1..75: mol_type = other DNA
tgtaaaatcggctgttggtaatgcagtcatcctgctggcaaaggatgtgatatataacgagtacttttttgatct

SEQ ID NO: 439088 - DNA, 75 bp, synthetic construct
  source 1..75: mol_type = other DNA
cagaactggcaggccgtgagacatacgagtaccaggtgctggcggaactggcgggcgtagcgaaatccacatgga

SEQ ID NO: 439089 - DNA, 75 bp, synthetic construct
  source 1..75: mol_type = other DNA
tacgtcagcagctcattgtggcgaccgcagacctcagcggggcgacgaaagggcagctggtagctttcgccgaga

SEQ ID NO: 439090 - DNA, 75 bp, synthetic construct
  source 1..75: mol_type = other DNA
ggcagttctgtctcttgaagaacaccataaagcctggttgctgtggtgttacagcggaaatgtttgttgggggca

SEQ ID NO: 439091 - DNA, 75 bp, synthetic construct
  source 1..75: mol_type = other DNA
tcgcattatctcgccgatcagggatttgattcgttgcaggagatggtaggtctggcgaatcacaatattgtcccg

SEQ ID NO: 439092 - DNA, 75 bp, synthetic construct
  source 1..75: mol_type = other DNA
cggtaaatcgagtatttccggatattccggtaaagcggtaaaaccgatcgccctgcgcttcattcagcaaatgcg

SEQ ID NO: 439093 - DNA, 75 bp, synthetic construct
  source 1..75: mol_type = other DNA
acgctggataatccgccgatttccggtaagcagtcgtacgcaaaaggttcatccattgcactggtcagccaggtt

SEQ ID NO: 439094 - DNA, 75 bp, synthetic construct
  source 1..75: mol_type = other DNA
agttttcgacatcatcatggcgacgggcggttctgtctcttgaagaacactataaagcctggttgctgtggtgtt

SEQ ID NO: 439095 - DNA, 75 bp, synthetic construct
  source 1..75: mol_type = other DNA
gatgaagtgactggaaaaatgatcacgcgggataatccaccaatcccggggaaacaatcgctggcaaaggggacg

SEQ ID NO: 439096 - DNA, 75 bp, synthetic construct
  source 1..75: mol_type = other DNA
cctcgctttatcttccgttcagtaaatacaaaccaccgctctggcaggtacagggcgtggtttatctccgatact

SEQ ID NO: 439097 - DNA, 75 bp, synthetic construct
  source 1..75: mol_type = other DNA
cgctttttctctggtgtgtatggcttacgcggtcgggcgcagaacgaaaaaatctcccgtatgagcgaggcgttc

SEQ ID NO: 439098 - DNA, 75 bp, synthetic construct
  source 1..75: mol_type = other DNA
ccgttaccgcaggctgaaaatctgttcaggaagagcggcgcaaacatcatcgagaaaggacaaaatgcttttttc

SEQ ID NO: 439099 - DNA, 75 bp, synthetic construct
  source 1..75: mol_type = other DNA
aggaaaacgacgccggagaaatcgaccatattccgatgctgaaaactttcaccgtgtttaacgttcagcaaatcg

SEQ ID NO: 439100 - DNA, 75 bp, synthetic construct
  source 1..75: mol_type = other DNA
gggcgcaatggaagagcttcgcctggccggtgttggtgtaatggaaaaccaatatctgatgccgcttaaacagac

SEQ ID NO: 439101 - DNA, 75 bp, synthetic construct
  source 1..75: mol_type = other DNA
agagcgtatctctgaacaaggtttatatgcgatgcgtgacgtgcaggtagcgcgcctggctctgtttcatggcga

SEQ ID NO: 439102 - DNA, 75 bp, synthetic construct
  source 1..75: mol_type = other DNA
atgacgcgcaaatgggcttacagggcgattcgtcagggaatgacgcgcaaatgggcttacaggcgaaactgccac

SEQ ID NO: 439103 - DNA, 75 bp, synthetic construct
  source 1..75: mol_type = other DNA
gtggtggcaaaaaacgtctgaaccgtgaaatgaaagggaagtttggcagtgcggattatgcagaggaagaactga

SEQ ID NO: 439104 - DNA, 75 bp, synthetic construct
  source 1..75: mol_type = other DNA
cctggctgaaagcgctgaaaaacgacaagcgctatattttcaaagcggccagcgccgcctccaaggcgcattctt

SEQ ID NO: 439105 - DNA, 75 bp, synthetic construct
  source 1..75: mol_type = other DNA
atgagcctgttaatgccatcaaggccgatagtcatcaatcctgaccttgcgtacagcataggcctgaatgaagcc

SEQ ID NO: 439106 - DNA, 75 bp, synthetic construct
  source 1..75: mol_type = other DNA
gaggtacaacatgaaagctatattgcttcctggctgaaagcgctgaaaaacgacaagcgttatattttcaaagcg

SEQ ID NO: 439107 - DNA, 75 bp, synthetic construct
  source 1..75: mol_type = other DNA
gcatgaatatcatgctgttatggtgcagcgcatctaaacagggtttcagcgattctcgatggatgacctacaaac

SEQ ID NO: 439108 - DNA, 75 bp, synthetic construct
  source 1..75: mol_type = other DNA
gcagcgctggaagccggtgtaaaaccgtggtcctgcccgtggctgcgtgtatccggcatgtctggactgccatcc

SEQ ID NO: 439109 - DNA, 75 bp, synthetic construct
  source 1..75: mol_type = other DNA
tgcccgtaaaacgtatccctacacgtattaagtacggccataatttccgccatacacacattcgagcatatgcaa

SEQ ID NO: 439110 - DNA, 75 bp, synthetic construct
  source 1..75: mol_type = other DNA
atgaagcgtaaaagtgtggctttgttacaagccattggctcggttatagccctgagcccgacggtcgtttcagca

SEQ ID NO: 439111 - DNA, 75 bp, synthetic construct
  source 1..75: mol_type = other DNA
gtggaagctgctgggtaaggatatccgctccgttcgcgaagaaatatacgccggtctgaaaacaccgggaactga

SEQ ID NO: 439112 - DNA, 75 bp, synthetic construct
  source 1..75: mol_type = other DNA
gttgcgaatgataaagccgttggatggaactggagtagcggagcctataacgcaactattgatggggcatcaacg

SEQ ID NO: 439113 - DNA, 75 bp, synthetic construct
  source 1..75: mol_type = other DNA
ggcgtcattgatggcaacctgataaacatcgcagttggtccgagtgatgattccggtacggggcgctcaatgcat

SEQ ID NO: 439114 - DNA, 75 bp, synthetic construct
  source 1..75: mol_type = other DNA
ttggtgattcgctttgaaacagcctggtctatgccaaaaccaatttatcaagcgatggctagaaagttcccgcac

SEQ ID NO: 439115 - DNA, 75 bp, synthetic construct
  source 1..75: mol_type = other DNA
aagctcacgctatcgtacatcgctattttggttcccatgttttactgggcgatgaagtcgctacggcgacccata

SEQ ID NO: 439116 - DNA, 75 bp, synthetic construct
  source 1..75: mol_type = other DNA
gtattgccggacatcactttattagcgaaagcccggaggcctggcgctggctgctggcatcggcagctctgcccg

SEQ ID NO: 439117 - DNA, 75 bp, synthetic construct
  source 1..75: mol_type = other DNA
ccgaccatattggtcggcaaaaaatcttcaccttcagctttttgctgattacgctcgcttcgttcttacaatttt

SEQ ID NO: 439118 - DNA, 75 bp, synthetic construct
  source 1..75: mol_type = other DNA
atgtgtcaggcagcgttccgcgatgacggggcgttgcctttcggcttctcaggcgagaagccgttcttattaccg

SEQ ID NO: 439119 - DNA, 75 bp, synthetic construct
  source 1..75: mol_type = other DNA
tctggcgcagtggggaatgcaggccaccttattgttactggccatcgtgctattggttggttttgttgtgacctg

SEQ ID NO: 439120 - DNA, 75 bp, synthetic construct
  source 1..75: mol_type = other DNA
gcggctcagcactccttggtttgtttcttggcagcctggttcttggatggatctccgaccatattggtcggcaaa

SEQ ID NO: 439121 - DNA, 75 bp, synthetic construct
  source 1..75: mol_type = other DNA
tgagcacattttgcttcgaattttaaaaagaattagacaaacaacggacaatgaattacctgaatcaaattaccc

SEQ ID NO: 439122 - DNA, 75 bp, synthetic construct
  source 1..75: mol_type = other DNA
tgaatggaaatttctctttatttatccaaaggctctgcctgcgctggccactcaggcattgatggtggacgggga

SEQ ID NO: 439123 - DNA, 75 bp, synthetic construct
  source 1..75: mol_type = other DNA
catccagatggatatgtttattacggtgatacaccagattttatcaaagggaaaatttacccctacggtaactgg

SEQ ID NO: 439124 - DNA, 75 bp, synthetic construct
  source 1..75: mol_type = other DNA
gaaaaggtcgaggaagctatctcgctggttggcttaaaaccgctggcgcatcggctggtcgatagtctctctggc

SEQ ID NO: 439125 - DNA, 75 bp, synthetic construct
  source 1..75: mol_type = other DNA
cagtggaggagcatataaaaaaaataaaaatagaataaatctcaacaagaatttaaataatttattattgagtga

SEQ ID NO: 439126 - DNA, 75 bp, synthetic construct
  source 1..75: mol_type = other DNA
taggtctgataagacgcgttagcgtcgcatcaggcaaaaaacggcaacgaaaacaacaaacacagcctcacctgg

SEQ ID NO: 439127 - DNA, 75 bp, synthetic construct
  source 1..75: mol_type = other DNA
atttatccaaaggctctgcctgcgctggtccactcaggcattgatggtggacgggaaggttataagacgacttat

SEQ ID NO: 439128 - DNA, 75 bp, synthetic construct
  source 1..75: mol_type = other DNA
atatttatctcgtttctgataatacctatgatgatagccatttgcctgatcagtttggtgatgactcagtcggaa

SEQ ID NO: 439129 - DNA, 75 bp, synthetic construct
  source 1..75: mol_type = other DNA
gctcagtttggtatgtatggggggaatattctttttagcaaaattctttttctcatttttccctgaagtatcaga

SEQ ID NO: 439130 - DNA, 75 bp, synthetic construct
  source 1..75: mol_type = other DNA
cgccgggcagtccgtagaacggactgcgcagcaggcagcagcatttgttaaggcgtatcgagaggcagtgcaatg

SEQ ID NO: 439131 - DNA, 75 bp, synthetic construct
  source 1..75: mol_type = other DNA
ccatgctggtggcgcaggatagccgctgtctgttgctggacgaaccgacctcggcgctggatatcgcccaccagg

SEQ ID NO: 439132 - DNA, 75 bp, synthetic construct
  source 1..75: mol_type = other DNA
atgcaggaatacacgaatcattccgataccacttttgcactgcgtaatatctcctttcgtgtgcccgggcgcacg

SEQ ID NO: 439133 - DNA, 75 bp, synthetic construct
  source 1..75: mol_type = other DNA
catggtcttgaagttattgcatggatttattttgcaataaacacttttaatcaacttgctttttatattttatat

SEQ ID NO: 439134 - DNA, 75 bp, synthetic construct
  source 1..75: mol_type = other DNA
ggcgcacagaatggttgcatcatcgcgggcgataacccggatgcggcgctggcattagaaaaagcccgcgcgttc

SEQ ID NO: 439135 - DNA, 75 bp, synthetic construct
  source 1..75: mol_type = other DNA
attacgcaactcattctcaatctggtagaaggttcaccgattaagctgattgatggcggaaaacaaaaacgctgc

SEQ ID NO: 439136 - DNA, 75 bp, synthetic construct
  source 1..75: mol_type = other DNA
aattacttgatcgggtgatctgggcctatggcgaaaaagagggtttacagttcaccctcttccgcccgtttaact

SEQ ID NO: 439137 - DNA, 75 bp, synthetic construct
  source 1..75: mol_type = other DNA
cgaaaattgatatgcaggaaaccatcgatgagacgctggatttcttcctgcgcactgtcgatcttacggataaat

SEQ ID NO: 439138 - DNA, 75 bp, synthetic construct
  source 1..75: mol_type = other DNA
atgtgggggctgggggaacctgtcggtgcgttaaccaacagcctgactcagtggcttcaggggatgcagcaaggc

SEQ ID NO: 439139 - DNA, 75 bp, synthetic construct
  source 1..75: mol_type = other DNA
ccgccgctggggatggggctggcgacgctgattggtcgcaaaaacttctccgcagaagaacgtgaaaccggtaaa

SEQ ID NO: 439140 - DNA, 75 bp, synthetic construct
  source 1..75: mol_type = other DNA
attgccgattttcgttcactgccgttcgctgattcttcttttccggttgtggtgtttgacccgccgcacctcgag

SEQ ID NO: 439141 - DNA, 75 bp, synthetic construct
  source 1..75: mol_type = other DNA
ctggccgtgcgtgctgagtgggaggaattgaaaacggaactggcgaagctggaaacgcagatggcaggttatctg

SEQ ID NO: 439142 - DNA, 75 bp, synthetic construct
  source 1..75: mol_type = other DNA
ggtctgccggaaaaactgttttacggtaccggtattccagctgctatcttgattttcaaaaagcagaaagtagat

SEQ ID NO: 439143 - DNA, 75 bp, synthetic construct
  source 1..75: mol_type = other DNA
gtggcggtgcgagcagagcgtgagcaactgaaggtggaactggcaaagctggaagttgagatggcgggttatctg

SEQ ID NO: 439144 - DNA, 75 bp, synthetic construct
  source 1..75: mol_type = other DNA
gaattactatgcaaggttcgcaattagcccagacgctagggctggttgaaggttcaagacttaacagtcaacctg

SEQ ID NO: 439145 - DNA, 75 bp, synthetic construct
  source 1..75: mol_type = other DNA
agccattgttgcccagctacgcgttgccattgcaccggacgatatcgccattacgctgcatcataaattgtgcta

SEQ ID NO: 439146 - DNA, 75 bp, synthetic construct
  source 1..75: mol_type = other DNA
tgcctgtggcgatggcgcgctggaaatcgtcaccggacaggcgggcgacggcattactatgcagggctcgcaatt

SEQ ID NO: 439147 - DNA, 75 bp, synthetic construct
  source 1..75: mol_type = other DNA
ggtcggtgcgcagtgctatgcaggctggggtggtctgattgtgctgccggtggttgaaggtaagctgggttatat

SEQ ID NO: 439148 - DNA, 75 bp, synthetic construct
  source 1..75: mol_type = other DNA
atctcattggctgatatactacagaaatgcagggaggccagcggcagtgacactataattgcatcaacgcatcac

SEQ ID NO: 439149 - DNA, 75 bp, synthetic construct
  source 1..75: mol_type = other DNA
ggcaaccagtgactggacatgcagcaatcctcgacatgtgctgtggcagtcgcatgttctggttcgatacaaatg

SEQ ID NO: 439150 - DNA, 75 bp, synthetic construct
  source 1..75: mol_type = other DNA
agacacctggcgtgatgatttgcggcagggatttaaagaagcctttcgtgtgttgcgtccatacggcgttctgat

SEQ ID NO: 439151 - DNA, 75 bp, synthetic construct
  source 1..75: mol_type = other DNA
tgaagcaacattacctgcaaacctgcgtgtcacgcataaatccctgttcgacggtacgttacagggcattcatcg

SEQ ID NO: 439152 - DNA, 75 bp, synthetic construct
  source 1..75: mol_type = other DNA
tggtggacagaggctgtcgcctgaccatcgttccggcgcaaacttctgcggaagatgtgctgaaaatgaatccag

SEQ ID NO: 439153 - DNA, 75 bp, synthetic construct
  source 1..75: mol_type = other DNA
caacgtcttctcggacataaatcagattcaatggcggcgcggtatagggacagccgagggagagaatgggacaaa

SEQ ID NO: 439154 - DNA, 75 bp, synthetic construct
  source 1..75: mol_type = other DNA
agatacctggcgtgatgatttgcggcagggatttaaagaagcctttcgtgtgttgtggccacacggcgttctgat

SEQ ID NO: 439155 - DNA, 75 bp, synthetic construct
  source 1..75: mol_type = other DNA
agatacctggcgtgatgatttgcggcagggatttaaagaagcctttcgtgtgttgcagccatacggcgttctgat

SEQ ID NO: 439156 - DNA, 75 bp, synthetic construct
  source 1..75: mol_type = other DNA
tgctggcgttcgatatgggcggcccggttaacaaagtggcctatgccttcatgctgatttgcgttgctcagggtg

SEQ ID NO: 439157 - DNA, 75 bp, synthetic construct
  source 1..75: mol_type = other DNA
ccggtaagccagattttggcactgacagacagaaaacctgttatcggtcaacgaacaggaaaaaacgataaaacc

SEQ ID NO: 439158 - DNA, 75 bp, synthetic construct
  source 1..75: mol_type = other DNA
agatacctggcgtgatgatttgcggcagggatttaaagaagcttttcgtgtgttgtggccacatggcgttctgat

SEQ ID NO: 439159 - DNA, 75 bp, synthetic construct
  source 1..75: mol_type = other DNA
acgcttgattatcagccctgacattatcgcagattttcgtgcattatcatttgcagacgcatctttttcgatggt

SEQ ID NO: 439160 - DNA, 75 bp, synthetic construct
  source 1..75: mol_type = other DNA
tgaggcgcaggatgcgaatccggtgaccactgctctggttctggggcagaagtgtcgggtggtccttgttggaga

SEQ ID NO: 439161 - DNA, 75 bp, synthetic construct
  source 1..75: mol_type = other DNA
gccgaagaaactcgaacttctcagaaagcacaccgtcacgaatgaacaggaggcggatatcacggtctcaacggc

SEQ ID NO: 439162 - DNA, 75 bp, synthetic construct
  source 1..75: mol_type = other DNA
gtgtgattggcacggcactgatggcggcaatgcgtggcaggaaggtttactgggtgggggcattgaaggctacag

SEQ ID NO: 439163 - DNA, 75 bp, synthetic construct
  source 1..75: mol_type = other DNA
agatttactgcgcaatgattggccttaagcgtgtaggaaccatcaagaaatacttcaaaggcgtggatgacgtga

SEQ ID NO: 439164 - DNA, 75 bp, synthetic construct
  source 1..75: mol_type = other DNA
cccgtctggcgcgcaacgcggcgatccagcgaatcaattattgcaatgaagcgggtgaacaggccggattcaaca

SEQ ID NO: 439165 - DNA, 75 bp, synthetic construct
  source 1..75: mol_type = other DNA
aatgagcaggatgcagatatcactgtgtcaacggcacaccggagcaaggggctggagtggccggttgtaatgctg

SEQ ID NO: 439166 - DNA, 75 bp, synthetic construct
  source 1..75: mol_type = other DNA
gtgttcccttcacccagaaagcagcagatcctttcagatatggtgttgacgagttttctgcgtaaaaagaaagcc

SEQ ID NO: 439167 - DNA, 75 bp, synthetic construct
  source 1..75: mol_type = other DNA
gtgtttccttctcccagaaagcagcagatcctttcagatatggtgttgacgagttttctgcgtaaaaagaaggcc

SEQ ID NO: 439168 - DNA, 75 bp, synthetic construct
  source 1..75: mol_type = other DNA
ttccgctggttgtttggtacgtacacccactccagctggctggttgtggcgcttaatctggtgttctgtgcgctc

SEQ ID NO: 439169 - DNA, 75 bp, synthetic construct
  source 1..75: mol_type = other DNA
tataaccgcgcgattcgtgatgaggcggagcgccggtttccctttaatgtggagtgcaaaacctcccatcagctg

SEQ ID NO: 439170 - DNA, 75 bp, synthetic construct
  source 1..75: mol_type = other DNA
gttgcaaatgcaatattcacatttacagcaaaaatatataaaaatgataatatctcaattaatgagggggagttc

SEQ ID NO: 439171 - DNA, 75 bp, synthetic construct
  source 1..75: mol_type = other DNA
aaaaggctggcgcctcttacttccgcattacttcacttggcggagataataaattttacggaactgctgttctct

SEQ ID NO: 439172 - DNA, 75 bp, synthetic construct
  source 1..75: mol_type = other DNA
gcgcgaaaccatcagtgaaacttacgaactggaatatggcaccgataaactggaaatccatgttgatgccattaa

SEQ ID NO: 439173 - DNA, 75 bp, synthetic construct
  source 1..75: mol_type = other DNA
attacactaaggaagccataaaagacctgtctgtcatggaaaaaggattaaggtcaaatgcacctcttacatcat

SEQ ID NO: 439174 - DNA, 75 bp, synthetic construct
  source 1..75: mol_type = other DNA
gcgcgagcaccgtcatgagtttatgaccgtcgagcacttgttactggcgctgctcagtaacccatctgcctggga

SEQ ID NO: 439175 - DNA, 75 bp, synthetic construct
  source 1..75: mol_type = other DNA
tggtcttatccaccaggataacagcaccgatgcgatggaagagatcaagaagatctttacaccggaattccgtaa

SEQ ID NO: 439176 - DNA, 75 bp, synthetic construct
  source 1..75: mol_type = other DNA
tagatgcgtttcctcagattatcagaaatgcaatttatgaagtggaacagcatacgcaggcccctcaaggtttga

SEQ ID NO: 439177 - DNA, 75 bp, synthetic construct
  source 1..75: mol_type = other DNA
tcataaatggtcgtaaagttcagccacctgaaaaaaacaagcgcccttcatatacttataaagtattgcaactgt

SEQ ID NO: 439178 - DNA, 75 bp, synthetic construct
  source 1..75: mol_type = other DNA
ttaccgaactgctgcgatattattgaaccagaagaataccgccagacacatttcgatttggcacgattaccatat

SEQ ID NO: 439179 - DNA, 75 bp, synthetic construct
  source 1..75: mol_type = other DNA
ttgatgagatccacaccattatcggtgcgggtgcagcgtctggtggccaggtcgatgcggctaacctgattaaac

SEQ ID NO: 439180 - DNA, 75 bp, synthetic construct
  source 1..75: mol_type = other DNA
gcgatgtaccggaagtgatggctgactgtacgatttactctctggatatcggttccctgttagcgggaactaaat

SEQ ID NO: 439181 - DNA, 75 bp, synthetic construct
  source 1..75: mol_type = other DNA
gtacgctgaccgataacaacggacgcaaagcggacttccgtaacgtggtgctggtgatgaccactaacgcggggg

SEQ ID NO: 439182 - DNA, 75 bp, synthetic construct
  source 1..75: mol_type = other DNA
atcctcttgcaggtgatggacaacggtacactgaccgataacaacggacgcaaagcggacttccgtaacgtggtg

SEQ ID NO: 439183 - DNA, 75 bp, synthetic construct
  source 1..75: mol_type = other DNA
cgttgctctccagcggtaaaatccgcgtaattggttcgacaacctatcaggagttcagcaacatttttgagaaag

SEQ ID NO: 439184 - DNA, 75 bp, synthetic construct
  source 1..75: mol_type = other DNA
agcgcgcgtgtgaaagcgctggaggataaccttggtgtcctgctatttgaggggcactggctggcaatgtctagc

SEQ ID NO: 439185 - DNA, 75 bp, synthetic construct
  source 1..75: mol_type = other DNA
ttttaacctgctgttctgcgtgctggtgatacgcgcacgcgggaacgtcacaaaaatctttccattgttgaggca

SEQ ID NO: 439186 - DNA, 75 bp, synthetic construct
  source 1..75: mol_type = other DNA
gatggcgcgaaagtggtagttccggcagccattgcgccagaaatcaacgataagatccgggcgattgccgttcag

SEQ ID NO: 439187 - DNA, 75 bp, synthetic construct
  source 1..75: mol_type = other DNA
agtctggtaccacaggccgatgcctgtcgtctgccggacgcttcccctgcgccggaagagggcgcatcagaaaac

SEQ ID NO: 439188 - DNA, 75 bp, synthetic construct
  source 1..75: mol_type = other DNA
ggcagcaggtgccggaagtatggaactttggcatgtttagcatcgctaaagtgggctatcaggcacaggtgattc

SEQ ID NO: 439189 - DNA, 75 bp, synthetic construct
  source 1..75: mol_type = other DNA
aagatactcggaaagcttataaaaattgaagttgaacatatacataactttgatttcagtaagctccagtctctt

SEQ ID NO: 439190 - DNA, 75 bp, synthetic construct
  source 1..75: mol_type = other DNA
gctgccagaagttatctctaaagaaccgcttgggccggtagtccgccgtggcgatgacgaatggttctctattgt

SEQ ID NO: 439191 - DNA, 75 bp, synthetic construct
  source 1..75: mol_type = other DNA
cccactgaaaattaaacgtggtcaaaataatctctggaataacggtggcatccagtacgcaccgcccgtgcgtta

SEQ ID NO: 439192 - DNA, 75 bp, synthetic construct
  source 1..75: mol_type = other DNA
aaatcgatggctgacggcgtgaaactgattaatgccgtgcaggacgtttatctcgatagcaaaattactattgcc

SEQ ID NO: 439193 - DNA, 75 bp, synthetic construct
  source 1..75: mol_type = other DNA
tgcaggcggtgaaactgacctcagcgatgcagtgcgtactgcggttatcaacaaacgcgctggcggaatggggct

SEQ ID NO: 439194 - DNA, 75 bp, synthetic construct
  source 1..75: mol_type = other DNA
ataagaattagaaggctaaatgaccaaattaacgcactgggttttgaaatagataatttatcagaaaaattatat

SEQ ID NO: 439195 - DNA, 75 bp, synthetic construct
  source 1..75: mol_type = other DNA
gaatatcgctcagggctccgccgtgataggcattatcatttccagccgcaagcacaatgaacgcgagatctccgt

SEQ ID NO: 439196 - DNA, 75 bp, synthetic construct
  source 1..75: mol_type = other DNA
cggcactgttagccgggctggcgctgggcgttattgaaactcgtcttaagcgcatcgtgccggattacctctatc

SEQ ID NO: 439197 - DNA, 75 bp, synthetic construct
  source 1..75: mol_type = other DNA
tatttgcgtaactccgcctttaagaaagatggcgttgattaccatgtttccgccgacctgaccggtcaggcgaac

SEQ ID NO: 439198 - DNA, 75 bp, synthetic construct
  source 1..75: mol_type = other DNA
atgagatatttaaccgaattgatctgtgacctctacaggttgacagatcaccataaactgaccacagcaacgttt

SEQ ID NO: 439199 - DNA, 75 bp, synthetic construct
  source 1..75: mol_type = other DNA
atgcagtggggctgggcgcatggtttttgtgtggcaaatcctgttgatgtggttgaacatttgcttccacagcaa

SEQ ID NO: 439200 - DNA, 75 bp, synthetic construct
  source 1..75: mol_type = other DNA
caacagcacatggttttcgttcaacattcagggactggtgtagtgaacagggatttggcggaaagggcgcttgcc

SEQ ID NO: 439201 - DNA, 75 bp, synthetic construct
  source 1..75: mol_type = other DNA
aacagtcgccgttcttcatacggctacgaccagcgcctggagctacacggttccgaagggctgctgtgcgcgggc

SEQ ID NO: 439202 - DNA, 75 bp, synthetic construct
  source 1..75: mol_type = other DNA
taaccttgtcagaaacggcaagccgggttaaacagcgcattcatgttgttatgcagtggggatgggcgcacggtt

SEQ ID NO: 439203 - DNA, 75 bp, synthetic construct
  source 1..75: mol_type = other DNA
atacagcatcgtgttcctttatcccggcaggccatgcacattctggaaaatatacgtggtttgcatgatgaacta

SEQ ID NO: 439204 - DNA, 75 bp, synthetic construct
  source 1..75: mol_type = other DNA
cgagagcaacttgctgcaggtgatgatcctctggagattaaaaaggctgaatctgagaaagtcgctatcccaaca

SEQ ID NO: 439205 - DNA, 75 bp, synthetic construct
  source 1..75: mol_type = other DNA
aagcaatggccataggatataataaatatgtgtttacagtttctattttattaggattgtcatttaaagagagat

SEQ ID NO: 439206 - DNA, 75 bp, synthetic construct
  source 1..75: mol_type = other DNA
aaatacagtctctgactgcctctaagagcttcggttgtgggtggaataaggtcatcaatggtagttggttcaaaa

SEQ ID NO: 439207 - DNA, 75 bp, synthetic construct
  source 1..75: mol_type = other DNA
cattactcacatgaactagactcgataacacttggcaacccaagcagaaaatataaactgagaggagattcttag

SEQ ID NO: 439208 - DNA, 75 bp, synthetic construct
  source 1..75: mol_type = other DNA
gatatggcgcgcttcatcatgggtgaagagccggtgtcagtgtatgcccagggcagtaacctggtggatccggcg

SEQ ID NO: 439209 - DNA, 75 bp, synthetic construct
  source 1..75: mol_type = other DNA
tggatggtgcaggccatgaagaagctttctacaaggacctcacactggactatattggcctgtctcaagcggtca

SEQ ID NO: 439210 - DNA, 75 bp, synthetic construct
  source 1..75: mol_type = other DNA
aaatgggggcttgtgaccaaatcaagagaaggtttctgtattaccgataatggccgggaaatgattgattctgcg

SEQ ID NO: 439211 - DNA, 75 bp, synthetic construct
  source 1..75: mol_type = other DNA
acagcctgagcgaaacacacgcaacgccggatggctacccagtaaaacaaatcggcgagcacgcctggttgattg

SEQ ID NO: 439212 - DNA, 75 bp, synthetic construct
  source 1..75: mol_type = other DNA
gtgctggaaatcgtgcgtattgagaagccgaaaggcgttatcgttcagtacggcggtcagaccccgctgaaactg

SEQ ID NO: 439213 - DNA, 75 bp, synthetic construct
  source 1..75: mol_type = other DNA
gcgtactccggcctccttcgaaccgtccatcgactatgtggttactaaaattcctcgcttcaacttcgaaaaatt

SEQ ID NO: 439214 - DNA, 75 bp, synthetic construct
  source 1..75: mol_type = other DNA
ggcgtcttcaacctgaccaatattgaccgctggttcctggtacagattgaagaactggtgcgtctggaagagaaa

SEQ ID NO: 439215 - DNA, 75 bp, synthetic construct
  source 1..75: mol_type = other DNA
tccagtttgcggttaacccaaaaaacggtcgtctgattgttatcgaaatgaacccgcgtgtatcccgttcttcgg

SEQ ID NO: 439216 - DNA, 75 bp, synthetic construct
  source 1..75: mol_type = other DNA
ccgaaagtgagtctcgacgacccggaagcgctgactaaaatccgccgcgaactgaaagatgctggcgcagagcgt

SEQ ID NO: 439217 - DNA, 75 bp, synthetic construct
  source 1..75: mol_type = other DNA
aagagttcggtgtgaccatgattggtgctaccgctgacgcgattgataaagcagaagaccgccgccgtttcgacg

SEQ ID NO: 439218 - DNA, 75 bp, synthetic construct
  source 1..75: mol_type = other DNA
ttgagtgtatttatcaacatctcagcattagtaaatgcggcagaatcattatatataacgccctctgctgttagt

SEQ ID NO: 439219 - DNA, 75 bp, synthetic construct
  source 1..75: mol_type = other DNA
aattatcgccgaagaattcaccttgttgatatctaaatcagcagggattgacgaaattcaaatggacatagatga

SEQ ID NO: 439220 - DNA, 75 bp, synthetic construct
  source 1..75: mol_type = other DNA
atcgtcacttcgaagacttctggcaacaaccagccgctcccggaggtgggcgacagcgacaggtcgatgtcctgt

SEQ ID NO: 439221 - DNA, 75 bp, synthetic construct
  source 1..75: mol_type = other DNA
ggcacggcgattgtgctgggcgaagcgggtatcaatccgcgtctggtaaacaaggtgcatgaaggtcgtccgcac

SEQ ID NO: 439222 - DNA, 75 bp, synthetic construct
  source 1..75: mol_type = other DNA
tgaacaacagggaatgcctgtgatccgtaacccctcatacagcggcgatggtggtcttgatggtcaggtggtgat

SEQ ID NO: 439223 - DNA, 75 bp, synthetic construct
  source 1..75: mol_type = other DNA
tattatcttctctgacctctgcctcggtatttgctggcgcatacgtcgaaaacagggaggcatataatcttgcct

SEQ ID NO: 439224 - DNA, 75 bp, synthetic construct
  source 1..75: mol_type = other DNA
ctccgtactactcggtgaaagaagtggtgctgccgttcaataaattccccggcgttgacccgctgttagggccag

SEQ ID NO: 439225 - DNA, 75 bp, synthetic construct
  source 1..75: mol_type = other DNA
ctggggcaacctgattaacttcatggccaactggcgcgctaaaacaggtacttcaacacggcgatccacgtcgcg

SEQ ID NO: 439226 - DNA, 75 bp, synthetic construct
  source 1..75: mol_type = other DNA
gccgggacgccgcaggccgcctggcagaagtcatcacgccggaaggcaaaacgcagtatgcctatgacaaatccg

SEQ ID NO: 439227 - DNA, 75 bp, synthetic construct
  source 1..75: mol_type = other DNA
gcggagcgggtactgaataagcttaacagcctgccgggaggcgggcagcgcctgacttatttgcgcaaaatcagt

SEQ ID NO: 439228 - DNA, 75 bp, synthetic construct
  source 1..75: mol_type = other DNA
ctggctaaccgctatgtcgatgaacaggctccgtgggtggtggcgaaacaggaaggacgcgatgccgacctgcag

SEQ ID NO: 439229 - DNA, 75 bp, synthetic construct
  source 1..75: mol_type = other DNA
acagtaaccggggttttgcctgtgagcagggctggaatgcagccagccagcttgtcacccagcgcgccggatttt

SEQ ID NO: 439230 - DNA, 75 bp, synthetic construct
  source 1..75: mol_type = other DNA
tgatctgcgtgcgcgaatatttccccgataccttttcgactgcggttcgacaaaaatcccgctggatcatcggca

SEQ ID NO: 439231 - DNA, 75 bp, synthetic construct
  source 1..75: mol_type = other DNA
cggtttcgctggcagccctgacgcgtaaagtcggacgcaaagtgcgttacgtcattgttctgcgcggacaaattg

SEQ ID NO: 439232 - DNA, 75 bp, synthetic construct
  source 1..75: mol_type = other DNA
tcgaaaacttcgatgcaatgggcatccacaccggtgactccatcactgtcgcaccagcccaaacgctgaccgaca

SEQ ID NO: 439233 - DNA, 75 bp, synthetic construct
  source 1..75: mol_type = other DNA
gacaactgcatcatcgtttgctctatcgaaaactttgatgcgatgggcatccacaccggtgactctattactgta

SEQ ID NO: 439234 - DNA, 75 bp, synthetic construct
  source 1..75: mol_type = other DNA
ctggccgtgttgctgatgcttatcctgcggggagggtggcgaaaacagaaatgcgtccggacccgtcgtcatcag

SEQ ID NO: 439235 - DNA, 75 bp, synthetic construct
  source 1..75: mol_type = other DNA
tcgaagaactgctgttactggccctgaagcagcaggggatgatggttattcacaatccctgctacagcggtgatg

SEQ ID NO: 439236 - DNA, 75 bp, synthetic construct
  source 1..75: mol_type = other DNA
ctggtcagcgggcagcgtctgctgaaactgctgaacggaacattactgacagatgagctcaccaggggggagcgg

SEQ ID NO: 439237 - DNA, 75 bp, synthetic construct
  source 1..75: mol_type = other DNA
aaaacgcgtgaagagatacaacacgaaaccgggcttacatttgaacaacaggctgtagcgcgtaagcatcttgtg

SEQ ID NO: 439238 - DNA, 75 bp, synthetic construct
  source 1..75: mol_type = other DNA
tatatatcaccccgtcagccgtgagccagtcgttacaacgcttacgtgcgcaatttaatgatcctttattcattc

SEQ ID NO: 439239 - DNA, 75 bp, synthetic construct
  source 1..75: mol_type = other DNA
ttatatcgtagctatcaaaaaaaccttcaattaaaacaaataaagatagaacagaatctaccatctaatacactt

SEQ ID NO: 439240 - DNA, 75 bp, synthetic construct
  source 1..75: mol_type = other DNA
caattgcatgaatatctctatattactgatcctgttccgcaagtgagtaagttcggtattaatgataatggcgta

SEQ ID NO: 439241 - DNA, 75 bp, synthetic construct
  source 1..75: mol_type = other DNA
tttctctgatccacgtagatgtaaactactctgacctatataccgggcttattgatgtgaatctgggtgatatgc

SEQ ID NO: 439242 - DNA, 75 bp, synthetic construct
  source 1..75: mol_type = other DNA
attgatgtgaatctgggcgacatgcagaaacgcatctctgaagagactcatcacgctctgagcgaactctccacc

SEQ ID NO: 439243 - DNA, 75 bp, synthetic construct
  source 1..75: mol_type = other DNA
ctttataactcccaccgtgactttcttaatttaaaagagataaaactagaacatccgttaccttcaataaagctt

SEQ ID NO: 439244 - DNA, 75 bp, synthetic construct
  source 1..75: mol_type = other DNA
ttcgcttctcttccatgaagcaagcagatggtagttcatttgaacgccagaagagaacagcgaaagagatagccg

SEQ ID NO: 439245 - DNA, 75 bp, synthetic construct
  source 1..75: mol_type = other DNA
aatcaacgccggtgttggcggtatgatcccgctgatcatcatggctatccttgcgttcccgatgacgttttttgc

SEQ ID NO: 439246 - DNA, 75 bp, synthetic construct
  source 1..75: mol_type = other DNA
aatctctgcgtggtaaaggtaagtctatcgaaatcaacaagctgaaccgtatcactgcgctgttcatgctggtaa

SEQ ID NO: 439247 - DNA, 75 bp, synthetic construct
  source 1..75: mol_type = other DNA
cgttacaacccgtcagtaaaaaattattaattgattttgctgattacacttcctctgcggattgtattgaagggg

SEQ ID NO: 439248 - DNA, 75 bp, synthetic construct
  source 1..75: mol_type = other DNA
aacagtaggggaactatttacttattctattaaattaaaaactcctgacatcctgaacctggactatgtttcccc

SEQ ID NO: 439249 - DNA, 75 bp, synthetic construct
  source 1..75: mol_type = other DNA
attggaaagaatatgtggtggactgataccacatctggttatgtgcttcctcatccggtcttcttccctattgtt

SEQ ID NO: 439250 - DNA, 75 bp, synthetic construct
  source 1..75: mol_type = other DNA
cgtacacccgatacggtgccgggttcgtgcaggcacattgcgagctgctggagtttaacggagggatccccgttg

SEQ ID NO: 439251 - DNA, 75 bp, synthetic construct
  source 1..75: mol_type = other DNA
ccccgagtgaaatgacgcattcagggatggtcagcggcgcttatcaggatcaacagcgttactccgctttttacc

SEQ ID NO: 439252 - DNA, 75 bp, synthetic construct
  source 1..75: mol_type = other DNA
gaaaagggaaaccgcagatgcgctgaagcgtcttcgtgatgccgggtttattactctggatttacgcacggtgga

SEQ ID NO: 439253 - DNA, 75 bp, synthetic construct
  source 1..75: mol_type = other DNA
cgtttgctgagcagtttggctttgggaaaagggaaaccgcagatgcgctgaagcgtcttcgtgatgccgggttta

SEQ ID NO: 439254 - DNA, 75 bp, synthetic construct
  source 1..75: mol_type = other DNA
tccgctgacgcgtctgcgccagcgcgttctgcccgacaggaatattcaccggaatttgaacaggcctggcaggaa

SEQ ID NO: 439255 - DNA, 75 bp, synthetic construct
  source 1..75: mol_type = other DNA
tactggtaccgcccgacagaagtcagggatgagcataccggggctttgctgggatatcgcaagcgttttcagggg

SEQ ID NO: 439256 - DNA, 75 bp, synthetic construct
  source 1..75: mol_type = other DNA
tgacaacctgcataaaatcggcgaaggaaccctggttgtacagggaaccggtgttaatgagggcggcctgaaagt

SEQ ID NO: 439257 - DNA, 75 bp, synthetic construct
  source 1..75: mol_type = other DNA
tgctacaggaaataccggcacacagttcgtgaagcaggctgcgacgttctttggacccgatcgtcacttcgaaga

SEQ ID NO: 439258 - DNA, 75 bp, synthetic construct
  source 1..75: mol_type = other DNA
gcagtttgccggggttgttactgttgaccgctccctggaaaaccgccgcatgcaggccgggcaggttatcagcgg

SEQ ID NO: 439259 - DNA, 75 bp, synthetic construct
  source 1..75: mol_type = other DNA
tgctttttgaccccgatttttgcgacttcaatttgtgggtaacacgccgtgtgcaaacggtggatgaggacggga

SEQ ID NO: 439260 - DNA, 75 bp, synthetic construct
  source 1..75: mol_type = other DNA
ggaggtgggcgacagcgacaggtcgatgtcctgtctggccttggtgccatgtctgacaaattcggtaaatccagt

SEQ ID NO: 439261 - DNA, 75 bp, synthetic construct
  source 1..75: mol_type = other DNA
acctggtggaaacatatccagctacccagtgggcgtccggatgcgacagccattgcgctgctttcagagattgtt

SEQ ID NO: 439262 - DNA, 75 bp, synthetic construct
  source 1..75: mol_type = other DNA
tatcgctctgctttcagagatcgtttactggtaccgcccgacagaggtcagggatgagcacaccggagcgttgct

SEQ ID NO: 439263 - DNA, 75 bp, synthetic construct
  source 1..75: mol_type = other DNA
atgacattcaaatggaaatagacgagaggtttataaatcgtaaaattgcctttcgtggctcctctttattggcga

SEQ ID NO: 439264 - DNA, 75 bp, synthetic construct
  source 1..75: mol_type = other DNA
agatccgttaccttcaataaagccttacatttcctataataaatcttctttaaacaatctggtattctcacgatt

SEQ ID NO: 439265 - DNA, 75 bp, synthetic construct
  source 1..75: mol_type = other DNA
tgagctggagcgacttcgcaaagaagcggaggaaaaagcgcgcattgagcgagaagagaatatccgccgggaagc

SEQ ID NO: 439266 - DNA, 75 bp, synthetic construct
  source 1..75: mol_type = other DNA
ccaggctgttgcagggggatatctcggtacttctgccgccgccatcgtcaggcaaaaatttcgttgagcaggtgc

SEQ ID NO: 439267 - DNA, 75 bp, synthetic construct
  source 1..75: mol_type = other DNA
ccttcgtacgaccgcaatcagcgaagcggcgtatgccgtcacccgattgcctgcgccaacaacttccgcggtgat

SEQ ID NO: 439268 - DNA, 75 bp, synthetic construct
  source 1..75: mol_type = other DNA
cctggtttgataacgcggcgcgtgacgcggacattatccggcgtaatgccattacgcatcccggctttgtgccgg

SEQ ID NO: 439269 - DNA, 75 bp, synthetic construct
  source 1..75: mol_type = other DNA
cattcagacgttcgctaaccagatttatatagataccggatcgccgaaaagcgggcggctgtcattttataaaat

SEQ ID NO: 439270 - DNA, 75 bp, synthetic construct
  source 1..75: mol_type = other DNA
cagcgtggaagtggttgcctgcggtgacgaagagcaggtggaaaaattaatgcagtggttaaaaagtggcggccc

SEQ ID NO: 439271 - DNA, 75 bp, synthetic construct
  source 1..75: mol_type = other DNA
agggcggcatgccggacatgcaggtgctgacctgggatggtcaactgctggcgcttgagctgccgcagaccgttg

SEQ ID NO: 439272 - DNA, 75 bp, synthetic construct
  source 1..75: mol_type = other DNA
tggtgcttttgttcgcgatcaggaagttcatgccgtggtgcaggactggaaagcgcgtggtcgcccacagtatgt

SEQ ID NO: 439273 - DNA, 75 bp, synthetic construct
  source 1..75: mol_type = other DNA
gcctttaccgtatccagtaagattgactcacgtaccattcttgatcaggctggcgcggaatcactgctggggatg

SEQ ID NO: 439274 - DNA, 75 bp, synthetic construct
  source 1..75: mol_type = other DNA
tatgtggcttgccagcggtggtgactggtttttcgatttaaatgattcagagcaacaagaggcaatagatctgtt

SEQ ID NO: 439275 - DNA, 75 bp, synthetic construct
  source 1..75: mol_type = other DNA
acacgctggtttcttcttgctctgctcttgatgactgcatcagcgataacttcgaccagtttggcatggacggta

SEQ ID NO: 439276 - DNA, 75 bp, synthetic construct
  source 1..75: mol_type = other DNA
atgcctggaaaatctcaaaatcgtcgattactcccctcagcaggaaggcaaagtctttttttggcgcgtgggtgg

SEQ ID NO: 439277 - DNA, 75 bp, synthetic construct
  source 1..75: mol_type = other DNA
aagtgttctttggcgcgtgggtggagattgaaaacgacgatggtgttacccaccgttttcgtatcgtcggctacg

SEQ ID NO: 439278 - DNA, 75 bp, synthetic construct
  source 1..75: mol_type = other DNA
caccgtttccgtattgtcggctacgatgaaatttttggccgtaaagattacatctctatcgattccccgatggcc

SEQ ID NO: 439279 - DNA, 75 bp, synthetic construct
  source 1..75: mol_type = other DNA
cagcgtggaagtggttgcctgcggtgacgaagggcaggtggaaaaattaatacagtggttaaaaagtggcggccc

SEQ ID NO: 439280 - DNA, 75 bp, synthetic construct
  source 1..75: mol_type = other DNA
ggtacgccaaaaatcttgacgatggcagcgtggaagtggttgcctgcggtgaagaagggcaggtggaaaaattaa

SEQ ID NO: 439281 - DNA, 75 bp, synthetic construct
  source 1..75: mol_type = other DNA
aatactgcggtcaggtatcagttttcataaaaacctcgcctttttcaaaacatgaaccctattacagcaaagtct

SEQ ID NO: 439282 - DNA, 75 bp, synthetic construct
  source 1..75: mol_type = other DNA
actatgagcagatgcgtcaggctatctgcagctatgcggcgcgtggcgccgaaaagcttcgcggcgagcatcagt

SEQ ID NO: 439283 - DNA, 75 bp, synthetic construct
  source 1..75: mol_type = other DNA
ttggcaattgtgcctgtggaggatgtctggggcgtcggcaggcgcatcagtaagaagctaaacgccatgggcatc

SEQ ID NO: 439284 - DNA, 75 bp, synthetic construct
  source 1..75: mol_type = other DNA
tgacgacatttgtacggacatccccctttgcagtaaaagaaccctgttacagcaatgccgctgtggaaaagcttc

SEQ ID NO: 439285 - DNA, 75 bp, synthetic construct
  source 1..75: mol_type = other DNA
acggaaagggcacactctattttgccgggcagggtatacagcagcagtggcagatgaagcgtgaaatgctgtcgc

SEQ ID NO: 439286 - DNA, 75 bp, synthetic construct
  source 1..75: mol_type = other DNA
cggtcagggcatacagcagcagtggcagatgaagcgggaaatgctttccccgcggtatacgacgaggtactcaga

SEQ ID NO: 439287 - DNA, 75 bp, synthetic construct
  source 1..75: mol_type = other DNA
gcggaaaaggtacactctactttgccggtcagggcatacagcagcagtggcagatgaagcgggaaatgctttccc

SEQ ID NO: 439288 - DNA, 75 bp, synthetic construct
  source 1..75: mol_type = other DNA
gaagaagagttgctgtttatgcctgagggcggcatgccggacatgcaggtgctgacctgggacggtcaactgctg

SEQ ID NO: 439289 - DNA, 75 bp, synthetic construct
  source 1..75: mol_type = other DNA
gtgatggctgctggccccggcgggaaagatatcttcctgttaagcccggatgtcggtgctaaacctggccaccag

SEQ ID NO: 439290 - DNA, 75 bp, synthetic construct
  source 1..75: mol_type = other DNA
aagactccaccgccgagctgtaccacttcatcggtaaagatattgtttacttccacagcctgttctggcctgcca

SEQ ID NO: 439291 - DNA, 75 bp, synthetic construct
  source 1..75: mol_type = other DNA
ctatcactcgacgcacagcgaagagaaccgtcagttgtctgagcttatctatactcgcctgaaagagaacggttt

SEQ ID NO: 439292 - DNA, 75 bp, synthetic construct
  source 1..75: mol_type = other DNA
taatgcgtgattctgaacacttcttctttgatctgccttctttcagcgaaatgttgcaggcatggacccgcagcg

SEQ ID NO: 439293 - DNA, 75 bp, synthetic construct
  source 1..75: mol_type = other DNA
gcaaccgctgctgggccataaagtgaatccgttcaaagcactgtataaccgtatcgacatgaaacaggtggaagc

SEQ ID NO: 439294 - DNA, 75 bp, synthetic construct
  source 1..75: mol_type = other DNA
cggccacgaggtcaacttcatctgcgccgacgatgcccacggtacaccaatcatgttgaaagctcagcagcttgg

SEQ ID NO: 439295 - DNA, 75 bp, synthetic construct
  source 1..75: mol_type = other DNA
cgacaattaccactctacgcacagcgaagagaaccgtcagctgtcagagcttatatacagccgcctgaaagaaaa

SEQ ID NO: 439296 - DNA, 75 bp, synthetic construct
  source 1..75: mol_type = other DNA
aaaacgcagagtttgttgaaggttctgacaaactgctgcgcctgacgctggatctcggcggtgaaaaacgcaatg

SEQ ID NO: 439297 - DNA, 75 bp, synthetic construct
  source 1..75: mol_type = other DNA
tgtccaagtctcgcggcacctttattaaagccagcacctggctgaatcactttgacgctgacagcttgcgctact

SEQ ID NO: 439298 - DNA, 75 bp, synthetic construct
  source 1..75: mol_type = other DNA
aatcatggcactggctgacctggctaaccgctatgtcgatgaacaggctccgtgggtggtggcgaagcaggaagg

SEQ ID NO: 439299 - DNA, 75 bp, synthetic construct
  source 1..75: mol_type = other DNA
catcgatgatatcgacctgaacctggaagattttgttcagcgtgtgaatgccgatatcgttaacaaagtggttaa

SEQ ID NO: 439300 - DNA, 75 bp, synthetic construct
  source 1..75: mol_type = other DNA
tgctggaaggcagcaacttccgcaagccgaccaacctgtttgttcacggctatgtgacggtgaacggcgcgaaga

SEQ ID NO: 439301 - DNA, 75 bp, synthetic construct
  source 1..75: mol_type = other DNA
gaaatgagtcaggaacatcagactgatttcgcaggctttaacatcagctatgacaactatcactcgacgcacagc

SEQ ID NO: 439302 - DNA, 75 bp, synthetic construct
  source 1..75: mol_type = other DNA
ataacaattatgctgcagcgcttaattttgacaacaaaatatatgaaccagcaaatattgttgcaaatgaattca

SEQ ID NO: 439303 - DNA, 75 bp, synthetic construct
  source 1..75: mol_type = other DNA
attcgagaataatattgtttgggggccaaacagcaaattagcgactcaactcaccacatccgaacatctaaggac

SEQ ID NO: 439304 - DNA, 75 bp, synthetic construct
  source 1..75: mol_type = other DNA
gtggtatatgtgatagcaccttcaagagtatcattcctctttactgatattgttggcgtggatgcctttatatct

SEQ ID NO: 439305 - DNA, 75 bp, synthetic construct
  source 1..75: mol_type = other DNA
tctgcctgatcccggagttcatgcgtgatgcaatgaaagtaccgttctacttcggtgggacctcactgcttatcg

SEQ ID NO: 439306 - DNA, 75 bp, synthetic construct
  source 1..75: mol_type = other DNA
tacgctggcgattggtaaagctggcgcggcaaacgcggcgttactggcagcacaaattcttgcgactcatgataa

SEQ ID NO: 439307 - DNA, 75 bp, synthetic construct
  source 1..75: mol_type = other DNA
ctgccaggcatgattgccgccaaaacgctggtgccggtgctgggcgtaccagtacagagcgccgcactgagcggt

SEQ ID NO: 439308 - DNA, 75 bp, synthetic construct
  source 1..75: mol_type = other DNA
cccgacggaactgatcgagccgaaatcagtggtttctggcgctacaccggtaatgcgtgattccgaacacttctt

SEQ ID NO: 439309 - DNA, 75 bp, synthetic construct
  source 1..75: mol_type = other DNA
tatctccgaaggcatggtgatggctgctggccccggcgggaaagatatcttcctgttaagcccggatgctggtgc

SEQ ID NO: 439310 - DNA, 75 bp, synthetic construct
  source 1..75: mol_type = other DNA
tgttccgcgtgctgatgacttacctgaagccggtactgccgaaactgactgaacgtgcagaagcattcctgaata

SEQ ID NO: 439311 - DNA, 75 bp, synthetic construct
  source 1..75: mol_type = other DNA
aaagtttgtggcccgatgcctggcatttcctttctatttttcagcggcagcgcatggttaatgactctgctgtgg

SEQ ID NO: 439312 - DNA, 75 bp, synthetic construct
  source 1..75: mol_type = other DNA
aatcctgctggaaaatcaggtcatcactgaagaacaactcgatacagcactgcgtaatcgcgtcgaaggcctacg

SEQ ID NO: 439313 - DNA, 75 bp, synthetic construct
  source 1..75: mol_type = other DNA
tgttccgcgtgctgatgacgtacctgaaaccggtactgccgaaactgaccgagcgtgcagaagcattcctcaata

SEQ ID NO: 439314 - DNA, 75 bp, synthetic construct
  source 1..75: mol_type = other DNA
taaactggcaggttaatggtgttaagggcgataacctgcataaaattggtgaaggtacgctgacggtacagggta

SEQ ID NO: 439315 - DNA, 75 bp, synthetic construct
  source 1..75: mol_type = other DNA
ggaaatggaacggccgttgagctggaagagggaacctctgttgcggttaacgatgcggataaaagtgtcttcaac

SEQ ID NO: 439316 - DNA, 75 bp, synthetic construct
  source 1..75: mol_type = other DNA
cgctgacacagggaaccaccacatatgccatgcacgggcagcagggaaatgacctgaatgctggtaagaacctga

SEQ ID NO: 439317 - DNA, 75 bp, synthetic construct
  source 1..75: mol_type = other DNA
atcatctgcggttgcgtcactgcggcgggtgcactggcgtacatcttcctggttcgtcagccgatcaacgaccca

SEQ ID NO: 439318 - DNA, 75 bp, synthetic construct
  source 1..75: mol_type = other DNA
gcggcttaaagagcggattgagagccttgcacagggtttatctgcgcgggttagtgaaggtgataacgacgcaga

SEQ ID NO: 439319 - DNA, 75 bp, synthetic construct
  source 1..75: mol_type = other DNA
gactggagtctgacagcccgtgccggcctgcattatgagttcgatctgacggacagtgctgacgttcatctgaag

SEQ ID NO: 439320 - DNA, 75 bp, synthetic construct
  source 1..75: mol_type = other DNA
ggcggtgcaatgggactcggtaactggacgccggcggcagaatttaatatttacgttgacccggaagcggcagaa

SEQ ID NO: 439321 - DNA, 75 bp, synthetic construct
  source 1..75: mol_type = other DNA
gacaccgagcgtttccgcaccattggtaacccggtttctaccattgttgccgaactgctggatttcttcctcgaa

SEQ ID NO: 439322 - DNA, 75 bp, synthetic construct
  source 1..75: mol_type = other DNA
acccgtcaccattgtctctaccggaccgcaaactaacgtcgccttgctgctcaatagccatccggaactgcatag

SEQ ID NO: 439323 - DNA, 75 bp, synthetic construct
  source 1..75: mol_type = other DNA
tcactggattttcatgccccccggctggataaactggtgacagaggttgcccctactgcggtgacggcgcagggg

SEQ ID NO: 439324 - DNA, 75 bp, synthetic construct
  source 1..75: mol_type = other DNA
tgcgtcagcaggcctgtacagcggtaaaacaaaatcatggggtggtggtttctatgccagtggtctgttccggtc

SEQ ID NO: 439325 - DNA, 75 bp, synthetic construct
  source 1..75: mol_type = other DNA
tattatgaatatctagagtcattaatttataaattaggacttagcgaatgtatcaaactgattcgtaagatgtct

SEQ ID NO: 439326 - DNA, 75 bp, synthetic construct
  source 1..75: mol_type = other DNA
aagccgattaagaaccgtaagctctgtattgttaccgggatgttcagttcagccgcctttactctggtagtaccg

SEQ ID NO: 439327 - DNA, 75 bp, synthetic construct
  source 1..75: mol_type = other DNA
taaaacgcgccggattgtacgctcagacgttaccggcacaacttttctcaacttcctgcctgtggagaataaagc

SEQ ID NO: 439328 - DNA, 75 bp, synthetic construct
  source 1..75: mol_type = other DNA
cgctccaccgcacctatctcacccaaaacggtaaaaaagccaaggtcggcaacgccaagaagatgatgcccattc

SEQ ID NO: 439329 - DNA, 75 bp, synthetic construct
  source 1..75: mol_type = other DNA
ggtaaagctccttatgagcataacgaagacaacgagctcagctactttgccttcatccgtgacaagagcggtttg

SEQ ID NO: 439330 - DNA, 75 bp, synthetic construct
  source 1..75: mol_type = other DNA
aatcccgtatccttttcgatcagcaacgacccgacaacattattgagtggagctatgctagaagcgatctcaaaa

SEQ ID NO: 439331 - DNA, 75 bp, synthetic construct
  source 1..75: mol_type = other DNA
agagcaccatcgaaacaaggataaagaaaataaagaaaagtgtattgatgaaataagtttaaaaaaatttgaaat

SEQ ID NO: 439332 - DNA, 75 bp, synthetic construct
  source 1..75: mol_type = other DNA
gcaacaggaaaatagcgcggcgctgaaatcgcagcggcgaatgttccatcaccagattgaacgtggcaacccgcg

SEQ ID NO: 439333 - DNA, 75 bp, synthetic construct
  source 1..75: mol_type = other DNA
cgcagcctgttccgtaaccgcacaatgtggggaatgatgctcggattcagtggcatcggtgatgctgccaactta

SEQ ID NO: 439334 - DNA, 75 bp, synthetic construct
  source 1..75: mol_type = other DNA
atcatctgcggttgcgttaccgcagcaggtgcgttggcgtacatattcctggttcgccagccgatcaacgaccca

SEQ ID NO: 439335 - DNA, 75 bp, synthetic construct
  source 1..75: mol_type = other DNA
tgccgcctttactctggtggtaccacaagcgacaacatccatgacggcagttctgctgattggcatggcgctatt

SEQ ID NO: 439336 - DNA, 75 bp, synthetic construct
  source 1..75: mol_type = other DNA
agtagaaaaaacagactgtttgcggttcaatccggctatgccctactacgacgaagatggcaatgaggttgggaa

SEQ ID NO: 439337 - DNA, 75 bp, synthetic construct
  source 1..75: mol_type = other DNA
ttgattaaagaagctacccgacaagacgtcgcgataacggtgctggaaacagaagcggggcgctatcctgacaca

SEQ ID NO: 439338 - DNA, 75 bp, synthetic construct
  source 1..75: mol_type = other DNA
acagcaacaggaaaatagcgcggcgctgaaatcgcagcggcgaatgttccatcatcaaattgaacgtggcaatcc

SEQ ID NO: 439339 - DNA, 75 bp, synthetic construct
  source 1..75: mol_type = other DNA
ggcgcaatggggcttggtaactggacgcctgcggctgaatttaatatttacgttgacccggaagcggcagaaatt

SEQ ID NO: 439340 - DNA, 75 bp, synthetic construct
  source 1..75: mol_type = other DNA
agtgctctatgaggttgatctggtcaacatgattgaaatcgttgacggcgcggacctgatggaagcacaccgtaa

SEQ ID NO: 439341 - DNA, 75 bp, synthetic construct
  source 1..75: mol_type = other DNA
accaaagtcagcagcaccaacagctacgcgaagctgaccattaacggcgaagtgctctatgaggttgatctggtc

SEQ ID NO: 439342 - DNA, 75 bp, synthetic construct
  source 1..75: mol_type = other DNA
atggctttaccacgcaaattaaaacatctgaacttgtttaacgacgggaacaactggcgggggatcgttgagtcg

SEQ ID NO: 439343 - DNA, 75 bp, synthetic construct
  source 1..75: mol_type = other DNA
cagatccgcgtcgctttgcctggcatcgttcagtcattcgatcctgacgcggtgacggcggttgtgcagcctgct

SEQ ID NO: 439344 - DNA, 75 bp, synthetic construct
  source 1..75: mol_type = other DNA
gttggcccgcagtcgcaagcacggaaaatcagcggtatcagtaccagttcggtagagctgcgcagcgatgacggc

SEQ ID NO: 439345 - DNA, 75 bp, synthetic construct
  source 1..75: mol_type = other DNA
atctgaacctgtttaacgacgggaacaactggcagggaatcgttgagtcgctgacgctgccgaaattcactcgca

SEQ ID NO: 439346 - DNA, 75 bp, synthetic construct
  source 1..75: mol_type = other DNA
cagaacgcatcagggacggaaccgtaccgtctccggtgaaattctccaacatgtggctggtgaatttgcgaataa

SEQ ID NO: 439347 - DNA, 75 bp, synthetic construct
  source 1..75: mol_type = other DNA
cttgatgcgtttattgaggggatgacgctgcattttgtcaccgaccgtaagccgctatcgcgcgaggagattttg

SEQ ID NO: 439348 - DNA, 75 bp, synthetic construct
  source 1..75: mol_type = other DNA
gatcaggcgtttgctgcaagccaatttacgcaacgatgtctccgcagtcgaagaagtggaaacgttgatgcgcaa

SEQ ID NO: 439349 - DNA, 75 bp, synthetic construct
  source 1..75: mol_type = other DNA
ggagctgccacggtggacggtatccagttgcgttttaccggctctattcagcgtgacgatactggcgaagtgcag

SEQ ID NO: 439350 - DNA, 75 bp, synthetic construct
  source 1..75: mol_type = other DNA
aatagcgcaaatgagtgatgatgactgcagggaatgtttgggatttttggaaggtaccttaaaagaagttgagga

SEQ ID NO: 439351 - DNA, 75 bp, synthetic construct
  source 1..75: mol_type = other DNA
agatctaagtaatttatttgggaatttagatttcctaaatgagatgaaaatatctcttaatgaacgaggtgatgg

SEQ ID NO: 439352 - DNA, 75 bp, synthetic construct
  source 1..75: mol_type = other DNA
cagatccgtgtcgccttgcctggcattattcagtcattcgatcctgacgcggtgacggcggttgtgcagccagct

SEQ ID NO: 439353 - DNA, 75 bp, synthetic construct
  source 1..75: mol_type = other DNA
ggagcatcgcggatgggcaatggttgattttttcgggtatggccaataatgccagcggtggcgcggtatttttgc

SEQ ID NO: 439354 - DNA, 75 bp, synthetic construct
  source 1..75: mol_type = other DNA
cggctacgtcaatatgggagcgtatgactatacgctggtggaagataacaacgactggtatctgcgatcgcaaga

SEQ ID NO: 439355 - DNA, 75 bp, synthetic construct
  source 1..75: mol_type = other DNA
tcattcagtcgttcgatcctgatactgttacctgcacagcagaggtggcgcttcgcggtattgttggcgacggct

SEQ ID NO: 439356 - DNA, 75 bp, synthetic construct
  source 1..75: mol_type = other DNA
gactaagtacgctgggttcccccgccagcggcactgcgacgtctgcggtacgtgtggaggacggaacgctaaaag

SEQ ID NO: 439357 - DNA, 75 bp, synthetic construct
  source 1..75: mol_type = other DNA
cgttgcaggaggctatggcggagcaatctattctgcgggaacaaacgatgccggtgatatggatttaaatatcac

SEQ ID NO: 439358 - DNA, 75 bp, synthetic construct
  source 1..75: mol_type = other DNA
tcacgatccccatgcgacggaaattgaagaagatggcagcactatcagtgacgatgcggtgaagcaacggggtga

SEQ ID NO: 439359 - DNA, 75 bp, synthetic construct
  source 1..75: mol_type = other DNA
tgagttcttggggagcgttaaggctaacggcaagccaatcgatgatacgcacactcatggcggtgttcagcgcgg

SEQ ID NO: 439360 - DNA, 75 bp, synthetic construct
  source 1..75: mol_type = other DNA
agtcgcaggcgaggaagattagcggtattaataccagtgctacacagttgcgtagtgacgacggcagcacctatt

SEQ ID NO: 439361 - DNA, 75 bp, synthetic construct
  source 1..75: mol_type = other DNA
gatcgttgtattgatttctggtggcagagcggcgggatacaggagccggtcgatgacagaatgcatgatttatcg

SEQ ID NO: 439362 - DNA, 75 bp, synthetic construct
  source 1..75: mol_type = other DNA
cccattgctggtggatgttccagtgatattcccacgtggcggaggatgtacgctaacgtttccgattaaagccgg

SEQ ID NO: 439363 - DNA, 75 bp, synthetic construct
  source 1..75: mol_type = other DNA
gatcgttgtattgatttctggtggcagaacggcggaatacaggagcctgttgatgacagaatgcatgatttatcg

SEQ ID NO: 439364 - DNA, 75 bp, synthetic construct
  source 1..75: mol_type = other DNA
ccgccggtttgtcgtatcatggattacggcaaattcctctatgaaaaaagcaagtcttctaaggaacagaagaaa

SEQ ID NO: 439365 - DNA, 75 bp, synthetic construct
  source 1..75: mol_type = other DNA
accctgatgcgccatagcctgatgggcgttgcggatgcgctcgcgatttcccgcgcaacgctgcgcaacatgaag

SEQ ID NO: 439366 - DNA, 75 bp, synthetic construct
  source 1..75: mol_type = other DNA
gtgaaaaaagcgtgccgctggcggaagttcagccagggatgttactgcgcctgacgaccggcgatcgcgtgccgg

SEQ ID NO: 439367 - DNA, 75 bp, synthetic construct
  source 1..75: mol_type = other DNA
actcgatttaactccgccgacggcgcgcctggtcaccgacgaaggtgaaaaaagcgtgccgctggcggaagttca

SEQ ID NO: 439368 - DNA, 75 bp, synthetic construct
  source 1..75: mol_type = other DNA
aacctgctcggcgcgtttatctataacagcattggcattccggtcgctgccggtattttgtggccgttcaccgga

SEQ ID NO: 439369 - DNA, 75 bp, synthetic construct
  source 1..75: mol_type = other DNA
tgccattgagactgcggcgataaccctgatgcgtcatagcctgatgggtgttgcggatgcgttagccatttcccg

SEQ ID NO: 439370 - DNA, 75 bp, synthetic construct
  source 1..75: mol_type = other DNA
cggcgttggccgtgcggcggagtttggcgtgctggtgcgtgatgccgacgcactgcaacgcgccagtacgctgga

SEQ ID NO: 439371 - DNA, 75 bp, synthetic construct
  source 1..75: mol_type = other DNA
ggaaggggtggtgacggcgttctggacgctctccgccagcggcgaactgtggcagcatctggcgatcagttccta

SEQ ID NO: 439372 - DNA, 75 bp, synthetic construct
  source 1..75: mol_type = other DNA
ggctgtatgtggtggaagcgacaatccggggtcaccggcagagaaacggctggcagaacggcaggagaaaagcgt

SEQ ID NO: 439373 - DNA, 75 bp, synthetic construct
  source 1..75: mol_type = other DNA
ctctacatggatgtagaagacttcaccttcggcatggtggtcctcgataaacactcaggtgctatattagtaggt

SEQ ID NO: 439374 - DNA, 75 bp, synthetic construct
  source 1..75: mol_type = other DNA
acggcgcggaagcgattgaagatgacgcgaaacgccgtgagcgccagcaggaaaccgccgttgctacgatgaagc

SEQ ID NO: 439375 - DNA, 75 bp, synthetic construct
  source 1..75: mol_type = other DNA
aaccgaccatcaggactgcaatcagccttgggaggtgccatgagcggtgcggcatcaggggcgatgattggctct

SEQ ID NO: 439376 - DNA, 75 bp, synthetic construct
  source 1..75: mol_type = other DNA
ctgctttacaacaactgcaaggactgatgactctggaagggcagaataaagccgcgaatgatttctttggttctg

SEQ ID NO: 439377 - DNA, 75 bp, synthetic construct
  source 1..75: mol_type = other DNA
cgacaccgtggtgttcgataaaaccgggacgctgaccgaaggtaaaccacaggttgtcgcagtaaaaacgtttgc

SEQ ID NO: 439378 - DNA, 75 bp, synthetic construct
  source 1..75: mol_type = other DNA
gctatgcaggtacctatgcaatagctaacgtgctactgacgctggcggggacaatcattgtaatggtgtggccag

SEQ ID NO: 439379 - DNA, 75 bp, synthetic construct
  source 1..75: mol_type = other DNA
gttccagccatccgctggcacgggcgatcctcgataaagcaagcgatatgcagctgccgcaggtcaacggtttcc

SEQ ID NO: 439380 - DNA, 75 bp, synthetic construct
  source 1..75: mol_type = other DNA
gtctgggggatgatcggcgataacatgatggtcacccccgataaccgcagcctgtggttagttatcggcctgata

SEQ ID NO: 439381 - DNA, 75 bp, synthetic construct
  source 1..75: mol_type = other DNA
aaaggcgatgtattgcaggtgagcggcgatgcccgtcgcgtgaaaaccatcgccgatcgcatcggctttatctcg

SEQ ID NO: 439382 - DNA, 75 bp, synthetic construct
  source 1..75: mol_type = other DNA
ttgccggattgattgtcagtctggtgcccgtggttatctgtttcttgttcggtgcttatgtattgcgaatgaacc

SEQ ID NO: 439383 - DNA, 75 bp, synthetic construct
  source 1..75: mol_type = other DNA
attgggctgatgatcgggatgatcaccttccagttcagcacattcagtttcggcatggggaacgctgccgggttg

SEQ ID NO: 439384 - DNA, 75 bp, synthetic construct
  source 1..75: mol_type = other DNA
ttgcgtagcgatagcgtggcggcgctgcaacgtctgcataaagcgggatatcgtctggtaatgttaaccggcgat

SEQ ID NO: 439385 - DNA, 75 bp, synthetic construct
  source 1..75: mol_type = other DNA
tggcgaagcggaaggccattcactgctgctggggaatcaggctctgttaaatgaccagcaagtcgatacgaaagc

SEQ ID NO: 439386 - DNA, 75 bp, synthetic construct
  source 1..75: mol_type = other DNA
accgccgtcgcgactatgaaacacttccgctggcaggcgattgtcgccctggcggtgggtatcccggtgatggtc

SEQ ID NO: 439387 - DNA, 75 bp, synthetic construct
  source 1..75: mol_type = other DNA
ctgatgcgccatagtctgatgggcgttgccgatgcgctcgccatctcccgcgcaacgctgcgtaatatgaagcag

SEQ ID NO: 439388 - DNA, 75 bp, synthetic construct
  source 1..75: mol_type = other DNA
cactgcaacgtgccagtacgctggataccgtagttttcgataaaaccgggacgctgaccgaagggaagccgcagg

SEQ ID NO: 439389 - DNA, 75 bp, synthetic construct
  source 1..75: mol_type = other DNA
ccaaagaagcagggattgatgaagtgattgcgggtgtattgccggatggtaaagccgaagcgattaaacgtctgc

SEQ ID NO: 439390 - DNA, 75 bp, synthetic construct
  source 1..75: mol_type = other DNA
gtatgggaagtaatcgagcgtcaccgcatcctggccccagtcccttatcgccttggctggagccggtcgtcgtgt

SEQ ID NO: 439391 - DNA, 75 bp, synthetic construct
  source 1..75: mol_type = other DNA
gctaagtcaacaggaaaaccggatcaacgccgacgcgataataaagatactcctggcaatactccgggattaaag

SEQ ID NO: 439392 - DNA, 75 bp, synthetic construct
  source 1..75: mol_type = other DNA
caacaggaaaatagcgcggcgctgaaatcgcagcggcgaatgttccatcaccagattgaacgtggcaacccgcga

SEQ ID NO: 439393 - DNA, 75 bp, synthetic construct
  source 1..75: mol_type = other DNA
ctaattaaagaagctgcccgacaagacgtcgcggtaacggtgttggaaacagaaacgggccgctactctgacacg

SEQ ID NO: 439394 - DNA, 75 bp, synthetic construct
  source 1..75: mol_type = other DNA
cagtggatggcaaatactaccctgtcataatagacacatccgcaatggaaggttacggcaacctgacatgtccta

SEQ ID NO: 439395 - DNA, 75 bp, synthetic construct
  source 1..75: mol_type = other DNA
aatctgcagccacttctgcatccaccgcgaccacgaaagcgtcagaagctgccacctcagcccgggatgcggcgg

SEQ ID NO: 439396 - DNA, 75 bp, synthetic construct
  source 1..75: mol_type = other DNA
gtgagtaaccgttattggatgatctccttccataaaaatacgcgcaatctaacggttcgctctgtgccaaaaaaa

SEQ ID NO: 439397 - DNA, 75 bp, synthetic construct
  source 1..75: mol_type = other DNA
attacgagaagcgccataccaaacaggggatacagaccaacctgacactgaaagaggaaagctacggcgactggc

SEQ ID NO: 439398 - DNA, 75 bp, synthetic construct
  source 1..75: mol_type = other DNA
cagcagatcaaacagtgggctcagcaggcaaaaggggaagatccacagggttacagggcggaatttattcgcctg

SEQ ID NO: 439399 - DNA, 75 bp, synthetic construct
  source 1..75: mol_type = other DNA
aggcaaaaggggaagatccacagggttacagagcggaatttattcgcctgattggactggcgaaagatctggaca

SEQ ID NO: 439400 - DNA, 75 bp, synthetic construct
  source 1..75: mol_type = other DNA
ctgaaatcgcagcggcgaatgttccatcaccagattgaacgtggtaacccacgacggacatttacagggatggca

SEQ ID NO: 439401 - DNA, 75 bp, synthetic construct
  source 1..75: mol_type = other DNA
ggggccgggcggtcaacatgtcaataaaaccgactcggcggtgcgcgccacgcatctggcaagtgggatttgtgt

SEQ ID NO: 439402 - DNA, 75 bp, synthetic construct
  source 1..75: mol_type = other DNA
caattactacaagaccgtgctgggcctggccgcacagcttatggcaatggtgcttctggttgcgattggcaaaga

SEQ ID NO: 439403 - DNA, 75 bp, synthetic construct
  source 1..75: mol_type = other DNA
gccgcaaagaagtcagccagcgatgccggcacatctgcccgtgaggcggcaacccatgcaaccgatgctgcaggc

SEQ ID NO: 439404 - DNA, 75 bp, synthetic construct
  source 1..75: mol_type = other DNA
gcgatcaaattgatgaagtagataaagcgctgttgaatttattagcgaagcgccttgaactggtcgccgaagttg

SEQ ID NO: 439405 - DNA, 75 bp, synthetic construct
  source 1..75: mol_type = other DNA
ccgaggctgaagctctcggagtgccgccggatctcattgaagacatcctgcgtcgggtgatgcgtgaatcttact

SEQ ID NO: 439406 - DNA, 75 bp, synthetic construct
  source 1..75: mol_type = other DNA
caaacgttactataagcgtttcggcgaggcgattgagttgctggagcagggcgataagcaggcgtttattgacag

SEQ ID NO: 439407 - DNA, 75 bp, synthetic construct
  source 1..75: mol_type = other DNA
tgaactgcatattcccgttgtcatcagcattgttgatgccaacggaacagaaagtgttacctggcggatgcctga

SEQ ID NO: 439408 - DNA, 75 bp, synthetic construct
  source 1..75: mol_type = other DNA
acttttcaggatcttcatcagctcattcgtagcgcggcaatgcgcgcagatgaactgcatattcccgtagtcatt

SEQ ID NO: 439409 - DNA, 75 bp, synthetic construct
  source 1..75: mol_type = other DNA
gcattagtggtggcagtgttgagcaagacatggatattgcccaaagcgcaatgaaggcaattaatgtgggagcaa

SEQ ID NO: 439410 - DNA, 75 bp, synthetic construct
  source 1..75: mol_type = other DNA
cgcagagggaattgcctggataattcgctgatggaaagagtctttcgcagccttaaaagtgaatggcttccgaaa

SEQ ID NO: 439411 - DNA, 75 bp, synthetic construct
  source 1..75: mol_type = other DNA
cagttttattcgcctgcaggacaaatggtgttatctcgcgctcgttgttgatttatattcacgtcggattatcgg

SEQ ID NO: 439412 - DNA, 75 bp, synthetic construct
  source 1..75: mol_type = other DNA
ttaaccccgccgcaccaaaccgcgtctggtgcggcgacatcagttttattcgcctgcaggacaaatggtgttatc

SEQ ID NO: 439413 - DNA, 75 bp, synthetic construct
  source 1..75: mol_type = other DNA
gcgatcaaattgatgaagtcgataaagaactgctgaatttattagcgaagcgtctggaactggtcgccgaggtcg

SEQ ID NO: 439414 - DNA, 75 bp, synthetic construct
  source 1..75: mol_type = other DNA
gaaaatactatgttgtcgggtattgccgtattacataatattgaaaggttattagaggcggggttagataatggc

SEQ ID NO: 439415 - DNA, 75 bp, synthetic construct
  source 1..75: mol_type = other DNA
cgcctttgctgctaatattataagtgaaaatactatgttgtcgggtattgccgtattacataatattgaaaggtt

SEQ ID NO: 439416 - DNA, 75 bp, synthetic construct
  source 1..75: mol_type = other DNA
ttacaatgaaaaccatccgcacagtgcgttgggttatcgctctccgcgagaatatcgacgtcagcgggtaacgtt

SEQ ID NO: 439417 - DNA, 75 bp, synthetic construct
  source 1..75: mol_type = other DNA
acagggctacaacaccgcatggattgaaacccaactagcccatgttgataagaatgctatccgtggcacctacaa

SEQ ID NO: 439418 - DNA, 75 bp, synthetic construct
  source 1..75: mol_type = other DNA
atctcgcttggtgtctatccaacgatcacacttgctgaagctcgttcccgtcgtgatgaggcccgaaaaatagtg

SEQ ID NO: 439419 - DNA, 75 bp, synthetic construct
  source 1..75: mol_type = other DNA
acagtctcccttgttgcccggcaacacggtgtggcagccagccagttatttctctggcgcaagcaataccaggag

SEQ ID NO: 439420 - DNA, 75 bp, synthetic construct
  source 1..75: mol_type = other DNA
gctttggcgataaagtaccggaacagtccatccagtggctgacagataacggttcagcgtacagagcgcatgaaa

SEQ ID NO: 439421 - DNA, 75 bp, synthetic construct
  source 1..75: mol_type = other DNA
gtgatagtagtgtactcagccagcagagacagaatatcctcgcgcctcagcctgatacgtttgacagctcttcta

SEQ ID NO: 439422 - DNA, 75 bp, synthetic construct
  source 1..75: mol_type = other DNA
gtgttgctgcatccatgttgccacaacccaacgggtgctgatcttactaatgaccaatgggatgcggtgattgaa

SEQ ID NO: 439423 - DNA, 75 bp, synthetic construct
  source 1..75: mol_type = other DNA
tgagtgatatggcattgactgtgttggtcaggcgtatcggctatgccgggcgcgttacagggcatggattccgcc

SEQ ID NO: 439424 - DNA, 75 bp, synthetic construct
  source 1..75: mol_type = other DNA
gaaaatgcgccgacctcatctggttccgttatcaagccaggcaattgacctgcttaatcagcttaaacccatgac

SEQ ID NO: 439425 - DNA, 75 bp, synthetic construct
  source 1..75: mol_type = other DNA
aaatatgcaattgcaacagggcgtgcactatctaaccctgcgccagatcttgccagcgtgatgatgccccataag

SEQ ID NO: 439426 - DNA, 75 bp, synthetic construct
  source 1..75: mol_type = other DNA
gcaggacaggctggggaatacctttgaggcgatcgcccgtgagtggtatcagcggcgttacgatctttgggccga

SEQ ID NO: 439427 - DNA, 75 bp, synthetic construct
  source 1..75: mol_type = other DNA
gcatatgcgcttcgcgccattgccagtgcaggtttaccggcattaatcagcaattcattttcgaaaatcttctct

SEQ ID NO: 439428 - DNA, 75 bp, synthetic construct
  source 1..75: mol_type = other DNA
atgaactccttaaagaagccgttgaatacgggcgtgcaaaaaagtggatagcgcacgcgcccttattgcccgggg

SEQ ID NO: 439429 - DNA, 75 bp, synthetic construct
  source 1..75: mol_type = other DNA
gtgatggctgctggtcctggcgggaaagatatcttcctgttaagcccggatgctggtgctaaaccaggccatcag

SEQ ID NO: 439430 - DNA, 75 bp, synthetic construct
  source 1..75: mol_type = other DNA
cggccacgaggtcaacttcatctgcgccgacgatgtccacggtacaccaatcatgctgaaagctcagcagcttgg

SEQ ID NO: 439431 - DNA, 75 bp, synthetic construct
  source 1..75: mol_type = other DNA
ctggcccactggcagatgatccgattcaggaaaccatcacctttggcgacttcgcaaaagttgacctgcgcgtgg

SEQ ID NO: 439432 - DNA, 75 bp, synthetic construct
  source 1..75: mol_type = other DNA
acagctgtggctgccggtgaagacgttgttcctgcttctgaactggccgctgcaataaagcagattaatcagctt

SEQ ID NO: 439433 - DNA, 75 bp, synthetic construct
  source 1..75: mol_type = other DNA
cagcgcctgctcggcaaaaaaacgatggaaaatgaactccttaaagaagccgttgaatacgggcgtgcaaaatag

SEQ ID NO: 439434 - DNA, 75 bp, synthetic construct
  source 1..75: mol_type = other DNA
gtgggatatctcccgcgacgcaccttacttcggttttgaaattccgaacgcgccgggtaaatatttctacgtctg

SEQ ID NO: 439435 - DNA, 75 bp, synthetic construct
  source 1..75: mol_type = other DNA
tggaaaaagccagaaatgcgctcgaacagctcttttctgccgggacgttacgtaaacgcagtagtcgttatcgtc

SEQ ID NO: 439436 - DNA, 75 bp, synthetic construct
  source 1..75: mol_type = other DNA
tgctcagtcacgaagtgcttgaccctggtcgcttaacgctggtggtggaaggcgatctggcggcgtgtcgtgcgg

SEQ ID NO: 439437 - DNA, 75 bp, synthetic construct
  source 1..75: mol_type = other DNA
ttatttctctggcgcaagcaataccaggagggaagtcttactgctgtggccgcaggagaacaggtcgttcctgcc

SEQ ID NO: 439438 - DNA, 75 bp, synthetic construct
  source 1..75: mol_type = other DNA
agccagccagttatttctctggcgtaagcaataccaggagggaagtcttactgctgtggccgccggagaacaggt

SEQ ID NO: 439439 - DNA, 75 bp, synthetic construct
  source 1..75: mol_type = other DNA
ggggatggggagtaagcttagtcagccgttgtctccgggtgtcgcgtgcgcagttgcacgtcattctcagacgaa

SEQ ID NO: 439440 - DNA, 75 bp, synthetic construct
  source 1..75: mol_type = other DNA
agcgcctgctacggacaaaaaaacgatggaaaatgaactcctcaaagaagccgttgaatatggacgggcaaaaag

SEQ ID NO: 439441 - DNA, 75 bp, synthetic construct
  source 1..75: mol_type = other DNA
aaactgagaatagttggtttgatattgataatgaagtctaccagtcgctttacttcaagtttcccgagttggctt

SEQ ID NO: 439442 - DNA, 75 bp, synthetic construct
  source 1..75: mol_type = other DNA
tgtgtggtgtggcaggagaagtagtgattggcaactcattgtgtaatgagcgacgccgggtgctgctgacacccg

SEQ ID NO: 439443 - DNA, 75 bp, synthetic construct
  source 1..75: mol_type = other DNA
aggcgttcatttcgcttttcaaccagactgctcgttatcaccatcgacatcaggtttttgaagacttcatcagtt

SEQ ID NO: 439444 - DNA, 75 bp, synthetic construct
  source 1..75: mol_type = other DNA
caattggttaatacttttaataaaatacttaatacagaagatcgattaattcaaatgataaaaacggcctattta

SEQ ID NO: 439445 - DNA, 75 bp, synthetic construct
  source 1..75: mol_type = other DNA
cagaagtacctgcgaatcgtcagtggttatgaaaagcaggatgttatcaacatggcgcatttgcttgcccatgtc

SEQ ID NO: 439446 - DNA, 75 bp, synthetic construct
  source 1..75: mol_type = other DNA
atggccacctttatcgaccatcagaaagccttcatttcgctgtttaatcagacggcccgttatcacaaacgccat

SEQ ID NO: 439447 - DNA, 75 bp, synthetic construct
  source 1..75: mol_type = other DNA
cggcgccgggtgttgctgacgcccgggcattacctgggaaactggtcatatcgtcagcgtcatttccagaaacag

SEQ ID NO: 439448 - DNA, 75 bp, synthetic construct
  source 1..75: mol_type = other DNA
atgcgggtgacgggcaggtcagcctggcaaatgacaatcaatacctcggcacaacgcaaatcgcttccggtacgc

SEQ ID NO: 439449 - DNA, 75 bp, synthetic construct
  source 1..75: mol_type = other DNA
gacagcagcgggcagcatcaggatgagggtagcacattgacgaaaacgggggcgggtacgctggagctgaccgcc

SEQ ID NO: 439450 - DNA, 75 bp, synthetic construct
  source 1..75: mol_type = other DNA
cgaatggcgtaccgcggttggtgtcacaccaacattagatctgaattattatcacgatccccatgcgacggaaat

SEQ ID NO: 439451 - DNA, 75 bp, synthetic construct
  source 1..75: mol_type = other DNA
atgctgactactatgtctctcggtgcgcttggaccagaaaatgcgtttgctgttcaggacaagatggttggtcgc

SEQ ID NO: 439452 - DNA, 75 bp, synthetic construct
  source 1..75: mol_type = other DNA
atgattgcgattgccgacatcttgcaggcgggagaaaagctaactgctgtggcaccttttcttgcgggtatccag

SEQ ID NO: 439453 - DNA, 75 bp, synthetic construct
  source 1..75: mol_type = other DNA
gcaacttgttaagcggatactggggcgatgatggccagtggatgctaggggccgtgggcggctacagcgataacc

SEQ ID NO: 439454 - DNA, 75 bp, synthetic construct
  source 1..75: mol_type = other DNA
gacagccccttatcacaaacgccataaggtgtttgaagactttgtcagctgcagtgtgattgccctggagaaccg

SEQ ID NO: 439455 - DNA, 75 bp, synthetic construct
  source 1..75: mol_type = other DNA
attgcgataaacgcattgatttcattcaaaaagaagtcgatgcaatgaagcaaaacaaaaccaggtcctttgctg

SEQ ID NO: 439456 - DNA, 75 bp, synthetic construct
  source 1..75: mol_type = other DNA
tctattaactgggtccgcgttgcccagcgttttccggtcaaaatcatggttgataaacctgacccggaaatgttc

SEQ ID NO: 439457 - DNA, 75 bp, synthetic construct
  source 1..75: mol_type = other DNA
gctttacgcaccaatgtgtgatgcattcggcacaaatagcagcagatttaagttgcaatgtgagccaggaggtgc

SEQ ID NO: 439458 - DNA, 75 bp, synthetic construct
  source 1..75: mol_type = other DNA
ggacagaatcaccgattctcaacttagtgaaccgccccgggaatcctggagactaaacttcctgagaaagaggta

SEQ ID NO: 439459 - DNA, 75 bp, synthetic construct
  source 1..75: mol_type = other DNA
tggaacgggatcaccatgtaccaggaataccgggaaaaagaagctgcggcagaagctgcacgtcttcgtctggca

SEQ ID NO: 439460 - DNA, 75 bp, synthetic construct
  source 1..75: mol_type = other DNA
aattgaaaacacaaaaacagatgaagaaggccgtccaataattctcccgtggaacgagtatgaattaatgattca

SEQ ID NO: 439461 - DNA, 75 bp, synthetic construct
  source 1..75: mol_type = other DNA
agttgcagatggccaatgaactgcaggctaaacatcctgactggccgctgatcacctgtcgtcgacgcattgaca

SEQ ID NO: 439462 - DNA, 75 bp, synthetic construct
  source 1..75: mol_type = other DNA
ggtcttatatcggcggtggtagtggtggaaacatgtttaaccagcttctggcatccgggaaaatcaccaagacag

SEQ ID NO: 439463 - DNA, 75 bp, synthetic construct
  source 1..75: mol_type = other DNA
cggcgccgggtgctgctgacgcccgggcattatctcgggaactggtcatatcgtctgcgtcattcccagaaacag

SEQ ID NO: 439464 - DNA, 75 bp, synthetic construct
  source 1..75: mol_type = other DNA
ggctaaacaccctgattggccgctgatcacctgccgtcgtcgcattgacacttggctaagtctagcagaatcgat

SEQ ID NO: 439465 - DNA, 75 bp, synthetic construct
  source 1..75: mol_type = other DNA
gggttgttagttgacggagtcattgcttctgtactgatgaatgatgactaccgatcgctctatagcgtgattgtc

SEQ ID NO: 439466 - DNA, 75 bp, synthetic construct
  source 1..75: mol_type = other DNA
aaacgggtgaaatggttcgtcttcgtactctggaaagtatctgggttcaggggaagctccgcatgtgggggcgtt

SEQ ID NO: 439467 - DNA, 75 bp, synthetic construct
  source 1..75: mol_type = other DNA
tcattcagccagagttgcagcgttcgggaccagataagacccttaccgataatattacgcgctccttcatgagtg

SEQ ID NO: 439468 - DNA, 75 bp, synthetic construct
  source 1..75: mol_type = other DNA
ttgcggaaaaatttatctgtattgcagacgcttccaagcaggttgatattctgggcaaattcccgctgccagtag

SEQ ID NO: 439469 - DNA, 75 bp, synthetic construct
  source 1..75: mol_type = other DNA
gggcaggaaatcgctggtgctatctggcggttgttatggatctttttgcccgcagggttatcggctggagtctgt

SEQ ID NO: 439470 - DNA, 75 bp, synthetic construct
  source 1..75: mol_type = other DNA
ttatcttgaacgccagtttgcagtaacagagcctaatcaggtctggtgtggcgatgtgacttatatctggacggg

SEQ ID NO: 439471 - DNA, 75 bp, synthetic construct
  source 1..75: mol_type = other DNA
aatcacgatggtcaatgataagggggagcgtaaaacctataatgcggaaaataatggcagaataacaacggccat

SEQ ID NO: 439472 - DNA, 75 bp, synthetic construct
  source 1..75: mol_type = other DNA
gcaagaaaaccagtgggctgggccatctcgttctcgccggacagcaggcttaccatgaaagcactggaaatggca

SEQ ID NO: 439473 - DNA, 75 bp, synthetic construct
  source 1..75: mol_type = other DNA
cgtctcggcggtgatgagtttttggttgtttcactgaacaacgagaatgcggatatttcgtctctgcgagaacgt

SEQ ID NO: 439474 - DNA, 75 bp, synthetic construct
  source 1..75: mol_type = other DNA
aggttggcgagcgccttaatacgctggcgaagttattggtcgtctcggcggtgatgagtttttggttgtttcact

SEQ ID NO: 439475 - DNA, 75 bp, synthetic construct
  source 1..75: mol_type = other DNA
ctgaacggctttatttcccgcttcgaaaatctgtccaaaaatgcccgtgataatgttcagtacatcggggacatg

SEQ ID NO: 439476 - DNA, 75 bp, synthetic construct
  source 1..75: mol_type = other DNA
catctggtacagcaacgctctataacgcatggggcggtgctgtaactgttgccccggcttcaacatcagggttca

SEQ ID NO: 439477 - DNA, 75 bp, synthetic construct
  source 1..75: mol_type = other DNA
ctgacggggtgaattccatccttgccgaaaagctggggatggcaaaacgcgtcaaaccgacggatgtggcggttg

SEQ ID NO: 439478 - DNA, 75 bp, synthetic construct
  source 1..75: mol_type = other DNA
tcatgaaagaactgggactggtgagttgtcagcaacccacccaccggtataaacgtggtggccatcaacacatcg

SEQ ID NO: 439479 - DNA, 75 bp, synthetic construct
  source 1..75: mol_type = other DNA
atggaacgcttcttcaggagtctgaagaacgaatggatgccggtggtgggtttcagcgaggcagctcacgccata

SEQ ID NO: 439480 - DNA, 75 bp, synthetic construct
  source 1..75: mol_type = other DNA
gggtgatgttccacagcgagcagggcagtcattatacgagcaggcagttccggcagttattgtggcgataccaga

SEQ ID NO: 439481 - DNA, 75 bp, synthetic construct
  source 1..75: mol_type = other DNA
tgcgtatctggctggacccggcgaaactcaacagtttccagatgacggctaaagatgtcactgatgccattgagt

SEQ ID NO: 439482 - DNA, 75 bp, synthetic construct
  source 1..75: mol_type = other DNA
ccgcgtgaatggcgtcggggatatcgatgcctatggttcgcaatattccatgcgtatctggctggacccggcgaa

SEQ ID NO: 439483 - DNA, 75 bp, synthetic construct
  source 1..75: mol_type = other DNA
atggcgaatttctttattgatcgccccatttttgcctgggtgctggcaatcctgttgtgtctgacagggaccctg

SEQ ID NO: 439484 - DNA, 75 bp, synthetic construct
  source 1..75: mol_type = other DNA
agtgtacaacaacagtgttacatagcaaagcttgccaatcatgcggcaaaaaaatggcagcggcagacgggtggg

SEQ ID NO: 439485 - DNA, 75 bp, synthetic construct
  source 1..75: mol_type = other DNA
ggcttttcttgataacccacgtatgtttagcggctatccggaactggcggtgggtgtggcacgtgacctgttcac

SEQ ID NO: 439486 - DNA, 75 bp, synthetic construct
  source 1..75: mol_type = other DNA
cggtgtagaagccgatggcgatgtgattgaagcgaaaacggtgatccttgctgatggggtgaactccatccttgc

SEQ ID NO: 439487 - DNA, 75 bp, synthetic construct
  source 1..75: mol_type = other DNA
gaaaggccagattgaaggggccgtttccagttcagatgcttccactgaaaaactgaaaagcctcggcattcacgt

SEQ ID NO: 439488 - DNA, 75 bp, synthetic construct
  source 1..75: mol_type = other DNA
aagcccggcggggtgatgttccacagcgatagtaataatgccgatgtcagtctttaccaccacttagtttgccgt

SEQ ID NO: 439489 - DNA, 75 bp, synthetic construct
  source 1..75: mol_type = other DNA
tgctgggataacagcccaatggaatgcttcttcaggagtctgaagaacgaatggatgccggtggtgggttacgta

SEQ ID NO: 439490 - DNA, 75 bp, synthetic construct
  source 1..75: mol_type = other DNA
gttgttctcgacctgtttgcaagaaaaccagtgggctgggccatgtcgttctcgccggacagcaggctcaccatg

SEQ ID NO: 439491 - DNA, 75 bp, synthetic construct
  source 1..75: mol_type = other DNA
gaacttgctgccgccatgaagcagattaaagaactccagcgcctgctcggcaagaaaacgatggaaaatgaactc

SEQ ID NO: 439492 - DNA, 75 bp, synthetic construct
  source 1..75: mol_type = other DNA
aagcagtaccaagaaggcagcctcatagccgttgccgcaggagaacaggttgtgcccgcgtcggaactggcatct

SEQ ID NO: 439493 - DNA, 75 bp, synthetic construct
  source 1..75: mol_type = other DNA
ttataccagtccacccacgttagtgtggccagttccacttctgtccggtttttccagctcttacggtgtattacc

SEQ ID NO: 439494 - DNA, 75 bp, synthetic construct
  source 1..75: mol_type = other DNA
gcaggagagcaggtcgttcctgcctctgaacttgctgctgccatgaagcagattaaagaactccagcgcctgctc

SEQ ID NO: 439495 - DNA, 75 bp, synthetic construct
  source 1..75: mol_type = other DNA
ctgctcggcaagaaaacgatggaaaatgaactcctcaaagaagccgttgaatatggacgggcaaaaaagtggata

SEQ ID NO: 439496 - DNA, 75 bp, synthetic construct
  source 1..75: mol_type = other DNA
aaagaagccgttgaatatgggcgggcaaaaaagtggatagcgcacgcgcccttattgcccggggatgaggagtaa

SEQ ID NO: 439497 - DNA, 75 bp, synthetic construct
  source 1..75: mol_type = other DNA
gcttttaacgtcttcttcgtttacgcggtttactgtggcctgacattcttcattccattcctgaaaaacatctat

SEQ ID NO: 439498 - DNA, 75 bp, synthetic construct
  source 1..75: mol_type = other DNA
tcataaatcaatattgtctgaagatgatcggtgggcctattggcggcatgatttcagataagatcctgaaatcac

SEQ ID NO: 439499 - DNA, 75 bp, synthetic construct
  source 1..75: mol_type = other DNA
tctgaacttgctgctgccatgaagcagattaaagaactccagcgcctgctcggacaaaaaaacgatggaaaatga

SEQ ID NO: 439500 - DNA, 75 bp, synthetic construct
  source 1..75: mol_type = other DNA
gtttttagactagtcattggagaacagatgattgatgtcttagggccggagaaacgcagacggcgtactacacag

SEQ ID NO: 439501 - DNA, 75 bp, synthetic construct
  source 1..75: mol_type = other DNA
aacgatggaaaatgaactcctcaaagaagccgttgaatatggacgggcaaaaaagtggatagcgcacgcgccctt

SEQ ID NO: 439502 - DNA, 75 bp, synthetic construct
  source 1..75: mol_type = other DNA
cttattgtgattgccgtaggcattatcattttctttgttctgaatgacaaagaagaggcaccgtccgttgaggtg

SEQ ID NO: 439503 - DNA, 75 bp, synthetic construct
  source 1..75: mol_type = other DNA
ttcgttgctcagaagtcacgatgcaaaaaaaactgctgaagatgaccggagaatggctgaataccatcgtggtag

SEQ ID NO: 439504 - DNA, 75 bp, synthetic construct
  source 1..75: mol_type = other DNA
gccctgcctcttactctactctggacgggtaagcgctgggcgtacctcgccgttgttctcgacctgttcgcaaga

SEQ ID NO: 439505 - DNA, 75 bp, synthetic construct
  source 1..75: mol_type = other DNA
caccatgaaagcgctggaaatggcatgggaaacccgtggtaagcccggcggggtgatgttccacagcgatagtaa

SEQ ID NO: 439506 - DNA, 75 bp, synthetic construct
  source 1..75: mol_type = other DNA
atataacggtgggttacccccaaacgaatcggaaaatcgatactggaaaaactgtaactgggtggccagtttttg

SEQ ID NO: 439507 - DNA, 75 bp, synthetic construct
  source 1..75: mol_type = other DNA
atgacaagatgggtcaaacaactgcgtgatgagcgtcagggcaaaacaccaaaagcctcccccattaccccggaa

SEQ ID NO: 439508 - DNA, 75 bp, synthetic construct
  source 1..75: mol_type = other DNA
ttgtcacagattggcgttcagatccagaaaaacaacgatggatccgttgatacgctgagaacgctggagtcgata

SEQ ID NO: 439509 - DNA, 75 bp, synthetic construct
  source 1..75: mol_type = other DNA
ttttaccgtctcgtgggattactcgttatgcaaacgcgccattgatgaaaactgctttttcagcgatgaagtccc

SEQ ID NO: 439510 - DNA, 75 bp, synthetic construct
  source 1..75: mol_type = other DNA
cgcgtctggcgaacgcagcgtgaaggaccggaaggatggcgtgaagggctggaccattttttctccgctcgttaa

SEQ ID NO: 439511 - DNA, 75 bp, synthetic construct
  source 1..75: mol_type = other DNA
gcgcgcttctggcacgtactggatgcctctgccggaaaagatcaggccgcaaactggatcatcgcgacctatcaa

SEQ ID NO: 439512 - DNA, 75 bp, synthetic construct
  source 1..75: mol_type = other DNA
ttaagccgtagccaggcggcgctgacgcagctgcatgaggcgtcggtaacgctaatctggcgcgacagtgacgag

SEQ ID NO: 439513 - DNA, 75 bp, synthetic construct
  source 1..75: mol_type = other DNA
gctcgcttctggcatgtgttggacgcctctgccggaaaagatcaggccgccaactggatcatcgcggcatatcaa

SEQ ID NO: 439514 - DNA, 75 bp, synthetic construct
  source 1..75: mol_type = other DNA
ctcaggtattacccatggcgaaatcagccaggtattaaatacgctgcgtgagaaagagcattttaaattcacaac

SEQ ID NO: 439515 - DNA, 75 bp, synthetic construct
  source 1..75: mol_type = other DNA
gctgggattacagtttgtacaaggtgcgcgcttctggcatgtgctggatgcctctgccggaaaagatcaggcggc

SEQ ID NO: 439516 - DNA, 75 bp, synthetic construct
  source 1..75: mol_type = other DNA
ccggggggctggttcgcggaattatgctcgccggacgtgctgttctctggattggacgtgcgctgatgatgaatc

SEQ ID NO: 439517 - DNA, 75 bp, synthetic construct
  source 1..75: mol_type = other DNA
ccagtgtaaccggaatgggtgacagcatcagtagctggtttaaacaatgctgggctgacattcaggaagccttta

SEQ ID NO: 439518 - DNA, 75 bp, synthetic construct
  source 1..75: mol_type = other DNA
cgcaactggggggcagtcagtggctggtttaaacagcgctgggctgacattcaggaagcctttaacggcggtatc

SEQ ID NO: 439519 - DNA, 75 bp, synthetic construct
  source 1..75: mol_type = other DNA
atggaaaagcagcatatcatttctataaaaaagtattactctcagattaatgaactgggtctttctctgatggaa

SEQ ID NO: 439520 - DNA, 75 bp, synthetic construct
  source 1..75: mol_type = other DNA
gaagttatggcgataataccaaaagaaacctcttatgttaagaggtgcttaattgatactggaggaatggaatga

SEQ ID NO: 439521 - DNA, 75 bp, synthetic construct
  source 1..75: mol_type = other DNA
tttaatcctcagtttttcctcaatggcagggaaaccacagcgcctgcaggactgactggtgccctgaatatgagt

SEQ ID NO: 439522 - DNA, 75 bp, synthetic construct
  source 1..75: mol_type = other DNA
tgatgaaattgtcattactgccggggcgttagaggcattaaacctcagtttgcaagcggtaactgaaccgggcga

SEQ ID NO: 439523 - DNA, 75 bp, synthetic construct
  source 1..75: mol_type = other DNA
ctggggattcactcgccaagccgggtctttatgggcttcggttcaaacatcgcagaaggggcggcgattggtatc

SEQ ID NO: 439524 - DNA, 75 bp, synthetic construct
  source 1..75: mol_type = other DNA
atggcgctctacggtcagggagtagaggcgtatgcacaagtcagggctgcttacagtcttgtgtccccggctata

SEQ ID NO: 439525 - DNA, 75 bp, synthetic construct
  source 1..75: mol_type = other DNA
gttatctgcctgcggaagtgaaaattcatcataatgacagcggttattttctctggctggagctccccgagccgt

SEQ ID NO: 439526 - DNA, 75 bp, synthetic construct
  source 1..75: mol_type = other DNA
gcgtcgccagcttgcggaacgtaaacaacgcgcctggcaggctttgctgcgttatctgcctgcggaagtcaaaat

SEQ ID NO: 439527 - DNA, 75 bp, synthetic construct
  source 1..75: mol_type = other DNA
atgaaaaaataccagcagcttgcagaacaattacgcgagcagattgcgtcgggtatctggcaacccggagatcgt

SEQ ID NO: 439528 - DNA, 75 bp, synthetic construct
  source 1..75: mol_type = other DNA
cgtctgtcgctcgcactggggcaaggcggtaagctccgctggctggtgaccggatttagcgccgtcgcacggcgg

SEQ ID NO: 439529 - DNA, 75 bp, synthetic construct
  source 1..75: mol_type = other DNA
ccatattcactttcgttgtggctctgaagcgagtttttccactgccggtgaatggcttccgttcatgaaaataat

SEQ ID NO: 439530 - DNA, 75 bp, synthetic construct
  source 1..75: mol_type = other DNA
aacttactggaaaatgcaggagttacctgcattcatcttttacgtagatgatatccccgagagaaatctgaaaaa

SEQ ID NO: 439531 - DNA, 75 bp, synthetic construct
  source 1..75: mol_type = other DNA
gcgatccgcgcggcaaattgctgctggcctcacatcttggcgatgtggaagtgtgccgggcgctggcaaaaattc

SEQ ID NO: 439532 - DNA, 75 bp, synthetic construct
  source 1..75: mol_type = other DNA
tgccattccaggctcgttatattgctctcgggcagtccgtagctggtactgcaaacgctgatgcgaccttcaaag

SEQ ID NO: 439533 - DNA, 75 bp, synthetic construct
  source 1..75: mol_type = other DNA
ttaacatttcggattgtgtcgatggtgtaaaaggcatagctaatagtgcactgtcaaactcacagaatgcacaaa

SEQ ID NO: 439534 - DNA, 75 bp, synthetic construct
  source 1..75: mol_type = other DNA
ggcagaaaaatctgaggcagcagaaaagaacgcaaacaactatacagacaataaaattactgatgttaaaaatga

SEQ ID NO: 439535 - DNA, 75 bp, synthetic construct
  source 1..75: mol_type = other DNA
tgaccttaattcgcctggcagaaaacgcaggtaaaggcgcggcagtgatgcgtggcttacaggcagcggcagacg

SEQ ID NO: 439536 - DNA, 75 bp, synthetic construct
  source 1..75: mol_type = other DNA
gttgctgattaactggtcgccggcaggcctgctctataaagcctttgcggctgcgctgaaatatttcggcgttgc

SEQ ID NO: 439537 - DNA, 75 bp, synthetic construct
  source 1..75: mol_type = other DNA
cttatctaccgcaactggtgggcagtcagtggctggtttaaacagcgctgggcagacattcaggaagcctttaac

SEQ ID NO: 439538 - DNA, 75 bp, synthetic construct
  source 1..75: mol_type = other DNA
cactgcgaaacctttgccgacccgctgctgttgccgcgtggcgaacgccaacaggcgctgcaaaacgctatcgac

SEQ ID NO: 439539 - DNA, 75 bp, synthetic construct
  source 1..75: mol_type = other DNA
acgcgctccagtcgcccctcgactggtttaattttttcgatttctggcaactgccggaagtccaggacaaggagt

SEQ ID NO: 439540 - DNA, 75 bp, synthetic construct
  source 1..75: mol_type = other DNA
gcgcggcagagcgaagtgaaaggattatggggaatgcgcctgatgctgctggtctggcgtctgctgggaagaacg

SEQ ID NO: 439541 - DNA, 75 bp, synthetic construct
  source 1..75: mol_type = other DNA
tgatctggattcaaggcaggaacaggccatcggtactgccattcgtcgggcatccctgcaggtcaatcagctcca

SEQ ID NO: 439542 - DNA, 75 bp, synthetic construct
  source 1..75: mol_type = other DNA
cctgttgatcgtgtgcagaaatcgcttaatggcgagttacaacaaataaacggcgctgattattttatatttgga

SEQ ID NO: 439543 - DNA, 75 bp, synthetic construct
  source 1..75: mol_type = other DNA
atgccatctacacgctatcaaaaaattaatgcccatcactatcgccatatatgggccgttggtgatattcatggt

SEQ ID NO: 439544 - DNA, 75 bp, synthetic construct
  source 1..75: mol_type = other DNA
catccagacattcgccaaccaggtatatattgataccggatcgccggaaagcgggcggctgtcgttttataaaat

SEQ ID NO: 439545 - DNA, 75 bp, synthetic construct
  source 1..75: mol_type = other DNA
gagagcgaattactctggcctgttgatcgtgtgcagaaatcgcttaatggcgagttacaacaaataaacggcgct

SEQ ID NO: 439546 - DNA, 75 bp, synthetic construct
  source 1..75: mol_type = other DNA
cacatgcagattatccggggagtgaatatctctttggtaaagaaatagcggagagcgaattactctggcctgttg

SEQ ID NO: 439547 - DNA, 75 bp, synthetic construct
  source 1..75: mol_type = other DNA
cgtacatgcagattatccgggtgatgaatatcagtttggcaaggaagtagcggaaagagaggtactctggcctgt

SEQ ID NO: 439548 - DNA, 75 bp, synthetic construct
  source 1..75: mol_type = other DNA
tgaactgggtgcgagtaatcataagcaactttcctcactgctttacaacattacgtcaggtacggcaaaagagcg

SEQ ID NO: 439549 - DNA, 75 bp, synthetic construct
  source 1..75: mol_type = other DNA
agttggagtcattaccccccggacgagtgggaatccatggtagggatttttaccgaaatggaagaacactattag

SEQ ID NO: 439550 - DNA, 75 bp, synthetic construct
  source 1..75: mol_type = other DNA
gaatggcaaatgaaacgggagatgctttcaccagcctatacaactcgctggtctgaactaccagtagcgaaatta

SEQ ID NO: 439551 - DNA, 75 bp, synthetic construct
  source 1..75: mol_type = other DNA
atttccagctccgtatccgtaacgccattatcaaacgccagtcccttgatttcatcatggccggttttaacggcg

SEQ ID NO: 439552 - DNA, 75 bp, synthetic construct
  source 1..75: mol_type = other DNA
aagttaacggacaacgattttcttatggaattactggtgggaatgttttttttagttgtcttgtttttgtttttt

SEQ ID NO: 439553 - DNA, 75 bp, synthetic construct
  source 1..75: mol_type = other DNA
ttctctccaccggtgagatgtcaatctccgagaagctggctgaacagaaagccgtgttacagggagggcaggagc

SEQ ID NO: 439554 - DNA, 75 bp, synthetic construct
  source 1..75: mol_type = other DNA
gtggtcattttaacacaagcccttatgtgaaaattctggtctggatccatgcagcggctcattgtgagctttgcg

SEQ ID NO: 439555 - DNA, 75 bp, synthetic construct
  source 1..75: mol_type = other DNA
aacatggtgacccgtttgagtagtgttatgtctgatggatttaatcagacagtcggattacgccatactcctcct

SEQ ID NO: 439556 - DNA, 75 bp, synthetic construct
  source 1..75: mol_type = other DNA
agcgcctgccgggctgactggagccctgaatatgagcctgcatgagctggaaaaaatgctggagcgtctgctggc

SEQ ID NO: 439557 - DNA, 75 bp, synthetic construct
  source 1..75: mol_type = other DNA
ttgttattggtggcatggttggcagcaccttccgctcggcggtgagcggcacccgacgtgccctcgactccctaa

SEQ ID NO: 439558 - DNA, 75 bp, synthetic construct
  source 1..75: mol_type = other DNA
gttgaccggcgcactgaatatgagcctgcatgagctggagaaaatgctggagcgtctgctggctcagcaacaacg

SEQ ID NO: 439559 - DNA, 75 bp, synthetic construct
  source 1..75: mol_type = other DNA
gataaatggcatcagaaacaaatgggcgtcactcaaaaccagcgtaaccggaatgggtgacagcatcagtgactg

SEQ ID NO: 439560 - DNA, 75 bp, synthetic construct
  source 1..75: mol_type = other DNA
gccggacaacgtgccggtaagacagacacggccccggcgattcaggtcagttttaatccgcagttttttctcaat

SEQ ID NO: 439561 - DNA, 75 bp, synthetic construct
  source 1..75: mol_type = other DNA
gcagcggtgcgggtaagtcgacgctgattaagctgattgccgggttgtatttccccacgcacggcaacatcagaa

SEQ ID NO: 439562 - DNA, 75 bp, synthetic construct
  source 1..75: mol_type = other DNA
gtagcggggactgtcgattttgataaggctcaacttacggattcaaaaggtggtgcaattagcgccgataaaatt

SEQ ID NO: 439563 - DNA, 75 bp, synthetic construct
  source 1..75: mol_type = other DNA
acgtgaactgaccgttcaggcaactaccggtactaactccgattctgacctgtcttctatccaggacgaaatcaa

SEQ ID NO: 439564 - DNA, 75 bp, synthetic construct
  source 1..75: mol_type = other DNA
taagatagcgactattggtctcaaactggggctgaatctccttatttccccctttgtaagtgtctggaaaaatgc

SEQ ID NO: 439565 - DNA, 75 bp, synthetic construct
  source 1..75: mol_type = other DNA
gcggaagtggcgggagccgctacagccgatccgttaaaagcactggatgccgcaatcgctaaagtcgacaaattc

SEQ ID NO: 439566 - DNA, 75 bp, synthetic construct
  source 1..75: mol_type = other DNA
gccaccaatgaagacgttgaaattgcctcacagcgggcagggctgtatgagatggtgtgcaatctgccgcaggga

SEQ ID NO: 439567 - DNA, 75 bp, synthetic construct
  source 1..75: mol_type = other DNA
agaacgtgaggatgcaatcaagcgtctgaatgcacttgatgttaaattgcaagggcaggtcgccgcgtctattgc

SEQ ID NO: 439568 - DNA, 75 bp, synthetic construct
  source 1..75: mol_type = other DNA
aaataacccgtttgctaaatttaatgcaatcgatcaagagaaatcggaagctgaacaagattataagaccgaaaa

SEQ ID NO: 439569 - DNA, 75 bp, synthetic construct
  source 1..75: mol_type = other DNA
tgcaaggacagacagccgcgtctattgcttctcaaaacaagcagttagaagccagcttgaaagatttagacactg

SEQ ID NO: 439570 - DNA, 75 bp, synthetic construct
  source 1..75: mol_type = other DNA
acacaattgcaacaaatcagggacaacgagttagaaagccataaacggttacttgatggtaaggctatctcctac

SEQ ID NO: 439571 - DNA, 75 bp, synthetic construct
  source 1..75: mol_type = other DNA
agacgcagccgcgaaacgccaatccttaatcgatcagaatactgaaaacgtatacaaaatggttttaggtgctga

SEQ ID NO: 439572 - DNA, 75 bp, synthetic construct
  source 1..75: mol_type = other DNA
taacgtcaccgaagaaaacgctaaaaaatatgataaattttctcagaatattaataagctggaaaataacctgaa

SEQ ID NO: 439573 - DNA, 75 bp, synthetic construct
  source 1..75: mol_type = other DNA
atgatgctaaaggtaaactggatgcttcgtattctaactgggctgatcatcaatggatccaatccttgaccccag

SEQ ID NO: 439574 - DNA, 75 bp, synthetic construct
  source 1..75: mol_type = other DNA
ggtttaagcgcaacctatggacaaacaggaaacaaggttgcagccgggaaccgtccagtcagtcattggtgtcac

SEQ ID NO: 439575 - DNA, 75 bp, synthetic construct
  source 1..75: mol_type = other DNA
tcctgttcagtatttattttcttttgatggcaggtaaagtcttcgccttcagttgtaatgttgatggtgggtcaa

SEQ ID NO: 439576 - DNA, 75 bp, synthetic construct
  source 1..75: mol_type = other DNA
gttagcacaacgttacatgaggcgtattaccgggaatgatgaaatcgcttttggtcactttggtactttggggta

SEQ ID NO: 439577 - DNA, 75 bp, synthetic construct
  source 1..75: mol_type = other DNA
ggtgctgatccttcctggtgtcgttccccacttcttcaccggtgcgactgcgggcgtatttggtaacgctacagg

SEQ ID NO: 439578 - DNA, 75 bp, synthetic construct
  source 1..75: mol_type = other DNA
gcttttgcgaatggtttattgattaccttcctgccagtgctgttattgccagttctgggggcgataggctttgca

SEQ ID NO: 439579 - DNA, 75 bp, synthetic construct
  source 1..75: mol_type = other DNA
gggaacatctaacccgcaaggcagatcctaaccgtgatttgactataccaaataaaccagtaagaccagaatcat

SEQ ID NO: 439580 - DNA, 75 bp, synthetic construct
  source 1..75: mol_type = other DNA
acgccgtgtttcgcaataacatcgctaatgacggcaaaggtggtgcaatttataccatcaataatgatatctatt

SEQ ID NO: 439581 - DNA, 75 bp, synthetic construct
  source 1..75: mol_type = other DNA
taaattcattactgacaacaaggacaggttaaatcgcgtgggtgctaatgctgactggatgattcagacaggtat

SEQ ID NO: 439582 - DNA, 75 bp, synthetic construct
  source 1..75: mol_type = other DNA
actggctcgctcaggtgcaaataacgttggtctgaccgcgttacgtggtctggctggagttgctgatatttacaa

SEQ ID NO: 439583 - DNA, 75 bp, synthetic construct
  source 1..75: mol_type = other DNA
aaatattgatgctggtggtaacgttaccgtaaatgcaggcgggtttagcgggaccattgaaggtgaagggcaact

SEQ ID NO: 439584 - DNA, 75 bp, synthetic construct
  source 1..75: mol_type = other DNA
cttatctttccgacgtaacagttaatggcaatctgaccaatacgaccggtgcggtcagcctgcaaaatggcgtcg

SEQ ID NO: 439585 - DNA, 75 bp, synthetic construct
  source 1..75: mol_type = other DNA
ggagattactgccaatgtcgatactcgctctacaacgactgagcatgggcgtgatattgaaatgcgcgccgacgg

SEQ ID NO: 439586 - DNA, 75 bp, synthetic construct
  source 1..75: mol_type = other DNA
aacaggcgttttccggtcttaatgatcagcaacgcaacgatatgggcgatttagccatgagggctaacgtcgctc

SEQ ID NO: 439587 - DNA, 75 bp, synthetic construct
  source 1..75: mol_type = other DNA
atgcgcgtcattaaaacactgagaagctggggggtgtatgtcgatgaagctttttttcttggcggtgtagagaaa

SEQ ID NO: 439588 - DNA, 75 bp, synthetic construct
  source 1..75: mol_type = other DNA
gaacattaacggcaacgttaatagctcagacaagatggtcatggatgctatcaaacgtcacgctaagttagttgc

SEQ ID NO: 439589 - DNA, 75 bp, synthetic construct
  source 1..75: mol_type = other DNA
aaggccaaaaactggaaaacctgatcgcgaaactcgatataacacagcctgaagaggtcgtcagaaaacagttat

SEQ ID NO: 439590 - DNA, 75 bp, synthetic construct
  source 1..75: mol_type = other DNA
aaatatagatggcttcacaagtgctgaagggcttgcaaaccgtaatgcgatagaagaattaaagtcgggtgcgtt

SEQ ID NO: 439591 - DNA, 75 bp, synthetic construct
  source 1..75: mol_type = other DNA
aaggtatcggtcgcttcgaaggaagaaatatagatggcttcacaagtgctgaagggcttgcaaaccgtaatgcga

SEQ ID NO: 439592 - DNA, 75 bp, synthetic construct
  source 1..75: mol_type = other DNA
tgaataaacaggccagtgagcttctcggctctgccggaaatgtggtcgataagctgcagggttcgctcggaggac

SEQ ID NO: 439593 - DNA, 75 bp, synthetic construct
  source 1..75: mol_type = other DNA
aattttgttggaaaatcaggtcatcaccgaagaacaactcgatacagcactgcgtaatcgtgtcgaaggtctgcg

SEQ ID NO: 439594 - DNA, 75 bp, synthetic construct
  source 1..75: mol_type = other DNA
actgcatggcaaagatgttccggtgcgtgaagccctcgccggacaggtgcccagcgcaggtgttggcacctgttt

SEQ ID NO: 439595 - DNA, 75 bp, synthetic construct
  source 1..75: mol_type = other DNA
acaagtttcaatgcactcattattactgaaagcaggtttaaccacagaacaggttgcggaactggagtccgaata

SEQ ID NO: 439596 - DNA, 75 bp, synthetic construct
  source 1..75: mol_type = other DNA
tggaaggtgtactgtcagaggataaattttcaattaatggcggggtcacgaaggtattaggctggcgtgcagatg

SEQ ID NO: 439597 - DNA, 75 bp, synthetic construct
  source 1..75: mol_type = other DNA
tgcgggcgcaattgctccagcgaccatcagcgctcagccaaaaagcctcacgcgaaacgcgggggggggactggg

SEQ ID NO: 439598 - DNA, 75 bp, synthetic construct
  source 1..75: mol_type = other DNA
cgccgcggtcacgatccgcgggcaatgttgtacaatgcggttcagcatcagtggctcacggaacaacaggccagc

SEQ ID NO: 439599 - DNA, 75 bp, synthetic construct
  source 1..75: mol_type = other DNA
gcgccgcattaaacgcaagctgagtgtttatcgccgctacccgcgaatgagttatcacgagctgtataaaccgga

SEQ ID NO: 439600 - DNA, 75 bp, synthetic construct
  source 1..75: mol_type = other DNA
catcgtgcagcgggtgattttcgtcactggctactacggtctgacgcaggggctgctatctgtcctgcgtctttt

SEQ ID NO: 439601 - DNA, 75 bp, synthetic construct
  source 1..75: mol_type = other DNA
ctgaatacggcaattgataaggagttgtcccgtacaaccagtgatgcgctgtttctggcgctgcgccgggtgaaa

SEQ ID NO: 439602 - DNA, 75 bp, synthetic construct
  source 1..75: mol_type = other DNA
aaagtttatggcccgatgcgtggcattttctttctatctttagcggtagcacgtggttaatgacgctactgtggc

SEQ ID NO: 439603 - DNA, 75 bp, synthetic construct
  source 1..75: mol_type = other DNA
catatctttgttggcacctaccccaacgaccccgatactcagcgtgatgttgacgaagtgtgcgctcgctttccg

SEQ ID NO: 439604 - DNA, 75 bp, synthetic construct
  source 1..75: mol_type = other DNA
ttacaacatgcgcgaacgtcaaacatgatctgcgtacgcgaatatttcccagataccttttcgacggcggtacgg

SEQ ID NO: 439605 - DNA, 75 bp, synthetic construct
  source 1..75: mol_type = other DNA
tatctggctgaagtggtgaaaaccatgaccacagacccggttacaggtgaggtgaataaggctgcaaatgtggct

SEQ ID NO: 439606 - DNA, 75 bp, synthetic construct
  source 1..75: mol_type = other DNA
cattttgcttgcgactctgccacaaggccgtcatctcagccgcgatcaacaacaactggtggatacgctggttga

SEQ ID NO: 439607 - DNA, 75 bp, synthetic construct
  source 1..75: mol_type = other DNA
agatgaagagaatcatcaggagttcacctgccagccggatatgacctgcgacgacaaaggctgccaactctgccc

SEQ ID NO: 439608 - DNA, 75 bp, synthetic construct
  source 1..75: mol_type = other DNA
ccgctgatgaattaaagaacactattatacttgccgcgaagggcatgaatctgatcgatgacgcttcgttccagt

SEQ ID NO: 439609 - DNA, 75 bp, synthetic construct
  source 1..75: mol_type = other DNA
tatcgctggccgtcaaattcccgtttcggtaaacgggatgcctaccagtttctcggtgtgggtgaggaaaacatg

SEQ ID NO: 439610 - DNA, 75 bp, synthetic construct
  source 1..75: mol_type = other DNA
tccgtaacgaactgaatgcctcctgggtgcagttacgagaactgcttaccacgttccgtttgcagctcacagaac

SEQ ID NO: 439611 - DNA, 75 bp, synthetic construct
  source 1..75: mol_type = other DNA
caccattgcgcgcgaactgcatgattctattgctcaatcgctctcttgtatgaagatgcagatcagttgtttaca

SEQ ID NO: 439612 - DNA, 75 bp, synthetic construct
  source 1..75: mol_type = other DNA
agctggcggcaagtcttgttcagccgggacgttgtatctatctggatgcgggaacgaccacgttagcgattgcac

SEQ ID NO: 439613 - DNA, 75 bp, synthetic construct
  source 1..75: mol_type = other DNA
cgaaatatggtcaggtggcgacatggctggcgttaccgttaagtgagtttgatcagatcattactgacggcggtc

SEQ ID NO: 439614 - DNA, 75 bp, synthetic construct
  source 1..75: mol_type = other DNA
acggacagaatgaatgtgtcacatatgaccattcgtcgggatttacaaaaactggagcagcagggagccgttgtg

SEQ ID NO: 439615 - DNA, 75 bp, synthetic construct
  source 1..75: mol_type = other DNA
tgatgtcagaaaaacgacgacagccaaccgaaactgtcgcgttaaatgcacaccgtgcaggacttgaggaaaatc

SEQ ID NO: 439616 - DNA, 75 bp, synthetic construct
  source 1..75: mol_type = other DNA
gacccgacaaggaaaactgaggaagaaattacagagaccaagcctcctgttgcatcttcgacccagccagaacaa

SEQ ID NO: 439617 - DNA, 75 bp, synthetic construct
  source 1..75: mol_type = other DNA
ctgctgaggagctcaagaatactattattctggctgcaaaaggcatgaagctgattgatgatgcctctttccagt

SEQ ID NO: 439618 - DNA, 75 bp, synthetic construct
  source 1..75: mol_type = other DNA
cgattgtttgaccgtttctatcgcgttgacccttcccgccagcgaaaaggtgaaggtagcggtattgggctggcg

SEQ ID NO: 439619 - DNA, 75 bp, synthetic construct
  source 1..75: mol_type = other DNA
gcgcggctgcactggcgacggtgctgctgacgccccatgttcaggcggctgacaacctgcatttctacggcaatt

SEQ ID NO: 439620 - DNA, 75 bp, synthetic construct
  source 1..75: mol_type = other DNA
atcgcctcctctggtcaggcgatatttcagggcaaacagcagaactatgtcatgctgactggcctatccattaat

SEQ ID NO: 439621 - DNA, 75 bp, synthetic construct
  source 1..75: mol_type = other DNA
gtcctctactccagtcttgaagagtataaccggatgaccaaaatggtcagcgacatgctgtttctggcacaggcg

SEQ ID NO: 439622 - DNA, 75 bp, synthetic construct
  source 1..75: mol_type = other DNA
ggagcagctggttatctcgttcaatcatatgattggaaagattgaggatgtttttacccgccaggccaatttctc

SEQ ID NO: 439623 - DNA, 75 bp, synthetic construct
  source 1..75: mol_type = other DNA
tctgggcaccgtggtgcggcccctgccgtaatttcgcaccaatttttgaagatgtcgcgcaagagcgtagcggta

SEQ ID NO: 439624 - DNA, 75 bp, synthetic construct
  source 1..75: mol_type = other DNA
ttcagggcctggatccaggcgaaaagcggtcgtgaagtgacgatcggtgaattcactgccagcctgacggcaact

SEQ ID NO: 439625 - DNA, 75 bp, synthetic construct
  source 1..75: mol_type = other DNA
gttgtgtttaagctgaaagactgcaaagggccggcgggatacaacgtcaaagtcacgctgagcggcaccgaagac

SEQ ID NO: 439626 - DNA, 75 bp, synthetic construct
  source 1..75: mol_type = other DNA
taacaatctgaattttaatgcctggctccaggcgaaaagcggccgggaagtgacgatgggtgaatttaccgcttc

SEQ ID NO: 439627 - DNA, 75 bp, synthetic construct
  source 1..75: mol_type = other DNA
tggcacggaagacagcgaacagcccggttttctggcgctggatgcttcttcagaggcgcaaggtgtcggaattgg

SEQ ID NO: 439628 - DNA, 75 bp, synthetic construct
  source 1..75: mol_type = other DNA
cgttcagggcgagtcgctggcggaggtgcatttccccaccgttagccgcaaagacctgatggtgaccgggcagtc

SEQ ID NO: 439629 - DNA, 75 bp, synthetic construct
  source 1..75: mol_type = other DNA
attctgcgtacagcagtgcgtcgtttgttaggactggatctgatcgccagactgcaaaatgacctgatgattttt

SEQ ID NO: 439630 - DNA, 75 bp, synthetic construct
  source 1..75: mol_type = other DNA
aatgcgaattatttagtacaaaaagtgaacttctgatgatctttccctggttaatatccaggcatcatgttacgt

SEQ ID NO: 439631 - DNA, 75 bp, synthetic construct
  source 1..75: mol_type = other DNA
ggaatatctcaatttttaaacataaaatgcgaattatttagtacaaaaagtgaacttctgatgatctttccctgg

SEQ ID NO: 439632 - DNA, 75 bp, synthetic construct
  source 1..75: mol_type = other DNA
ataattttcgggtatttaacggtactcataccattgatctggcccccagaaagcgcccacacgatttgaatccac

SEQ ID NO: 439633 - DNA, 75 bp, synthetic construct
  source 1..75: mol_type = other DNA
aatgaaatcggtgtttctggcggctcgctggcggcattgacttcacccttaacctcaacaactcccgtcgccgaa

SEQ ID NO: 439634 - DNA, 75 bp, synthetic construct
  source 1..75: mol_type = other DNA
aagtattatgcgacgcagaggacgtgctggtgtggtccgtggcagtcactccggcaattgaaaagctcaatgtct

SEQ ID NO: 439635 - DNA, 75 bp, synthetic construct
  source 1..75: mol_type = other DNA
aaaacgatcctaacgaagcgcgagcgcaactcatctctttgcgccgaagcgtgctaaaacttaccggtgatgtat

SEQ ID NO: 439636 - DNA, 75 bp, synthetic construct
  source 1..75: mol_type = other DNA
gtgctcattaaacaactggtattacataattttcgggtatttaacggtactcacacgattgatctggctccaaga

SEQ ID NO: 439637 - DNA, 75 bp, synthetic construct
  source 1..75: mol_type = other DNA
atgaataaacaaaacggaattagcattattgaggtttgtgtagttttaatttcatcattattttttttatatata

SEQ ID NO: 439638 - DNA, 75 bp, synthetic construct
  source 1..75: mol_type = other DNA
cacaaactggctcgtaaagaggatttacagcttaatgcgcatataaatccgcagacatttgatgttgaactggtg

SEQ ID NO: 439639 - DNA, 75 bp, synthetic construct
  source 1..75: mol_type = other DNA
agctttgaaaaagagttaaggctatttttggcccagctcagaaacgatattgcattacgctctagtactaccagt

SEQ ID NO: 439640 - DNA, 75 bp, synthetic construct
  source 1..75: mol_type = other DNA
gaaaaagggcaagaaagatcgcctttctttacaaaaggatggccaaccactcagtgaactggattatgatcagtg

SEQ ID NO: 439641 - DNA, 75 bp, synthetic construct
  source 1..75: mol_type = other DNA
gcagcgcgaagcccaattgcagaaatatcggtcattgctagaagatgctaaacgtaaaaaacagcagcaactgga

SEQ ID NO: 439642 - DNA, 75 bp, synthetic construct
  source 1..75: mol_type = other DNA
ggcctgctgctgaccgccagcacgggtgcactggcggtagataacaacctgcatttttacggcaacctgctgagt

SEQ ID NO: 439643 - DNA, 75 bp, synthetic construct
  source 1..75: mol_type = other DNA
caggctataaagagcttccattggtgatcccaatgctgttttatcatggttgcagaagtccttatccttattcac

SEQ ID NO: 439644 - DNA, 75 bp, synthetic construct
  source 1..75: mol_type = other DNA
attacgggcggatatggcggtctgggatcttaatcatccacgtgaactggcttactggtttggacatcagccttg

SEQ ID NO: 439645 - DNA, 75 bp, synthetic construct
  source 1..75: mol_type = other DNA
tgctccctggtgcttattacttcctgcgcgaaacccatctgccgccgattgtcgctctgcgggccgcaggtgtgc

SEQ ID NO: 439646 - DNA, 75 bp, synthetic construct
  source 1..75: mol_type = other DNA
cattgcgccgtctttatccacttccactcagactaacacctgtatggctgattttaataacaacctttacgcgat

SEQ ID NO: 439647 - DNA, 75 bp, synthetic construct
  source 1..75: mol_type = other DNA
atgagcagaaagaacctgtggcggccattgcgccgtctttatccacttccactcagactaacacctgtatggctg

SEQ ID NO: 439648 - DNA, 75 bp, synthetic construct
  source 1..75: mol_type = other DNA
aaaacgccttatcctggcgagcgtgattggtgctacttttgcgttgtctggtgccatcggcagttacgttttgct

SEQ ID NO: 439649 - DNA, 75 bp, synthetic construct
  source 1..75: mol_type = other DNA
gccaatgcggtattactgcatagctgcgaagtcaccagcggtacgccaggctgctatcgtcaggctgtatgtatc

SEQ ID NO: 439650 - DNA, 75 bp, synthetic construct
  source 1..75: mol_type = other DNA
gcctctaatcaggactctccgccgagtattccaaccgcacgtaagcggatgcaaatcaacgcctctaaaatgaaa

SEQ ID NO: 439651 - DNA, 75 bp, synthetic construct
  source 1..75: mol_type = other DNA
gacgagatgatccccggcgcggtatcgtgggagacccttgaggcggtggtgaaagaaaaactggcggtggcccat

SEQ ID NO: 439652 - DNA, 75 bp, synthetic construct
  source 1..75: mol_type = other DNA
atggatcctgaccgcggggctcggtggtatgggggcgcacaaccgctggcggcgactctggcgggggcgtgctca

SEQ ID NO: 439653 - DNA, 75 bp, synthetic construct
  source 1..75: mol_type = other DNA
aaaaatctggaagctgatgagtcactgctggttcagtccggtaaacccgtaggcgtgtttaaaacgcataccgat

SEQ ID NO: 439654 - DNA, 75 bp, synthetic construct
  source 1..75: mol_type = other DNA
agcgccgcgcgccacgccggtccgaatttataccaatgctgaagaattagtcggcaaaccgttccgcgatctcgg

SEQ ID NO: 439655 - DNA, 75 bp, synthetic construct
  source 1..75: mol_type = other DNA
tcgggcgaaacaggtggtgtttcaggtgaacgccgcgccgggaaccgcgacaggtggggtgaaagtggctgacgt

SEQ ID NO: 439656 - DNA, 75 bp, synthetic construct
  source 1..75: mol_type = other DNA
ggtgacccttaccggtacggaagacagtgaacagcccggtttcctggcgctggataccacatcaaccgcgcaggg

SEQ ID NO: 439657 - DNA, 75 bp, synthetic construct
  source 1..75: mol_type = other DNA
ctttcaatctcagtgacggtgcgaataacctcaattttaatgcctggttacaggcgaaaagcggtcgtgacgtaa

SEQ ID NO: 439658 - DNA, 75 bp, synthetic construct
  source 1..75: mol_type = other DNA
ttcaagctggcgctgttgcagtctcttcctgcagtaatcgagaaatccgtagaaccgatgaagtctatcgacggt

SEQ ID NO: 439659 - DNA, 75 bp, synthetic construct
  source 1..75: mol_type = other DNA
gacggcaagcgggtggatattaacaacactaccggggcgacttttgcgcttaccaacggcaacaatgatattaat

SEQ ID NO: 439660 - DNA, 75 bp, synthetic construct
  source 1..75: mol_type = other DNA
tttacggcaacctgctgagtaaatcctgcacgctggtggtggatggtgccaatctggcagaaatccattttccca

SEQ ID NO: 439661 - DNA, 75 bp, synthetic construct
  source 1..75: mol_type = other DNA
ttcaatgcctggttacaggcgaaaagtggtcgagaagttactctcggcgagttcacagccactatgaccgcaaca

SEQ ID NO: 439662 - DNA, 75 bp, synthetic construct
  source 1..75: mol_type = other DNA
gctagagattgaacaacaagaagcgtttatgacgcttgagcaggagcaggagcagcaggttaaaacccgtaccgc

SEQ ID NO: 439663 - DNA, 75 bp, synthetic construct
  source 1..75: mol_type = other DNA
aagaagccgcagagaaagaagccgcagagatgcaggcggcggcgatcgttgagttagccgaagcaacacgcaaaa

SEQ ID NO: 439664 - DNA, 75 bp, synthetic construct
  source 1..75: mol_type = other DNA
aattcccatcaatatgaataccctgaagctggaagtcagccgttctactattgatagcctgattacgaaagatcg

SEQ ID NO: 439665 - DNA, 75 bp, synthetic construct
  source 1..75: mol_type = other DNA
agacgcgtattctggctgaacggcaaattcaggaaacagaaatcgaccgcgaacaggccgtgcgctcaagaaaag

SEQ ID NO: 439666 - DNA, 75 bp, synthetic construct
  source 1..75: mol_type = other DNA
ctgcggcgcaagatgccgaaaccaaagccgttgaactgacagtacgggcgaaagcagaaaaagaagccgcagaga

SEQ ID NO: 439667 - DNA, 75 bp, synthetic construct
  source 1..75: mol_type = other DNA
tcgcgaacgtaacgaagttgaacaggatgtagaagttgcggtgcgtgagaaaaaccgtgatgcgctgtcgcggaa

SEQ ID NO: 439668 - DNA, 75 bp, synthetic construct
  source 1..75: mol_type = other DNA
aatatcgattacgaaagcggtagagtaaagatttactctagtaacgataatagactcaacaatggtacttttaac

SEQ ID NO: 439669 - DNA, 75 bp, synthetic construct
  source 1..75: mol_type = other DNA
tatctggtcgacagccagggcagtgatgatgcgctacgcagctgggcgcgggaacatcacattcctgtggaaaag

SEQ ID NO: 439670 - DNA, 75 bp, synthetic construct
  source 1..75: mol_type = other DNA
tctgcatgattcgccgcgcgagcgaagagttgctggcgataaacgatgagataacgcatcactatgagcagttac

SEQ ID NO: 439671 - DNA, 75 bp, synthetic construct
  source 1..75: mol_type = other DNA
tttgacgcccgtcatcactcaggaggtgggtgaggcaatgaccatcatcggtctggtttccgccggtctgggtgt

SEQ ID NO: 439672 - DNA, 75 bp, synthetic construct
  source 1..75: mol_type = other DNA
gccggtctgggtgtttcaattttgcctgcgtcatttaaacgtgttcagctcaacgaaatgcgctgggtgccgatt

SEQ ID NO: 439673 - DNA, 75 bp, synthetic construct
  source 1..75: mol_type = other DNA
aacctcgtaaaaagtattcgaatgaattcaaacttcgtatggttgaactggcatcacaacctggagcttgtgtta

SEQ ID NO: 439674 - DNA, 75 bp, synthetic construct
  source 1..75: mol_type = other DNA
aactgttctgcagggaatatttaaaagatttaaacgccactcaggcagctatcagggcgggttacagcgaggatt

SEQ ID NO: 439675 - DNA, 75 bp, synthetic construct
  source 1..75: mol_type = other DNA
gcctgaaaaccagctatgaaccgcaagaagcaaccagcatgatggctttctgcattaacggtaagtcgaaatcgc

SEQ ID NO: 439676 - DNA, 75 bp, synthetic construct
  source 1..75: mol_type = other DNA
tgttcaggcgtttaaagaacaagcttctcacgaactaacaggcaaagacggcggcgcaatccagattgaaacatc

SEQ ID NO: 439677 - DNA, 75 bp, synthetic construct
  source 1..75: mol_type = other DNA
gaggggagtgacgataagttacgccagtgggcccgtgctcaccgtatcccggcggaaaaagtccgttcccgccag

SEQ ID NO: 439678 - DNA, 75 bp, synthetic construct
  source 1..75: mol_type = other DNA
ttgcccgggataccggggggcgtctggcgttgttcgttaagtcgaagaactgtccgacctgcgatgcgcggctgt

SEQ ID NO: 439679 - DNA, 75 bp, synthetic construct
  source 1..75: mol_type = other DNA
tagcattcaaaacgaagtatcttctgtggaaagagctatgttagtaggggaatcccgctttgttggttccggacg

SEQ ID NO: 439680 - DNA, 75 bp, synthetic construct
  source 1..75: mol_type = other DNA
catccactggcaaataaatccatcgtcacgctggcggaactggcgaaagaaccgttcgtttttttcgatcctcat

SEQ ID NO: 439681 - DNA, 75 bp, synthetic construct
  source 1..75: mol_type = other DNA
tatggtgaacatacaggtattggttatcagacaggctctaatggcactaaactttcagcattacatcaggcatct

SEQ ID NO: 439682 - DNA, 75 bp, synthetic construct
  source 1..75: mol_type = other DNA
aaggttatccggcagatgaaaatcaggctgctgcttacatgaacaaaattattgagaaagagattatgcgtgcgc

SEQ ID NO: 439683 - DNA, 75 bp, synthetic construct
  source 1..75: mol_type = other DNA
aaaaaaaacactaaaaaaaaaaaaacaaaaactgaacaaacagttaaaacaaaaaaaaaacaaaagaaaaagaaa

SEQ ID NO: 439684 - DNA, 75 bp, synthetic construct
  source 1..75: mol_type = other DNA
atgaatctggcccagaattgggaagcgccgtttaccggcatgtctatgggttctgttgctggtgcatttagtggt

SEQ ID NO: 439685 - DNA, 75 bp, synthetic construct
  source 1..75: mol_type = other DNA
ttatgatgcatatggtgcacagcagttctattttccgaatgttcttaaatatgatcctgatcagcttaaagtatc

SEQ ID NO: 439686 - DNA, 75 bp, synthetic construct
  source 1..75: mol_type = other DNA
gtggagaacgaagatggctctcacattcctgtttcgcaaccaatcatcattaacgccgctggatatccggtatat

SEQ ID NO: 439687 - DNA, 75 bp, synthetic construct
  source 1..75: mol_type = other DNA
taacatgacgctggaaaatccatcgccagagcagctcacggtgttaatccgcgaactgagcgggaggggaagatg

SEQ ID NO: 439688 - DNA, 75 bp, synthetic construct
  source 1..75: mol_type = other DNA
atgagcagaaagaaccgatagcggctcttagcccgcttttatccactccttcacagagcaaagttagtgccagtt

SEQ ID NO: 439689 - DNA, 75 bp, synthetic construct
  source 1..75: mol_type = other DNA
attttcaaatggctcaggctctggcaaaacgaaggacgtgtttcgcggcgtcttccggtaacgacctcttctgac

SEQ ID NO: 439690 - DNA, 75 bp, synthetic construct
  source 1..75: mol_type = other DNA
cctgcaaggtggagttccgtcacggtaacatgacgctggaaaatccatcgccagagctgctcacgctgttgatcc

SEQ ID NO: 439691 - DNA, 75 bp, synthetic construct
  source 1..75: mol_type = other DNA
gtttaaacttcaaatggttaaactggcttcacaaccaggagcctctgttgcccgtattgccagggaacacgatat

SEQ ID NO: 439692 - DNA, 75 bp, synthetic construct
  source 1..75: mol_type = other DNA
attttcaaatggctcaggctctggcagaacgaagggcgtgtttcgcggcgtcttccggtaacgacctcttctgac

SEQ ID NO: 439693 - DNA, 75 bp, synthetic construct
  source 1..75: mol_type = other DNA
tcgaacttcttggtaagcatgtttccgttcaggcatttaaagaacaagcttctcacgagctaaccggtaaagacg

SEQ ID NO: 439694 - DNA, 75 bp, synthetic construct
  source 1..75: mol_type = other DNA
gctcggttgtaccgggatctggttgaaatcagaaggcggcaccaatgtgtgcgtcgatttctggtgcggcaccgg

SEQ ID NO: 439695 - DNA, 75 bp, synthetic construct
  source 1..75: mol_type = other DNA
aagtgaaagacattgaaattcatgcgcttgacgctttcgaccgtactgcactgatcaccctgcctgccgatcaaa

SEQ ID NO: 439696 - DNA, 75 bp, synthetic construct
  source 1..75: mol_type = other DNA
cgcggtcagggcaagggcattatggagacgctgcaaaactacggttttgacatcgtggtgctgctggcgctggcc

SEQ ID NO: 439697 - DNA, 75 bp, synthetic construct
  source 1..75: mol_type = other DNA
gataaagataacctcgagtatcactatccgcgtggtttcgatgattgcttcaccattgaaccggatctgccgttc

SEQ ID NO: 439698 - DNA, 75 bp, synthetic construct
  source 1..75: mol_type = other DNA
cagtgaactatctgttcaaaacgccaggcggctccctgtatcacagtggcgactctcactattccaactactacg

SEQ ID NO: 439699 - DNA, 75 bp, synthetic construct
  source 1..75: mol_type = other DNA
cgaagcacggtaacgaacatcagatcgacgtggcgttaggatcgtacggcgaaaacccgcgcggtatcaccgaca

SEQ ID NO: 439700 - DNA, 75 bp, synthetic construct
  source 1..75: mol_type = other DNA
caggccgtccgctcaagaaaggttgaagctgaacgtgaagttcgcattaaagagatcgaacagcagcaggtcacc

SEQ ID NO: 439701 - DNA, 75 bp, synthetic construct
  source 1..75: mol_type = other DNA
ttctgatgaacaaaccagccttaaattcaaactggcgctattacagtcgttacctgcagtaatagagaaatccgt

SEQ ID NO: 439702 - DNA, 75 bp, synthetic construct
  source 1..75: mol_type = other DNA
gagacggagcgccgtcgtcgcgaacgtaacgaagttgaacaggatgtagaagttgcggtgcgtgagaaaaaccgt

SEQ ID NO: 439703 - DNA, 75 bp, synthetic construct
  source 1..75: mol_type = other DNA
aatggttcatgagaaatgctgagcagtatctggaaggcaattataaaccccccacatttttggagaaaattgata

SEQ ID NO: 439704 - DNA, 75 bp, synthetic construct
  source 1..75: mol_type = other DNA
cgccacttactctgaaattcagggcgggcgtaagcaatggaaagatttaggcgcaatggcaggcgtcggcgcggt

SEQ ID NO: 439705 - DNA, 75 bp, synthetic construct
  source 1..75: mol_type = other DNA
taaagagatcgaacagcaacaagtcaccgaaattgccaaccagacgaaatcgatcgctattgccgctaaatcgga

SEQ ID NO: 439706 - DNA, 75 bp, synthetic construct
  source 1..75: mol_type = other DNA
aaatcggaaggcggtaccaacgtctgcgtcgatttttggtgcggtactggcaaacaaagtcacggtaacccgctg

SEQ ID NO: 439707 - DNA, 75 bp, synthetic construct
  source 1..75: mol_type = other DNA
atcaaatggcctgataaggtcaaaaacctcgaacttcttggcaagcatgtttctgttcaggcatttaaagagcaa

SEQ ID NO: 439708 - DNA, 75 bp, synthetic construct
  source 1..75: mol_type = other DNA
ctgaagttcagcgaattctggatattgcatccccacactccctgcgtaattactgcatgatttatctcgccttca

SEQ ID NO: 439709 - DNA, 75 bp, synthetic construct
  source 1..75: mol_type = other DNA
cagatgcgggaaatcaacgacagccttgatccggagattgaatctgaaatcagccgccgcgaagaggaagagggc

SEQ ID NO: 439710 - DNA, 75 bp, synthetic construct
  source 1..75: mol_type = other DNA
agctgtttgcccgcgagttcattaaagacctcaacgccactcaggcggccattagggccggatacagcgagaagt

SEQ ID NO: 439711 - DNA, 75 bp, synthetic construct
  source 1..75: mol_type = other DNA
aaaatatgaaggcattcttgcttcgctgaaatctggacttttaaacgtcttaattactgattttgatacggctat

SEQ ID NO: 439712 - DNA, 75 bp, synthetic construct
  source 1..75: mol_type = other DNA
aaacagccgctggcagggttacgatcctcgctacatatactcgctcgtggtcagacgttattttgcggatatgaa

SEQ ID NO: 439713 - DNA, 75 bp, synthetic construct
  source 1..75: mol_type = other DNA
ccatgcagaccgttatcagtaaacaggatgaaggcgcggaacaacttattgccggtgcgctggccgcacttaacg

SEQ ID NO: 439714 - DNA, 75 bp, synthetic construct
  source 1..75: mol_type = other DNA
gtgacgtgttgattattggtagcggcgcagccggactttcactggcgctacgcctggctgaccagcatcaggtca

SEQ ID NO: 439715 - DNA, 75 bp, synthetic construct
  source 1..75: mol_type = other DNA
gtgaatcctggatcctgagcactttcccggagtggggtagctggctgaatgaagaaattgaacaagagcaggtcg

SEQ ID NO: 439716 - DNA, 75 bp, synthetic construct
  source 1..75: mol_type = other DNA
ggctgttttgtgctgggttttcaggccaaagcacagatggactacacctacggtaaagagtttgccgatgccatg

SEQ ID NO: 439717 - DNA, 75 bp, synthetic construct
  source 1..75: mol_type = other DNA
cagtggaagaaaagacgcctgtggcagagctgactgaaattgtggacaaagaaaccggggaaatcctgtatccgg

SEQ ID NO: 439718 - DNA, 75 bp, synthetic construct
  source 1..75: mol_type = other DNA
tgacgaacagaacaaaacggagtctcaggccggacaggcagaatctcttaacaatccggtactggctgcagcggt

SEQ ID NO: 439719 - DNA, 75 bp, synthetic construct
  source 1..75: mol_type = other DNA
gcgtggtcatacccggttctgcggcttaaacgcctggggctgtcaaaaacgttccgccgtctggttgtcacactt

SEQ ID NO: 439720 - DNA, 75 bp, synthetic construct
  source 1..75: mol_type = other DNA
acaaactggtatggaatcacattacgggcgcttttgtggtggcttccgaactggcccgctcacggggaaaacgcg

SEQ ID NO: 439721 - DNA, 75 bp, synthetic construct
  source 1..75: mol_type = other DNA
atgtacacaacggtggcacggcaacagaaacgcggataaaccgtgatggctggcaggtgattaaggaaggaggaa

SEQ ID NO: 439722 - DNA, 75 bp, synthetic construct
  source 1..75: mol_type = other DNA
gaaaatgatattgtgcattattatgagtgggcagatgttgtcataactcatgcaggcgcaggcactatatataaa

SEQ ID NO: 439723 - DNA, 75 bp, synthetic construct
  source 1..75: mol_type = other DNA
ggttatgcccacagcgtcagcggcagcagcgctgaaggctataacggtcaggccacgctgaatgtgaccttctga

SEQ ID NO: 439724 - DNA, 75 bp, synthetic construct
  source 1..75: mol_type = other DNA
acccgacgttatggcgtcagtctcattcatctggatgccagcgccgaatgtctgccggatttacccactttcgac

SEQ ID NO: 439725 - DNA, 75 bp, synthetic construct
  source 1..75: mol_type = other DNA
tcaccctgggcgttcaggccggttatgaccacagcgtcagcggcagcagcgctgaaggctataacggtcaggcca

SEQ ID NO: 439726 - DNA, 75 bp, synthetic construct
  source 1..75: mol_type = other DNA
tcaccctgggcgttcaggctggttatgtccacagcgtcagcggcagcagcgctgaagggtataacggtcaggcca

SEQ ID NO: 439727 - DNA, 75 bp, synthetic construct
  source 1..75: mol_type = other DNA
tcaccctgggcgttcaggctggttatgaccacagcgtcagcggcagcagcgctgaaggttataacggtcaggcca

SEQ ID NO: 439728 - DNA, 75 bp, synthetic construct
  source 1..75: mol_type = other DNA
atatcaccctgggcgttcaggccggttatgcccacagcatcaacggcagcagcgctgaaggttataacagtcagg

SEQ ID NO: 439729 - DNA, 75 bp, synthetic construct
  source 1..75: mol_type = other DNA
atggctacatacggcggtcagtttacgcttacactcccggtgctgtctgctgacatcgttgtgcacccgggtgaa

SEQ ID NO: 439730 - DNA, 75 bp, synthetic construct
  source 1..75: mol_type = other DNA
tcaccctgggcgttcaggcgggttatgaccacagcgtcagcggcagcagcgctgaagggtataacggtcaggcca

SEQ ID NO: 439731 - DNA, 75 bp, synthetic construct
  source 1..75: mol_type = other DNA
gaaaaattttctccagcggtatataagaaaactcctttttttagaagtgatgagatagttaattttattaacaat

SEQ ID NO: 439732 - DNA, 75 bp, synthetic construct
  source 1..75: mol_type = other DNA
ctatctggggtgataaagatgcacctacagatatgctcataaaggctctgtaccgtgatggtggagcgttcattt

SEQ ID NO: 439733 - DNA, 75 bp, synthetic construct
  source 1..75: mol_type = other DNA
gcaacgcggtcgctgaatgacgctaaaatattcttgttgctgattgtgaaatggggggggttatgcgtgatgatc

SEQ ID NO: 439734 - DNA, 75 bp, synthetic construct
  source 1..75: mol_type = other DNA
ccgctggcgaatttcgaaaatatcaaccagttaccgccgcaaccgctccggcttcttccagtggtacgtaatttt

SEQ ID NO: 439735 - DNA, 75 bp, synthetic construct
  source 1..75: mol_type = other DNA
cgactgaagtgttgatcactgaccggagagagtatgagctggcggaagagggctttatcacactgaccatgcgta

SEQ ID NO: 439736 - DNA, 75 bp, synthetic construct
  source 1..75: mol_type = other DNA
ctcgttgtttccgagcaaactatggcaacaaatgaggcgttgcagccgttttttaacagcgatgaactgtttcgc

SEQ ID NO: 439737 - DNA, 75 bp, synthetic construct
  source 1..75: mol_type = other DNA
ccgatcaaacctttgctgatgacctccagcaactgctgcactgcggcaaaagtttccgcgtttacagcaacccgg

SEQ ID NO: 439738 - DNA, 75 bp, synthetic construct
  source 1..75: mol_type = other DNA
cacgtcaggttcagtttaaatggtccttcgatcaggtgaccggagcggtaagtaacaccggcaacacgtggttta

SEQ ID NO: 439739 - DNA, 75 bp, synthetic construct
  source 1..75: mol_type = other DNA
ttctggtatacctactatcagatatagaacacgattatagattatctgaccctatacttggttctgagattccag

SEQ ID NO: 439740 - DNA, 75 bp, synthetic construct
  source 1..75: mol_type = other DNA
agggatgatgttgacgttttctataatgacgcggatgtaataattacccatgctggggctgggacactatatcag

SEQ ID NO: 439741 - DNA, 75 bp, synthetic construct
  source 1..75: mol_type = other DNA
gccacgcggtcgctgaatgacgctaaaaatattcttgttgctgattgtgaaaatggggagggtgcccctattaag

SEQ ID NO: 439742 - DNA, 75 bp, synthetic construct
  source 1..75: mol_type = other DNA
atgcacaataaaaccacaccggacgcagcagctgccgcactcactacgctgatgcacgcacttattgatattgaa

SEQ ID NO: 439743 - DNA, 75 bp, synthetic construct
  source 1..75: mol_type = other DNA
tggtatctacgtccgggagacgtggttcatcagcctgagttacgtcagccggggaatcactatctggtctataac

SEQ ID NO: 439744 - DNA, 75 bp, synthetic construct
  source 1..75: mol_type = other DNA
tcaccctgggcgttcaggcaggttatggccacagcgtcagcggcagcagcgctgaagggtataacggtcaggcca

SEQ ID NO: 439745 - DNA, 75 bp, synthetic construct
  source 1..75: mol_type = other DNA
ccgtatccatgggaaatggcggtgtactgctggccgattccggagccgctgtcagtggtacccggagcgacggaa

SEQ ID NO: 439746 - DNA, 75 bp, synthetic construct
  source 1..75: mol_type = other DNA
tcaccctcacctccggtgccacctggaacattccggacaacgccacggtgaaatcggtggtggatgaactccgtc

SEQ ID NO: 439747 - DNA, 75 bp, synthetic construct
  source 1..75: mol_type = other DNA
acgataacaacggcggtattgcccgtggggccacgccggaaagcagcggcagctatggcttcgtccgtctggagg

SEQ ID NO: 439748 - DNA, 75 bp, synthetic construct
  source 1..75: mol_type = other DNA
gggcaatgggtacaggatggcggaacagccaacaaaacgactgtcaccagtggtggtcttcagagagtgaatccc

SEQ ID NO: 439749 - DNA, 75 bp, synthetic construct
  source 1..75: mol_type = other DNA
aactcgtacacgggtcagaaggtccagggaacagcagaatccaccaccatcaacaaaaatggacggcagattatc

SEQ ID NO: 439750 - DNA, 75 bp, synthetic construct
  source 1..75: mol_type = other DNA
ccgtatccatgggaaatggcggggtactgctggccgattccggtgccgctgtcagtggtacccggagcgacggaa

SEQ ID NO: 439751 - DNA, 75 bp, synthetic construct
  source 1..75: mol_type = other DNA
ggacagtgatgagagctggtatctgcgcagtgaaaatgcttatcgtgctgaagtccccctgtatgcctccatgct

SEQ ID NO: 439752 - DNA, 75 bp, synthetic construct
  source 1..75: mol_type = other DNA
ggtacacggagaggcacataacacccggctggagggaggaaaccagtatgtgcacaaatacggacttgcgctgaa

SEQ ID NO: 439753 - DNA, 75 bp, synthetic construct
  source 1..75: mol_type = other DNA
ccggactggaagcccgtgtccgggaaaatatcaccctgggcgttcaggccggttatgcccacagcgtcagcggca

SEQ ID NO: 439754 - DNA, 75 bp, synthetic construct
  source 1..75: mol_type = other DNA
ccgtcacccagaatacgggcggtgcgctggttaccggtacggcagccaccgtctccggcacaaaccgtgcgggcc

SEQ ID NO: 439755 - DNA, 75 bp, synthetic construct
  source 1..75: mol_type = other DNA
actggcaaatcatgacaaccagattgtcttcggtatgaccaacggaatgaccatcagtaccgggctggagtatgg

SEQ ID NO: 439756 - DNA, 75 bp, synthetic construct
  source 1..75: mol_type = other DNA
atgaaagcgtcaacggacaataacgacttccgcgcccgggggggggggctggctgggttcgctggaaaccggtct

SEQ ID NO: 439757 - DNA, 75 bp, synthetic construct
  source 1..75: mol_type = other DNA
gccacggttcagtcggtggtggatgacctcagccatgccggacagattcatttcacctccgcccgcacagggaag

SEQ ID NO: 439758 - DNA, 75 bp, synthetic construct
  source 1..75: mol_type = other DNA
ccgctcccgaatcttccgaaagatggggtgaaaaaccatatctgcggactgacggctttatccgcaaccttcatt

SEQ ID NO: 439759 - DNA, 75 bp, synthetic construct
  source 1..75: mol_type = other DNA
ataggtaattacgccacaggtgttaatatccagtgggattatacaaaggatgcaactgtacaaattcatacatca

SEQ ID NO: 439760 - DNA, 75 bp, synthetic construct
  source 1..75: mol_type = other DNA
tcaccctgggcgttcaggcaggttatgcccacagcgtcagcggcagcagcgctgaaggctataacggtcaggcca

SEQ ID NO: 439761 - DNA, 75 bp, synthetic construct
  source 1..75: mol_type = other DNA
tcaccctgggcgttcaggcaggttatgtccacagcgtcagcggcagcagcgctgaaggttataacggtcaggcca

SEQ ID NO: 439762 - DNA, 75 bp, synthetic construct
  source 1..75: mol_type = other DNA
tcaccctgggcgttcaggcaggttatgaccacagcgtcagcggcagcagcgctgaaggatataacggtcaggcca

SEQ ID NO: 439763 - DNA, 75 bp, synthetic construct
  source 1..75: mol_type = other DNA
aacacagctcagtaaaggcgccagcatggtactgaatggtgatgtggtcagtaccggcgatattgttaacgcagg

SEQ ID NO: 439764 - DNA, 75 bp, synthetic construct
  source 1..75: mol_type = other DNA
acacagtgtgcgtgaattgccggtgaactggtgggtacagccttctgttatccgcaccttcagctcccggggaga

SEQ ID NO: 439765 - DNA, 75 bp, synthetic construct
  source 1..75: mol_type = other DNA
aactccccggtaacgttccataaactgaccaccacgaacctcaccggccagggcggcaccatcaatatgcgtgtc

SEQ ID NO: 439766 - DNA, 75 bp, synthetic construct
  source 1..75: mol_type = other DNA
tgctaataacgtccatgttatgcgctttgtctccggcagtattcaaagtaataaaaccataaatattacagggcg

SEQ ID NO: 439767 - DNA, 75 bp, synthetic construct
  source 1..75: mol_type = other DNA
caacggtggtattgcccgtggggccacgccggaaagcagcggcagctatggcttcgtccgtctggagggtgacct

SEQ ID NO: 439768 - DNA, 75 bp, synthetic construct
  source 1..75: mol_type = other DNA
acactgacaaatcatgacaaccagattgtcctcggtacggccaacggaatgaccatcagtaccgggctggagtat

SEQ ID NO: 439769 - DNA, 75 bp, synthetic construct
  source 1..75: mol_type = other DNA
tcttccggtaacgacctcttctgactctggcgttgaattattacctgtggagataacgccggatgagcagaaaga

SEQ ID NO: 439770 - DNA, 75 bp, synthetic construct
  source 1..75: mol_type = other DNA
gacaatgcctttgatgctgaaggcctgacccttctgacccaggaaacagaacgtcgtcgccgcgaacgcaacgaa

SEQ ID NO: 439771 - DNA, 75 bp, synthetic construct
  source 1..75: mol_type = other DNA
aacatgacgctggaaaatccttcaccagagctgctcacggtgttgatccgtgaactgaccgggagggggcgatga

SEQ ID NO: 439772 - DNA, 75 bp, synthetic construct
  source 1..75: mol_type = other DNA
acgcgagcgagtcaggaagactggaatccaggattcacggaaaaaatggttggctgggcaaaaaagatggagtct

SEQ ID NO: 439773 - DNA, 75 bp, synthetic construct
  source 1..75: mol_type = other DNA
gcgcgagctgaccaggaaggctggaaccctgggttcacggaaaaatggttggatgggcaaaaaaatggagacagg

SEQ ID NO: 439774 - DNA, 75 bp, synthetic construct
  source 1..75: mol_type = other DNA
ccactgcagcccagacgctgggacaacgcacgctcacacctgaagatctgcgtagtctggtcgaggataaatttg

SEQ ID NO: 439775 - DNA, 75 bp, synthetic construct
  source 1..75: mol_type = other DNA
tggatattatcgataattattatccagcagtaattagcaaagaagattggatgttattacaatcagacgcaaagc

SEQ ID NO: 439776 - DNA, 75 bp, synthetic construct
  source 1..75: mol_type = other DNA
gaatcgctctggctgctgaccttgcgcataaagaatcggagaagaaatcacagcgtttgcgtgagacaaaacagc

SEQ ID NO: 439777 - DNA, 75 bp, synthetic construct
  source 1..75: mol_type = other DNA
agttgcattatatcagataatgaaggaactaaaactcgagaaaaaaactagttttgataaaacattattagagga

SEQ ID NO: 439778 - DNA, 75 bp, synthetic construct
  source 1..75: mol_type = other DNA
ttgaccttgaaactggtgagtctatcaattttcgagatctgcttaaggcgaacgggaaagctcctaggcatgcaa

SEQ ID NO: 439779 - DNA, 75 bp, synthetic construct
  source 1..75: mol_type = other DNA
tgaagctcccgaagtgggtttatgaccgtattactgaaataacggactgtgtggtggggaatacgcaatgggcgg

SEQ ID NO: 439780 - DNA, 75 bp, synthetic construct
  source 1..75: mol_type = other DNA
atggacatgcattcaggaacctttaacccagaggatttcacctggcaaggcttaacgctaacccccgcagcggcg

SEQ ID NO: 439781 - DNA, 75 bp, synthetic construct
  source 1..75: mol_type = other DNA
ggaagcgtttcgctttgatatctgcggcagcgttagcgaaccgattcccgataatcgttatggtgtgagtaatgg

SEQ ID NO: 439782 - DNA, 75 bp, synthetic construct
  source 1..75: mol_type = other DNA
atggaattcgaaatcaaaggcgtgaaatatcgcgtggcaaaactcagcgtttttgaccaactgaaagtgacccgc

SEQ ID NO: 439783 - DNA, 75 bp, synthetic construct
  source 1..75: mol_type = other DNA
atggcgtttgacgatatcgacctgttgaccatgctgcaactggtggcgcgggtggtcgccgactcgctgggaaat

SEQ ID NO: 439784 - DNA, 75 bp, synthetic construct
  source 1..75: mol_type = other DNA
atcctgttcccctgtctttccgttgtttcacgcgagcacatgaaaggctgggtgccggtctgccagcatggcgaa

SEQ ID NO: 439785 - DNA, 75 bp, synthetic construct
  source 1..75: mol_type = other DNA
atgagcagaaagaacctgtggcggccatattgcgccgtctttatccacttccactcagaccagagtcagtgccag

SEQ ID NO: 439786 - DNA, 75 bp, synthetic construct
  source 1..75: mol_type = other DNA
attccagcaactgaaggtaagccgtaagctgctgccggtgctggctgggctcgttagcgaattttccacgctgaa

SEQ ID NO: 439787 - DNA, 75 bp, synthetic construct
  source 1..75: mol_type = other DNA
cgattattcatccctgtcttgcggtggtgtcgcggcgtcatatggacggatgggttccggtatttacccagggcg

SEQ ID NO: 439788 - DNA, 75 bp, synthetic construct
  source 1..75: mol_type = other DNA
agcggcgagaaaatacgtaaagcgccgatactgtttcactacactaatctggctgaagggatgtcagagcagcgg

SEQ ID NO: 439789 - DNA, 75 bp, synthetic construct
  source 1..75: mol_type = other DNA
cgatattgtttcactacaccaacctggccgaagggatgtcagagaagcggctggaaacggatatttatgtgccgt

SEQ ID NO: 439790 - DNA, 75 bp, synthetic construct
  source 1..75: mol_type = other DNA
acatcatcaatttcccttcaacccgcgtggctttgttgccgcatcgctgtagccctgagttgctcaactatagcg

SEQ ID NO: 439791 - DNA, 75 bp, synthetic construct
  source 1..75: mol_type = other DNA
atcgaaaccgtgaaattcgagcagttaaaaccggtgtttgaaaccatgctcccgcatatcgctgaggaactgtct

SEQ ID NO: 439792 - DNA, 75 bp, synthetic construct
  source 1..75: mol_type = other DNA
aatatcgcgtggcaaaactcagcgtttttgaccagctgaaagtgacccgcaaacttctgccggtgctggcaggaa

SEQ ID NO: 439793 - DNA, 75 bp, synthetic construct
  source 1..75: mol_type = other DNA
tgggttccggtatttacccggggcgaactgatgtttgatgatattgacttgctggtcatgctgcagctggtggcg

SEQ ID NO: 439794 - DNA, 75 bp, synthetic construct
  source 1..75: mol_type = other DNA
ggcgtttcgtaatctggaaagcgatctcggttacggcatgctgctcacccgctatgcgccggatatgaatcatgt

SEQ ID NO: 439795 - DNA, 75 bp, synthetic construct
  source 1..75: mol_type = other DNA
gaacgtcaggctaacgccagtctgtcggaaataccgtattacgagtgctacacagatattccggcgatggtgcaa

SEQ ID NO: 439796 - DNA, 75 bp, synthetic construct
  source 1..75: mol_type = other DNA
gggaagcatcaaggatttcatcgaggaacgtaaaaccaacgagcggctgtctgaaataccgtatttcgagtgcta

SEQ ID NO: 439797 - DNA, 75 bp, synthetic construct
  source 1..75: mol_type = other DNA
cttctgcatccaccgcgaccacgaaagcgtcagaagctgccacctcagcccgggatgcggcggcctcaaaagagg

SEQ ID NO: 439798 - DNA, 75 bp, synthetic construct
  source 1..75: mol_type = other DNA
aagacccggaaattaaccgttaccgcccgcgcattctggtcaatgaagacagcctgaccgtgggcggtgccagca

SEQ ID NO: 439799 - DNA, 75 bp, synthetic construct
  source 1..75: mol_type = other DNA
gtgggacagccagcctgcctcgatggtgggcggtcgccagtacatcaccgaagacccggaaattaaccgttaccg

SEQ ID NO: 439800 - DNA, 75 bp, synthetic construct
  source 1..75: mol_type = other DNA
cggaaataccgtattacgagtgctacacagatattccggcgatggtgcaaaaactggctgcccgttttgattatg

SEQ ID NO: 439801 - DNA, 75 bp, synthetic construct
  source 1..75: mol_type = other DNA
aaaaaaaataaatacagacgtagaatttgaaccattatcacaatctgaagttgttgaaatgatgaagtgctctga

SEQ ID NO: 439802 - DNA, 75 bp, synthetic construct
  source 1..75: mol_type = other DNA
cctttgaacgtgatgatgctgaaaaatggggagtaacatttcttccgctgttttattcgccgcgttttgacaata

SEQ ID NO: 439803 - DNA, 75 bp, synthetic construct
  source 1..75: mol_type = other DNA
aaactttctcgtcagtggcaagatgaaagtattgcggccatttctgctcagatggatgtattacgcaatatagca

SEQ ID NO: 439804 - DNA, 75 bp, synthetic construct
  source 1..75: mol_type = other DNA
gtggagtatctggtcgtcgaggccgctggcgaaacccgcgagctgcgtctggataaaattaccagctttagccac

SEQ ID NO: 439805 - DNA, 75 bp, synthetic construct
  source 1..75: mol_type = other DNA
ctggcgaaacccgcgagttgcgcctggataaaattaccagctttagccatccggaaatcggtacggtagtggtga

SEQ ID NO: 439806 - DNA, 75 bp, synthetic construct
  source 1..75: mol_type = other DNA
aagggctggcatggataaaattcgattcaaccggcgttgaagaagaattaaatctggaaaatgtgaaaattgttt

SEQ ID NO: 439807 - DNA, 75 bp, synthetic construct
  source 1..75: mol_type = other DNA
ttatttcggtaatttccggcaatgagattattgctgacggaataaataaaaatgcactcactgcgccggaagtgt

SEQ ID NO: 439808 - DNA, 75 bp, synthetic construct
  source 1..75: mol_type = other DNA
tggtcagcgtaaatgcagcaaatccgttgaataactttaaagatacgaaaggcaaagaggaaaagaacgatgaat

SEQ ID NO: 439809 - DNA, 75 bp, synthetic construct
  source 1..75: mol_type = other DNA
gtaaatcactggagaatccttccaccccgataaccggggatgccgttgatactgatgggctgttccgggcagacg

SEQ ID NO: 439810 - DNA, 75 bp, synthetic construct
  source 1..75: mol_type = other DNA
gcgcagttttatcactttgccattacagatggctggatgagccggaatgaagcgagggcatttgaggacatgaac

SEQ ID NO: 439811 - DNA, 75 bp, synthetic construct
  source 1..75: mol_type = other DNA
ccagcatcgctgggtgctaaaaatggcgctctggagtctgccgctaccgtggattgccattgaggccgggtggtt

SEQ ID NO: 439812 - DNA, 75 bp, synthetic construct
  source 1..75: mol_type = other DNA
ttgatatcgacaccctgcgtatggagatgaccagtttcagcgagctgctcttcaacccggtcagccaggtgaaat

SEQ ID NO: 439813 - DNA, 75 bp, synthetic construct
  source 1..75: mol_type = other DNA
gtaaccgggagccgcatgtgttgcaggcattccgggagttggaaagcgaccttggttacggcatgttgctctccc

SEQ ID NO: 439814 - DNA, 75 bp, synthetic construct
  source 1..75: mol_type = other DNA
tctggcgatcaacctgatcggcggcgtctgtatcgggatcttcaaatacaacctgagcgccgatgctgccttcca

SEQ ID NO: 439815 - DNA, 75 bp, synthetic construct
  source 1..75: mol_type = other DNA
gcggcgggtaaggtgattgagtcgtttggtcaggtggtgatcggcggcaactttgtcgtcggcttcgtggtgttt

SEQ ID NO: 439816 - DNA, 75 bp, synthetic construct
  source 1..75: mol_type = other DNA
gattcgtttttctgaccttggcaggttgttcttcagtaggcaaccagtcattgaaaaatgagacgcaggaaagtg

SEQ ID NO: 439817 - DNA, 75 bp, synthetic construct
  source 1..75: mol_type = other DNA
tcgttcatgatgaaccgaatgcctggcagaccagctataagtggcgggaactgaagcagcgtcatgtgctggggt

SEQ ID NO: 439818 - DNA, 75 bp, synthetic construct
  source 1..75: mol_type = other DNA
aaacgacgctgatgaatactggtggccgatatacctacggtttgtacaacgaatatggggcgtttgcgatcagcc

SEQ ID NO: 439819 - DNA, 75 bp, synthetic construct
  source 1..75: mol_type = other DNA
ctgatggctggatgagccgcaatgaagcgcgagccttcgaagacatgaatccggtagatggcctggatgaaatgc

SEQ ID NO: 439820 - DNA, 75 bp, synthetic construct
  source 1..75: mol_type = other DNA
ggacgatggtaacggtgtaccgcgtgggccattggcaccgttgttgattggtctactgattgcggtcatcggcgc

SEQ ID NO: 439821 - DNA, 75 bp, synthetic construct
  source 1..75: mol_type = other DNA
cgttaaaccacagctggttgctgtcgttcgccgtgcgctggaactgacggaggttgattttggtatcacggaagg

SEQ ID NO: 439822 - DNA, 75 bp, synthetic construct
  source 1..75: mol_type = other DNA
atgtcgggtaaattcagattcagtcgtcgcagtgaaaaaaatctggggggcgtcaaaccacagctggttgctgtc

SEQ ID NO: 439823 - DNA, 75 bp, synthetic construct
  source 1..75: mol_type = other DNA
acaatggatacgctggtggcgctgggtacgggcgtggcgtggctctattcgatgagcgtcaacctgtggccgcag

SEQ ID NO: 439824 - DNA, 75 bp, synthetic construct
  source 1..75: mol_type = other DNA
gcaggcatttaagcaggctgccgcagagctgggaactgccatcgaatggggcggcgactggaaaacactgaaaga

SEQ ID NO: 439825 - DNA, 75 bp, synthetic construct
  source 1..75: mol_type = other DNA
ccatttttatcgcggtagcagaagagagtaatttcagtaaagccgccgcacgactgggcgttacccgttcagcgg

SEQ ID NO: 439826 - DNA, 75 bp, synthetic construct
  source 1..75: mol_type = other DNA
gcacaacgctgaatcagtcatcagaccgcgaccttaaagacgatattctcgttatcagcgacgcgacgaaagcaa

SEQ ID NO: 439827 - DNA, 75 bp, synthetic construct
  source 1..75: mol_type = other DNA
gtaaggatttacgaccagttaaacaagccgactaaagcagatttgggtctttctaatgctatgcttacaggcgct

SEQ ID NO: 439828 - DNA, 75 bp, synthetic construct
  source 1..75: mol_type = other DNA
agaccatgaacagccgccacctgaccggtgatgcggtggatgttgttgcctgggttggcagccaggtgtcatggg

SEQ ID NO: 439829 - DNA, 75 bp, synthetic construct
  source 1..75: mol_type = other DNA
gagctgggaactgccatcgaatggggcggggagtggaccagcctgaaagacggaccgcattttcagttgaggcga

SEQ ID NO: 439830 - DNA, 75 bp, synthetic construct
  source 1..75: mol_type = other DNA
atgtcgggtaaattcagattcagtcgtcggagcgagaaaaatctggagggcgtcaaaccacaactggttgccgtg

SEQ ID NO: 439831 - DNA, 75 bp, synthetic construct
  source 1..75: mol_type = other DNA
cgtaaggctcggagaggtcattgaaaaagacatgattgctgttccccttaccggcaggcagcgtgaaatggtcgt

SEQ ID NO: 439832 - DNA, 75 bp, synthetic construct
  source 1..75: mol_type = other DNA
agtacgcaatatcagaaacccatatttacgacatcatccggcgactaagaaagaagcacgccaataaaatcacgc

SEQ ID NO: 439833 - DNA, 75 bp, synthetic construct
  source 1..75: mol_type = other DNA
atgaagaagaagaaactattcatactcaacacctaacgcttaatgttgtgaatatgattcccaacatgggcggcg

SEQ ID NO: 439834 - DNA, 75 bp, synthetic construct
  source 1..75: mol_type = other DNA
caatgttgctttaatcgcctcatgctgcggcctgatatatgccgttattacaaaaagaggatcaaccacactgcc

SEQ ID NO: 439835 - DNA, 75 bp, synthetic construct
  source 1..75: mol_type = other DNA
atgcccgatgcgccatcttatcgggtcttcagggaaagccgcgattacttgcgttggcagatacctgtaggccgg

SEQ ID NO: 439836 - DNA, 75 bp, synthetic construct
  source 1..75: mol_type = other DNA
ggtgcgctaagtgagtcgaaactatggaatgatgatgccattgaaagacagttaagccacgttgaacgaaaaaat

SEQ ID NO: 439837 - DNA, 75 bp, synthetic construct
  source 1..75: mol_type = other DNA
gcagcgtgtcacggctattatgcgttttgcagtacagaacgattacatcgactcaaacccagccagtgatatggc

SEQ ID NO: 439838 - DNA, 75 bp, synthetic construct
  source 1..75: mol_type = other DNA
aacatgattcctaatatggggggcgttcctcttgtatggggtgtttctttacttggttcatcaatgctgcttgct

SEQ ID NO: 439839 - DNA, 75 bp, synthetic construct
  source 1..75: mol_type = other DNA
gtgatttaggcagttacccggttgttgactggaaggacgcagtaaacaatatggaagacacaaggcgatcaacat

SEQ ID NO: 439840 - DNA, 75 bp, synthetic construct
  source 1..75: mol_type = other DNA
tacgttcgctcaatccgctgtatccgccaatccctatgaatccagaatctaaaatcataggtgtggtagtggacg

SEQ ID NO: 439841 - DNA, 75 bp, synthetic construct
  source 1..75: mol_type = other DNA
tgtcacactggcttaacggtcgccgcgagccaaatcttgaagatattgcgcggattatgcgggcgcttgggcgtc

SEQ ID NO: 439842 - DNA, 75 bp, synthetic construct
  source 1..75: mol_type = other DNA
aaagctgcgtttatttgcgttggcagacacctgtaggccggataaggcgctcgcgccgcatccagcatgaaataa

SEQ ID NO: 439843 - DNA, 75 bp, synthetic construct
  source 1..75: mol_type = other DNA
aaccaaatcaggtgtggtgcggtgatgtgacctatagtgtgcccggagttcagggcgggcatggatgcttaaatg

SEQ ID NO: 439844 - DNA, 75 bp, synthetic construct
  source 1..75: mol_type = other DNA
gacggcagacgggctgtattacgcagccaggtacttgaactgcatggcatcagccacggctctgccggagcaaga

SEQ ID NO: 439845 - DNA, 75 bp, synthetic construct
  source 1..75: mol_type = other DNA
gcatcgacagtgtggcgggcgtgtatgtacagaatgaccagggaagactggtgctacaggccgggcgagacataa

SEQ ID NO: 439846 - DNA, 75 bp, synthetic construct
  source 1..75: mol_type = other DNA
ggggcagggctggaaagggacaatagcctggaatgcggcaggtggagcattaaccaacgctataaacggagatga

SEQ ID NO: 439847 - DNA, 75 bp, synthetic construct
  source 1..75: mol_type = other DNA
gtaacgccggtcatattggtgcgcaggcaggggcggttaccctgacggctgacggacgtattgaaaacagtggca

SEQ ID NO: 439848 - DNA, 75 bp, synthetic construct
  source 1..75: mol_type = other DNA
gagcagtttaaggcattaatggatgccggcattgcatttggtaagcagtacagcctgacgcctggtgtggctctg

SEQ ID NO: 439849 - DNA, 75 bp, synthetic construct
  source 1..75: mol_type = other DNA
cagcactggcggcagcatcggtggccggtttgtgggaaatatggccaacaatctgctggtcggtgcaaatcatga

SEQ ID NO: 439850 - DNA, 75 bp, synthetic construct
  source 1..75: mol_type = other DNA
tccggcagtgacatgacgctggatgtacaggacggggtactcagtaaccggaacacgaaaacacggggtggtatc

SEQ ID NO: 439851 - DNA, 75 bp, synthetic construct
  source 1..75: mol_type = other DNA
gggttggcaattatgtggtgaagcctgttgcaaatacagcaggcaagtggataaccggtggctggaatcctaaat

SEQ ID NO: 439852 - DNA, 75 bp, synthetic construct
  source 1..75: mol_type = other DNA
aaagaggtttcactaaagaagaggcacaggctctggcatcaatggatttgggacatggcgatggcaggggacaat

SEQ ID NO: 439853 - DNA, 75 bp, synthetic construct
  source 1..75: mol_type = other DNA
gccatcattacatacggctattgaacgttatcgcaatgttgtccgtgagtccggattaacaggaaaatatgcgcc

SEQ ID NO: 439854 - DNA, 75 bp, synthetic construct
  source 1..75: mol_type = other DNA
tgcttgtaatggtatcccgtctgggtggatgccgggtctggcaacgaaatacgttaaagaaaaatcattatgcaa

SEQ ID NO: 439855 - DNA, 75 bp, synthetic construct
  source 1..75: mol_type = other DNA
aggcgatacaggccgcaacggcagcagtacaggggctggccggcggtaatctgagtgcagccctggcaggtggtg

SEQ ID NO: 439856 - DNA, 75 bp, synthetic construct
  source 1..75: mol_type = other DNA
ctgatcgacatgaaccggacgatggagaaatcaactatccgtggctgttccgcctgttcgatgaggtgggatatc

SEQ ID NO: 439857 - DNA, 75 bp, synthetic construct
  source 1..75: mol_type = other DNA
ggaccgacggcaaaaatctgcgtgaactgggtatttatcgacaaactggctgctacattgaacgtattcgacgta

SEQ ID NO: 439858 - DNA, 75 bp, synthetic construct
  source 1..75: mol_type = other DNA
ccagcagggaagtctgcttgccagccgtgacatcctgattaatacacaggcgctgaataacgacaacggactgat

SEQ ID NO: 439859 - DNA, 75 bp, synthetic construct
  source 1..75: mol_type = other DNA
gatggactattgatataaaaggaaatcctcagttaggagagcttgctaataaatataaaactggtattgaaatta

SEQ ID NO: 439860 - DNA, 75 bp, synthetic construct
  source 1..75: mol_type = other DNA
ggagacggtttttacgagcagcgtctgattcgagagcaggttgtagctctgaccgggcaacggtacctggacaga

SEQ ID NO: 439861 - DNA, 75 bp, synthetic construct
  source 1..75: mol_type = other DNA
caggtggtgcagcgccgtatctggctgaagtggtgaaaaccatgaccacagacccggttacaggtgaggtgaata

SEQ ID NO: 439862 - DNA, 75 bp, synthetic construct
  source 1..75: mol_type = other DNA
caggcggttgcctcctggaatcagtatgctgatgccaataatctcaccccggaacagaagcaggcaggactggat

SEQ ID NO: 439863 - DNA, 75 bp, synthetic construct
  source 1..75: mol_type = other DNA
atgtgcagaacgaccagggaagactggtgctgcaggccggacgggatatgaatctgacggctgcaacggtggtga

SEQ ID NO: 439864 - DNA, 75 bp, synthetic construct
  source 1..75: mol_type = other DNA
gggcagtatccatgttgccgggccggatacccgtctgccggacagcagcctgtttaaaacaaatccggcagtgaa

SEQ ID NO: 439865 - DNA, 75 bp, synthetic construct
  source 1..75: mol_type = other DNA
gggagactcgggggcttcagcggtagccggcgcacagtcaggcaagacaacggttgagaataatgcgctcagctt

SEQ ID NO: 439866 - DNA, 75 bp, synthetic construct
  source 1..75: mol_type = other DNA
gaccattccgtcaggaaacgtggaaaacgtcagtgtcagcggagagcaacatgttactgacaaaggcacatcaac

SEQ ID NO: 439867 - DNA, 75 bp, synthetic construct
  source 1..75: mol_type = other DNA
aataacgtgaatgaccatttcaccacggagcgcgtggtggtctccacagaaaaggtaactgagtaccagctcagc

SEQ ID NO: 439868 - DNA, 75 bp, synthetic construct
  source 1..75: mol_type = other DNA
gccgcaggtgctgccactggagacgtggtggggatgatagccacagagatgtgcgaaatatcccctggcactgtc

SEQ ID NO: 439869 - DNA, 75 bp, synthetic construct
  source 1..75: mol_type = other DNA
atacagcttcactggccggggctggtattggtgctggtctgggtggggcatttgggaagtatgcccccacagccg

SEQ ID NO: 439870 - DNA, 75 bp, synthetic construct
  source 1..75: mol_type = other DNA
atgattgccggggcatggtatctggggtctgctgcgtcagcaggtaaagttcttggtggcgggcttcttggactg

SEQ ID NO: 439871 - DNA, 75 bp, synthetic construct
  source 1..75: mol_type = other DNA
acggtattgatgcggctggccgggttatttccggcgtgaaagacggggtgaatgaccaggacgccgttaacgttt

SEQ ID NO: 439872 - DNA, 75 bp, synthetic construct
  source 1..75: mol_type = other DNA
aactccagaagggtttaagacaggagaatctattgcaatcggcgccaaagcacaagcgactaaagaacagtcaat

SEQ ID NO: 439873 - DNA, 75 bp, synthetic construct
  source 1..75: mol_type = other DNA
taccaccgaggagggttttaaaacgggtgagtcaattgccattggtgccaaagctaaggcacaaagagaacagtc

SEQ ID NO: 439874 - DNA, 75 bp, synthetic construct
  source 1..75: mol_type = other DNA
gtacttcaattgcgctggcaattgcccctattgcgatatcctttgccgatcaaaacaaaaaccatattgaggttg

SEQ ID NO: 439875 - DNA, 75 bp, synthetic construct
  source 1..75: mol_type = other DNA
gtgatatatctgttactgttgaggatgacggtagcatggtgattgatggtgctaaaattgctgaaaatataaaag

SEQ ID NO: 439876 - DNA, 75 bp, synthetic construct
  source 1..75: mol_type = other DNA
ggaaataacggaagtgtaactctgtcatccgaaggtaataagctgacattgtcaggcggtaatggtgttgggcaa

SEQ ID NO: 439877 - DNA, 75 bp, synthetic construct
  source 1..75: mol_type = other DNA
gccttgccgttttactatcactcagtccggttataatgccatttgccagtgcacaacaaaatgctgatgtgattg

SEQ ID NO: 439878 - DNA, 75 bp, synthetic construct
  source 1..75: mol_type = other DNA
atgtcgaaatcactggcaaaggcccaataaaaacccaggtggctggagataaactggagatttcagcagagacag

SEQ ID NO: 439879 - DNA, 75 bp, synthetic construct
  source 1..75: mol_type = other DNA
agtatatcaccagattcacccctactgatggtggtgaaattgaaccagagttttttctcatatgggaagatggtt

SEQ ID NO: 439880 - DNA, 75 bp, synthetic construct
  source 1..75: mol_type = other DNA
gtcttgcaatttttgtttcgttgactccctctttaagttcattagctggggaaaaagatacaaataaaaatacag

SEQ ID NO: 439881 - DNA, 75 bp, synthetic construct
  source 1..75: mol_type = other DNA
ggcacaatcagaaaatgcgttgtctgtcggtagtgcttcaagagcaactcagaataattctacagccataggttt

SEQ ID NO: 439882 - DNA, 75 bp, synthetic construct
  source 1..75: mol_type = other DNA
gtggggatgatttaactcctttacatgggcgaacttatggagagaaaactattgaagaaggatataaatcatcag

SEQ ID NO: 439883 - DNA, 75 bp, synthetic construct
  source 1..75: mol_type = other DNA
gaaatagggactattactgaagttaagaaagatgatcaaaatggtcttaattttgaccataattctcctattgca

SEQ ID NO: 439884 - DNA, 75 bp, synthetic construct
  source 1..75: mol_type = other DNA
tggcgcgaggggactgaaatcgatcttggtgctgatccgcatagttgtgatgatggtatccatgctgccgcaact

SEQ ID NO: 439885 - DNA, 75 bp, synthetic construct
  source 1..75: mol_type = other DNA
agcttataaccgtggctgaagaatctgttttctgtttgggtgattttattttgcccttcaatgggaccgctacca

SEQ ID NO: 439886 - DNA, 75 bp, synthetic construct
  source 1..75: mol_type = other DNA
atggcgctacttctggagacggcaaagttctggattagccgcgcggtgagagttaacgaccgtctggaaattcat

SEQ ID NO: 439887 - DNA, 75 bp, synthetic construct
  source 1..75: mol_type = other DNA
aagtcgccgatttctgtggtgtttcagtatcgacagttcttcgctggaacagcgtaaacaggagaactggtcaga

SEQ ID NO: 439888 - DNA, 75 bp, synthetic construct
  source 1..75: mol_type = other DNA
caaaaactctttctgtaaaactccctgaaaacataaagttcatccagttagattataaagataattgctatttcg

SEQ ID NO: 439889 - DNA, 75 bp, synthetic construct
  source 1..75: mol_type = other DNA
gatgcttttgatatgggcgcgttcgggctggatgaaaacctgacgatccgtatctccggcggcgtcagccgtagc

SEQ ID NO: 439890 - DNA, 75 bp, synthetic construct
  source 1..75: mol_type = other DNA
aacagttgaggaagcttctgaattcattctatcatctaataaatttatcagtaaagagcatttagatattgtatt

SEQ ID NO: 439891 - DNA, 75 bp, synthetic construct
  source 1..75: mol_type = other DNA
gatttggccagcgcggtttttggtacagaaaacggcccgacaacccggattgacaatgcaggcatcacaatcaca

SEQ ID NO: 439892 - DNA, 75 bp, synthetic construct
  source 1..75: mol_type = other DNA
attcatactggaaagggggctgtcaacaattccgtaacagtccgggggcgcggtaacattgatgttactgtagac

SEQ ID NO: 439893 - DNA, 75 bp, synthetic construct
  source 1..75: mol_type = other DNA
gattttaaaagggaattaaatgaactagagccaggtttatatattgagctatatcagtcagcaggaaagtcaatt

SEQ ID NO: 439894 - DNA, 75 bp, synthetic construct
  source 1..75: mol_type = other DNA
gataaagacaatcaatataaacatttaacgaaccctaatgtaacgaaatgcatagaaatttcagatatacatctt

SEQ ID NO: 439895 - DNA, 75 bp, synthetic construct
  source 1..75: mol_type = other DNA
tctttcagaattaaagctaatgagaaactcttaaattttagggcgatagataaaactggtgatatttatagaggc

SEQ ID NO: 439896 - DNA, 75 bp, synthetic construct
  source 1..75: mol_type = other DNA
accggttatacggtaactggggcgggcacttatagtggcggttctgtggttcttccgtcgccgcttgctgctggc

SEQ ID NO: 439897 - DNA, 75 bp, synthetic construct
  source 1..75: mol_type = other DNA
cggtgaagaaagatggtggtgatttcgaccagttcaccggcgcgacgattactccccgcgcggtggttaatgcgg

SEQ ID NO: 439898 - DNA, 75 bp, synthetic construct
  source 1..75: mol_type = other DNA
aaagccgaagcgattaaacgcctgcaaagtgaaggacgtcaggtggcaatggtgggcgacggcattaacgacgcg

SEQ ID NO: 439899 - DNA, 75 bp, synthetic construct
  source 1..75: mol_type = other DNA
tgatggtcaccgctgacaaccgcagcctgtggttggttatcggcctgataaccctggcggtaatggttttcgccg

SEQ ID NO: 439900 - DNA, 75 bp, synthetic construct
  source 1..75: mol_type = other DNA
ggtgaggatgaccagaaacctccgtgatttggccagcgcggttttttggtacagaaaacggcccgacaacccgga

SEQ ID NO: 439901 - DNA, 75 bp, synthetic construct
  source 1..75: mol_type = other DNA
aaaatatccctgaataatgacctgactgtgggggataaggctcccggcagcatcaaagttaacggggctgatggt

SEQ ID NO: 439902 - DNA, 75 bp, synthetic construct
  source 1..75: mol_type = other DNA
taacagtcccacaacagggggatcgctgctcaagaatgagttttactttgatggatcccacacaccaacgtatag

SEQ ID NO: 439903 - DNA, 75 bp, synthetic construct
  source 1..75: mol_type = other DNA
atacagccaaccgacttaaacaacgagttaaggacatcatacatagcgcccgtctgagcggcattaagacagaaa

SEQ ID NO: 439904 - DNA, 75 bp, synthetic construct
  source 1..75: mol_type = other DNA
atgtccagaaataccctcaacaaattaacagaccgtcagtgcaaagcagctaagccacgagacaaaacttataaa

SEQ ID NO: 439905 - DNA, 75 bp, synthetic construct
  source 1..75: mol_type = other DNA
ccatcagacaagaaagaagacagacttgcttttggggtatatccaaccaccagcttacaagacgccagagaaaaa

SEQ ID NO: 439906 - DNA, 75 bp, synthetic construct
  source 1..75: mol_type = other DNA
tcgcctggtgatgctaaccggggataacccgaccaccgccaatgcgatcgccaaagaagcagggattgatgaggt

SEQ ID NO: 439907 - DNA, 75 bp, synthetic construct
  source 1..75: mol_type = other DNA
ttgcaataaatgcttatctgttttcgacacagactctggcgaaagactgtatcattgataatttctttcagaaaa

SEQ ID NO: 439908 - DNA, 75 bp, synthetic construct
  source 1..75: mol_type = other DNA
taccagactttttcactcgattgggcagctttaaaggtaatcctcttacccgccttgccattgagctaaccatgt

SEQ ID NO: 439909 - DNA, 75 bp, synthetic construct
  source 1..75: mol_type = other DNA
aagcagcgacgcctctgttgcagtatcgtctcagactgtggaagtaaaacatggcctgaacacccgtgtatcggc

SEQ ID NO: 439910 - DNA, 75 bp, synthetic construct
  source 1..75: mol_type = other DNA
atatcgctgttgatgacagttatagccagaacgagggcgtattattagatgtgaataacagtgcatctgcttacg

SEQ ID NO: 439911 - DNA, 75 bp, synthetic construct
  source 1..75: mol_type = other DNA
cggagagttggatcaagacgtactgctaccgctttgggaagtgcgtgaagaagcggtgaagggaattacctgcat

SEQ ID NO: 439912 - DNA, 75 bp, synthetic construct
  source 1..75: mol_type = other DNA
gcagggcaatagcgtgacgcttcagggggtaaacgacaaagtgtacaccctggcgaaattgtataatttacctgc

SEQ ID NO: 439913 - DNA, 75 bp, synthetic construct
  source 1..75: mol_type = other DNA
aatttcagaacaatgcgcagtttagtctggcgggcagcggctacgtcaatatgggcgcttacgactatatgttgg

SEQ ID NO: 439914 - DNA, 75 bp, synthetic construct
  source 1..75: mol_type = other DNA
ggtggtaatgttactgtcaaccagggcggttttgccgggactgttcagggggatgggcaactgactattgctgaa

SEQ ID NO: 439915 - DNA, 75 bp, synthetic construct
  source 1..75: mol_type = other DNA
taacgctgataacaatgattttaccggtgagatgagaattaaaaacggtgaagtcatgttggggcggaataattc

SEQ ID NO: 439916 - DNA, 75 bp, synthetic construct
  source 1..75: mol_type = other DNA
tgctggctgcagaacagatgaacgtctcgctgacgtcggtctggcatgcggtccgtggctggcacaagacccggc

SEQ ID NO: 439917 - DNA, 75 bp, synthetic construct
  source 1..75: mol_type = other DNA
ccaacggattgctgatgcagctggttatggatctgagaagtggctatctgcgccgctgcgaatcgctgggactga

SEQ ID NO: 439918 - DNA, 75 bp, synthetic construct
  source 1..75: mol_type = other DNA
gcgacccaggtcatgacgacgctatcgcaatcgttctcgccctcgcctcaccagagcttgatgtcaaagcaatta

SEQ ID NO: 439919 - DNA, 75 bp, synthetic construct
  source 1..75: mol_type = other DNA
ccaaacgctgtcagcagaaaaggtgcaaagggactgatgcagttaatgcctgtacataccaaaaggcataatgct

SEQ ID NO: 439920 - DNA, 75 bp, synthetic construct
  source 1..75: mol_type = other DNA
tttcccgctctcgctgggcagtatcaaagtcagccagggtatgggggctgaatttgtcccgtcatgcacatatcc

SEQ ID NO: 439921 - DNA, 75 bp, synthetic construct
  source 1..75: mol_type = other DNA
caaacggattactgatgcagctggttatggatctcagaagtggctatctccgccgctgcgaatcgctgggactga

SEQ ID NO: 439922 - DNA, 75 bp, synthetic construct
  source 1..75: mol_type = other DNA
catcagagtgcagggctcagtaccggtggcagtgttgccggaaatttcctggggaacatggcaaacaatctgctg

SEQ ID NO: 439923 - DNA, 75 bp, synthetic construct
  source 1..75: mol_type = other DNA
cactttcgggtccatgagcggttcggcgagtgtgagcctcagccgggataaaatgcacagtaactacgacagtgt

SEQ ID NO: 439924 - DNA, 75 bp, synthetic construct
  source 1..75: mol_type = other DNA
cggggcgggaccatgggggcgaaaacgacagctgacctgagcaccacctcgctggataaccgtgagggtggccgg

SEQ ID NO: 439925 - DNA, 75 bp, synthetic construct
  source 1..75: mol_type = other DNA
aacgaccagggaagactggtgctgcaggccggacgggatatgaatctgacggctgcaacggtggtgaatcagggt

SEQ ID NO: 439926 - DNA, 75 bp, synthetic construct
  source 1..75: mol_type = other DNA
accattttgaacgtaccagtatcgacagtgtggccggcgtgtatgtgcagaacgaccagggaagactggtgctgc

SEQ ID NO: 439927 - DNA, 75 bp, synthetic construct
  source 1..75: mol_type = other DNA
tcaccagccacggacaggttcagggcagccatgtcacgctttctcccctgaagccacagggaacggatgtacaga

SEQ ID NO: 439928 - DNA, 75 bp, synthetic construct
  source 1..75: mol_type = other DNA
gtagctctgggtatgaagctgtttgtaactcatgttacagtaatagccattactatctcgaaggtgcaaaatgta

SEQ ID NO: 439929 - DNA, 75 bp, synthetic construct
  source 1..75: mol_type = other DNA
ccgcagcatagcgatattgaaatagcctggtatgcttcgatacagcaggagccgaatggctggaagaccgtcacc

SEQ ID NO: 439930 - DNA, 75 bp, synthetic construct
  source 1..75: mol_type = other DNA
ggcattctaaaaataaaccgttactcgtcatacttcgggttacatgtgctgcggctgcgttcattcaccccagtc

SEQ ID NO: 439931 - DNA, 75 bp, synthetic construct
  source 1..75: mol_type = other DNA
taacgccggtcatattggtgcgcaggccggggcggttaccctgacggctgacggacgtattgaaaacagtggcag

SEQ ID NO: 439932 - DNA, 75 bp, synthetic construct
  source 1..75: mol_type = other DNA
gcaggcattgtcgcagaccatggcgcaccggggcatcagcagcccacgattatgcagacggccagcggcattccg

SEQ ID NO: 439933 - DNA, 75 bp, synthetic construct
  source 1..75: mol_type = other DNA
tgccggtgccgcaggcgcagccaccggcgaggtggtgggaatgatagccacacagatgtacggtcagccggtgag

SEQ ID NO: 439934 - DNA, 75 bp, synthetic construct
  source 1..75: mol_type = other DNA
gcagatatcagcacagagcctgtcaaatcgtaaaggcagtctgattcagacgggaacaggggatttttcactgaa

SEQ ID NO: 439935 - DNA, 75 bp, synthetic construct
  source 1..75: mol_type = other DNA
acggtgcggtgattgcgtccacggcaacggcagataaaaacaggctggataccggcacactgggcttcagtgaca

SEQ ID NO: 439936 - DNA, 75 bp, synthetic construct
  source 1..75: mol_type = other DNA
cagtcagtttgatgtcagtaaccatggcgtcattctgaataactcacataaaaatgtgcagactcaactgggtgg

SEQ ID NO: 439937 - DNA, 75 bp, synthetic construct
  source 1..75: mol_type = other DNA
gtgccgcctcgtgtacagcaggatgcttcactggcgtttgatcccagtcagcaaggaaagagcgcagaagagatc

SEQ ID NO: 439938 - DNA, 75 bp, synthetic construct
  source 1..75: mol_type = other DNA
ctgccggcctggccggtggtctggtgggagactcgggggcttcagcggtagccggcgcacagtcaggtaagacaa

SEQ ID NO: 439939 - DNA, 75 bp, synthetic construct
  source 1..75: mol_type = other DNA
ggtacactgggcttcagtgatatcgaaaatcgtgctgattacaaagttgaacaccagagcgtgggtatcagcact

SEQ ID NO: 439940 - DNA, 75 bp, synthetic construct
  source 1..75: mol_type = other DNA
agcggtgcatcgctgaatctccgtgctgacacactgagtaaccgtaacagtggtgaccggggcggggttatcagt

SEQ ID NO: 439941 - DNA, 75 bp, synthetic construct
  source 1..75: mol_type = other DNA
actgaaggccgggacggatatgttgctgagtggtggcgatgtcagtaatcaggaagggacgcttgccgccggcgg

SEQ ID NO: 439942 - DNA, 75 bp, synthetic construct
  source 1..75: mol_type = other DNA
ggggctgtctcaggagaagttactggcaaccaagtaaaagataaactggacaaggtagggaataaaaatgggagc

SEQ ID NO: 439943 - DNA, 75 bp, synthetic construct
  source 1..75: mol_type = other DNA
cctgactgcaggcgtggttaacaatacatccggtcaggtggtggcaaacggtctgctcggctggaacagccaggc

SEQ ID NO: 439944 - DNA, 75 bp, synthetic construct
  source 1..75: mol_type = other DNA
tccgtcaggaagcgtggaaaatgtcagtgtcagtggcgagcggcatgttacggactcaggaacatccacgtatta

SEQ ID NO: 439945 - DNA, 75 bp, synthetic construct
  source 1..75: mol_type = other DNA
caccacactgaatcagtcatcagaccgcagactgaaagaaaatatcgagattatcgataacgcgactgacgcaat

SEQ ID NO: 439946 - DNA, 75 bp, synthetic construct
  source 1..75: mol_type = other DNA
ttttttatgccattctgatttatatcacactgttctataatctggaactaacaacagcaggtggtttttttaaat

SEQ ID NO: 439947 - DNA, 75 bp, synthetic construct
  source 1..75: mol_type = other DNA
atgccgatatggctgaagatggagcaaggcgtaataggtactggaaatcatcgagccttccagtttgtgaaagat

SEQ ID NO: 439948 - DNA, 75 bp, synthetic construct
  source 1..75: mol_type = other DNA
ttcgtgcattaaatatatttttttccaatcctcacccaagagatgcaaagatattttcaggggtggtttttgaag

SEQ ID NO: 439949 - DNA, 75 bp, synthetic construct
  source 1..75: mol_type = other DNA
atgagaataaacactccttggattggaaaatactattgtcaatagcaggcaataatctgcatgacaacccttatc

SEQ ID NO: 439950 - DNA, 75 bp, synthetic construct
  source 1..75: mol_type = other DNA
aagtagatggcaacctgacgcatttaatccgcgactacgccgggaaatatgcgcacgtacaaattgccggactac

SEQ ID NO: 439951 - DNA, 75 bp, synthetic construct
  source 1..75: mol_type = other DNA
cgcctgttcgatgaagtgggatatcagggctggatcggttgtgaatacaaacctcgtggcctcaccgaagaaggg

SEQ ID NO: 439952 - DNA, 75 bp, synthetic construct
  source 1..75: mol_type = other DNA
caaaaccatctgacactggcgctgttcaataccgctcccggagatattaatgcgggggaatggggattatccgcc

SEQ ID NO: 439953 - DNA, 75 bp, synthetic construct
  source 1..75: mol_type = other DNA
tctcttagcgccttaacagtaagaaaatgtcgccttgaagctggcgagcttaaagatattgggcgttggactcca

SEQ ID NO: 439954 - DNA, 75 bp, synthetic construct
  source 1..75: mol_type = other DNA
agaactctatgacgagatcatgacgaacgggggcaaaaccgttttgcgcagaattcttgatgcttatgggtttac

SEQ ID NO: 439955 - DNA, 75 bp, synthetic construct
  source 1..75: mol_type = other DNA
ggcgcataggtgcgtcaaatggcgtattagagcgcttaatgtcagcctatggcgtcaagatgcaaaaggatttgg

SEQ ID NO: 439956 - DNA, 75 bp, synthetic construct
  source 1..75: mol_type = other DNA
gagaaaaattcatcaaaaatcctgagctttttttttatgattccaaaaagacgatagtcaagagtattggtaaat

SEQ ID NO: 439957 - DNA, 75 bp, synthetic construct
  source 1..75: mol_type = other DNA
gggcggcggtggccgaaggccaggtgcgggatttacaggcgaagcagaatgccgctatgcaggcggcgcaaacca

SEQ ID NO: 439958 - DNA, 75 bp, synthetic construct
  source 1..75: mol_type = other DNA
ctggaatggttagcaaccggtaaagggcaaatgcgaacaaacagggaagctgtcacatcaggtttttcaattaaa

SEQ ID NO: 439959 - DNA, 75 bp, synthetic construct
  source 1..75: mol_type = other DNA
ggcgtgcttgcgggattcgcctccttttattccctaagatggggggctggaattgttctacggaaagagtcgctg

SEQ ID NO: 439960 - DNA, 75 bp, synthetic construct
  source 1..75: mol_type = other DNA
caacggttggcgcagtgtgggatgaactggcacgcattctggcgcgcaagcgtagcattccggggatttcgttta

SEQ ID NO: 439961 - DNA, 75 bp, synthetic construct
  source 1..75: mol_type = other DNA
ggcgtgattttaccgttgcgctcgccacgcgtagcaaaactgtatgcctctgtctggatggaaggtggttcgccg

SEQ ID NO: 439962 - DNA, 75 bp, synthetic construct
  source 1..75: mol_type = other DNA
gcgagccggatctgctgctgctctcttatcacggcattcctcaacgttatgcagatgaaggtgatgattacccac

SEQ ID NO: 439963 - DNA, 75 bp, synthetic construct
  source 1..75: mol_type = other DNA
gatgcacatcagtggtgacgtactgagtaatgactgggcccgtcatcagttagctaccgcggccgagttggttag

SEQ ID NO: 439964 - DNA, 75 bp, synthetic construct
  source 1..75: mol_type = other DNA
tataccggaggggggtatcgtgttttctggcaacgcaggcttaatagctctgacttggcattgctgacccgacag

SEQ ID NO: 439965 - DNA, 75 bp, synthetic construct
  source 1..75: mol_type = other DNA
gttcgcgcctctttcgctaaacatggcgagccggatctgctgctgctctcctatcatggaattccacagcgttat

SEQ ID NO: 439966 - DNA, 75 bp, synthetic construct
  source 1..75: mol_type = other DNA
ggttcccaggtcgttaccctcaatcagggaacgcgtttcgaaggaaccgcgctactgcgtgatttccgcattacg

SEQ ID NO: 439967 - DNA, 75 bp, synthetic construct
  source 1..75: mol_type = other DNA
taccgctgagcgtggttaacccgcgtcagggacgcgtactgtcgatgctgccagccatgctgctgtatctacttt

SEQ ID NO: 439968 - DNA, 75 bp, synthetic construct
  source 1..75: mol_type = other DNA
caccgtgtttatgatggcgctcatggttgtgcctctgagcgtggttaacccgcgtcagggacgtgtcctgtcgat

SEQ ID NO: 439969 - DNA, 75 bp, synthetic construct
  source 1..75: mol_type = other DNA
atacttcaggaaacagagaaaaggcaggaactacatgaatcaatacccaaaacatgcaaattaaaggcactggat

SEQ ID NO: 439970 - DNA, 75 bp, synthetic construct
  source 1..75: mol_type = other DNA
atttcttctactacctgataaagttaattgtcattcagccacaatatatttgtgtctatatgatattcttttttt

SEQ ID NO: 439971 - DNA, 75 bp, synthetic construct
  source 1..75: mol_type = other DNA
tgccgctgagtgtggttaatccgcgtcaggggcgtgtcctgtcgatgctgccagcgatgctgctgtatctgctgt

SEQ ID NO: 439972 - DNA, 75 bp, synthetic construct
  source 1..75: mol_type = other DNA
aagcacaccgtgacgctggagaaaggggataacggctggacatccagtgatccgacgctgatcccggacagcact

SEQ ID NO: 439973 - DNA, 75 bp, synthetic construct
  source 1..75: mol_type = other DNA
agctcagttagtcaagttaacggcatcggatgtattgggtatgaatgacaattcaacgatttatatttccggtga

SEQ ID NO: 439974 - DNA, 75 bp, synthetic construct
  source 1..75: mol_type = other DNA
tactgagtctggcgatgatattgttacgatcaaacgtactggtgtaacaaatgccggacagatttatcttggttc

SEQ ID NO: 439975 - DNA, 75 bp, synthetic construct
  source 1..75: mol_type = other DNA
tggtgcaacactggcggcatggggcgcagccctgagtgccggagggctgactgccaccacgatgctgttctcact

SEQ ID NO: 439976 - DNA, 75 bp, synthetic construct
  source 1..75: mol_type = other DNA
cggcagcggaggccatccgtgccctgtcgctgcaggtgccgggattccgctgtcagatgaacgaaggctggtatc

SEQ ID NO: 439977 - DNA, 75 bp, synthetic construct
  source 1..75: mol_type = other DNA
accggaacgccggctttttatgtcaacggtaaataccagattaaaaacaacggcattaaagacggctccacagaa

SEQ ID NO: 439978 - DNA, 75 bp, synthetic construct
  source 1..75: mol_type = other DNA
ggtattcctctggcgctcaaccgcactatctaccagatagagatgatgccggagaaagtcgacaacgtgcagcaa

SEQ ID NO: 439979 - DNA, 75 bp, synthetic construct
  source 1..75: mol_type = other DNA
aacgtatatacgttcgctttgttgttaatggaaactggacagcgtggagtcaggttgttgtttccggatggaatc

SEQ ID NO: 439980 - DNA, 75 bp, synthetic construct
  source 1..75: mol_type = other DNA
agcgatactctggttctggcaggtaatatttctgtcaatctggctacagggaagaatgaaggtattgccggcttc

SEQ ID NO: 439981 - DNA, 75 bp, synthetic construct
  source 1..75: mol_type = other DNA
acctttaaattaggcacaattgccaaaaacctgaccattgatgccggtgccggtgatgatattgttgttctgaca

SEQ ID NO: 439982 - DNA, 75 bp, synthetic construct
  source 1..75: mol_type = other DNA
ctggtttatacggtttctctgaatcatgtcactacaacagatgtaacagttacagttacattgggtagcggagct

SEQ ID NO: 439983 - DNA, 75 bp, synthetic construct
  source 1..75: mol_type = other DNA
atgaaactacagaactcttttcgcgactatacggcagagtccgcactgtttgtgcgccgggcgctggtcgccttt

SEQ ID NO: 439984 - DNA, 75 bp, synthetic construct
  source 1..75: mol_type = other DNA
agatgctcacccccagggcgaaaacaccgtctgccacgacaacagataatggtaaacggaacacgtatttttcgt

SEQ ID NO: 439985 - DNA, 75 bp, synthetic construct
  source 1..75: mol_type = other DNA
aagctgccctacgtaccacccgacgctggtcgctggcagattttcattctctgtttgttaatcatccctttaccc

SEQ ID NO: 439986 - DNA, 75 bp, synthetic construct
  source 1..75: mol_type = other DNA
aaccagtaacagcctgactcgctgggaaggtaaatccgctaccgttgggcagcttatgggaatgcgatacaaagg

SEQ ID NO: 439987 - DNA, 75 bp, synthetic construct
  source 1..75: mol_type = other DNA
tgaataacgcacttaaacaagcaaccaccaataacgagtcatttggttataccgatgaagaaatagtctcttccg

SEQ ID NO: 439988 - DNA, 75 bp, synthetic construct
  source 1..75: mol_type = other DNA
atgacgctctggaaattatcggcgaaatgctgcgctttacccagggggggacgtttttatagcgggctggaacaa

SEQ ID NO: 439989 - DNA, 75 bp, synthetic construct
  source 1..75: mol_type = other DNA
aagcgctaatgagcttccgttctcttcgagtgtaccgtgacaataaatccgtcacttttgccgaacttgatgtgt

SEQ ID NO: 439990 - DNA, 75 bp, synthetic construct
  source 1..75: mol_type = other DNA
gggggtttatccggcaaatgaaccgcgtcgtttactcaacgcctttcgtgtggccgcagagggggagttctgcaa

SEQ ID NO: 439991 - DNA, 75 bp, synthetic construct
  source 1..75: mol_type = other DNA
attactccattctggatagcgacggcgataagaaacacggcgacgagactgatgaccgttacggcgcacgcgttc

SEQ ID NO: 439992 - DNA, 75 bp, synthetic construct
  source 1..75: mol_type = other DNA
agccaggtaaaacagcttcagatacaacaggcagccgaaattcgcgaaattaaagccgcgcagggtaatacgcca

SEQ ID NO: 439993 - DNA, 75 bp, synthetic construct
  source 1..75: mol_type = other DNA
acgtaaggtgttggcacctcactacatcctgtcactgtccgccgttctgccggttcaggaggtacgccatgtatg

SEQ ID NO: 439994 - DNA, 75 bp, synthetic construct
  source 1..75: mol_type = other DNA
atgaaaaaatcgacattatctttagctatcggtttattattggcatgtagtaccggtatggcaaaaacacagtat

SEQ ID NO: 439995 - DNA, 75 bp, synthetic construct
  source 1..75: mol_type = other DNA
tatatctatatgatgaaagagggccgcgggcgttctaacgctggcggtaattcctcgtcagcaaacaactcgata

SEQ ID NO: 439996 - DNA, 75 bp, synthetic construct
  source 1..75: mol_type = other DNA
taccggtatggcaaaaacacagcatttaacgctggaacaacgcatggcattgctggaagaacgcctggaagcggc

SEQ ID NO: 439997 - DNA, 75 bp, synthetic construct
  source 1..75: mol_type = other DNA
ggggaggggaatgacacaatcaaaataggtactatttcaaatggtaatataaccattgatgcgggtgccggtgat

SEQ ID NO: 439998 - DNA, 75 bp, synthetic construct
  source 1..75: mol_type = other DNA
tgcccgtggtctggaagaagatgctgaaggactgcgcgctttcgcggctatgcataaagagctgattgttgccag

SEQ ID NO: 439999 - DNA, 75 bp, synthetic construct
  source 1..75: mol_type = other DNA
cgttgtactcaggaactgctgtttggtaaaggtagcgccttgatcaatgacaaacgagctcgcacagcccagacc

SEQ ID NO: 440000 - DNA, 75 bp, synthetic construct
  source 1..75: mol_type = other DNA
tgcatcaacaggtaaagtagtcagtggcgcagtcatctcagccattgccaatggtacgtatcagtggtacgacct

SEQ ID NO: 440001 - DNA, 75 bp, synthetic construct
  source 1..75: mol_type = other DNA
actaagcgagtatttcgatacaaacgcacagccggacatggccaacatcaaccgcaaaaaagcgaacgtcatgcg

SEQ ID NO: 440002 - DNA, 75 bp, synthetic construct
  source 1..75: mol_type = other DNA
tgaactgtacgacgatacgaaaactcaggagctgatcagccggatacgttcggcgtcccttgatcctgatattga

SEQ ID NO: 440003 - DNA, 75 bp, synthetic construct
  source 1..75: mol_type = other DNA
agaaaaaggcgtatcgcctggcagataatcgtctgccgcttaacgctggctgggatgaagagctgttacggatgg

SEQ ID NO: 440004 - DNA, 75 bp, synthetic construct
  source 1..75: mol_type = other DNA
cggacagaaccattttgaacgtaccagtatcgacagtgtggccggcgtgtatgtgcagaacgaccagggcagact

SEQ ID NO: 440005 - DNA, 75 bp, synthetic construct
  source 1..75: mol_type = other DNA
ccggataccgcttcgtccggtggtgtcagccggtgaaccagtcattctgttaccggggcagcagtttgaagtcag

SEQ ID NO: 440006 - DNA, 75 bp, synthetic construct
  source 1..75: mol_type = other DNA
tgctgcaggcaaaccgtgacgtgaatctggtatcagcagaaaacacttcaaagctggaaggaaagaacacatcca

SEQ ID NO: 440007 - DNA, 75 bp, synthetic construct
  source 1..75: mol_type = other DNA
tccgggatttatatttgatgcgacaggatcttttggtagtgaatttcttggtggatatataaaagaagcaagtag

SEQ ID NO: 440008 - DNA, 75 bp, synthetic construct
  source 1..75: mol_type = other DNA
tggtaaatgctgcactggcggtggcacagggaaataacgcccttgccggtgccgcaggcgcagccaccggcgagg

SEQ ID NO: 440009 - DNA, 75 bp, synthetic construct
  source 1..75: mol_type = other DNA
gtcagattgtggcgaacggtctgcccggccggaacagtctggcgctgaacaatcagtccggtcttattcagggga

SEQ ID NO: 440010 - DNA, 75 bp, synthetic construct
  source 1..75: mol_type = other DNA
gggtttttcgggttacgggcgggtgatggttgtcggtggaggggcggagattgtggcacccgctatccgcgaagc

SEQ ID NO: 440011 - DNA, 75 bp, synthetic construct
  source 1..75: mol_type = other DNA
tctttttaaacaaaaagaacttattaaaatacttaaagaggagttcgctgactcaaaccaggttagaatagtaat

SEQ ID NO: 440012 - DNA, 75 bp, synthetic construct
  source 1..75: mol_type = other DNA
atgatgagattggaaaattagaggcggaaactgattcttatcttgatgcttgtttttatgagtccaatgttttta

SEQ ID NO: 440013 - DNA, 75 bp, synthetic construct
  source 1..75: mol_type = other DNA
ggcctttatctctgcaaacaaaatttagcggtgagtggccatagtattttctacgaaacaagaacagagaaaaaa

SEQ ID NO: 440014 - DNA, 75 bp, synthetic construct
  source 1..75: mol_type = other DNA
caactgcgttagatggtattgagcatacttatacgctttacagcagtgtaagtggcgcaaatgtgtatattgata

SEQ ID NO: 440015 - DNA, 75 bp, synthetic construct
  source 1..75: mol_type = other DNA
tggagcattgcttcaattctgcttatctggactgcgattaatcgttgtcgggtgatgcttccaattagtagaaca

SEQ ID NO: 440016 - DNA, 75 bp, synthetic construct
  source 1..75: mol_type = other DNA
aaacggggatgccggagaaccttatattgaggtgtgttttaccggtaaaggccggcaggctgaattgtctgcgga

SEQ ID NO: 440017 - DNA, 75 bp, synthetic construct
  source 1..75: mol_type = other DNA
ttatcagccagcaaaaaggatcaggagcagtaagattctctttaggatttggagccaatggagagattattcttt

SEQ ID NO: 440018 - DNA, 75 bp, synthetic construct
  source 1..75: mol_type = other DNA
aacaacgcgtgattcgcgcgctggcggggttttcggggtacggtcgggtgatggttgtcggtggaggggcggaga

SEQ ID NO: 440019 - DNA, 75 bp, synthetic construct
  source 1..75: mol_type = other DNA
gacggctccaccaacatcaagctggcatggactgagaacggcgaacgccgcaacgccatcagcccgaacagcttc

SEQ ID NO: 440020 - DNA, 75 bp, synthetic construct
  source 1..75: mol_type = other DNA
cgctcaacttggaataactgtggagataattggtcatgaaatcgaaggtttcgatatgactattgagcgaggtat

SEQ ID NO: 440021 - DNA, 75 bp, synthetic construct
  source 1..75: mol_type = other DNA
agggggaaaagtcccagccgggcaaaccgggaaagaatgagtaactttcgtcgctggctccatgatgcccgtcag

SEQ ID NO: 440022 - DNA, 75 bp, synthetic construct
  source 1..75: mol_type = other DNA
ggctgtccggttttcgctgggatttaacagtaaaggggaaattgtattgcactggactaacgaggccgggttaag

SEQ ID NO: 440023 - DNA, 75 bp, synthetic construct
  source 1..75: mol_type = other DNA
gtgtatgctgcagaatcggtaaccggaggccctgcggtccttaactcagtgtcttgtgttgctcatttgccacaa

SEQ ID NO: 440024 - DNA, 75 bp, synthetic construct
  source 1..75: mol_type = other DNA
gcaatccacggcggcactgcttgcagaaaaccgtctcgatcagaaaaagatggatgagttcgcccaacgtgccac

SEQ ID NO: 440025 - DNA, 75 bp, synthetic construct
  source 1..75: mol_type = other DNA
tggctctgcgcgataattttcgccagtgggtgttcagcgaagttcgcgccctggcgatccccgtcgttcaggtaa

SEQ ID NO: 440026 - DNA, 75 bp, synthetic construct
  source 1..75: mol_type = other DNA
accgatatcccggcgctgttggatttcgcacaaaacgaaaagattgatctgaccatcgtcggcccggaagcgccg

SEQ ID NO: 440027 - DNA, 75 bp, synthetic construct
  source 1..75: mol_type = other DNA
ttttgatgcgtatggctctcagcagcactatttcccaaatgtaatgaaatatgctccagatcagttaaggcagga

SEQ ID NO: 440028 - DNA, 75 bp, synthetic construct
  source 1..75: mol_type = other DNA
tttaaaacacgttgccgacgcgccgtttaaacagtggaccgacggtaacgccgccagggtgctggataacctgaa

SEQ ID NO: 440029 - DNA, 75 bp, synthetic construct
  source 1..75: mol_type = other DNA
tgccacggtgcagaccctggccagttttctcgaagagccaccgcgcgacgcatcaccggagaaaaaacagtacca

SEQ ID NO: 440030 - DNA, 75 bp, synthetic construct
  source 1..75: mol_type = other DNA
ggaatgcaactgagttctcatggttccgatacggacagtataacgaaacgggtatttactgaaccgccccgggtt

SEQ ID NO: 440031 - DNA, 75 bp, synthetic construct
  source 1..75: mol_type = other DNA
gtgcagcgattatcaacgcgcttcatctcactgaggacaatattctgccaggcttgccaattcaggtggcaacaa

SEQ ID NO: 440032 - DNA, 75 bp, synthetic construct
  source 1..75: mol_type = other DNA
atgcgctacttaaatacaaagaatatcattgcagcaggagtattactctcctgcatgaacagcattgcctggggt

SEQ ID NO: 440033 - DNA, 75 bp, synthetic construct
  source 1..75: mol_type = other DNA
agaagacgatggggtaatgacttacgaaaaagttgaaatcatccgtagaaatgatggttcgatccgctttaacaa

SEQ ID NO: 440034 - DNA, 75 bp, synthetic construct
  source 1..75: mol_type = other DNA
tgattctggaagaggcacacgaatcatctggttctaacttctacgacatcgcccggttgtgcatcaatgccgact

SEQ ID NO: 440035 - DNA, 75 bp, synthetic construct
  source 1..75: mol_type = other DNA
gaattacagcttgcacatgtagataaaaattcgatacgtggtatttataaccatgcgcaatatatagaacagcga

SEQ ID NO: 440036 - DNA, 75 bp, synthetic construct
  source 1..75: mol_type = other DNA
ccatgcacagtatcttgatgggcgtagggagatgatgcagtggtatgcggattatattggttccctgacaagaga

SEQ ID NO: 440037 - DNA, 75 bp, synthetic construct
  source 1..75: mol_type = other DNA
ctttctcttggcgtataccccgatgtgacgttagccgacgctcgccaaaaacgcagtgaagcaaggaaaatcctc

SEQ ID NO: 440038 - DNA, 75 bp, synthetic construct
  source 1..75: mol_type = other DNA
caaaaaaagaagaaaaaatcgcgctgcaaatgagtttgaaaaacactttcgaggccgttgctcgcgagtggcatc

SEQ ID NO: 440039 - DNA, 75 bp, synthetic construct
  source 1..75: mol_type = other DNA
cccgatcttgccagtgctttagctacaccgaaaaaagtacattttcccggtaatggtgccaacttactgatttag

SEQ ID NO: 440040 - DNA, 75 bp, synthetic construct
  source 1..75: mol_type = other DNA
gctaatggcattgacccggtagaggaacgcaaagctttaagactcgcccaaaagctatcaacagaaaattctttc

SEQ ID NO: 440041 - DNA, 75 bp, synthetic construct
  source 1..75: mol_type = other DNA
tcattatgctaactggtgtacgaactcaagaattgcgtttcgcacgctgggaggatatcgattttgagacaaaat

SEQ ID NO: 440042 - DNA, 75 bp, synthetic construct
  source 1..75: mol_type = other DNA
agcttatcgagaagaaattattaaaacatttgaacaggatgtttttcctttcattggtaaacgaccaatagctga

SEQ ID NO: 440043 - DNA, 75 bp, synthetic construct
  source 1..75: mol_type = other DNA
ttgataaaaacagcataagaggcacttacaaccatgcacagtacctcttacaacggaaagaaatgcttcagtggt

SEQ ID NO: 440044 - DNA, 75 bp, synthetic construct
  source 1..75: mol_type = other DNA
cggaatacaatcctgctcctgatttagccatcgctctggccgttcctaagccaaaacatcatccatttctatctg

SEQ ID NO: 440045 - DNA, 75 bp, synthetic construct
  source 1..75: mol_type = other DNA
ctgaatataaccctgcgcctgatttggccattgcattagctgtcccgaagcaaaaacatcatccttatctttcgg

SEQ ID NO: 440046 - DNA, 75 bp, synthetic construct
  source 1..75: mol_type = other DNA
gaaactgtaagtagagaatggcatgcagcaaaagcagaccgctggacagtggcctatcgcgaagaaatcattaaa

SEQ ID NO: 440047 - DNA, 75 bp, synthetic construct
  source 1..75: mol_type = other DNA
ctgaatacaatccagcacctgatttagctatcgcattagcagtgccgaagcaaaaacatcatccttttctatcag

SEQ ID NO: 440048 - DNA, 75 bp, synthetic construct
  source 1..75: mol_type = other DNA
ggcttgccaattcaggtagcaacaacaggacactcaaaagtgatgatcccgttgaaaccagaagtggatatcgac

SEQ ID NO: 440049 - DNA, 75 bp, synthetic construct
  source 1..75: mol_type = other DNA
ttccgggcggttctatcctgcctgtttacgatgccttaagccaaagcacgcaaatccgccatattctggctcgcc

SEQ ID NO: 440050 - DNA, 75 bp, synthetic construct
  source 1..75: mol_type = other DNA
gatccttatcttgctcaatcgtggattgaagatgccagcggtaaaaaaacgcgtgattacatttcaacactgccg

SEQ ID NO: 440051 - DNA, 75 bp, synthetic construct
  source 1..75: mol_type = other DNA
ctgcaaaaagtgacgattacccgcaccgccgccgggctgaccctgaataacccgacgccttatcatattaccgtc

SEQ ID NO: 440052 - DNA, 75 bp, synthetic construct
  source 1..75: mol_type = other DNA
cacctatccgggcaaaatcaactttatgcagattgccgccggattcggcctcgaaacctgtgatttgaataacga

SEQ ID NO: 440053 - DNA, 75 bp, synthetic construct
  source 1..75: mol_type = other DNA
gactttaatggcgctgggcatgttgccaaaagcgcatccgttgtcgctgggtatgttggggatgcacggtgtgcg

SEQ ID NO: 440054 - DNA, 75 bp, synthetic construct
  source 1..75: mol_type = other DNA
acgcgattatcaccaccgacgtgggtcagcatcagatgtggactgcacaagcttatccgctcaatcgtccacgtc

SEQ ID NO: 440055 - DNA, 75 bp, synthetic construct
  source 1..75: mol_type = other DNA
ggctaatgctatccatacacttgaagcaatcaggttattccttttcttaactaatacagcctttatcattgcagc

SEQ ID NO: 440056 - DNA, 75 bp, synthetic construct
  source 1..75: mol_type = other DNA
gataaagaagcattgaccccaccgcagcaaataaatttatttagagatgaatatagtgggattttaaaagagtta

SEQ ID NO: 440057 - DNA, 75 bp, synthetic construct
  source 1..75: mol_type = other DNA
aatttggtagaaaagctaaggatagcattggaaaaatctttacaggaatcatggcataaagatcctatgaagaaa

SEQ ID NO: 440058 - DNA, 75 bp, synthetic construct
  source 1..75: mol_type = other DNA
gcgtgattacatctcgacattgccgccgatggaacgtattgagcctgatgaacagatacaaattcgcctgatggc

SEQ ID NO: 440059 - DNA, 75 bp, synthetic construct
  source 1..75: mol_type = other DNA
cacgttacgctgggttatatcggaacaaatggggtcacgatgttaccgcaaacgcaaagcttaatggtcctccct

SEQ ID NO: 440060 - DNA, 75 bp, synthetic construct
  source 1..75: mol_type = other DNA
atgattacgcggcatgcatagttattaacgatacaattgagcgcattgaatcaggtaaaccattaagagattttg

SEQ ID NO: 440061 - DNA, 75 bp, synthetic construct
  source 1..75: mol_type = other DNA
gacacctacggcatctctatccccatcaccaaacacaactatctggtaagacatatcgaagaactcccgcaggtc

SEQ ID NO: 440062 - DNA, 75 bp, synthetic construct
  source 1..75: mol_type = other DNA
tggtattgtggaagatccggtgaccgggaatgccaatggcccgatgggcgcatggttggtacatcacaacttact

SEQ ID NO: 440063 - DNA, 75 bp, synthetic construct
  source 1..75: mol_type = other DNA
aaatgcagcttatcgcccgcgaattaggtcattcggaaactgcttttctgctgcacagcgacgacagcgatgtac

SEQ ID NO: 440064 - DNA, 75 bp, synthetic construct
  source 1..75: mol_type = other DNA
caagatgtcccattgatacgtttctggtccgagactggctgccccacctgcgcggaatttgtctacagcggtttt

SEQ ID NO: 440065 - DNA, 75 bp, synthetic construct
  source 1..75: mol_type = other DNA
atgaaaccgcaggtgtaccacgtcgatgcttttacctcacacccgtttcgcggcaattctgcgggtgttgtttcc

SEQ ID NO: 440066 - DNA, 75 bp, synthetic construct
  source 1..75: mol_type = other DNA
tgaagttccgatttgtggtcacgcgacagtagctgcgcactatgtacgtgcaaaggtgttaggtttaggaaattg

SEQ ID NO: 440067 - DNA, 75 bp, synthetic construct
  source 1..75: mol_type = other DNA
tgaagtgccgatttgtggtcacgcgacggtagcagcgcattatgtacgttcgaaggtattaggtttgggaaattg

SEQ ID NO: 440068 - DNA, 75 bp, synthetic construct
  source 1..75: mol_type = other DNA
ggcgattccactcattaaagcgaataccaaaaaagtcggccatgctgcgtcaatcgttgggatgacggtaatcgg

SEQ ID NO: 440069 - DNA, 75 bp, synthetic construct
  source 1..75: mol_type = other DNA
cggtctgctgccagctctgaaaaagatccacactaataaacgcgacctggcgcgcgccatgaaggggcatatggg

SEQ ID NO: 440070 - DNA, 75 bp, synthetic construct
  source 1..75: mol_type = other DNA
ccgcggctggagtccgctgcgcctgattgcagttaccgtggtactcggcatcgtcggtaaattctgtcatttcct

SEQ ID NO: 440071 - DNA, 75 bp, synthetic construct
  source 1..75: mol_type = other DNA
cgccagtaatccggcaaccgttgccgtctgggatcctgaatattgctatttcagtgacaccgccccctgttttct

SEQ ID NO: 440072 - DNA, 75 bp, synthetic construct
  source 1..75: mol_type = other DNA
atggcatctaatcaaaccaccctgccgaacgtcagtgaaaacgaagaaacactgctgactggcgtcaatgaaaac

SEQ ID NO: 440073 - DNA, 75 bp, synthetic construct
  source 1..75: mol_type = other DNA
ggctggagtccgctgcgcctgattgcagttaccgtggttctcggcatcgtcggtaaattctgccatttcctttaa

SEQ ID NO: 440074 - DNA, 75 bp, synthetic construct
  source 1..75: mol_type = other DNA
agcccgcaatacttactttatatttggaattccatgcttattattctatgcttttttcggaacactaattgttca

SEQ ID NO: 440075 - DNA, 75 bp, synthetic construct
  source 1..75: mol_type = other DNA
acgtttcccgcagatgatccggtatcgggttaaagagtgggaaaaagttgccggtgtgcctgttgcagaagtatt

SEQ ID NO: 440076 - DNA, 75 bp, synthetic construct
  source 1..75: mol_type = other DNA
atgatgcttacagaaccatatataggaacagatattcaagcatatctatatacttgtggcagttggtttctatta

SEQ ID NO: 440077 - DNA, 75 bp, synthetic construct
  source 1..75: mol_type = other DNA
aaggtcaggggaatgttcatcttgtgctgttgcacggatggggactgaatgccgaagtgtggcgttgcattgacg

SEQ ID NO: 440078 - DNA, 75 bp, synthetic construct
  source 1..75: mol_type = other DNA
gctggataaactttggcctcacagcgaatcatatatcttcgccaaagcggcccatgcgccgtttatttcgcatcc

SEQ ID NO: 440079 - DNA, 75 bp, synthetic construct
  source 1..75: mol_type = other DNA
tgtcacttgctgatatggctgaagtcgtgctgcgacaagcgccggacaaagctatctggttaggctggagtttgg

SEQ ID NO: 440080 - DNA, 75 bp, synthetic construct
  source 1..75: mol_type = other DNA
gatcgacagtctgatcgaagaagcggcacctggcggcgtgcaaattctctgtcctgtccactcagtgattgcagt

SEQ ID NO: 440081 - DNA, 75 bp, synthetic construct
  source 1..75: mol_type = other DNA
ggaagactacactcgctatcaaaacttcatccagtggtgggtgccgcaggctacggaaagcgccattaatcactt

SEQ ID NO: 440082 - DNA, 75 bp, synthetic construct
  source 1..75: mol_type = other DNA
tcccgccagcaaatttcgctggaattcatgccgttcccgagatcgaagacaagatttcacagatagttgtcaacc

SEQ ID NO: 440083 - DNA, 75 bp, synthetic construct
  source 1..75: mol_type = other DNA
tacccaaacaatgtcatggatgtgattggtctggatattcacaacttcacccgaacagttgctgaagacggcaag

SEQ ID NO: 440084 - DNA, 75 bp, synthetic construct
  source 1..75: mol_type = other DNA
gcttggacgcatcgccccgccagcgccggtagtgccggaagaagcaactccggaaaacgtagaaatgctctctgg

SEQ ID NO: 440085 - DNA, 75 bp, synthetic construct
  source 1..75: mol_type = other DNA
ttaatgaagtaacagaacagtatccggcgaaagatctggcagatctactgttgaccatgatggcccatcagttgc

SEQ ID NO: 440086 - DNA, 75 bp, synthetic construct
  source 1..75: mol_type = other DNA
acttcaccatgccacaggacgttgcggcaaactttacccttgaaaataacggtattgccatcactcaggccaatg

SEQ ID NO: 440087 - DNA, 75 bp, synthetic construct
  source 1..75: mol_type = other DNA
aatttcactggcaattcctggaacattatccggctgctcaggactgcgcttataaatttattgtctgcgaggata

SEQ ID NO: 440088 - DNA, 75 bp, synthetic construct
  source 1..75: mol_type = other DNA
atggagccaacttcgacaacacgattttgcgccgttcatacgaacggcaggggatcccctgcccgtggcgttact

SEQ ID NO: 440089 - DNA, 75 bp, synthetic construct
  source 1..75: mol_type = other DNA
aacctgccaggaaacattcgatgaagaaaatcaggctgaagctcaggaggaaatggaaggcagtggcggcgatca

SEQ ID NO: 440090 - DNA, 75 bp, synthetic construct
  source 1..75: mol_type = other DNA
taaatggtggcttaagcaatcacgcgaggcgcaatctgccattatgaccgatgaaatcccgttagatgatgcact

SEQ ID NO: 440091 - DNA, 75 bp, synthetic construct
  source 1..75: mol_type = other DNA
gaaacattcgatgaagaacatcaggttgaagttcaggaaaatgatccggaggaaatggaaggcgctgaacattca

SEQ ID NO: 440092 - DNA, 75 bp, synthetic construct
  source 1..75: mol_type = other DNA
atcacgaaagaagaatatcttgcccgcaaaaacggaacatacacggacttaccgcaaaatgtggataccgctgaa

SEQ ID NO: 440093 - DNA, 75 bp, synthetic construct
  source 1..75: mol_type = other DNA
aattatcaatctcagttatacattcaacaaaagactggcaggaagctatcaatttctcgatggcatcactgttag

SEQ ID NO: 440094 - DNA, 75 bp, synthetic construct
  source 1..75: mol_type = other DNA
agtacggtggcccttgcgaaattcctaatggtctggccctctgcgcaattcatcataaagcttttgataagggat

SEQ ID NO: 440095 - DNA, 75 bp, synthetic construct
  source 1..75: mol_type = other DNA
ctgataaaaagtaagagcctgattaattccctcgcccgacaaatcctcgaagcccatttcaccgagagcattcag

SEQ ID NO: 440096 - DNA, 75 bp, synthetic construct
  source 1..75: mol_type = other DNA
agaaagcggaacaaaacagcccaaatacgcaacaaaacgagccagaaacgaaacaacctgaaccagtagtgcaac

SEQ ID NO: 440097 - DNA, 75 bp, synthetic construct
  source 1..75: mol_type = other DNA
ctcagcatcaatgcgcaaacagcctgatgcgcttcgctatgaccgtcagactattttcggccttgttcgtgagcg

SEQ ID NO: 440098 - DNA, 75 bp, synthetic construct
  source 1..75: mol_type = other DNA
cccgaatgatccgaaatgggtgaagggaattgaaacccgcgattctgtgaaccagaaccagcaagaaacggaaca

SEQ ID NO: 440099 - DNA, 75 bp, synthetic construct
  source 1..75: mol_type = other DNA
ttaatgaagtgacagaacagtacccagcgaaagatctggcagacctactgttgaccatgatggcccatcagttgc

SEQ ID NO: 440100 - DNA, 75 bp, synthetic construct
  source 1..75: mol_type = other DNA
gtaaattgttagaaattccatttaatccggtgtatcggaattttgacaaagcgcttcaggaaatcaccgactgga

SEQ ID NO: 440101 - DNA, 75 bp, synthetic construct
  source 1..75: mol_type = other DNA
catgcggcagatggagtttactgtgccgggcggcgcgcccatcattggctttttgcatatgccaaaaggcgatgg

SEQ ID NO: 440102 - DNA, 75 bp, synthetic construct
  source 1..75: mol_type = other DNA
ccctgttcaaaccccgctttaaacatcctgaaacctcgacgcttgttcgtcgttttaatcacggctcgcaaccgc

SEQ ID NO: 440103 - DNA, 75 bp, synthetic construct
  source 1..75: mol_type = other DNA
tggtattgtggaagatccggtgaccggcaatgccaatggcccgatgggcgcatggttggtacatcacaacgtatt

SEQ ID NO: 440104 - DNA, 75 bp, synthetic construct
  source 1..75: mol_type = other DNA
tcgaacgttatccagagcttaagagtggttattacgtttgcattgatggtaaatgtccatacggagatcaggttg

SEQ ID NO: 440105 - DNA, 75 bp, synthetic construct
  source 1..75: mol_type = other DNA
gtaaattgttagaaattccattcaatcctgtgtatcggaattttgacaaagcactccaggaaattaccaactggc

SEQ ID NO: 440106 - DNA, 75 bp, synthetic construct
  source 1..75: mol_type = other DNA
atcaacgaagctatcgcactgctgaaagagctggcgactgctaaattcgtagaaagcgtggacgtagctgttaac

SEQ ID NO: 440107 - DNA, 75 bp, synthetic construct
  source 1..75: mol_type = other DNA
cgctatgccattgctactggaagggctgagtttaaccctgctgcggatctttcaagcgctctcaatgtacaccaa

SEQ ID NO: 440108 - DNA, 75 bp, synthetic construct
  source 1..75: mol_type = other DNA
gggcggaacgatccgaacaagcctatgagtgaggcgagtattaaccaggttatcaaacgtattggatatgctggg

SEQ ID NO: 440109 - DNA, 75 bp, synthetic construct
  source 1..75: mol_type = other DNA
ggggtggaattgcatgcctggtaatgttctcactgatactgttgcatagcggcagtaaagcgccgacacagaccc

SEQ ID NO: 440110 - DNA, 75 bp, synthetic construct
  source 1..75: mol_type = other DNA
cggcgcggatgttgcgctcgattgttccggtaatgctgcggggcgcttgctggcattgcaatccaccgccgactg

SEQ ID NO: 440111 - DNA, 75 bp, synthetic construct
  source 1..75: mol_type = other DNA
gccgtatttacccagggtgcaaacgctgaagctgctaaagctgcaggtgcagaactggtaggtatggaagatctg

SEQ ID NO: 440112 - DNA, 75 bp, synthetic construct
  source 1..75: mol_type = other DNA
atgcttttacctcacaaccgtttcgcggcaattctgccggttttgttttcccccgccgataatcttagcgaagcg

SEQ ID NO: 440113 - DNA, 75 bp, synthetic construct
  source 1..75: mol_type = other DNA
tctgggcggtggtgttattaatgcgcctgtacgggtgcgtgaactggcggaaaaagcgcaactgccgacgaccat

SEQ ID NO: 440114 - DNA, 75 bp, synthetic construct
  source 1..75: mol_type = other DNA
cggaggctttggcgcagcaaaaaatttaagcaactttgcaagccagggcagcgagtgccacgttgacaacgcgtt

SEQ ID NO: 440115 - DNA, 75 bp, synthetic construct
  source 1..75: mol_type = other DNA
atttttatgctgcgggtcaccatgccactgaacgcggtggtattcgcgcattgagcgagtggctgaatgaaaata

SEQ ID NO: 440116 - DNA, 75 bp, synthetic construct
  source 1..75: mol_type = other DNA
caaaaccgagcagttctgtccgaatgccaaaattattcatgtcgatatcgaccgcgcagagctgggtaaaatcaa

SEQ ID NO: 440117 - DNA, 75 bp, synthetic construct
  source 1..75: mol_type = other DNA
attcgtgacgcagcggcgatgattaacgctgccaaacgcccggtgctttatctgggcggtggtgtgatcaatgcg

SEQ ID NO: 440118 - DNA, 75 bp, synthetic construct
  source 1..75: mol_type = other DNA
aaaaccagctggatgtcaaaatcattctgatgaataacgaagcgctggggctggtgcatcagcaacagagtctgt

SEQ ID NO: 440119 - DNA, 75 bp, synthetic construct
  source 1..75: mol_type = other DNA
atgatcccattgaagccggaagtggatatcgacgctctttcgcctgaccttagtgcgctgaccgctatcagttaa

SEQ ID NO: 440120 - DNA, 75 bp, synthetic construct
  source 1..75: mol_type = other DNA
gacggtgacaattcgcgataaccagccggagaaagtgactatttctggtacggcggtgattttatttcatgccga

SEQ ID NO: 440121 - DNA, 75 bp, synthetic construct
  source 1..75: mol_type = other DNA
ggcttgccaattcaggtggcaacaacaggacactcaaaagtgatgatcccgttgaaaccggaagtggatatcgac

SEQ ID NO: 440122 - DNA, 75 bp, synthetic construct
  source 1..75: mol_type = other DNA
atgatgagtatcttcatcatgaccctttccttatttaaggcccctcccgaggaaggggctttcccgtttcagcgt

SEQ ID NO: 440123 - DNA, 75 bp, synthetic construct
  source 1..75: mol_type = other DNA
tcaccggtcgtgacgtgcgttttgttaccgacctgagccagccggttagcgtttacatgacgccgaaagagcgtc

SEQ ID NO: 440124 - DNA, 75 bp, synthetic construct
  source 1..75: mol_type = other DNA
cttaccgtgggatgggctctctgggcgcgatgtccaaaggttcttctgatcgttatttccagagcgacaacgccg

SEQ ID NO: 440125 - DNA, 75 bp, synthetic construct
  source 1..75: mol_type = other DNA
cagtcttgccctggtgaaatacacgcaaaaggtttcccggctgacgatccgcaagcaaaacgcgaatacgaaaaa

SEQ ID NO: 440126 - DNA, 75 bp, synthetic construct
  source 1..75: mol_type = other DNA
tacaggttattgaccaacaaacattgcagaactccaccaatgcctccatagccgataatttgcaggacatccccg

SEQ ID NO: 440127 - DNA, 75 bp, synthetic construct
  source 1..75: mol_type = other DNA
ctgaccgccgaagccagggagaaattacagagcagcaggagacagcgcaacgcgcttcctgccaggccgctttta

SEQ ID NO: 440128 - DNA, 75 bp, synthetic construct
  source 1..75: mol_type = other DNA
catgggcctgttcgacacatacgtcgcagcgcgtgatgaaggtcgtgagttacttcgctgttggtctaacgctcg

SEQ ID NO: 440129 - DNA, 75 bp, synthetic construct
  source 1..75: mol_type = other DNA
tccagaagcaaaacgcgaatacgaaaaagcggcaaaagacttctgcatagataacctgggctgttttaatggcaa

SEQ ID NO: 440130 - DNA, 75 bp, synthetic construct
  source 1..75: mol_type = other DNA
atgaaaaaatacagattagacgtgtggactgataaatgtgaatgggaaagcatggggctatttgacacatataca

SEQ ID NO: 440131 - DNA, 75 bp, synthetic construct
  source 1..75: mol_type = other DNA
atgagtaaagtctttatttgtgccgccattcctgacgaacaggcaataaaagacgagggtgctgttgctgtggcc

SEQ ID NO: 440132 - DNA, 75 bp, synthetic construct
  source 1..75: mol_type = other DNA
ctgacgaagtaaacaaaattatgcaggcagccaatatcagccagcctgacgccgatgaactgcttgcagtatcac

SEQ ID NO: 440133 - DNA, 75 bp, synthetic construct
  source 1..75: mol_type = other DNA
gatgctgaatatatgcaggaaaaccgctgggatgaggattctgcttccttttttccggttgattctgaatctgat

SEQ ID NO: 440134 - DNA, 75 bp, synthetic construct
  source 1..75: mol_type = other DNA
cccctttctcattacgcctccagtttataaacttgaagaaaatcggcaaacattactccatattgtatttacagg

SEQ ID NO: 440135 - DNA, 75 bp, synthetic construct
  source 1..75: mol_type = other DNA
tctgttacccgcgatggatgccaaactgctgagcctgatgcttgacggggaacgtccctcgccatacaggattat

SEQ ID NO: 440136 - DNA, 75 bp, synthetic construct
  source 1..75: mol_type = other DNA
aacatgacagactggcaacccgcctttccatcatcctgagccgtttgtttcagggtgaaaagctgcatatcggga

SEQ ID NO: 440137 - DNA, 75 bp, synthetic construct
  source 1..75: mol_type = other DNA
tttacgccgatgccagagggatccactctcatggcgcggtgcgcgttgaatactacgcagaacgcatttcaaaag

SEQ ID NO: 440138 - DNA, 75 bp, synthetic construct
  source 1..75: mol_type = other DNA
gggtagaaaagcttggtctcgaagattcgctgtacagcacacattccatgagaagaacaaaaccttacttaatct

SEQ ID NO: 440139 - DNA, 75 bp, synthetic construct
  source 1..75: mol_type = other DNA
ttatctgtgtttgtcgataattacggcgctatttgtgccgttctttttgcagtggtcacagggttaacatcatgg

SEQ ID NO: 440140 - DNA, 75 bp, synthetic construct
  source 1..75: mol_type = other DNA
ctgtctgacctgcgatttttcatgccgtccctgaccgcagaagaactgcacggcaaccgtcttcaatggctgtat

SEQ ID NO: 440141 - DNA, 75 bp, synthetic construct
  source 1..75: mol_type = other DNA
gtggaacaaaggccgtatcgtaggccaaaaagaccacttcagatatctcatatctgggggatccgaatcaggctt

SEQ ID NO: 440142 - DNA, 75 bp, synthetic construct
  source 1..75: mol_type = other DNA
aactaaccagcacatttcaacccggcaatacaaccgaatctttcatgggtggatagaaaaacttggtctcgaagg

SEQ ID NO: 440143 - DNA, 75 bp, synthetic construct
  source 1..75: mol_type = other DNA
aaactggaaagcacagtccgttatctgggtattgaagtagatgatgtgttagagatctctgaatcgattgaagtc

SEQ ID NO: 440144 - DNA, 75 bp, synthetic construct
  source 1..75: mol_type = other DNA
gttgggttaactgttattgagcaacgaagtggaactctcaatgattgggttcggagagtatttggggctcagaac

SEQ ID NO: 440145 - DNA, 75 bp, synthetic construct
  source 1..75: mol_type = other DNA
cccgcgcccggttttaatcaggtttattatcccggacaggatcaggatattaaacaacgcaaagccgccgtcgaa

SEQ ID NO: 440146 - DNA, 75 bp, synthetic construct
  source 1..75: mol_type = other DNA
tggcctttgccgcgccgggagaaagtgacgagatccttacctttgatatggcgactaccgtacaagcatggggga

SEQ ID NO: 440147 - DNA, 75 bp, synthetic construct
  source 1..75: mol_type = other DNA
atttagtgatgctacaggagtctttgttattcgacagttaaaagatgataagcaaggtaaaatcgctaatattta

SEQ ID NO: 440148 - DNA, 75 bp, synthetic construct
  source 1..75: mol_type = other DNA
aatgcgttacaccgaatcccggttgtcgaaatattccgagctgctattgagcgagctggggcaggggacggctga

SEQ ID NO: 440149 - DNA, 75 bp, synthetic construct
  source 1..75: mol_type = other DNA
tctgcgggaaatcctctctgaatggctggtgttccgtcgtgataccgtacgccgccgtctgaactatcgcctgga

SEQ ID NO: 440150 - DNA, 75 bp, synthetic construct
  source 1..75: mol_type = other DNA
catccaccagcaggacgtgtgaccatctaatgatcgaccttgaaaccatggaaaaaatcctgatgccccgattat

SEQ ID NO: 440151 - DNA, 75 bp, synthetic construct
  source 1..75: mol_type = other DNA
gcaacaccgaagttctacgtgctaaagcgctagataaggatctaacactgcatgatggtgatgggctttttctga

SEQ ID NO: 440152 - DNA, 75 bp, synthetic construct
  source 1..75: mol_type = other DNA
tgatgaaacctattagtgcacatcgagaacatgtttttcccagcagaaataatccaaaacaacctatgaatagcc

SEQ ID NO: 440153 - DNA, 75 bp, synthetic construct
  source 1..75: mol_type = other DNA
caaatcccttaattaaggtgaacggtcatcgtgaaattacatccaccagcaggttgtggcaccatctgatgattg

SEQ ID NO: 440154 - DNA, 75 bp, synthetic construct
  source 1..75: mol_type = other DNA
acggcaaaaactcgaagcagaggctcgacgacagggcaacacgttcgaaaatgtggccgcatcgtggtacgaaat

SEQ ID NO: 440155 - DNA, 75 bp, synthetic construct
  source 1..75: mol_type = other DNA
agctcgatctggatgcaaagctctgggtgattccaagcgagcggatgaaggctaagcgagaacatattgttcctt

SEQ ID NO: 440156 - DNA, 75 bp, synthetic construct
  source 1..75: mol_type = other DNA
cgaagttcggcgtgcatataatcgcgctttatatctcgagcaacgtaaagagcttttaaattggtggggattatt

SEQ ID NO: 440157 - DNA, 75 bp, synthetic construct
  source 1..75: mol_type = other DNA
gacgattccagccgaaaggatgaaagcgaagcgtgaacatattgtacctctatctcctcaggcgttagagattct

SEQ ID NO: 440158 - DNA, 75 bp, synthetic construct
  source 1..75: mol_type = other DNA
catcgtgaacatgttttcccgagtcggaatgacccaaagcaaccaatgaatagccagacggcaaatgctgcttta

SEQ ID NO: 440159 - DNA, 75 bp, synthetic construct
  source 1..75: mol_type = other DNA
agaattgcctatgctgatgcgttctctcgtcatgtcaaatttgtctgttccgactcgctgcctcattgagtggca

SEQ ID NO: 440160 - DNA, 75 bp, synthetic construct
  source 1..75: mol_type = other DNA
gcactgaacaaatatatcagtgaatacctgacgacaaagggcgtgtttgaacatgaagaaacagaccagagctct

SEQ ID NO: 440161 - DNA, 75 bp, synthetic construct
  source 1..75: mol_type = other DNA
ctgttgcgaccaactggttccagataaaaagcaaaagcgtttcccctgattacgctaaagatatatggcgctcgc

SEQ ID NO: 440162 - DNA, 75 bp, synthetic construct
  source 1..75: mol_type = other DNA
ctggcgctttcgttatcaacgtccggcgacaaaacaacggacaatgatggggctaggtgctttccccgccctttc

SEQ ID NO: 440163 - DNA, 75 bp, synthetic construct
  source 1..75: mol_type = other DNA
ctaacactgaactatcacgtgctaaagcaactgaaaaggatctaacgctacatgatggtgatgggctttttctac

SEQ ID NO: 440164 - DNA, 75 bp, synthetic construct
  source 1..75: mol_type = other DNA
ttacgccgttcatatgaacggcaggagatcccctgcccgtggcgttacaccaatgatcgtgatgtaagaacgatt

SEQ ID NO: 440165 - DNA, 75 bp, synthetic construct
  source 1..75: mol_type = other DNA
agagcaacaagaaccggaaaaagtctgcaccgcctgcggtcagactggcggcggcaactgtcctgactgtggcgc

SEQ ID NO: 440166 - DNA, 75 bp, synthetic construct
  source 1..75: mol_type = other DNA
tgcaccgcatgcggtcagaccggcggcggcaactgccctgattgtggtgcggtgatgggcgacgcaacataccag

SEQ ID NO: 440167 - DNA, 75 bp, synthetic construct
  source 1..75: mol_type = other DNA
tgatgcactactgcaattgcgggaatttatagatgaaaactcctgtggattttatgttcgagtctggggaaatgg

SEQ ID NO: 440168 - DNA, 75 bp, synthetic construct
  source 1..75: mol_type = other DNA
tggcgaggcgacagatcccttaattaatatgaacggtcatcacgaaatcacatccaccagccgggtgtggcacca

SEQ ID NO: 440169 - DNA, 75 bp, synthetic construct
  source 1..75: mol_type = other DNA
tgagggtgaacgccataatgccctgcacgatgcgcgttaccaggcaaaatacgtttcagctatctggcaaaaact

SEQ ID NO: 440170 - DNA, 75 bp, synthetic construct
  source 1..75: mol_type = other DNA
aaaacatgcctagtatccgcccggatcaacttccacaattaatgcagactatgcgcacggcaagtatcagcctgt

SEQ ID NO: 440171 - DNA, 75 bp, synthetic construct
  source 1..75: mol_type = other DNA
ggccgagattttatttttccaagccgcattaagcccactcagccgatgaacagtcaaaccgtgaatgctgcactc

SEQ ID NO: 440172 - DNA, 75 bp, synthetic construct
  source 1..75: mol_type = other DNA
taagcaagtctcagaacatcaacagattgcgattgatagtattttttcaaaagttgccacaaattggtttgccat

SEQ ID NO: 440173 - DNA, 75 bp, synthetic construct
  source 1..75: mol_type = other DNA
ggtgatgggcgacgcaacctgccaggaaacattcgatgaagaaaatcaggctgaagctcaggaggaaatggaagg

SEQ ID NO: 440174 - DNA, 75 bp, synthetic construct
  source 1..75: mol_type = other DNA
ttcacggtgtcagccgcaagacggtaacagcgtggaaggcccgtggctggctggttctggacggtgaggacatcg

SEQ ID NO: 440175 - DNA, 75 bp, synthetic construct
  source 1..75: mol_type = other DNA
caacgtatcaacgaaatcatgatttactctgtcaatattggattgattgatgtgctcccttcatcaggcattggt

SEQ ID NO: 440176 - DNA, 75 bp, synthetic construct
  source 1..75: mol_type = other DNA
tttttgatgaatcaggtaatactggcggaaatttactcgatccattgcaacctgtttttaccttaagttcaagta

SEQ ID NO: 440177 - DNA, 75 bp, synthetic construct
  source 1..75: mol_type = other DNA
aacatcgccgttacgttattagatctgccacaacaaatcgtactggcgaaaaaaatatcgcgaatgcaggttttt

SEQ ID NO: 440178 - DNA, 75 bp, synthetic construct
  source 1..75: mol_type = other DNA
ggcaacgattgtgcccggtaaagcaggtaactgcaaagaaactcctctcacaaagtattgttcgaggactatgcc

SEQ ID NO: 440179 - DNA, 75 bp, synthetic construct
  source 1..75: mol_type = other DNA
gaactgcaacatgaaggtggcgatacctttatgggacatcaggaaattttaggtacgcgaccactgccgccgctg

SEQ ID NO: 440180 - DNA, 75 bp, synthetic construct
  source 1..75: mol_type = other DNA
ggtaaggtggcagatatcgtcaacaatccttatggcgtgagctggcaaaatctggtggatagccagcggattatg

SEQ ID NO: 440181 - DNA, 75 bp, synthetic construct
  source 1..75: mol_type = other DNA
gctggtttatgcgccggaaagtaaaatcgttctgtcgctgatgctgtttctgctgggactgatgctgtcgctggg

SEQ ID NO: 440182 - DNA, 75 bp, synthetic construct
  source 1..75: mol_type = other DNA
ctgaataaagcaggattccaggtagcagagcgccacgataatttaggcgttgggcatacacttttgatatgccaa

SEQ ID NO: 440183 - DNA, 75 bp, synthetic construct
  source 1..75: mol_type = other DNA
ggttacggtttcgtctgcacctttaacgatctggtggcgcgtaaccgtgcaggtaaggctttgatcaccttaccg

SEQ ID NO: 440184 - DNA, 75 bp, synthetic construct
  source 1..75: mol_type = other DNA
ccgcgttccaaccgcgtggatatggatcaggtgatgaaccacctcttcgctaccaccgatctggaaaagagctat

SEQ ID NO: 440185 - DNA, 75 bp, synthetic construct
  source 1..75: mol_type = other DNA
tgaacgccatcattcataactacgtggcaacgattgtgcccggtaaagcaggtaactgcaaagaaactcctctca

SEQ ID NO: 440186 - DNA, 75 bp, synthetic construct
  source 1..75: mol_type = other DNA
tgctctgcttcgcgctcttctcgctcagccaaaagcgttgctactggatgagccattcagccgtcttgatgtagc

SEQ ID NO: 440187 - DNA, 75 bp, synthetic construct
  source 1..75: mol_type = other DNA
attactattcagatggcgcatttaacgccgcactgccttatgtattcgccaacaaccccacaacattgtacgatg

SEQ ID NO: 440188 - DNA, 75 bp, synthetic construct
  source 1..75: mol_type = other DNA
atggcgcgatttgtggtgttagtgattgatagctttggcgtaggcgcaatgaaagatgtcacgttggtgcgccca

SEQ ID NO: 440189 - DNA, 75 bp, synthetic construct
  source 1..75: mol_type = other DNA
ccaagtgcaggtaagtatcaaggcgtcgtttccattgtaatgactcaatcgacagacacagccgcgcctgttcct

SEQ ID NO: 440190 - DNA, 75 bp, synthetic construct
  source 1..75: mol_type = other DNA
ggctttggaaaagtacacgcgactgataattcaaccgtatctgacaaggtggagcgcgttgaaaaaacagacaac

SEQ ID NO: 440191 - DNA, 75 bp, synthetic construct
  source 1..75: mol_type = other DNA
ggatttggcagggtacacgccaccgatggttccaccgtatcccgacaggtggaaagagtggaaaaaccggaatcc

SEQ ID NO: 440192 - DNA, 75 bp, synthetic construct
  source 1..75: mol_type = other DNA
atggcagaagaaagcgtaattaccaaactgcaatctattggtttcgttatcgctggttattccgaagctgcgatc

SEQ ID NO: 440193 - DNA, 75 bp, synthetic construct
  source 1..75: mol_type = other DNA
cggaagtcaggtaaccgactgttccgttgtttcgtgaatgccacgaaagagaatcctgcaagtttatcttgttcg

SEQ ID NO: 440194 - DNA, 75 bp, synthetic construct
  source 1..75: mol_type = other DNA
atggatgaatactcacctaaaagacatgatatcgcacagcttaagtttctctgtgaaaccctgtatcatgactgt

SEQ ID NO: 440195 - DNA, 75 bp, synthetic construct
  source 1..75: mol_type = other DNA
atgatatcgcacagcttaagtttctctgtgaaactctgtatcatgactgccttgcaaaccttgaagaaagcaatc

SEQ ID NO: 440196 - DNA, 75 bp, synthetic construct
  source 1..75: mol_type = other DNA
catttgctcatcgtttcagtaactgggtattcagaaatgtgataccgggtatcagaaaaacgggggcttatggta

SEQ ID NO: 440197 - DNA, 75 bp, synthetic construct
  source 1..75: mol_type = other DNA
cccgacaatcggtcacagccaccatacccgcgaagtcgtgccggtgctggtttatcagcaaggcctggctgctac

SEQ ID NO: 440198 - DNA, 75 bp, synthetic construct
  source 1..75: mol_type = other DNA
tatccagaagaaaggcgacttcaccgtactggtgattcaggaggtgacgccacgcctggtactgcgttccggtaa

SEQ ID NO: 440199 - DNA, 75 bp, synthetic construct
  source 1..75: mol_type = other DNA
gaaaatgcccatgttatgccgccggtggtgattgaggatgcttccgatatgctgctggcaatcactcaggcaggc

SEQ ID NO: 440200 - DNA, 75 bp, synthetic construct
  source 1..75: mol_type = other DNA
agctacaggcatgtaagcgcaaaaagcgtgagctggaggaagaagaaaaaaggctgatacgtgaataccagcctg

SEQ ID NO: 440201 - DNA, 75 bp, synthetic construct
  source 1..75: mol_type = other DNA
agacaaaaaagaagttaggctcgacgacgtagagggcagcatcactctgaactccaagtcgccgtctcaggcact

SEQ ID NO: 440202 - DNA, 75 bp, synthetic construct
  source 1..75: mol_type = other DNA
tgctggggcaaatcgccaccgcgttgggaccactggataaaccctttacgcgtaccgatctgcataagcaagcct

SEQ ID NO: 440203 - DNA, 75 bp, synthetic construct
  source 1..75: mol_type = other DNA
tggatggtcgtccggcggtgaaaaatctgctggaaatcctctccgaatggctggtgttccgccgcgataccgtgc

SEQ ID NO: 440204 - DNA, 75 bp, synthetic construct
  source 1..75: mol_type = other DNA
gctggtattcatactgcggtagaaacttgcctgcatgtgccgtggaaatatatcgtcccttctctgccctatatc

SEQ ID NO: 440205 - DNA, 75 bp, synthetic construct
  source 1..75: mol_type = other DNA
gacgggcaagtccggtccgctggcgcagtacatagtggaagatatttatgtctctggcgtgaaagaagaaaacat

SEQ ID NO: 440206 - DNA, 75 bp, synthetic construct
  source 1..75: mol_type = other DNA
actggattgcccacggtcttgctccgctggcgagccatccactgggtctggtcatgctggcgctcatctgctcct

SEQ ID NO: 440207 - DNA, 75 bp, synthetic construct
  source 1..75: mol_type = other DNA
gccgccgcaaagcacgctgaccattcatgttgggaaacgcaaaattaaactgcgtccggaagagctacagaaagt

SEQ ID NO: 440208 - DNA, 75 bp, synthetic construct
  source 1..75: mol_type = other DNA
tcagtcataaactgattaatatcgttgttttggtagcaattgtagaatacgcctatttattcctccatttctatt

SEQ ID NO: 440209 - DNA, 75 bp, synthetic construct
  source 1..75: mol_type = other DNA
tggttgatggagatgacacttatgatgcaagttctgctccagaaatgattaaccatctcataaaaaatcaattgg

SEQ ID NO: 440210 - DNA, 75 bp, synthetic construct
  source 1..75: mol_type = other DNA
tcgtcaataatggcatttgtatgtggcattattttgcattcaaatacaacaactagacgtgaaatgaaggcatta

SEQ ID NO: 440211 - DNA, 75 bp, synthetic construct
  source 1..75: mol_type = other DNA
tcggcgctgtcggcagcgctttgttcctgttgctgcaaaaacgtaccacccattcggaaaacgtgcgtatttcct

SEQ ID NO: 440212 - DNA, 75 bp, synthetic construct
  source 1..75: mol_type = other DNA
tgttccttctgttgtacctggggttgacgttatgcctgcgtcgattgacgatgcctttattgcatccgattggag

SEQ ID NO: 440213 - DNA, 75 bp, synthetic construct
  source 1..75: mol_type = other DNA
ccctgaagtttgttgccagccttcctgcgcttattgattcgattgaacaggatggacacacctgcaatctcatcg

SEQ ID NO: 440214 - DNA, 75 bp, synthetic construct
  source 1..75: mol_type = other DNA
ggcacagcttactggctggcaggctatcgacggatttaaagaaggtgaacccgcagaagcggaaatcggcgtcgc

SEQ ID NO: 440215 - DNA, 75 bp, synthetic construct
  source 1..75: mol_type = other DNA
cggaggctgccatcatggctactgtcccagccctctctcgtctgaatgatgaagacttacataaactcagttatg

SEQ ID NO: 440216 - DNA, 75 bp, synthetic construct
  source 1..75: mol_type = other DNA
ggctacccctgaatttttcgccattttggcctcagccgtggacggatttccgtggacggattttatcggtccaat

SEQ ID NO: 440217 - DNA, 75 bp, synthetic construct
  source 1..75: mol_type = other DNA
attttggcctcagccgtggacggattttatcggtccaataagcgcacagcttggttttgcgttgggatattattg

SEQ ID NO: 440218 - DNA, 75 bp, synthetic construct
  source 1..75: mol_type = other DNA
cgtcgcagcccctgtagctttggttatcggtactgtcgcaggcgttgttgcggccatccttgaagcatcgaagca

SEQ ID NO: 440219 - DNA, 75 bp, synthetic construct
  source 1..75: mol_type = other DNA
gttttgcatggggatattattgccattggtgcagaaaaaatagaaaccagaggaagaagtggggcgattgggtaa

SEQ ID NO: 440220 - DNA, 75 bp, synthetic construct
  source 1..75: mol_type = other DNA
agattaccaaatcacctggctgtaagtaaccacagagaactttacctgactgtggggggcgagttgtgcaggaac

SEQ ID NO: 440221 - DNA, 75 bp, synthetic construct
  source 1..75: mol_type = other DNA
aggcagaaatggggcgagtggggaacgtgcttaagtttggcgattttagctcaggggccgttattcatattgtta

SEQ ID NO: 440222 - DNA, 75 bp, synthetic construct
  source 1..75: mol_type = other DNA
tgtttcaatctggtcgtgacaccatcgacactgtattaaaaaccattctgccgtttatggcattcgtctcggcgc

SEQ ID NO: 440223 - DNA, 75 bp, synthetic construct
  source 1..75: mol_type = other DNA
tcaccaatttcttccgcggctgggtgaccgatctgaccaccgccatttttgagaaaaagatgggcattcaacttg

SEQ ID NO: 440224 - DNA, 75 bp, synthetic construct
  source 1..75: mol_type = other DNA
gaaatccttcctgaagcgccaaaaatccgcgcactgaatgacaagcgtaaaaaccagatccgaacgttctggcgc

SEQ ID NO: 440225 - DNA, 75 bp, synthetic construct
  source 1..75: mol_type = other DNA
atgcgcagtttctttctgacagttgtctggctcccactaaatttttcgccattttggtctcaaccgtggattgac

SEQ ID NO: 440226 - DNA, 75 bp, synthetic construct
  source 1..75: mol_type = other DNA
aacttgagttattggctgaatatgcactttttttcagtgtaatgggtggcgtcggttggcaattctcccgcagaa

SEQ ID NO: 440227 - DNA, 75 bp, synthetic construct
  source 1..75: mol_type = other DNA
cactgcgcaagcttacccaaacggccacgcagtatgtgttaaagctcgacggctggatccagaaaaataaggggc

SEQ ID NO: 440228 - DNA, 75 bp, synthetic construct
  source 1..75: mol_type = other DNA
gaaaaattcagagctgcaggccgtgctcggggtagataagcagtcgccagaaatgcaggcgctacgcaaacaggc

SEQ ID NO: 440229 - DNA, 75 bp, synthetic construct
  source 1..75: mol_type = other DNA
caccaacaggcaaagcatacgatgccctcaaagagttgggtgttaaaacctcggacagcaaaggcaatacgcgcc

SEQ ID NO: 440230 - DNA, 75 bp, synthetic construct
  source 1..75: mol_type = other DNA
cttggtcttgaaaagaaatcaccggaaatggacgcgctgagaaaacaggcacgtcagctcggggataatacagcg

SEQ ID NO: 440231 - DNA, 75 bp, synthetic construct
  source 1..75: mol_type = other DNA
gccagtcaaggccacgcaggagacgctcgatagctgcaaaaatgttggtatcgttttcggtcaggctctggccga

SEQ ID NO: 440232 - DNA, 75 bp, synthetic construct
  source 1..75: mol_type = other DNA
gcctctgctgatgatgccgccagtgcgcagattattatcgcgaaaggtggcggtgatgccgcagctatagcagcc

SEQ ID NO: 440233 - DNA, 75 bp, synthetic construct
  source 1..75: mol_type = other DNA
cggggatgcggcggccattcaggcggcgacgccggtgacgctgaatatggcgctgtccaacaggcgcacgatgga

SEQ ID NO: 440234 - DNA, 75 bp, synthetic construct
  source 1..75: mol_type = other DNA
actctgccgggaggtgttgcaccggggcatcagcttgacagacagttacgcgatacgctcgaacagattgagcgc

SEQ ID NO: 440235 - DNA, 75 bp, synthetic construct
  source 1..75: mol_type = other DNA
atcatcggcggcattggtctcgttgcgtggccggttgtcatgggaattaatgccattatcgccgctgctggcgtg

SEQ ID NO: 440236 - DNA, 75 bp, synthetic construct
  source 1..75: mol_type = other DNA
ccggtagcatggcggcggctggcgcggccggtgtcggtattgcgacaacaggaaccatggccggggttaagctgc

SEQ ID NO: 440237 - DNA, 75 bp, synthetic construct
  source 1..75: mol_type = other DNA
ctgtttgaccagcaggagggctcactgcgtaagctgacgcagacggccacgcagtatgtgctcaggcttgacggc

SEQ ID NO: 440238 - DNA, 75 bp, synthetic construct
  source 1..75: mol_type = other DNA
ccccgcgacagcgagttatggcgggtatcaggcgtatcagccggtcactgcgcctgcaggtcgctcttatatcga

SEQ ID NO: 440239 - DNA, 75 bp, synthetic construct
  source 1..75: mol_type = other DNA
cgctcgcaaaccgtcgaacgatggaagagaacgccgggttattgatggggatgcgctctgccttccagctttcaa

SEQ ID NO: 440240 - DNA, 75 bp, synthetic construct
  source 1..75: mol_type = other DNA
atgatagcgaaacaaataagctatcactatttattgagttcgaacgccggatcgtgtgtgtaccgtgggcgcgtc

SEQ ID NO: 440241 - DNA, 75 bp, synthetic construct
  source 1..75: mol_type = other DNA
tgtccggcttgatgttagcaatggttgctggtaatgcttctgcagcactggacggtggccaattaaatatcagcg

SEQ ID NO: 440242 - DNA, 75 bp, synthetic construct
  source 1..75: mol_type = other DNA
tccaggtagtacagctaaaatgaccttcggttctgttttggatttgcccctatatttccagacacctgttatcac

SEQ ID NO: 440243 - DNA, 75 bp, synthetic construct
  source 1..75: mol_type = other DNA
gagtgggagagcctcgtttggagaaaaggctgccagaagaatagagcaaacatacgggatgccggaagggtatct

SEQ ID NO: 440244 - DNA, 75 bp, synthetic construct
  source 1..75: mol_type = other DNA
tgcagggttaacgtctaatcaactggaattattgcagattttttcagccttccctgaggatgagcaacgccagat

SEQ ID NO: 440245 - DNA, 75 bp, synthetic construct
  source 1..75: mol_type = other DNA
tggatcgttcggtcagattgatgaaatagaaataagccaggaagagctaaaacgggcgcgtgatttattcctttc

SEQ ID NO: 440246 - DNA, 75 bp, synthetic construct
  source 1..75: mol_type = other DNA
tgccatcatcgcggcagcaggcgcaatgggggcaatcttcacgacggttggcagtgccgttatgacggccatcgg

SEQ ID NO: 440247 - DNA, 75 bp, synthetic construct
  source 1..75: mol_type = other DNA
tcggcggctgattttcagggactcagtgatgcactgacttacctcggtccggttgctaggacggcaggtgtaagt

SEQ ID NO: 440248 - DNA, 75 bp, synthetic construct
  source 1..75: mol_type = other DNA
aaacctacatcgaccagagtcggccaacctatcaaatcaacgtgccgggcaacggtatgccgggcggtcggttag

SEQ ID NO: 440249 - DNA, 75 bp, synthetic construct
  source 1..75: mol_type = other DNA
ggtgctaaagctaagccattcagcattactattgactgcagcaaagctaacccggctccgggtactactgcaaaa

SEQ ID NO: 440250 - DNA, 75 bp, synthetic construct
  source 1..75: mol_type = other DNA
acagcgagcaaatcgctgtcgggggatatccgggaaacacaaaaatcactgcgcgagctgaacggtcagacatcc

SEQ ID NO: 440251 - DNA, 75 bp, synthetic construct
  source 1..75: mol_type = other DNA
gtgtgctgcatgacaataacatcagggggtcaatggcgggtacggggagtagtgccgttgtcacccgattacagg

SEQ ID NO: 440252 - DNA, 75 bp, synthetic construct
  source 1..75: mol_type = other DNA
aaatgcaggctctacgcaaacaggcgcgtcagctcggcgataactcagcggcctcagcagatgatgccgccgccg

SEQ ID NO: 440253 - DNA, 75 bp, synthetic construct
  source 1..75: mol_type = other DNA
ttgttggattactcgcgcttacctctccggtcattgctcaggactgttttgaactggctggaagagattacaaaa

SEQ ID NO: 440254 - DNA, 75 bp, synthetic construct
  source 1..75: mol_type = other DNA
ataaatggagcgagagcgaaggtaaagcatactttactggagatactaaaactgcagcattgaaggtttcgtttt

SEQ ID NO: 440255 - DNA, 75 bp, synthetic construct
  source 1..75: mol_type = other DNA
ggcaattcaacgcacggagggaaaaacgcgacctcatacaattttatcaacgggaacggatatctgattgttcag

SEQ ID NO: 440256 - DNA, 75 bp, synthetic construct
  source 1..75: mol_type = other DNA
cactgtaaatggctttttcaaacccactgaggtggtgattaagtcagaccctgtaaccgcagatgtcacaatcat

SEQ ID NO: 440257 - DNA, 75 bp, synthetic construct
  source 1..75: mol_type = other DNA
accctgcaaaccgccacaaccactgaagttaatcaggccggtgttgtccaacttgccagccctggcgcaaaaccg

SEQ ID NO: 440258 - DNA, 75 bp, synthetic construct
  source 1..75: mol_type = other DNA
agactcccagcattttaatgaactggcccgctacggaattaaaccggaacatctgacagcagatccctgtctgaa

SEQ ID NO: 440259 - DNA, 75 bp, synthetic construct
  source 1..75: mol_type = other DNA
ttggtttaaaaactgtactaaaagctggtgcaggttggtttttacgacaggaggctagtgaagttgccgaagaat

SEQ ID NO: 440260 - DNA, 75 bp, synthetic construct
  source 1..75: mol_type = other DNA
aacgtgacgagttccaacgaagaaacatcgctgaaaatatcatcaagttgctaaaaccagaggcagacatttcac

SEQ ID NO: 440261 - DNA, 75 bp, synthetic construct
  source 1..75: mol_type = other DNA
atttcatcctcagagaacggttgatgacaatgcagaagcagctggaaggggcacagctatacattcgtgagcaat

SEQ ID NO: 440262 - DNA, 75 bp, synthetic construct
  source 1..75: mol_type = other DNA
tacaataagtaacgatggtggaaggataattgaatatggcaatgattctatggttctgtctggaagcatagatag

SEQ ID NO: 440263 - DNA, 75 bp, synthetic construct
  source 1..75: mol_type = other DNA
tcggaacactgtttgcactggtcggtgcaattgttaccactattccggaatacagagcctcgaaaacaatgaaga

SEQ ID NO: 440264 - DNA, 75 bp, synthetic construct
  source 1..75: mol_type = other DNA
ttaactcacaaaagtatcttgacaagtttataaaatataccatcacgcttccagatacatgtttaataaatggtc

SEQ ID NO: 440265 - DNA, 75 bp, synthetic construct
  source 1..75: mol_type = other DNA
ccgtagtactgagtgcaacattaatgtcctctgcttttgccgccgatcattatcagcaaattcgcaatgcaaccg

SEQ ID NO: 440266 - DNA, 75 bp, synthetic construct
  source 1..75: mol_type = other DNA
gcgcagctcaaccggcagcgcgaagcattggcgaaggtcagcgcacagcaggcgcacctaaaccgagtgaaagag

SEQ ID NO: 440267 - DNA, 75 bp, synthetic construct
  source 1..75: mol_type = other DNA
cggggacacagcttgaccgccagttacaggatgcgctcgaaaaatacgagcgggataaacgtgcgcgcgcccgtg

SEQ ID NO: 440268 - DNA, 75 bp, synthetic construct
  source 1..75: mol_type = other DNA
cacaaagtatgtgttaaaactcgacggctggatccagaaaaacaaatcactggcgtcaaccattggcctcattgc

SEQ ID NO: 440269 - DNA, 75 bp, synthetic construct
  source 1..75: mol_type = other DNA
actctaccgggtggcgttgcgccggggcctcaacttgaccgacagctacgcgacacactcgaacaaattgagcgc

SEQ ID NO: 440270 - DNA, 75 bp, synthetic construct
  source 1..75: mol_type = other DNA
cgcgccattctcagccgcctgcaggctcccaccggaaaagcgtttgaggccattaaggaactcggcgtcaaaacg

SEQ ID NO: 440271 - DNA, 75 bp, synthetic construct
  source 1..75: mol_type = other DNA
gaaaaattccgaactgcaggccgtgctcggggtcgataagcagtcgccagaaatgcaggcactacgcaaacaggc

SEQ ID NO: 440272 - DNA, 75 bp, synthetic construct
  source 1..75: mol_type = other DNA
acacctcggcggcggaaagctaccgttattgctggaacaacagggggagcaatggcatcccgtatctgtaccctg

SEQ ID NO: 440273 - DNA, 75 bp, synthetic construct
  source 1..75: mol_type = other DNA
ttggctactgacagggaaagaagagacaaatagagaggcgcttgatgatgacgagaaggccctgcttgatgttta

SEQ ID NO: 440274 - DNA, 75 bp, synthetic construct
  source 1..75: mol_type = other DNA
atggacatgagaaaaaagcaatacgacaccccgctagcagaaaggttagatacgatctctcaacagcatcattta

SEQ ID NO: 440275 - DNA, 75 bp, synthetic construct
  source 1..75: mol_type = other DNA
gcagtgaccttgaccgccagctccgtgacgccgtcgacaaacttgaccgcgagaaacgtgcgcgccagcgatcca

SEQ ID NO: 440276 - DNA, 75 bp, synthetic construct
  source 1..75: mol_type = other DNA
agttgccaaagatgccggtgtcagcctagaagaaaccgccgcgatgctgggtgcgttacacgatgcaaaaatcat

SEQ ID NO: 440277 - DNA, 75 bp, synthetic construct
  source 1..75: mol_type = other DNA
atgaatttgagttgatcattattgatgaaggtcattccgaaccatcgccagaatggggagggattattcgtaagt

SEQ ID NO: 440278 - DNA, 75 bp, synthetic construct
  source 1..75: mol_type = other DNA
ttatagcccatgtgaagagcatggttacgatctggcactcagccacgatcagatgcgccaactcactgctaccgg

SEQ ID NO: 440279 - DNA, 75 bp, synthetic construct
  source 1..75: mol_type = other DNA
ctcaatcagagaagattctgtcacagaaagatattaatttaccatcatttagatttgttcaaatgtttagcaagt

SEQ ID NO: 440280 - DNA, 75 bp, synthetic construct
  source 1..75: mol_type = other DNA
tcgaagtctagtaaaggtgttttacgcggactacattatcagttagaaccttacgcacaaggaaaattagtgcgc

SEQ ID NO: 440281 - DNA, 75 bp, synthetic construct
  source 1..75: mol_type = other DNA
aaattccacgccgtggtacgcacagggctattttgtttacgactccaaaaaggcgggcggcctgacggtttctca

SEQ ID NO: 440282 - DNA, 75 bp, synthetic construct
  source 1..75: mol_type = other DNA
gcagctgatttgcaaaaacgctatgacttcctggcacaaatggccggaaaagcggaaaaaagcaacaccgattaa

SEQ ID NO: 440283 - DNA, 75 bp, synthetic construct
  source 1..75: mol_type = other DNA
tcctgctcaacacgccgtacagcgcagctgaagtgtggtcgcgcttgccgcaggaagttcaggccgtgctaaacc

SEQ ID NO: 440284 - DNA, 75 bp, synthetic construct
  source 1..75: mol_type = other DNA
ttatgcgcaagggaaattggtacgttgcgttgttggtgaggtatttgatgttgcggttgatattcgcaagtcttc

SEQ ID NO: 440285 - DNA, 75 bp, synthetic construct
  source 1..75: mol_type = other DNA
gaattacgctggttagatcgtaatatagaaccataccaccgcgagcaaaaccagattcgtatcgggacgaagtat

SEQ ID NO: 440286 - DNA, 75 bp, synthetic construct
  source 1..75: mol_type = other DNA
atgacaaacatgatctcatatcagggacttgttcgcaccttccttatgttaaccaatacctacacctttcagcga

SEQ ID NO: 440287 - DNA, 75 bp, synthetic construct
  source 1..75: mol_type = other DNA
ctaataacttctataatagaaattatgaaagatgtttaaaatttgatgatatagaattaagcatcaaatggccaa

SEQ ID NO: 440288 - DNA, 75 bp, synthetic construct
  source 1..75: mol_type = other DNA
ctggcgcgatatattgattccggatatcaggctgagtttgaatgtgaaggagcagcagataaatggggcatctat

SEQ ID NO: 440289 - DNA, 75 bp, synthetic construct
  source 1..75: mol_type = other DNA
gcgggaagaaaaatactgatgaaaggtacctgtgttttccctctgggagaaccagttaagggaacacataatatt

SEQ ID NO: 440290 - DNA, 75 bp, synthetic construct
  source 1..75: mol_type = other DNA
acgatttcttcctcaacctgccagaaatcgatcgtagcaaactggaacgtattgatattcgtacatcgcagctga

SEQ ID NO: 440291 - DNA, 75 bp, synthetic construct
  source 1..75: mol_type = other DNA
gcagacagccattccgcaagttccggtaactccggatagttggataagctgtagtgagcgaatgccggacgacag

SEQ ID NO: 440292 - DNA, 75 bp, synthetic construct
  source 1..75: mol_type = other DNA
gaacctgtaagccaaacttacaagttaacttttgagcaatggctggaacagcagcacggcaaaattgatattgat

SEQ ID NO: 440293 - DNA, 75 bp, synthetic construct
  source 1..75: mol_type = other DNA
atttccatattggtgcatttttattctcagagagaaaaggtcatcttctggaatactggaaagctgaaattatca

SEQ ID NO: 440294 - DNA, 75 bp, synthetic construct
  source 1..75: mol_type = other DNA
gccgttccgccagttcctgtaatacaggctgatgtcgcgcaggcaattgaaaaactcaaacggaaattagtggaa

SEQ ID NO: 440295 - DNA, 75 bp, synthetic construct
  source 1..75: mol_type = other DNA
gtgacaggcgaggtatcggtgattgtctggatgaggctgagcaagagcttatcgttaccattaacaaacatgcca

SEQ ID NO: 440296 - DNA, 75 bp, synthetic construct
  source 1..75: mol_type = other DNA
ttatacagaatcaggacttcaacgttccacatcttatactcagtcaagtatagaaaaaaacgctttacatcggcc

SEQ ID NO: 440297 - DNA, 75 bp, synthetic construct
  source 1..75: mol_type = other DNA
ggcaggagaacttcacattgacggcaccggtatcaggtactgttgctgcggtgctggtcagacagggacagtctg

SEQ ID NO: 440298 - DNA, 75 bp, synthetic construct
  source 1..75: mol_type = other DNA
caagatataaatattatttggccaaatattgcagagcctctcttatctgacaaagataaactagctaaaaatatc

SEQ ID NO: 440299 - DNA, 75 bp, synthetic construct
  source 1..75: mol_type = other DNA
caactaattattatgcccctgccagtgatagaggcattgcatggaatgatcccacgattggtattaggtggcccg

SEQ ID NO: 440300 - DNA, 75 bp, synthetic construct
  source 1..75: mol_type = other DNA
ggtaaaggcttcgtgttgccccgccattcaggtatcgtcattcacggtaatgtaaagatcggtgagaatgtgatt

SEQ ID NO: 440301 - DNA, 75 bp, synthetic construct
  source 1..75: mol_type = other DNA
ctattgctgctgtactgatcaaacaggggcagtctgtgaaagcatctgaaccggtcatgactctcattcccgata

SEQ ID NO: 440302 - DNA, 75 bp, synthetic construct
  source 1..75: mol_type = other DNA
taattcctcaatatgcaggatatgtaacacaactgactgtatccgaaggagaacacgtaactgcagggactcaac

SEQ ID NO: 440303 - DNA, 75 bp, synthetic construct
  source 1..75: mol_type = other DNA
taacattaatgatttcaatagcagcaatggcacgaagcatcactgggaaatcactaacaccttccgttaccgcat

SEQ ID NO: 440304 - DNA, 75 bp, synthetic construct
  source 1..75: mol_type = other DNA
cgtggcgtgaccgtagtgaataatttcgacgctaaacgctatctcggcacctggtatgagattgcccgttttgat

SEQ ID NO: 440305 - DNA, 75 bp, synthetic construct
  source 1..75: mol_type = other DNA
gtcaggcgagcgtagtttctccttttgaatacgaacaaggtttaaacctgctgttctcttccctggggatctttg

SEQ ID NO: 440306 - DNA, 75 bp, synthetic construct
  source 1..75: mol_type = other DNA
aaaaatgacgtcctgttgacagataacatcagtcggtcctttttcctgcgccatcccggtaatgttactgagctc

SEQ ID NO: 440307 - DNA, 75 bp, synthetic construct
  source 1..75: mol_type = other DNA
aatttttctgttgttttttccgcgcagcctgttgatgaaacctttgcgaaggagtgcaaggtgagggtaaatatc

SEQ ID NO: 440308 - DNA, 75 bp, synthetic construct
  source 1..75: mol_type = other DNA
aagagcaaaaattagggcaacagatcattgatgcttttcagaatgaaataacacatcgagtacaatgcgtttttc

SEQ ID NO: 440309 - DNA, 75 bp, synthetic construct
  source 1..75: mol_type = other DNA
cagcgacagctgcatttctggtggttgcctgtagttctcccacaccaccgcgtggcgtgaccgtggtaaataatt

SEQ ID NO: 440310 - DNA, 75 bp, synthetic construct
  source 1..75: mol_type = other DNA
gactgccgcctcaaccggaaagctggacaaactgaccgctgcgtttaaagcctcagacgggaagaccgcagagct

SEQ ID NO: 440311 - DNA, 75 bp, synthetic construct
  source 1..75: mol_type = other DNA
ggaatgcatgccatcacaccgcgtccggtcgcagaaaacggtcaggttgttattcgaccaatgatgtaccttgct

SEQ ID NO: 440312 - DNA, 75 bp, synthetic construct
  source 1..75: mol_type = other DNA
cggtcgcagaaaacggtcaggttgttattcgtcccatgatgtaccttgctctcagctatgaccatcgcattatcg

SEQ ID NO: 440313 - DNA, 75 bp, synthetic construct
  source 1..75: mol_type = other DNA
acatcagtcggtcctttttcctgcgccatcccggtaatgttactgagctccggattgacgaatgcattgtcagaa

SEQ ID NO: 440314 - DNA, 75 bp, synthetic construct
  source 1..75: mol_type = other DNA
ttgcgccggtgggggaactgttcacgccactgaaaccggtgtttgactggctgggcgaaaagttacaggccgcgt

SEQ ID NO: 440315 - DNA, 75 bp, synthetic construct
  source 1..75: mol_type = other DNA
aaatggccgcgctccgcaaacaggcgcgccagctcggcgacaataccgccgcctcggcggatgatgcagccggtg

SEQ ID NO: 440316 - DNA, 75 bp, synthetic construct
  source 1..75: mol_type = other DNA
tgtcgagctgatggggttcgataaagattcagaccgcgaagcgctggacagtatccttcaggaagtgtgggagga

SEQ ID NO: 440317 - DNA, 75 bp, synthetic construct
  source 1..75: mol_type = other DNA
ctgatgtgctgatttttgaaccgcgtgtgtttggtgatgcgcggggtttcttctttgagagcttcagcagcaagg

SEQ ID NO: 440318 - DNA, 75 bp, synthetic construct
  source 1..75: mol_type = other DNA
gagactgcggaatttttatataaaacgacgaattattatcatcctgagagtgatagaggaattatttggaatgat

SEQ ID NO: 440319 - DNA, 75 bp, synthetic construct
  source 1..75: mol_type = other DNA
gatgttccacgtttacctattccgaaagtgtctgagtttgttcaaaaatacatcggggataaagttcgccaagcc

SEQ ID NO: 440320 - DNA, 75 bp, synthetic construct
  source 1..75: mol_type = other DNA
aacctatggggtgtgggaaggtgtaattttgtcagaaacgaataaaaagcaattctggatcccaccgggacttgc

SEQ ID NO: 440321 - DNA, 75 bp, synthetic construct
  source 1..75: mol_type = other DNA
atctgcgtgctgagctgaaatccctgtccgatacgctggaagaggtgctaagcgcctcaggcgagaagtcaaaag

SEQ ID NO: 440322 - DNA, 75 bp, synthetic construct
  source 1..75: mol_type = other DNA
agcaacgtttggcaagtgggttggggtgaatctttctgctgagaataaacggcagttgtggatacctgaaggttt

SEQ ID NO: 440323 - DNA, 75 bp, synthetic construct
  source 1..75: mol_type = other DNA
accgtgactaccgcaaagtggctgaactgcatgtcgattccggctgggttcctccagatactaacgttgaagagt

SEQ ID NO: 440324 - DNA, 75 bp, synthetic construct
  source 1..75: mol_type = other DNA
cgaatattgccgaccaactggcgttattgcaggacaaagtcgcaccgtttgatggcaaactggcgaaagcacaaa

SEQ ID NO: 440325 - DNA, 75 bp, synthetic construct
  source 1..75: mol_type = other DNA
gaaacttatctaccgtctggctcgctgggtgccgcgtttgctgccggatggtcgccgtctgcgcccaaccgaagt

SEQ ID NO: 440326 - DNA, 75 bp, synthetic construct
  source 1..75: mol_type = other DNA
gttaatcaacgggttgcaatgctctcacctcaaaatattcgtggcgaactattaacacattggctaaatcgcccc

SEQ ID NO: 440327 - DNA, 75 bp, synthetic construct
  source 1..75: mol_type = other DNA
tcttaatagtctaaatctgccgatcaacgagccccccgcactgttaaaccgagtcagcgcacaaacaatggagga

SEQ ID NO: 440328 - DNA, 75 bp, synthetic construct
  source 1..75: mol_type = other DNA
ggtcagccgacctgaatgggggatgatgccgggttggttaatggcggctggcttggtagcctggtttgtcggctg

SEQ ID NO: 440329 - DNA, 75 bp, synthetic construct
  source 1..75: mol_type = other DNA
aaccggcccccgactggcagacaccgctgaacgggattatttcatcctcagagaacggctgatggcaatgcagaa

SEQ ID NO: 440330 - DNA, 75 bp, synthetic construct
  source 1..75: mol_type = other DNA
atgagcagagtaaccgcgattatatctgctctgattatctgcatcgtcgtctgtctgtcgtgggcggtcaatcat

SEQ ID NO: 440331 - DNA, 75 bp, synthetic construct
  source 1..75: mol_type = other DNA
gcagacaccgctgaacgggattatttcactctcagagaacggttgatgctgatgcagaagcagctggaaggggcg

SEQ ID NO: 440332 - DNA, 75 bp, synthetic construct
  source 1..75: mol_type = other DNA
gccacctgtccaggctccgtgcgtgaagcccccaccacctccggcgtggataatgcaaccggcccccgactggca

SEQ ID NO: 440333 - DNA, 75 bp, synthetic construct
  source 1..75: mol_type = other DNA
gatgcgagagctgaaaatgaaactctgcgcgctgatgttgccgctggtcgtaagcgcctgcggatcaacgccacc

SEQ ID NO: 440334 - DNA, 75 bp, synthetic construct
  source 1..75: mol_type = other DNA
tcgctggaagcagagccagttgcttatattttcaaacatccggccgggaaattattctgggctttaacggatgaa

SEQ ID NO: 440335 - DNA, 75 bp, synthetic construct
  source 1..75: mol_type = other DNA
gtgatgttgctgcactcgatgcaaagtactcgagagaattagccaatgcgaaagctgaaaatgaaactctgcgcg

SEQ ID NO: 440336 - DNA, 75 bp, synthetic construct
  source 1..75: mol_type = other DNA
gctgcacgtcaacgccagatgtcccgcgaacggaacggccggcgccagcggcgtgggcgatgcttccggccccag

SEQ ID NO: 440337 - DNA, 75 bp, synthetic construct
  source 1..75: mol_type = other DNA
cgtgctgatgtttctgctggtcgtaagtggctgcacgtcaaagcagtctgtccggacatgcataaaaccaccgcc

SEQ ID NO: 440338 - DNA, 75 bp, synthetic construct
  source 1..75: mol_type = other DNA
gtgctctgctcccgtggcgggttactctgcctgcctgaccagcttcacttcgtcaatacggttctcactgcacgc

SEQ ID NO: 440339 - DNA, 75 bp, synthetic construct
  source 1..75: mol_type = other DNA
tagcgggtggttctggtacacgtctttatcctgtgactatggctgtcagtaaacagctattacctatttatgata

SEQ ID NO: 440340 - DNA, 75 bp, synthetic construct
  source 1..75: mol_type = other DNA
atactcgagggaattagccgatgcgagagctgaaaatgaaactcttcgcgctgacgttgccgctggtcgtaagcg

SEQ ID NO: 440341 - DNA, 75 bp, synthetic construct
  source 1..75: mol_type = other DNA
atcagcaatggtccttattatattcttgcgttgggagtagcgatgcctcatgcacggccagaatgtggggcgctt

SEQ ID NO: 440342 - DNA, 75 bp, synthetic construct
  source 1..75: mol_type = other DNA
attaacaacggatcttattatattctcgcagcaggcgtagcaatgcctcatgcgcgaccagaatgtggggcgctc

SEQ ID NO: 440343 - DNA, 75 bp, synthetic construct
  source 1..75: mol_type = other DNA
tgcaggtgcgccagcgcgatgttgctgcgctcgatgcaaaatactcgagggaattagccgatgcgagagctgaaa

SEQ ID NO: 440344 - DNA, 75 bp, synthetic construct
  source 1..75: mol_type = other DNA
ggaatgtggggcgcttaaaaccgggatgtctttgacattacttgaacaaggtgtttattttccggggaatgacga

SEQ ID NO: 440345 - DNA, 75 bp, synthetic construct
  source 1..75: mol_type = other DNA
actaaatcagtaagttggcagcatcacccaatctcagttatacattcagcaaaagattggcaggaagctatcgat

SEQ ID NO: 440346 - DNA, 75 bp, synthetic construct
  source 1..75: mol_type = other DNA
ggcccttattatattctcgcaccaggcgtggcaatgcctcatgcgcgaccggaatgtggggcgcttaaaaccggg

SEQ ID NO: 440347 - DNA, 75 bp, synthetic construct
  source 1..75: mol_type = other DNA
caacgtgatgtagcagaactcgatgccagatatacaaaggagcttgctgatgctaacgcgactatcgaaagtctc

SEQ ID NO: 440348 - DNA, 75 bp, synthetic construct
  source 1..75: mol_type = other DNA
ttattaccgtctccgaagtggaatcgacaggataaccgcgcaggttaactacttgcaggaatacatcaggacgca

SEQ ID NO: 440349 - DNA, 75 bp, synthetic construct
  source 1..75: mol_type = other DNA
tcagtgttatttttttatttagcattataactatgttgttgccagataatctgagtgattttttcattaattggg

SEQ ID NO: 440350 - DNA, 75 bp, synthetic construct
  source 1..75: mol_type = other DNA
tattatttttttatcggcattggtttctgcacgttcgtctctgattggtatttttctgtcgatcataattcttat

SEQ ID NO: 440351 - DNA, 75 bp, synthetic construct
  source 1..75: mol_type = other DNA
atgagcagagtaaccgcgattatctcagcgctggttatctgcatcatcgtttgcctgtcatgggctgttaatcat

SEQ ID NO: 440352 - DNA, 75 bp, synthetic construct
  source 1..75: mol_type = other DNA
gacagtccgggatgcaaaaggcaacctgctcaatgacgtcaaggtcactttcaatgttaattcagcagcagcgaa

SEQ ID NO: 440353 - DNA, 75 bp, synthetic construct
  source 1..75: mol_type = other DNA
atgctgatttctacatatcaagagcgccagacacgcaacagagaaaaaataaaacaactgctgaacttcctgaaa

SEQ ID NO: 440354 - DNA, 75 bp, synthetic construct
  source 1..75: mol_type = other DNA
tcgggatggattaacggcgaccgggccacctttatcagccagtatcaggtgaaacatcgcccggacgggttatta

SEQ ID NO: 440355 - DNA, 75 bp, synthetic construct
  source 1..75: mol_type = other DNA
gtaaggaacgcaataatgaaaaaattcgcgttctgctgaattttttaaaagaggaaacgtatagcgactttcaaa

SEQ ID NO: 440356 - DNA, 75 bp, synthetic construct
  source 1..75: mol_type = other DNA
tgcgcgaaagtgaggcgttaacactttgggtgacggatgtatttgaagacccgtataacccagacagtgctgtgg

SEQ ID NO: 440357 - DNA, 75 bp, synthetic construct
  source 1..75: mol_type = other DNA
tgatgctatcgcatttcccgaaatgcactgggaaaaattctatacgtgtggtgttggtggctctggcgatccacg

SEQ ID NO: 440358 - DNA, 75 bp, synthetic construct
  source 1..75: mol_type = other DNA
aacccgggcccgttatcagtcgataattgccagtcacctgctggcccgtacccgcaagaactggatttatgtttt

SEQ ID NO: 440359 - DNA, 75 bp, synthetic construct
  source 1..75: mol_type = other DNA
gtgaaaagtgcgcgccttgtgttggctgccatcctgctgtttctggtggtggcggtggatttcaccggacggctg

SEQ ID NO: 440360 - DNA, 75 bp, synthetic construct
  source 1..75: mol_type = other DNA
atggtggatttcaccagcagaatcatgtcggtgctggcggatggggtgctggtctgcggcattgtggtattgctg

SEQ ID NO: 440361 - DNA, 75 bp, synthetic construct
  source 1..75: mol_type = other DNA
atccagagtcgcgacgctgaggaccagaatcagcccaacgtgaaacaaaatgagccagaagcggaacaaaacagc

SEQ ID NO: 440362 - DNA, 75 bp, synthetic construct
  source 1..75: mol_type = other DNA
ggcgataagtgattacgcgccgaatggtttgcaggtggaaggcaaagagacggtgcaaaaaattgttaccggtgt

SEQ ID NO: 440363 - DNA, 75 bp, synthetic construct
  source 1..75: mol_type = other DNA
ctggaaaggtgaatctccggtcattcgcggcatgaagcgtaaccgtttaaaaacgttgctggcaaatgatatcaa

SEQ ID NO: 440364 - DNA, 75 bp, synthetic construct
  source 1..75: mol_type = other DNA
atcctgtcagttttatcggacggggcgttggtggcagtagctgtaacattggtatggccgatattaaaaacagct

SEQ ID NO: 440365 - DNA, 75 bp, synthetic construct
  source 1..75: mol_type = other DNA
cgtgagttacgcgaagaattgggcatcgaagcaactgtgggtgagtatgttgccagccatcagcgagaagtgtcg

SEQ ID NO: 440366 - DNA, 75 bp, synthetic construct
  source 1..75: mol_type = other DNA
ctgaatatgagcgatccgcaaaccatgtcagcattgatgagcagcattatccagcatgaaaatggaagaaatatc

SEQ ID NO: 440367 - DNA, 75 bp, synthetic construct
  source 1..75: mol_type = other DNA
ctcgctgtttggcgcactgacgattgcgctgcgcattctgaacagtacgttctggatgtcgccgattggcctcat

SEQ ID NO: 440368 - DNA, 75 bp, synthetic construct
  source 1..75: mol_type = other DNA
tcaggaggcggctaatctgatcgctgacaagcagggggctgtaaatgccagggcggtacagcaattgaaaggacc

SEQ ID NO: 440369 - DNA, 75 bp, synthetic construct
  source 1..75: mol_type = other DNA
cgggattatttcactctcagagagcggttgatgctgatgcagaagcagctggaaggggcgcaggaatatatccgc

SEQ ID NO: 440370 - DNA, 75 bp, synthetic construct
  source 1..75: mol_type = other DNA
tataacttcgccattgaacaggggctactggagcagttcatcaatccattccagaaaacatcgctgcgggaatct

SEQ ID NO: 440371 - DNA, 75 bp, synthetic construct
  source 1..75: mol_type = other DNA
accgcgatattaaggtgacgctcagctatattgaacacaatgtcgagatgctcagaagttgcgtggagagagatt

SEQ ID NO: 440372 - DNA, 75 bp, synthetic construct
  source 1..75: mol_type = other DNA
tccaaaattgatctttttatatatcaacatgtatcgtcaacctttgatccttttttttgcacagatcatatttgt

SEQ ID NO: 440373 - DNA, 75 bp, synthetic construct
  source 1..75: mol_type = other DNA
ggcaactattttaccggtcctggcagtattgcccgatcctatcgtacggcgaaaacgacgatggtggtgggtaaa

SEQ ID NO: 440374 - DNA, 75 bp, synthetic construct
  source 1..75: mol_type = other DNA
actccgtcatgaatggatttcttcaagcagtgtccttattgttggattacatggaagcaaatagaggattgtttg

SEQ ID NO: 440375 - DNA, 75 bp, synthetic construct
  source 1..75: mol_type = other DNA
gccagcggtaacatgcgtgacatggccgctatctttacgggcgttggacagaaactcagcagcatgccgtattac

SEQ ID NO: 440376 - DNA, 75 bp, synthetic construct
  source 1..75: mol_type = other DNA
ggacgctgcgcgatcttctctggaaaacctctcccggtttattcgtaataatcccggagcagaaggctttctgaa

SEQ ID NO: 440377 - DNA, 75 bp, synthetic construct
  source 1..75: mol_type = other DNA
aaagccataaaaggcattctggcgctcggagacatcatcgggcggctgttcttcaggctaattgagggaacatcc

SEQ ID NO: 440378 - DNA, 75 bp, synthetic construct
  source 1..75: mol_type = other DNA
gagcatcatcaccacgataacaaagatcaccacgaccatggacatcatcaccatcacgaacatggcgagggcgat

SEQ ID NO: 440379 - DNA, 75 bp, synthetic construct
  source 1..75: mol_type = other DNA
gctcatgcacgagcccatgccaatgacatcaaacgacgcttcaatggcagagaagtgaccaactggcaaatttta

SEQ ID NO: 440380 - DNA, 75 bp, synthetic construct
  source 1..75: mol_type = other DNA
tcaccatcacgaacatggcgagtatcaggatgcccatgcacgagcccatgccaatgacattaaacgacgctttga

SEQ ID NO: 440381 - DNA, 75 bp, synthetic construct
  source 1..75: mol_type = other DNA
tgcgcaggttgatgtcatcaaatctgaaaccatcgcgacgctgcttgctgaagacgaaaccctggacgaaaacga

SEQ ID NO: 440382 - DNA, 75 bp, synthetic construct
  source 1..75: mol_type = other DNA
agccggagccggtaaacgaagcgctgaacgcgcgcgttgctgcactggctgaagctcgcctgagcgatgcttacc

SEQ ID NO: 440383 - DNA, 75 bp, synthetic construct
  source 1..75: mol_type = other DNA
gaacatcaatgaactggtgaaagaagccggtaaaccacgttgggactggcagccggagccggtaaacgaagcgct

SEQ ID NO: 440384 - DNA, 75 bp, synthetic construct
  source 1..75: mol_type = other DNA
ttctttggtgggccggtaggtctggataacctggcggcagccattggcgaagaacgtgaaaccattgaggatgtg

SEQ ID NO: 440385 - DNA, 75 bp, synthetic construct
  source 1..75: mol_type = other DNA
ttgattcagcaaggctttttgcagcgtacaccgcgtgggcgtatggcgacgacgcgggcgtggaatcactttggc

SEQ ID NO: 440386 - DNA, 75 bp, synthetic construct
  source 1..75: mol_type = other DNA
agaacgtgaaaccattgaggatgtactggagccttatttgattcagcaaggctttttgcagcgtacaccgcgtgg

SEQ ID NO: 440387 - DNA, 75 bp, synthetic construct
  source 1..75: mol_type = other DNA
ggatcaacgccacctgctccggtaccgtgcgtgaagccaccggcacctccggcgtggataatgcaaccggccccc

SEQ ID NO: 440388 - DNA, 75 bp, synthetic construct
  source 1..75: mol_type = other DNA
aacgggattatttcaccctccgggaacgactggtaatgatgcaggcccaacttgaaggtgctcagcaatacataa

SEQ ID NO: 440389 - DNA, 75 bp, synthetic construct
  source 1..75: mol_type = other DNA
aaggtttcgattatatggatcgtaaattattgctggcggtgatcgataagtttttcggcgggccggtaggactgg

SEQ ID NO: 440390 - DNA, 75 bp, synthetic construct
  source 1..75: mol_type = other DNA
cgttatcggtaaaggcggctctgttatccgtgccctgaccgaagaaaccggcaccaccatcgaaatcgaagatga

SEQ ID NO: 440391 - DNA, 75 bp, synthetic construct
  source 1..75: mol_type = other DNA
cgggattatttcaccctcagagaacggctgatgacaatgcaaaagcaactggaaggggcacaggaatatatccgt

SEQ ID NO: 440392 - DNA, 75 bp, synthetic construct
  source 1..75: mol_type = other DNA
cgggattatttcaccctcagagaccgattgatgacgatgcagaagcaactggaaggggcgcaggaatatatccgc

SEQ ID NO: 440393 - DNA, 75 bp, synthetic construct
  source 1..75: mol_type = other DNA
taccgtgataacgccatcgcctacaaagagcagcgcgataacaaggccagtgaactggagaaggcgaacgccacc

SEQ ID NO: 440394 - DNA, 75 bp, synthetic construct
  source 1..75: mol_type = other DNA
ctggcagacgccgctgaacgggattatttcatcctcagagaacggttgatgacaatgcagaagcagctggaaggg

SEQ ID NO: 440395 - DNA, 75 bp, synthetic construct
  source 1..75: mol_type = other DNA
aagagcagcgcgataaagccacatccacaatcgctgacatgcagaagcgtcaacgtgacgtagcagaacttgacg

SEQ ID NO: 440396 - DNA, 75 bp, synthetic construct
  source 1..75: mol_type = other DNA
gtactcgagagaattagccaatgcgaaagctgaaaatgaaactctgcgcgctgatgttgccgctggtcgtaagcg

SEQ ID NO: 440397 - DNA, 75 bp, synthetic construct
  source 1..75: mol_type = other DNA
ttattgtcctgctggtagcctgtggtgcgcttagtctggggctgaatcattaccgcgataacgccataacctaca

SEQ ID NO: 440398 - DNA, 75 bp, synthetic construct
  source 1..75: mol_type = other DNA
ctacgctgctggtcgtatcccgggtagctttttccgtcgtgaaggccgcccaagcgaaggcgaaaccctgatcgc

SEQ ID NO: 440399 - DNA, 75 bp, synthetic construct
  source 1..75: mol_type = other DNA
ctcgtgacgcgcaggttcttgatgaactgatgggcgaacgtactgacaccttcctgttccactacaacttccctc

SEQ ID NO: 440400 - DNA, 75 bp, synthetic construct
  source 1..75: mol_type = other DNA
ccgctctgattatctgcatcgtcgtctgtctgtcatgggcggtcaatcattaccgtgataacgccatcgcctaca

SEQ ID NO: 440401 - DNA, 75 bp, synthetic construct
  source 1..75: mol_type = other DNA
agaactgaagctggcgaacgcaaccattactgacatgcagcagagacagcgtgatgttaatgcactcgatgctaa

SEQ ID NO: 440402 - DNA, 75 bp, synthetic construct
  source 1..75: mol_type = other DNA
ctcaccaaccttgaaccacacgatgtgttgtttattgatgagatccaccgtctttcgcctgtggtggaagaagtg

SEQ ID NO: 440403 - DNA, 75 bp, synthetic construct
  source 1..75: mol_type = other DNA
cctccggcgtggataatgcaaccgcccccgactggcagacacagttgaacgggattatttcactctcagagagcg

SEQ ID NO: 440404 - DNA, 75 bp, synthetic construct
  source 1..75: mol_type = other DNA
gtgggggcaacaatgagcagggtaaccgcgattatttatgctctggttatctgcatcatcgtctgcctgtcatgg

SEQ ID NO: 440405 - DNA, 75 bp, synthetic construct
  source 1..75: mol_type = other DNA
ctcggtatcagagacggaatcatcagcgaccaggcagcattgagaatgcttcaggaatatatccgcactcagtgt

SEQ ID NO: 440406 - DNA, 75 bp, synthetic construct
  source 1..75: mol_type = other DNA
ctgacgttgccgctggtcaccgcagcctgcggatcaacgccacctgtccaggtcccgtgcgtgaagccaccggca

SEQ ID NO: 440407 - DNA, 75 bp, synthetic construct
  source 1..75: mol_type = other DNA
cgggattatttcaccctcagagagcggctgatgacgatgcagatgcaactggaaggggcgcaggaatatatccgc

SEQ ID NO: 440408 - DNA, 75 bp, synthetic construct
  source 1..75: mol_type = other DNA
ttttttgggcgtaattttctggtatataacactaatgaatatttttagattcaacaggttgtttacatctagaat

SEQ ID NO: 440409 - DNA, 75 bp, synthetic construct
  source 1..75: mol_type = other DNA
tgatgacaatgcagaagcagctggaaggggcgcaggaatatatccgcactcagtgcactaagctggctttttatt

SEQ ID NO: 440410 - DNA, 75 bp, synthetic construct
  source 1..75: mol_type = other DNA
tgatagttttcaatctgtcttgattttattggttttagatattgtattttacaacaggaataaatatgaagcata

SEQ ID NO: 440411 - DNA, 75 bp, synthetic construct
  source 1..75: mol_type = other DNA
gagttcgaggttagcgccgacctgatgcaccatcaacggcggattatcggctcctgggtgaccagtctgttccat

SEQ ID NO: 440412 - DNA, 75 bp, synthetic construct
  source 1..75: mol_type = other DNA
ccgctctggttatctgcatcattgtctgcctgtcgtgggcggtcaatcattaccgtgataacgccatcgcctaca

SEQ ID NO: 440413 - DNA, 75 bp, synthetic construct
  source 1..75: mol_type = other DNA
ggctgatgacaatgcagaagcaggtggaaggggcacaggactatatccgcactcagtgtactaagcaggcttttt

SEQ ID NO: 440414 - DNA, 75 bp, synthetic construct
  source 1..75: mol_type = other DNA
acgggattatttcatcctcagagaacggctgatggcaatgcagaagcaactggaaggagcacaggaatatatccg

SEQ ID NO: 440415 - DNA, 75 bp, synthetic construct
  source 1..75: mol_type = other DNA
cgctgaacgggattatttcatcctcagagaacggttgatgacaatgcagaagcagctggaaggggcgcaggaata

SEQ ID NO: 440416 - DNA, 75 bp, synthetic construct
  source 1..75: mol_type = other DNA
gtggttatcattgtcctgctggtggcctgtggtgcgcttagtctggggctgaatcattaccgtgatcacgccatc

SEQ ID NO: 440417 - DNA, 75 bp, synthetic construct
  source 1..75: mol_type = other DNA
atgcagcagcgccagcgtgatgttgctgcacttgatgccagatactcgagggaattagctgatgcgagagctgaa

SEQ ID NO: 440418 - DNA, 75 bp, synthetic construct
  source 1..75: mol_type = other DNA
tgcgcttagcctggggttgaatcattaccgtgataacgccatcacctacaaagtgcagcgcgataaaaaagcctg

SEQ ID NO: 440419 - DNA, 75 bp, synthetic construct
  source 1..75: mol_type = other DNA
aaaggtcataaaaccgtctatgttgccggcgataccctgtggaatgccgacgtgaacaaggcaatcgtgaaatac

SEQ ID NO: 440420 - DNA, 75 bp, synthetic construct
  source 1..75: mol_type = other DNA
gtgatgttgctgcacttgatgccagatactcgagggaattagccgatgcgagagctgaaaatgaaactctgcgtg

SEQ ID NO: 440421 - DNA, 75 bp, synthetic construct
  source 1..75: mol_type = other DNA
cgtgaagccaccggcacctccggcgtgggcaatgatgccgccgtcgaactctctccggttgctggacgaaacgtt

SEQ ID NO: 440422 - DNA, 75 bp, synthetic construct
  source 1..75: mol_type = other DNA
attactgatatgcagcagcgccagcgcgatgttgctgcgctcgatgcaaaatactcgagggaattagccgatgcg

SEQ ID NO: 440423 - DNA, 75 bp, synthetic construct
  source 1..75: mol_type = other DNA
gacataaatctgatggctttcttgcaacaagacgcgttgcacctgagcgatctgtttcgtagttccgcccagcag

SEQ ID NO: 440424 - DNA, 75 bp, synthetic construct
  source 1..75: mol_type = other DNA
gcactgcgatcattgttggtaagaaaggtcagcgtgtgtggaccggcggtggtgatgaagaagcactgtcgaaag

SEQ ID NO: 440425 - DNA, 75 bp, synthetic construct
  source 1..75: mol_type = other DNA
cactattacgatgaactgccgacggaagggaacgaacatggtcaggcgttccgcgatatccagctggaacaggaa

SEQ ID NO: 440426 - DNA, 75 bp, synthetic construct
  source 1..75: mol_type = other DNA
caggtatcatcgcaggttctcgcatcagcgaagcccgaatcccggcgctccgtgaacgggcgaacgggctgcttt

SEQ ID NO: 440427 - DNA, 75 bp, synthetic construct
  source 1..75: mol_type = other DNA
gcggcaaaagcggcattttatcctgacatcaacctgatggccttcctgcaacaggatgcgttgcacttaagcgat

SEQ ID NO: 440428 - DNA, 75 bp, synthetic construct
  source 1..75: mol_type = other DNA
gaatgacgtggcgcaggcagccagtcagtcaggttcagacactggcggagaaaaaccagcatcaggcgcaaattg

SEQ ID NO: 440429 - DNA, 75 bp, synthetic construct
  source 1..75: mol_type = other DNA
gagcaggtgctggtggtcggggcggggccaatcggtctgggcgcggcggcaatcgctaaagccgatggcgcacag

SEQ ID NO: 440430 - DNA, 75 bp, synthetic construct
  source 1..75: mol_type = other DNA
tttggcggctctctggcgcagaaagtgatcgacgcgacaggtaatcaacatgcgatgaataacactgttaatctg

SEQ ID NO: 440431 - DNA, 75 bp, synthetic construct
  source 1..75: mol_type = other DNA
tttggtggttcgctggcgcagaaagtgatcgacgcgacaggtaatcaacatgcgatgaataacaccgtgaatttg

SEQ ID NO: 440432 - DNA, 75 bp, synthetic construct
  source 1..75: mol_type = other DNA
atacttcgcgcacgacattcgcgttatccgtctgccgcgtcacggtgcatcctgcccggtaggcatgggcgtctc

SEQ ID NO: 440433 - DNA, 75 bp, synthetic construct
  source 1..75: mol_type = other DNA
atgtccacaatgaaagtattaatttgtcaggaaataaagaatttagtatgggaagtccgggaaagaccggtgcca

SEQ ID NO: 440434 - DNA, 75 bp, synthetic construct
  source 1..75: mol_type = other DNA
cgatattcatgcctggggtggaaatcaaccattttttagttatccacgcgttttaggccatgaaatatgtgggga

SEQ ID NO: 440435 - DNA, 75 bp, synthetic construct
  source 1..75: mol_type = other DNA
atgtattgccacgcgaaactaaaaaatatattgcatcacacggtaatctccgcgcaccttttcttacctgactat

SEQ ID NO: 440436 - DNA, 75 bp, synthetic construct
  source 1..75: mol_type = other DNA
ctggcgcggtgccgcgccaatccaacgttcgttatgggcgggagatgcagaaaccggcgtgaccattatgcaaat

SEQ ID NO: 440437 - DNA, 75 bp, synthetic construct
  source 1..75: mol_type = other DNA
ccggtcaaagtgctggctgaagaaaaaggcttacccgtttttcagcctgtttccttgcgtccacaagaaaaccag

SEQ ID NO: 440438 - DNA, 75 bp, synthetic construct
  source 1..75: mol_type = other DNA
ggccaatgagctggctggaaattgaaggacagccggttaaagtctggaaagcgtcggtcattgatacggcaacca

SEQ ID NO: 440439 - DNA, 75 bp, synthetic construct
  source 1..75: mol_type = other DNA
gcccgggatgtaaaaacagagctggataaccgcgatgaaaaaattcaggcaacactgaatatgcttcacgacagc

SEQ ID NO: 440440 - DNA, 75 bp, synthetic construct
  source 1..75: mol_type = other DNA
gatagttttacagaactgcgccgctggatgtgttcaagaaagacaggtgatcgagtggaggtatttttgaatgtc

SEQ ID NO: 440441 - DNA, 75 bp, synthetic construct
  source 1..75: mol_type = other DNA
attccttttatcgtggacaacattttactaaaaacaacatccctgtctttagtcattttttttatcagccttggt

SEQ ID NO: 440442 - DNA, 75 bp, synthetic construct
  source 1..75: mol_type = other DNA
gtaaagaagaagcgcgtattgactggtcgctttcggcggcacagcttgaacgctgcattcgcacttttaatccat

SEQ ID NO: 440443 - DNA, 75 bp, synthetic construct
  source 1..75: mol_type = other DNA
atgttagctctttgattgagaaaataaaagaaagtgattatgaaataccaaaaagctctgatgtaatgaaaatta

SEQ ID NO: 440444 - DNA, 75 bp, synthetic construct
  source 1..75: mol_type = other DNA
gtcggcagaagggttaatggggccgtttgctctgaacgatccggccgcaggtacgaccggtccgtggtacaccaa

SEQ ID NO: 440445 - DNA, 75 bp, synthetic construct
  source 1..75: mol_type = other DNA
tgctctcaatgcaacctgcaggtaagaaagcgatgagcgtgcaagacctcctgaattctcgtcgggaatggtttg

SEQ ID NO: 440446 - DNA, 75 bp, synthetic construct
  source 1..75: mol_type = other DNA
agccaacaaacaaggcatccaggttgcaactggcgatggcatcctgaacctgctctcgttacaacctgcgggtaa

SEQ ID NO: 440447 - DNA, 75 bp, synthetic construct
  source 1..75: mol_type = other DNA
gcgtcatctcgacgcgctgttgtcttctggtcataacgtcgttggcgtgttcacccagccagaccgaccggcagg

SEQ ID NO: 440448 - DNA, 75 bp, synthetic construct
  source 1..75: mol_type = other DNA
ttagcgacgatttcaacggtgagtacctgcatcagaagtgcgcgaagaaaaaaacggcgattaagccctggctga

SEQ ID NO: 440449 - DNA, 75 bp, synthetic construct
  source 1..75: mol_type = other DNA
ataaagattgggccagcgcccgtctggcagaaatgatcgatgctgatatgttgataatccttaccgccgtcgaaa

SEQ ID NO: 440450 - DNA, 75 bp, synthetic construct
  source 1..75: mol_type = other DNA
aacaccgccactggcactgtttatccgacatggagcggaactacggttcacggcacacgggaagagggagaggtt

SEQ ID NO: 440451 - DNA, 75 bp, synthetic construct
  source 1..75: mol_type = other DNA
agcagtttgcccgaaaaagggctgaacactgccaccggcgctgccggggaagggtgtaacgaaaaaagcagcctt

SEQ ID NO: 440452 - DNA, 75 bp, synthetic construct
  source 1..75: mol_type = other DNA
gttaagctggatagtcccgtcagaaaaacagcagaactcgcagatacaaaaaaacttcctggatgcccttgccgg

SEQ ID NO: 440453 - DNA, 75 bp, synthetic construct
  source 1..75: mol_type = other DNA
tgacgctgaccagcatcgggcgttatttacccggcccggctcaggtcaaaaataaaatcaaacgcgttgaccgac

SEQ ID NO: 440454 - DNA, 75 bp, synthetic construct
  source 1..75: mol_type = other DNA
tacactctgaaagaagatgctggtcgcggctatcgccgtgttgttgcctcgccaaaaccggttgatatcattgaa

SEQ ID NO: 440455 - DNA, 75 bp, synthetic construct
  source 1..75: mol_type = other DNA
tcaccctgttgctggcagccgctgccgtgcaggcctccacccgggatgaaattgaacgactctggaatccacagg

SEQ ID NO: 440456 - DNA, 75 bp, synthetic construct
  source 1..75: mol_type = other DNA
ggcagcaggcacgtcagccaggacagaaaagccggctccccgctggttccgcctcagtaatggcaggcaggttaa

SEQ ID NO: 440457 - DNA, 75 bp, synthetic construct
  source 1..75: mol_type = other DNA
atgtcagggaaaccatcactgtgcatttcaccgcaaaaagaggtgactggtgtgacatctggggtactgaaacag

SEQ ID NO: 440458 - DNA, 75 bp, synthetic construct
  source 1..75: mol_type = other DNA
atggattcagaaacagttcacggaacggtcaggtctggcgctggcagcgtgccggaagccgggccgtcagcctgg

SEQ ID NO: 440459 - DNA, 75 bp, synthetic construct
  source 1..75: mol_type = other DNA
agaaaaacttcctgtcgaagagtgggatattccgctacctgcggtggttacaccgtcgaaagtctgggagtggtg

SEQ ID NO: 440460 - DNA, 75 bp, synthetic construct
  source 1..75: mol_type = other DNA
gcaaagccggctccccgctggttccgcctcagcaacggcaggcaggttaacctggccgactggaaggtggtgctg

SEQ ID NO: 440461 - DNA, 75 bp, synthetic construct
  source 1..75: mol_type = other DNA
ccccacgccagagattgatcgcccggaatggatgaatgcttcagattcagaacctgttcaggcggattgtatatg

SEQ ID NO: 440462 - DNA, 75 bp, synthetic construct
  source 1..75: mol_type = other DNA
gtgattaaagcggtgttgctgcgttcgattgagcagggcggtacaactctgaaagattttctgcaaagtgatggt

SEQ ID NO: 440463 - DNA, 75 bp, synthetic construct
  source 1..75: mol_type = other DNA
caaagagctggaagggcataatgtgctggcccatcttggaccggagccgcttagtgacgatttcaacggtgagta

SEQ ID NO: 440464 - DNA, 75 bp, synthetic construct
  source 1..75: mol_type = other DNA
ctgtttgcggcggggatccatccggatcggctggcgtcatcactgtcgctggcagagtgtgaattgttagctcgg

SEQ ID NO: 440465 - DNA, 75 bp, synthetic construct
  source 1..75: mol_type = other DNA
gaaggattttctgcaaagcgacggtaaaccggggtattttgcgcaggaattacaggtttacggacgtaaaggtga

SEQ ID NO: 440466 - DNA, 75 bp, synthetic construct
  source 1..75: mol_type = other DNA
ggcagagtgcgaattgctggctcgggtgattaaagcggtgttgctgcgttcgattgagcagggcggtacaacgct

SEQ ID NO: 440467 - DNA, 75 bp, synthetic construct
  source 1..75: mol_type = other DNA
ccgtttaagcgaccaaccagtgcttagcgtgcagcgccgggctaaatatctgctgctggagctgcctgagggctg

SEQ ID NO: 440468 - DNA, 75 bp, synthetic construct
  source 1..75: mol_type = other DNA
tactcgccgacaaaaatgaaaaaatagattcactctccaccagactggagaagaaatcccgtattcagccgcctg

SEQ ID NO: 440469 - DNA, 75 bp, synthetic construct
  source 1..75: mol_type = other DNA
attgatacccccagagacttcatggcaggcctggtctgtcaactggaaagcacagcgcgtagcctgcgctccaca

SEQ ID NO: 440470 - DNA, 75 bp, synthetic construct
  source 1..75: mol_type = other DNA
ataactcctctctactggccgcgctgcaaaatgtgctgcgtcaggaacatagcggttacatttatctctgggcac

SEQ ID NO: 440471 - DNA, 75 bp, synthetic construct
  source 1..75: mol_type = other DNA
ccagccgccgcggcattgaaccgcatctcgttggcgcgaccattcttcatgcggtggtccgcaacgggcgtttgc

SEQ ID NO: 440472 - DNA, 75 bp, synthetic construct
  source 1..75: mol_type = other DNA
tagccgacaaaaatgaaaaaatcgactcactctccaccaggctggagaaaaaatcccgtattcaaccgcctgagc

SEQ ID NO: 440473 - DNA, 75 bp, synthetic construct
  source 1..75: mol_type = other DNA
tgttagaggatgatgaagaccttgccgaactggccgacggcggcacagttgccgatctgacgcttgacgacgttg

SEQ ID NO: 440474 - DNA, 75 bp, synthetic construct
  source 1..75: mol_type = other DNA
tgccacctccgctgatggcctggatgcgcagccacagttcggaatatcaccgggagcttgtcgagcgacgggatc

SEQ ID NO: 440475 - DNA, 75 bp, synthetic construct
  source 1..75: mol_type = other DNA
tgccgcctccgctggtggcccgaatgcgcagccacagttccgcttattttcgggagttggtagagacgaaggaac

SEQ ID NO: 440476 - DNA, 75 bp, synthetic construct
  source 1..75: mol_type = other DNA
caaacatcttgaaagtattgcccgcagtcgtggtctcctcccaaaaaaactgctgaatgaaatgattgagcaggc

SEQ ID NO: 440477 - DNA, 75 bp, synthetic construct
  source 1..75: mol_type = other DNA
tatactgtttcgaagttttatgaaaaacctaatataagtgatgcccaaaaattcctcgcttctggagaattttat

SEQ ID NO: 440478 - DNA, 75 bp, synthetic construct
  source 1..75: mol_type = other DNA
tcaacagtattattttctcccatgaagacggtacgcgactgggcgtggagcacctggtcgcattgggtcaccagc

SEQ ID NO: 440479 - DNA, 75 bp, synthetic construct
  source 1..75: mol_type = other DNA
caaacaacttgaaagtattgcccgcagtcgtggtctccgcccaaaaaaactgctgaatgaaatgattgagcaggc

SEQ ID NO: 440480 - DNA, 75 bp, synthetic construct
  source 1..75: mol_type = other DNA
cgtgggtgtttgatctggtggctgccctgtttggctcctacgatgcgcagaccggtgtacgccatataaaggaag

SEQ ID NO: 440481 - DNA, 75 bp, synthetic construct
  source 1..75: mol_type = other DNA
cgatatcctgcagcgtgctgatgtggtgacggtggggattgacggcgggggcctggatgatctgctgggaatgta

SEQ ID NO: 440482 - DNA, 75 bp, synthetic construct
  source 1..75: mol_type = other DNA
tgtcaaaacatgccaatgtggaaattggtcttgccctgcgttctgaccgctggtcgggtgctgatttctgggatt

SEQ ID NO: 440483 - DNA, 75 bp, synthetic construct
  source 1..75: mol_type = other DNA
caaaacctgatcgaagcgccctgccgcgtactcggcttgagtaaagatcaggcgctggctcgcgcagaaaaactg

SEQ ID NO: 440484 - DNA, 75 bp, synthetic construct
  source 1..75: mol_type = other DNA
ctgctgacgggcgggatctgtatgcagagttttttaaagggttacgcgaccccatagcgaaggcaaaaatcgctt

SEQ ID NO: 440485 - DNA, 75 bp, synthetic construct
  source 1..75: mol_type = other DNA
ttaatagactttttaatcaagcaaaagatgatgaaagaaaaagagctcattatcttttacataaatcttatgaag

SEQ ID NO: 440486 - DNA, 75 bp, synthetic construct
  source 1..75: mol_type = other DNA
caattcggtgcaggatgtgaaaaaagtagtggagcagattaaagcccatggtcgttctgaacatcagatgcatag

SEQ ID NO: 440487 - DNA, 75 bp, synthetic construct
  source 1..75: mol_type = other DNA
tccgcgcaatgggcgaagcgattgcagacggtattccgctgatgggctacaccacctggggctgtattgatttag

SEQ ID NO: 440488 - DNA, 75 bp, synthetic construct
  source 1..75: mol_type = other DNA
acttcgatgtgccgatgcatctggtcaccgaatatggctcctggcgtaaccgcaagctggtggagtttttcagcc

SEQ ID NO: 440489 - DNA, 75 bp, synthetic construct
  source 1..75: mol_type = other DNA
accgcgaaaacctgttttttatcgatgtgcaggcgcgtggcgcgtacccagcttactctgcccgcgtatttcgcg

SEQ ID NO: 440490 - DNA, 75 bp, synthetic construct
  source 1..75: mol_type = other DNA
gctgtatgctggcgggcggtaacttctacccttacagttgcaagccggaagatgtctgggcggcgctggagaaag

SEQ ID NO: 440491 - DNA, 75 bp, synthetic construct
  source 1..75: mol_type = other DNA
tgcgtaacccctatctgcaggtaagcgactggggttggggtattgatccactcggtctgcgtatcactatgaaca

SEQ ID NO: 440492 - DNA, 75 bp, synthetic construct
  source 1..75: mol_type = other DNA
aaaaaggggtaaccatcaacaaagcaccgggcgatgatgaaatcctgaaaaacaccgtcgattttgtctctttca

SEQ ID NO: 440493 - DNA, 75 bp, synthetic construct
  source 1..75: mol_type = other DNA
gctgaaataacccgggcttattttgaactgggtatgacgtttccggaactgtacgacgatactcatccaggcgct

SEQ ID NO: 440494 - DNA, 75 bp, synthetic construct
  source 1..75: mol_type = other DNA
tccggacggcgaaaaagtaccggctgcgaaaattaccaaagcgtatttcgaactgggaatgacgttcccggaact

SEQ ID NO: 440495 - DNA, 75 bp, synthetic construct
  source 1..75: mol_type = other DNA
ctgttaccggcgatcgaaaaggcgatgccgcctttgctggtggcccgtatgcgcagccacagttctgagtattac

SEQ ID NO: 440496 - DNA, 75 bp, synthetic construct
  source 1..75: mol_type = other DNA
ccgtgacgatgcaggcaacggcacgctggcgcgcacgcgtaagaaatcgttctggtggtataaaaaagtgattgc

SEQ ID NO: 440497 - DNA, 75 bp, synthetic construct
  source 1..75: mol_type = other DNA
caaacgataaagccctgagcgagctatgggacgaatatcggcagcgtatgattggtctttctggaatcgctatat

SEQ ID NO: 440498 - DNA, 75 bp, synthetic construct
  source 1..75: mol_type = other DNA
gtccgaagggagtttcaaattgctcaggaaacaggggttgtcgtgcttccacttggcgtcactggttatatggcc

SEQ ID NO: 440499 - DNA, 75 bp, synthetic construct
  source 1..75: mol_type = other DNA
ggcaatgcccgggtggagcctaaaggtaacgccattcttattaccaaacaggccagcggacggggaaaaattgac

SEQ ID NO: 440500 - DNA, 75 bp, synthetic construct
  source 1..75: mol_type = other DNA
gatcgccagtcaaacctggcgcgatcatccggtggatttattgctctcgctgctggtgcaaagtctgacagggtt

SEQ ID NO: 440501 - DNA, 75 bp, synthetic construct
  source 1..75: mol_type = other DNA
caaacaccttgaaagtattgcccgaagtcgtggtctccccccaaaaaaactgctgaatgaaatgattgagcaggc

SEQ ID NO: 440502 - DNA, 75 bp, synthetic construct
  source 1..75: mol_type = other DNA
caaacagcttgaaagtattgcccgcagtcgtggtctccacccaaaaaaactgctgaatgaaatgattgagcaggc

SEQ ID NO: 440503 - DNA, 75 bp, synthetic construct
  source 1..75: mol_type = other DNA
tgcgttgattgccagccagacatggcatgatcatccggtggatttattgctctcgctgctggtgcaaagccttac

SEQ ID NO: 440504 - DNA, 75 bp, synthetic construct
  source 1..75: mol_type = other DNA
gacgttactgcccgtggcgttgatttcccgctttcgccatcagcgcgactggcgcacattgttgttacagggggc

SEQ ID NO: 440505 - DNA, 75 bp, synthetic construct
  source 1..75: mol_type = other DNA
gacgttactgcccgtggcgttgatttctcgctatcgccatcagcgtgactggcgcacgttgctgttacaaggagc

SEQ ID NO: 440506 - DNA, 75 bp, synthetic construct
  source 1..75: mol_type = other DNA
ctgcaacccggagtcaagttagaggttttaagtgaatcaacattatacgaattgtttctttttttaagaaaaaat

SEQ ID NO: 440507 - DNA, 75 bp, synthetic construct
  source 1..75: mol_type = other DNA
ctcgaagtccacgctggccgcggggatcatgatgacggcgctgttactgaactggcggcaggcggcgggctacac

SEQ ID NO: 440508 - DNA, 75 bp, synthetic construct
  source 1..75: mol_type = other DNA
aaaggggctgtcgattattccggctccgatttatccggaccaggccgcacaggccctggcgatttttaaacaact

SEQ ID NO: 440509 - DNA, 75 bp, synthetic construct
  source 1..75: mol_type = other DNA
ttaaggagcgggtgatccgcaacagtctgcggccccctgccgtgcccggtatcggacgcactgagaaatacggaa

SEQ ID NO: 440510 - DNA, 75 bp, synthetic construct
  source 1..75: mol_type = other DNA
ttaaggagcgggtgatccgcaacagtctgcggccccctgccgtgcccggtatcggacgcacagagaaatacggta

SEQ ID NO: 440511 - DNA, 75 bp, synthetic construct
  source 1..75: mol_type = other DNA
ttaaggagcgggtgatccgtaacagtctgcggccccctgccgtgcccggtatcggacgcacggagaaatacggga

SEQ ID NO: 440512 - DNA, 75 bp, synthetic construct
  source 1..75: mol_type = other DNA
tgcactgattgccagccagacatggcgcgatcatccggtagatttattgctctcgcttttggtgcaaagtctgac

SEQ ID NO: 440513 - DNA, 75 bp, synthetic construct
  source 1..75: mol_type = other DNA
tgcatgagttatatgataatgccagaaaatcagaaagactgcgtgcacatttgctattgcattcttgtcatgatg

SEQ ID NO: 440514 - DNA, 75 bp, synthetic construct
  source 1..75: mol_type = other DNA
acttaaaaacaaaccctgaaatgcattaccatggtgctgacggcgtacatataggtgttgataatcacagtcaaa

SEQ ID NO: 440515 - DNA, 75 bp, synthetic construct
  source 1..75: mol_type = other DNA
gtgcaaggtggtatagttaataaaaaacttgatcgctttgctatgcatgtttttattcttccttttccttcagta

SEQ ID NO: 440516 - DNA, 75 bp, synthetic construct
  source 1..75: mol_type = other DNA
ccgccagccggggtgttcagacagaaactgcagtacgcccgggatgtccgtgacggcaaaattcatgatccgcac

SEQ ID NO: 440517 - DNA, 75 bp, synthetic construct
  source 1..75: mol_type = other DNA
ccagccactgatggcctggtgcgttggcaatgcccgggtggagcccagaggtaacgccatccttattaccaaaca

SEQ ID NO: 440518 - DNA, 75 bp, synthetic construct
  source 1..75: mol_type = other DNA
tcagcccctgatggcctggtgtgtcggcaatgcccgggtggagcctaaaggtaacgccattcttatcaccaaaca

SEQ ID NO: 440519 - DNA, 75 bp, synthetic construct
  source 1..75: mol_type = other DNA
tgatgttgattgccatcctggcgctggtttttgttcactacaatgcgaccggcgtctggaccttcaactatgaag

SEQ ID NO: 440520 - DNA, 75 bp, synthetic construct
  source 1..75: mol_type = other DNA
cccgctgatggcgctcttcaatgcggtatccctgatgtccctgaatccggagccgaaaaagaaagaatatgcggt

SEQ ID NO: 440521 - DNA, 75 bp, synthetic construct
  source 1..75: mol_type = other DNA
aaacctcgccatggtcaatccgaatctcggctattcagtggatgaggcctttctgtaccgggagtaccgtaaagc

SEQ ID NO: 440522 - DNA, 75 bp, synthetic construct
  source 1..75: mol_type = other DNA
ctaactttgcaacagtgcccgccgagttcgagcgcgccctgatccgcgagcgtcagcgcgagggtattgcgctcg

SEQ ID NO: 440523 - DNA, 75 bp, synthetic construct
  source 1..75: mol_type = other DNA
agctgttgaatacgccaatgtccagtggtgtggaatatctgttgatgctgggcttcttcatcgccttcgcagtca

SEQ ID NO: 440524 - DNA, 75 bp, synthetic construct
  source 1..75: mol_type = other DNA
gccagttggcctaccagggcgcggtaatccagatgattgcgcacggcttgtcggcggcgggtctgtttattctct

SEQ ID NO: 440525 - DNA, 75 bp, synthetic construct
  source 1..75: mol_type = other DNA
gccgggggggtgaataaagcggaagcgatcgccgccgcgatgaaaggaggttatatcaacgcactggtcaccgac

SEQ ID NO: 440526 - DNA, 75 bp, synthetic construct
  source 1..75: mol_type = other DNA
tacccttaaaacactggagtctatcgcaaaaatttttccaaccttgcgacctgaacagcagaagtccgccgctga

SEQ ID NO: 440527 - DNA, 75 bp, synthetic construct
  source 1..75: mol_type = other DNA
ctttcaggtgaatgccacgaatgaagagctaaccgttgagtgtacgatgaatgcagctaaatgccgcatggtatc

SEQ ID NO: 440528 - DNA, 75 bp, synthetic construct
  source 1..75: mol_type = other DNA
ggggaccggttatcccgaaagggaaggtcgagatcaccatcagtaaatacgagaaaacggcgggtgcagccgcct

SEQ ID NO: 440529 - DNA, 75 bp, synthetic construct
  source 1..75: mol_type = other DNA
ccggactctcaaatattgtccctggtggcctgagaacggttttcgctctattgatgatgccagagtatgggtaaa

SEQ ID NO: 440530 - DNA, 75 bp, synthetic construct
  source 1..75: mol_type = other DNA
taggttacttttttgatgaaaacggaaaggtgatttcggatacaaagatccatgatgaactgattgggttagatc

SEQ ID NO: 440531 - DNA, 75 bp, synthetic construct
  source 1..75: mol_type = other DNA
gtcaacgaggaaattgctgggataacagcccgatggagcgcttcttcaggagtctgaaaaacgagtggataccgg

SEQ ID NO: 440532 - DNA, 75 bp, synthetic construct
  source 1..75: mol_type = other DNA
tgggaaacccgtggtaagcccgtcggggtgatgttccagataccggatcaggcagagtatgagtcggcgtggaaa

SEQ ID NO: 440533 - DNA, 75 bp, synthetic construct
  source 1..75: mol_type = other DNA
cggcagttactgtggagataccggatcaggcagagtatgagtcggcgtggaaactgctgggataacagcccaatg

SEQ ID NO: 440534 - DNA, 75 bp, synthetic construct
  source 1..75: mol_type = other DNA
atataacggtggattacccccaaacgaatcggaaaatcaatactggaaaaactctaactcggtggccagtttttg

SEQ ID NO: 440535 - DNA, 75 bp, synthetic construct
  source 1..75: mol_type = other DNA
tcatgaaagaactgggactggtccgttgccagcagcctgcgcaccgttataaacgaggtggtcgtgaacatgtca

SEQ ID NO: 440536 - DNA, 75 bp, synthetic construct
  source 1..75: mol_type = other DNA
ctggtggagtggggaccggttatcccggaagggaaggtcgagatcactatcagtaagtacgaaaaagcgagttgc

SEQ ID NO: 440537 - DNA, 75 bp, synthetic construct
  source 1..75: mol_type = other DNA
caaatgttcgcagaatggggtgcggaagttatctggatcgagaacgtcgcctgggccgacaccattcgcgttcaa

SEQ ID NO: 440538 - DNA, 75 bp, synthetic construct
  source 1..75: mol_type = other DNA
gccaccacggcggcgctggcagcactgcataaagtgcgtgaaaccggcaaaggcgaaagcatcgacatcgccatg

SEQ ID NO: 440539 - DNA, 75 bp, synthetic construct
  source 1..75: mol_type = other DNA
tccggccatcaccctgatacgtatactggcctgcctgttactgatgagtgccattgcagcactgtgtgcctcaaa

SEQ ID NO: 440540 - DNA, 75 bp, synthetic construct
  source 1..75: mol_type = other DNA
tggcaattggcaaaatcaaacttgccgatggtagcgaagtgctgggcgtactggcagaaaactggctgaccgaag

SEQ ID NO: 440541 - DNA, 75 bp, synthetic construct
  source 1..75: mol_type = other DNA
cataagtgctaattaccttgacgagttaatccttcagggaaataaagagcacttccaactgagagaatccccaca

SEQ ID NO: 440542 - DNA, 75 bp, synthetic construct
  source 1..75: mol_type = other DNA
ccggaactggaaagcaatccacagtatgtggctcgtgaatcaatcactcagtggcaaacgatggatggtcgcacc

SEQ ID NO: 440543 - DNA, 75 bp, synthetic construct
  source 1..75: mol_type = other DNA
cagcatttacccgccgtatcctggagttgtttcgtgtcagatcagattatcgcccgcgtctcgcaatcccttgcc

SEQ ID NO: 440544 - DNA, 75 bp, synthetic construct
  source 1..75: mol_type = other DNA
cgaccgttggggagattgcatcgccgcgcgcaatctggggatcaccacttttctaagcacgccggttcatttacc

SEQ ID NO: 440545 - DNA, 75 bp, synthetic construct
  source 1..75: mol_type = other DNA
aaacacaaacagaaaaacacctttttgtcgcgcatccagcgctacattcctgaggcgtattcacatccttttgat

SEQ ID NO: 440546 - DNA, 75 bp, synthetic construct
  source 1..75: mol_type = other DNA
atgactacaacacttttagccgttaacggaacgctgatgcgcggtctggaactcaacccaaatatgcaaaaagct

SEQ ID NO: 440547 - DNA, 75 bp, synthetic construct
  source 1..75: mol_type = other DNA
ggcatttaaaaatgacgttaaatctatcaatgtctcaaccgatccagagcatgtgatatggccaacctttccaga

SEQ ID NO: 440548 - DNA, 75 bp, synthetic construct
  source 1..75: mol_type = other DNA
cttctggagatgctggaaatggtcaccgacatggagtcgacttatctgacaaaagtggatattgacgcgcgcctg

SEQ ID NO: 440549 - DNA, 75 bp, synthetic construct
  source 1..75: mol_type = other DNA
tgccggacagcaggctcaccatgaaagagctggaaatagcatgggaaacccgtggtaagcccggcggggggatgt

SEQ ID NO: 440550 - DNA, 75 bp, synthetic construct
  source 1..75: mol_type = other DNA
agcaatcaggacagtcattatacgagcaggcagttccggcagttattgtggcgatacctggtcaggctgagtatg

SEQ ID NO: 440551 - DNA, 75 bp, synthetic construct
  source 1..75: mol_type = other DNA
ggtactggcgtaatggggggaatgatctccgccaccattctggcgatttacttcgtgccgctgttctttgtgctg

SEQ ID NO: 440552 - DNA, 75 bp, synthetic construct
  source 1..75: mol_type = other DNA
ccgtggcatgttcaccacgtcggtgcagctacccagcggttcgacccagcaacagacgctgaaagtggtggaaca

SEQ ID NO: 440553 - DNA, 75 bp, synthetic construct
  source 1..75: mol_type = other DNA
acaacacaaatcgcttccggcacgctggtagtgagcaacaattctcagcttggtgatactcactataaccgccag

SEQ ID NO: 440554 - DNA, 75 bp, synthetic construct
  source 1..75: mol_type = other DNA
aatggtagctatgcgctggcgggggcgtcgtcgatggcgctgaccggcgatattgtggtggaagatggcgcaatc

SEQ ID NO: 440555 - DNA, 75 bp, synthetic construct
  source 1..75: mol_type = other DNA
cgtcgaaatgggggcggagaaatacgattatcttagccgctttaatggtaagcctgcctccggtctgggggtaaa

SEQ ID NO: 440556 - DNA, 75 bp, synthetic construct
  source 1..75: mol_type = other DNA
tttcggccacgattctggctatttacttcgtgccgctgttctttgtgttggtacgccgccgcttcccgctgaagc

SEQ ID NO: 440557 - DNA, 75 bp, synthetic construct
  source 1..75: mol_type = other DNA
actggcttccggcgcgaacgaaatggccacggcgaagctggtactgaaccggctcgacgaactggcgcaatactt

SEQ ID NO: 440558 - DNA, 75 bp, synthetic construct
  source 1..75: mol_type = other DNA
gtaccggtcaggcgacggttaccttaagttttaaagcggggaccgacccggacgaagcggtacagcaggtacaga

SEQ ID NO: 440559 - DNA, 75 bp, synthetic construct
  source 1..75: mol_type = other DNA
cgtgcgagtaaccgctaactatcctggcgcatcagcccagacgctggaaaataccgtcactcaggttatcgagca

SEQ ID NO: 440560 - DNA, 75 bp, synthetic construct
  source 1..75: mol_type = other DNA
acgactggtatctgcgatcgcaagaagtaacgccaccattgccacctgatccagaccctgacccaacacccgatc

SEQ ID NO: 440561 - DNA, 75 bp, synthetic construct
  source 1..75: mol_type = other DNA
ctgggccatgtcgttctcgccggacagcaggcttaccatgaaagcactggaaatggcatgggaaacccgtggtaa

SEQ ID NO: 440562 - DNA, 75 bp, synthetic construct
  source 1..75: mol_type = other DNA
acaaatgacgctggtgatattgatcttagcgttaccaatgctgtatttacaggtaatattgctaacgacggcaaa

SEQ ID NO: 440563 - DNA, 75 bp, synthetic construct
  source 1..75: mol_type = other DNA
tgagtggtgaatataataatggaggtgctatttttgcgaaagaaaactcaacgctgaatcttactcaggttatct

SEQ ID NO: 440564 - DNA, 75 bp, synthetic construct
  source 1..75: mol_type = other DNA
gcaataacggactatatcgttggatattacagcgcactaagaccgcacgaatataatggtgggttaccgccaaac

SEQ ID NO: 440565 - DNA, 75 bp, synthetic construct
  source 1..75: mol_type = other DNA
cacgccataacggattatatcgttggatattacagcgcactaagaccgcacgaatataacggtgggttaccccca

SEQ ID NO: 440566 - DNA, 75 bp, synthetic construct
  source 1..75: mol_type = other DNA
atggcatgggaaacccgtggtaagcccgtcggggtgatgttccacagcgatagtaataatgccgatgtcagtctt

SEQ ID NO: 440567 - DNA, 75 bp, synthetic construct
  source 1..75: mol_type = other DNA
gggcctggctggatatctggctgcaatacgcgtggtttaacaatgatgtttgtagtggcacagtaaatttggcca

SEQ ID NO: 440568 - DNA, 75 bp, synthetic construct
  source 1..75: mol_type = other DNA
caggcgcaggtgatttatcagggcgtgcagcaggatgattttaccgccgctaaccatgcgcgcgtgtcacaatcg

SEQ ID NO: 440569 - DNA, 75 bp, synthetic construct
  source 1..75: mol_type = other DNA
ccctatcttattgatatttcgattgatgacagctacagccagaacggcggcgtgttaatcgatgagaacaatagc

SEQ ID NO: 440570 - DNA, 75 bp, synthetic construct
  source 1..75: mol_type = other DNA
gcggtcagcctgcaaaatggcgtcgctggcgacacgctgacggtaaacggtgattataccggcggtggtacgcta

SEQ ID NO: 440571 - DNA, 75 bp, synthetic construct
  source 1..75: mol_type = other DNA
gcgacgggctggttagcctggcaaacaataatagttacctgggcaccacgcaaatcgcttctggtacgctggtgg

SEQ ID NO: 440572 - DNA, 75 bp, synthetic construct
  source 1..75: mol_type = other DNA
ggtaacgtggcgtggcagaaagggagtgatgattttgcccagacggcagggtttttgtcgatgacggtgaaatgg

SEQ ID NO: 440573 - DNA, 75 bp, synthetic construct
  source 1..75: mol_type = other DNA
agcggcgtgctgaaccaacagccgtatggatttaacacgcgttttgaaggcgaaaaaggaaccaaccctgaagaa

SEQ ID NO: 440574 - DNA, 75 bp, synthetic construct
  source 1..75: mol_type = other DNA
aacttaggtccgacgatgatgtttgccgtgcagccaacacttttcacccgcatgttcggtaccaaagtacgatat

SEQ ID NO: 440575 - DNA, 75 bp, synthetic construct
  source 1..75: mol_type = other DNA
ggtattgatactgtagagcttcctgaacatatctgttgtctgaaaacgctttccgctaaatattccattgatgaa

SEQ ID NO: 440576 - DNA, 75 bp, synthetic construct
  source 1..75: mol_type = other DNA
tagtgatgatttatggtatccaatgaaactgcaaactcagattgagtttatgaaagaaaataatattaatttctc

SEQ ID NO: 440577 - DNA, 75 bp, synthetic construct
  source 1..75: mol_type = other DNA
tatctccccggcagccttcagggaaaaatatcatcagatggctgcttaaaaaaagaacaaatggttgtgtccgct

SEQ ID NO: 440578 - DNA, 75 bp, synthetic construct
  source 1..75: mol_type = other DNA
cacctcaaactgagttctcatggttccgatacggacagtataacgaaacgggtatttacatctcgatcgagaaga

SEQ ID NO: 440579 - DNA, 75 bp, synthetic construct
  source 1..75: mol_type = other DNA
aaaaagcaggagccatacctcaccagttgaaagcttggttgataaagccagtcaacttgatcttacagttcctga

SEQ ID NO: 440580 - DNA, 75 bp, synthetic construct
  source 1..75: mol_type = other DNA
cagggaagctttttcacgtatggccatggatgatgaggagactgtggccctgatcgcgggagggcatacatttgg

SEQ ID NO: 440581 - DNA, 75 bp, synthetic construct
  source 1..75: mol_type = other DNA
acagcggcgaaccgctttctgcggcagcagctatccgcgcgaccttcggcaacatgggcatgaacgacgaagaaa

SEQ ID NO: 440582 - DNA, 75 bp, synthetic construct
  source 1..75: mol_type = other DNA
ataaaaaaataacgacgcatttcctgaacgatccgaaagcctttgagagagcatttgcaagagcgtggttcaaac

SEQ ID NO: 440583 - DNA, 75 bp, synthetic construct
  source 1..75: mol_type = other DNA
cgtaaaacgggagcattaaaatggaaagcatcctctgttgatttaatcttcagttcaaatcctgaattacgtgcg

SEQ ID NO: 440584 - DNA, 75 bp, synthetic construct
  source 1..75: mol_type = other DNA
taattctgttagcactatctggtagcctttcccccgcaattgctgatggtaaaaaagctcctgagaaattctact

SEQ ID NO: 440585 - DNA, 75 bp, synthetic construct
  source 1..75: mol_type = other DNA
aattaaaaaaaattattgatttccaaggggataatgtttcatttggttatcatgatatgctttttaaaaaagcaa

SEQ ID NO: 440586 - DNA, 75 bp, synthetic construct
  source 1..75: mol_type = other DNA
ctggaaagtggtgctgttcatgcaggggcgatgtccgtactgtcaccagtttgacccggtactgaaacagctggc

SEQ ID NO: 440587 - DNA, 75 bp, synthetic construct
  source 1..75: mol_type = other DNA
ttcttgatgaagtgcgcagtgcgaaacttgcgggtatgtgccctgtgcagaccgaccaacatgttctgaatgtcg

SEQ ID NO: 440588 - DNA, 75 bp, synthetic construct
  source 1..75: mol_type = other DNA
ccctggatggtcagggggatactgcctttccggaggcattgccggcaccaccggacgtaatgcagaccttcttcc

SEQ ID NO: 440589 - DNA, 75 bp, synthetic construct
  source 1..75: mol_type = other DNA
tcaccctgttgctgacagccgctgccgtgcaggcctccacccgggatgaaattgaacgactctggaatccgcagg

SEQ ID NO: 440590 - DNA, 75 bp, synthetic construct
  source 1..75: mol_type = other DNA
atgcctatcactaaatcactgttgttcaccctgttactgacagccgctgccgtgcaggcctccacccgggatgaa

SEQ ID NO: 440591 - DNA, 75 bp, synthetic construct
  source 1..75: mol_type = other DNA
gcaggttaacctggccgactggaaggtggtgctgtttatgcaggggcattgcccttactgtcaccagtttgaccc

SEQ ID NO: 440592 - DNA, 75 bp, synthetic construct
  source 1..75: mol_type = other DNA
ggcagcaacttagggtttaaattcgaacatctcgcggcgattatcgacggcgtggaagataaatcccgcgtcggc

SEQ ID NO: 440593 - DNA, 75 bp, synthetic construct
  source 1..75: mol_type = other DNA
cgcgtttcgttggattatgcaggacgagcgcttcgacggcattccactgatcctcgaaactattaacccggatat

SEQ ID NO: 440594 - DNA, 75 bp, synthetic construct
  source 1..75: mol_type = other DNA
taaataaaaagatagatattacacctatattacctttaacttatcatcagatgttaaggaaaaaagctactttag

SEQ ID NO: 440595 - DNA, 75 bp, synthetic construct
  source 1..75: mol_type = other DNA
cggtggccacaccgaccaccttcctggtcaacgtcaacacacttgaggcattaccgcttttgcagggggcaacgg

SEQ ID NO: 440596 - DNA, 75 bp, synthetic construct
  source 1..75: mol_type = other DNA
ttccagtggtcgggttgctgacaggcggttcacagacgcaggccaaaacgctggaaatcgaatttaaaggcgaaa

SEQ ID NO: 440597 - DNA, 75 bp, synthetic construct
  source 1..75: mol_type = other DNA
atacgtacagggcaagattacgcactttggttaaagttgctgaaaaataatgatactaaggcggttttatatccg

SEQ ID NO: 440598 - DNA, 75 bp, synthetic construct
  source 1..75: mol_type = other DNA
tgattcttctggcgctatcggggagtttttctaccgctgtagccgctgataaaaaagagactcaaaatttctact

SEQ ID NO: 440599 - DNA, 75 bp, synthetic construct
  source 1..75: mol_type = other DNA
ctgtcagatatgaaacgccttaaactttctgaagcgatggtgcagcaagaactgtataaagtcgcaaccaacgaa

SEQ ID NO: 440600 - DNA, 75 bp, synthetic construct
  source 1..75: mol_type = other DNA
attctgaccgaactgatgatccctaccgtttcggccaacatcgacgatatgcccccttctgacaggctgtcccac

SEQ ID NO: 440601 - DNA, 75 bp, synthetic construct
  source 1..75: mol_type = other DNA
tgtgcccgtcagtgatgtcaggcggtcgttttccgtcgtggtgaaagcgatagttcagatactggaaacatggcc

SEQ ID NO: 440602 - DNA, 75 bp, synthetic construct
  source 1..75: mol_type = other DNA
gtccggattagggacaggaatggcgactctttcctactcgatgtcgctgacaccgctgtttttcgtgcctctggc

SEQ ID NO: 440603 - DNA, 75 bp, synthetic construct
  source 1..75: mol_type = other DNA
ggaataaaaaaatgtgttgaaactaagttagctctaatgaaacgggacagccctaacattcctgtttcacaactt

SEQ ID NO: 440604 - DNA, 75 bp, synthetic construct
  source 1..75: mol_type = other DNA
agaaagcggcacgcgaacaaatggaacaacaaaagaacggctcacttaataccttccagcaaggtttaaaagcgc

SEQ ID NO: 440605 - DNA, 75 bp, synthetic construct
  source 1..75: mol_type = other DNA
tgggacaaagaaacgctggagaaaatggacaaagaccgtttccgccagagcctcggtggcctgatcgaagcctat

SEQ ID NO: 440606 - DNA, 75 bp, synthetic construct
  source 1..75: mol_type = other DNA
ctgcgcgatcaggtagccctgcgggtgactgaagcaggtgcggatgatgaggaggaattacagcaggaggagtaa

SEQ ID NO: 440607 - DNA, 75 bp, synthetic construct
  source 1..75: mol_type = other DNA
tgaccggctggaaagggacagagggtggaccgcatcacaactgaatgaagtacagattgtggttgatgagatccg

SEQ ID NO: 440608 - DNA, 75 bp, synthetic construct
  source 1..75: mol_type = other DNA
ccgttgcaggggggcatgaaagcaacctcaagctttatcgggtggttgatattgtgtcggcatttctggcattgc

SEQ ID NO: 440609 - DNA, 75 bp, synthetic construct
  source 1..75: mol_type = other DNA
tgtccctgtcagtgatgtcagacggtcgttttctgtcgtggtgaaagcgatagttcaggtactggaaacctggcc

SEQ ID NO: 440610 - DNA, 75 bp, synthetic construct
  source 1..75: mol_type = other DNA
tgcagattgtggttgatgagatccgcgacacactggaaaaggcagtcattgactgttgtgatgaggccgatatgt

SEQ ID NO: 440611 - DNA, 75 bp, synthetic construct
  source 1..75: mol_type = other DNA
attggcttttttatctatcgtgaaatgcggatttctcatgtcgtcaaagcattgggcgaaacggcacgcgcaacc

SEQ ID NO: 440612 - DNA, 75 bp, synthetic construct
  source 1..75: mol_type = other DNA
gctggtggatgtcatgctcgctaaagaggccattccagcaatggctgaacaaaaacgtattttgcactctggccc

SEQ ID NO: 440613 - DNA, 75 bp, synthetic construct
  source 1..75: mol_type = other DNA
tacggcttccggccggggcgcaacgcatggcaggcggtgcaacaggcacagcgttacatacggggcggcaaacgg

SEQ ID NO: 440614 - DNA, 75 bp, synthetic construct
  source 1..75: mol_type = other DNA
aaaaacagggcaataaagtcgaactgttgccagaaaacagcgagtttaaaccaattgtcgttgaccttcgtcagc

SEQ ID NO: 440615 - DNA, 75 bp, synthetic construct
  source 1..75: mol_type = other DNA
agcacatggtgcagcgtctcctgaaaaatgtattggcgcagggcctgatggtgcacctgtggaggagcagggatt

SEQ ID NO: 440616 - DNA, 75 bp, synthetic construct
  source 1..75: mol_type = other DNA
accctccaactcccgccagccgtgtgcgtcaggctgcggcttcccttgcgccctgtgcatccccgccttatcgcc

SEQ ID NO: 440617 - DNA, 75 bp, synthetic construct
  source 1..75: mol_type = other DNA
atgatggcggggagaatccccgcctttttcctgccggtccccggacagagcacaaaggaagtcgccgccggctcc

SEQ ID NO: 440618 - DNA, 75 bp, synthetic construct
  source 1..75: mol_type = other DNA
attgcccttactgtcaccagtttgacccggtactgaaacagctggcacagcagtacggcttttctgtttttccct

SEQ ID NO: 440619 - DNA, 75 bp, synthetic construct
  source 1..75: mol_type = other DNA
gccacggatgcgcagggctttatggccagagtggatacggtatttcagatgatggagaacccgaataatggataa

SEQ ID NO: 440620 - DNA, 75 bp, synthetic construct
  source 1..75: mol_type = other DNA
agttccagggcgaaccgatactttcagggaagcatataactgaaacaaacttttttgaaaaaaataaagacgtta

SEQ ID NO: 440621 - DNA, 75 bp, synthetic construct
  source 1..75: mol_type = other DNA
ctgatttcctgctgcgcgtcagcgggatgtcgatgaaagatatcggcattatggatggcgacttgctggcagtgc

SEQ ID NO: 440622 - DNA, 75 bp, synthetic construct
  source 1..75: mol_type = other DNA
ccggtgaaccgcttctggcgcaacagcatattgaaggtcattatcaggtcgatccttccttgttcaagccgaatg

SEQ ID NO: 440623 - DNA, 75 bp, synthetic construct
  source 1..75: mol_type = other DNA
agggggcaacggatgccgccagttttatggcgcggatggataccgttctgcagatgtacggagaggaaaaaggtg

SEQ ID NO: 440624 - DNA, 75 bp, synthetic construct
  source 1..75: mol_type = other DNA
gtctggggaaatggagccaacttcgacaacacgattttgcgccgttcatacgaacggcaggggatcccctgcccg

SEQ ID NO: 440625 - DNA, 75 bp, synthetic construct
  source 1..75: mol_type = other DNA
gccagagccaatcaacagaacactgaaagttcaacaggaaaagtcagcccggtcattgctgcactcatcgcgaat

SEQ ID NO: 440626 - DNA, 75 bp, synthetic construct
  source 1..75: mol_type = other DNA
gaagacatggcaacattcgacggacatatcgttgaagcgttgatgaaaatgccagaagttaacgccatgtatccg

SEQ ID NO: 440627 - DNA, 75 bp, synthetic construct
  source 1..75: mol_type = other DNA
gaacgtgaggggccgttctacttcctcttcaccgacaaggatggcgaaaaatacggtcgcgcaaacaaactttct

SEQ ID NO: 440628 - DNA, 75 bp, synthetic construct
  source 1..75: mol_type = other DNA
tgatggggaccgccgccgggctggaaatcccgacgatgttgattgccggatatttcgccaaacgtctgggtaagc

SEQ ID NO: 440629 - DNA, 75 bp, synthetic construct
  source 1..75: mol_type = other DNA
ggcctggtgacattgatgccggaaacattaacggcagcatccatcgctgggcaaaaaatgaagttatcaacaacg

SEQ ID NO: 440630 - DNA, 75 bp, synthetic construct
  source 1..75: mol_type = other DNA
tttatcgacgaaaactccggcgaattttttgttcaggtctggggaaatggagccaacttcgacaacacgattttg

SEQ ID NO: 440631 - DNA, 75 bp, synthetic construct
  source 1..75: mol_type = other DNA
ttgaagttcaggaagacgattcggagaaaatggaaggcgctgaacatccacacaaggagaatgctggcagcgctc

SEQ ID NO: 440632 - DNA, 75 bp, synthetic construct
  source 1..75: mol_type = other DNA
gataagttgcttgctgcatcacgtggtgaatttgttgaagggattagtgacccgaatgatccgaaatgggttaag

SEQ ID NO: 440633 - DNA, 75 bp, synthetic construct
  source 1..75: mol_type = other DNA
ggcatcaatgcgcaaacagcctgatgcccttcgctacgaccgccaaactatttttggccttgtccgtgagcgtcc

SEQ ID NO: 440634 - DNA, 75 bp, synthetic construct
  source 1..75: mol_type = other DNA
gatgacgaactggcctacgctctctggcctagtgatgtggatgccggaaacattgacggcagcatccatcgctgg

SEQ ID NO: 440635 - DNA, 75 bp, synthetic construct
  source 1..75: mol_type = other DNA
ggtgagcgccataatgcacttgatgacgcccgttatcaggcaaaatacgtttcagctatctggaaaaaactgatc

SEQ ID NO: 440636 - DNA, 75 bp, synthetic construct
  source 1..75: mol_type = other DNA
aacgaatggcattttattgaataatgaatggtgtgcctttctcaaagaacatgaatttctggttggtatctcgat

SEQ ID NO: 440637 - DNA, 75 bp, synthetic construct
  source 1..75: mol_type = other DNA
tgttacaattgcgggaatttatcgacgaaaactccggtgaattttttgttcatgtctggggaaatggagccaact

SEQ ID NO: 440638 - DNA, 75 bp, synthetic construct
  source 1..75: mol_type = other DNA
tcctccattctgaccgatgaaatcacgttggatgatgcactgctgcaattccgggaatttatcgacgaaaactcc

SEQ ID NO: 440639 - DNA, 75 bp, synthetic construct
  source 1..75: mol_type = other DNA
tcacgatagcgataatgaaactggcgagacggcagatcactcaattaaggtgaacggtcatcaagaaatcacatc

SEQ ID NO: 440640 - DNA, 75 bp, synthetic construct
  source 1..75: mol_type = other DNA
aagctgccgcacgcctggaggcgctctgggagcatctggggaataatcaggtgctgtcggtaaaccgatcggttt

SEQ ID NO: 440641 - DNA, 75 bp, synthetic construct
  source 1..75: mol_type = other DNA
agtcatcatgcctgtcgtacggagaattatgccatgacggtccattattaccggttgcgggattacgccctgcag

SEQ ID NO: 440642 - DNA, 75 bp, synthetic construct
  source 1..75: mol_type = other DNA
atggctcagccgttgttgtcagatgagcccctgacagcgctgatggatcattatcttgatactgatgctctggca

SEQ ID NO: 440643 - DNA, 75 bp, synthetic construct
  source 1..75: mol_type = other DNA
aagttaacaccatgtatccggagcttaagttgcacgccattgggtgggttaagcataaatgtattcctggtgcta

SEQ ID NO: 440644 - DNA, 75 bp, synthetic construct
  source 1..75: mol_type = other DNA
cgtggctacctttgacgggcatatcgttgaagcactgatgaaaacgcctgaaattaaagctatgtatccggaacg

SEQ ID NO: 440645 - DNA, 75 bp, synthetic construct
  source 1..75: mol_type = other DNA
ggtgatgggcgacgcaacataccaggaaacattcgatgaagagtatcaggttgaagttcaggaagatgatccgga

SEQ ID NO: 440646 - DNA, 75 bp, synthetic construct
  source 1..75: mol_type = other DNA
taccgctgacgaagtaaacaaaattatgcaggcagccaatatcagccagcctgacgccgataagttacttgctgt

SEQ ID NO: 440647 - DNA, 75 bp, synthetic construct
  source 1..75: mol_type = other DNA
cgaccttgaaaccatgggaaaaaatcctgatgccccgatcatctcaataggtgcaatatttttcgatccgcaaac

SEQ ID NO: 440648 - DNA, 75 bp, synthetic construct
  source 1..75: mol_type = other DNA
cctcttcaccgacaaggatggcgaaaaatacggtcgcgcaaacaaactttctggtctggataaggcgctgtctgc

SEQ ID NO: 440649 - DNA, 75 bp, synthetic construct
  source 1..75: mol_type = other DNA
ggcatcaatgcgcaaacagcctgatgcccttcgctacgaccgccagactatttttggccttgtccgtgaacgtcc

SEQ ID NO: 440650 - DNA, 75 bp, synthetic construct
  source 1..75: mol_type = other DNA
acccgaaatctgatttattcaacaaagccattattaggttataatactcgcaaggtcgctattgctggaagtatg

SEQ ID NO: 440651 - DNA, 75 bp, synthetic construct
  source 1..75: mol_type = other DNA
ctgctggcggtgtcattgacagggacaccgttaagtggtggctgaagcaatcgcgcgaagcgcagtctgccattc

SEQ ID NO: 440652 - DNA, 75 bp, synthetic construct
  source 1..75: mol_type = other DNA
tggtgcatctgacacgaccgcacaaccagagccggtaaaagttaccgctgacgaagtaaacaaaattatgcagcc

SEQ ID NO: 440653 - DNA, 75 bp, synthetic construct
  source 1..75: mol_type = other DNA
ctggactattcccgcgcagctatttttgcacttatccgaagcgcccaccctgagttttatcactacccggggcgc

SEQ ID NO: 440654 - DNA, 75 bp, synthetic construct
  source 1..75: mol_type = other DNA
gccgatgaactgcttgcagtatcacgtggtgaatttgttgaaggaattagcgacccgaatgatccgaagtgggtt

SEQ ID NO: 440655 - DNA, 75 bp, synthetic construct
  source 1..75: mol_type = other DNA
aggaaaatgtcctcacactggatccgacgactttccctgaaaatgtagaagtcccacagacagatagtcgtgttg

SEQ ID NO: 440656 - DNA, 75 bp, synthetic construct
  source 1..75: mol_type = other DNA
ggggatccagacccgcgattctgtaaaccagaaccagcatgaatcggaacggaactaccaaaaagcggaacaaaa

SEQ ID NO: 440657 - DNA, 75 bp, synthetic construct
  source 1..75: mol_type = other DNA
caatatttttcgatccgcaaaccggagatatgggaccagaatttagcaagaccatcgatctggatactgctggcg

SEQ ID NO: 440658 - DNA, 75 bp, synthetic construct
  source 1..75: mol_type = other DNA
ggaggaaacggaaggcactgagcatccgcacaaggagaacactggcggcgctcaggaccacgccagcgataataa

SEQ ID NO: 440659 - DNA, 75 bp, synthetic construct
  source 1..75: mol_type = other DNA
acattcgagaatggagtatttggctcgatattaaaattatattacttacaattttcaagggttttgtaaataaat

SEQ ID NO: 440660 - DNA, 75 bp, synthetic construct
  source 1..75: mol_type = other DNA
gctcaggactgcgcttataaatttattgtctgcgaggataaacctggcataccccgccctgccctcgattcctgg

SEQ ID NO: 440661 - DNA, 75 bp, synthetic construct
  source 1..75: mol_type = other DNA
acttttgaattctccagtgagttagagttacgtgatgacagagttcgctatttcaggaatgagtccaataaaggg

SEQ ID NO: 440662 - DNA, 75 bp, synthetic construct
  source 1..75: mol_type = other DNA
gaccttgaaaccatgggaaaaaatcctgatgccccgatcatctcaataggtgcaatatttttcgatccgcaaacc

SEQ ID NO: 440663 - DNA, 75 bp, synthetic construct
  source 1..75: mol_type = other DNA
caatcacgtgaagcgcagtctgccattatgaccgatgaaatcccgttagatgatgcactgttacaattgcgggaa

SEQ ID NO: 440664 - DNA, 75 bp, synthetic construct
  source 1..75: mol_type = other DNA
tattaccggcttggatgatgatgacgaatttacatttgatcgaataaaattatttgttgaaaattgggatgatag

SEQ ID NO: 440665 - DNA, 75 bp, synthetic construct
  source 1..75: mol_type = other DNA
aggtgaacgccataacgcgctgcacgatgcgcgttaccaagcaaaatacgtttcagccatctggcaaaaactgat

SEQ ID NO: 440666 - DNA, 75 bp, synthetic construct
  source 1..75: mol_type = other DNA
cattcgaaggtgaacgccataacgccctgcacgatgcgcgttaccaggcaaaatacgtttcagccatctggcaaa

SEQ ID NO: 440667 - DNA, 75 bp, synthetic construct
  source 1..75: mol_type = other DNA
ttcatacgaacgacagggtatcccctgcccgtggcgctactgcaacgatcgcgatgtacgcacaatcgttgagct

SEQ ID NO: 440668 - DNA, 75 bp, synthetic construct
  source 1..75: mol_type = other DNA
gaaaactcagcagaaaatatcccccctgtcactgcagtcattcgtcgcgaatataagcagacatggaaaacactg

SEQ ID NO: 440669 - DNA, 75 bp, synthetic construct
  source 1..75: mol_type = other DNA
tggcgctgaacaaatacatcactgaatacctgactacaaagggcgtgtttgaagatgaaggaacaaatcagagca

SEQ ID NO: 440670 - DNA, 75 bp, synthetic construct
  source 1..75: mol_type = other DNA
gttgaggcattgatgaaaatgcctgaagttaacgtcatgtattcagaactaaagctgttcgccatcgggtgggtt

SEQ ID NO: 440671 - DNA, 75 bp, synthetic construct
  source 1..75: mol_type = other DNA
tatatcgttatcagcctggttgacgctatggacacgggggctgtacctgatggttccaccatcgaatggtggctt

SEQ ID NO: 440672 - DNA, 75 bp, synthetic construct
  source 1..75: mol_type = other DNA
gtcgacattcacaaagaccccgtggcactgaataaatacatcactgaataccttgcgacaaagggcgtgtttgag

SEQ ID NO: 440673 - DNA, 75 bp, synthetic construct
  source 1..75: mol_type = other DNA
tctcaataggcgcaatatttttcgatccacaaaccggagatatgggaccggaatttagcaagaccatagatctga

SEQ ID NO: 440674 - DNA, 75 bp, synthetic construct
  source 1..75: mol_type = other DNA
gtgaatttgttgcagggattagcgatccgaatgatccgaaatgggtgaaggggattgaaacccgcgattcagtga

SEQ ID NO: 440675 - DNA, 75 bp, synthetic construct
  source 1..75: mol_type = other DNA
ggccgttctacttcctcttcaccgacaaggatggcgaaaaatacggtcgcgcaaacaaactttctggtctggata

SEQ ID NO: 440676 - DNA, 75 bp, synthetic construct
  source 1..75: mol_type = other DNA
tgcaccgcctgcggtcagagcggcggcggcaactgccctgattgtggtgttgtgatgggcgacgcaacataccag

SEQ ID NO: 440677 - DNA, 75 bp, synthetic construct
  source 1..75: mol_type = other DNA
ccgttagatgatgcactgctgcaattacgggaatttatcgacgaaaactccggtgaattttttgttcaggtctgg

SEQ ID NO: 440678 - DNA, 75 bp, synthetic construct
  source 1..75: mol_type = other DNA
gaagattcctgcagcacgcatgaaaatgaaccgcgaccatactgtgcccttgtcagatgaagcaatagctgtgct

SEQ ID NO: 440679 - DNA, 75 bp, synthetic construct
  source 1..75: mol_type = other DNA
cgacaacgtgattttacgccgttcatacgaacggcaggggatcccctgcccgtggcgttattgcaacgatcgcga

SEQ ID NO: 440680 - DNA, 75 bp, synthetic construct
  source 1..75: mol_type = other DNA
gatatggtcatcaacgcaagcgggcttcttggtgatgacgacatgatgacctttgacggacacctcgcagaagca

SEQ ID NO: 440681 - DNA, 75 bp, synthetic construct
  source 1..75: mol_type = other DNA
gtatcggtggtccggcagctgtattggcgcagggaagcattaagagcctggaatgtgttgaatatccggaactgg

SEQ ID NO: 440682 - DNA, 75 bp, synthetic construct
  source 1..75: mol_type = other DNA
gcgttactgacgccagggaaactgaaaaattatctggttgagaaaatgcgtacgctgggcacggcggcgtgtcct

SEQ ID NO: 440683 - DNA, 75 bp, synthetic construct
  source 1..75: mol_type = other DNA
gatcgatctttatgccgttgatggcgacgagtacaaattcctctgtatcgccaaaggtggtggttcggcaaacaa

SEQ ID NO: 440684 - DNA, 75 bp, synthetic construct
  source 1..75: mol_type = other DNA
tttttgttcaggtttggggaaatggagccaacttcgacaacacgattttgcgccgttcatacgaacggcagggga

SEQ ID NO: 440685 - DNA, 75 bp, synthetic construct
  source 1..75: mol_type = other DNA
tgggggcagtaaaaataaaacccagtgaaaatagcctgcttaaattaggtcgcttcgggacggaggtgatgctgc

SEQ ID NO: 440686 - DNA, 75 bp, synthetic construct
  source 1..75: mol_type = other DNA
gaaggttatgcctccggttctcttggcccaacgaccgccggacggatggattcttatgtcgatcaactgcaagcg

SEQ ID NO: 440687 - DNA, 75 bp, synthetic construct
  source 1..75: mol_type = other DNA
gcataggctcctacccgtcagttacccttgccgatgccagaaactaccgtgcagagtcccgctcactactggcta

SEQ ID NO: 440688 - DNA, 75 bp, synthetic construct
  source 1..75: mol_type = other DNA
tagtcgcacatggattgcgttcaatagcaagtacagcactaaatgaagccggctttaatgctgatgctattgaag

SEQ ID NO: 440689 - DNA, 75 bp, synthetic construct
  source 1..75: mol_type = other DNA
atggcctttgagaagcccaaaaagcaaaacatgccgacactgcggccagaagaattacctaagctaatgcgttct

SEQ ID NO: 440690 - DNA, 75 bp, synthetic construct
  source 1..75: mol_type = other DNA
ttgagccagtcaaagctcgtggggcgctagagactgtacgtcgactggcgcaacgcattaacgagataatgatct

SEQ ID NO: 440691 - DNA, 75 bp, synthetic construct
  source 1..75: mol_type = other DNA
cagctcttgctcatagcgataaaaacgaagtacgtcgcgcttataatcgctcggtttatttagaaaaacgtaagc

SEQ ID NO: 440692 - DNA, 75 bp, synthetic construct
  source 1..75: mol_type = other DNA
gcggattaccttgccctattagccaacggaatcgacccgcaaattcaagctgaagctgcagaggaaaagcaacaa

SEQ ID NO: 440693 - DNA, 75 bp, synthetic construct
  source 1..75: mol_type = other DNA
tgaagtgaggcgtgcatataatcgctcactatatattgaacaaaggaaagatttgatgtcatggtggggaaacgt

SEQ ID NO: 440694 - DNA, 75 bp, synthetic construct
  source 1..75: mol_type = other DNA
agaaatgatgaagtcacttagtggtggccgagaatttatttttcccagtcgcattaatccgacccagccaatgaa

SEQ ID NO: 440695 - DNA, 75 bp, synthetic construct
  source 1..75: mol_type = other DNA
gaaaatccctgcatcacgcatgaaaatgaaccgtgaccataccgttccattgtcaaatgaagcaatggctgttct

SEQ ID NO: 440696 - DNA, 75 bp, synthetic construct
  source 1..75: mol_type = other DNA
ggctttccgcctgatgttattgaggcagcacttgcccatgtggacaagaatgaggttcgccgtgcttataaccgc

SEQ ID NO: 440697 - DNA, 75 bp, synthetic construct
  source 1..75: mol_type = other DNA
ggatttaattctgatgttattgaagcagcattagcacactcagacaaaaatgaagttcgaaaagcttacaaccgt

SEQ ID NO: 440698 - DNA, 75 bp, synthetic construct
  source 1..75: mol_type = other DNA
tcaacctatctagagcatcgaaaagaattgatgaactggtggggtatgcattgcacttctgcaaaaaatgggatt

SEQ ID NO: 440699 - DNA, 75 bp, synthetic construct
  source 1..75: mol_type = other DNA
aaaacatgccgacgctccggccagaagaattaccgaagctgatgcgttctttgattatgtctaatctgtctgttc

SEQ ID NO: 440700 - DNA, 75 bp, synthetic construct
  source 1..75: mol_type = other DNA
taaaacggtgaaactggcttccgctaaatactatgacgaactgccaacggaagggaatgagcacggtcaggcgtt

SEQ ID NO: 440701 - DNA, 75 bp, synthetic construct
  source 1..75: mol_type = other DNA
gcgcaatctgccattatgaccgatgaaatcccgttagatgatgcactgttacaattgcgggaatttatcgacgaa

SEQ ID NO: 440702 - DNA, 75 bp, synthetic construct
  source 1..75: mol_type = other DNA
caggtctggggaaatggagacaacttcgacaacgtgattttacgccgctcatacgaacgacaggggatcccctgc

SEQ ID NO: 440703 - DNA, 75 bp, synthetic construct
  source 1..75: mol_type = other DNA
gctgaattacgtaactggaaaaaacggcaggacgcagagcgcaaagagactggaaaatacacgtctgttgttgat

SEQ ID NO: 440704 - DNA, 75 bp, synthetic construct
  source 1..75: mol_type = other DNA
aaatgtaagcctggtgccaaatggcccgaaattcaggcagagatgcgcatctggaaaaaacgtcgcgaaggtgaa

SEQ ID NO: 440705 - DNA, 75 bp, synthetic construct
  source 1..75: mol_type = other DNA
cgccagaaccaatcaacagcacagtgaaaattcaacaggaaaaatcagcccggtcattgctgccattcatcgcga

SEQ ID NO: 440706 - DNA, 75 bp, synthetic construct
  source 1..75: mol_type = other DNA
acagaacgaccagaaagcggaacaaaacagcccaaatacgcaacaaaacgagccagaaacgaaacaacctgagcc

SEQ ID NO: 440707 - DNA, 75 bp, synthetic construct
  source 1..75: mol_type = other DNA
accgcacaaccagagccggtaaaagttaccgctgacgaagtaaacaaaattatgcaggcagccaatatcagccag

SEQ ID NO: 440708 - DNA, 75 bp, synthetic construct
  source 1..75: mol_type = other DNA
ccggagatatgggaccggaatttagtaagactatcgatctggaaactgctggcggagtcattgatcgggacacca

SEQ ID NO: 440709 - DNA, 75 bp, synthetic construct
  source 1..75: mol_type = other DNA
gcgacgcaacataccaggaaacattcaatgaagagaatcaggttgaagttcaggaaaatgatccggaggaaatgg

SEQ ID NO: 440710 - DNA, 75 bp, synthetic construct
  source 1..75: mol_type = other DNA
atcgctgggcaaaaaatgaagttatcgacaacgaccgcgaagactggaagcgtatctcggcatcaatgcgcaaac

SEQ ID NO: 440711 - DNA, 75 bp, synthetic construct
  source 1..75: mol_type = other DNA
aaaacgagccagaaacgaaacaacctgagccagtagcgcaacaggaaccggaaaaagtctgcaccgcctgcggtc

SEQ ID NO: 440712 - DNA, 75 bp, synthetic construct
  source 1..75: mol_type = other DNA
atcggaacagaacgaccagaaagcggaacaaaacagcccaaatacgcaacaaaacgagccagaaacgaaacaacc

SEQ ID NO: 440713 - DNA, 75 bp, synthetic construct
  source 1..75: mol_type = other DNA
aaatcgcgctgttagcgggcccattaagttctgtctcggcgcgtctgcgtctggcgggctggcataaatatctca

SEQ ID NO: 440714 - DNA, 75 bp, synthetic construct
  source 1..75: mol_type = other DNA
ttgccagtacacctcacctctcgcggagaatttgttgcagggattagcgacccgaatgatccgaaatgggttaag

SEQ ID NO: 440715 - DNA, 75 bp, synthetic construct
  source 1..75: mol_type = other DNA
gggttaaggggctccagacccgcgattctgtgaaccagaaccagcatgaatcggaacggaactaccaaaaagcgg

SEQ ID NO: 440716 - DNA, 75 bp, synthetic construct
  source 1..75: mol_type = other DNA
agaatcggaacagaacgaccagaaaacggaacaaaacagcccaaatgcgcaacaaaacgagccagaaacgaaaca

SEQ ID NO: 440717 - DNA, 75 bp, synthetic construct
  source 1..75: mol_type = other DNA
agtggaagatttcccggcatttatccttgttgatgataaagggaatgacttcttccagcagattcaactcacgca

SEQ ID NO: 440718 - DNA, 75 bp, synthetic construct
  source 1..75: mol_type = other DNA
tccggggctgatcttccatccgcctctgctctatatggggtacgtcggtttctcggtggcgtttgctttcgccat

SEQ ID NO: 440719 - DNA, 75 bp, synthetic construct
  source 1..75: mol_type = other DNA
gacgaaaactccggtgaattttttgttcaggtctggggaaatggagccaacttcgacaacacgattttgcgccgt

SEQ ID NO: 440720 - DNA, 75 bp, synthetic construct
  source 1..75: mol_type = other DNA
accggaatttagcaagaccatagatctgaatactgctggcggagtcattgatcgtgacgtcattaaatggtggct

SEQ ID NO: 440721 - DNA, 75 bp, synthetic construct
  source 1..75: mol_type = other DNA
accatctaatgatcgaccttgaaaccatgggaaaaaatcctgatgccccgattatctcaataggcgcaatatttt

SEQ ID NO: 440722 - DNA, 75 bp, synthetic construct
  source 1..75: mol_type = other DNA
atgaaatcccgttagatgatgcactgctgcaattacgggaatttatcgacgaaaactccggtgaattttttgttc

SEQ ID NO: 440723 - DNA, 75 bp, synthetic construct
  source 1..75: mol_type = other DNA
cagatcacccaattaaggtgaacggtcatcacgaaatcacatccaccagcaggacgtgtgaccatctaatgatcg

SEQ ID NO: 440724 - DNA, 75 bp, synthetic construct
  source 1..75: mol_type = other DNA
aaatacacgtctgttgttgatctcgcccgcgccagaaccaatcaacagcacactgaaaattcaacaggaaaaatc

SEQ ID NO: 440725 - DNA, 75 bp, synthetic construct
  source 1..75: mol_type = other DNA
cataatgcacttgatgacgcccgttaccaggcaaaatacgtttcagttatctggcaaaaactgatcccgagtcag

SEQ ID NO: 440726 - DNA, 75 bp, synthetic construct
  source 1..75: mol_type = other DNA
gaacagacagcgttgtcgctggggattaacgtgagtcgtctgcgcatcgagatttttctttgttgcgcactggca

SEQ ID NO: 440727 - DNA, 75 bp, synthetic construct
  source 1..75: mol_type = other DNA
cgctgggagcgttacgtggtactcaatgctgaattggcagcaagagggcgcgggggatttgaacgtaatcgccgt

SEQ ID NO: 440728 - DNA, 75 bp, synthetic construct
  source 1..75: mol_type = other DNA
gcttacctacactctcgcggtgaaaatattggtgcgttcggtaaccaggatctggttgaatacatcgacgtgggc

SEQ ID NO: 440729 - DNA, 75 bp, synthetic construct
  source 1..75: mol_type = other DNA
ttcgataaagcaggcgactggacgagtgttccggtaaaagacactgaagtggttgaacgactggagcacaccctg

SEQ ID NO: 440730 - DNA, 75 bp, synthetic construct
  source 1..75: mol_type = other DNA
caacctgatcgaggaaagtgactttaccaaagcgtctggtgttgcaaccgacaacattgtagcagttggtatgac

SEQ ID NO: 440731 - DNA, 75 bp, synthetic construct
  source 1..75: mol_type = other DNA
acgaagacaggcgttgagcgttatgtccagttgtctactcaagccatcgattttctgaaagtattacgcctcagt

SEQ ID NO: 440732 - DNA, 75 bp, synthetic construct
  source 1..75: mol_type = other DNA
tcaagccagacgctaccgcagaaaacaccccggagctgaccatcgccaaagtgatggggccgggggacagcagcg

SEQ ID NO: 440733 - DNA, 75 bp, synthetic construct
  source 1..75: mol_type = other DNA
gcaatgatttcgaccttcgccagttgcgccgggaagatatcactgtttatgttggcgttaatgctgaagatatgt

SEQ ID NO: 440734 - DNA, 75 bp, synthetic construct
  source 1..75: mol_type = other DNA
ttcgtgttcgcatggaaggtcagcttttactgaatacgatagacctgatcattgatgctgcaattgatgggcatg

SEQ ID NO: 440735 - DNA, 75 bp, synthetic construct
  source 1..75: mol_type = other DNA
gacccggcgctgttgcggctgaataatctctcatccagcgaactggttagcgccgtcaatccgaaacaattcgcc

SEQ ID NO: 440736 - DNA, 75 bp, synthetic construct
  source 1..75: mol_type = other DNA
aaagtaccttacggaaaattcatggcgtttacgtgaatcagggcaaatgcttgatataccgcactggacacctca

SEQ ID NO: 440737 - DNA, 75 bp, synthetic construct
  source 1..75: mol_type = other DNA
caacctgatcgatgaaagtgattttaccaaaaaatctggcgttgcaaccgacaacatcgttgctgttggtatgac

SEQ ID NO: 440738 - DNA, 75 bp, synthetic construct
  source 1..75: mol_type = other DNA
ctgactacaacggttgggttggctgtgaatataaaccccaaaccaccacggaagccggtttacgctggatggatc

SEQ ID NO: 440739 - DNA, 75 bp, synthetic construct
  source 1..75: mol_type = other DNA
gattgacgatgttggttgctgcaatttgaaaattcagtatgacatttatcacatgcagcggatggaaggtgaatt

SEQ ID NO: 440740 - DNA, 75 bp, synthetic construct
  source 1..75: mol_type = other DNA
ttatgctcgtgcgctgggtaataaaaaaattaactgtctggtcggtaaaacgccggctggtttcagcagtgaaca

SEQ ID NO: 440741 - DNA, 75 bp, synthetic construct
  source 1..75: mol_type = other DNA
gccttgccaaagcgctcggcggcggcgctggcgaccatcaatgtgttgctggagcagaacttaccggctcaggct

SEQ ID NO: 440742 - DNA, 75 bp, synthetic construct
  source 1..75: mol_type = other DNA
actgacactgagcattgaacagtgtgaacaggtgatcaaagcggcgcgtaaggcgctggccgccatgcgagtaag

SEQ ID NO: 440743 - DNA, 75 bp, synthetic construct
  source 1..75: mol_type = other DNA
gaacagtgtgaactggtgatcaaagcggcgcgtaaggcgctggcggccatgcgcgtgagtgtggaagaagcgtaa

SEQ ID NO: 440744 - DNA, 75 bp, synthetic construct
  source 1..75: mol_type = other DNA
ttacgctgtcttatcccttcaccactgctgcaggcaccagaattgagctggttgaactgaaacgtctgacggtca

SEQ ID NO: 440745 - DNA, 75 bp, synthetic construct
  source 1..75: mol_type = other DNA
gcggcaatgaccggactggtgccagaagatttagctgaaatggatttgctggattaccaggcattgcagaaacga

SEQ ID NO: 440746 - DNA, 75 bp, synthetic construct
  source 1..75: mol_type = other DNA
actacggctccatcgattacggccgtaactacggtgtagcatacgacatcggtgcgtggactgacgtcctgccag

SEQ ID NO: 440747 - DNA, 75 bp, synthetic construct
  source 1..75: mol_type = other DNA
gctgataatccgcatcgcggcgaaccgggaaccggagaaattaattacgaatatctctttacggtaattgaaaat

SEQ ID NO: 440748 - DNA, 75 bp, synthetic construct
  source 1..75: mol_type = other DNA
gggagattgatgccctcgatactgacgatctggagatgtggctggagcaggctgaagagcaaataaaaagcgagt

SEQ ID NO: 440749 - DNA, 75 bp, synthetic construct
  source 1..75: mol_type = other DNA
tcgacaatatggatctggctgattacctgcagttacagaaacgatttcagctcatcacggggatgggtgagagca

SEQ ID NO: 440750 - DNA, 75 bp, synthetic construct
  source 1..75: mol_type = other DNA
attatttatgctgtcagcgaagaggacgatgccgcgaagatatcagaaaaacttgggtatattactactacctca

SEQ ID NO: 440751 - DNA, 75 bp, synthetic construct
  source 1..75: mol_type = other DNA
atgaaaatcaaacatgagcacatccgcatggcgatgaatgcctgggcatatcctgatggcgagaaagttccggca

SEQ ID NO: 440752 - DNA, 75 bp, synthetic construct
  source 1..75: mol_type = other DNA
gtcacagcgtcccctcttagggacgtgcgtttgccatgctttttgcttgttatcgttattttggcgggtcgagcc

SEQ ID NO: 440753 - DNA, 75 bp, synthetic construct
  source 1..75: mol_type = other DNA
atgaaaatcaagcatgaacacatccgcatggcgatgaatgcatgggcataccctgatggtgaaaaggttccggca

SEQ ID NO: 440754 - DNA, 75 bp, synthetic construct
  source 1..75: mol_type = other DNA
catccggaagccctggctcgcaatacccagaaaattttccgctgggtagagaaagacacccctgatgcagttgaa

SEQ ID NO: 440755 - DNA, 75 bp, synthetic construct
  source 1..75: mol_type = other DNA
tccgctgggtggagaaagacacccctgatgcggttaaaaaaattcaggcgttgttaccagcgatcgaaaaagcaa

SEQ ID NO: 440756 - DNA, 75 bp, synthetic construct
  source 1..75: mol_type = other DNA
tccagacggcgagaaagtaccggctgcgaaaattaccaaagcgtatttcgaactcggtatgacgttcccggaatt

SEQ ID NO: 440757 - DNA, 75 bp, synthetic construct
  source 1..75: mol_type = other DNA
ccgcaaacgctggctgcgtactggtaaatgttctttcctgcctgaagaacgtgaatggatggacaggctgataag

SEQ ID NO: 440758 - DNA, 75 bp, synthetic construct
  source 1..75: mol_type = other DNA
acttcccgcagggtgaaagccgcgaccatccgataaaattcccggcgaaggcgcagttttatcagaatctgcaaa

SEQ ID NO: 440759 - DNA, 75 bp, synthetic construct
  source 1..75: mol_type = other DNA
cgcgttagccaccaaaatcgctcatgaggtaaacccgcaaaaccaggtgggctgtatgctggcgggcggcaattt

SEQ ID NO: 440760 - DNA, 75 bp, synthetic construct
  source 1..75: mol_type = other DNA
agtgcggcatcagcacgcataatgaagatgaagcccgtttaaaccgtcggatgtgcgaagttgcggaacggatca

SEQ ID NO: 440761 - DNA, 75 bp, synthetic construct
  source 1..75: mol_type = other DNA
gtgcgtcgcggctttcccggtgacgacgaagaggcgcaacggcggattattatggcggaaatcccctcaccgctg

SEQ ID NO: 440762 - DNA, 75 bp, synthetic construct
  source 1..75: mol_type = other DNA
ccgcaaacgctggctgcgtaccggtaaatgttctttcctgccagaagaacgcgaatggatggagagactgattag

SEQ ID NO: 440763 - DNA, 75 bp, synthetic construct
  source 1..75: mol_type = other DNA
gtctgccacggaacggtggcgcaagggtgcgatttacatatcgtctataaacccgcccaggcctggtgctgggat

SEQ ID NO: 440764 - DNA, 75 bp, synthetic construct
  source 1..75: mol_type = other DNA
gccagtgggcttttattggtctggttatgtgtcttgtgacgtattatactggctcagttgctgtttacttcctga

SEQ ID NO: 440765 - DNA, 75 bp, synthetic construct
  source 1..75: mol_type = other DNA
atgatgccgcgaagatatcagaaaaacttgggtatattaccactacatcaaagagcacaagcaagagccggggac

SEQ ID NO: 440766 - DNA, 75 bp, synthetic construct
  source 1..75: mol_type = other DNA
cgatttatcagaatatctcacaacttaatgaaatttacgggattcagggggcattgtcattacttgctaaccatc

SEQ ID NO: 440767 - DNA, 75 bp, synthetic construct
  source 1..75: mol_type = other DNA
cacccctgagttgaccattgcgaaagtgatgggccccggcgatgcagcagcaaccaccacccacggcaacgttga

SEQ ID NO: 440768 - DNA, 75 bp, synthetic construct
  source 1..75: mol_type = other DNA
acatttgaagaactggcgcaaggaaatgaaactgccctttttcatttaaaggatgcgcttaccaaaataagagag

SEQ ID NO: 440769 - DNA, 75 bp, synthetic construct
  source 1..75: mol_type = other DNA
gctgatgagtgcgcatccctgccggattatctatgctgtcagtgaagaagatgacgctaaaaagatttcggaaaa

SEQ ID NO: 440770 - DNA, 75 bp, synthetic construct
  source 1..75: mol_type = other DNA
ccggcgatcgaaaaggcgatgccgcctttgctggtggcccgtatgcgcagccacagttctgaatattaccgtgag

SEQ ID NO: 440771 - DNA, 75 bp, synthetic construct
  source 1..75: mol_type = other DNA
atgaaaatcaggcatgagcacatccgcatggcgatgaatgcctgggcgcatccggacggtgaaaaagttccggca

SEQ ID NO: 440772 - DNA, 75 bp, synthetic construct
  source 1..75: mol_type = other DNA
gcgaaaattaccaaagcgtatttcgaactgggtatgacgttcccggaactgtacgacgacagccatccggaagcc

SEQ ID NO: 440773 - DNA, 75 bp, synthetic construct
  source 1..75: mol_type = other DNA
cttgaaacaacagatgatcctcatgtccttttcattatcaaagatgcacttgataagttcagacattacgttgag

SEQ ID NO: 440774 - DNA, 75 bp, synthetic construct
  source 1..75: mol_type = other DNA
ctggtggaaagtggtgccaatctgcgcgcaattcaggtcaagggcgttaacccgcaacaggaacagcgtttgagc

SEQ ID NO: 440775 - DNA, 75 bp, synthetic construct
  source 1..75: mol_type = other DNA
atgcctttatcgttattgattggcctgcgttttagccgcggacggcgacgcggcggcatggtgtcgctgatctcc

SEQ ID NO: 440776 - DNA, 75 bp, synthetic construct
  source 1..75: mol_type = other DNA
gctatagccggtaagttttttgatccggtaaccggagagatgggaccagaattcagcaaaactatcgatctggaa

SEQ ID NO: 440777 - DNA, 75 bp, synthetic construct
  source 1..75: mol_type = other DNA
gaaatatcagaaactgcgggcagaactccatgaagcccggaaaaacattccgccccaaaatcctgttgatgccga

SEQ ID NO: 440778 - DNA, 75 bp, synthetic construct
  source 1..75: mol_type = other DNA
ggcgtatttgatacggaattctgcaaccgttacgaaaaaggcggggaagatggcatcacaatggtatttatcgca

SEQ ID NO: 440779 - DNA, 75 bp, synthetic construct
  source 1..75: mol_type = other DNA
ggtgcaactttcgacaacgtgattttacgccgttcatatgaacggcaggggatcccctgcccgtggcgttacacc

SEQ ID NO: 440780 - DNA, 75 bp, synthetic construct
  source 1..75: mol_type = other DNA
atgtaagaacgattattgccctggggctggtgatggatttcgatgctcgaagtgtcatcacatttgagggtgaac

SEQ ID NO: 440781 - DNA, 75 bp, synthetic construct
  source 1..75: mol_type = other DNA
tatattactataaaataaaaaaagagcattgtatttttaactacaaagacatgctttttgagaatgaagcttcaa

SEQ ID NO: 440782 - DNA, 75 bp, synthetic construct
  source 1..75: mol_type = other DNA
agtgcagaatcactacagcctgctctatcgtgcttctgaagaggccgggatccttgattattgtcgacaaaacgg

SEQ ID NO: 440783 - DNA, 75 bp, synthetic construct
  source 1..75: mol_type = other DNA
atggtggtgcgcgaagatggccgttactgcggttttgtctctggcggctgcgtggaggccgctgccgcttttgaa

SEQ ID NO: 440784 - DNA, 75 bp, synthetic construct
  source 1..75: mol_type = other DNA
cggtttctccactacttatgagtatgaaggattcggtgtaggtgcaacctatgctaaatctgaccgcactaataa

SEQ ID NO: 440785 - DNA, 75 bp, synthetic construct
  source 1..75: mol_type = other DNA
gtgttgcagaaaagtctggagataacggaagaggcagatttggcactgagaaacgcgatggcccggattaaataa

SEQ ID NO: 440786 - DNA, 75 bp, synthetic construct
  source 1..75: mol_type = other DNA
tatgggatcgtcgggcttatccggacactacaatccttgaaatccgtccccggaaaaggttgaaacaaatcgggg

SEQ ID NO: 440787 - DNA, 75 bp, synthetic construct
  source 1..75: mol_type = other DNA
atgagtatagaaataaaaacagggctggtgctgtccggcggtggggcggtgggcgcttatcaggcgggagtggtt

SEQ ID NO: 440788 - DNA, 75 bp, synthetic construct
  source 1..75: mol_type = other DNA
ggcagatcacccaattaaggtgaacggtcatcacgaaatcacatccaccagcaggacgtgtgaccatctaatgat

SEQ ID NO: 440789 - DNA, 75 bp, synthetic construct
  source 1..75: mol_type = other DNA
atgggaccggaatttagtaagactatcgatctggaaactgctggcggagtcattgatcgggacaccattaaatgg

SEQ ID NO: 440790 - DNA, 75 bp, synthetic construct
  source 1..75: mol_type = other DNA
aggaccacgccagcaataatgaaactggcgagacggcagatcccttaattgcggtgaacggtcatcacgttatca

SEQ ID NO: 440791 - DNA, 75 bp, synthetic construct
  source 1..75: mol_type = other DNA
agtatcacgccagcgataataaaactggcgaaacagcaaatcccttaattaaagtgaacggtcatcatgaaatct

SEQ ID NO: 440792 - DNA, 75 bp, synthetic construct
  source 1..75: mol_type = other DNA
gaatgatccgaaatgggtgaaggggattgaaacccgcgattcagtgaatcagaaccagcaagaaacggaacagaa

SEQ ID NO: 440793 - DNA, 75 bp, synthetic construct
  source 1..75: mol_type = other DNA
ccattatgaccgatgaaatcccgttagatgatgcactgttacaattgcgggaatttatcgacgaaaactccggtg

SEQ ID NO: 440794 - DNA, 75 bp, synthetic construct
  source 1..75: mol_type = other DNA
gatcgacattcacaaagatcccgtagcactgaacaaatacatcactgaatacctgactaccaagggcgtgtttga

SEQ ID NO: 440795 - DNA, 75 bp, synthetic construct
  source 1..75: mol_type = other DNA
aggtgagcgccataatgcacttgatgacgctcgttaccaggcaaaatacgtttcagctatctggcaaaaactgat

SEQ ID NO: 440796 - DNA, 75 bp, synthetic construct
  source 1..75: mol_type = other DNA
ccgatgaacgtcaattttgacaagctggcccctgaagtacagaacgctgtcatggttaagttcgacacatgtgaa

SEQ ID NO: 440797 - DNA, 75 bp, synthetic construct
  source 1..75: mol_type = other DNA
tcttcaccgacaaggatggcgaaaaatacggtcgcgcaaacaaactttctggtctggataaggcgctgtctgccg

SEQ ID NO: 440798 - DNA, 75 bp, synthetic construct
  source 1..75: mol_type = other DNA
ccctcaccctctgcgcaggacaaaccagccaacactgacaataccaacgtcaacggcgaagacatgactgagatt

SEQ ID NO: 440799 - DNA, 75 bp, synthetic construct
  source 1..75: mol_type = other DNA
gggtacttactgaaaccgatcatgccaaccctgatccggaaatcgtagatattgcctgcggtcgctcctctgccc

SEQ ID NO: 440800 - DNA, 75 bp, synthetic construct
  source 1..75: mol_type = other DNA
actgccattgaagccggtgatgaacgtcgcgcccgcgcaaaatttcactggcaattcctggaacattatccggtt

SEQ ID NO: 440801 - DNA, 75 bp, synthetic construct
  source 1..75: mol_type = other DNA
atttataacaaagacagcaacaaactggatctgtacggaaaagttaatgccgagcactacttctcctctaacgat

SEQ ID NO: 440802 - DNA, 75 bp, synthetic construct
  source 1..75: mol_type = other DNA
gcgcagcaagccttccacgacgcttctttcatgcttcgcccggcacaccagaaacaggttgcttctattcttcat

SEQ ID NO: 440803 - DNA, 75 bp, synthetic construct
  source 1..75: mol_type = other DNA
caccacaatccttgagatccgtccccggaaaaggctgaaatatgcaggtgatggtgacaacagcggcggtctgct

SEQ ID NO: 440804 - DNA, 75 bp, synthetic construct
  source 1..75: mol_type = other DNA
ccctgacagcgctgatggatcattatcttgatactgatgctctggcagacgggctaccgctgtatgtgtcgctgt

SEQ ID NO: 440805 - DNA, 75 bp, synthetic construct
  source 1..75: mol_type = other DNA
ctgcaatcccacggcggtagcatgatcatgctggcgaaaggcaaccgcagtcagcaggttaccgacgcgtgccat

SEQ ID NO: 440806 - DNA, 75 bp, synthetic construct
  source 1..75: mol_type = other DNA
aaacacggcggcttctacctcggtagcatcggcggtccggcggcggtactggcgcagcagagcatcaagcatctg

SEQ ID NO: 440807 - DNA, 75 bp, synthetic construct
  source 1..75: mol_type = other DNA
atgtcaaacaaaccatttatctaccaggcacctttcccgatggggaaagacaataccgaatattatctgctcacc

SEQ ID NO: 440808 - DNA, 75 bp, synthetic construct
  source 1..75: mol_type = other DNA
tggccttcaccaaccaactcattcaggaatccatggtgaatatcgtctcacacggcaaggccgaactcgaagcca

SEQ ID NO: 440809 - DNA, 75 bp, synthetic construct
  source 1..75: mol_type = other DNA
actatggcggcgcggcaggtccggtcatctttggcgtgggttataacgatattaaatcctggtggttggtcggtg

SEQ ID NO: 440810 - DNA, 75 bp, synthetic construct
  source 1..75: mol_type = other DNA
ttcctccaaagataaaacccgtcttgccttcgctggcctgaaattcggtgactacggctccatcgattatggccg

SEQ ID NO: 440811 - DNA, 75 bp, synthetic construct
  source 1..75: mol_type = other DNA
ataatacaattagcaatgttgtcctttcactatgcggaatgtcacatatatctaacaaattatctaataatggac

SEQ ID NO: 440812 - DNA, 75 bp, synthetic construct
  source 1..75: mol_type = other DNA
ttgtttccgcacgcaaaataagcctgacattgctgtctctgatgccggaattattgagcgaggaagtatatgcca

SEQ ID NO: 440813 - DNA, 75 bp, synthetic construct
  source 1..75: mol_type = other DNA
ccaggcaatgaacctctgccagatccccggacgtgcaggagcactgcttacgacgcttcttcgccatatatcgat

SEQ ID NO: 440814 - DNA, 75 bp, synthetic construct
  source 1..75: mol_type = other DNA
gcctcggcgcacagtttggtggtaaatacttcgctcacgacatccgcgtgattcgcctgcctcgtcacggcgcat

SEQ ID NO: 440815 - DNA, 75 bp, synthetic construct
  source 1..75: mol_type = other DNA
actgaaaactcagcagaaaaaatcaaccctgtcactactgccattcgtcgcgaatacaagcagacatggaaaacg

SEQ ID NO: 440816 - DNA, 75 bp, synthetic construct
  source 1..75: mol_type = other DNA
ttacgccgttcatacgaacggcaggggatcccctgcccgtggcgttattgcaacgatcgcgatgtgcgcacaatc

SEQ ID NO: 440817 - DNA, 75 bp, synthetic construct
  source 1..75: mol_type = other DNA
atctggaaactgctggcggagtcattgatcgggacaccattaaatggtggcttaaacaatcacgcgaagcgcaat

SEQ ID NO: 440818 - DNA, 75 bp, synthetic construct
  source 1..75: mol_type = other DNA
atgaaaaaaattacagtggcactctctgcggttgcagtatctgttctgatggcaacgtctgctcaagctgcagaa

SEQ ID NO: 440819 - DNA, 75 bp, synthetic construct
  source 1..75: mol_type = other DNA
tatgtctactttcgttgattacaaaatcaacctgcttgacaaaaatgacttcactaaagcactcggtgtaagcac

SEQ ID NO: 440820 - DNA, 72 bp, synthetic construct
  source 1..72: mol_type = other DNA
gacgcccgttaccaggcaaaatacgtttcagttatctggcaaaaactgatcccgaatcaggctgatttttaa

SEQ ID NO: 440821 - DNA, 75 bp, synthetic construct
  source 1..75: mol_type = other DNA
gtgttgcaggccgcgcgagaagcaaaacccttttatctcggcgcattgggcagctatcgaacccacactttacgt

SEQ ID NO: 440822 - DNA, 75 bp, synthetic construct
  source 1..75: mol_type = other DNA
tggatcattatcttgatactgatgctctggcagacgggctaccgctgtatgtgtcgctgtaccccacagaagggg

SEQ ID NO: 440823 - DNA, 75 bp, synthetic construct
  source 1..75: mol_type = other DNA
cagtatccggtctctactcgtctgtcactcaccggcaccattatcgttggtcgtgatattgcgcacgctaagctg

SEQ ID NO: 440824 - DNA, 75 bp, synthetic construct
  source 1..75: mol_type = other DNA
tagcgcccctaatgatccgaaatgggtcaaggggatccagactcgcgattctgtgaaccagaaccagcatgaatc

SEQ ID NO: 440825 - DNA, 75 bp, synthetic construct
  source 1..75: mol_type = other DNA
aacgtcaccgtggatatggtcatcaacgcaagcgggcttcttggcgatgacgacatgatgacctttgacggacac

SEQ ID NO: 440826 - DNA, 75 bp, synthetic construct
  source 1..75: mol_type = other DNA
cttgatgatgcacgtcaccaggcaaaacaagtttcagcaatctggcaaaaactgatcccgagtcaggctgatttt

SEQ ID NO: 440827 - DNA, 75 bp, synthetic construct
  source 1..75: mol_type = other DNA
aaaacggccaacaactatcaggaggagattggctctctgctgggtaaaatcaaatcaccagtcatcgccggtttc

SEQ ID NO: 440828 - DNA, 75 bp, synthetic construct
  source 1..75: mol_type = other DNA
agcggcttactgctggtgaaactgcttcagggggcaacgctgcaggaggccctggaacatgtgaccgctgcagta

SEQ ID NO: 440829 - DNA, 75 bp, synthetic construct
  source 1..75: mol_type = other DNA
cgcgagctggctacagccgtgaccgttttgaaatgctgctagtcaccgccgatgaagcctggcatatcagccgtc

SEQ ID NO: 440830 - DNA, 75 bp, synthetic construct
  source 1..75: mol_type = other DNA
tctcttcgtcggtggaagcactcagggcacagcttaaggaaaatgaagcttatgtccgccttttaatcgggatgg

SEQ ID NO: 440831 - DNA, 75 bp, synthetic construct
  source 1..75: mol_type = other DNA
agtactggtgcctaaaatggaagaacgtgacggagagatgctggatattcatcagaaaactcgcgatgacttctt

SEQ ID NO: 440832 - DNA, 75 bp, synthetic construct
  source 1..75: mol_type = other DNA
tgattgagcaggaattgcgtgatgacccgtatgctcaggaggcattttcaaaactcctgcgtatggctatcgaag

SEQ ID NO: 440833 - DNA, 75 bp, synthetic construct
  source 1..75: mol_type = other DNA
tactatcgattaacgggcatgacgggcgctacggtacctgtcatacaccaatgaaattctgggcggcatggcgcg

SEQ ID NO: 440834 - DNA, 75 bp, synthetic construct
  source 1..75: mol_type = other DNA
ggcgaagtggttgataaaacccgccagaatgaacatccgcacctccctgttgaaagtcgtcgtcaggccaaaggt

SEQ ID NO: 440835 - DNA, 75 bp, synthetic construct
  source 1..75: mol_type = other DNA
gggctgtgttttattcacaattataatggcatattcccagccatcgtttgcactgttgtgcagaaataaccagac

SEQ ID NO: 440836 - DNA, 75 bp, synthetic construct
  source 1..75: mol_type = other DNA
gaggtcatcgggctgaccgatgccgccgatatgcctgacgaagtgcgcgcccgactgcataaggtcaccggtctg

SEQ ID NO: 440837 - DNA, 75 bp, synthetic construct
  source 1..75: mol_type = other DNA
ggctcagcttaaggaaaatgaagcttatgtccgccttttaatcgggatggatgcggtctcccgatggaccgggcc

SEQ ID NO: 440838 - DNA, 75 bp, synthetic construct
  source 1..75: mol_type = other DNA
ggattatatgaatttaaatcaaaaaatatagatgatattggaatatttgcattggcaatgtgggtaatgctgcca

SEQ ID NO: 440839 - DNA, 75 bp, synthetic construct
  source 1..75: mol_type = other DNA
ggcttaccgtgcacatccatatgtccgtcaccttgccagcgtaggcgaagggatggtaatcgaacatcagatcga

SEQ ID NO: 440840 - DNA, 75 bp, synthetic construct
  source 1..75: mol_type = other DNA
tcctcagtaaggcgctgattcttcatgacagcctgaagcagtgtcgcattgtggtggtgacggaccgtgtcgatc

SEQ ID NO: 440841 - DNA, 75 bp, synthetic construct
  source 1..75: mol_type = other DNA
aaccgcagccggtacaccaatcggtcccaacgacacagcgattgccggacatgctatagctgcaggggccattct

SEQ ID NO: 440842 - DNA, 75 bp, synthetic construct
  source 1..75: mol_type = other DNA
ggagccagttcgatgaaattcagtatggcagtgctgtgctcaagcgcaatggcaagggagccatactacgcccgg

SEQ ID NO: 440843 - DNA, 75 bp, synthetic construct
  source 1..75: mol_type = other DNA
aatctggagcaggcggtgctgcgcggtcaccgtatcgtggtctcggccatcacctactccgagatgcgcttcggc

SEQ ID NO: 440844 - DNA, 75 bp, synthetic construct
  source 1..75: mol_type = other DNA
atggtgaccgatttattaggttcgaagatgccgtcgacgattctcgccggggtcatcctgttgtggagtgaaggt

SEQ ID NO: 440845 - DNA, 75 bp, synthetic construct
  source 1..75: mol_type = other DNA
tcctgccctgggatcgcgccgcagtagacgccaccacgaagattaaagtggcactgcggctggccgggacgccga

SEQ ID NO: 440846 - DNA, 75 bp, synthetic construct
  source 1..75: mol_type = other DNA
atatgctcgacacgaatatctgctctttcattatgcgtgaacagcccgccgcagtgatcaaacgtctggagcagg

SEQ ID NO: 440847 - DNA, 75 bp, synthetic construct
  source 1..75: mol_type = other DNA
caccaataaattcggcccgattgtccacgcctacactatgcagagggctgtcgaagataaagccgttacgcctct

SEQ ID NO: 440848 - DNA, 75 bp, synthetic construct
  source 1..75: mol_type = other DNA
atcgttctgattgatgaaggacaccggagccaggggggggagaaccatgtgcgaatgaaactggcactgccgaac

SEQ ID NO: 440849 - DNA, 75 bp, synthetic construct
  source 1..75: mol_type = other DNA
aatctgccagttatcggaaaaggcgctggataacctgatatcgcaggtctgttctccggcgctgaatgaaggact

SEQ ID NO: 440850 - DNA, 75 bp, synthetic construct
  source 1..75: mol_type = other DNA
cacgcgacccgtgcggccgtcgaggaaggcatcgtcccgggcggcggcgtcgccctgatccgtgccaaggcggcg

SEQ ID NO: 440851 - DNA, 75 bp, synthetic construct
  source 1..75: mol_type = other DNA
cggccgcgcgaagaaggtgcaggtctcgaaggagaacaccaccatcatcgacggcgccggcgacaccgcggacat

SEQ ID NO: 440852 - DNA, 75 bp, synthetic construct
  source 1..75: mol_type = other DNA
aattggccgggaaaaaagacaaagccaatgcaatggcgacatccgggcagatgctggcgaaacagattggctccg

SEQ ID NO: 440853 - DNA, 75 bp, synthetic construct
  source 1..75: mol_type = other DNA
ggcaaaaggaacccgcttcctgtggcagtacagcgataagtggatgaccgaatcccggcaggaaaagctgatgtg

SEQ ID NO: 440854 - DNA, 75 bp, synthetic construct
  source 1..75: mol_type = other DNA
agtgccattctttgcgccgaatatgcgtcagacatttaacgatgattaccgtattccggtactgattcgtatcga

SEQ ID NO: 440855 - DNA, 75 bp, synthetic construct
  source 1..75: mol_type = other DNA
ggtgctgaaaacgctcaacgagaagagtaacgcgctggtatttgaagcgaagggcaaaaaagatccagagccgaa

SEQ ID NO: 440856 - DNA, 75 bp, synthetic construct
  source 1..75: mol_type = other DNA
acactggctgatgatttgacgcacgttgaaatcaaagcgcggctgaattccggtatggaaaaattgctgcataaa

SEQ ID NO: 440857 - DNA, 75 bp, synthetic construct
  source 1..75: mol_type = other DNA
gtgctattccgaggctttcgagtaggctcggttgaaaccagcaccttcgatacgcaaaaacgcaatatcagctat

SEQ ID NO: 440858 - DNA, 75 bp, synthetic construct
  source 1..75: mol_type = other DNA
atcaggtgttgcgagaactgcaaccggtgctgaaaacgctcaacgagaagagtaacgcgctggtatttgaagcga

SEQ ID NO: 440859 - DNA, 75 bp, synthetic construct
  source 1..75: mol_type = other DNA
gataccgtcttttgggtggtgaaaccgcagattggtcgagaagggattagcggcctaggaacgctgctgtctggg

SEQ ID NO: 440860 - DNA, 75 bp, synthetic construct
  source 1..75: mol_type = other DNA
ttcctttaggcctgttacggcgtgaatacatcattctgattgagatcgcactgtcagcgttatcgctgttgcttt

SEQ ID NO: 440861 - DNA, 75 bp, synthetic construct
  source 1..75: mol_type = other DNA
ttgaacgcacagaaaatcacgataattttggccttgcgttgctgatttttcacgtcttgtttggtgggcggcatc

SEQ ID NO: 440862 - DNA, 75 bp, synthetic construct
  source 1..75: mol_type = other DNA
ttttggccttgcgttgctgatttttcacgtcttgtttggtgggcggcatccttattccggtgtgccgcttatctc

SEQ ID NO: 440863 - DNA, 75 bp, synthetic construct
  source 1..75: mol_type = other DNA
ggaaggttttatcgccaaacggacgatgctacgaaaaaatgaaggacgaaattcttgggttaccggaagaagaaa

SEQ ID NO: 440864 - DNA, 75 bp, synthetic construct
  source 1..75: mol_type = other DNA
ggaaggttttatcgccaaacggacgatgctcgaaaaaatgaaggacgaaattcttgggttaccggaagaagaaaa

SEQ ID NO: 440865 - DNA, 75 bp, synthetic construct
  source 1..75: mol_type = other DNA
ccttcatgctccagcacggaccatgccgttgatggagccgctacgtcaggcggcagaaaaactggctcaggcgca

SEQ ID NO: 440866 - DNA, 75 bp, synthetic construct
  source 1..75: mol_type = other DNA
cctcagaccatcggagagccgaaatcactcacaatactttatgggataaagtcccggcctccgcatggagaaatg

SEQ ID NO: 440867 - DNA, 75 bp, synthetic construct
  source 1..75: mol_type = other DNA
gacggttatgaacagcgccgaccgacgggacttaatgccagactgaagacgtttcaggcggtgttccgggtgacg

SEQ ID NO: 440868 - DNA, 75 bp, synthetic construct
  source 1..75: mol_type = other DNA
gaacggtaaaggttgtgtgccgtgaatggagcgttacggataatgcccggtacagtgatttcagctgtacgattg

SEQ ID NO: 440869 - DNA, 75 bp, synthetic construct
  source 1..75: mol_type = other DNA
gtatatatttttttagctatagtattatggattttacctattctcctgattgtatacctgtatacctgtatacct

SEQ ID NO: 440870 - DNA, 75 bp, synthetic construct
  source 1..75: mol_type = other DNA
caaaaaaatagaattcgaattcaaaggagagcggatgaagtaaatgatttaagagttaaccaacctttagttaag

SEQ ID NO: 440871 - DNA, 75 bp, synthetic construct
  source 1..75: mol_type = other DNA
gaaaactgatacatgccggagacctcattgccactatcaaggtcaggaaagagtctacatatggccaggatgcgg

SEQ ID NO: 440872 - DNA, 75 bp, synthetic construct
  source 1..75: mol_type = other DNA
acttcggtgcccaacgttttgggattggcggtagcaacttgcagggcgcgctgcgctgggcgcaaaccaatactc

SEQ ID NO: 440873 - DNA, 75 bp, synthetic construct
  source 1..75: mol_type = other DNA
ggttagagttctcgatcctgctgttgatgctatcaaccgaacgactgacctgacagttcgctatgaaactgttac

SEQ ID NO: 440874 - DNA, 75 bp, synthetic construct
  source 1..75: mol_type = other DNA
ctctgcggtcgatcactggctggcagaactaaccatgaacaaactttacgatcgtgttcccgcttcagtccggaa

SEQ ID NO: 440875 - DNA, 75 bp, synthetic construct
  source 1..75: mol_type = other DNA
aactggctggcagaactgacaatgaacaaactttacgatcgcgcgccggcttccgtctggaaatatgtcacctga

SEQ ID NO: 440876 - DNA, 75 bp, synthetic construct
  source 1..75: mol_type = other DNA
agaacaagtgtctgtcaccctccctgaataacgtgaccatttcggagtcaaagtcgttgatccgcatggtagagg

SEQ ID NO: 440877 - DNA, 75 bp, synthetic construct
  source 1..75: mol_type = other DNA
aggaacggcacatgccgggctgcaggatgacatgaattcgtttttcaacaatatgagttatgccagtaactccac

SEQ ID NO: 440878 - DNA, 75 bp, synthetic construct
  source 1..75: mol_type = other DNA
agtcagagttctagatcctgcggtaaatgccattaacaggactactgatttaactgtaaggtatgaaaccgtaac

SEQ ID NO: 440879 - DNA, 75 bp, synthetic construct
  source 1..75: mol_type = other DNA
aggcactacctggaccaaagcaccatggcggtttgaagccggtacacccaataccggaggcatcattggtcttgg

SEQ ID NO: 440880 - DNA, 75 bp, synthetic construct
  source 1..75: mol_type = other DNA
gcatcgctgtttatcaacgcccgttcggcggaagagctggtgttcgtccgcggcacgacggaagggatcaatctg

SEQ ID NO: 440881 - DNA, 75 bp, synthetic construct
  source 1..75: mol_type = other DNA
ggtcatcgcgaaagcaaaagctaaccgtcagcagcgatttttttccacggtcagttcaatcccacactgtggctg

SEQ ID NO: 440882 - DNA, 75 bp, synthetic construct
  source 1..75: mol_type = other DNA
gacattgcgattcgcgtttggtggctcattcattagatgttgcccctgcagagtatggaaagttttcttttggtg

SEQ ID NO: 440883 - DNA, 75 bp, synthetic construct
  source 1..75: mol_type = other DNA
tatgggccaccggacagacttggcgttatcgcctttaatctcggtaaacatcatgcctatgatgttggcagtttt

SEQ ID NO: 440884 - DNA, 75 bp, synthetic construct
  source 1..75: mol_type = other DNA
tatctcgacagcgccgccagtgcgcagaaaccgagccaggtgattgacgccgaggccgagttttatcgtcatggc

SEQ ID NO: 440885 - DNA, 75 bp, synthetic construct
  source 1..75: mol_type = other DNA
atgctgccagaccagcgaccagcgaccagcgaccagcgaccagcgaccagcgaccagcgaccagcgaccagcgac

SEQ ID NO: 440886 - DNA, 75 bp, synthetic construct
  source 1..75: mol_type = other DNA
tctgtacgaagcatacatcgattcgttactgatcgatattcaaaacggagaatactcgttacttaatgaaatcag

SEQ ID NO: 440887 - DNA, 75 bp, synthetic construct
  source 1..75: mol_type = other DNA
atactttcttgtttgaaatgatgaagagtaaatcaaaagacattacgcttgctgcgatctatgcattaggtgaag

SEQ ID NO: 440888 - DNA, 75 bp, synthetic construct
  source 1..75: mol_type = other DNA
cacggacgaaccagtactggcgcagacgctgctgatgcagctaaagccggtgctgtcaatgagtgatgccactgt

SEQ ID NO: 440889 - DNA, 75 bp, synthetic construct
  source 1..75: mol_type = other DNA
gtcgcgcttattgcacatggacaaaatataactctcgccatgaaagagggggttccacagcgtgttctgctgaaa

SEQ ID NO: 440890 - DNA, 75 bp, synthetic construct
  source 1..75: mol_type = other DNA
ttttattacggtcaaaggtaaacggatctttgctcgtcaaaaaggcttggcagcctttcctatcaaaattcctgc

SEQ ID NO: 440891 - DNA, 75 bp, synthetic construct
  source 1..75: mol_type = other DNA
ggtcacgaaatcgcagctatcgatagagacagtaagcaattttatgctctacgaatgcctattcttaagcgagtg

SEQ ID NO: 440892 - DNA, 75 bp, synthetic construct
  source 1..75: mol_type = other DNA
tcagagttacaccgaacttagagaaaggtgaaacgattaacgttggtttgatcgtttaccatgactctgacatag

SEQ ID NO: 440893 - DNA, 75 bp, synthetic construct
  source 1..75: mol_type = other DNA
ttatacaacatggaattttcagtaagtattttgaagatctttcccaacataaaatcgtagctaattatccaatta

SEQ ID NO: 440894 - DNA, 75 bp, synthetic construct
  source 1..75: mol_type = other DNA
ttgtagagcacggcctgctggcatcggtcaatattgatggccctacgctcatcgccctgcgtcagcaaccaaaaa

SEQ ID NO: 440895 - DNA, 75 bp, synthetic construct
  source 1..75: mol_type = other DNA
ttaaagaaactaaataaacatccctatctcttttttaaagatgcaatcaaaaaatattggggtaaaaacaaagaa

SEQ ID NO: 440896 - DNA, 75 bp, synthetic construct
  source 1..75: mol_type = other DNA
ataatgaatttcatggacatggatatgaagattttgaggcattgaacagattagccaatagagctaataagtttt

SEQ ID NO: 440897 - DNA, 75 bp, synthetic construct
  source 1..75: mol_type = other DNA
tgggaagtagtctgggcctgctgcccgactggcgtagcccgtcgtatccagggcgtaccgctgcttattaagtaa

SEQ ID NO: 440898 - DNA, 75 bp, synthetic construct
  source 1..75: mol_type = other DNA
accatcgaaacggcaacagcggacagcgcgggtaatgaacgcttcctcttaaaactgacccagacgacttcgctc

SEQ ID NO: 440899 - DNA, 75 bp, synthetic construct
  source 1..75: mol_type = other DNA
tgaaggttacgagggatataaaggtgctcctcggctcgtgttggctttactttggaagttgcaggaaattagcga

SEQ ID NO: 440900 - DNA, 75 bp, synthetic construct
  source 1..75: mol_type = other DNA
agactcaacctttgcctcgatgtgtgaatttggtccgctgtggctggatgatttcggcactgggatggcgaattt

SEQ ID NO: 440901 - DNA, 75 bp, synthetic construct
  source 1..75: mol_type = other DNA
aatgcggcgatcactgcgttaggtaatatctgttctgatcgcctgattgatggcttctttgatgtcaaaccgaca

SEQ ID NO: 440902 - DNA, 75 bp, synthetic construct
  source 1..75: mol_type = other DNA
attacgaagatgttctcggcgaaccgctgaagccgtcttccggctcacagttcgaaccaattcgccatgtgtacg

SEQ ID NO: 440903 - DNA, 75 bp, synthetic construct
  source 1..75: mol_type = other DNA
tttgtgaatcatgattacacatcacaaactcttggtgagcttgccaactataatatacgcagcacattattatta

SEQ ID NO: 440904 - DNA, 75 bp, synthetic construct
  source 1..75: mol_type = other DNA
agcatgacagctttggcggttttattccggtgcgttgctgggtaacggatgactttaaactggtgctcaacctct

SEQ ID NO: 440905 - DNA, 75 bp, synthetic construct
  source 1..75: mol_type = other DNA
atgtaatccgtaatcagttatccaaaacaggaataacgaagattttgggttatgacggtttaacagaagttgcta

SEQ ID NO: 440906 - DNA, 75 bp, synthetic construct
  source 1..75: mol_type = other DNA
cgtgatcacattctggaaccctctgccggcaccgggccatactgcgggcgattcgtcatgtcgcgccgggggcca

SEQ ID NO: 440907 - DNA, 75 bp, synthetic construct
  source 1..75: mol_type = other DNA
tcgatttcaacctgatgcagcgcacgctgtcggtacgccatgcgaaccaggttctgccagacgtgctcgtggcac

SEQ ID NO: 440908 - DNA, 75 bp, synthetic construct
  source 1..75: mol_type = other DNA
gtaagcgcctgctgcgcaacatcctgggcctgaagattatcgatctgagcgccattcaggatgaagtcattctgg

SEQ ID NO: 440909 - DNA, 75 bp, synthetic construct
  source 1..75: mol_type = other DNA
gttcgaagaaaactctggacagaaatttgaagggatgagagaaaaggcaagaaacattaaaagtgggaatacctt

SEQ ID NO: 440910 - DNA, 75 bp, synthetic construct
  source 1..75: mol_type = other DNA
ttccttgccggtgtgttggtcagttttgtcaaactgatggcttacggcagcattggcgtgggcagtagttttatt

SEQ ID NO: 440911 - DNA, 75 bp, synthetic construct
  source 1..75: mol_type = other DNA
taccaaagggtacgttcgacgtagaaacagcctgcaatggacactcgcgctgcttgttacgtccatcatgctgta

SEQ ID NO: 440912 - DNA, 75 bp, synthetic construct
  source 1..75: mol_type = other DNA
tcttatcctgttgctgcagttatctttttagccagtatcatggtgccaacgttaaagatgatcgccatcgcatgg

SEQ ID NO: 440913 - DNA, 75 bp, synthetic construct
  source 1..75: mol_type = other DNA
cgtgatcacattctggaaccctctgccggcaccgggggccatactgcgggcgattcgggataccgcgccgggggc

SEQ ID NO: 440914 - DNA, 75 bp, synthetic construct
  source 1..75: mol_type = other DNA
cagtcaagattggttctcgcgcaatagcttttattgaaagcgagatcgatgactggatcgatcaacgtatagccg

SEQ ID NO: 440915 - DNA, 75 bp, synthetic construct
  source 1..75: mol_type = other DNA
tgcttgttacgtccatcatgctgtatctcccggcgaatattttgcccatcatggtgacggatttattaggctcga

SEQ ID NO: 440916 - DNA, 75 bp, synthetic construct
  source 1..75: mol_type = other DNA
cccgacgacaaactgcgcgaagtggagcaattgtccagaaacggcaaggttggcatggtcggtgatggcatcaac

SEQ ID NO: 440917 - DNA, 75 bp, synthetic construct
  source 1..75: mol_type = other DNA
tggaagccctgcatgaacgccatgaagaagttcaggcattgctgggtgaggcgcaaactatcgccgaccaggaac

SEQ ID NO: 440918 - DNA, 75 bp, synthetic construct
  source 1..75: mol_type = other DNA
gcacgtattcatgcggcagaaatggcgaaacgccagcaggcggaagcatctacccgtcgtaacctgttgggcagc

SEQ ID NO: 440919 - DNA, 75 bp, synthetic construct
  source 1..75: mol_type = other DNA
tgcagcgtgttccggccacagaatcacaggggcgtattcacacttccgcctgtactgtcgcggtgatgccggaac

SEQ ID NO: 440920 - DNA, 75 bp, synthetic construct
  source 1..75: mol_type = other DNA
cacgacgtggtgacgatgaacagccgggtaaaattccgcaatcttagcgatggcgaagtgcgtgtacgcacactg

SEQ ID NO: 440921 - DNA, 75 bp, synthetic construct
  source 1..75: mol_type = other DNA
ctctaccgtctggatgaagtgatggaaggtaagctggatatgctgattgaaccgattatccaggaacatcaggcc

SEQ ID NO: 440922 - DNA, 75 bp, synthetic construct
  source 1..75: mol_type = other DNA
tggaagccctgcatgaacgccatgaagaagttcaggcgttgatgggtgacgcgcaaactatcgccgaccaggaac

SEQ ID NO: 440923 - DNA, 75 bp, synthetic construct
  source 1..75: mol_type = other DNA
atgagcctgaacgaatgatgtacagacatatacctctgatacgtcttgttgccagtgagttgtcaccaaagaaat

SEQ ID NO: 440924 - DNA, 75 bp, synthetic construct
  source 1..75: mol_type = other DNA
ttctgcgcggtgtcacgctgaaagggattgatagtgtcatgttcgcgaaagagaaaagagcagcaatctggcaac

SEQ ID NO: 440925 - DNA, 75 bp, synthetic construct
  source 1..75: mol_type = other DNA
agatggatggtcgctacagtacccaaattgctgaaatcgctgaaagcgagctgccacagggggatgtggaggtca

SEQ ID NO: 440926 - DNA, 75 bp, synthetic construct
  source 1..75: mol_type = other DNA
tgtacagccgttacgcagaagcccgtcgctggcgcgtggaaatcatgagcgccagcgagggcgagcatggtggct

SEQ ID NO: 440927 - DNA, 75 bp, synthetic construct
  source 1..75: mol_type = other DNA
tgaaaaaagagcgcatcaggaagagaatatacaaaacccgggatctagcccgggcggatatcttcgattacattg

SEQ ID NO: 440928 - DNA, 75 bp, synthetic construct
  source 1..75: mol_type = other DNA
ggagtggttaaaagagcaacgagaaagtggtaattataacgccagccggatatggcgggaaatggtggcccgggg

SEQ ID NO: 440929 - DNA, 75 bp, synthetic construct
  source 1..75: mol_type = other DNA
atcagcggctgatggagtcaatagaatggattggcaagcattcccagtacttacgcaaggcaactgctgatggag

SEQ ID NO: 440930 - DNA, 75 bp, synthetic construct
  source 1..75: mol_type = other DNA
aaaccgttcatcgatgcctttggatttatgggcggcggaggccagacaatcggcttactgattgctttatggatt

SEQ ID NO: 440931 - DNA, 75 bp, synthetic construct
  source 1..75: mol_type = other DNA
attgcaatggcaagcggcgcgatgcctggcaatgcgctgtttagcgcggcaattagcgcatggctgtgggtcacc

SEQ ID NO: 440932 - DNA, 75 bp, synthetic construct
  source 1..75: mol_type = other DNA
acgtcaggggctgcgttcgtgctcctgttgtacggcaatccttcctgctgatgaacccgtgtgcccgcgctgtgg

SEQ ID NO: 440933 - DNA, 75 bp, synthetic construct
  source 1..75: mol_type = other DNA
gcctgcattcgcccgactccgccattctcagtgcggtcattttcaacgccttgattatcgtctttttgattcccc

SEQ ID NO: 440934 - DNA, 75 bp, synthetic construct
  source 1..75: mol_type = other DNA
tgagtgggccatggttttacaggatgccagtggtaccaggcatgtaacagatgcaatagcccgtcgtagtaatgg

SEQ ID NO: 440935 - DNA, 75 bp, synthetic construct
  source 1..75: mol_type = other DNA
tggcttatcacacgggtaattttttattgattggtaatggttaccacaacgagcaaaaagaacgtcaggccattg

SEQ ID NO: 440936 - DNA, 75 bp, synthetic construct
  source 1..75: mol_type = other DNA
ggctgaccacggtccgttatccaatagtgacaatggcgacccaggctgccgaactggcattggcgctggcggata

SEQ ID NO: 440937 - DNA, 75 bp, synthetic construct
  source 1..75: mol_type = other DNA
tggctgtgcatagtgcaatggagtctcttagctatcacccgaacgccaacgcccgtgcgctggcgcagcagacca

SEQ ID NO: 440938 - DNA, 75 bp, synthetic construct
  source 1..75: mol_type = other DNA
ccggcaccatcacgctaggtaaccgtcaggcatcggagtttatccctgcgcagggcgtagaggaaaaaacgctgg

SEQ ID NO: 440939 - DNA, 75 bp, synthetic construct
  source 1..75: mol_type = other DNA
tgaatccggcggcgattttgcctccgtcactggcggcacgcgtattctttctgactggctggtgattgagtgcag

SEQ ID NO: 440940 - DNA, 75 bp, synthetic construct
  source 1..75: mol_type = other DNA
gccgacttcttcaaacctgccctgctggcgcgtatggaagtggtgccgtatctgccgctgtcgaaagagacgctc

SEQ ID NO: 440941 - DNA, 75 bp, synthetic construct
  source 1..75: mol_type = other DNA
ggagccacagccaaaagcggccacctgcgccccgcgtaagaccaggagcgcgacaccggcaaaacgtggacgccc

SEQ ID NO: 440942 - DNA, 75 bp, synthetic construct
  source 1..75: mol_type = other DNA
ttcctgaataccaataactataaacacctgggaacgctgggaaccggtaaccactttattgaaatctgccttgat

SEQ ID NO: 440943 - DNA, 75 bp, synthetic construct
  source 1..75: mol_type = other DNA
ccgcctgttaacgtcgatgctaaatgggccgagcttgaagcaggttatcagtggttaacgcaaaaatatccgcgt

SEQ ID NO: 440944 - DNA, 75 bp, synthetic construct
  source 1..75: mol_type = other DNA
tggcatctctccattcgacgtcgtacatatcgatgtatccggcctggtcggaaccgaccatgattacggtgcaat

SEQ ID NO: 440945 - DNA, 75 bp, synthetic construct
  source 1..75: mol_type = other DNA
acctgtttaccactgctcttgacattgatctgactcctgccagtggcttcacttctgacagcaaacgtcagtttg

SEQ ID NO: 440946 - DNA, 75 bp, synthetic construct
  source 1..75: mol_type = other DNA
actgtcaccacaactatgtgcaaaaagaacagcactttggcgaagagatctacgtgacgcgtaaaggcgcggtgt

SEQ ID NO: 440947 - DNA, 75 bp, synthetic construct
  source 1..75: mol_type = other DNA
ggcgaaaagctttatcgtccgtgggctgggaaatgaagaatctttctgttcatgcagccacggtgccggacgcgt

SEQ ID NO: 440948 - DNA, 75 bp, synthetic construct
  source 1..75: mol_type = other DNA
caattgtccgacccgggtaatatcagagacaacgctgacaaaatcagtgatgactggaaagcctttgatcgtgcc

SEQ ID NO: 440949 - DNA, 75 bp, synthetic construct
  source 1..75: mol_type = other DNA
cctcgctgccgctctgatgctgaaaagctacggtacgatcagtgtcgacggtaaagtcagtgatgccgacctgaa

SEQ ID NO: 440950 - DNA, 75 bp, synthetic construct
  source 1..75: mol_type = other DNA
cagctgtccgatccgggtaatatcgccgacaacgccgacaaaatcagcgatgactggaaagccttcgaccgtgcc

SEQ ID NO: 440951 - DNA, 75 bp, synthetic construct
  source 1..75: mol_type = other DNA
cttcacaccaaaattccagcgtgttgacctgtttaactacaacgtgctggttaaaaattacgacagtagcgcttt

SEQ ID NO: 440952 - DNA, 75 bp, synthetic construct
  source 1..75: mol_type = other DNA
ctggacactgggtctggtcgcacagaacctgctcccccgcagtattgagacaaaggaagtgaacggtgtcactga

SEQ ID NO: 440953 - DNA, 75 bp, synthetic construct
  source 1..75: mol_type = other DNA
gtgccagtacggacctggatgaccactggacgctggggctggtcgcacagaacctgatcccccgtagtattgaga

SEQ ID NO: 440954 - DNA, 75 bp, synthetic construct
  source 1..75: mol_type = other DNA
tggtcgtccctgctctgttggtagcaggtaccgcaaacgctgcggaaatctataacaaagatggcaacaaactgg

SEQ ID NO: 440955 - DNA, 75 bp, synthetic construct
  source 1..75: mol_type = other DNA
aacctgctaccgcaggtatggaaaatcgtaaaccggtcgtcttacaggcccacctcgatatggtgccgcagaaaa

SEQ ID NO: 440956 - DNA, 75 bp, synthetic construct
  source 1..75: mol_type = other DNA
tctctgattttgaggtggataatgaaaatcccacttattataaaataacaaggcggcgctctatgtttggctcag

SEQ ID NO: 440957 - DNA, 75 bp, synthetic construct
  source 1..75: mol_type = other DNA
ggcgaggcaaacctaaaattgaagttgattcaactaatcaaagtttattaacagcattaaggaaggtgcgaataa

SEQ ID NO: 440958 - DNA, 75 bp, synthetic construct
  source 1..75: mol_type = other DNA
acatcaattctgccgctggtgttaagttaactgataacgccactattggcgcggtggttaaaggcgatggaacat

SEQ ID NO: 440959 - DNA, 75 bp, synthetic construct
  source 1..75: mol_type = other DNA
actgctaacgttatcgacactactcagcacgatgaacagtacgtcaccgcttcttgtcgttttcgttcgtcaaac

SEQ ID NO: 440960 - DNA, 75 bp, synthetic construct
  source 1..75: mol_type = other DNA
caacaacagcgacaagcgcagccgattcagctaagacatacagagacgaagcccacgaatacgccaatcagaccg

SEQ ID NO: 440961 - DNA, 75 bp, synthetic construct
  source 1..75: mol_type = other DNA
cgatcggcaccctgcgctttagccgccgcaaccgcggcaaggtgccggagaaagacgagtcgctaccgatcggct

SEQ ID NO: 440962 - DNA, 75 bp, synthetic construct
  source 1..75: mol_type = other DNA
ggcgatatttcaccttctgcggatgtggtggatgtcagcgaagatgatgttgcattaatgatggcttcagcgggg

SEQ ID NO: 440963 - DNA, 75 bp, synthetic construct
  source 1..75: mol_type = other DNA
cggatttcagtctgcttgcgccagtgtgtgaggaagagcagacggagatgccggacgaggaagacatgctgatgc

SEQ ID NO: 440964 - DNA, 75 bp, synthetic construct
  source 1..75: mol_type = other DNA
catccaaatatgttgacgctctatattgaaaatatcacgggaaatgaacatatgacgccacctaaaagtaataca

SEQ ID NO: 440965 - DNA, 75 bp, synthetic construct
  source 1..75: mol_type = other DNA
ctgatactttcataattaatggcgaatcatttaaaggtaaaagaaacgcaaaagaaaacaaggtattaattccat

SEQ ID NO: 440966 - DNA, 75 bp, synthetic construct
  source 1..75: mol_type = other DNA
ttgggagaacagcgccatccgctgccgccgcgccaccgggatcagacccgcgtctggctgggcgttcgcccggaa

SEQ ID NO: 440967 - DNA, 75 bp, synthetic construct
  source 1..75: mol_type = other DNA
ggggccgatcaactaatgtcaccgctacagcagaaactgacagctacggtttcctgtacggaaaattcgtgatcg

SEQ ID NO: 440968 - DNA, 75 bp, synthetic construct
  source 1..75: mol_type = other DNA
gtaccgatcccatcggccccggcgaaagtctgttcacttctgcattttatgaaggttgcaaacgctgcctgaatc

SEQ ID NO: 440969 - DNA, 75 bp, synthetic construct
  source 1..75: mol_type = other DNA
cgatggtgaagttattgaaggtggcgcatcggtcgatgagagcgccatcaccggggaatcggcaccggtgatccg

SEQ ID NO: 440970 - DNA, 75 bp, synthetic construct
  source 1..75: mol_type = other DNA
atcgcgatggtgagcggtgcgatgcccggcaatgcgctatttagcgcggcaattagtggctggctttgggtcacc

SEQ ID NO: 440971 - DNA, 75 bp, synthetic construct
  source 1..75: mol_type = other DNA
tacgttgactacgcaattaaccaaatcgattctgacaacaaactgggtgtcggttccgatgatactgttgctgtc

SEQ ID NO: 440972 - DNA, 75 bp, synthetic construct
  source 1..75: mol_type = other DNA
atggtcagtgggaatataacttccagggtaacaactctgaaggcgcctggtaacaaaacgcgtctggcattcgcg

SEQ ID NO: 440973 - DNA, 75 bp, synthetic construct
  source 1..75: mol_type = other DNA
tcgcaacttggtattaatgtttggttcgatgaacaaacattggaaattggtgatagcttaagaaggaatatagat

SEQ ID NO: 440974 - DNA, 75 bp, synthetic construct
  source 1..75: mol_type = other DNA
attgtattacacagtgcacttagtgcagacgcgcaggatgaggacgatccgtatgccgattttaaagtgcctgat

SEQ ID NO: 440975 - DNA, 75 bp, synthetic construct
  source 1..75: mol_type = other DNA
gagcgcgataaacaattaagcgaacaacaaaaacaagcggcattagcgaaagaatataaagcccaggtgaagcag

SEQ ID NO: 440976 - DNA, 75 bp, synthetic construct
  source 1..75: mol_type = other DNA
gcgtgatgccagcagtattgtgttgcacagcgcgctcagtgccgaagagcaggatgaagacgatccgtatgccga

SEQ ID NO: 440977 - DNA, 75 bp, synthetic construct
  source 1..75: mol_type = other DNA
accaccttcagcatcgccaacgatgtggcgaaatacttcgccattattccggcggcgttcgcggcaacgtatccg

SEQ ID NO: 440978 - DNA, 75 bp, synthetic construct
  source 1..75: mol_type = other DNA
cagggtgccacgccgctggtagtagtagaaggttcccgtgtgctgggcgttattgcactgaaagatatcgtcaaa

SEQ ID NO: 440979 - DNA, 75 bp, synthetic construct
  source 1..75: mol_type = other DNA
ctgaccgccgccgccattgcagcggaagcgggcgtcgacgatttccttgccgaagcgacaccagaggccaagctg

SEQ ID NO: 440980 - DNA, 75 bp, synthetic construct
  source 1..75: mol_type = other DNA
cagtggtgaaatcatctggatgcatcccgaaaaccggccttatctgcgcgcactttatgcagcaattctcgcaaa

SEQ ID NO: 440981 - DNA, 75 bp, synthetic construct
  source 1..75: mol_type = other DNA
ccgctcttaaaggactggcggcaggtaatcgtatcatcccggaaagtttctgtggtgaaataatctggatgcatc

SEQ ID NO: 440982 - DNA, 75 bp, synthetic construct
  source 1..75: mol_type = other DNA
aaccttgatgggacatcgatatacctgacgatggcggcggtatttattgcccaggccactaacagtcagatggat

SEQ ID NO: 440983 - DNA, 75 bp, synthetic construct
  source 1..75: mol_type = other DNA
atttccggatacctggtttggcccattgctgggggagtttgaagaagtgcttgatgcatacgacgctgatgaaat

SEQ ID NO: 440984 - DNA, 75 bp, synthetic construct
  source 1..75: mol_type = other DNA
ccgaaaaccggccttatctgcgcgcgctttatgcagcaattctcgcaaatgtgcacttacagcgtcatcaggatg

SEQ ID NO: 440985 - DNA, 75 bp, synthetic construct
  source 1..75: mol_type = other DNA
atgaacgacagattacgctttgaagtgaacgataaccaagggcgtttcgtatttccggatacctggtttggccca

SEQ ID NO: 440986 - DNA, 75 bp, synthetic construct
  source 1..75: mol_type = other DNA
tgatgcaggaagatgatttcgaaatatgcgaaaatactttcagacaacaggacgaattacggaaaagaatcgatg

SEQ ID NO: 440987 - DNA, 75 bp, synthetic construct
  source 1..75: mol_type = other DNA
tctgcatccatttcctcttgctgtatggcataactattctgccgggccggatactgccgaagattattatgcaac

SEQ ID NO: 440988 - DNA, 75 bp, synthetic construct
  source 1..75: mol_type = other DNA
ggcaccccgcgtaaagcgttcaacgccgctcttaaagggctgtcagctggtaatcgtctcatccctgaaggtttc

SEQ ID NO: 440989 - DNA, 75 bp, synthetic construct
  source 1..75: mol_type = other DNA
aaatttatccgctacatccgtgaagaactgctgattgtgctgggaacatcctcttccgagtcggcgctgccgcgt

SEQ ID NO: 440990 - DNA, 75 bp, synthetic construct
  source 1..75: mol_type = other DNA
gatcagggcattgtcgccttcattatggatgtcatcccggcgagtgttattggcgcatttgccagcggtaacatc

SEQ ID NO: 440991 - DNA, 75 bp, synthetic construct
  source 1..75: mol_type = other DNA
tggtctggcgctgatcctcggcatcgaccgctttatgtcggaagctcgtgcgctgactaatcttgtcggtaatgg

SEQ ID NO: 440992 - DNA, 75 bp, synthetic construct
  source 1..75: mol_type = other DNA
ccgcgttaagtggtactgctctctggcgaacaagcacgacaaagctatcgccgcgctgaccaatgtaaaaatttg

SEQ ID NO: 440993 - DNA, 75 bp, synthetic construct
  source 1..75: mol_type = other DNA
aatgcctacatgcttgaggcagccaccaactcagtgaaagaggtggctagtattggcgtggatgcgcaggcggca

SEQ ID NO: 440994 - DNA, 75 bp, synthetic construct
  source 1..75: mol_type = other DNA
ccaactcaacgccgcgaagattgcagaaatcttcaacaatatggacctcgacaagcaggcagaactgcgtgagta

SEQ ID NO: 440995 - DNA, 75 bp, synthetic construct
  source 1..75: mol_type = other DNA
aacgccttgtcgcgcaatggctggaaagagttcgcagaggattacggtattgacccggataccctgccatctttc

SEQ ID NO: 440996 - DNA, 75 bp, synthetic construct
  source 1..75: mol_type = other DNA
ttcaggcggaaccgcgctatatcgttttggttcccgtgctggcggctatctggattattggcagtctggcaagca

SEQ ID NO: 440997 - DNA, 75 bp, synthetic construct
  source 1..75: mol_type = other DNA
cagaagagcagaatcccaccccactgccggccgtcgctgaggcgctgatcaacgcggtggtgcacgaactacttt

SEQ ID NO: 440998 - DNA, 75 bp, synthetic construct
  source 1..75: mol_type = other DNA
ttcgcccggtggtcaggaaactggtcgcagagatgcgccggaaccctatcgacgttctcttcagacccaaagacg

SEQ ID NO: 440999 - DNA, 75 bp, synthetic construct
  source 1..75: mol_type = other DNA
caacgatatttatgacgttcctcgtcatgtaacgctgacacttgaagatggtagcgagaaagacgttcaactcta

SEQ ID NO: 441000 - DNA, 75 bp, synthetic construct
  source 1..75: mol_type = other DNA
aacgccttgtcacgcaatggctggaaagagttcgcagaggattacggtattgatccggacaccctgccatctttc

SEQ ID NO: 441001 - DNA, 75 bp, synthetic construct
  source 1..75: mol_type = other DNA
ttcgcccggtggtcaggaaactggtcgcagagatgcgccggaaccctatcgacgttctattcagaccaaaagacg

SEQ ID NO: 441002 - DNA, 75 bp, synthetic construct
  source 1..75: mol_type = other DNA
cgaatggacattgccaacatcctgcaatcgcagagacaaaatcaaccttccggcagtgtagccgagacacctcaa

SEQ ID NO: 441003 - DNA, 75 bp, synthetic construct
  source 1..75: mol_type = other DNA
accagagccctacgagcaacaatcaggttatccgtcgcgagccgatacacagcgcatgctcgcacgtcatatggg

SEQ ID NO: 441004 - DNA, 75 bp, synthetic construct
  source 1..75: mol_type = other DNA
ccgcacgccgaagaagaagccgttcttctggcctgagcagattgcaggctttgagcacatgtatgacggcaacga

SEQ ID NO: 441005 - DNA, 75 bp, synthetic construct
  source 1..75: mol_type = other DNA
tcagcaacaacccggagtttgccgatgtgcgtagtctggaagggctttcaccgaccaataaacccagcgtaccga

SEQ ID NO: 441006 - DNA, 75 bp, synthetic construct
  source 1..75: mol_type = other DNA
caacaggctcttgatgaaaccttattgactggcagagcctgttactggtcgcgatcccgatcatgcctttggcga

SEQ ID NO: 441007 - DNA, 75 bp, synthetic construct
  source 1..75: mol_type = other DNA
aaaaaaaccgcttttgctcgcaagctgcgcgaaccgaaatatggcgctgtggcagacaaagttcctgccgatcaa

SEQ ID NO: 441008 - DNA, 75 bp, synthetic construct
  source 1..75: mol_type = other DNA
gggagaagctaaaaattatatttcaagagaagaattactaggaaaaacaatgattttatatcatattggtggtaa

SEQ ID NO: 441009 - DNA, 75 bp, synthetic construct
  source 1..75: mol_type = other DNA
tatatgtttcatattcactcgtttaacaggtcaaagtcaaaccaaaatactttgtcaatgttgaaaatcattgag

SEQ ID NO: 441010 - DNA, 75 bp, synthetic construct
  source 1..75: mol_type = other DNA
cagcgtgggttgcatcaaaggcccgttatcgctggcgctgatgcgcaagctgtctgttgatgacttccagcgtct

SEQ ID NO: 441011 - DNA, 75 bp, synthetic construct
  source 1..75: mol_type = other DNA
gccacacaggtcggcggagttgtttttacaacgccattaaaggcgatgagctaaccgtgctcaacgatcctggtt

SEQ ID NO: 441012 - DNA, 75 bp, synthetic construct
  source 1..75: mol_type = other DNA
gaagtggatagcggtatggtcgcggtgcgtatttcgcccgatatggagatggccgttgtcggcacacccgagcac

SEQ ID NO: 441013 - DNA, 75 bp, synthetic construct
  source 1..75: mol_type = other DNA
tggcggtagcaacttgcagggtgcgctgcgctgggcgcaaaccaatactccggtgcgcgatcgcaataaacggag

SEQ ID NO: 441014 - DNA, 75 bp, synthetic construct
  source 1..75: mol_type = other DNA
tcaagttgttgacggcgatgcgctacaattagccgggcgcggtagttggtttgtcgcaacaagtgaagaactggc

SEQ ID NO: 441015 - DNA, 75 bp, synthetic construct
  source 1..75: mol_type = other DNA
catttaccttccctgatggtacgagcacggaagatattggagccgccattgatgattattttgctggtcaggttg

SEQ ID NO: 441016 - DNA, 75 bp, synthetic construct
  source 1..75: mol_type = other DNA
tttcgcacaaaatgcaactaaaaatgccggagttaaccttgccgctcagggggttctttccgcagcagcaaaggg

SEQ ID NO: 441017 - DNA, 75 bp, synthetic construct
  source 1..75: mol_type = other DNA
ggtttgtcgatattattactgagcgcttcgatgccggtatacgtctgggctcggaagtggatagcggtatggttg

SEQ ID NO: 441018 - DNA, 75 bp, synthetic construct
  source 1..75: mol_type = other DNA
gcatggatgagtttagcatcgctcgatggtctggaagaaagttggtctcacaaaatgtttcctatgatcaccgat

SEQ ID NO: 441019 - DNA, 75 bp, synthetic construct
  source 1..75: mol_type = other DNA
cagcgcagcgcctgctcgatgcgaaacagcctgtcgggctgcagctcctgctcgacaccatcgcactgaccgaac

SEQ ID NO: 441020 - DNA, 75 bp, synthetic construct
  source 1..75: mol_type = other DNA
aataccccgcgtaaagctctgaatgctgcgcttaaaggactgaccgttggcaatcgtcttatccctgaaggtttc

SEQ ID NO: 441021 - DNA, 75 bp, synthetic construct
  source 1..75: mol_type = other DNA
ccacttgctgtatggcataacttttcaggcggtccggatactgccgaagattattatgcaacatactcaccatta

SEQ ID NO: 441022 - DNA, 75 bp, synthetic construct
  source 1..75: mol_type = other DNA
ggcgctggcacaggcggccctggacgatgtttgtaccggaggcaatccgcgtgaagcgacgctggaggatattgt

SEQ ID NO: 441023 - DNA, 75 bp, synthetic construct
  source 1..75: mol_type = other DNA
agtgcccaacccaacaattactgtcgtcaaagaagggctcgatgtattccagaatagcggcgcggattacctgat

SEQ ID NO: 441024 - DNA, 75 bp, synthetic construct
  source 1..75: mol_type = other DNA
aagtggaaggtatgagcctggaagaggcgcgtaatgccgctgttgaagcggtgtttgctctcaaccgtgatgtcg

SEQ ID NO: 441025 - DNA, 75 bp, synthetic construct
  source 1..75: mol_type = other DNA
tgtagctaaaaaggctattagcagattaaaagaattatcaagtcaagcgaggttattggctgctgaaattcaaaa

SEQ ID NO: 441026 - DNA, 75 bp, synthetic construct
  source 1..75: mol_type = other DNA
ataaatctaagacgaaacactcaacattatcaatgttgaagattgtcgaattcgttttacttaaaatcaatatgg

SEQ ID NO: 441027 - DNA, 75 bp, synthetic construct
  source 1..75: mol_type = other DNA
ttctcaaaagatgaaaaccaattgtctacaagggacattttcactacttctgttcttgcactactcatgtgtgct

SEQ ID NO: 441028 - DNA, 75 bp, synthetic construct
  source 1..75: mol_type = other DNA
ctgatgggcgtgctgccagtgaccaaagaacagttgggtaaaaaaacgctggcgcaaatgcccattaacccactg

SEQ ID NO: 441029 - DNA, 75 bp, synthetic construct
  source 1..75: mol_type = other DNA
ttgacccgcgtgataaccgcaccaacaccttgccgatggtctttgcgggtgcgccggatgtcgggctgcaacaag

SEQ ID NO: 441030 - DNA, 75 bp, synthetic construct
  source 1..75: mol_type = other DNA
taaaagaattatcaagtcaagcgaggttattggctgctgaaattcaaaaaaattactctaattcaacgatgggaa

SEQ ID NO: 441031 - DNA, 75 bp, synthetic construct
  source 1..75: mol_type = other DNA
taatgaacatggcttgtcggaatatctggcaggtaaagatgagctcaacaaagtgatccagcattttggcaaagg

SEQ ID NO: 441032 - DNA, 75 bp, synthetic construct
  source 1..75: mol_type = other DNA
ttatcagcgtgaccgcgttattcacgctgatcgctgtcgcttactcgctgttaagcacaccaatttatcaggcag

SEQ ID NO: 441033 - DNA, 75 bp, synthetic construct
  source 1..75: mol_type = other DNA
gatcgatctgcttcgtctggtcggcgagttatgggatcaccgtaagtttattatcagcgtgaccgcgttattcac

SEQ ID NO: 441034 - DNA, 75 bp, synthetic construct
  source 1..75: mol_type = other DNA
cggtatttttatccaaaatcatggaacaatgataatggataatctacgggctatggcaaatgtgacaatcgagcc

SEQ ID NO: 441035 - DNA, 75 bp, synthetic construct
  source 1..75: mol_type = other DNA
tcaacaacagtgcggcgacctttgcagggaccctgacggggaccggtaccctgacccaggaaggcggaaatactc

SEQ ID NO: 441036 - DNA, 75 bp, synthetic construct
  source 1..75: mol_type = other DNA
ttcttgagcagattgttaatgttgataatcaactcaatgagctgactttccgtgaggcagagatctcccagctat

SEQ ID NO: 441037 - DNA, 75 bp, synthetic construct
  source 1..75: mol_type = other DNA
ggaagtgttgcgtttaagtcgtgacgtagaagcgggccgtgcggtatatctgcaattacttaaccgccagcagga

SEQ ID NO: 441038 - DNA, 75 bp, synthetic construct
  source 1..75: mol_type = other DNA
cgtggtgtagaagcaccggaacaactggaagagcacggcatcagcgtttatgccactatcccgatgtccgagtgg

SEQ ID NO: 441039 - DNA, 75 bp, synthetic construct
  source 1..75: mol_type = other DNA
gtcgctggcgctcgggagcctgtcgggcagcgggacgttccagatgaacacggatatcgcatcacataccgggga

SEQ ID NO: 441040 - DNA, 75 bp, synthetic construct
  source 1..75: mol_type = other DNA
cagtcaggaatgggcggagcgcctcagtcggtaatttgagtttatacaatacgatgacaactaaaaatatgaata

SEQ ID NO: 441041 - DNA, 75 bp, synthetic construct
  source 1..75: mol_type = other DNA
tgcgcgttttggcttgaacaccgccaaagaggtgagtttgtcaatgcagcgtctggaacaggcaggcgtcaatat

SEQ ID NO: 441042 - DNA, 75 bp, synthetic construct
  source 1..75: mol_type = other DNA
gcgttgcgctgactatcgcggacattaaggccaaaccaggaacacagtttgtcctgagccagcgtaccgaactgg

SEQ ID NO: 441043 - DNA, 75 bp, synthetic construct
  source 1..75: mol_type = other DNA
agcgtcgcttgctggttggccactggcgaaagtgctcgatacctggcactggagcggtttttttgtggttatctc

SEQ ID NO: 441044 - DNA, 75 bp, synthetic construct
  source 1..75: mol_type = other DNA
atgcgctactggaatagccgtcaggtcacgggtgttgtgaaaaatgtcactgtcagccagtcctgcggtaagtgg

SEQ ID NO: 441045 - DNA, 75 bp, synthetic construct
  source 1..75: mol_type = other DNA
tgccgaaacttggctggatgcgctaccggaatagccgtcaggtcacgggagttgtgaaaaatgtcacggccagcc

SEQ ID NO: 441046 - DNA, 75 bp, synthetic construct
  source 1..75: mol_type = other DNA
atgctattattcacagcgaaaatattaaactgcaagaagaaaaacataaatcctatttgattaaaaaacaaagag

SEQ ID NO: 441047 - DNA, 75 bp, synthetic construct
  source 1..75: mol_type = other DNA
ttgtcgaatcggagcagaccatccgcccagtgatcaacgcaggtcagctgaagacctttatcgcaccggcaacgg

SEQ ID NO: 441048 - DNA, 75 bp, synthetic construct
  source 1..75: mol_type = other DNA
gtaaattcagatgccaggtatgtggatatacagcgaacgccgatgtaaatggcgctcgtaacattttagcggcgg

SEQ ID NO: 441049 - DNA, 75 bp, synthetic construct
  source 1..75: mol_type = other DNA
agaagcagaaacgcaaaatacagcaactgcactcccgtatcgcaaatatccgcagagactaccttcataaagtca

SEQ ID NO: 441050 - DNA, 75 bp, synthetic construct
  source 1..75: mol_type = other DNA
gctgaatgtgacggggaatgccagtggcaattttgtgctggacatcagaaataccggtcttgaacctgtttccgc

SEQ ID NO: 441051 - DNA, 75 bp, synthetic construct
  source 1..75: mol_type = other DNA
cctgctctggcggtggattataacaatgaaacactggggaacggtggaacgagttcatctatgtcagtgagtgcc

SEQ ID NO: 441052 - DNA, 75 bp, synthetic construct
  source 1..75: mol_type = other DNA
ggcatcgcttgccggttggccgctggcgaaagtgcttgatacctggcactggagtggtttttttgtggtcattgc

SEQ ID NO: 441053 - DNA, 75 bp, synthetic construct
  source 1..75: mol_type = other DNA
cgcaggcgttaggtttaccggcggtcggtgaatggcggcacgacgcgctggaaattgctcaacaacaagaagggg

SEQ ID NO: 441054 - DNA, 75 bp, synthetic construct
  source 1..75: mol_type = other DNA
tctccggcattgtcagcgatcgctcaaatgcccgttattttatggggatagggcttatcgccacgggcattatca

SEQ ID NO: 441055 - DNA, 75 bp, synthetic construct
  source 1..75: mol_type = other DNA
tgaaggcgaaagcagggacaaccaaatcacttcagggtgaagtgggtgtgaacctcgggatgaatcttgatgttg

SEQ ID NO: 441056 - DNA, 75 bp, synthetic construct
  source 1..75: mol_type = other DNA
tggcggtagcgctactgatactaccattcatagcggtggttcgttggttgtgttctctggagggagcgctgttgc

SEQ ID NO: 441057 - DNA, 75 bp, synthetic construct
  source 1..75: mol_type = other DNA
gctcagcctctaaggttactcagaacagtggcggtgctgtcgttactaataccagtgcagacctgagtggtacca

SEQ ID NO: 441058 - DNA, 75 bp, synthetic construct
  source 1..75: mol_type = other DNA
ctccagtggtggcagtgccactaaaacaaccgttaacagtggcgggcgtcagcatgtttataaaaacggcaatgt

SEQ ID NO: 441059 - DNA, 75 bp, synthetic construct
  source 1..75: mol_type = other DNA
tgccattagtactactatttacagtgatgggcgccagaatgtctccagcggaggcagtgctacaggcacaatgat

SEQ ID NO: 441060 - DNA, 75 bp, synthetic construct
  source 1..75: mol_type = other DNA
atccgactgaataacggcatgaaagccagtatcggtgcgaccaaatccttgcaggctgaggctggcgtgaagctg

SEQ ID NO: 441061 - DNA, 75 bp, synthetic construct
  source 1..75: mol_type = other DNA
ccctgacgcaggtaagccagatgcaggtacatcgtcgtctccggtgcgtcgcacaacaaaatcggccgacgcagt

SEQ ID NO: 441062 - DNA, 75 bp, synthetic construct
  source 1..75: mol_type = other DNA
tcctgacggggaacgttgcgggagacaacaccggtgcaggtgatatggcggttaaaggtgcgtctgtctggcatc

SEQ ID NO: 441063 - DNA, 75 bp, synthetic construct
  source 1..75: mol_type = other DNA
aggcgtcgtagcgaccactgatccaactcatccggcgaacgagacttacgcttacatggtaggccgcatctttga

SEQ ID NO: 441064 - DNA, 75 bp, synthetic construct
  source 1..75: mol_type = other DNA
agaatggtggtaacttctacgtgatcgcagtattcaacaatgagttgggaacgctggtccatgaatgcgcccaca

SEQ ID NO: 441065 - DNA, 75 bp, synthetic construct
  source 1..75: mol_type = other DNA
atggctaaggctaaaggcattaaattgcctcaatttaagatcccactctttgagcatacaaccgtttttttttgc

SEQ ID NO: 441066 - DNA, 75 bp, synthetic construct
  source 1..75: mol_type = other DNA
tgaacctgattttgaactggcaggaggattgacgcttacttgcactggcgagaaaggcggtaacttctacgtgat

SEQ ID NO: 441067 - DNA, 75 bp, synthetic construct
  source 1..75: mol_type = other DNA
aaggaagaagaaaaaacagcgaagaaagggaaacgcaaggctaaagcaaaagaagcgcttgtaccgcgtgttatg

SEQ ID NO: 441068 - DNA, 75 bp, synthetic construct
  source 1..75: mol_type = other DNA
aaggaagaagaaaaaccagcgaagaaaggcaaacgtaagcagaaagcaaaagaggcgcttgtaccgcgtgttatg

SEQ ID NO: 441069 - DNA, 75 bp, synthetic construct
  source 1..75: mol_type = other DNA
gccggaactgttgtcagaccgtatctgacgacggcagtgagccatgagttttcggataacaacagggtccggata

SEQ ID NO: 441070 - DNA, 75 bp, synthetic construct
  source 1..75: mol_type = other DNA
ttgtcattgggggccatgccatctctaccaccattaatagtggtggtaaacaaactgttcataccagcggcagtg

SEQ ID NO: 441071 - DNA, 75 bp, synthetic construct
  source 1..75: mol_type = other DNA
ggaggctcagcgtcggagattacaatcaacagtggttaccaggtcatctcaagcggtggcagtgtaaccaccacg

SEQ ID NO: 441072 - DNA, 75 bp, synthetic construct
  source 1..75: mol_type = other DNA
acacattctttccagggtgaggttggtgttaatttagggatggaccttgatgttggtaaaaccaaaataaggccc

SEQ ID NO: 441073 - DNA, 75 bp, synthetic construct
  source 1..75: mol_type = other DNA
tattcactgacccagagcggaatggaaaccggcggcgacaccgtttttgaactgaaggacagcaggctggctgtg

SEQ ID NO: 441074 - DNA, 75 bp, synthetic construct
  source 1..75: mol_type = other DNA
acatgctgaatgtgacggggaatgccagtggcagctttgtgctggacatcagaaataccggtcttgaacctgttt

SEQ ID NO: 441075 - DNA, 75 bp, synthetic construct
  source 1..75: mol_type = other DNA
aagtggatgccggtacctgggaatactatctgaacaaggaaaatactgactggtacctgaaagctgacagtagtc

SEQ ID NO: 441076 - DNA, 75 bp, synthetic construct
  source 1..75: mol_type = other DNA
tcggccccaaaggctcctattcacatcttgccgctcgtcagtacgctgcgcgtcactttgagcaattcattgaaa

SEQ ID NO: 441077 - DNA, 75 bp, synthetic construct
  source 1..75: mol_type = other DNA
tggaaaattgaatataccgaaagtacgtctgcggcaatggaaaaggttgcacaggcaaaatcaccgcatattgct

SEQ ID NO: 441078 - DNA, 75 bp, synthetic construct
  source 1..75: mol_type = other DNA
cggtagcgccacgaacaccaccattaacagtggtggtatcctgtccgtctccgggggcgccagtgcagtagacat

SEQ ID NO: 441079 - DNA, 75 bp, synthetic construct
  source 1..75: mol_type = other DNA
caatcctccagtacggcacaccacaaagtctactgatgctgtactgaatatggcaagcgctccgacatatatctt

SEQ ID NO: 441080 - DNA, 75 bp, synthetic construct
  source 1..75: mol_type = other DNA
cgtggattttcattcaatacagtcccctcagtttaaaacaaaacttgagggagtaacgttaaatatcggacagtt

SEQ ID NO: 441081 - DNA, 75 bp, synthetic construct
  source 1..75: mol_type = other DNA
gcgtattgaggcaaatcagcggcaaaacttcacccgatttgtggtactggcacgtaaagcgattaacgtgtctga

SEQ ID NO: 441082 - DNA, 75 bp, synthetic construct
  source 1..75: mol_type = other DNA
atgatacgtttcgctgtgattggcacgaactggatcacccgccagttcgtcgaggccgcccatgagagcggtaaa

SEQ ID NO: 441083 - DNA, 75 bp, synthetic construct
  source 1..75: mol_type = other DNA
tcaattatggatatcggcttttactgcctggcgtcggcggtggcattattcggtgaaccgaaaagcgtgcaggca

SEQ ID NO: 441084 - DNA, 75 bp, synthetic construct
  source 1..75: mol_type = other DNA
gctggcggtcagtcgcatcaccgccaaactgctgaccgagatccgccgccagactggggtgatttttccggcaga

SEQ ID NO: 441085 - DNA, 75 bp, synthetic construct
  source 1..75: mol_type = other DNA
tggcctcgcggactccgtctggagtgagacgcctgatgcccttaacgccgacattcttcagactctgacgcagcg

SEQ ID NO: 441086 - DNA, 75 bp, synthetic construct
  source 1..75: mol_type = other DNA
tactggaacaagcgtcacgtagagccgatgcccggcagcattatttatgttggcctcgcggactccgtctggagt

SEQ ID NO: 441087 - DNA, 75 bp, synthetic construct
  source 1..75: mol_type = other DNA
tgacgggcaggcaaaaaatcaatcttgatcccgatatcgtccgcgttgccgaacgcggtaacccgccgttgcagg

SEQ ID NO: 441088 - DNA, 75 bp, synthetic construct
  source 1..75: mol_type = other DNA
tgaaggatgacccgttctccgggcatctgttcatcttccgcggacgccggggtgaccagataaaagtgttgtggg

SEQ ID NO: 441089 - DNA, 75 bp, synthetic construct
  source 1..75: mol_type = other DNA
ctggcctcaaaagttcagaacgtcctgaaggatgacccgttttccggacacctgaggtgtactggcaatagcgga

SEQ ID NO: 441090 - DNA, 75 bp, synthetic construct
  source 1..75: mol_type = other DNA
gcggtaatggagaactatcagcaggctgatggtcgtatcgaagtgccagaagttctgcgtccgtacatgaacgga

SEQ ID NO: 441091 - DNA, 75 bp, synthetic construct
  source 1..75: mol_type = other DNA
gattctgtcctggcaagcgagattcagggcgaagcgggatcgctggtgattgaaaaactgtctgaatgccagaaa

SEQ ID NO: 441092 - DNA, 75 bp, synthetic construct
  source 1..75: mol_type = other DNA
atgatacgtttcgctgtgattggtacgaactggatcactcgccagttcgtcgaggccgcccatgagagcggtaaa

SEQ ID NO: 441093 - DNA, 75 bp, synthetic construct
  source 1..75: mol_type = other DNA
ccatatcaatattgcggaagccgatcacttcaaacagttcctacgtcagattaagcgtaccggcctcgatatccg

SEQ ID NO: 441094 - DNA, 75 bp, synthetic construct
  source 1..75: mol_type = other DNA
gtgcggtgattagcgaagagctggcaacggcggcagcattgcgtcagcagcaggcgttgctgacacggctggcag

SEQ ID NO: 441095 - DNA, 75 bp, synthetic construct
  source 1..75: mol_type = other DNA
tcgttgtacccaccgagaaaaactcggcggtctacggcatgttgacctcgctaaccattaccgccgggcaaaaga

SEQ ID NO: 441096 - DNA, 75 bp, synthetic construct
  source 1..75: mol_type = other DNA
cgaagaggacgcttataacaccaaagtcatcactctttcacgtagcggctcgctgccggaagtgatcgaaaccag

SEQ ID NO: 441097 - DNA, 75 bp, synthetic construct
  source 1..75: mol_type = other DNA
aatcagaaaggtatctacggttatacattattaagtgatgactggcagcaagtggcagcacagtggtatcaacgc

SEQ ID NO: 441098 - DNA, 75 bp, synthetic construct
  source 1..75: mol_type = other DNA
tgcattcttcggtggaacaggaacgccaggcggtaattagtcagttaattgcgcgttttgaaaaagaaaacccag

SEQ ID NO: 441099 - DNA, 75 bp, synthetic construct
  source 1..75: mol_type = other DNA
tgcattcttcggtggagcaggagcgtcaggcagttatcagcaaattgattgcccgttttgaaaaagaaaacccag

SEQ ID NO: 441100 - DNA, 75 bp, synthetic construct
  source 1..75: mol_type = other DNA
atggtgcataacgtcaccgtgggtaaagccgatctccctggcacgctgcaagcgagccagaaaaagctggatgaa

SEQ ID NO: 441101 - DNA, 75 bp, synthetic construct
  source 1..75: mol_type = other DNA
gggcttattagtcgtccaggcaatcagccatttaccccaggtcgtgacgtggcgagttacctctccggtcagaac

SEQ ID NO: 441102 - DNA, 75 bp, synthetic construct
  source 1..75: mol_type = other DNA
cgactggcgaatagctggtggcccggtgcggtgatcagcgaagagctggcaacggcagcagcattgcggcagcag

SEQ ID NO: 441103 - DNA, 75 bp, synthetic construct
  source 1..75: mol_type = other DNA
cggctggcaaacagctggtggcctggtgcggtgattagcgaagagctggcaacggcggcagcattgcgtcagcag

SEQ ID NO: 441104 - DNA, 75 bp, synthetic construct
  source 1..75: mol_type = other DNA
gggttgcgccgctgaacccacaaatgagtcactatcgcgagtggttgaaatcggcagatttggcgctctacaaag

SEQ ID NO: 441105 - DNA, 75 bp, synthetic construct
  source 1..75: mol_type = other DNA
ggggccatgatgtgggcgatgaagcgattgtggcgcttacccgacagttacaaattaccctgcgcggtagcgatg

SEQ ID NO: 441106 - DNA, 75 bp, synthetic construct
  source 1..75: mol_type = other DNA
atcctctgctgtttggctgggtcagctaccagacggcaacaaaacttgcagaacataaacgcagattgcaggtca

SEQ ID NO: 441107 - DNA, 75 bp, synthetic construct
  source 1..75: mol_type = other DNA
tttgcagctgcagttaagctgactggttcccgctttgtggtaatgaaagggcagattgctcgcatgcaccgcgca

SEQ ID NO: 441108 - DNA, 75 bp, synthetic construct
  source 1..75: mol_type = other DNA
gtatcgcaaatatccgcagggactaccttcacaaagtcacaacggccgtcagcaaaaaccacgcaatgatagtca

SEQ ID NO: 441109 - DNA, 75 bp, synthetic construct
  source 1..75: mol_type = other DNA
ccggttcacccttcagcatcaatgatcgggctggatgctggcgtggctaaactcgccacgctgtcagatggcaca

SEQ ID NO: 441110 - DNA, 75 bp, synthetic construct
  source 1..75: mol_type = other DNA
caggtgcttgctgctccgccagcgtacacaagccagcgttgcgcgtgctgtggtcatacagcgaaagaaaatcgc

SEQ ID NO: 441111 - DNA, 75 bp, synthetic construct
  source 1..75: mol_type = other DNA
agttttcagaaaaaccagaagacgctggcgagacttcagcgacagttaagccgcaaggtcaaattcagcaacaac

SEQ ID NO: 441112 - DNA, 75 bp, synthetic construct
  source 1..75: mol_type = other DNA
ggtcatacagcgaaagaaaatcgcctgtcacaaagtcaattcagatgccaggtatgtggatatacagcgaacgcc

SEQ ID NO: 441113 - DNA, 75 bp, synthetic construct
  source 1..75: mol_type = other DNA
gagtacaagcagctctggcgtggcggtcaggtgcttgctgttccgccagcgtatacaagccagcgttgcgcgtac

SEQ ID NO: 441114 - DNA, 75 bp, synthetic construct
  source 1..75: mol_type = other DNA
aagtgaaacagaaaatggcgatgtttgctggtggtgccagcggcgtgctgtgtctgattggcggcgtgctgttgc

SEQ ID NO: 441115 - DNA, 75 bp, synthetic construct
  source 1..75: mol_type = other DNA
agccagcgttgcgcgtactgtggtcatacagcgaaagagaaccgcctgtcacaaagtaaattcagatgccaggta

SEQ ID NO: 441116 - DNA, 75 bp, synthetic construct
  source 1..75: mol_type = other DNA
cttaaagatgccccctcacagccattgcaacagtcactgaaagaccttgagcgggcttacaaaaacttcttccag

SEQ ID NO: 441117 - DNA, 75 bp, synthetic construct
  source 1..75: mol_type = other DNA
taaactcgccacgctgtcagatggcacagtctttggacctgtaaacagttttcagaaaaaccagaagacgctggc

SEQ ID NO: 441118 - DNA, 75 bp, synthetic construct
  source 1..75: mol_type = other DNA
ttctggggatttttgtcggtcacttccttggtatgttgacgccgcactgggtttacgaagcgtggctgccgattg

SEQ ID NO: 441119 - DNA, 75 bp, synthetic construct
  source 1..75: mol_type = other DNA
tgcctgattggcggtgtgctgttgctaaaacgccgcctgttcagcccgcgcgtgcgtgcaacgactaccggagcg

SEQ ID NO: 441120 - DNA, 75 bp, synthetic construct
  source 1..75: mol_type = other DNA
accacgcaatgatagtcattgaggatttgaaggtcagcaacatgtcaaagtcagcagcgggtacggtcagccagc

SEQ ID NO: 441121 - DNA, 75 bp, synthetic construct
  source 1..75: mol_type = other DNA
atcagcctcgttaccggcgtccttgtactggcgagctgaaccgccccgggtttcctggagagtgttttatctgtg

SEQ ID NO: 441122 - DNA, 75 bp, synthetic construct
  source 1..75: mol_type = other DNA
ttaccgtgaaagaaatcaatcgcctcaaaatacttcaggatgtcattgaacgtaacctgcgtcctggccaagctc

SEQ ID NO: 441123 - DNA, 75 bp, synthetic construct
  source 1..75: mol_type = other DNA
tggccagcagcgcgtgttgattgatgccggtgcgggcgatctgtttggcaacaatggaggccaactgcttgaaaa

SEQ ID NO: 441124 - DNA, 75 bp, synthetic construct
  source 1..75: mol_type = other DNA
gcggtaatggaaaactatcagcaggccgatggtcgtattgaagtaccagaagttttgcgtccatatatgaacgga

SEQ ID NO: 441125 - DNA, 75 bp, synthetic construct
  source 1..75: mol_type = other DNA
ttgtcgcagtttatgctggatctgcataccgagcagcatggctatagcgaaaactatgtcccgtatctggttaac

SEQ ID NO: 441126 - DNA, 75 bp, synthetic construct
  source 1..75: mol_type = other DNA
gtgctggacgttgccaggcaggtccagagaaaacgtgacaataaccgttcacagtcggtacctgctggcgatgaa

SEQ ID NO: 441127 - DNA, 75 bp, synthetic construct
  source 1..75: mol_type = other DNA
gaaaaatgccactgaaacgcaatggcttaaagattcgccctcacagccattgcaacagtcactgaaagaccttga

SEQ ID NO: 441128 - DNA, 75 bp, synthetic construct
  source 1..75: mol_type = other DNA
tgcctgtggagggatggtgcagtcaggccgcccgttgaagcaggaacccaccgaaatgattcaggcgacagcctg

SEQ ID NO: 441129 - DNA, 75 bp, synthetic construct
  source 1..75: mol_type = other DNA
tattcagactgaaaatgaagtatcaactccggttcacccttcagcattaatggtcggactggatgctggcgtggc

SEQ ID NO: 441130 - DNA, 75 bp, synthetic construct
  source 1..75: mol_type = other DNA
tcacgggtgttgtgaaaaatgtcactgtcagccagtcctgcggtaagtggcacatcagtattcagacagaaagtg

SEQ ID NO: 441131 - DNA, 75 bp, synthetic construct
  source 1..75: mol_type = other DNA
ggtaataaatacatcccttacgggaaaatggcttcctggctggttgagtggaaaaacgccactggaacgcaatgg

SEQ ID NO: 441132 - DNA, 75 bp, synthetic construct
  source 1..75: mol_type = other DNA
atgcttccccgtcggatatcggtttctttattcatagaccaaagtatcatttggcctgtgaaacgattacaggca

SEQ ID NO: 441133 - DNA, 75 bp, synthetic construct
  source 1..75: mol_type = other DNA
gaccgagaatgctttccgtgacgttaacattgctttcgccaacgaattatctctgatctgcgaccagcagggcat

SEQ ID NO: 441134 - DNA, 75 bp, synthetic construct
  source 1..75: mol_type = other DNA
aatatattgagaatgcacataaaaatataatagataatgatgagttaaaacacgaaatttccctttttgcgaaag

SEQ ID NO: 441135 - DNA, 75 bp, synthetic construct
  source 1..75: mol_type = other DNA
tgcgtggtggtggcaccgccagccgtgccgggcggcaagttccgcattctggagcgacaccagtggcgcgggatg

SEQ ID NO: 441136 - DNA, 75 bp, synthetic construct
  source 1..75: mol_type = other DNA
ttctagcagctggaatattttcacttatctacttggctctatatttcaaacatatcacaaagaagtttctggcat

SEQ ID NO: 441137 - DNA, 75 bp, synthetic construct
  source 1..75: mol_type = other DNA
agattgaagacctgtcagccttcgcaaaagaagatggccagcccaagtacaccatcaccaccgggacaatcccga

SEQ ID NO: 441138 - DNA, 75 bp, synthetic construct
  source 1..75: mol_type = other DNA
agattgaagacctagcagcattcgcgaaagaagatggtcagccccaatacaccatcaccactggtacaatcccgg

SEQ ID NO: 441139 - DNA, 75 bp, synthetic construct
  source 1..75: mol_type = other DNA
aggcccacgccgccagccggaaaagaatattttcaccgatgaacaaattgagaagctggaagaaatcttccattc

SEQ ID NO: 441140 - DNA, 75 bp, synthetic construct
  source 1..75: mol_type = other DNA
ggtacgcagaacggtgacagcgccggttgcgtcgtcattgccccgccatcagtatcgggcggcaagttccgtatt

SEQ ID NO: 441141 - DNA, 75 bp, synthetic construct
  source 1..75: mol_type = other DNA
tgttcccgctcagcgagctgcaggcctgcatggtggacagttgggaagtctggactgattttcaggcgctggcgc

SEQ ID NO: 441142 - DNA, 75 bp, synthetic construct
  source 1..75: mol_type = other DNA
gggcaacaatgcacgcactctttaacgaaccgctgcagggcgagtctgccaataccagcaatattgtggagattt

SEQ ID NO: 441143 - DNA, 75 bp, synthetic construct
  source 1..75: mol_type = other DNA
acttcgccaaagaagtggaggtggagctgaaaggcgatccgatggtacttcctaacggggccacgctttacttcc

SEQ ID NO: 441144 - DNA, 75 bp, synthetic construct
  source 1..75: mol_type = other DNA
cactggtatcgcgccgggcttgagcaccgcatccgcgatattctgaaatcccgccagattggcgcaacgttttat

SEQ ID NO: 441145 - DNA, 75 bp, synthetic construct
  source 1..75: mol_type = other DNA
atgaaaatggtgagtgtggccttttctttcgtttgccttcaaactttgcaatgaagggcattaatttagttaaaa

SEQ ID NO: 441146 - DNA, 75 bp, synthetic construct
  source 1..75: mol_type = other DNA
ggtagtgctgcgtacagccgtattcgcgcgatgctggcggaagcgccggtggtgaacgatggtagcgaacccgtg

SEQ ID NO: 441147 - DNA, 75 bp, synthetic construct
  source 1..75: mol_type = other DNA
agcgcggcgtgatgctttccggtgggcaaaaacagcgtatctccattgctcgtgcgttattagtcaacgcggaaa

SEQ ID NO: 441148 - DNA, 75 bp, synthetic construct
  source 1..75: mol_type = other DNA
aggagcaatggttaaagaagtatcgacatttgataatgtttattgtgatcagttggaatgtttgtttaacgaaca

SEQ ID NO: 441149 - DNA, 75 bp, synthetic construct
  source 1..75: mol_type = other DNA
ttgggcgatatttaaaaaatctgaatcagttggttttaccacacagctaggcgccctaggtctatcattatttat

SEQ ID NO: 441150 - DNA, 75 bp, synthetic construct
  source 1..75: mol_type = other DNA
gtttatgcagaaaatgcaacagataatcttgatgaaatgattaaaaatatatcccatactcctgagtttagagaa

SEQ ID NO: 441151 - DNA, 75 bp, synthetic construct
  source 1..75: mol_type = other DNA
tcagcagtggacggacgtacggagcaccagatcctgcataatctgcgccagtgggggcagggacgaacggtgatt

SEQ ID NO: 441152 - DNA, 75 bp, synthetic construct
  source 1..75: mol_type = other DNA
ccgatctggcctgggcaacaatgcatgcactgtttaatgaaccgctgcagggcgaatccgccaataccagcaata

SEQ ID NO: 441153 - DNA, 75 bp, synthetic construct
  source 1..75: mol_type = other DNA
agaacgtgaaagcgttttttcctgccgtcagggagtttgtctacaatcccaacgttaaaaacgccctggtactca

SEQ ID NO: 441154 - DNA, 75 bp, synthetic construct
  source 1..75: mol_type = other DNA
caggcgtgcatggtggacagttgggaagtctggaccgactttcatgctctggccctgcgcccgtttggctggcgc

SEQ ID NO: 441155 - DNA, 75 bp, synthetic construct
  source 1..75: mol_type = other DNA
ccccgaaggcacacgaacgaagcccggtgaaaaaatgacgttacagcgcggtgcagcgaatattgccgtgcgctg

SEQ ID NO: 441156 - DNA, 75 bp, synthetic construct
  source 1..75: mol_type = other DNA
tgttttgtcctgtttggtctcggcggcctgctgctttcagtcgtgtggtttaacatattgttagttttggtgtgg

SEQ ID NO: 441157 - DNA, 75 bp, synthetic construct
  source 1..75: mol_type = other DNA
aaggtcaaaggtcaaaggttaaaagaattcaccatgagcggcgcttatgcgccgttttttttctgtcacacctta

SEQ ID NO: 441158 - DNA, 75 bp, synthetic construct
  source 1..75: mol_type = other DNA
agctgcgcatggaatacagccctgacgaataccagaacctgctgatgtgtgaatttattgacgatctggcgtcag

SEQ ID NO: 441159 - DNA, 75 bp, synthetic construct
  source 1..75: mol_type = other DNA
caaattgtcctggtgaaacatctggcccgtgctggctacagccacgatcgttttgagatgttgctggtcaccgcg

SEQ ID NO: 441160 - DNA, 75 bp, synthetic construct
  source 1..75: mol_type = other DNA
gcggttctggcagcgcgtgaactcattgcgcaagggccacaaattgtgttggttaaacacctggcgcgggctggc

SEQ ID NO: 441161 - DNA, 75 bp, synthetic construct
  source 1..75: mol_type = other DNA
gatgaagcctggcatatcagccgtccgctggtagattttggtatgcgccagccggtaggtgttggtgatgtgacg

SEQ ID NO: 441162 - DNA, 75 bp, synthetic construct
  source 1..75: mol_type = other DNA
tggggcttccgctattggtctcggtgtcgcggaaatccttcttgggcgccaccgttggccttcctgtaaaggatc

SEQ ID NO: 441163 - DNA, 75 bp, synthetic construct
  source 1..75: mol_type = other DNA
cgcgagctgcgtaacgccagcggcaaactggtcacggaaatcacctatctgaatcgccagggcaaacgcgtgcca

SEQ ID NO: 441164 - DNA, 75 bp, synthetic construct
  source 1..75: mol_type = other DNA
gccgacgaccataaaatcacccttgccggtctgtcgtcggtcggcattcgcctgtttctggtgacctacgatgct

SEQ ID NO: 441165 - DNA, 75 bp, synthetic construct
  source 1..75: mol_type = other DNA
gatggtcatttccgtctgctgcaacagcggctggtgggcgaacgtcatttgaaagtcatggtcgaaccggtcggc

SEQ ID NO: 441166 - DNA, 75 bp, synthetic construct
  source 1..75: mol_type = other DNA
cgctccattcaggggctgcatatgcgtgatgcgctggagcgattagacacactctaccccggcatgatgctgaag

SEQ ID NO: 441167 - DNA, 75 bp, synthetic construct
  source 1..75: mol_type = other DNA
accaacacatgaggaacagattgctgcagccgaactgaaaaagcagcaattgattaatcaggccaacgattatat

SEQ ID NO: 441168 - DNA, 75 bp, synthetic construct
  source 1..75: mol_type = other DNA
tggcggacgtcgtgccgctggacgccaataaccgcatcctcacctggcagggaatgagtcgcatccgtgccggaa

SEQ ID NO: 441169 - DNA, 75 bp, synthetic construct
  source 1..75: mol_type = other DNA
cgaactctttcagcaacgctttggcgaactggttaccgagtggctggatccggcattattacagggtgaagtagt

SEQ ID NO: 441170 - DNA, 75 bp, synthetic construct
  source 1..75: mol_type = other DNA
cggttatcgcctttgcgcctgcgggcgacggtacgctgaaaggttccggtcgctccattcaggggctgcatatgc

SEQ ID NO: 441171 - DNA, 75 bp, synthetic construct
  source 1..75: mol_type = other DNA
tggtgggaagccggaaaaaccaatcgcatccgtaatctgctgaagtctcgccagatcggcgcgaccttttacttt

SEQ ID NO: 441172 - DNA, 75 bp, synthetic construct
  source 1..75: mol_type = other DNA
cggtatggctattcacaaaaaatggcgacaaacctatttttccacgccatccagcctgacacacagtgcttatcc

SEQ ID NO: 441173 - DNA, 75 bp, synthetic construct
  source 1..75: mol_type = other DNA
gcatggtggacagctgggaagtcaggaccgactttcatgcactggcgctgcgcccgtttggctggcgcgaagtgt

SEQ ID NO: 441174 - DNA, 75 bp, synthetic construct
  source 1..75: mol_type = other DNA
gagctgaaaggcgacccgatgacgctcagcaatggcgccacgctgtatttcctcggcacaaacgcccgcaccgcg

SEQ ID NO: 441175 - DNA, 75 bp, synthetic construct
  source 1..75: mol_type = other DNA
tacgcagaacggtgacagtgccgggtgcgtggtggtggctccgccagccgtgccgggcggtaagttccgtattct

SEQ ID NO: 441176 - DNA, 75 bp, synthetic construct
  source 1..75: mol_type = other DNA
accctaacgtcgccaaccgtaacaaaggcccgcgccgtcagccggaaaagaatgttttcaccgatgagcagattg

SEQ ID NO: 441177 - DNA, 75 bp, synthetic construct
  source 1..75: mol_type = other DNA
aacaactctgggctggggcaattgacaccgttggcgacaaagtgctggcgaaagtgctggcgcaaatgaattacg

SEQ ID NO: 441178 - DNA, 75 bp, synthetic construct
  source 1..75: mol_type = other DNA
tgattcctggcatagacttcgcaggaatcgtacgcgccagtgaagatcctcgttttcatgccggtcaggaagtgt

SEQ ID NO: 441179 - DNA, 75 bp, synthetic construct
  source 1..75: mol_type = other DNA
caggcgcgagtgaaaggtgactggctggttgccatgccgcaagggctggacgcgcgtaaagcaatgattatcggt

SEQ ID NO: 441180 - DNA, 75 bp, synthetic construct
  source 1..75: mol_type = other DNA
tcaaaaaactgaccgagcagtacaacgtgacctacatcggcatcgactcaaccggcgttggtcacggggtttacg

SEQ ID NO: 441181 - DNA, 75 bp, synthetic construct
  source 1..75: mol_type = other DNA
gtcgtaacaggtgctagtggtggcgtcggtagtaccgctgtggcgctgctgcataaattgggttatcaggtcgtt

SEQ ID NO: 441182 - DNA, 75 bp, synthetic construct
  source 1..75: mol_type = other DNA
agaatgcccgctttaatgtgaaaaaagtctggccctattcgcgcttttcgttttccacgctgggcaaggaaattc

SEQ ID NO: 441183 - DNA, 75 bp, synthetic construct
  source 1..75: mol_type = other DNA
caactatcacaccgatgcggtttaccgttcgatgatcgcaagcgttgccgggttgagtatcgaacggattttctt

SEQ ID NO: 441184 - DNA, 75 bp, synthetic construct
  source 1..75: mol_type = other DNA
agtgtgaccgtatacgtcaacaatctgagcaatttgagcgaagacgagacgaaagccctgcgggaaggcgtggaa

SEQ ID NO: 441185 - DNA, 75 bp, synthetic construct
  source 1..75: mol_type = other DNA
tggcgtgaagcagtcagacctcagtgaagagcagaagcagacgataagtacgctggcaactgtgtcagcagggct

SEQ ID NO: 441186 - DNA, 75 bp, synthetic construct
  source 1..75: mol_type = other DNA
tgacttcgaacaacgttctcgtttgcagattattcctgctcagtcagttatctccagtgatgcccggccttcgca

SEQ ID NO: 441187 - DNA, 75 bp, synthetic construct
  source 1..75: mol_type = other DNA
gccgcgacagcggcgcttcaggggctggcggggggtaatttagcaggtgctctggccggagcttcagcaccggaa

SEQ ID NO: 441188 - DNA, 75 bp, synthetic construct
  source 1..75: mol_type = other DNA
aaaaatattatgtgtttaccgattctgataggatttattttagtaaatatctgaatgttgaagtaattaatgttg

SEQ ID NO: 441189 - DNA, 75 bp, synthetic construct
  source 1..75: mol_type = other DNA
tcatcggtgagtacggttctggtaaaacgttctttttaagtgttgtgcggtctattgcgttagagaagaagctgg

SEQ ID NO: 441190 - DNA, 75 bp, synthetic construct
  source 1..75: mol_type = other DNA
tatttccgtacgccacgaaacacgattaaagccttcctggatatgctggccgtgctggaacaaaacccatccatt

SEQ ID NO: 441191 - DNA, 75 bp, synthetic construct
  source 1..75: mol_type = other DNA
taactatcacattgacgccgtgtaccgctctgcgatcgccagtgtggccggattgagtaccgatcgcattttctt

SEQ ID NO: 441192 - DNA, 75 bp, synthetic construct
  source 1..75: mol_type = other DNA
tgctggataccggcatcgcatccgaaccgttcgttgatgcagtaaacgcattcattaacgatgaaggtcatcacg

SEQ ID NO: 441193 - DNA, 75 bp, synthetic construct
  source 1..75: mol_type = other DNA
cgagtttttccggatgatgacgctgtccttcctggccctgcgtcttaacgtctcccccgaaactgtagattccaa

SEQ ID NO: 441194 - DNA, 75 bp, synthetic construct
  source 1..75: mol_type = other DNA
gttttggcccaagttggggttggagtgcaactgaaattaaaggcgttgacgttaatggcacttcaacaagtgagg

SEQ ID NO: 441195 - DNA, 75 bp, synthetic construct
  source 1..75: mol_type = other DNA
gccgacgcccaacagcgtattgctgctatcgatgacaaaatccagcagttactttgcatcgaatacacgccagat

SEQ ID NO: 441196 - DNA, 75 bp, synthetic construct
  source 1..75: mol_type = other DNA
attttccagacaggtacatccttctggaaagccgcgaaattgaaattaccgttaaccagcccgagccaatcgaca

SEQ ID NO: 441197 - DNA, 75 bp, synthetic construct
  source 1..75: mol_type = other DNA
gtagagaatgaagaaggttctcacgttcctgtttcgcaaccaatcgttatcaatgctgctggatatcctgtatat

SEQ ID NO: 441198 - DNA, 75 bp, synthetic construct
  source 1..75: mol_type = other DNA
cgcaacatataaatcaggtgattatactcgcagaaataagcatctgtttggaatagcaaacctgtctgatattct

SEQ ID NO: 441199 - DNA, 75 bp, synthetic construct
  source 1..75: mol_type = other DNA
ctcagttaaatggttctgactctaaaatcggagttctggttagctttgagcctgaagggctggcaataagaggtg

SEQ ID NO: 441200 - DNA, 75 bp, synthetic construct
  source 1..75: mol_type = other DNA
cactatcaccatccgggacagggacaatcagaagcagaatctggcgaacctgagccgtgaccctgcgcacgctaa

SEQ ID NO: 441201 - DNA, 75 bp, synthetic construct
  source 1..75: mol_type = other DNA
ttgccggcgttaatgcggcaaaaggcagcgagaaaggtaacggtactgagtggactgaaaccacaacagacagcg

SEQ ID NO: 441202 - DNA, 75 bp, synthetic construct
  source 1..75: mol_type = other DNA
gtaataatgtcgctgccggtgcagcaggcgcagcaacgggagagctggcagccagagcgattaccggaatgctgt

SEQ ID NO: 441203 - DNA, 75 bp, synthetic construct
  source 1..75: mol_type = other DNA
atggaagcgcgcaccatcccagtaacactctttattcattatgcaacttcaactttcagccacgaaaagctgctt

SEQ ID NO: 441204 - DNA, 75 bp, synthetic construct
  source 1..75: mol_type = other DNA
aaaaactgtagataagcttaatcagaagcaagaaagtgcgattaagaagatcgataacactataaaaaatgctct

SEQ ID NO: 441205 - DNA, 75 bp, synthetic construct
  source 1..75: mol_type = other DNA
ggggctgcctcgaatccgaatatcggtaaagatctgaccgatgcggaaaaagtagaactgggcggttccggctca

SEQ ID NO: 441206 - DNA, 75 bp, synthetic construct
  source 1..75: mol_type = other DNA
tcaattgcgttagagaaaaagctggtgacaatcagtgccgatttatctccggacaggcgcatccacgcaacgggt

SEQ ID NO: 441207 - DNA, 75 bp, synthetic construct
  source 1..75: mol_type = other DNA
accgacactttaagcgctgggtaaagaatggcggtcaggagaacgccagcagccagaatacccctttgggccggt

SEQ ID NO: 441208 - DNA, 75 bp, synthetic construct
  source 1..75: mol_type = other DNA
ttttaccccgcgatgtgttccgtaatgttgcatttcagttcgccgctcttagtgaagatagcggtaacgaggtgg

SEQ ID NO: 441209 - DNA, 75 bp, synthetic construct
  source 1..75: mol_type = other DNA
aaattgatcgctgtgaagagcagttaaaaaagctgacaacatacggttctcaggataccaactacgaaagagaaa

SEQ ID NO: 441210 - DNA, 75 bp, synthetic construct
  source 1..75: mol_type = other DNA
atgatgaagctgaaaggcgttatctcagctttcgctctgagcctctgtctattgtcaccggctcaggccgaagaa

SEQ ID NO: 441211 - DNA, 75 bp, synthetic construct
  source 1..75: mol_type = other DNA
caaataaccatcaatagttaccgtgagtgtgagcgtgttggagagataactataaataataatctgcaagatctc

SEQ ID NO: 441212 - DNA, 75 bp, synthetic construct
  source 1..75: mol_type = other DNA
acgtatgacaactttttcgacgcactgaagaaaccgctggaatacaacctgaaaaatacctataaacggcgccag

SEQ ID NO: 441213 - DNA, 75 bp, synthetic construct
  source 1..75: mol_type = other DNA
aggcgacataacgcgtaccgagctgtattatgaagtcgaaaatgataccagtgacaccaaccccaccctgcacga

SEQ ID NO: 441214 - DNA, 75 bp, synthetic construct
  source 1..75: mol_type = other DNA
aacgcattcgcatgcgcaacagtgaaggcgacataacgcgtaccgagctgtattatgaagtcgaaaatgatacca

SEQ ID NO: 441215 - DNA, 75 bp, synthetic construct
  source 1..75: mol_type = other DNA
tctcgacttcagggactgggccactggcctgaaaaatcgcgaccgctatattcagtggtacaaaggggcgaaaga

SEQ ID NO: 441216 - DNA, 75 bp, synthetic construct
  source 1..75: mol_type = other DNA
gcgtcagcagtatggtatgcactcacggtgcgatgaaaaaacagatataaataagaaacatgaccagatcctgac

SEQ ID NO: 441217 - DNA, 75 bp, synthetic construct
  source 1..75: mol_type = other DNA
ccgcgcccaagtttctcaactttaccacgtgcatgaacgtgatggcgcggaggtcatcttcagttccgatggcac

SEQ ID NO: 441218 - DNA, 75 bp, synthetic construct
  source 1..75: mol_type = other DNA
ccgatagctgaactcaattacgtgaacagtggagctgagcgcacaattattctggcgttcgagatggatttggta

SEQ ID NO: 441219 - DNA, 75 bp, synthetic construct
  source 1..75: mol_type = other DNA
gcgaaccagataccggaatgcctttagcagaactggaatacacccaggccattctgacgtatgacgttacgttaa

SEQ ID NO: 441220 - DNA, 75 bp, synthetic construct
  source 1..75: mol_type = other DNA
atcagttgctgagtctgtgcgattacatcctggcgattgtcaaagtggacgctaattgccatattcggttgcatc

SEQ ID NO: 441221 - DNA, 75 bp, synthetic construct
  source 1..75: mol_type = other DNA
gtgcggggaggcgtggggacaacaaccatcaccgccgcattagcctggtcattacaaatgttgggagaaaatgtc

SEQ ID NO: 441222 - DNA, 75 bp, synthetic construct
  source 1..75: mol_type = other DNA
cagtgatgcgctggcggctgaagaaatactgacgctggcgaactggtgcctgttgaactattccgggctgaaaac

SEQ ID NO: 441223 - DNA, 75 bp, synthetic construct
  source 1..75: mol_type = other DNA
gaatgactgcctgcaagggacggctgaatatatcggttttttacttggcggtacgccagaattcctgttcgatcc

SEQ ID NO: 441224 - DNA, 75 bp, synthetic construct
  source 1..75: mol_type = other DNA
gtgaatggccgtactgggattgcaggggtgcggggaggcgtggggacaacaaccatcaccgccgcattagcctgg

SEQ ID NO: 441225 - DNA, 75 bp, synthetic construct
  source 1..75: mol_type = other DNA
ttcagcaactgaaagctagcgggcgttatcaatggattttgatcgatttaccacgcgacgcctcgcagataacgc

SEQ ID NO: 441226 - DNA, 75 bp, synthetic construct
  source 1..75: mol_type = other DNA
cgtgaagtctggtgttcgcaagggcattccaacataccgtgttaacgatatgccgtttgggtgcagtaacagcct

SEQ ID NO: 441227 - DNA, 75 bp, synthetic construct
  source 1..75: mol_type = other DNA
atgagcgcattttcttttaacaccacttatcagccaaccggtgatcagcagaaagacgcaatcgcacaaatcgac

SEQ ID NO: 441228 - DNA, 75 bp, synthetic construct
  source 1..75: mol_type = other DNA
ttgaggttttttcaggagaaggggataattggtcatttgtgaaacctgttaataatgagtcaacattagtaatag

SEQ ID NO: 441229 - DNA, 75 bp, synthetic construct
  source 1..75: mol_type = other DNA
gcgcggcttaactcaagcgttagagagctggggaagactatgcgcgatctgttgaaggtggttctaagcctcgta

SEQ ID NO: 441230 - DNA, 75 bp, synthetic construct
  source 1..75: mol_type = other DNA
gacaactccataagcaattacgacaatagtccatcaaattacgacaactctgagagcaactacgataatagttca

SEQ ID NO: 441231 - DNA, 75 bp, synthetic construct
  source 1..75: mol_type = other DNA
aaatatgccattgttattgcctatccgtatgaggaccggaaattaaaagttcgtcgtgaggagcatgaaagattt

SEQ ID NO: 441232 - DNA, 75 bp, synthetic construct
  source 1..75: mol_type = other DNA
tccccgtgtcgtggggctggggcccacgcaccgtgcggtcggggagatgcgcagcgccggcgtggatgcgcagac

SEQ ID NO: 441233 - DNA, 75 bp, synthetic construct
  source 1..75: mol_type = other DNA
ctgggcagcatgggagaacgctgggccggcaggggggctgaacagctggggctgcagggcagtgtcgataaggat

SEQ ID NO: 441234 - DNA, 75 bp, synthetic construct
  source 1..75: mol_type = other DNA
cctgaaaatacaaccactatcgccccgttaacgtcatacgataaatgggatggtgagaaatgggtgaccgatact

SEQ ID NO: 441235 - DNA, 75 bp, synthetic construct
  source 1..75: mol_type = other DNA
ggtatacagcctgattaaccgggatgtggaaagggcactgtccgggcttgagagtgtgaaaccgtctcaggtgcc

SEQ ID NO: 441236 - DNA, 75 bp, synthetic construct
  source 1..75: mol_type = other DNA
attcgccccggccaggagcgggcagagcaacatattgacctggcctatgccatcaccgcccacggtgcgcagggg

SEQ ID NO: 441237 - DNA, 75 bp, synthetic construct
  source 1..75: mol_type = other DNA
tcgcgtgtggggggatatcccggacagcagcgtccagccggggagccggaaatggcgaaccggtcacggcagagg

SEQ ID NO: 441238 - DNA, 75 bp, synthetic construct
  source 1..75: mol_type = other DNA
gaccatcgcggtgaaacggtatatagcactgaaacaggagaatcaaaagaaatcacagctccgggtgattactct

SEQ ID NO: 441239 - DNA, 75 bp, synthetic construct
  source 1..75: mol_type = other DNA
gcacagcatagcgccgcagtagacgcggcagaagcactgcgtcagtcactgattgatactgcaatggcttccatc

SEQ ID NO: 441240 - DNA, 75 bp, synthetic construct
  source 1..75: mol_type = other DNA
tggcagaagcacaacgccagtcactgattgatacagcaatggcttccattagtctgattcagctgaaattacagg

SEQ ID NO: 441241 - DNA, 75 bp, synthetic construct
  source 1..75: mol_type = other DNA
cagcagaagcacagcgccagtcgctgattgatactgcaatggcctccatcagtctgattcagctgaaattgcagg

SEQ ID NO: 441242 - DNA, 75 bp, synthetic construct
  source 1..75: mol_type = other DNA
aactcattgccataaaagcgggagtcattaccatttataattatgatggtgaaacgcgggaatatatttccacat

SEQ ID NO: 441243 - DNA, 75 bp, synthetic construct
  source 1..75: mol_type = other DNA
gattacattgatgcggtggcggcaacagataccagcaccgcgccggatgtcatctggcctgaactgccggatgcg

SEQ ID NO: 441244 - DNA, 75 bp, synthetic construct
  source 1..75: mol_type = other DNA
agccggagccgttatctgcgggatatgtaccgcccggggatggtgatggagcagtggaacccggagacacgcagt

SEQ ID NO: 441245 - DNA, 75 bp, synthetic construct
  source 1..75: mol_type = other DNA
tgtgactatttcacagttgggagaatacccggaaggaaccaccactatcgccccattaacgccatacgataaatg

SEQ ID NO: 441246 - DNA, 75 bp, synthetic construct
  source 1..75: mol_type = other DNA
tccgggacgtaaatatccgcagccgtatgtggcactgccggcgtttgaccgtaacggcaggtccgccggtatctg

SEQ ID NO: 441247 - DNA, 75 bp, synthetic construct
  source 1..75: mol_type = other DNA
actgcagggaaacgtcgataaggatgtctttacccgtcttctggagggcagactgcctgacggttcggacttaag

SEQ ID NO: 441248 - DNA, 75 bp, synthetic construct
  source 1..75: mol_type = other DNA
agtctgattcaactgaaattgcaggccgggcggaagctgacgcaggcagaaaacacccgacttaacgccgtgctg

SEQ ID NO: 441249 - DNA, 75 bp, synthetic construct
  source 1..75: mol_type = other DNA
agcttattgccacgaaggcggggaatattaccgtctataactatgatggtaaaactcgggaatatatttccactt

SEQ ID NO: 441250 - DNA, 75 bp, synthetic construct
  source 1..75: mol_type = other DNA
aacgccgcagtagaagcagcagaagcacagcgccagtcactgattgatgcagtaatggcttccattagtctgatt

SEQ ID NO: 441251 - DNA, 75 bp, synthetic construct
  source 1..75: mol_type = other DNA
aggggcgggaggtgcagattatcgctgctgaccgtcgctcgcagatgaacatgaagcaggatgagcgtctgtccg

SEQ ID NO: 441252 - DNA, 75 bp, synthetic construct
  source 1..75: mol_type = other DNA
gcaggggcgggaggtgcagattatcgccgctgaccgtcgctcgcagatgaacctgaagcaggatgaacggctgtc

SEQ ID NO: 441253 - DNA, 75 bp, synthetic construct
  source 1..75: mol_type = other DNA
agtcacagcctgaccctgcgggatgcgcagggtgaaacgcaggtggtgcgtatttcctccctggacagcagctgg

SEQ ID NO: 441254 - DNA, 75 bp, synthetic construct
  source 1..75: mol_type = other DNA
gttgcccgggaaaatctgctgcaggagcgactgcagcagatggagcgggatatggtccgtgacctgcagaaagag

SEQ ID NO: 441255 - DNA, 75 bp, synthetic construct
  source 1..75: mol_type = other DNA
cccgggaaaatctgctgcaggagcgtctgcagcagatggagcgggatatggttcgtgacctgcagaaagagaaaa

SEQ ID NO: 441256 - DNA, 75 bp, synthetic construct
  source 1..75: mol_type = other DNA
ccgctatgtgatagaccgggtgacagcgcagagtcacagcctgaccctgcgggatgcgcagggcgaaacgcaggt

SEQ ID NO: 441257 - DNA, 75 bp, synthetic construct
  source 1..75: mol_type = other DNA
gcacagcacggcgcagcagtagatgcagcagaagcactgcgccagtcgctgattgatactgcaatggcctccatc

SEQ ID NO: 441258 - DNA, 75 bp, synthetic construct
  source 1..75: mol_type = other DNA
tgagaaatgggtgacggatactgagacacagcatagcgccgcagtagacgcggcagaagcacaacgtcagtcact

SEQ ID NO: 441259 - DNA, 75 bp, synthetic construct
  source 1..75: mol_type = other DNA
tggcattaagcctgttccaaattatttttcagcctttaaatcaaaaagtgtattattattaagctttacccattt

SEQ ID NO: 441260 - DNA, 75 bp, synthetic construct
  source 1..75: mol_type = other DNA
agtctgattcaactgaaattacaggccggacggaagctgacgcaggcagaaacaatccgccttaacgctgtgctg

SEQ ID NO: 441261 - DNA, 75 bp, synthetic construct
  source 1..75: mol_type = other DNA
aatttatcgccacccaggcaggaaatattactgtttataactatgatggtgaaacgcgtgaatatatttctacat

SEQ ID NO: 441262 - DNA, 75 bp, synthetic construct
  source 1..75: mol_type = other DNA
gatgctcctggctcatataaagctggttatgcaatctgccgttctgcagattttaactcatgggaatatgtgcca

SEQ ID NO: 441263 - DNA, 75 bp, synthetic construct
  source 1..75: mol_type = other DNA
gaaaatacaaccactatcgccccgttaacgtcatacgataaatgggatggtgagaaatgggtgacggataccgag

SEQ ID NO: 441264 - DNA, 75 bp, synthetic construct
  source 1..75: mol_type = other DNA
tgagaaatgggtgacagatactgaggcacagcatagcgccgcagtaggcgcggcagaagcacagcgtcagtcact

SEQ ID NO: 441265 - DNA, 75 bp, synthetic construct
  source 1..75: mol_type = other DNA
gattacattgacgcggtgacagcaacagataccagcaccgcgccggatgtcatctggcctgagttgttggatgca

SEQ ID NO: 441266 - DNA, 75 bp, synthetic construct
  source 1..75: mol_type = other DNA
gaaatcacagctccgggtgattatcctgaaaatacaaccactatcgccccgttaacgccatacgatgaatgggat

SEQ ID NO: 441267 - DNA, 75 bp, synthetic construct
  source 1..75: mol_type = other DNA
atgtataacgccatcttaaataataaatttattgccacaaaggcaggagagattaccgtttataactatgacagt

SEQ ID NO: 441268 - DNA, 75 bp, synthetic construct
  source 1..75: mol_type = other DNA
cactgacccgcacctgatgctccgccttgccattgaaacggtcgctcatgactatgacgtgatcgttattgatag

SEQ ID NO: 441269 - DNA, 75 bp, synthetic construct
  source 1..75: mol_type = other DNA
ctggagaaatgctctttctatttgggaacctgtctgcaatgaaattttcgatcgtctgattaaaccacgctggga

SEQ ID NO: 441270 - DNA, 75 bp, synthetic construct
  source 1..75: mol_type = other DNA
gggcacgatccgtatgcctatctcaaggatgtgctgagacggttgccgacgcagcgagctagtgagattgcagag

SEQ ID NO: 441271 - DNA, 75 bp, synthetic construct
  source 1..75: mol_type = other DNA
gatgctcctggctcacataaagctggttatgcaatttgccgttctgcagattttaactcatgggaatatgtgcca

SEQ ID NO: 441272 - DNA, 75 bp, synthetic construct
  source 1..75: mol_type = other DNA
aatgagactgtttactcaatcgaaaatggtgcagctgttacagtggattatatcggtgccatcaaagacggttat

SEQ ID NO: 441273 - DNA, 75 bp, synthetic construct
  source 1..75: mol_type = other DNA
ccattgatgcaggtcaactgctcaggcaaggcacaggggggcggcctgatcaggcaatggacagcgcctggctcc

SEQ ID NO: 441274 - DNA, 75 bp, synthetic construct
  source 1..75: mol_type = other DNA
aatcacagctccgggtgattactctgaaaatacaactactatcgccccgttaacgccattcgataaatgggatgg

SEQ ID NO: 441275 - DNA, 75 bp, synthetic construct
  source 1..75: mol_type = other DNA
aatcacggtgccgggtaattaccctgaaaatacaaccactatcgccccgttaacgctatacgataaatgggatgg

SEQ ID NO: 441276 - DNA, 75 bp, synthetic construct
  source 1..75: mol_type = other DNA
atggatactgcaatggcttccatcaatctgattcaactgaaattacaggccggacggagtctgacgcaggcagaa

SEQ ID NO: 441277 - DNA, 75 bp, synthetic construct
  source 1..75: mol_type = other DNA
tttccacttcaaatgaatatcttgccattggtgtcggtatccctgcatattcctgtttagatgcccctggcacac

SEQ ID NO: 441278 - DNA, 75 bp, synthetic construct
  source 1..75: mol_type = other DNA
gaccatcgcggtgaaatcgtctataacaccgaaacgggggactcaaaagaaatcacagtgccgggagattaccct

SEQ ID NO: 441279 - DNA, 75 bp, synthetic construct
  source 1..75: mol_type = other DNA
gattatatagacgcactgaacgcaatggatataaacatggcaccagatatcaactggccggaaataccactggca

SEQ ID NO: 441280 - DNA, 75 bp, synthetic construct
  source 1..75: mol_type = other DNA
atgaataaagcggtattaaataacgaactcattgctataaaagcgggagacattaccatttataattatgatggt

SEQ ID NO: 441281 - DNA, 75 bp, synthetic construct
  source 1..75: mol_type = other DNA
tattaccgtttataattatgatggtgaaacgcgggaatatatttctacatcaactgaatatcttgctgttggcgt

SEQ ID NO: 441282 - DNA, 75 bp, synthetic construct
  source 1..75: mol_type = other DNA
cggcagaagcacagcgtcagtcactgattgatgctgcaatggcttccatcggtctgattcagctgaaattacagg

SEQ ID NO: 441283 - DNA, 75 bp, synthetic construct
  source 1..75: mol_type = other DNA
atcgcctggcggttcgcttatcactcattatcagccgactgatgaccggagaatctctgtcactaaaaacactgt

SEQ ID NO: 441284 - DNA, 75 bp, synthetic construct
  source 1..75: mol_type = other DNA
acagaaatggcaggtacagcctcagacgacagagcagcccgtgtgcgatccctgaaatgctttcttttatacaga

SEQ ID NO: 441285 - DNA, 75 bp, synthetic construct
  source 1..75: mol_type = other DNA
cgtgcgtataaccgtagtgattatcttgagcagcgacggcctatgatgcagtggtgggctgattttgtgatggct

SEQ ID NO: 441286 - DNA, 75 bp, synthetic construct
  source 1..75: mol_type = other DNA
attacccgccctgccgaagcggctgaagctctctgggaagaggtagacatagaagcgcgagagtggaagattcct

SEQ ID NO: 441287 - DNA, 75 bp, synthetic construct
  source 1..75: mol_type = other DNA
tttcttaccgacaaccaggagccctctccctgccttatctggctgccggcgccggatatctcccctttatcacca

SEQ ID NO: 441288 - DNA, 75 bp, synthetic construct
  source 1..75: mol_type = other DNA
gcctgacatcagaacggtttgaacggagaggccacatccacagtctggtcgctgaagagcgttttatctccgccc

SEQ ID NO: 441289 - DNA, 75 bp, synthetic construct
  source 1..75: mol_type = other DNA
ccgcttactctggtacccaacaatatatggaagcaatgggtgtcccgggttttatgctgccgctggtgattctgc

SEQ ID NO: 441290 - DNA, 75 bp, synthetic construct
  source 1..75: mol_type = other DNA
tggccgatcacgccgacgcctttgccgagctggattacaacattttccgcggcctggcgtttgcttccggcaacc

SEQ ID NO: 441291 - DNA, 75 bp, synthetic construct
  source 1..75: mol_type = other DNA
cgagagctgcattgaagcattccatgaggctgaaaccagtctgaatcacactgctttccgccgtaatcaatggga

SEQ ID NO: 441292 - DNA, 75 bp, synthetic construct
  source 1..75: mol_type = other DNA
gagtgtttctcgcaactcatcctggcaataagacagtgtatccacatctcgctgatgactgagcgatggtatacg

SEQ ID NO: 441293 - DNA, 75 bp, synthetic construct
  source 1..75: mol_type = other DNA
cttcgcatcccgaaacatcacacagggctgacacgccataagcgtgtttttttgtctacgcacgtctattcaatg

SEQ ID NO: 441294 - DNA, 75 bp, synthetic construct
  source 1..75: mol_type = other DNA
attacggcaggttggggaaaaattactggctacgcgggtacgcaacaatatatggaagcgatgggtgtccctggc

SEQ ID NO: 441295 - DNA, 75 bp, synthetic construct
  source 1..75: mol_type = other DNA
atgcactctcaaatctgggttgtgagcacgctgcttatcagcatcgtgttaattgtactggccatcgtgaagttc

SEQ ID NO: 441296 - DNA, 75 bp, synthetic construct
  source 1..75: mol_type = other DNA
ggttcgcgaggcgtttatggcagtagacgctaaagcaagtacagctttcattcagcatggtgataagtatctggc

SEQ ID NO: 441297 - DNA, 75 bp, synthetic construct
  source 1..75: mol_type = other DNA
aaaatcaaattttcagtgcatctctgaaagtaagtaaaagccgctcgctcgttaagcggcgtatgcaatcattag

SEQ ID NO: 441298 - DNA, 75 bp, synthetic construct
  source 1..75: mol_type = other DNA
ggactgggagcaagtgcgaatgctggtatcagttatctggctgatggtactgtagatccggcaaacgcagccatt

SEQ ID NO: 441299 - DNA, 75 bp, synthetic construct
  source 1..75: mol_type = other DNA
atgattgatttaacagaacgctatgaacttatcaaagcaattagcgaacgactgaaagaacaacccagcaaacca

SEQ ID NO: 441300 - DNA, 75 bp, synthetic construct
  source 1..75: mol_type = other DNA
gcttcctgaccctaatggcctttatacaaacacctttaacagcattattgaccgtgcactgctgactcatctcaa

SEQ ID NO: 441301 - DNA, 75 bp, synthetic construct
  source 1..75: mol_type = other DNA
ttcagcatggagataaatatctggcggatatttatcagcttgcccggcagcgtctggcgaatgttggtgttgagc

SEQ ID NO: 441302 - DNA, 75 bp, synthetic construct
  source 1..75: mol_type = other DNA
ccatactgctacccattgcgctgatgttggttaaaacgattgccgaattgaatatggcgcgtgagagtggttttt

SEQ ID NO: 441303 - DNA, 75 bp, synthetic construct
  source 1..75: mol_type = other DNA
tggttgggctgatggcatcactgatcggtggcccacttttccttaaatttctgggtcaacgactgccctttaaac

SEQ ID NO: 441304 - DNA, 75 bp, synthetic construct
  source 1..75: mol_type = other DNA
ttctctctaatatgcatatgcacccgattcttctggcctggttagtggctcttattctgcatgctgcagtgggct

SEQ ID NO: 441305 - DNA, 75 bp, synthetic construct
  source 1..75: mol_type = other DNA
acattgtaatggagcagaccgggcggcactcaaactggcccagctaggaaggccagttaaaatcatgctcggcgg

SEQ ID NO: 441306 - DNA, 75 bp, synthetic construct
  source 1..75: mol_type = other DNA
cagcgaagccagaagttgctgaggcgcattttctcgcgcgcttgagtgtcgaaacagattgcgccgatgttcatg

SEQ ID NO: 441307 - DNA, 75 bp, synthetic construct
  source 1..75: mol_type = other DNA
ttctctgtcttatggtttttcacaacttccttccggtattttgctagaccgctttggcccacgaatagtgttagg

SEQ ID NO: 441308 - DNA, 75 bp, synthetic construct
  source 1..75: mol_type = other DNA
ccgagaaaaaactcactcaaagtgatattcgtggcgtcttcctgcgttctaacctctttcagggttcatggaact

SEQ ID NO: 441309 - DNA, 75 bp, synthetic construct
  source 1..75: mol_type = other DNA
ggcttttgcgcagcgtcacaacatggcgaagctggccgagcgagcgggtatgaacgttcaaacgttacgtaacaa

SEQ ID NO: 441310 - DNA, 75 bp, synthetic construct
  source 1..75: mol_type = other DNA
gcgaagctggcagaacgcgcaggaatgaatgtccagacgctgcgcaataagctgaccccggagcaaccgcatcaa

SEQ ID NO: 441311 - DNA, 75 bp, synthetic construct
  source 1..75: mol_type = other DNA
cagcgagcatttaatggcacttcccctgttccctcctccactccagcaatcccaggaaacacaccgcagactacc

SEQ ID NO: 441312 - DNA, 75 bp, synthetic construct
  source 1..75: mol_type = other DNA
ttaaccgcaccagaaatctggttgcttactgatttgactgaagattcaacgctggtagatggctttctggcacaa

SEQ ID NO: 441313 - DNA, 75 bp, synthetic construct
  source 1..75: mol_type = other DNA
cgcgcagttcatacagttcggcaggctccttttgtgctgaccgggacagagctgcgcggtggcagtacccgtgca

SEQ ID NO: 441314 - DNA, 75 bp, synthetic construct
  source 1..75: mol_type = other DNA
cctggcagtcctggagcagcagcccgtgctgacagcatcctggaaggaacaactggagaatctgccggagatgct

SEQ ID NO: 441315 - DNA, 75 bp, synthetic construct
  source 1..75: mol_type = other DNA
cggatacaacttcgcttactggagttacgtcgattagcgccccgatcaccgcaacgcctggtggcactattgtga

SEQ ID NO: 441316 - DNA, 75 bp, synthetic construct
  source 1..75: mol_type = other DNA
agtctgattcagctgaaattgcaggccggacgtaaactaacgcaggcagaaacaacccgccttaacgctgtgctg

SEQ ID NO: 441317 - DNA, 75 bp, synthetic construct
  source 1..75: mol_type = other DNA
gattgatactgcaatggcctccatcagtctgattcagctgaaattgcaggccggacgtaaactaacgcaggcaga

SEQ ID NO: 441318 - DNA, 75 bp, synthetic construct
  source 1..75: mol_type = other DNA
gcaacgccgggcggcacgattgtggaagctacacctacgtttgatcgcactcgcgcagatgatttattgctggat

SEQ ID NO: 441319 - DNA, 75 bp, synthetic construct
  source 1..75: mol_type = other DNA
atgagcaaggaggatctggagactaggacaaatgaacttggccagttttttactatcagaacgtcgaattcatct

SEQ ID NO: 441320 - DNA, 75 bp, synthetic construct
  source 1..75: mol_type = other DNA
tccgttccgatgttgttacaacagcgtcttgatgagattcactttaaggggactgaacgccctataaaccagaca

SEQ ID NO: 441321 - DNA, 75 bp, synthetic construct
  source 1..75: mol_type = other DNA
gcaggcccgtttacaggctaatcctgcgatggcgagtgcagttgataccgtgactggcctcggcgcttcattcgg

SEQ ID NO: 441322 - DNA, 75 bp, synthetic construct
  source 1..75: mol_type = other DNA
ctcacgagtgcgtggaaaaaataaaggccctgtttcctcatcttcgtgctgaaggtggtggatttattggcactg

SEQ ID NO: 441323 - DNA, 75 bp, synthetic construct
  source 1..75: mol_type = other DNA
tctgtgcagtgtcctgcatcacatcccgccgcgtatatctgcagcggacagctgtcgccggcgtcccacgttatg

SEQ ID NO: 441324 - DNA, 75 bp, synthetic construct
  source 1..75: mol_type = other DNA
agcagcattaattctgtaacacgactgatggcgctggcggctgtttcattgcaggcccgtttacagactaaccct

SEQ ID NO: 441325 - DNA, 75 bp, synthetic construct
  source 1..75: mol_type = other DNA
tcaacctgttgtttaacgaccgcactccgtttgtgtccgaacagacgaaacagtggctggcatcatccggctcag

SEQ ID NO: 441326 - DNA, 75 bp, synthetic construct
  source 1..75: mol_type = other DNA
tgaagaattacaggcggccagggcgtgcttcgatgaaaacgggctggaagccgcgctgcggtacctggaaaacct

SEQ ID NO: 441327 - DNA, 75 bp, synthetic construct
  source 1..75: mol_type = other DNA
ggtggccgccattctctgtgaacgtcagcctgagtcaccgctgggttaccgcctgcgccgccatgcgctgtggca

SEQ ID NO: 441328 - DNA, 75 bp, synthetic construct
  source 1..75: mol_type = other DNA
gtgcagtatcctgcattaccagccgccggatctacctgcagagaacctctgttgcaggaactccccgttataatc

SEQ ID NO: 441329 - DNA, 75 bp, synthetic construct
  source 1..75: mol_type = other DNA
atgagcgaacaacaggagatgataacgcccgttccggcagataaacccacaacacgcaggtattcacttctgcgg

SEQ ID NO: 441330 - DNA, 75 bp, synthetic construct
  source 1..75: mol_type = other DNA
attcattgtctgccatgtgtaccgattaatgaggtggcaaaagagaaactgccacattacgtcatgagtgcaact

SEQ ID NO: 441331 - DNA, 75 bp, synthetic construct
  source 1..75: mol_type = other DNA
ttacaggctaaccctgcgatggcgagtgcagttgataccgtgactggcctcggtgcttcattcggtttgctgtga

SEQ ID NO: 441332 - DNA, 75 bp, synthetic construct
  source 1..75: mol_type = other DNA
gctgaaatcggacgtgttgctgccggtgccgtatcgggtgatgtgaaaaccaccgcaggccgccgcgatgttatc

SEQ ID NO: 441333 - DNA, 75 bp, synthetic construct
  source 1..75: mol_type = other DNA
gcagagatcgggcgtgttgcggcaggtgcggtttctggcgatgtaaaaaccagtgcaggccgtcgtgatgcgatc

SEQ ID NO: 441334 - DNA, 75 bp, synthetic construct
  source 1..75: mol_type = other DNA
ccgcgatcttattcgtgaataccgtcttaccggacgtgcgcgccgtctggctattcgccccggttcgccgatgat

SEQ ID NO: 441335 - DNA, 75 bp, synthetic construct
  source 1..75: mol_type = other DNA
ttcgctggcggatgagcctctgctgttgggtgacattattctggtggtcggtaactggaagcttatcggtatgtt

SEQ ID NO: 441336 - DNA, 75 bp, synthetic construct
  source 1..75: mol_type = other DNA
gcgtgaaattggttttcgtacccgctatggactgaatgtggtgggcctgaaacgcaatggcgtggcgctggaagg

SEQ ID NO: 441337 - DNA, 75 bp, synthetic construct
  source 1..75: mol_type = other DNA
aacgtttcctgggatgcgctgaacacggcattcagtgaacacccggagtgggtttccgggcttgtctccggggat

SEQ ID NO: 441338 - DNA, 75 bp, synthetic construct
  source 1..75: mol_type = other DNA
caaattgcaggacagcttttatataaacggtaagcgtaaagccaatgccgtctgtaacacctgctccttgcagac

SEQ ID NO: 441339 - DNA, 75 bp, synthetic construct
  source 1..75: mol_type = other DNA
gcgcgaaatcggctttcgtacccgctacgggctgaatgtcgtggggctgaaacgcaatggcgtggcgctggaagg

SEQ ID NO: 441340 - DNA, 75 bp, synthetic construct
  source 1..75: mol_type = other DNA
tcaatctgtctctggaacatgaactgaatgagtggctggcagaggtggttacccggaaattgcaggacagctttt

SEQ ID NO: 441341 - DNA, 75 bp, synthetic construct
  source 1..75: mol_type = other DNA
tatgccggactggcgtataaccggaaccgggtggtagaggtggttacccgcaaattgcaggacagcttttatatc

SEQ ID NO: 441342 - DNA, 75 bp, synthetic construct
  source 1..75: mol_type = other DNA
acgctggtggcgacgccgccgaacctggtagtcaacagtgaattgctgcgtgaaggctatcatggttttagtttc

SEQ ID NO: 441343 - DNA, 75 bp, synthetic construct
  source 1..75: mol_type = other DNA
ctgggcgatatcatcctggttgtgggtaactggaaactgatcggtatgctggccaaacagggccgcgacttcgta

SEQ ID NO: 441344 - DNA, 75 bp, synthetic construct
  source 1..75: mol_type = other DNA
gcagaagttgttacccgcaaattgcaggacagcttttatataaacgtttccagggatgcgctgaacacggcatac

SEQ ID NO: 441345 - DNA, 75 bp, synthetic construct
  source 1..75: mol_type = other DNA
gcgcggggcgattacttccggtgaactggatatctatccggaatataccggcaatggcgcgttcttctttaaaga

SEQ ID NO: 441346 - DNA, 75 bp, synthetic construct
  source 1..75: mol_type = other DNA
gaagcgcctacgcgtgaggccaggaccaacggcctgcgtattcgtctcaagcaatgggctaaaggcggcgaattc

SEQ ID NO: 441347 - DNA, 75 bp, synthetic construct
  source 1..75: mol_type = other DNA
ctgcaagtacctgcattctgggtacaaacggttcaggtaaaacaatgctgatgacgtttttacaaatcaatcagc

SEQ ID NO: 441348 - DNA, 75 bp, synthetic construct
  source 1..75: mol_type = other DNA
ggtgtttatcgctttcttcgatgcaacgctagtgcagattaagcgagccattaaggagcgtaaaaatgggaaata

SEQ ID NO: 441349 - DNA, 75 bp, synthetic construct
  source 1..75: mol_type = other DNA
gcgataccaaacgttttgccgcccgtgtcacgctcgatctgtcgggtgtcggcagatacaccaaagtcatgagcg

SEQ ID NO: 441350 - DNA, 75 bp, synthetic construct
  source 1..75: mol_type = other DNA
gtggcgcttgacctgctgacatcaggaaaaatcgcttacgggaagcaccatttttccatcatggtgtattccccg

SEQ ID NO: 441351 - DNA, 75 bp, synthetic construct
  source 1..75: mol_type = other DNA
cttcttcaccgtctgcttcaatccgcacaccggcattgagcgggcgaccatgaaacagaagtccctgggcgaacg

SEQ ID NO: 441352 - DNA, 75 bp, synthetic construct
  source 1..75: mol_type = other DNA
cacggtgtaccgacggtgaataaagtccagttgggaacgactcctgtggtacgcggagcgatcacctccggtgaa

SEQ ID NO: 441353 - DNA, 75 bp, synthetic construct
  source 1..75: mol_type = other DNA
ttaaactcgatcaggatcagttactgtcactggctggtggcgacacggcggtgacgattaaagccgctgcccagc

SEQ ID NO: 441354 - DNA, 75 bp, synthetic construct
  source 1..75: mol_type = other DNA
acccgcgtttgaaaaagcctatggctttaagctcggtcaggatcagttgctgtcactggctggtggcgacacggc

SEQ ID NO: 441355 - DNA, 75 bp, synthetic construct
  source 1..75: mol_type = other DNA
atgattgaatgccttatagctgtgattgttttgctttatatcgctggcgctatcctgatgtcttgttttattaag

SEQ ID NO: 441356 - DNA, 75 bp, synthetic construct
  source 1..75: mol_type = other DNA
gtttatcgaacgcgccgatgcgttacccgcgtttgaaaaagcctacgactttaaactcgatcaggatcagttact

SEQ ID NO: 441357 - DNA, 75 bp, synthetic construct
  source 1..75: mol_type = other DNA
ggcttacggcactgacggcccggtcgcggcgctggggctgcaaaccttaagcgatccgcaaggcgtgcaacctat

SEQ ID NO: 441358 - DNA, 75 bp, synthetic construct
  source 1..75: mol_type = other DNA
cgatgtgccataggggattcagccccatcaaccaaaggaagcaacatgaaacagcagaactggtttcagaagctg

SEQ ID NO: 441359 - DNA, 75 bp, synthetic construct
  source 1..75: mol_type = other DNA
tggagggtaaaaccaccgacggcgatccggacccgggcaacatgaccaccgacgaagacgaagaagaaaaccgca

SEQ ID NO: 441360 - DNA, 75 bp, synthetic construct
  source 1..75: mol_type = other DNA
atgaaggaacggcgcaattcttcacagcagcgattccgcaacggggcggaacgtcatgctaaccgtttcgctacc

SEQ ID NO: 441361 - DNA, 75 bp, synthetic construct
  source 1..75: mol_type = other DNA
ctggggtatcaccggcgcagggattttattactggccttcgctatgctgatcctgacgcgtattcgtcccgacct

SEQ ID NO: 441362 - DNA, 75 bp, synthetic construct
  source 1..75: mol_type = other DNA
gcgaaagaggatgcgaaggtaaccggcgatgcggcctataagcgcaacatcatcggcgacgcagagatcatctgc

SEQ ID NO: 441363 - DNA, 75 bp, synthetic construct
  source 1..75: mol_type = other DNA
ttggcgaaacgcgctaccagctggcggacggctccctgctgtgcaaagacgtcccgatcgcccgcaccggcacgc

SEQ ID NO: 441364 - DNA, 75 bp, synthetic construct
  source 1..75: mol_type = other DNA
ccatttcgctaccaacgcatcacgcagcaacatccgctacagcctgagcgagacgcacgcaacacctgatggcca

SEQ ID NO: 441365 - DNA, 75 bp, synthetic construct
  source 1..75: mol_type = other DNA
atgaaacagcaacgtaattcacgctttcgtaatggtgcggaacgccatgctaaccgtttcgctaccagtgcatca

SEQ ID NO: 441366 - DNA, 75 bp, synthetic construct
  source 1..75: mol_type = other DNA
atgaataagcaacagcgaaacagcgaacctcataacacgggatttcgccgcaattactttgaaaatgggcgttat

SEQ ID NO: 441367 - DNA, 75 bp, synthetic construct
  source 1..75: mol_type = other DNA
cacattatacgaagcactacgcacggttgatcgtctgcttcgcgggcaaagttttattaaacaggctgatttata

SEQ ID NO: 441368 - DNA, 75 bp, synthetic construct
  source 1..75: mol_type = other DNA
ttcgtaatggtgctgaacgccacgctaaccgtttcgctaccagtgcatcacgcagcaacatccgctacagcctga

SEQ ID NO: 441369 - DNA, 75 bp, synthetic construct
  source 1..75: mol_type = other DNA
ggatttcacattatacgaagcacttcgcacggttgatcgtctgcttcgcgggcaaagttttattaaacaggctga

SEQ ID NO: 441370 - DNA, 75 bp, synthetic construct
  source 1..75: mol_type = other DNA
tcatcgctgccggtttgatcgtttccgtttgcggcgcgtacttaagctggaccatcatggcagcagaagttccgt

SEQ ID NO: 441371 - DNA, 75 bp, synthetic construct
  source 1..75: mol_type = other DNA
ccagactgaaacgggcgacggtcagaaatccgaatgcaaaaattatcgttaaccgcggtgatctccctgtgatta

SEQ ID NO: 441372 - DNA, 75 bp, synthetic construct
  source 1..75: mol_type = other DNA
aaccggggggatttgcccgtaataaagctgggtaacgcgcgggttgtcctgtcccgacgcaggcgtcgtaaaaag

SEQ ID NO: 441373 - DNA, 75 bp, synthetic construct
  source 1..75: mol_type = other DNA
ggtggtagataacgctatcgacgaagcgctcgcgggtcactgtaaagaaattatcgtcaccattcacgccgataa

SEQ ID NO: 441374 - DNA, 75 bp, synthetic construct
  source 1..75: mol_type = other DNA
tgggcgtggtggcacgtcctgaactggctgaaattcgtaacccgtcaatggccggtctgatggtggaaatgatgg

SEQ ID NO: 441375 - DNA, 75 bp, synthetic construct
  source 1..75: mol_type = other DNA
cgtttgtggcgcatatttaagttggaccattatggcggcagaagtccccttcctggcagcgacccataaagcatt

SEQ ID NO: 441376 - DNA, 75 bp, synthetic construct
  source 1..75: mol_type = other DNA
aaagccggtcagcatcggtatcagcgggcatttattcagcgattaaaaatggtcgctggcatgtcatgcagcgtg

SEQ ID NO: 441377 - DNA, 75 bp, synthetic construct
  source 1..75: mol_type = other DNA
ggttcgtaaaaacgccattccggcggcttctgcaatgaccattaaccgcgtggccacaacggcgattaatcagtc

SEQ ID NO: 441378 - DNA, 75 bp, synthetic construct
  source 1..75: mol_type = other DNA
ctggaatgcgccgtgggagaaaagcgccggtggcgggcatactgaatggtttacacgagagtgtcttgataaggt

SEQ ID NO: 441379 - DNA, 75 bp, synthetic construct
  source 1..75: mol_type = other DNA
agccaacgctgctgtttaacggatacgccgatcaagtggcgtcgctttatcgtggcctggatttacgggagaatt

SEQ ID NO: 441380 - DNA, 75 bp, synthetic construct
  source 1..75: mol_type = other DNA
gtctcgacgaagcaatgcatccgctcacactgatgaccgtaggtgtttatggcaaggcgttaccgccacaaaatg

SEQ ID NO: 441381 - DNA, 75 bp, synthetic construct
  source 1..75: mol_type = other DNA
agcagatcacccgggatgtggtgctggacagtcgttcaccggactgcgaagagagactcaaagagttgatatggg

SEQ ID NO: 441382 - DNA, 75 bp, synthetic construct
  source 1..75: mol_type = other DNA
tcaagctcatttttaattggattgaatgtccttcgagctcaagtagcatctagcggtcgaggggagtttacatta

SEQ ID NO: 441383 - DNA, 75 bp, synthetic construct
  source 1..75: mol_type = other DNA
atggttagcattacaaggtcatcgtgttcttttggttgaaggtaacgatcctcaaggcacggcctctatgtatca

SEQ ID NO: 441384 - DNA, 75 bp, synthetic construct
  source 1..75: mol_type = other DNA
gttcggactggataaagccgatccagcggcaaatgccggcagtctgaaaactgatccgtggacgttgaaaatcag

SEQ ID NO: 441385 - DNA, 75 bp, synthetic construct
  source 1..75: mol_type = other DNA
cgctgatgaatgcgaaacccggacgcgacctttgctggctcctgacccgtcatccggaaaagccggaataccacg

SEQ ID NO: 441386 - DNA, 75 bp, synthetic construct
  source 1..75: mol_type = other DNA
ttttgctgatggcacgctgatcgattcagacgtgagtgacgttctgccgctcgcctgcgatctgcgcgcgctgaa

SEQ ID NO: 441387 - DNA, 75 bp, synthetic construct
  source 1..75: mol_type = other DNA
gcgccgggaaagcaaccagcgtatggcggacttcgccgtcgccgatgtctccctgttctggctgcttaacgcgct

SEQ ID NO: 441388 - DNA, 75 bp, synthetic construct
  source 1..75: mol_type = other DNA
ataccacgcggtgctgtgcgtcagacaggagtatttcgatggccctgaactggaccggttgatactggatgcctg

SEQ ID NO: 441389 - DNA, 75 bp, synthetic construct
  source 1..75: mol_type = other DNA
ccgggtgaagcagcaccgtaccagaaacagataacccgggatgtggtgctggacagttgttcaccggactgcgaa

SEQ ID NO: 441390 - DNA, 75 bp, synthetic construct
  source 1..75: mol_type = other DNA
aaagagttgatatgggcgttcagtgatttcgcccgcgatcgtcgtggtgtgtgcgatccggaagcccgttgcctc

SEQ ID NO: 441391 - DNA, 75 bp, synthetic construct
  source 1..75: mol_type = other DNA
acgttactgacagcggcaatcgcgttatggaacacggtatacatagaaagagccattgaatccctgaaacgaaaa

SEQ ID NO: 441392 - DNA, 75 bp, synthetic construct
  source 1..75: mol_type = other DNA
gtcacgctttcaccgttaacgccatacgataaatgggatggtgagaaatgggtgacggataccgaggcactgcat

SEQ ID NO: 441393 - DNA, 75 bp, synthetic construct
  source 1..75: mol_type = other DNA
gcgttgtttttattatgaggcagttacgtatgaatatactggctggtctgatgaatatattaatactggcgtaag

SEQ ID NO: 441394 - DNA, 75 bp, synthetic construct
  source 1..75: mol_type = other DNA
tgagctggtgctgggttatctccagggggtgccagtggcgtgcatgaaaggtcgcggacatttctacgaaggtcg

SEQ ID NO: 441395 - DNA, 75 bp, synthetic construct
  source 1..75: mol_type = other DNA
aactcatcaccacaaaggcgggagacattaccgtttacaattatgatggtgagacacgagaatatatttccacat

SEQ ID NO: 441396 - DNA, 75 bp, synthetic construct
  source 1..75: mol_type = other DNA
cggcagaagcacagcgccagtcactgattgatgcagcaatggcttccatcagtctgattcagctgaaattacagg

SEQ ID NO: 441397 - DNA, 75 bp, synthetic construct
  source 1..75: mol_type = other DNA
agcgccgcagtagacgcggcagaagcacagcgccagtcgctgattgatgctgcaatggcttccattagtctgatt

SEQ ID NO: 441398 - DNA, 75 bp, synthetic construct
  source 1..75: mol_type = other DNA
attcaattgtctttggattgccgggcatcttatactaaaaataatgcccgtgtgtttagttagagttgcataccg

SEQ ID NO: 441399 - DNA, 75 bp, synthetic construct
  source 1..75: mol_type = other DNA
gttatgcaatatgccgctcaacggatttgaactcgtggaaatatgtgccagaccatcgcggtgaaattgtttata

SEQ ID NO: 441400 - DNA, 75 bp, synthetic construct
  source 1..75: mol_type = other DNA
tattaccgtttataattatgatggtgagacgcaggaatatatttcaacatcaacagaatatcttgctgtcggtgt

SEQ ID NO: 441401 - DNA, 75 bp, synthetic construct
  source 1..75: mol_type = other DNA
tgagtacggtgcatggacatgcgggtgagctggtgttggggcatctccagggcgttccggtggcatgtatgaaag

SEQ ID NO: 441402 - DNA, 75 bp, synthetic construct
  source 1..75: mol_type = other DNA
cactggcaaatgcctatgatgcggattaccgggcgctgttgcaaaaagtggcgaaagaagagggattccccctga

SEQ ID NO: 441403 - DNA, 75 bp, synthetic construct
  source 1..75: mol_type = other DNA
cggcagaagcacagcgtcagtcactgattgatgcagcaatggcttccattagtctgattcagctgaaattacagg

SEQ ID NO: 441404 - DNA, 75 bp, synthetic construct
  source 1..75: mol_type = other DNA
accataacacgtcagctcattctcgggcaggacgcgttgtgggctgcgcataacggagcatatcttatgaatgct

SEQ ID NO: 441405 - DNA, 75 bp, synthetic construct
  source 1..75: mol_type = other DNA
ggagtctttacaaagacgccaacacacagatccttcagggaaactacggcagtcttaccggcagggggggaatgc

SEQ ID NO: 441406 - DNA, 75 bp, synthetic construct
  source 1..75: mol_type = other DNA
tggactctgacaatgctgtctcccgcgtggtggcctccgtacctgccggcccatgggccggggccgtcctctaca

SEQ ID NO: 441407 - DNA, 75 bp, synthetic construct
  source 1..75: mol_type = other DNA
gcgtcaagtctgtccgcggtggcgcacagggtgatttgctatgccgcgttgttgtcgaaacaccggtaggtttga

SEQ ID NO: 441408 - DNA, 75 bp, synthetic construct
  source 1..75: mol_type = other DNA
tcttaggtggtatgaactatcgggtcagcgaagggccgttacaagggatgaatttctttcttgctgccgataaag

SEQ ID NO: 441409 - DNA, 75 bp, synthetic construct
  source 1..75: mol_type = other DNA
gcctgtgtccatattacgtgggtaggatcaatcatcgccgtgattaagtcggttgaagccggacgaactgttaaa

SEQ ID NO: 441410 - DNA, 75 bp, synthetic construct
  source 1..75: mol_type = other DNA
gtatggagcggctgcaaaagctaattgtaagaataaaagatcagcatcctgccggtagtacaccaaccatagcaa

SEQ ID NO: 441411 - DNA, 75 bp, synthetic construct
  source 1..75: mol_type = other DNA
cattctatgaatacctgttaacgcaccaatggcgaaaagttcgcgttacccgcacccctgcctatgacgtaatgg

SEQ ID NO: 441412 - DNA, 75 bp, synthetic construct
  source 1..75: mol_type = other DNA
gtagcgaaccgtttatttggcgcaacaacatttatgcccgttgagcatgatgatgttgatatcaaggagtttctc

SEQ ID NO: 441413 - DNA, 75 bp, synthetic construct
  source 1..75: mol_type = other DNA
acagggtgatttgctgtgccgcgttgtcgtcgaaacaccggtaggcctgaacgagaagcagaaacagctgctgca

SEQ ID NO: 441414 - DNA, 75 bp, synthetic construct
  source 1..75: mol_type = other DNA
cccttgatggtcgcgtcaaactgaaagtgcctggcgaaacccagaccggtaagctgttccgtatgcgtggtaaag

SEQ ID NO: 441415 - DNA, 75 bp, synthetic construct
  source 1..75: mol_type = other DNA
tggtcaggtgcagatgcgccagggcttcttcgctgtacagcagacctgtccacactgtcagggccgcggtacgct

SEQ ID NO: 441416 - DNA, 75 bp, synthetic construct
  source 1..75: mol_type = other DNA
aatgaaacggcgttggttagtggacaattgacctggaatgcgccgtggggaagcgtatttggcagtggtggttat

SEQ ID NO: 441417 - DNA, 75 bp, synthetic construct
  source 1..75: mol_type = other DNA
gagtaacgtactgggcttcgcgtcaccgggtgaagcaaagccgtatcagaagcagatcacccgggatgtagtact

SEQ ID NO: 441418 - DNA, 75 bp, synthetic construct
  source 1..75: mol_type = other DNA
gagcaacgtactgggcttcgcgtcaccgggtgaagcggcaccgtaccagaagcagataacacgggatgtggtgct

SEQ ID NO: 441419 - DNA, 75 bp, synthetic construct
  source 1..75: mol_type = other DNA
cgttcagtgatttcgcccgcgatcgccgtggagtgtgcgatccggaagcgcgtcacctcgccggcaatcccggtt

SEQ ID NO: 441420 - DNA, 75 bp, synthetic construct
  source 1..75: mol_type = other DNA
tttctgagttattgcttttgggatttaatagtggtcctcgagcccttggtgagagaatgctaagtatgctttcgg

SEQ ID NO: 441421 - DNA, 75 bp, synthetic construct
  source 1..75: mol_type = other DNA
tcgtgatgtgtgcgatccggaagcccgttgcctcgccggtaatcccgggtatcccggatctgcagggccgttctg

SEQ ID NO: 441422 - DNA, 75 bp, synthetic construct
  source 1..75: mol_type = other DNA
ccaaccggcgagcacaacagcccgcgttcgaagagtttcttcgacggcgtgaagaagttttttgacgacctgact

SEQ ID NO: 441423 - DNA, 75 bp, synthetic construct
  source 1..75: mol_type = other DNA
taggttattgggctttaacacctaatatcgaactgtggggaatgtggcgctcaagagtatttttgtggaccgact

SEQ ID NO: 441424 - DNA, 75 bp, synthetic construct
  source 1..75: mol_type = other DNA
gtatcagactgaaaaatgaattacgccgggccgacaagcccagtgctggtgcgggaagagatatttacgcgtggg

SEQ ID NO: 441425 - DNA, 75 bp, synthetic construct
  source 1..75: mol_type = other DNA
taccgacagtttctgaaggagcattaggttattgggctttaacgccaaatattgatctgtggggaatgtggcgtt

SEQ ID NO: 441426 - DNA, 75 bp, synthetic construct
  source 1..75: mol_type = other DNA
tgctgtgcgtcagacaggagtatttcgacggccccgaactggaccggctgattctggatgcctggagcaacgtac

SEQ ID NO: 441427 - DNA, 75 bp, synthetic construct
  source 1..75: mol_type = other DNA
tagtgagaagaagacccggttaaaaaaaattcttccatatactgtcaggaagaggaatgttgtaaaccgtgcaac

SEQ ID NO: 441428 - DNA, 75 bp, synthetic construct
  source 1..75: mol_type = other DNA
tggaccggttgatactggatgcctggagtaacgtactgggcttcgcgtcaccgggtgaagcaaagcagtatcaga

SEQ ID NO: 441429 - DNA, 75 bp, synthetic construct
  source 1..75: mol_type = other DNA
gacaaggcgtcggtgttcccgttcgaggagctgcaacgctgcatggtcgacacgctggaagaatgggaagactat

SEQ ID NO: 441430 - DNA, 75 bp, synthetic construct
  source 1..75: mol_type = other DNA
gaccgactttcatgcactggccctgcgcccgtttggctggcgcgaagtatggatcggttatgacccggcgaaagg

SEQ ID NO: 441431 - DNA, 75 bp, synthetic construct
  source 1..75: mol_type = other DNA
tctggcccccggcctgctgtgcgcagacgggcaataccgccagatagtcaccgtggaagacgcggtgcgcggcgg

SEQ ID NO: 441432 - DNA, 75 bp, synthetic construct
  source 1..75: mol_type = other DNA
tcaaaaaactctccgaacagtacaacgtgacctatatcggtatcgactcaaccggcgttggtcacggggtttatg

SEQ ID NO: 441433 - DNA, 75 bp, synthetic construct
  source 1..75: mol_type = other DNA
cggcaaccgcccgacctatgaagcaagccgcagtgaagaagccagccatgccgatctggcctgggcaacaatgca

SEQ ID NO: 441434 - DNA, 75 bp, synthetic construct
  source 1..75: mol_type = other DNA
acgactggcacgggtaaatcgttacagccagaccggcaacgaggcagaccttaatccgaacgtcgctaaccgcaa

SEQ ID NO: 441435 - DNA, 75 bp, synthetic construct
  source 1..75: mol_type = other DNA
tgttgcatgacccgcgacggcaggcatcgctgctttactggcaggggttttccgtgccacagattgccgaaatgc

SEQ ID NO: 441436 - DNA, 75 bp, synthetic construct
  source 1..75: mol_type = other DNA
cacctgcgctcgacctatttctccaccccgtccacgctggcgcacgacgcctacccgttctggtccggtgaactg

SEQ ID NO: 441437 - DNA, 75 bp, synthetic construct
  source 1..75: mol_type = other DNA
atcggcaacaacggcgcaaagctgatatttctcggcaccaactcaaacaccgcgcagagccataacggcgacctg

SEQ ID NO: 441438 - DNA, 75 bp, synthetic construct
  source 1..75: mol_type = other DNA
aataccagaacctgctgatgtgtgaattcgtggacgatctcgcgtccgtgttcccgctcagcgagctgcaggcgt

SEQ ID NO: 441439 - DNA, 75 bp, synthetic construct
  source 1..75: mol_type = other DNA
gcccgtgaagccctgattgacgccctgctgaccggacgtaaccagattttcctttccgccagcaaggcacaggcc

SEQ ID NO: 441440 - DNA, 75 bp, synthetic construct
  source 1..75: mol_type = other DNA
tgcgcggtactggctccgccactggttgccggtggcaagttccgcatccttgagcgtcaccagtggaaaggcatg

SEQ ID NO: 441441 - DNA, 75 bp, synthetic construct
  source 1..75: mol_type = other DNA
gctgaaaggcgatccgatggtgcttcccaacggggccacactgtatttcctcggcaccaatgcccgcactgccca

SEQ ID NO: 441442 - DNA, 75 bp, synthetic construct
  source 1..75: mol_type = other DNA
ggcttcgatacccttgttttgcaatggacccgttacggcgatgcatttacccagccagaacagcgcacgttattg

SEQ ID NO: 441443 - DNA, 75 bp, synthetic construct
  source 1..75: mol_type = other DNA
ccgatctcgcgtgggcaaccatgcacgtattaatcaatgagccgctgaccgccgcgaccggcgaacagtcatcca

SEQ ID NO: 441444 - DNA, 75 bp, synthetic construct
  source 1..75: mol_type = other DNA
gacttccgcgcccaggctgacgccatcaaaaaactgactgaacagtacaacgtgacctacatcggcatcgactcg

SEQ ID NO: 441445 - DNA, 75 bp, synthetic construct
  source 1..75: mol_type = other DNA
cgtgacatatatcggcatcgactcgacgggtgtcggtcacggagtttatgagaacgtgaaagcgttttttccagc

SEQ ID NO: 441446 - DNA, 75 bp, synthetic construct
  source 1..75: mol_type = other DNA
gtagcccgcattgctgaaatgctgggcgaaaaagttgcaaccgttcacagctggaaaaaacgcgacaagtggggc

SEQ ID NO: 441447 - DNA, 75 bp, synthetic construct
  source 1..75: mol_type = other DNA
cgccggaggatgtacgctgtttaatctggatcagctgaaacaggaaaacagcgccgacgactttcgcaacctctt

SEQ ID NO: 441448 - DNA, 75 bp, synthetic construct
  source 1..75: mol_type = other DNA
ctgggcaataacggcgcaaaactgatttttctcggcaccaactccaacaccgcgcagagccataacggcgacctg

SEQ ID NO: 441449 - DNA, 75 bp, synthetic construct
  source 1..75: mol_type = other DNA
ccgtcttgagtttgacgccgggcacaccgacattgcgcagtcattcatggcaatccgtcgcgccaccaccgccag

SEQ ID NO: 441450 - DNA, 75 bp, synthetic construct
  source 1..75: mol_type = other DNA
accctaacgttgccaaccgcaacaaaggcccacgtcgtcagccggaaaagaatgtttttaccgatgaacagattg

SEQ ID NO: 441451 - DNA, 75 bp, synthetic construct
  source 1..75: mol_type = other DNA
accgacattgcgcagtcattcatggcaatccgtcgtgccaccaccgccagtggcaaccgcccgacctatgaagcc

SEQ ID NO: 441452 - DNA, 75 bp, synthetic construct
  source 1..75: mol_type = other DNA
cctgcgcccgtttggctggcgcgaagtatggatcggttatgaccccgcaaaaggtactcagaacggcgacagtgc

SEQ ID NO: 441453 - DNA, 75 bp, synthetic construct
  source 1..75: mol_type = other DNA
ggcccacgtctttaagcagtacatcatcgacttcgctaaagaagtggaggtggagctgaaaggcgatccgatggt

SEQ ID NO: 441454 - DNA, 75 bp, synthetic construct
  source 1..75: mol_type = other DNA
ttttcccgggaggcgctgctgcatgcactgaaaaccggccacaaccagatttttctgtcagcgagtaagacgcag

SEQ ID NO: 441455 - DNA, 75 bp, synthetic construct
  source 1..75: mol_type = other DNA
gttcctgcggaagtgatcagcaaactggcaaatgccgggattgtggtttctgccggtcactccaacgcgacgttg

SEQ ID NO: 441456 - DNA, 75 bp, synthetic construct
  source 1..75: mol_type = other DNA
cctggcaaaacatccgaaccaggcgttaggtctgcatctggaaggtccgtggctgaatctggtaaaaaaaggcac

SEQ ID NO: 441457 - DNA, 75 bp, synthetic construct
  source 1..75: mol_type = other DNA
atgaagtgtatattatttaaatgggtactgtgcctgttactgggtttttcttcggtatcctattcccgggagttt

SEQ ID NO: 441458 - DNA, 75 bp, synthetic construct
  source 1..75: mol_type = other DNA
aaatcagatatcagtgagagcagaaagagcaggtataaacctgttaacgcttccacaggacaataacgtaagcgt

SEQ ID NO: 441459 - DNA, 75 bp, synthetic construct
  source 1..75: mol_type = other DNA
ccgcctcgaaggaactgattctgatgcactggaagtcaaaaaatataaggggcgtttcccttatctgtgtttcct

SEQ ID NO: 441460 - DNA, 75 bp, synthetic construct
  source 1..75: mol_type = other DNA
taacgatggtttgtaatggtcaaacaatccaacgcaattattacaatagtactgctacatcactagagttttttg

SEQ ID NO: 441461 - DNA, 75 bp, synthetic construct
  source 1..75: mol_type = other DNA
gcgattgctgctgaagtgctgaaaaaagccggtgtttatgacaaaaacaaactgttcggcgttaccacgctggat

SEQ ID NO: 441462 - DNA, 75 bp, synthetic construct
  source 1..75: mol_type = other DNA
ttggtcatagtcaccgctgatcacgcccacgccagccagattgttgcgccggataccaaagctccgggcctcacc

SEQ ID NO: 441463 - DNA, 75 bp, synthetic construct
  source 1..75: mol_type = other DNA
atggtgatgagttacgggaactccgaagaggattcacaagaacataccggcagtcagctgcgtattgcggcgtat

SEQ ID NO: 441464 - DNA, 75 bp, synthetic construct
  source 1..75: mol_type = other DNA
tgtgcctacgttgaaggtgacggtcagtacgcacgtttcttctctcaaccgctgctgctgggtaaaaacggcgtg

SEQ ID NO: 441465 - DNA, 75 bp, synthetic construct
  source 1..75: mol_type = other DNA
tgagcgcatttgaacagaacgcgctggaaggtatgctggatacgctgaagaaagatatcgccctgggcgaagagt

SEQ ID NO: 441466 - DNA, 75 bp, synthetic construct
  source 1..75: mol_type = other DNA
tgagcgcatttgaacagagcgcactggaaggtatgctggatacgctgaagaaagatatcgccctgggcgaagagt

SEQ ID NO: 441467 - DNA, 75 bp, synthetic construct
  source 1..75: mol_type = other DNA
cgggagttgtggctgagtatggacgatctgacccgccatataatgtttttcgccaccaccggtggcggtaaaacg

SEQ ID NO: 441468 - DNA, 75 bp, synthetic construct
  source 1..75: mol_type = other DNA
gcatccgcaacctgttgaagtcacgccagatcggcgcgaccttctattttgcccgtgaagccctgattgacgctc

SEQ ID NO: 441469 - DNA, 75 bp, synthetic construct
  source 1..75: mol_type = other DNA
aacgttttcaccgatgaacagattgagaagctggaagaaatcttttattcctccatgttcaactaccagcgccac

SEQ ID NO: 441470 - DNA, 75 bp, synthetic construct
  source 1..75: mol_type = other DNA
aagcctacgacattatcagtcaccgccgtctggagtttgacgccggacacaccgacatagcgcagtcatttatgg

SEQ ID NO: 441471 - DNA, 75 bp, synthetic construct
  source 1..75: mol_type = other DNA
aggcctacgacattatcagccaccgtcgtctggagtttgacgccggacacaccgacatagcgcagtcatttatgg

SEQ ID NO: 441472 - DNA, 75 bp, synthetic construct
  source 1..75: mol_type = other DNA
cgtgggcgcaacaaggccgacaaggtggacatcgacctgtcccacagcaatctggcccccggcctgctgtgcgca

SEQ ID NO: 441473 - DNA, 75 bp, synthetic construct
  source 1..75: mol_type = other DNA
acttcgccaaagaagtggaggtggagctgaaaggtgatccgatggtgcttcccaacggggccacgctttacttcc

SEQ ID NO: 441474 - DNA, 75 bp, synthetic construct
  source 1..75: mol_type = other DNA
aattccatacttagatgtccgtctatatcagatgggcgtctaagttaccaattctcgtctgatggctacatacgg

SEQ ID NO: 441475 - DNA, 75 bp, synthetic construct
  source 1..75: mol_type = other DNA
cgagggcttgatgtctatcaggcgcgttttgaccatcttcgtctgattattgagcaaaataatttatatgtggcc

SEQ ID NO: 441476 - DNA, 75 bp, synthetic construct
  source 1..75: mol_type = other DNA
caaatcagtcgtcactcactggtttcatcatatctggcgttaatggagttcagtggtaatacaatgaccagagat

SEQ ID NO: 441477 - DNA, 75 bp, synthetic construct
  source 1..75: mol_type = other DNA
ggatcggttatgacccggcaaaaggtacacaaaacggcgacagcgctggatgcgtggtggtggcaccgccagccg

SEQ ID NO: 441478 - DNA, 75 bp, synthetic construct
  source 1..75: mol_type = other DNA
gttctggtccggtgcgctgttcaaccgtgggcgcaacaaagccgataaggtggacatcgacctgtcccacaacaa

SEQ ID NO: 441479 - DNA, 75 bp, synthetic construct
  source 1..75: mol_type = other DNA
ttcaacaaggggcgctcagacaagagcgagcgcgtcgatatcgatatcagccacgccgcactcgcaaagggcgtc

SEQ ID NO: 441480 - DNA, 75 bp, synthetic construct
  source 1..75: mol_type = other DNA
gcgtgttcaggcgcgtgaagcgcgggcggcggtagaagaaaataaaaaggcacagcttgagcgcgataaacaact

SEQ ID NO: 441481 - DNA, 75 bp, synthetic construct
  source 1..75: mol_type = other DNA
aggcgcgtgaagcacgggcggcggtagaagaaaataaaaaggcacagcttgagcgtgataaacagcttagtgaac

SEQ ID NO: 441482 - DNA, 75 bp, synthetic construct
  source 1..75: mol_type = other DNA
tacggcagaggcgggctcggtgatcacccagttcagtcaggcgctggcgcagggtgtattgcgtggtgaggagtt

SEQ ID NO: 441483 - DNA, 75 bp, synthetic construct
  source 1..75: mol_type = other DNA
cacctggcaaagaatgatgaaaactccagtgccataagaattctgcgtcagcgtctgtcttcagaattcttacaa

SEQ ID NO: 441484 - DNA, 75 bp, synthetic construct
  source 1..75: mol_type = other DNA
taacgtttgtggccgataagactacggcgaccatctccagtattgaggtgattggcaaccgtgcagtggcggatg

SEQ ID NO: 441485 - DNA, 75 bp, synthetic construct
  source 1..75: mol_type = other DNA
atgacgacggaactcaccttcaccgtgaaggatgcgtacgggaacccggtcaccgggctgaagccagatgcacca

SEQ ID NO: 441486 - DNA, 75 bp, synthetic construct
  source 1..75: mol_type = other DNA
acggagatgctgaacggaaataaagtggaatggcgcagctgggctgcatcaatcctgcaggaaatatcaaaagtt

SEQ ID NO: 441487 - DNA, 75 bp, synthetic construct
  source 1..75: mol_type = other DNA
gcaggagggattcagtaactgggtggataatgcgtccgattacgcctcacaggcagcacagctggcgacggaggg

SEQ ID NO: 441488 - DNA, 75 bp, synthetic construct
  source 1..75: mol_type = other DNA
cagtctcagtatcagaccggggatatcagtgaggatttttacagacaggctctggcgcagaatgcacagtatctg

SEQ ID NO: 441489 - DNA, 75 bp, synthetic construct
  source 1..75: mol_type = other DNA
gaaggcgatggcggacgatggtcaactgacggcggataaagtcgtgcccgcgttaatcagccagctggggatatt

SEQ ID NO: 441490 - DNA, 75 bp, synthetic construct
  source 1..75: mol_type = other DNA
aaaaggggccgggctgatgggggaggccggacctgaagccattatgcccctgacgcgggcggcggatggctcgct

SEQ ID NO: 441491 - DNA, 75 bp, synthetic construct
  source 1..75: mol_type = other DNA
tatctcagggatggtgaataacatcacggagatgctgaacggaaataaagtggaatggcgcagctgggcagcatc

SEQ ID NO: 441492 - DNA, 75 bp, synthetic construct
  source 1..75: mol_type = other DNA
aaacacaaacggcggtaacggaggcgtaccgaatattggcgatatccgcatcactggtggagatggaggcgacgg

SEQ ID NO: 441493 - DNA, 75 bp, synthetic construct
  source 1..75: mol_type = other DNA
tcgctttggtgcagaagtggtcattgaaccggaagtgacggacgaaatcatgagccgcgtcacccgcgcggaaaa

SEQ ID NO: 441494 - DNA, 75 bp, synthetic construct
  source 1..75: mol_type = other DNA
tgtccggttcggtgggggcgaagggcgcgatattttaccttctgcggatgtggaggatgtcccggtggatgatgc

SEQ ID NO: 441495 - DNA, 75 bp, synthetic construct
  source 1..75: mol_type = other DNA
aggacttgccggaggcgtccggttcggtggggacggagggcgcgatattttatcgtctgcggatgtggcggatgt

SEQ ID NO: 441496 - DNA, 75 bp, synthetic construct
  source 1..75: mol_type = other DNA
gacggtttttccatctggcatcaccttgacgctcacggcattcctttcaaaagcatcactcccaagaatgacact

SEQ ID NO: 441497 - DNA, 75 bp, synthetic construct
  source 1..75: mol_type = other DNA
cgttctcgacagaacattacctcatggctatatcattgcgcagcaggacgataataatcaggccatgcaatggct

SEQ ID NO: 441498 - DNA, 75 bp, synthetic construct
  source 1..75: mol_type = other DNA
tacatcattgcgcagcaggacaataacagtcaggctatgcagtggctgacccggttacgggataactctcatcgc

SEQ ID NO: 441499 - DNA, 75 bp, synthetic construct
  source 1..75: mol_type = other DNA
acactcgccgcaggtaaagtagccaacctgactgcattcacacctgattttaaaatcaccagaccatcgttaacg

SEQ ID NO: 441500 - DNA, 75 bp, synthetic construct
  source 1..75: mol_type = other DNA
gtttaacgacaccgctgaagcggtcagcgtggaaacgctggaaatcatgcagaacgccaatgagaaatcaggctg

SEQ ID NO: 441501 - DNA, 75 bp, synthetic construct
  source 1..75: mol_type = other DNA
cacgtagattatgccaatattcgcaatgccaaacgcctgaaaggcgacaagctgtgtctggttacagacgccact

SEQ ID NO: 441502 - DNA, 75 bp, synthetic construct
  source 1..75: mol_type = other DNA
gcgatatttcaccttctgcggatgtggtggatgtcagcgaggatgatgttgcattaatgatggcttcagcgggga

SEQ ID NO: 441503 - DNA, 75 bp, synthetic construct
  source 1..75: mol_type = other DNA
aaagaagcgaaagccggtttccgcgcggggattacctttgccacccatctgtacaacgcgatgccgtatattacc

SEQ ID NO: 441504 - DNA, 75 bp, synthetic construct
  source 1..75: mol_type = other DNA
ccataatccgaattttgtgcgtaagcctgatgccgcgctggtcgatttcctgtgcgaaaatgccgatgtcattac

SEQ ID NO: 441505 - DNA, 75 bp, synthetic construct
  source 1..75: mol_type = other DNA
tgctgaacggtgttgccggtaatattgatgcagtggcaacagcagcgggggcgctgcttaccgtcggggtggccc

SEQ ID NO: 441506 - DNA, 75 bp, synthetic construct
  source 1..75: mol_type = other DNA
gaaatgaaaaccgcaatggtgctcaaggcaaaagacaccattcgccgcggctgtctggaatacgacgccggggca

SEQ ID NO: 441507 - DNA, 75 bp, synthetic construct
  source 1..75: mol_type = other DNA
ttaaccccaatgtcgccaaccgtaacaagggcgagcgtaagaagccgaaaaagaactttttcagcgacgaggcta

SEQ ID NO: 441508 - DNA, 75 bp, synthetic construct
  source 1..75: mol_type = other DNA
tgcaacgctgcatggtcgacgtgatggaacaatgggatgattttgcccccttcgccgaccatccgtttggcacgc

SEQ ID NO: 441509 - DNA, 75 bp, synthetic construct
  source 1..75: mol_type = other DNA
ggtttgatatgcgtcagtgtacggcaagcgtaactatcggtaagacatggaaaaggatgaaacactcggagaaat

SEQ ID NO: 441510 - DNA, 75 bp, synthetic construct
  source 1..75: mol_type = other DNA
caaacttcccttaaggatgtgcttgattttcaacagggagtactgtcagggctttcagtgttgcaattaatacaa

SEQ ID NO: 441511 - DNA, 75 bp, synthetic construct
  source 1..75: mol_type = other DNA
agattgtcaccattgaggatgcccttgccgggggctgcaccctgttcgacctcgaccagctcaaacgagaaaaca

SEQ ID NO: 441512 - DNA, 75 bp, synthetic construct
  source 1..75: mol_type = other DNA
cgtgtgggtgtggcgtttcacggtgtcgcggatggtaaaaatccggatgtgctttccgtgggagaggggccaggg

SEQ ID NO: 441513 - DNA, 75 bp, synthetic construct
  source 1..75: mol_type = other DNA
cttcgctacatttcatcgccaaatatcgtgctaccgggcgtcgggttactggcggcatcgccaatgcacaggcct

SEQ ID NO: 441514 - DNA, 75 bp, synthetic construct
  source 1..75: mol_type = other DNA
gaaaggcggctgcacgctgttcgacattgagcagctcaaacgcgaaaacagcgccgacgattttaaaaacctgtt

SEQ ID NO: 441515 - DNA, 75 bp, synthetic construct
  source 1..75: mol_type = other DNA
ccgaccgcatcgaaatcgacatcagccacagcgcgctcgccggtggccagctctgtgacgatggccagtggcggc

SEQ ID NO: 441516 - DNA, 75 bp, synthetic construct
  source 1..75: mol_type = other DNA
cacggtgttgcgaacgccatcctgttaccgcatgtcatgcgctataacgctgactttaccggtgagaagtaccgc

SEQ ID NO: 441517 - DNA, 75 bp, synthetic construct
  source 1..75: mol_type = other DNA
tcgtcattcatggtaatgttgatatcggtgagaatgtcattatacggcagaatacaaccattggtgaaaaggttt

SEQ ID NO: 441518 - DNA, 75 bp, synthetic construct
  source 1..75: mol_type = other DNA
ggcggcagggatgcccctccggtatggctgacccttgggcgttatcctgatatgtctctggcagccgccaggaga

SEQ ID NO: 441519 - DNA, 75 bp, synthetic construct
  source 1..75: mol_type = other DNA
cactgcgacaacgaatgagcaagggcaggctattttcaccgctaccactactgttgcggcgacatacacactcaa

SEQ ID NO: 441520 - DNA, 75 bp, synthetic construct
  source 1..75: mol_type = other DNA
ccggaacgtatgagatcacggcatcggcagggaatagccagccttcgaatacgcagactataacgtttgtagccg

SEQ ID NO: 441521 - DNA, 75 bp, synthetic construct
  source 1..75: mol_type = other DNA
tcagacgccggaaggggtgacggagaaggattatcagttcctgccgtcgaaaaatgaccatttcgtgagcgggaa

SEQ ID NO: 441522 - DNA, 75 bp, synthetic construct
  source 1..75: mol_type = other DNA
ggaaggcgctggagaatgccacgtcggttacgggaatgctgaaaagtggcgcggcatccctgctttcgcttgtcg

SEQ ID NO: 441523 - DNA, 75 bp, synthetic construct
  source 1..75: mol_type = other DNA
tatcagtatgttctggcgaaccctggctggacgaccggtgacggattcatgataaaccatctgacatcggtgaag

SEQ ID NO: 441524 - DNA, 75 bp, synthetic construct
  source 1..75: mol_type = other DNA
cggccctgattgaccagcaaaaaatccgggaacagttgcggtcccgggaagagaccctgaagaatgataatgtgg

SEQ ID NO: 441525 - DNA, 75 bp, synthetic construct
  source 1..75: mol_type = other DNA
agtttaaaggtacaggcaacatggaactgcatctctctcgtaagatcgctgaaaaacgcgtcttcccggctatcg

SEQ ID NO: 441526 - DNA, 75 bp, synthetic construct
  source 1..75: mol_type = other DNA
aacggttctactgaagatttgaccgcacgcgtgctggatctggcttcaccaatcgggcgtggccaacgtggtctg

SEQ ID NO: 441527 - DNA, 75 bp, synthetic construct
  source 1..75: mol_type = other DNA
cgcaaagagtggcgaagatatctttggtgatggcgtactggagatattgcaggatggatttggttttctccgttc

SEQ ID NO: 441528 - DNA, 75 bp, synthetic construct
  source 1..75: mol_type = other DNA
tcaccttcaccgtgaaggatgcgtacgggaacccggtcaccgggctgaagccagatgcaccagtgtttagcggtg

SEQ ID NO: 441529 - DNA, 75 bp, synthetic construct
  source 1..75: mol_type = other DNA
tagcatggtttgatattagtaattatgaatttttaaatgatttaaccttgccggacttgattcaagaattagagt

SEQ ID NO: 441530 - DNA, 75 bp, synthetic construct
  source 1..75: mol_type = other DNA
actacaaccgttctggtacccgtaaagaagagctgctcacgactcaggaagaactgcagaaaatgtggatcctgc

SEQ ID NO: 441531 - DNA, 75 bp, synthetic construct
  source 1..75: mol_type = other DNA
gctgtggtaaaaatgccattaatgggaaaatcactgaataaatccattgaacgaaataaagtaaaaacggctaaa

SEQ ID NO: 441532 - DNA, 75 bp, synthetic construct
  source 1..75: mol_type = other DNA
tggtaattacagcgtttgtcgcccgtcgcttactgcgctttcgtcatatgcttgcctgtcgtcgtcgcgggttaa

SEQ ID NO: 441533 - DNA, 75 bp, synthetic construct
  source 1..75: mol_type = other DNA
cgtgttattcgtgcgctggctgcgggaatgggggttgcccgtaaggatctgaaggccatggcggataacggaaaa

SEQ ID NO: 441534 - DNA, 75 bp, synthetic construct
  source 1..75: mol_type = other DNA
aacgcagattgccacggcgcgggcaagagcagccgtgtaccgtgcgcagcaggcagtggcggcagcccgcgggac

SEQ ID NO: 441535 - DNA, 75 bp, synthetic construct
  source 1..75: mol_type = other DNA
tgaacagaaatattgctgccagaaccgccgcccagaatgcgctgaacagtacaacggcagtgggttctcgtctga

SEQ ID NO: 441536 - DNA, 75 bp, synthetic construct
  source 1..75: mol_type = other DNA
tatcagccagcggacaggcaccgcattttcggataatgcggccctgtttgcccgttcggctgcctcgatgcgtga

SEQ ID NO: 441537 - DNA, 75 bp, synthetic construct
  source 1..75: mol_type = other DNA
cgatagtgccattaacatcgggatcagaggtcctctgaacggttatatccagcccttggttgcctcacgtatatt

SEQ ID NO: 441538 - DNA, 75 bp, synthetic construct
  source 1..75: mol_type = other DNA
caaacaagcaggaatcgacagcgagacgcgtgcgcagtttgttggacatatccgcggttctggcgagacagagaa

SEQ ID NO: 441539 - DNA, 75 bp, synthetic construct
  source 1..75: mol_type = other DNA
cggattctttaccggagcaaggattaatgagttatgccaactttatctagatgatattaagcaggatgctaccgg

SEQ ID NO: 441540 - DNA, 75 bp, synthetic construct
  source 1..75: mol_type = other DNA
tgcttgccgggctggaggagcgacgggtggcgttgatccgtcaacaggcggcggaacaaaacaaagcgtatcagt

SEQ ID NO: 441541 - DNA, 75 bp, synthetic construct
  source 1..75: mol_type = other DNA
taattgacgagcagaaaagtaagattaaatccttacaggaaaaaattgctggctatcagtatgtgctggcaaacc

SEQ ID NO: 441542 - DNA, 75 bp, synthetic construct
  source 1..75: mol_type = other DNA
cgggagttgcagcagatccgtgacagcttccgccagaaggatgcggaccttcagtctcagtatcagaccggggat

SEQ ID NO: 441543 - DNA, 75 bp, synthetic construct
  source 1..75: mol_type = other DNA
cacgcagattgccacggcgcgggcaagtgcagccgtgtaccgtgctcagcaggcagtggcggcagcccgcgggac

SEQ ID NO: 441544 - DNA, 75 bp, synthetic construct
  source 1..75: mol_type = other DNA
cagagcgtgagctggccctgtccagactgaatggggacgaaaaagagcggggccggctggggtatgcggcggatg

SEQ ID NO: 441545 - DNA, 75 bp, synthetic construct
  source 1..75: mol_type = other DNA
tgaacagaaatattgctgccagaagcgccgcccagaatgagctgaacagtacaacggcggtgggctcacgtctga

SEQ ID NO: 441546 - DNA, 75 bp, synthetic construct
  source 1..75: mol_type = other DNA
tgaacagaaatattgctgccagaagcgcagcccagaatgcgctgaacagtacaacggcggtgggctcacgtctga

SEQ ID NO: 441547 - DNA, 75 bp, synthetic construct
  source 1..75: mol_type = other DNA
cagagcgtgagctggccctgtcctgactgaatggggacgaaaaagagcggggccgtctggggtatgcggcggatg

SEQ ID NO: 441548 - DNA, 75 bp, synthetic construct
  source 1..75: mol_type = other DNA
cagagcgtgagctggccctgtcctgactgaaaggggacgaaaaagagcggggccggctggggtatgcggcggatg

SEQ ID NO: 441549 - DNA, 75 bp, synthetic construct
  source 1..75: mol_type = other DNA
cagagcgtgagctggccctgtccagactgaagggggacgaaaaagagcggggccgtctggggtatgcggcggatg

SEQ ID NO: 441550 - DNA, 75 bp, synthetic construct
  source 1..75: mol_type = other DNA
tgaacagaaatattgctgccagaaacgcggcccagaatgcgctgaacagtacaacggcggtgggctcacgtctga

SEQ ID NO: 441551 - DNA, 75 bp, synthetic construct
  source 1..75: mol_type = other DNA
tgaacagaaatattgctgccagaaacgccgcccagaatgggctgaacagtacaacggcggtgggctcacgtctga

SEQ ID NO: 441552 - DNA, 75 bp, synthetic construct
  source 1..75: mol_type = other DNA
gacgcagattgccacggcgcgggcaagggcagccgtgtaccgtgcccagcaggcagtggcggcagcccgcgggac

SEQ ID NO: 441553 - DNA, 75 bp, synthetic construct
  source 1..75: mol_type = other DNA
tgaacagaaatattgctgccagaaccgcggcccagaatgagctgaacagtacaacggcggtgggctcacgtctga

SEQ ID NO: 441554 - DNA, 75 bp, synthetic construct
  source 1..75: mol_type = other DNA
tgaacagaaatattgctgccagaaccgcagcccagaatgggctgaacagtacaacggcggtgggctcacgtctga

SEQ ID NO: 441555 - DNA, 75 bp, synthetic construct
  source 1..75: mol_type = other DNA
tgaacagaaatattgctgccagaatcgctgcccagaatgcgctgaacagtacaacggcggtgggctcacgtctga

SEQ ID NO: 441556 - DNA, 75 bp, synthetic construct
  source 1..75: mol_type = other DNA
actcggtgaaaatgagcgagttatgtgaaaaatatattcgctacaagcgcggggggaaattcacggaaaaggcag

SEQ ID NO: 441557 - DNA, 75 bp, synthetic construct
  source 1..75: mol_type = other DNA
cggctcctgtccccactctggcggcctccggtagttcaccacagaccaccaccacgtctgaaagcggcgtgacgc

SEQ ID NO: 441558 - DNA, 75 bp, synthetic construct
  source 1..75: mol_type = other DNA
atggcaatggacttacgcgatccgaatgtctggatatcgcacctgctggaaaacctgccggaagaaaaactggca

SEQ ID NO: 441559 - DNA, 75 bp, synthetic construct
  source 1..75: mol_type = other DNA
cgtcaagctagggtctctggcgcacactcagcttgatattcccgaactacaacgcagggggctaaaacttctggc

SEQ ID NO: 441560 - DNA, 75 bp, synthetic construct
  source 1..75: mol_type = other DNA
ggtcgtcactatttcgccaatccggaagcgcgtagtctggcgctgggcttctaccacaagctgtctgcgttgtgc

SEQ ID NO: 441561 - DNA, 75 bp, synthetic construct
  source 1..75: mol_type = other DNA
accgacgaaggtgaataatttctgggaaacctccgggttgaatatccttgagacgctggcgcgactggatcacga

SEQ ID NO: 441562 - DNA, 75 bp, synthetic construct
  source 1..75: mol_type = other DNA
tgcacagacggcgcaccgtcttggctataccgccgcggccgatgccatccgcgatgaagtcgtttcctttcttgg

SEQ ID NO: 441563 - DNA, 75 bp, synthetic construct
  source 1..75: mol_type = other DNA
cggccacgagttttgcggcgatattctggccgtgggtaaaaagtggcagcacaaattccagccgggtcagcgtta

SEQ ID NO: 441564 - DNA, 75 bp, synthetic construct
  source 1..75: mol_type = other DNA
aacgctgcgcccgattaccgctgcgctcggcgcatctctggcactttctggcaacatcctcggcccgcttttgtt

SEQ ID NO: 441565 - DNA, 75 bp, synthetic construct
  source 1..75: mol_type = other DNA
agcaaaagaatagaatcagaagaatcgctaaatggtgtcttgataaattaccaagtgattgtcagattgtcggtg

SEQ ID NO: 441566 - DNA, 75 bp, synthetic construct
  source 1..75: mol_type = other DNA
attcgttgcgtgggttatcgccagatgtggtcttaccttgaaggcgaaatctcatacgatgaaatggtttatcga

SEQ ID NO: 441567 - DNA, 75 bp, synthetic construct
  source 1..75: mol_type = other DNA
tcgccggaaacatgtcgccagatggctatcgccaactgctggaacacgttaaagcaaccggtgttaatgtctggg

SEQ ID NO: 441568 - DNA, 75 bp, synthetic construct
  source 1..75: mol_type = other DNA
cgattaccgccgcgctcggcgcatctctggcactttcgggcaacattctcggcccgctgctgttcttctttattt

SEQ ID NO: 441569 - DNA, 75 bp, synthetic construct
  source 1..75: mol_type = other DNA
aagataattgcaaatagtattgcagaatatgaacatacacgaatacctgcaatcttatatcagcatgacggcgag

SEQ ID NO: 441570 - DNA, 75 bp, synthetic construct
  source 1..75: mol_type = other DNA
gttggtgaaaacgattgccgaactgaatatggcacgtgagagcggtttgtattccttgcttgagtttattggcaa

SEQ ID NO: 441571 - DNA, 75 bp, synthetic construct
  source 1..75: mol_type = other DNA
ctgtacccacagagtttgcagatctcaaagttcgcgatgaaaaaacactaccgtcattaggcgcaacgttattca

SEQ ID NO: 441572 - DNA, 75 bp, synthetic construct
  source 1..75: mol_type = other DNA
gaatggactaaaaccggtttttgtggatattgatcccgaaacatttaatattgatcctaagaaaattgaagaagc

SEQ ID NO: 441573 - DNA, 75 bp, synthetic construct
  source 1..75: mol_type = other DNA
gcgttacgttagggctaccggaagtcgctccgtttgtttgcgaagatggtgtagatgcggtagctgatgctatca

SEQ ID NO: 441574 - DNA, 75 bp, synthetic construct
  source 1..75: mol_type = other DNA
tgcaccattcgtttgcgaagatggtgtcgatgcggtagctgatgcgctacggattaagcagagcaataaatcgcg

SEQ ID NO: 441575 - DNA, 75 bp, synthetic construct
  source 1..75: mol_type = other DNA
cgcagtttgttggacatatccgtggttctggcgagacagagaaccggtatagcaaagatcatccaccagcggctc

SEQ ID NO: 441576 - DNA, 75 bp, synthetic construct
  source 1..75: mol_type = other DNA
tgataaagtcctatgcttgccaatatatacagatttaaatgaagagattgttgtgaaaataaccaaattattatt

SEQ ID NO: 441577 - DNA, 75 bp, synthetic construct
  source 1..75: mol_type = other DNA
gtaatccttgtgatgtgattgcaatagaaaaaatagccaaaaagtataaacttaaagtgatatatgatgctgctc

SEQ ID NO: 441578 - DNA, 75 bp, synthetic construct
  source 1..75: mol_type = other DNA
aacagtgactgcagctggaataaatgggaaaatgagcgaggtaaattcagcgtttggattactccagcttaaata

SEQ ID NO: 441579 - DNA, 75 bp, synthetic construct
  source 1..75: mol_type = other DNA
ggttctgtgcttaccgatatatactgaattaacggaaactgaattggcatttatcataaatagtattcgaggtta

SEQ ID NO: 441580 - DNA, 75 bp, synthetic construct
  source 1..75: mol_type = other DNA
tgttacagctcctggcattaatgggaaaatgagtgagctaaatgctgcatttggtttagttcaattaaaatatat

SEQ ID NO: 441581 - DNA, 75 bp, synthetic construct
  source 1..75: mol_type = other DNA
caacaccctgtgaagtcgaagaaattcaaaaaatagctgataattatggattgaaagtaatctacgacgcagcac

SEQ ID NO: 441582 - DNA, 75 bp, synthetic construct
  source 1..75: mol_type = other DNA
caggaaatgtggaacatccgacaggagtttgagcagaaaaataatgagttgctgagacagtaccagaccggagaa

SEQ ID NO: 441583 - DNA, 75 bp, synthetic construct
  source 1..75: mol_type = other DNA
cgtattttgcttttgcgaaaggtgccgggctgatgggcgaggccgggcctgaagcaatcatgccactgacacggg

SEQ ID NO: 441584 - DNA, 75 bp, synthetic construct
  source 1..75: mol_type = other DNA
tcagatagggccggaggcggcaggcagccttgtgcagctgattgaccagcgggtgcaggcggtgatgctgtccat

SEQ ID NO: 441585 - DNA, 75 bp, synthetic construct
  source 1..75: mol_type = other DNA
cagggctgaaaatttccggtgccagtgcggcagaggcgggttcggtgatcacccagttcagccatgcgctggcac

SEQ ID NO: 441586 - DNA, 75 bp, synthetic construct
  source 1..75: mol_type = other DNA
cgacgcgccctggcagaactgaacagccagttgacggaaattcgcggttctgctgtcggagtggctggcgcattt

SEQ ID NO: 441587 - DNA, 75 bp, synthetic construct
  source 1..75: mol_type = other DNA
aagcggcagatgcggtcgtttccactatggatggtctggtttcaaatatttccgaggcactggccggaaacgttg

SEQ ID NO: 441588 - DNA, 75 bp, synthetic construct
  source 1..75: mol_type = other DNA
ggggcggggctgatgggggaggccggtcctgaagccattatgcccctgacccgggcggcggatggctcgctgggt

SEQ ID NO: 441589 - DNA, 75 bp, synthetic construct
  source 1..75: mol_type = other DNA
aacagcagagcgccctgaataacacagagcgtcaactggccctgtcccggctgaaaggggaagaaaaagagcgtg

SEQ ID NO: 441590 - DNA, 75 bp, synthetic construct
  source 1..75: mol_type = other DNA
ctgacggcggataaagtcgttcctgcgttaatcagccagctgggggtattgcgtgatgaatatgccgccatgcca

SEQ ID NO: 441591 - DNA, 75 bp, synthetic construct
  source 1..75: mol_type = other DNA
atgcccctgacccgggcggcggatggctcgctgggcgtacgtgccgtgggcaggatgaacgggagtgcgggtctg

SEQ ID NO: 441592 - DNA, 75 bp, synthetic construct
  source 1..75: mol_type = other DNA
gcgtgcggactggcagaaaggcttgcaggaggggctcagtaactgggtggacaatgcatccgattacgcctctca

SEQ ID NO: 441593 - DNA, 75 bp, synthetic construct
  source 1..75: mol_type = other DNA
ggatgggtgtggcccgtaaagatctgaaggcaatggcggatgacggaaaactgacagcggataaagtggtccccg

SEQ ID NO: 441594 - DNA, 75 bp, synthetic construct
  source 1..75: mol_type = other DNA
ctgctcgtccctcagttggcaaaaccgctttcgccctgacgctatgcgtgaacgcgctaatgctgcgccctgctc

SEQ ID NO: 441595 - DNA, 75 bp, synthetic construct
  source 1..75: mol_type = other DNA
tgctgcggcgtgccgctcatcgccaacggctttaccgataaagcacgtaaacaagcaatcacgaatgtagagtcg

SEQ ID NO: 441596 - DNA, 75 bp, synthetic construct
  source 1..75: mol_type = other DNA
gctgaaaccagtgcgacaactgcttgatgcggcgttaaaaattgaccatcgccgcacgctgccgaaatactcctt

SEQ ID NO: 441597 - DNA, 75 bp, synthetic construct
  source 1..75: mol_type = other DNA
gccgcacgctgccgaaatactccttcggcactttccgccgctggtatcgcagtgtggcggcgcagcaagcgcaat

SEQ ID NO: 441598 - DNA, 75 bp, synthetic construct
  source 1..75: mol_type = other DNA
aactatatgaccggcggacgctcccgcagtgaactgctccatgccggcgacaaatccctgccggaatccaactcc

SEQ ID NO: 441599 - DNA, 75 bp, synthetic construct
  source 1..75: mol_type = other DNA
attcgtgagcaaattgctgcttatgaaagcagcctggcggacagtaacgccagtgtcagggcatcaaatgaggct

SEQ ID NO: 441600 - DNA, 75 bp, synthetic construct
  source 1..75: mol_type = other DNA
atgaacgataccagcttcgaaaactgcatcaagtgcaccgtctgcaccaccgcctgtccggtgagccgggtgaat

SEQ ID NO: 441601 - DNA, 75 bp, synthetic construct
  source 1..75: mol_type = other DNA
atgagtggttgcgatatgctataatctctgatgtgttattttatctatatcaatacttcgctagtaatattaata

SEQ ID NO: 441602 - DNA, 75 bp, synthetic construct
  source 1..75: mol_type = other DNA
taagataataccgtatcttttgggttatagtcatgagtattcttctcagagaatggatatctctgttgaccaatc

SEQ ID NO: 441603 - DNA, 75 bp, synthetic construct
  source 1..75: mol_type = other DNA
caccctgagcgaatcgctggaacagcaggagcagctcgaacaggtgggcggcttcgcgtatctggctgagttgtc

SEQ ID NO: 441604 - DNA, 75 bp, synthetic construct
  source 1..75: mol_type = other DNA
acaccacgcgcccgtcgctgcgcaatttcgttttgagtcataccgacctgatgggtagcgtttctacgccgttcg

SEQ ID NO: 441605 - DNA, 75 bp, synthetic construct
  source 1..75: mol_type = other DNA
gcattaagtgcaccgtctgtaccaccgcctgcccggtgagccgggtaaatcctggttatccggggcccaaacagg

SEQ ID NO: 441606 - DNA, 75 bp, synthetic construct
  source 1..75: mol_type = other DNA
atgagtggttgcgatatgctataatttctgatgtgttattttatctatatcaatacttcgctagtaatattaaca

SEQ ID NO: 441607 - DNA, 75 bp, synthetic construct
  source 1..75: mol_type = other DNA
cggatcattcgtgcactggctgcaggcatgggcgtggcccgtaaagatctgaaggcgatggcggacgacggcaaa

SEQ ID NO: 441608 - DNA, 75 bp, synthetic construct
  source 1..75: mol_type = other DNA
accgtaacggaagggcttgctcaggcaacagagcagcttgccgttgagcagtcccgtctggcacagatgcaggaa

SEQ ID NO: 441609 - DNA, 75 bp, synthetic construct
  source 1..75: mol_type = other DNA
gggaatgaactgcttcagcagcgtcagggactggtgaatgtaccgttacggctgccgcaggccaccctggatcga

SEQ ID NO: 441610 - DNA, 75 bp, synthetic construct
  source 1..75: mol_type = other DNA
cagagcgtcaactggccctctcccggctgaaaggggaagaaaaagagcgtgcccggctggggtatgcggcggatg

SEQ ID NO: 441611 - DNA, 75 bp, synthetic construct
  source 1..75: mol_type = other DNA
cggcgtgcactggcagaagtgacggatcagataaatacagctaaatcttcggcactgaatatggcggggggattt

SEQ ID NO: 441612 - DNA, 75 bp, synthetic construct
  source 1..75: mol_type = other DNA
gcagttaaccattgccgaaaacattttcctcggtcgtgagtttgttaatcgctttggcaaaattgactggaaaac

SEQ ID NO: 441613 - DNA, 75 bp, synthetic construct
  source 1..75: mol_type = other DNA
cggcgctaacgggcagatagggccggaagcggcgggcacccttgtgcaactgattgaccagcgggtacaggcggt

SEQ ID NO: 441614 - DNA, 75 bp, synthetic construct
  source 1..75: mol_type = other DNA
cagagcgtgagctggccctgtccggactgaatggggacgaaaaagagcggggccgactggggtatgcggcggatg

SEQ ID NO: 441615 - DNA, 75 bp, synthetic construct
  source 1..75: mol_type = other DNA
cagagcgtgagctggccctgtccggactgaaaggggacgaaaaagagcggggccgtctggggtatgcggcggatg

SEQ ID NO: 441616 - DNA, 75 bp, synthetic construct
  source 1..75: mol_type = other DNA
cagagcgtgagctggccctgtcctgactgaagggggacgaaaaagagcggggccgactggggtatgcggcggatg

SEQ ID NO: 441617 - DNA, 75 bp, synthetic construct
  source 1..75: mol_type = other DNA
actgaatggggaggaaaaagagcgggcccgactggggtatgcggcggatgacctaggttttgtgggggatccgta

SEQ ID NO: 441618 - DNA, 75 bp, synthetic construct
  source 1..75: mol_type = other DNA
actgaaaggggaggaaaaagagcgggcccgtctggggtatgcggcggatgacctaggttttgtgggggatccgta

SEQ ID NO: 441619 - DNA, 75 bp, synthetic construct
  source 1..75: mol_type = other DNA
actgaaaggggaggaaaaagagcgggcccgactggggtatgcggcggatgaccttggttttgtgggggatccgta

SEQ ID NO: 441620 - DNA, 75 bp, synthetic construct
  source 1..75: mol_type = other DNA
cagtcttgtgcagctgattgaccagcgggtgcaggcggtgatgctgtccatgcgacgtgacggaggaatgctgag

SEQ ID NO: 441621 - DNA, 75 bp, synthetic construct
  source 1..75: mol_type = other DNA
aagttgaaaacgcctttatggcctgggttggtggtgcgaatgatgccagcggtgcaacaaaaacgcttaccggaa

SEQ ID NO: 441622 - DNA, 75 bp, synthetic construct
  source 1..75: mol_type = other DNA
agataatgaggaaaagacgcgacaggcactgaaggagcaaaacaggttaattgacgagcagaaaagtaagattaa

SEQ ID NO: 441623 - DNA, 75 bp, synthetic construct
  source 1..75: mol_type = other DNA
tcaggagtgtcatggttttgttcaccgtgccgatgtctctgcacacattcatgaactggcaaacgcgccagcact

SEQ ID NO: 441624 - DNA, 75 bp, synthetic construct
  source 1..75: mol_type = other DNA
acaatgctggcattctgcgcatttatcttttgcatttttctgccattgtggggtataaaacgcgacgcgcggctt

SEQ ID NO: 441625 - DNA, 75 bp, synthetic construct
  source 1..75: mol_type = other DNA
aattcttcacccgatttccacttttttttgaatcgtgtctcattctgttaaaaacgtggctggaaatttttcctg

SEQ ID NO: 441626 - DNA, 75 bp, synthetic construct
  source 1..75: mol_type = other DNA
gacacagatagcaacagccagagcgcgggcggcattgtatcgtgcgcagcaggcggttatggctgcccgtggtac

SEQ ID NO: 441627 - DNA, 75 bp, synthetic construct
  source 1..75: mol_type = other DNA
ccgggaagagaccctgaagaatgataatgtggctgcgcgtgcatcaaatgaagccgaactgctgggatacgggca

SEQ ID NO: 441628 - DNA, 75 bp, synthetic construct
  source 1..75: mol_type = other DNA
acggtatcattaagtagtttgctaagtaagtttgaaatacgtgcacctattatgttaattactcgcggtactggt

SEQ ID NO: 441629 - DNA, 75 bp, synthetic construct
  source 1..75: mol_type = other DNA
taattcggtcaatgaaagcggagaccggatcgtacgtgcactggctgcgggtatgggcgtggcccgtaaagatct

SEQ ID NO: 441630 - DNA, 75 bp, synthetic construct
  source 1..75: mol_type = other DNA
acaatgggcggagctcaggattatctggcgcacagaacagtgattgacgaggccgagaaagcaggcatcacacgc

SEQ ID NO: 441631 - DNA, 75 bp, synthetic construct
  source 1..75: mol_type = other DNA
tggtccgcaagcacttatcatctcaacaatgggcggcgcacaggattatctggcccacagaacggtgattgatga

SEQ ID NO: 441632 - DNA, 75 bp, synthetic construct
  source 1..75: mol_type = other DNA
gtatacctcggcaaacctgagtgcgtacagcaacagcattgtggacacgcccacgtactttgcgtttgcaaaagg

SEQ ID NO: 441633 - DNA, 75 bp, synthetic construct
  source 1..75: mol_type = other DNA
tcgccagcgcctgggacagtcgctacccgcagataagccgaagctggcaggctaactggccgaatcttgccacgt

SEQ ID NO: 441634 - DNA, 75 bp, synthetic construct
  source 1..75: mol_type = other DNA
ggatgcagacagtaacctgcagagtctgtgctggtcctgccataaagcaaaaacagcgcgcgaacgcatcaactg

SEQ ID NO: 441635 - DNA, 75 bp, synthetic construct
  source 1..75: mol_type = other DNA
gatgccgacagcaatctgcagagcctgtgctggccgtgtcataaggcgaagacggcccgtgaacggctgaagtaa

SEQ ID NO: 441636 - DNA, 75 bp, synthetic construct
  source 1..75: mol_type = other DNA
gggatgacggtctccctcgttgcccggcaacatggtgtagcagccagccagttatttctctggcgtaagcaatac

SEQ ID NO: 441637 - DNA, 75 bp, synthetic construct
  source 1..75: mol_type = other DNA
cagagattatccaaaccaaagtacgtccagcagttggcggttcagaagttattacaacaatattctaaaattctg

SEQ ID NO: 441638 - DNA, 75 bp, synthetic construct
  source 1..75: mol_type = other DNA
ctggtgtggcggagacgcaggaaaaacctgcggtaactgaaaatgcggctgctgcgtccaccgcaggcacgggaa

SEQ ID NO: 441639 - DNA, 75 bp, synthetic construct
  source 1..75: mol_type = other DNA
gttgtgtctgcgtgccggtgtggtgagcgaggcgaaaaccgtcgaccacatcatcccgaaagcgtatggcggaac

SEQ ID NO: 441640 - DNA, 75 bp, synthetic construct
  source 1..75: mol_type = other DNA
aatagcgcgggttctctgatggtactgagaggtgccggagtcactcaggtttatcgtgtgtacaacagctcgcgc

SEQ ID NO: 441641 - DNA, 75 bp, synthetic construct
  source 1..75: mol_type = other DNA
gccgtgttcgcggctgccgccataccacgacagatccgtcaggctactgcgaaagccacaaaagcgaaggctgga

SEQ ID NO: 441642 - DNA, 75 bp, synthetic construct
  source 1..75: mol_type = other DNA
tcatcagcgcggttatggttcgaagtgggacagtatccgcgcgcgcgtcctgaagcgtgacaaaggtttatgtca

SEQ ID NO: 441643 - DNA, 75 bp, synthetic construct
  source 1..75: mol_type = other DNA
tgatgctgactgcaatctgcagagtttgtgctggccgtgtcataaggcgaagacggcccgtgaacggcttaggtg

SEQ ID NO: 441644 - DNA, 75 bp, synthetic construct
  source 1..75: mol_type = other DNA
atgtcaacgattattatggatttatgtagttacacccgactaggtttaaccgggtatctgttgagtagaggggtt

SEQ ID NO: 441645 - DNA, 75 bp, synthetic construct
  source 1..75: mol_type = other DNA
atgggtgcagccgtattcctcgcaagtccggcatcgaattatgtcaacggacatttattagtggttgatggcggt

SEQ ID NO: 441646 - DNA, 75 bp, synthetic construct
  source 1..75: mol_type = other DNA
accaaacggctggagcgcggccgcttcgcctggccgtcagcccgggatggcaaagtgttcctcacaccggcacag

SEQ ID NO: 441647 - DNA, 75 bp, synthetic construct
  source 1..75: mol_type = other DNA
atcactgggtgggtattggtgcgcataaccattatgtggttatgggctatcacggacatacagcgaccgttcatg

SEQ ID NO: 441648 - DNA, 75 bp, synthetic construct
  source 1..75: mol_type = other DNA
ccatgttttcattttccggggccgcagcggcagtcaggttaaactgctgtggtccaccggtgacgggctgtgcct

SEQ ID NO: 441649 - DNA, 75 bp, synthetic construct
  source 1..75: mol_type = other DNA
aagtgttccttacgcaggcgcagttggcgatgctgctggaaggtatcgactggcgacagcctaagcggctgctga

SEQ ID NO: 441650 - DNA, 75 bp, synthetic construct
  source 1..75: mol_type = other DNA
cgtgggcgcttcgcctggccgtcagcccgtgatggcaaagtgttccttacgcaggcgcagctggcgatgctgctg

SEQ ID NO: 441651 - DNA, 75 bp, synthetic construct
  source 1..75: mol_type = other DNA
gtatctggttggttgccggtatcaccgacatgcgaaatggttttaacggcctggcatcaaaagttcagaacgtcc

SEQ ID NO: 441652 - DNA, 75 bp, synthetic construct
  source 1..75: mol_type = other DNA
tatgcatcgggcgacgatccttggggataaaccgttttatcggtcggggggatacgagtgcggacggttccctcg

SEQ ID NO: 441653 - DNA, 75 bp, synthetic construct
  source 1..75: mol_type = other DNA
ccgcaggggcgattctggcggcaaaagagttaccctcgaccggcggcgatacgctctggagcagcggtattgcgg

SEQ ID NO: 441654 - DNA, 75 bp, synthetic construct
  source 1..75: mol_type = other DNA
tggctgtaatcaactcacccagtacacgattagcgaacaagaaattaaccagtcacttgagaaacataataattt

SEQ ID NO: 441655 - DNA, 75 bp, synthetic construct
  source 1..75: mol_type = other DNA
ccgattatttgccgcagcgacgaattatgcatcgggcaacgatactcggagataaaccgttttatcgggcagagt

SEQ ID NO: 441656 - DNA, 75 bp, synthetic construct
  source 1..75: mol_type = other DNA
gccggataacgacaactggcacaccgatgtgacatttattgaaacgccgccagcgggagcgattctggcagcgaa

SEQ ID NO: 441657 - DNA, 75 bp, synthetic construct
  source 1..75: mol_type = other DNA
gccagataacgacaactggcataccgatgtgacatttattgaaacgcctcctgctggggcgattctggcggcgaa

SEQ ID NO: 441658 - DNA, 75 bp, synthetic construct
  source 1..75: mol_type = other DNA
gccgcgttcgcggctgccgccataccacgactgacccgtcaggctattgcgaaagccacaaaagcaaaggctgga

SEQ ID NO: 441659 - DNA, 75 bp, synthetic construct
  source 1..75: mol_type = other DNA
tggtttcgttattcgccatgtgaatggcgtgactatcttgctgaactaaatgagcaaggtcaggcttatgcgcaa

SEQ ID NO: 441660 - DNA, 75 bp, synthetic construct
  source 1..75: mol_type = other DNA
cgttcctgcctctgaacttgctgccgccatgaagcagattaaagaactccagcgtctgctcggcaaaaaaacgat

SEQ ID NO: 441661 - DNA, 75 bp, synthetic construct
  source 1..75: mol_type = other DNA
ggttgagtgaagaagaaagtctatggatccagtcgcgcattcatctacgggctctacgttattatagtaactggc

SEQ ID NO: 441662 - DNA, 75 bp, synthetic construct
  source 1..75: mol_type = other DNA
gccttagcggtgtcatggctgctggctctaggcaaatatttgctaatgaaatttcgtcaggagcaagtaatgtag

SEQ ID NO: 441663 - DNA, 75 bp, synthetic construct
  source 1..75: mol_type = other DNA
cgatgtgctaaatcagttacatattgattttagagccttagcggtgtcatggctgctggctctaggcaaatattt

SEQ ID NO: 441664 - DNA, 75 bp, synthetic construct
  source 1..75: mol_type = other DNA
ccgactgtgcattacagggaactggcgatgtgttaaatcagttacatattgattttcgcgcactcagtggcgtaa

SEQ ID NO: 441665 - DNA, 75 bp, synthetic construct
  source 1..75: mol_type = other DNA
atggatgtacagcagttttttgtcgttgccgtttttttccttattccgatattttgtttccgcgaagcatggaaa

SEQ ID NO: 441666 - DNA, 75 bp, synthetic construct
  source 1..75: mol_type = other DNA
gcaccacctgctgtatgatcccgcacctgcaaatcgagaaagaactggccagcggtgaactgattgacttaacgc

SEQ ID NO: 441667 - DNA, 75 bp, synthetic construct
  source 1..75: mol_type = other DNA
ttctggaacgactgttaatggacagcccagtgagctagggactgcgggtaacaccggcacagcgattgttgtttc

SEQ ID NO: 441668 - DNA, 75 bp, synthetic construct
  source 1..75: mol_type = other DNA
gcccgtttgcggaatggcaacaactggcctgggccggggtattgatcattaccctgtgcgtcctgctgctgaaca

SEQ ID NO: 441669 - DNA, 75 bp, synthetic construct
  source 1..75: mol_type = other DNA
catcgcaggttggggcggtctggtccgctacctgatagatgtgaagcagagtaaagcaacgtggagttggataaa

SEQ ID NO: 441670 - DNA, 75 bp, synthetic construct
  source 1..75: mol_type = other DNA
ccatccaggatccggcaaataaatttaatgttctaagtagtacaggaacttctcgatcattctatccagtaatga

SEQ ID NO: 441671 - DNA, 75 bp, synthetic construct
  source 1..75: mol_type = other DNA
ctgccgctataaaacaaataaaagagttacagcgctttctgggtaaaaaaccatggaagttgagatcctcaaaga

SEQ ID NO: 441672 - DNA, 75 bp, synthetic construct
  source 1..75: mol_type = other DNA
gaaagccacaaaagcgaaggctggaagcaatacaagccaggccagtcccgtcatcagcgcggctacggttcgaaa

SEQ ID NO: 441673 - DNA, 75 bp, synthetic construct
  source 1..75: mol_type = other DNA
gaagagaacccgcatcagctgcagcagcttatccggctgccggggcagcagtatgatgaggagtccggcctgtat

SEQ ID NO: 441674 - DNA, 75 bp, synthetic construct
  source 1..75: mol_type = other DNA
tcatcaacgcggttatggttctaagtgggatgttatccgtgtgcgtgtgctgcaacgtgacaaaggcctgtgtca

SEQ ID NO: 441675 - DNA, 75 bp, synthetic construct
  source 1..75: mol_type = other DNA
gccgtgttcgcggctgccgccataccaccactgacccgtcaggttattgcgaaagccacaaaagcgaaggctgga

SEQ ID NO: 441676 - DNA, 75 bp, synthetic construct
  source 1..75: mol_type = other DNA
caacgaaccccaaaagcctgccgcgttcgcggctgccgtaataccactacagacccgtcaggctactgcgaaagc

SEQ ID NO: 441677 - DNA, 75 bp, synthetic construct
  source 1..75: mol_type = other DNA
cactactgatccgtcaggctattgcgaaagccacaaaagcgagggctggaagcaatacaagccaggacaatcccg

SEQ ID NO: 441678 - DNA, 75 bp, synthetic construct
  source 1..75: mol_type = other DNA
ttttgggcataaaaaaacccagccgaagctgggtcgttgcgttggttatctgtcagtagttatgtactggctgaa

SEQ ID NO: 441679 - DNA, 75 bp, synthetic construct
  source 1..75: mol_type = other DNA
gttacagcgcttgctgggtaaaaaaacagatcctcaaagaagcggggagagtatggtcagtcgcgaaaatggata

SEQ ID NO: 441680 - DNA, 75 bp, synthetic construct
  source 1..75: mol_type = other DNA
gtcccatgtggcgcgtttgcatggtattcagcccagcctgttgtttaagtggaaaaaacaatatctggaaggaag

SEQ ID NO: 441681 - DNA, 75 bp, synthetic construct
  source 1..75: mol_type = other DNA
gaaagccacaaaagcgaaggctggaagcagtacaaacctggacaatcccgtcaccagcgcggctacggttcgaag

SEQ ID NO: 441682 - DNA, 75 bp, synthetic construct
  source 1..75: mol_type = other DNA
tggtgcagatagtcatggagaatattgggacgaaatattttcaggtaaagatgagaaaatagttaaaagtaaaga

SEQ ID NO: 441683 - DNA, 75 bp, synthetic construct
  source 1..75: mol_type = other DNA
cgggctggatgtcgctgtcacggaaaccgcaagtgacctggtacggctgggacggcgaccggctgaccacaatac

SEQ ID NO: 441684 - DNA, 75 bp, synthetic construct
  source 1..75: mol_type = other DNA
aacaggactggcgcgatgagtactgtgttggcgacattgctgtatacgacgactccaggcccggcacgctgaacg

SEQ ID NO: 441685 - DNA, 75 bp, synthetic construct
  source 1..75: mol_type = other DNA
cgacaggatttagtgccgctgccaggtcgtttgtctatgggaatacccttcctggcacatacctcgctttatcag

SEQ ID NO: 441686 - DNA, 75 bp, synthetic construct
  source 1..75: mol_type = other DNA
accgggtagcctggttcttgctgcgtaccttcctgatagcggtagcagtgatgttacattacttcgtacacaagc

SEQ ID NO: 441687 - DNA, 75 bp, synthetic construct
  source 1..75: mol_type = other DNA
caacaaacgcagcgacttctgctcttgacagtaaaaataatgcagaagagctaaaaaatcaggcacagcaaaatg

SEQ ID NO: 441688 - DNA, 75 bp, synthetic construct
  source 1..75: mol_type = other DNA
agggctcacgactcagcccactggcaatactctgcagtgccggtgataccgggatttttaccggaaatccacgat

SEQ ID NO: 441689 - DNA, 75 bp, synthetic construct
  source 1..75: mol_type = other DNA
tgaaagatggggcgggtaaacctgtcgtaaattgtgcgattgaattgcgagccagaagaaccagtccgaccgttg

SEQ ID NO: 441690 - DNA, 75 bp, synthetic construct
  source 1..75: mol_type = other DNA
catcaggcacagcgcgggacgaatcagtcgatgccgccgaacgcgcccgcctttatcataataccgcatcatcag

SEQ ID NO: 441691 - DNA, 75 bp, synthetic construct
  source 1..75: mol_type = other DNA
atgggaaaaatgaaagaactgctgtttgaaattcaggaagaacgcactgatgaatggattgcggaaaattacacg

SEQ ID NO: 441692 - DNA, 75 bp, synthetic construct
  source 1..75: mol_type = other DNA
ccggcggcgtggatattaagggcgcgaaaatcaatcttaacggcggaggcagtccgggagacgtgatcctgccga

SEQ ID NO: 441693 - DNA, 75 bp, synthetic construct
  source 1..75: mol_type = other DNA
atctcgctttatcaggcgggccggacgtcacattttatgatcgtggtgtggtttctttgtttgtgagggtttcat

SEQ ID NO: 441694 - DNA, 75 bp, synthetic construct
  source 1..75: mol_type = other DNA
acggatagttgatgacctgaagggaagcaatgcctccacaacagaaaaaggcctggtgcaactctgtagtgatac

SEQ ID NO: 441695 - DNA, 75 bp, synthetic construct
  source 1..75: mol_type = other DNA
aatagcattattaacttatttagtatcaccaaatttggttgtttttttaaaagtatcacaggatattcgacatga

SEQ ID NO: 441696 - DNA, 75 bp, synthetic construct
  source 1..75: mol_type = other DNA
ggttgtgaacgccgggtcgtttacgatttcgtcaacgtcattcagggcgatgcaacgctaaaccaggcgttaatt

SEQ ID NO: 441697 - DNA, 75 bp, synthetic construct
  source 1..75: mol_type = other DNA
aactgaaagcggctgcgacgatggaaccccagagcgatatccgcgaccgcacaccgggcagactggcactgtccg

SEQ ID NO: 441698 - DNA, 75 bp, synthetic construct
  source 1..75: mol_type = other DNA
ctccgttgtcagaaaaagcccgcgcattactggcactggacacgcctgaagccatgcgcaatgagcttgagctga

SEQ ID NO: 441699 - DNA, 75 bp, synthetic construct
  source 1..75: mol_type = other DNA
acagtaagccccgtcatttacgacggcgattcgctggccttcctgctgtcccggacggcgggcaacggcccgtcc

SEQ ID NO: 441700 - DNA, 75 bp, synthetic construct
  source 1..75: mol_type = other DNA
gctgccacgccaaaggctgtcaaaaccgtcatggacgagacgaaaacaaaagcgccactggacagcccggccttc

SEQ ID NO: 441701 - DNA, 75 bp, synthetic construct
  source 1..75: mol_type = other DNA
ggacaggcattcaccagcactgacgctctggcgtttgaggggctgtctgatttcgttgagtggttgaagaaagtc

SEQ ID NO: 441702 - DNA, 75 bp, synthetic construct
  source 1..75: mol_type = other DNA
aaccccagaccgatatccgtgaccgcacacccggcaggctggcgctaccgggcgcttttggctttggtaaggcat

SEQ ID NO: 441703 - DNA, 75 bp, synthetic construct
  source 1..75: mol_type = other DNA
atctgccacacaggatgcggcccgcgcagagcaggctgttaaagacgcagacaaaatcgtcgataaggctgttga

SEQ ID NO: 441704 - DNA, 75 bp, synthetic construct
  source 1..75: mol_type = other DNA
gcgtatatctgaaacaggactggcgcgacgagtactgtgttggcgacattgctgtatacgacgactcaaagcccg

SEQ ID NO: 441705 - DNA, 75 bp, synthetic construct
  source 1..75: mol_type = other DNA
gaatgacggacgccggagcaagttcaattattgcccgcgatatggcgaccatagccaaaagcgcgcataacctgc

SEQ ID NO: 441706 - DNA, 75 bp, synthetic construct
  source 1..75: mol_type = other DNA
tttgtggggtgaatatggcagtaaagatttcaggtgtactgaaagatggggcgggtaaacctgtcgtaaattgtg

SEQ ID NO: 441707 - DNA, 75 bp, synthetic construct
  source 1..75: mol_type = other DNA
tatgtttccaccccacgcgtttctgccggaggtgccggggcattcagctttcccggtcgctatcaggcgctttct

SEQ ID NO: 441708 - DNA, 75 bp, synthetic construct
  source 1..75: mol_type = other DNA
gtattcatcgcctgacttaccgctggagtggaaataactggaatgcaacagtaagtcccgtcatttacgacggag

SEQ ID NO: 441709 - DNA, 75 bp, synthetic construct
  source 1..75: mol_type = other DNA
aggagagttcgtgctgggtgagggtgtcacaggcgtgggcggggccggggttcggtaacctggcgataccgcgtg

SEQ ID NO: 441710 - DNA, 75 bp, synthetic construct
  source 1..75: mol_type = other DNA
gctggcgatgctgctggaaggtatcgactggcggcagcctaaaaagactgcttacgtccctgactatgttgtaag

SEQ ID NO: 441711 - DNA, 75 bp, synthetic construct
  source 1..75: mol_type = other DNA
cttccagcttacgccgccagtgccaactggctgaacgccgtccggatctcattatccgttctctgcgcggcaatg

SEQ ID NO: 441712 - DNA, 75 bp, synthetic construct
  source 1..75: mol_type = other DNA
aatggggatttcgctggcagaagagctactgaataacggcgcacgcgagatcctcgctgaagtctataacggaga

SEQ ID NO: 441713 - DNA, 75 bp, synthetic construct
  source 1..75: mol_type = other DNA
ctgctgactgaaagccagagcgatggcggcatgatgctgcgttttgtactgcgttctgataccaaactggcgcaa

SEQ ID NO: 441714 - DNA, 75 bp, synthetic construct
  source 1..75: mol_type = other DNA
gaacgggtacagctttttgatatgttcccgcacaccgcgcactatgaagtgctgacgctgctggtgaagcaataa

SEQ ID NO: 441715 - DNA, 75 bp, synthetic construct
  source 1..75: mol_type = other DNA
gcaaagtgttcctgaccccggcgcagctggcaatgctgctggaaggcatcgactggcgacagccgaagcggttgc

SEQ ID NO: 441716 - DNA, 75 bp, synthetic construct
  source 1..75: mol_type = other DNA
aaatttggctggttgccggtatcaccgatatgagaaatggcttcaacggcctagctgcgaaagtacaaacggcgc

SEQ ID NO: 441717 - DNA, 75 bp, synthetic construct
  source 1..75: mol_type = other DNA
tccttacacaggcgcagctggcgatgctgctggaaggtatcgactggcgacagcctaagcggctgctgacctccc

SEQ ID NO: 441718 - DNA, 75 bp, synthetic construct
  source 1..75: mol_type = other DNA
gcgctgaaagacgatcccatgtccggccatgttttcattttccggggccgcagcggcagtcaggttaaactgctg

SEQ ID NO: 441719 - DNA, 75 bp, synthetic construct
  source 1..75: mol_type = other DNA
gcgtactcgcgcgctgctcgccgcactgaatcataacgaaacagcactgcgtgtcacggctgaacgcgccatgaa

SEQ ID NO: 441720 - DNA, 75 bp, synthetic construct
  source 1..75: mol_type = other DNA
ccagcagtaggacaaggtgctgtaggcattgaatgccgccttgatgattcgcgcacccgcgaggtactcgccgcg

SEQ ID NO: 441721 - DNA, 75 bp, synthetic construct
  source 1..75: mol_type = other DNA
taggtctggagtcacgcattcgcgccgcgttgccacctgagatttctcttccggcggtaggacaaggtgcggtcg

SEQ ID NO: 441722 - DNA, 75 bp, synthetic construct
  source 1..75: mol_type = other DNA
tatccgcgaactgccaggttaccgcatcgaacgggtacagctttttgatatgttcccgcacaccgcgcactatga

SEQ ID NO: 441723 - DNA, 75 bp, synthetic construct
  source 1..75: mol_type = other DNA
tttaaccgcagagaagttcgccacagcgaaccgaaatcactggtacgtggagaataagctgcactggcatctgga

SEQ ID NO: 441724 - DNA, 75 bp, synthetic construct
  source 1..75: mol_type = other DNA
ctttcaacggtgccggggttcgctatactgcccgtacgctgaaaatcggcattaatacagtcatccgaactttaa

SEQ ID NO: 441725 - DNA, 75 bp, synthetic construct
  source 1..75: mol_type = other DNA
ctgttacgaggcccgtaaaccgggagttaaagaccaaatcactgaaatggctttcaacggtgtcggaattcgcga

SEQ ID NO: 441726 - DNA, 75 bp, synthetic construct
  source 1..75: mol_type = other DNA
gcgctggggataaaggtggacggggatatcgtgctggagagcagcagccggataagcctgaaggtgagtggctcg

SEQ ID NO: 441727 - DNA, 75 bp, synthetic construct
  source 1..75: mol_type = other DNA
gaaatgaccgtaaagtgacggtggaagggaagcaggagcataagacgacggggaaccatatcagtctggtggagg

SEQ ID NO: 441728 - DNA, 75 bp, synthetic construct
  source 1..75: mol_type = other DNA
taccgccagaacactgaaggtcggcgtcaacaccgttatccggactttaaaaaactctcaccacgacgagtacat

SEQ ID NO: 441729 - DNA, 75 bp, synthetic construct
  source 1..75: mol_type = other DNA
ggtgcaccttactccggctcagttatccatgcttcttgaaggtatcaactggaagcacccgaaacgaacggaacg

SEQ ID NO: 441730 - DNA, 75 bp, synthetic construct
  source 1..75: mol_type = other DNA
gacgctgaaagacgatccgatgtcaggtcacgtttttatcttccgtgggcgtaatggcagtcaggtaaagctcct

SEQ ID NO: 441731 - DNA, 75 bp, synthetic construct
  source 1..75: mol_type = other DNA
gcaactggcgatgctgctggaaggtatcgactggcgacagcccaagcggctgctgacctccctgaccatgctgta

SEQ ID NO: 441732 - DNA, 75 bp, synthetic construct
  source 1..75: mol_type = other DNA
aagcaataccaggaaggaagtcttactgctgtcgccgccggagaacaggttgttcctgcctctgaacttgctgct

SEQ ID NO: 441733 - DNA, 75 bp, synthetic construct
  source 1..75: mol_type = other DNA
cccgttgtcagtcagctcaggtttaccgccatggtcagaaccctaaaggccgtgacatacttcgctgccgtgact

SEQ ID NO: 441734 - DNA, 75 bp, synthetic construct
  source 1..75: mol_type = other DNA
cgtcacaattgcaaaccgcccgcaccatcaacggcgtggcatttaacggtacagcaaacatcaccatttcggcgg

SEQ ID NO: 441735 - DNA, 75 bp, synthetic construct
  source 1..75: mol_type = other DNA
ttgcagatctggccgacgattttagcgttctggccggagagatagatccagacctggaagaaccagaggaagaag

SEQ ID NO: 441736 - DNA, 75 bp, synthetic construct
  source 1..75: mol_type = other DNA
gtccgataccctgaagaccggaatcgaagaacttgatgccatcaccggagggatgaacgcggaagacctgaaccg

SEQ ID NO: 441737 - DNA, 75 bp, synthetic construct
  source 1..75: mol_type = other DNA
cactttgttgcatgtgaccaggatgaagccagacagatttgcacagcatcaaatgcacctgctgcacgtggcaga

SEQ ID NO: 441738 - DNA, 75 bp, synthetic construct
  source 1..75: mol_type = other DNA
cagagattagagagctcacgagatacgaacggtacacaaaacagcaacaccagttaaggttgcacggtatcccat

SEQ ID NO: 441739 - DNA, 75 bp, synthetic construct
  source 1..75: mol_type = other DNA
atgagacaggatatcgaagcgagcgttatcggcggtctgctgattggtggattaacgccaaccgccagcgacgtt

SEQ ID NO: 441740 - DNA, 75 bp, synthetic construct
  source 1..75: mol_type = other DNA
acaggcgtctgaggaacggagaagagtcagataccctgaagaccggaatcgaagaacttgacgctatcaccggag

SEQ ID NO: 441741 - DNA, 75 bp, synthetic construct
  source 1..75: mol_type = other DNA
tgtaacgccgatctggcggatatcgaccatattcgtcatgctgccgatcaactgtgggacgattcgctattcgcc

SEQ ID NO: 441742 - DNA, 75 bp, synthetic construct
  source 1..75: mol_type = other DNA
gagccgttaagcgagatgcgtacccgctgtgagacactgttacagacggcgcagaacaccatcagtcgcgacttt

SEQ ID NO: 441743 - DNA, 75 bp, synthetic construct
  source 1..75: mol_type = other DNA
gatctttattgccaacaaatggctaaagttctggcagagcaggtcgatgaatctgttacggcaggcatgaatact

SEQ ID NO: 441744 - DNA, 75 bp, synthetic construct
  source 1..75: mol_type = other DNA
gcagagtgttccttacgcaggcgcagctggcgatgctgctggaaggtatcgactggcgacagcctaagcggctgc

SEQ ID NO: 441745 - DNA, 75 bp, synthetic construct
  source 1..75: mol_type = other DNA
gactcacagctggatttacaccgacgctcagctgttacgcgatgatattcaaacacttttcacggcagaacgata

SEQ ID NO: 441746 - DNA, 75 bp, synthetic construct
  source 1..75: mol_type = other DNA
ttggcattgtgcgtgagactttctcgcgctggctgaatcagcccgactgggggcggagtagtgagaaatctccgc

SEQ ID NO: 441747 - DNA, 75 bp, synthetic construct
  source 1..75: mol_type = other DNA
atgtacgaattaactctatcgccagcagagattcaagagatcacaagatacgagcgatacacaagacagcaacac

SEQ ID NO: 441748 - DNA, 75 bp, synthetic construct
  source 1..75: mol_type = other DNA
tgcgggctgacaaagtagcactgaatggctggtcggaatcacgtaaaggaactgccggaaatttatataaataca

SEQ ID NO: 441749 - DNA, 75 bp, synthetic construct
  source 1..75: mol_type = other DNA
cattcagggggagctgagtgacctgtcaggcagggcgaagagtcatatcctgaccgcgggtatccgtggcgggtg

SEQ ID NO: 441750 - DNA, 75 bp, synthetic construct
  source 1..75: mol_type = other DNA
ccagtctgaacagggggtttactgtttatacccctgacacacaggtgcaggagaaagacggcagagtttactggc

SEQ ID NO: 441751 - DNA, 75 bp, synthetic construct
  source 1..75: mol_type = other DNA
ctccggttgcaccggatacaggtaatacaggaagcactgaggctgatggtattgtgtctgaagggaataacagca

SEQ ID NO: 441752 - DNA, 75 bp, synthetic construct
  source 1..75: mol_type = other DNA
ctgcagggtatctgttccacggacagctgaaaggcaatctgaatgtggataatcgcctgccggaaggcgttaccg

SEQ ID NO: 441753 - DNA, 75 bp, synthetic construct
  source 1..75: mol_type = other DNA
tatggttatttccccacggaccagagcagtaacgccacttgggagtttgtggggcacagtcagggggatgcacag

SEQ ID NO: 441754 - DNA, 75 bp, synthetic construct
  source 1..75: mol_type = other DNA
aggagcgctatcctgttttttatcgtctggggtctggtactcagtatattaaggacagtaacggacagctgacac

SEQ ID NO: 441755 - DNA, 75 bp, synthetic construct
  source 1..75: mol_type = other DNA
ccggaagcggaacgaatgaattatataatatatcggaaattaacttaaatggctcagattcaaaactatctgtag

SEQ ID NO: 441756 - DNA, 75 bp, synthetic construct
  source 1..75: mol_type = other DNA
tataataggaaaatatgtgcatcataaaaatagttactctagtgacttcttatctttcgatgataagaaaagttc

SEQ ID NO: 441757 - DNA, 75 bp, synthetic construct
  source 1..75: mol_type = other DNA
ctctcctttgtgacagacaactggtcgccgaaaacgctgacggtaaacacactgcatgccagcagtatgaatatc

SEQ ID NO: 441758 - DNA, 75 bp, synthetic construct
  source 1..75: mol_type = other DNA
ctgcagggtatctgttccacggacagctgaaaggcaacctgaatgtggataatcgtctgccggaaggcgttacca

SEQ ID NO: 441759 - DNA, 75 bp, synthetic construct
  source 1..75: mol_type = other DNA
ggattacttcatcctgaagcagagcacctatggttatttccccacggaccagagcagcaacgccacctgggagtt

SEQ ID NO: 441760 - DNA, 75 bp, synthetic construct
  source 1..75: mol_type = other DNA
gatgactcacggctggatttacaccgacgctcagctgttacgcgatgatattcaaacacttttcacggcagaacg

SEQ ID NO: 441761 - DNA, 75 bp, synthetic construct
  source 1..75: mol_type = other DNA
ccagacccgcgattctgtgaaccagaaccagcaagaaacggaacagaacgaccagaaagcggaacaaaacagccc

SEQ ID NO: 441762 - DNA, 75 bp, synthetic construct
  source 1..75: mol_type = other DNA
atgatccggaggaaatggaaggcgctgaacatccacacaaggagaatgctggcagcgctcaggacaacgccagcg

SEQ ID NO: 441763 - DNA, 75 bp, synthetic construct
  source 1..75: mol_type = other DNA
ggaacaaaaccgatcgcaatccgaatttagtacacaccttcgatacgctggatgtggagattgcagcggccacac

SEQ ID NO: 441764 - DNA, 75 bp, synthetic construct
  source 1..75: mol_type = other DNA
tgccctgattgtggcgcagtgatgggtgacgcaacctaccaggagacattcaacgaagaaagccaggatgaagcc

SEQ ID NO: 441765 - DNA, 75 bp, synthetic construct
  source 1..75: mol_type = other DNA
atcagcctggttgacgcaatggacaaaggtgctgttcctgatggttccaccatcgaatggtggctggcacagtcc

SEQ ID NO: 441766 - DNA, 75 bp, synthetic construct
  source 1..75: mol_type = other DNA
atgagcactgataaagaagaatttgcattatattgtgaagcaaaaaatgacaaagtcagaaaacgccttggaatt

SEQ ID NO: 441767 - DNA, 75 bp, synthetic construct
  source 1..75: mol_type = other DNA
acggttcagggcgttgccggattatcaataacggcattgatatggcaaccgaagccattctggcggaactgccac

SEQ ID NO: 441768 - DNA, 75 bp, synthetic construct
  source 1..75: mol_type = other DNA
atgaatattctgcaatttaatgtgcgactggcggaaggcggggcggcaggtgtggcgttagatctccaccagcgt

SEQ ID NO: 441769 - DNA, 75 bp, synthetic construct
  source 1..75: mol_type = other DNA
caataacggtattgatatggcaaccgaagcgattctggcggacttgcctccggtgcgcgaaacccagggtaagcc

SEQ ID NO: 441770 - DNA, 75 bp, synthetic construct
  source 1..75: mol_type = other DNA
ggcgggcaggcggcgtcatcggtgtcggtgcagattgacgtttatgccatgacggtcacacaggcgcgtcagatt

SEQ ID NO: 441771 - DNA, 75 bp, synthetic construct
  source 1..75: mol_type = other DNA
aacagatgcaactggctccggccagtgaggaaggcgcaacaaaattaagcgataaaataaatccaccgggcgtcg

SEQ ID NO: 441772 - DNA, 75 bp, synthetic construct
  source 1..75: mol_type = other DNA
aatacgcgccaatatgcgatgtcggtggaagtactggaacagatgcaactggctccggccagtgaggaaggcgca

SEQ ID NO: 441773 - DNA, 75 bp, synthetic construct
  source 1..75: mol_type = other DNA
ccggagagcaggggcctgaattcagcaaaataattgatatgggtacatgtggcggcactgtagacataagcacca

SEQ ID NO: 441774 - DNA, 75 bp, synthetic construct
  source 1..75: mol_type = other DNA
cgatatgcgaaatggctttaacggcctggcatcaaaagttcagaacgtcctgaaggatgacccgttctccggaca

SEQ ID NO: 441775 - DNA, 75 bp, synthetic construct
  source 1..75: mol_type = other DNA
actggatgctggcgcagtttgcgttaacgttgaccttgctcacgccggacagcaggcaaaactggagccagacac

SEQ ID NO: 441776 - DNA, 75 bp, synthetic construct
  source 1..75: mol_type = other DNA
caaagaagtgaaagtggaaatcgacgtgctgtctgataaacccaaccagactcactatcgtgcgctgttagtccg

SEQ ID NO: 441777 - DNA, 75 bp, synthetic construct
  source 1..75: mol_type = other DNA
ttcgccatacgcccgggcaaaaggaaccggtactgcatttttcacatgtcgcgccaatcgattgtttaattcaac

SEQ ID NO: 441778 - DNA, 75 bp, synthetic construct
  source 1..75: mol_type = other DNA
atgatatctctccctgacggttcgcgtatctggctggttgccggtatcaccgacatgcgaaatggttttaacggc

SEQ ID NO: 441779 - DNA, 75 bp, synthetic construct
  source 1..75: mol_type = other DNA
ctgacagtgacggactgtgcctcttcaccaaacgcctggagcggggccgcttcgtctggccagtcacccgtgacg

SEQ ID NO: 441780 - DNA, 75 bp, synthetic construct
  source 1..75: mol_type = other DNA
ttgaaaccatgggaaaaaatcccgatgccccgattatctcaataggtgcaatatttttcgatccgcaaaccggag

SEQ ID NO: 441781 - DNA, 75 bp, synthetic construct
  source 1..75: mol_type = other DNA
cacgatgcgcgttaccaggcaaaatacgtttcagctatctggcaaaaactgttcccgagtcaggctgatttttaa

SEQ ID NO: 441782 - DNA, 75 bp, synthetic construct
  source 1..75: mol_type = other DNA
caaaaacggtacatactcaggttcacaacaaaatactggtgcatctgacacgaccgcacaaccagggtcagtaaa

SEQ ID NO: 441783 - DNA, 75 bp, synthetic construct
  source 1..75: mol_type = other DNA
tggttgcaggggctgtggcattaactctggggttctctgtcagcaacgtcatggcggcaggttttaaacccgcgc

SEQ ID NO: 441784 - DNA, 75 bp, synthetic construct
  source 1..75: mol_type = other DNA
cgcctgccgggcaactgggtgcggtcattgtcgatccctacggcaatgcaccactgaccgctttggttgacttag

SEQ ID NO: 441785 - DNA, 75 bp, synthetic construct
  source 1..75: mol_type = other DNA
gctggttacgacgaagaggactttaaaaaacctgttcgcgtccatttgcctgttgtgaatgaccttccaccagaa

SEQ ID NO: 441786 - DNA, 75 bp, synthetic construct
  source 1..75: mol_type = other DNA
caaaatgcaggcgcgtcgccgcctcaaaaaccgtattgcgctgacgctctcgatggcgacgatggccttcggcct

SEQ ID NO: 441787 - DNA, 75 bp, synthetic construct
  source 1..75: mol_type = other DNA
gaagtattcaattacattcaatggcattaaaaagtgaaaatgttgaaaatcagcttttaaatctatggatagctc

SEQ ID NO: 441788 - DNA, 75 bp, synthetic construct
  source 1..75: mol_type = other DNA
tgatgccgatgaataaggatttccctgtctattacatcgacccggagaatgagagcgtcgaaatctggggagtgg

SEQ ID NO: 441789 - DNA, 75 bp, synthetic construct
  source 1..75: mol_type = other DNA
gataagagtattaatttcaaagtgatagctgaactggctttcatgtcatattttatttttattctgacaatactt

SEQ ID NO: 441790 - DNA, 75 bp, synthetic construct
  source 1..75: mol_type = other DNA
tggtcggcaatattggcagtctcccgaagatgataatctgcctttattacgtgaattcttagcgcgtaaagaata

SEQ ID NO: 441791 - DNA, 75 bp, synthetic construct
  source 1..75: mol_type = other DNA
gcccgtttgcagaatggcagcaactggcctgggccggggtgttgattattaccctttgcgtactgctgctgaaca

SEQ ID NO: 441792 - DNA, 75 bp, synthetic construct
  source 1..75: mol_type = other DNA
cagctttctggccgatatggaaaaccttgtggctaatctgcccacgttaccggcagcactgaatcagtggatgga

SEQ ID NO: 441793 - DNA, 75 bp, synthetic construct
  source 1..75: mol_type = other DNA
cgcctgttcccgtctgcggcggataacacgcagcaggaagtgctgacgggcattgatgcggtaaaagcggccatt

SEQ ID NO: 441794 - DNA, 75 bp, synthetic construct
  source 1..75: mol_type = other DNA
ggccacggtattcggtacgccgctgggtattatggcggggatttatctggcggagtatggccgtaaatcctggct

SEQ ID NO: 441795 - DNA, 75 bp, synthetic construct
  source 1..75: mol_type = other DNA
ttagcgcgtaaagaatacgacgattccggcaatgatatgttttatcaattatttgccagtgatgatgcgtattac

SEQ ID NO: 441796 - DNA, 75 bp, synthetic construct
  source 1..75: mol_type = other DNA
gaagataaacagcgcattagcgaaattctccaggaaacgtgggaaagcgccgatgactggtttgtcagcgaataa

SEQ ID NO: 441797 - DNA, 75 bp, synthetic construct
  source 1..75: mol_type = other DNA
atggctatggttgaaatgcaaaccactgcggcgctggcagaatcccgccgcaaaatgcaggcgcgtcgccgcctc

SEQ ID NO: 441798 - DNA, 75 bp, synthetic construct
  source 1..75: mol_type = other DNA
tatcttgaatacgacttatcgtttaaaaataatagaatgaaactgttgagacgtgttcagatctatcttgtcatt

SEQ ID NO: 441799 - DNA, 75 bp, synthetic construct
  source 1..75: mol_type = other DNA
tccatcgcgtttccggtgtgatcacctttgttgcagtgggcatcctgctgtggcttctgggtaccagcctctctt

SEQ ID NO: 441800 - DNA, 75 bp, synthetic construct
  source 1..75: mol_type = other DNA
ctgcaggctcacggcttccggacatataatctgagtggtggtttcataacctggcagacggtaacggagtcaatg

SEQ ID NO: 441801 - DNA, 75 bp, synthetic construct
  source 1..75: mol_type = other DNA
tgggccgactagatattttctttgatgtaatgaatattaaaagcatcttggtattggtttgttgtgcaactatac

SEQ ID NO: 441802 - DNA, 75 bp, synthetic construct
  source 1..75: mol_type = other DNA
ctgccatatcgttaattcttcagaagcgttcgtacaacttgctcgccagggcaccacctgctgtatgatcccgca

SEQ ID NO: 441803 - DNA, 75 bp, synthetic construct
  source 1..75: mol_type = other DNA
ggttataccggtggccgttccatgttgcgttactacatccagcccaaacgtaagatgcggccatcgaagaaaacg

SEQ ID NO: 441804 - DNA, 75 bp, synthetic construct
  source 1..75: mol_type = other DNA
cgccaggctgccgtggttctcgatattgcggctcagattggttgctctgaacggacggtcagacgctacctcaaa

SEQ ID NO: 441805 - DNA, 75 bp, synthetic construct
  source 1..75: mol_type = other DNA
ccaagtgggatcgctatagcggtttaaccattcttctgccgcatggctatgacggacaagggccggagcactctt

SEQ ID NO: 441806 - DNA, 75 bp, synthetic construct
  source 1..75: mol_type = other DNA
agcttgatccacttggtctgaatactcccgccgacgttccctctctccagccaggcttttggggattaagcgaag

SEQ ID NO: 441807 - DNA, 75 bp, synthetic construct
  source 1..75: mol_type = other DNA
atgccacttaagcaactgcttaacctgctggagcaagcctgggcgggtagccaggcttatgaacttgctcatctg

SEQ ID NO: 441808 - DNA, 75 bp, synthetic construct
  source 1..75: mol_type = other DNA
ttcaggcgatgtgaaataccacatgggatattccagcaacctggaaacacctgccggttcgttacatgtagcgct

SEQ ID NO: 441809 - DNA, 75 bp, synthetic construct
  source 1..75: mol_type = other DNA
tgcaacatattcgctccggtcaggcatctttcgatgtttatgattcggtgcttaacgaagaagctctgctggcgt

SEQ ID NO: 441810 - DNA, 75 bp, synthetic construct
  source 1..75: mol_type = other DNA
cgcaattgcatcagtcccagaaagttaagcgcgttattttgtgtagcggccaggtctattacgacgtactggaag

SEQ ID NO: 441811 - DNA, 75 bp, synthetic construct
  source 1..75: mol_type = other DNA
aaaaaccgtattgcgctgacgctctcaatggcgacgatggccttcggcctgttctggctgatctggattttaatg

SEQ ID NO: 441812 - DNA, 75 bp, synthetic construct
  source 1..75: mol_type = other DNA
ttcgttcagaagcaaaggcgggacgctctcctttgtgacagacaactggtcgccgaaaacgctgacggtaaacac

SEQ ID NO: 441813 - DNA, 75 bp, synthetic construct
  source 1..75: mol_type = other DNA
tcacgcaacgacataaatggaaccaataatcccgcaacagggaaaggatacgcaactgcaataccacttggctat

SEQ ID NO: 441814 - DNA, 75 bp, synthetic construct
  source 1..75: mol_type = other DNA
caccaaaaacgctgacagtaaacaccctgtatgccagcagcatgcacattgatatgggcgtcagcataacagaca

SEQ ID NO: 441815 - DNA, 75 bp, synthetic construct
  source 1..75: mol_type = other DNA
tgcaatatattctgttttctatggttctggtatccaaaagggcaaacaaatccaaatcactcttgatcaggctgc

SEQ ID NO: 441816 - DNA, 75 bp, synthetic construct
  source 1..75: mol_type = other DNA
gtgggtgatgctgtcactggtctgaatgcgcaaattgagaaaggtcagaaaacagttaatattgctgtaaataag

SEQ ID NO: 441817 - DNA, 75 bp, synthetic construct
  source 1..75: mol_type = other DNA
gctcgctgcgcgacaaccgcagccacaccatcggactggtggtgccggagatcaccaaccacggctttgcggtct

SEQ ID NO: 441818 - DNA, 75 bp, synthetic construct
  source 1..75: mol_type = other DNA
agcgtgaaacataacgggggatataaaaacgtcagctttggtgacggggagaaccgttacaatattgtcgatcgc

SEQ ID NO: 441819 - DNA, 75 bp, synthetic construct
  source 1..75: mol_type = other DNA
ccatttataataagcagggagagcttgtcggcacactgaataaagccgccatgccggatttcagccccgttaacg

SEQ ID NO: 441820 - DNA, 75 bp, synthetic construct
  source 1..75: mol_type = other DNA
ccgactgtttcactgaacggtgcccgggtggacggaaatcgtctgcagggccgggagcggagcgtggagcttcat

SEQ ID NO: 441821 - DNA, 75 bp, synthetic construct
  source 1..75: mol_type = other DNA
caaaaacgacggtaatggcacggcctttacgctggaagaaggcacatcagaggcggtgagggatgcagaccgtag

SEQ ID NO: 441822 - DNA, 75 bp, synthetic construct
  source 1..75: mol_type = other DNA
cgggccaccatcacgctggattatgccctgcaggctgacaaagtgacactgaacagctggtcgggttcccgtaaa

SEQ ID NO: 441823 - DNA, 75 bp, synthetic construct
  source 1..75: mol_type = other DNA
ctccggttgcaccggaaacaggaagtacagaggcagatggtgttgtgtctgaaggaaataacagcagcagtgtca

SEQ ID NO: 441824 - DNA, 75 bp, synthetic construct
  source 1..75: mol_type = other DNA
cggtgaaggatgcagaccgtagcgtgtttaatggtagtgctgtcttgaacgggaagacgacgctggatatcatga

SEQ ID NO: 441825 - DNA, 75 bp, synthetic construct
  source 1..75: mol_type = other DNA
ctattacaatggtgggttgacgccagaagaatcagagaacagataccgttcttactgtaaaaccgtggccaatat

SEQ ID NO: 441826 - DNA, 75 bp, synthetic construct
  source 1..75: mol_type = other DNA
gggtgccgacggatggttacgtaggcaaggacgaggcccggcaacaaattagcggttatatcctgaattattaca

SEQ ID NO: 441827 - DNA, 75 bp, synthetic construct
  source 1..75: mol_type = other DNA
ctatctcaccgaatatgttcaggtgctgcgcgacctgtggggcacggggaaaagcgattttaaggtgatgctgcc

SEQ ID NO: 441828 - DNA, 75 bp, synthetic construct
  source 1..75: mol_type = other DNA
gtttccattatgcactgaaagtattttgcttgaaaatgattttattattaccggggtaggtggctgtattttatc

SEQ ID NO: 441829 - DNA, 75 bp, synthetic construct
  source 1..75: mol_type = other DNA
ttggtaaattgaaaagttatttatcgtttccattatgcactgaaagtattttgcttgaaaatgattttattatta

SEQ ID NO: 441830 - DNA, 75 bp, synthetic construct
  source 1..75: mol_type = other DNA
atgacgatgggttaacacaggctgaagtactgtcccggttgatccaccgcgaagcattagccagaaacatagctt

SEQ ID NO: 441831 - DNA, 75 bp, synthetic construct
  source 1..75: mol_type = other DNA
gacacaggtggtggacaacagcgatgcagacggtggtgtatgggccatgacagggtacagtcatggtggatatga

SEQ ID NO: 441832 - DNA, 75 bp, synthetic construct
  source 1..75: mol_type = other DNA
ggtaacgatctgacgtttcatcagctgaaggccgcagattatggtgctgtgctggcaaataattctgataatcat

SEQ ID NO: 441833 - DNA, 75 bp, synthetic construct
  source 1..75: mol_type = other DNA
ttatacccctgacacacaggtgcaggagaaagacggcagggtttactggcaactgaaaagtcatgccggaacaac

SEQ ID NO: 441834 - DNA, 75 bp, synthetic construct
  source 1..75: mol_type = other DNA
ttgggtcaggcagtggtgaaactaccagtttgaaaagtctggcacaaaaagcagttgatagcggagtaaacgtag

SEQ ID NO: 441835 - DNA, 75 bp, synthetic construct
  source 1..75: mol_type = other DNA
tcgtcgaaaactttaaggctgcaggcggtgtatctatgacgggtaccaatgctgatggtgtttattcagtcaaag

SEQ ID NO: 441836 - DNA, 75 bp, synthetic construct
  source 1..75: mol_type = other DNA
gcaggatggtatttctccacagattgatttcggtaatgctattgatgtcgctactattaagaacagcgaagctgt

SEQ ID NO: 441837 - DNA, 75 bp, synthetic construct
  source 1..75: mol_type = other DNA
cagaaagccgtcaacctgaatgaaggcacgctgacgctgaacgacagtaccgtcaccacggatgtcattgctcag

SEQ ID NO: 441838 - DNA, 75 bp, synthetic construct
  source 1..75: mol_type = other DNA
gtcttcggtacgaccaacggaatgaccatcagtaccgggctggagtatgggccagataacgaggccaataccggc

SEQ ID NO: 441839 - DNA, 75 bp, synthetic construct
  source 1..75: mol_type = other DNA
ctgtcggtaacaccaccgttaatcagaacggtgaactgagggtacatgccggcggggaagccactgcagtcaccc

SEQ ID NO: 441840 - DNA, 75 bp, synthetic construct
  source 1..75: mol_type = other DNA
agtcgacgacggtttacgctttacgtatagtggcgacaattttttttatcgggaaatctcaatgatcagtctgat

SEQ ID NO: 441841 - DNA, 75 bp, synthetic construct
  source 1..75: mol_type = other DNA
cggatgcggaaaatggtgataccgggcagaccgtctacggagatgccgtacgcaccaccatcaataaaaatggtc

SEQ ID NO: 441842 - DNA, 75 bp, synthetic construct
  source 1..75: mol_type = other DNA
cgtcaccacggatgtcattgctcagcgcggtacagccctgaagctgaccggcagcactgtgctgaacggtgccat

SEQ ID NO: 441843 - DNA, 75 bp, synthetic construct
  source 1..75: mol_type = other DNA
acgctgaatgggggggaccagtatgtgcacaacggcggtacagcgactgacactgttgttaacagtgacggctgg

SEQ ID NO: 441844 - DNA, 75 bp, synthetic construct
  source 1..75: mol_type = other DNA
ccgttgatcttaatgatctgaccattaaaggcacagataaaggatcggttaaatactatcagtgcagaactgccg

SEQ ID NO: 441845 - DNA, 75 bp, synthetic construct
  source 1..75: mol_type = other DNA
gcctgacggcgtaggcggtaactttttgcttcgtgtagagtcgattcgtaagattagggattcagattatgcgaa

SEQ ID NO: 441846 - DNA, 75 bp, synthetic construct
  source 1..75: mol_type = other DNA
cagtggagccaccgcagagcttgcaaacacatcaactgacgtggctaatactacgttaaaaatcagcggatcaca

SEQ ID NO: 441847 - DNA, 75 bp, synthetic construct
  source 1..75: mol_type = other DNA
gccgccaccaccgtatccatggggaatggcggtgtactgctggccgattccggggccgctgtcagtggtacccgg

SEQ ID NO: 441848 - DNA, 75 bp, synthetic construct
  source 1..75: mol_type = other DNA
gaacacggtaattaacgaggggggctggcaggttgttaaggcaggtggtactgccggtaacaccaccataaatca

SEQ ID NO: 441849 - DNA, 75 bp, synthetic construct
  source 1..75: mol_type = other DNA
tgcggcgttagcggtagatcgcgttatcggcatggaaaacgccatgccgtggaacctgcctgccgatctcgcctg

SEQ ID NO: 441850 - DNA, 75 bp, synthetic construct
  source 1..75: mol_type = other DNA
cggtggtattgcccgtggggccacgccggaaagcagcggcagctatggcttcgtccgtctggagggggacctgct

SEQ ID NO: 441851 - DNA, 75 bp, synthetic construct
  source 1..75: mol_type = other DNA
gttaatgccggaggactggccagcaacaccactgtcggacatcgtggaacactgacgctggctgccgggggaagt

SEQ ID NO: 441852 - DNA, 75 bp, synthetic construct
  source 1..75: mol_type = other DNA
tactgcagcaactgttcttggcagcaaccgtctggggaatttcacggtggaaaacggtaaggctgacggcgttgt

SEQ ID NO: 441853 - DNA, 75 bp, synthetic construct
  source 1..75: mol_type = other DNA
atgaaacgacatctgaacaccagctacaggctggtatggaatcacattacgggcaccctggtggtgacctccgaa

SEQ ID NO: 441854 - DNA, 75 bp, synthetic construct
  source 1..75: mol_type = other DNA
tatcaccctgggcgttcaggccggttatgccaacagtgtcagcggcaacagcgctgaaggctataacggtcaggc

SEQ ID NO: 441855 - DNA, 75 bp, synthetic construct
  source 1..75: mol_type = other DNA
tatcaccctgggcgttcaggctggttatgcccacagtgtcagcggcagcagcgccgaaggctataacggtcaggc

SEQ ID NO: 441856 - DNA, 75 bp, synthetic construct
  source 1..75: mol_type = other DNA
aacgtgggttaaatcggtggatgaagccatcgccgcgtgtggtgacgtaccggagattatggtgattggcggtgg

SEQ ID NO: 441857 - DNA, 75 bp, synthetic construct
  source 1..75: mol_type = other DNA
agtcaaccgggtacggacgatcgcgtaacgtgggtgaagtcggtggatgaagccatcgcggcgtgtggtgacgta

SEQ ID NO: 441858 - DNA, 75 bp, synthetic construct
  source 1..75: mol_type = other DNA
gtttaaacgcaacaccttaaataaacccgtgattatgggccgccatacctgggaatcaatcggtcgtccgttgcc

SEQ ID NO: 441859 - DNA, 75 bp, synthetic construct
  source 1..75: mol_type = other DNA
ttatgtcaggtgatcttgatatattgaaagaaacgccgtctatcaggctaaaatcagcaaaaggaaccgctcatc

SEQ ID NO: 441860 - DNA, 75 bp, synthetic construct
  source 1..75: mol_type = other DNA
tacggatgatcgcgtaacgtgggtgaagtcggtggatgaagccatcgcggcgtgtggtgacgtaccagaaatcat

SEQ ID NO: 441861 - DNA, 75 bp, synthetic construct
  source 1..75: mol_type = other DNA
tggggctggctgggctcactggaaaccggtctgcccttcagtatcactgacaacctgatgctggagccacaactg

SEQ ID NO: 441862 - DNA, 75 bp, synthetic construct
  source 1..75: mol_type = other DNA
attatcagccgcaggaagcgcaggcgctggcgcaatggatagaaaacacccgaatggtttatgaagcacattcta

SEQ ID NO: 441863 - DNA, 75 bp, synthetic construct
  source 1..75: mol_type = other DNA
gcaattttgaaagtcggtccggcattaacctttgcgttacgcgaggcgatatttgcgctggcgcaaattgagcag

SEQ ID NO: 441864 - DNA, 75 bp, synthetic construct
  source 1..75: mol_type = other DNA
gaatttgatcacagcaatattatccattatcagccgcaggaagcgcaggcgctggcgcaatggatagaaaacacc

SEQ ID NO: 441865 - DNA, 75 bp, synthetic construct
  source 1..75: mol_type = other DNA
gtatccggaacagctaatggcgtgactgtcagtaccgggcttgagctggggccggacagtgacgaaaacaccggc

SEQ ID NO: 441866 - DNA, 75 bp, synthetic construct
  source 1..75: mol_type = other DNA
ttacagcctgtcggatcgtattcgttattactggccgcatagtcgaattaaaaatagcgttgaaacgatgatggc

SEQ ID NO: 441867 - DNA, 75 bp, synthetic construct
  source 1..75: mol_type = other DNA
gatcacagcaatattatccattatcagccgcaggaagcgcaggcgctggcgcaatggatagaaaacacccgaatg

SEQ ID NO: 441868 - DNA, 75 bp, synthetic construct
  source 1..75: mol_type = other DNA
ctgcagtcacccagaacacgggcggtgcactggttaccagtactgctgcaactgtcaccggcacaaaccgcctgg

SEQ ID NO: 441869 - DNA, 75 bp, synthetic construct
  source 1..75: mol_type = other DNA
gccagcggtaagttcagtattgatggtatctccggtcaggccagcggcctgctgctggaaaatggcggcagcttt

SEQ ID NO: 441870 - DNA, 75 bp, synthetic construct
  source 1..75: mol_type = other DNA
acaatctggaatatgaaagatgactccgttgttacccatctgactaattcagacagtattatcaatctttcgtat

SEQ ID NO: 441871 - DNA, 75 bp, synthetic construct
  source 1..75: mol_type = other DNA
gccttctggggattgatattcccactttcgctaacaccgacggagaagtaaaatccgtagccaaaactattcatg

SEQ ID NO: 441872 - DNA, 75 bp, synthetic construct
  source 1..75: mol_type = other DNA
cgctgatgcccgccatgctcaagaagataaattttatgaaaagcatggcaagcatagtgatacagaatcgttccg

SEQ ID NO: 441873 - DNA, 75 bp, synthetic construct
  source 1..75: mol_type = other DNA
accgacacggttgtgaataccggcgcggaagggggaccggatgcggaaaatggtgataccgggcagaccgtctac

SEQ ID NO: 441874 - DNA, 75 bp, synthetic construct
  source 1..75: mol_type = other DNA
ctgggatttgatggtttcaccaaacgtgcagaaaaactggcgcaaagcatcatcagggggatgtgggtggaagaa

SEQ ID NO: 441875 - DNA, 75 bp, synthetic construct
  source 1..75: mol_type = other DNA
aaccgtgacagcgatgaagactggtacctgcgcagtgaaaatgcgtatcgttctgaagtcccccggtatgcctcc

SEQ ID NO: 441876 - DNA, 75 bp, synthetic construct
  source 1..75: mol_type = other DNA
gaagttcgggcatggcagtgcacaacatgtgcgtgccggcttccgtctgggcagccacaacgatatgagctttgg

SEQ ID NO: 441877 - DNA, 75 bp, synthetic construct
  source 1..75: mol_type = other DNA
catgacgttctcaccgtcacagaatggcacgtcactggacctgcaggccggactggaagcccgtgtccgggaaaa

SEQ ID NO: 441878 - DNA, 75 bp, synthetic construct
  source 1..75: mol_type = other DNA
aaccgtgacagcgatgaagactggtacctgcgcagtgaagatgcgtatcgttctgaagtcccccagtatgcctcc

SEQ ID NO: 441879 - DNA, 75 bp, synthetic construct
  source 1..75: mol_type = other DNA
aaccgtgacagcgatgaagactggtacctgcgcagtgaagatgcttatcgttctgaagtccccctgtatgcctcc

SEQ ID NO: 441880 - DNA, 75 bp, synthetic construct
  source 1..75: mol_type = other DNA
aaccgtgacagcgatgaagactggtacctgcgcagtgaagatgcatatcgttctgaagtcccccggtatgcctcc

SEQ ID NO: 441881 - DNA, 75 bp, synthetic construct
  source 1..75: mol_type = other DNA
ccagatgtggtgaaacgatttgaagatttgacaagtcaggcgcaacgaagtgcagatgtggcaatatcagcgaca

SEQ ID NO: 441882 - DNA, 75 bp, synthetic construct
  source 1..75: mol_type = other DNA
cggggccggggctggctgggctcactggaaaccggtctgcccttcagtatcactgacaacctgatgctggagcca

SEQ ID NO: 441883 - DNA, 75 bp, synthetic construct
  source 1..75: mol_type = other DNA
ctgggcggatatatgaacctgacacacacctcctccggcctgtgggctgacatagtggcacagggaacccgccac

SEQ ID NO: 441884 - DNA, 75 bp, synthetic construct
  source 1..75: mol_type = other DNA
gacggtgaacaacgataccctgaccatccgtgaaggtgatgcactcctgcagggaggcgctctcaccggtaacgg

SEQ ID NO: 441885 - DNA, 75 bp, synthetic construct
  source 1..75: mol_type = other DNA
gggcagactgcaggtggacgccggtggtacagccacgaatgtcaccctgaagcagggcggcgcactggttaccag

SEQ ID NO: 441886 - DNA, 75 bp, synthetic construct
  source 1..75: mol_type = other DNA
aaaagtaaaaagcgtaaacgcagagcttgcaaacacatcaactaacacgcttgagaacacgttaaaaatcagcgg

SEQ ID NO: 441887 - DNA, 75 bp, synthetic construct
  source 1..75: mol_type = other DNA
aactggtgggtacagccttctgttatccgcaccttcagctcccggggtgacatgagcatgggtacagccgccgcc

SEQ ID NO: 441888 - DNA, 75 bp, synthetic construct
  source 1..75: mol_type = other DNA
agggcggttatgcccacagcgtcagcggcagcagcgctgaaggttataacggtcaggccacgctgaatgtgactt

SEQ ID NO: 441889 - DNA, 75 bp, synthetic construct
  source 1..75: mol_type = other DNA
ccctgtatgcctccatgctgacacaggcaatggactatgaccggattctggcaggctcccgcagccatcagaccg

SEQ ID NO: 441890 - DNA, 75 bp, synthetic construct
  source 1..75: mol_type = other DNA
cattaagactgatttaggtccagcttcgcaggaggttgatctgattatttcggtggaaggtgtacagcagaagta

SEQ ID NO: 441891 - DNA, 75 bp, synthetic construct
  source 1..75: mol_type = other DNA
gccggttatgcccacagtgtcagcggcagcagcgctgaaggttataacggtcaggccacgctgaatgtgactttc

SEQ ID NO: 441892 - DNA, 75 bp, synthetic construct
  source 1..75: mol_type = other DNA
caacaaaaatgggcggcaagttatctggtcttcaggggtagcccgggataccctcatttacgcaggtggtgacca

SEQ ID NO: 441893 - DNA, 75 bp, synthetic construct
  source 1..75: mol_type = other DNA
cacggtaattaacgaggggggctggcaggttgttaaggccggtggtactgccggtaacaccaccataaatcagaa

SEQ ID NO: 441894 - DNA, 75 bp, synthetic construct
  source 1..75: mol_type = other DNA
agaaaaccgtcaacctgaatgaaggcacgctgacgctgaacgacagtaccgtcaccacggatgtcattgctcagc

SEQ ID NO: 441895 - DNA, 75 bp, synthetic construct
  source 1..75: mol_type = other DNA
atgtgcacagggacggacttgcgctgaacacggtaattaacgaggggggctggcaggttgttaaggcaggtggcg

SEQ ID NO: 441896 - DNA, 75 bp, synthetic construct
  source 1..75: mol_type = other DNA
agtcgcccgcttcaggccggcgcctttaactacaccctgaaccgtgacagcgatgaagactggtacctgcgcagt

SEQ ID NO: 441897 - DNA, 75 bp, synthetic construct
  source 1..75: mol_type = other DNA
agttcgggcatggcagtacacaacatgtgcgtgccggcttccgtctgggcagccacaacgatatgacctttggcg

SEQ ID NO: 441898 - DNA, 75 bp, synthetic construct
  source 1..75: mol_type = other DNA
ctggcagggactctccctggatgacggccaggataacgccggttatgtgaagttcgggcatggcagtgcacaaca

SEQ ID NO: 441899 - DNA, 75 bp, synthetic construct
  source 1..75: mol_type = other DNA
gcaaaattaagctcaaagacttcaatatcaagacagatttaggtccagcttctcaggaagtggatctgattattt

SEQ ID NO: 441900 - DNA, 75 bp, synthetic construct
  source 1..75: mol_type = other DNA
gtgacatgagcatggggacagccgcagccggcagtaacatgacgttctcaccgtcccggaatggcacgtcactgg

SEQ ID NO: 441901 - DNA, 75 bp, synthetic construct
  source 1..75: mol_type = other DNA
gctgagccgtgctgttgcaaaaagtaactccctggtaacgttccataaactgaccaccacgaacctcaccggcca

SEQ ID NO: 441902 - DNA, 75 bp, synthetic construct
  source 1..75: mol_type = other DNA
tggcgcgtaccctcgccgactcgccggaaatccgtcagggcttgcagaaaaaaccgcaggagagtggaatccagg

SEQ ID NO: 441903 - DNA, 75 bp, synthetic construct
  source 1..75: mol_type = other DNA
ggtcacgctgatcaacgatgccgcacaagaattgctgaattaccgtaagtcgcaggacgatgagaaactgtcgac

SEQ ID NO: 441904 - DNA, 75 bp, synthetic construct
  source 1..75: mol_type = other DNA
atcaatgacagtcgctggagcattatctggtcggtattatttggcatgctggtcggactgattggcacctgcatt

SEQ ID NO: 441905 - DNA, 75 bp, synthetic construct
  source 1..75: mol_type = other DNA
actggaaaatcatgacaaccagattgtcttcggtacggccaacggaatgaccatcagtaccgggctggaactggg

SEQ ID NO: 441906 - DNA, 75 bp, synthetic construct
  source 1..75: mol_type = other DNA
gcgtgacagtgcaaaacacagtatgcgtgaactgccggtgaactggtgggtacagccttctgttatccgcacctt

SEQ ID NO: 441907 - DNA, 75 bp, synthetic construct
  source 1..75: mol_type = other DNA
ggtacagccttccgttatccgcaccttcagctcccggggtgatatgcgtgtggggacctccactgcaggcagcgg

SEQ ID NO: 441908 - DNA, 75 bp, synthetic construct
  source 1..75: mol_type = other DNA
gttaacgcaggggagattcgctttgataatcagacgacaccggatgccgcgctgagccgtgctgttgcaaaaagt

SEQ ID NO: 441909 - DNA, 75 bp, synthetic construct
  source 1..75: mol_type = other DNA
ttggtgaaggcacctcatcccgtgacaccctgcgcgacagtgcaaaacaccgtgtgcgtgaactgccggtgaact

SEQ ID NO: 441910 - DNA, 75 bp, synthetic construct
  source 1..75: mol_type = other DNA
tgcgcgacagtacaaaacacggtgtgagtgaactgcctgtgaactggtgggtacaaccttctgttatccgcacct

SEQ ID NO: 441911 - DNA, 75 bp, synthetic construct
  source 1..75: mol_type = other DNA
gaaatgccgtacgcaccaccatcaataaaaatggtcgtcagattgtggctgctgaaggaacggcaaataccactg

SEQ ID NO: 441912 - DNA, 75 bp, synthetic construct
  source 1..75: mol_type = other DNA
atgctggagccacaactgcagtacacctggcagggactctccctggatgacggccaggataacgccggttatgtg

SEQ ID NO: 441913 - DNA, 75 bp, synthetic construct
  source 1..75: mol_type = other DNA
gggaaaatatcaccctgggcgttcaggccggttatgcccacagcgtcagcggcagcagcgctgaagggtataacg

SEQ ID NO: 441914 - DNA, 75 bp, synthetic construct
  source 1..75: mol_type = other DNA
aatatgcgtgttcgccttgatggcagcaatacctctgaccagctggtgattaatggtggtcaggcaaccggcaaa

SEQ ID NO: 441915 - DNA, 75 bp, synthetic construct
  source 1..75: mol_type = other DNA
ggatatggcacagaacaatgctgacagactggtcattgacggtggcagggcaaccggaaaaaccatcctgaacct

SEQ ID NO: 441916 - DNA, 75 bp, synthetic construct
  source 1..75: mol_type = other DNA
ggcggaagtgtttcagacacggttatcagtgccggaggcggacagagccttcaggggcaggcagtgaacaccact

SEQ ID NO: 441917 - DNA, 75 bp, synthetic construct
  source 1..75: mol_type = other DNA
cgaagagcgtccgacggatgttgtctttgcgggggcgaaaaaagcgccactaacggccgagggaaaagccagtgc

SEQ ID NO: 441918 - DNA, 75 bp, synthetic construct
  source 1..75: mol_type = other DNA
aatcgtctggtactacatggtgatgaggtgtcggaacgtctggtggattatgcggcattccagtggcagcgggct

SEQ ID NO: 441919 - DNA, 75 bp, synthetic construct
  source 1..75: mol_type = other DNA
cggattgtggcaggctcccgcagccatcagaccggtgtaaatggtgaaaacaacagcgtccgtctcagcattcag

SEQ ID NO: 441920 - DNA, 75 bp, synthetic construct
  source 1..75: mol_type = other DNA
ttcaggccggttatgcccacagcgtcagcggcagcagcgctgaaggttataacggtcaggccacgctgaatgtga

SEQ ID NO: 441921 - DNA, 75 bp, synthetic construct
  source 1..75: mol_type = other DNA
tgctgtgctgcccggcattcgctctttgctgacagatctctgcgcacagcagatccctatagggctggcttctgt

SEQ ID NO: 441922 - DNA, 75 bp, synthetic construct
  source 1..75: mol_type = other DNA
agagaaactgttcgcgatggcagaacatttgttagcactgggtcagccgaatttatttggtgaatggtgcattgc

SEQ ID NO: 441923 - DNA, 75 bp, synthetic construct
  source 1..75: mol_type = other DNA
cgtactggaaaatggcggacgcctggatgtgctgaccggacacacagccactaatacccgcgtggatgatggcgg

SEQ ID NO: 441924 - DNA, 75 bp, synthetic construct
  source 1..75: mol_type = other DNA
ggctcactggaaaccggtctgcccttcagtatcactgacaacctgatgctggagccacaactgcagtatacctgg

SEQ ID NO: 441925 - DNA, 75 bp, synthetic construct
  source 1..75: mol_type = other DNA
atgacaaccagattgtcttcggtacggccatcccgtgacaccctgcgcgacagtgcaaaacacagtgtgcgtgaa

SEQ ID NO: 441926 - DNA, 75 bp, synthetic construct
  source 1..75: mol_type = other DNA
atggcaggtggcagtgccacggatacggttatcagtgccggtggaggacagaatctgcgcgggcaggcttacggt

SEQ ID NO: 441927 - DNA, 75 bp, synthetic construct
  source 1..75: mol_type = other DNA
gtcggtacacggaagggccctgaataccacactgaatggcggttaccaatatgtgcacagggacggacttgcgct

SEQ ID NO: 441928 - DNA, 75 bp, synthetic construct
  source 1..75: mol_type = other DNA
ctgaatggtggcgagcagtggatgcatgagggtgcgatagccacaggaaccgtcattaatgataagggctggcag

SEQ ID NO: 441929 - DNA, 75 bp, synthetic construct
  source 1..75: mol_type = other DNA
gctgagccgtgctgttgcaaaaagtaactccccggtaacgttccataaactgaccaccagtaacctcaccggcca

SEQ ID NO: 441930 - DNA, 75 bp, synthetic construct
  source 1..75: mol_type = other DNA
ccacaactgcagtacacctggcaggggctctccctggatgacggccaggataacgccggttatgtgaagttcggg

SEQ ID NO: 441931 - DNA, 75 bp, synthetic construct
  source 1..75: mol_type = other DNA
cctgggcgttcaggccggttatgcccacagcgtcagcggcagcagcgctgaagggtataacggtcaggccacact

SEQ ID NO: 441932 - DNA, 75 bp, synthetic construct
  source 1..75: mol_type = other DNA
ttcgtaccggcaaccctgaaagtgaaaaacctgaacggacagaatggcaccatcagcctgcgtgtacgcccggat

SEQ ID NO: 441933 - DNA, 75 bp, synthetic construct
  source 1..75: mol_type = other DNA
tcattgctcagcgcggtacagccctgaagctgaccggcagcactgtgctgaacggtgccattgaccccacgaatg

SEQ ID NO: 441934 - DNA, 75 bp, synthetic construct
  source 1..75: mol_type = other DNA
tgatggcggaacgctggatgtccgcaacggtggcaccgccaccaccgtatccatgggaaatggcggtgtactgct

SEQ ID NO: 441935 - DNA, 75 bp, synthetic construct
  source 1..75: mol_type = other DNA
ggctctccctggatgacggccaggataacgccggttatgtgaagttcgggcatggcagtgcacaacatgtgcgtg

SEQ ID NO: 441936 - DNA, 75 bp, synthetic construct
  source 1..75: mol_type = other DNA
tccaaccaaaaagccggatgacaaacgtgcggaactggccgcacaagctgtgtttacctatggtgccagtacaat

SEQ ID NO: 441937 - DNA, 75 bp, synthetic construct
  source 1..75: mol_type = other DNA
tgtgcggcccgtttgatgacaacatcaaacaactcgaacgccgtctcggcatcgaaatcaatcgccgcgataacc

SEQ ID NO: 441938 - DNA, 75 bp, synthetic construct
  source 1..75: mol_type = other DNA
attacgcaagtcccaaaagcacattgcccggtctgaaaagtatatgacgatgtggcgtgcgcagacgctcgatct

SEQ ID NO: 441939 - DNA, 75 bp, synthetic construct
  source 1..75: mol_type = other DNA
gactatttcccttataggacagacaaacggcatccttactccagacgaagcaaatggtgcacctaccggcgcaag

SEQ ID NO: 441940 - DNA, 75 bp, synthetic construct
  source 1..75: mol_type = other DNA
caccctcggtccgatgatccgattcgtgaagtttttgcaatggggcggcgatagccagggctactgttccgcatt

SEQ ID NO: 441941 - DNA, 75 bp, synthetic construct
  source 1..75: mol_type = other DNA
gcgatattgaatttgtgtggtccgccctgaacgggattgccctgattttctcacaatacaccggtgtaaaagcat

SEQ ID NO: 441942 - DNA, 75 bp, synthetic construct
  source 1..75: mol_type = other DNA
aaccgtatccatattggataacggaagcaactggaacgtggctagtattaaagcctcagaatattcagtctcagg

SEQ ID NO: 441943 - DNA, 75 bp, synthetic construct
  source 1..75: mol_type = other DNA
tttccatgatttattagtgcaggggcctccttatgatgaaacagacagcgatattaaattgtttgttccaacaat

SEQ ID NO: 441944 - DNA, 75 bp, synthetic construct
  source 1..75: mol_type = other DNA
cgtttgagtttggctcgtcagttcttgtcggtggatacggctattgagcgattactgaagtggcaaacgccacag

SEQ ID NO: 441945 - DNA, 75 bp, synthetic construct
  source 1..75: mol_type = other DNA
aacgccctgttatcgctttctgggctacagcggcacgatgaaactcacgcccgaccgtatcacggactacaaagc

SEQ ID NO: 441946 - DNA, 75 bp, synthetic construct
  source 1..75: mol_type = other DNA
accgatgaccatttttggtttacgctgtttcatgagattgggcatctcatcttgcatgaagctgtccgagttcgc

SEQ ID NO: 441947 - DNA, 75 bp, synthetic construct
  source 1..75: mol_type = other DNA
ttgtagcaaaacacctttttggtcgtccgtttaaagttccactgtcttactactccaaatacacaggggacgtta

SEQ ID NO: 441948 - DNA, 75 bp, synthetic construct
  source 1..75: mol_type = other DNA
tggtgatggaatggatcaacgagccactgctttgaacagtatgtatcagagcgggcaagttcgtggcttatctaa

SEQ ID NO: 441949 - DNA, 75 bp, synthetic construct
  source 1..75: mol_type = other DNA
gatacacctgaggaatgggatgctttctttcgacagatattaaaaaagaatgcaattgacttagtaatttgttac

SEQ ID NO: 441950 - DNA, 75 bp, synthetic construct
  source 1..75: mol_type = other DNA
ggttgacatcgatggtgtcagtttaaaatttaaaactcgggaaagaattgcagaagaaattgcgaaaaaaactgc

SEQ ID NO: 441951 - DNA, 75 bp, synthetic construct
  source 1..75: mol_type = other DNA
atgacaatttcaaattcgaatttattaaaaccgtttattactggtactgagttgccaccttttaaagaggatgtt

SEQ ID NO: 441952 - DNA, 75 bp, synthetic construct
  source 1..75: mol_type = other DNA
gctaatcaataatggcaatcaacgtctgaagatattaaccattgcctattgtaaaaatagtggttctgcggagtg

SEQ ID NO: 441953 - DNA, 75 bp, synthetic construct
  source 1..75: mol_type = other DNA
gcgttgtgcgtgagactttttcgcgctggttgaatcagcccgactggggacggggaaatgagaaatcaccgacag

SEQ ID NO: 441954 - DNA, 75 bp, synthetic construct
  source 1..75: mol_type = other DNA
agactgtgatgactcacggctggatttacaccgacgctcagctgttacgcgatgatattcaaacacttttcacgg

SEQ ID NO: 441955 - DNA, 75 bp, synthetic construct
  source 1..75: mol_type = other DNA
cgatgaagaacaaaaaaaattaagaccttttttcactagtgatcacatctattgtttgtttgatgcttttagtca

SEQ ID NO: 441956 - DNA, 75 bp, synthetic construct
  source 1..75: mol_type = other DNA
tatgcagatttactacgtcaaatagcatccaagtctgcgatattacaagattttgatcaacaattgttctggcgc

SEQ ID NO: 441957 - DNA, 75 bp, synthetic construct
  source 1..75: mol_type = other DNA
ctttgtgaacagcccccatgcgtacacaccagatttcttcatccggatacgtatctgccgataaactgcacaaac

SEQ ID NO: 441958 - DNA, 75 bp, synthetic construct
  source 1..75: mol_type = other DNA
ctttgtgaacagccgcccctgcgtacacaccagatttcttcatccggatacgtatctgcagataaactgcccaaa

SEQ ID NO: 441959 - DNA, 75 bp, synthetic construct
  source 1..75: mol_type = other DNA
atgacaatttcaaattcgaatttattaaaaccgtttattactggttctaagttgctaccttttaaggatgatgtc

SEQ ID NO: 441960 - DNA, 75 bp, synthetic construct
  source 1..75: mol_type = other DNA
aagaccattgaggagaagaatatcgaaaaaaacaagaaagaaacaaatcctgaggataattttgtcttaaaattc

SEQ ID NO: 441961 - DNA, 75 bp, synthetic construct
  source 1..75: mol_type = other DNA
tgactgaagatggttactacaaacctgcgaaaaagaagctcctggatctcaatgtttcggatacggggtttgata

SEQ ID NO: 441962 - DNA, 75 bp, synthetic construct
  source 1..75: mol_type = other DNA
aacgaaaagtttgttcctgaattatacatttggaacaagattacagatcacgcattagtaaaatttcataaaaaa

SEQ ID NO: 441963 - DNA, 75 bp, synthetic construct
  source 1..75: mol_type = other DNA
gtggataagtccgtacccacggcagctgtacttattgcatccgttctgggatttgccattattcctctggcgggt

SEQ ID NO: 441964 - DNA, 75 bp, synthetic construct
  source 1..75: mol_type = other DNA
gcaacactttacgcgcactcgcattctcaacaaaccgatgaacatgcagttgctgggcgatgcacagccgcatac

SEQ ID NO: 441965 - DNA, 75 bp, synthetic construct
  source 1..75: mol_type = other DNA
accggaaaaataacggcctgctgcctgataaaccagtatttgaaatcgaaaaacttaacagcgaaacggggttag

SEQ ID NO: 441966 - DNA, 75 bp, synthetic construct
  source 1..75: mol_type = other DNA
ggtattgtcgagcgtgtatatacatatttcggaccgcgccgcagattattggggtatcgaattaaatatttgtat

SEQ ID NO: 441967 - DNA, 75 bp, synthetic construct
  source 1..75: mol_type = other DNA
ttaatcggcaacatactctatcaaggctattcaattctcttatattacaaactgataaagattttgagtggataa

SEQ ID NO: 441968 - DNA, 75 bp, synthetic construct
  source 1..75: mol_type = other DNA
cgtggtgatggtcgtcgttttagcggcgaacgtcgtgaaggccgcgcaccgcgtcgtgatgactctaccggtcgt

SEQ ID NO: 441969 - DNA, 75 bp, synthetic construct
  source 1..75: mol_type = other DNA
aacttcctccatgtatacatctgttgaaagaaggttcatagaaaaaatactttctagttttgagtgtgtgtatat

SEQ ID NO: 441970 - DNA, 75 bp, synthetic construct
  source 1..75: mol_type = other DNA
ggggaccacgaaatttaacggtatcattgatgtgatgtggtcaccgtctgataacgacgaatcagacacggcgcg

SEQ ID NO: 441971 - DNA, 75 bp, synthetic construct
  source 1..75: mol_type = other DNA
ggaagattttgatgcggcgattatcttcgttcgtaccaaaaacgcgactctggaagtggctgaagctcttgagcg

SEQ ID NO: 441972 - DNA, 75 bp, synthetic construct
  source 1..75: mol_type = other DNA
tcctgatatcagccagagctactggactgtgtggggtatgcgtaaaaacgaagcgctggtacgtttcctggaagc

SEQ ID NO: 441973 - DNA, 75 bp, synthetic construct
  source 1..75: mol_type = other DNA
atgcgtggcgtaaacgtggttgccctgtacggcggccaacgttatgacgtgcaattacgcgccctgcgtcagggg

SEQ ID NO: 441974 - DNA, 75 bp, synthetic construct
  source 1..75: mol_type = other DNA
attactgaaagggaaggcgttaaccgacgcagtacacagcgcgggcttacgtgtgctggaggtaatgcgttatac

SEQ ID NO: 441975 - DNA, 75 bp, synthetic construct
  source 1..75: mol_type = other DNA
acttgaatttaaaacaataaaaatcatatcaataatattattgattattttattacaattatcaggtataatata

SEQ ID NO: 441976 - DNA, 75 bp, synthetic construct
  source 1..75: mol_type = other DNA
caatggttaattctgccagtcccttccccgttgatgcattgccattgataatgcaaaacaccatcaactaccttc

SEQ ID NO: 441977 - DNA, 75 bp, synthetic construct
  source 1..75: mol_type = other DNA
tgcatacgagcgtgattatgccgtctgggagacaaaacttcaggccctgaagagcaacctgcgtaccgcagtcaa

SEQ ID NO: 441978 - DNA, 75 bp, synthetic construct
  source 1..75: mol_type = other DNA
gaaggaagtggatgccgaactggcgaaaccagaaaacagcgatgtcaccattggccgtggtaaaaaggcggcgct

SEQ ID NO: 441979 - DNA, 75 bp, synthetic construct
  source 1..75: mol_type = other DNA
ggcgctctggtccgtattctgggttgtggttgcgatggcatttgccggtttcctctacatccaccacggtgctga

SEQ ID NO: 441980 - DNA, 75 bp, synthetic construct
  source 1..75: mol_type = other DNA
cattcggtttaactcaacctataatttatgttatttctatagtcttagtatgctatacatttggcgtattaaaac

SEQ ID NO: 441981 - DNA, 75 bp, synthetic construct
  source 1..75: mol_type = other DNA
gatgcggtacacagcgcaggtttgcgtgtactggaggtgatgcgctatacccagcggcatgagagcgatgagttg

SEQ ID NO: 441982 - DNA, 75 bp, synthetic construct
  source 1..75: mol_type = other DNA
tgtcatttcccattcacgggtaaaaaccgacctgaaagggactggcgacctgtttttttttcagtttttttgtgg

SEQ ID NO: 441983 - DNA, 75 bp, synthetic construct
  source 1..75: mol_type = other DNA
gcgtgctggaggtgatgtgttatacccagcagcatgaaagcgatgaattgattttgccgccgctggcggaagcat

SEQ ID NO: 441984 - DNA, 75 bp, synthetic construct
  source 1..75: mol_type = other DNA
gtcagcccctggttgaagtgatcaatccttttactaatttgcctgaacccgatgcactttacatcctgactctgg

SEQ ID NO: 441985 - DNA, 75 bp, synthetic construct
  source 1..75: mol_type = other DNA
agcgccattgctgctgcaaaaagcctgctttcagagacattaaaatgggtggttgttaccagcgcctccggcaat

SEQ ID NO: 441986 - DNA, 75 bp, synthetic construct
  source 1..75: mol_type = other DNA
gtgtactggaggtgatgcgctatacccagcggcatgagagcgatgagttgattctgccgccgctggcggaagcat

SEQ ID NO: 441987 - DNA, 75 bp, synthetic construct
  source 1..75: mol_type = other DNA
gtaggtaaaaaacctcactccgatcgtccggctgccgccgaggtggttacggaggcaatgcggagaatttccggt

SEQ ID NO: 441988 - DNA, 75 bp, synthetic construct
  source 1..75: mol_type = other DNA
tgcacaacggcggtacagcgtctggcactgttgtaaacagtgacggctggcagattatcaaggaaggtggtctgg

SEQ ID NO: 441989 - DNA, 75 bp, synthetic construct
  source 1..75: mol_type = other DNA
ggtgaacaacgataccctgaccatccgtgaaggcgatgcactcctgcagggaggcgctcttaccggtaacggcag

SEQ ID NO: 441990 - DNA, 75 bp, synthetic construct
  source 1..75: mol_type = other DNA
ctatagtggttaacggcgatgcagaatatgttatcagtatgcagcacgatcgaacaggcctgtatccaggactct

SEQ ID NO: 441991 - DNA, 75 bp, synthetic construct
  source 1..75: mol_type = other DNA
tgctcatagaaaaaattgagagaaggcttgatgataaattaatgatgaccgtatctgatgttgcaaagttctctg

SEQ ID NO: 441992 - DNA, 75 bp, synthetic construct
  source 1..75: mol_type = other DNA
gtttcaaagtatataaagaaaagagtattgactcgaggggctatattgctaaaaatgacgaaaaaaagcattagt

SEQ ID NO: 441993 - DNA, 75 bp, synthetic construct
  source 1..75: mol_type = other DNA
tggatcagtatttctctgacatcctgacgggggtatcacctgccgggcgagccaggacggcgcgcgaagttggga

SEQ ID NO: 441994 - DNA, 75 bp, synthetic construct
  source 1..75: mol_type = other DNA
caaagaatacttagcccatataatccgatcttatgaaaacttcataaccgcacaaggttataagattgcacaatg

SEQ ID NO: 441995 - DNA, 75 bp, synthetic construct
  source 1..75: mol_type = other DNA
atcttccctggtcaggaaataaattttgaaagcatatctggctacgacaagatcgttgtcaaatataataactgg

SEQ ID NO: 441996 - DNA, 75 bp, synthetic construct
  source 1..75: mol_type = other DNA
ggcggtattgcccgtggggccacgccggaaagcagcggcagctatggattcgtccgtctggagggtgacctgatg

SEQ ID NO: 441997 - DNA, 75 bp, synthetic construct
  source 1..75: mol_type = other DNA
cctggtggtacaggcggtggcgcggggggagcatctgcaaacacatcatatattcagggtatttcatggggtgcc

SEQ ID NO: 441998 - DNA, 75 bp, synthetic construct
  source 1..75: mol_type = other DNA
ccttaaataaaataaatagccaatctatttgcgaagataaagagttcgctggtttaatatgtaaggataatagtg

SEQ ID NO: 441999 - DNA, 75 bp, synthetic construct
  source 1..75: mol_type = other DNA
atggacccggtatacacgccggcgcgaaaaattcacctgtaccactgcgaccatcgcggcctgccgctggccctt

SEQ ID NO: 442000 - DNA, 75 bp, synthetic construct
  source 1..75: mol_type = other DNA
tggaacactgacaaatcatgacaaccagattgtcttcggtacggccaacggaatgaccatcagtaccgggctgga

SEQ ID NO: 442001 - DNA, 75 bp, synthetic construct
  source 1..75: mol_type = other DNA
tttttttccaatgtcaccgcggtatcagaacaagataaaggaatatcaattgatgcatcaaatatcgattctcaa

SEQ ID NO: 442002 - DNA, 75 bp, synthetic construct
  source 1..75: mol_type = other DNA
ctggcccgctcacggggaaaacgcaccggtgtggcggttgcgctgtctcttgctgctgtcacgtcagtcccggca

SEQ ID NO: 442003 - DNA, 75 bp, synthetic construct
  source 1..75: mol_type = other DNA
atatcaacaaaacgtttcatgccacgcgagcgctgcgcgatgtttctctcgactttatgtcgggtgaagtgcact

SEQ ID NO: 442004 - DNA, 75 bp, synthetic construct
  source 1..75: mol_type = other DNA
gcggccatctcggtcacgataacaacggcggtattgcccgtggggccacgccggaaagcagcggcaggctatggc

SEQ ID NO: 442005 - DNA, 75 bp, synthetic construct
  source 1..75: mol_type = other DNA
cagattgtcttcggtacggccaacggaatgaccatcagtaccgggctggaactggggccggacagtgaagaaaac

SEQ ID NO: 442006 - DNA, 75 bp, synthetic construct
  source 1..75: mol_type = other DNA
gggcgctttcgtggttgcctccggactggcccgcgcacggggtaaacgtggcggtgtggcggttgcactgtctct

SEQ ID NO: 442007 - DNA, 75 bp, synthetic construct
  source 1..75: mol_type = other DNA
ctgggcggatacctgaatctgatacacaacgcctccggactgtgggctgacattgtggccctgggaacccgccac

SEQ ID NO: 442008 - DNA, 75 bp, synthetic construct
  source 1..75: mol_type = other DNA
ggccaggataacgccggttatgtgaagttcgggcatggcagtgcacaacatgtgcgtgccggcttccgtctgggc

SEQ ID NO: 442009 - DNA, 75 bp, synthetic construct
  source 1..75: mol_type = other DNA
gttccacctcagcaacctattgctaagttagaagtaaatgctgcccaaaaattagttaatgcagggaatcaacgc

SEQ ID NO: 442010 - DNA, 75 bp, synthetic construct
  source 1..75: mol_type = other DNA
gcaataacgccggagtcggtgctgatgcaggacggcgcattcagcctgacggcaccgcccgtgcagggaatgccg

SEQ ID NO: 442011 - DNA, 75 bp, synthetic construct
  source 1..75: mol_type = other DNA
ctattctgctttatctgcagatagcgttattaaaattagcgggcgcgtcctggattatggctgcacagtttcatc

SEQ ID NO: 442012 - DNA, 75 bp, synthetic construct
  source 1..75: mol_type = other DNA
ctcaaaagcgaatacccgtcccgtgaacaggtgatgcagtacggtgaggacgacctgacgtttatttcacgcctg

SEQ ID NO: 442013 - DNA, 75 bp, synthetic construct
  source 1..75: mol_type = other DNA
gcgtacttctcgctcgccagtattacgcgcctgactcgttccgcctgtcttggcgaaatgaataaagaatatatt

SEQ ID NO: 442014 - DNA, 75 bp, synthetic construct
  source 1..75: mol_type = other DNA
ttagccgtccagttctggcattacctgatgaatctggcacacggcgatctgggcatcgccagctccaccgggcaa

SEQ ID NO: 442015 - DNA, 75 bp, synthetic construct
  source 1..75: mol_type = other DNA
ctcgtcacaggacgaagcccgttacgaagtgcgccttgaaccccgtatggcgctgcttacccgcagccgccagaa

SEQ ID NO: 442016 - DNA, 75 bp, synthetic construct
  source 1..75: mol_type = other DNA
ttttcgatatacatcctatagctgagttatgtagaagtaagaatatttatttaattgaagattgtaataacgcac

SEQ ID NO: 442017 - DNA, 75 bp, synthetic construct
  source 1..75: mol_type = other DNA
tcggccttttgcgaaaaatttccttttgctgagtgtattttacgagatgtcaggaatggtgaaccatttattatt

SEQ ID NO: 442018 - DNA, 75 bp, synthetic construct
  source 1..75: mol_type = other DNA
tatatttttattcttttagttcccaggcagtattgtctgattttaaagttgcgacctggaacttgcagggagcgt

SEQ ID NO: 442019 - DNA, 75 bp, synthetic construct
  source 1..75: mol_type = other DNA
gatggacgcctctatacaggcgagtatttacagcttgaaaaaacagcaacggctggcgcttcctgctcccctaac

SEQ ID NO: 442020 - DNA, 75 bp, synthetic construct
  source 1..75: mol_type = other DNA
ttatctcaaaaaggaagctataaacgtaactcccgcgcctcgtattgcagaaaccgtaaaaccacgttctgagca

SEQ ID NO: 442021 - DNA, 75 bp, synthetic construct
  source 1..75: mol_type = other DNA
tttatctttcagcagataaaccgttatatgggttgagaaatatctcacagtgcgtattcattattactgataatc

SEQ ID NO: 442022 - DNA, 75 bp, synthetic construct
  source 1..75: mol_type = other DNA
atgaatattcctgccctaaactttgaccactcacaccacaaactcaaaatccgtggcctgcaaagtccggtggac

SEQ ID NO: 442023 - DNA, 75 bp, synthetic construct
  source 1..75: mol_type = other DNA
tacctgatgcagaaatatgcccgtctggggccgagcgcgatgcagagtgaacaaccgacgcagcaacaggggtaa

SEQ ID NO: 442024 - DNA, 75 bp, synthetic construct
  source 1..75: mol_type = other DNA
ctggcaacggctgaataaataccagcacctgctggtgacgtggctggtggcgttcggttcaaatctctctgcgtt

SEQ ID NO: 442025 - DNA, 75 bp, synthetic construct
  source 1..75: mol_type = other DNA
cgttacgaagtgcgccttgaaccccgtatggcgctgcttacccgcagccgccagaacgccatctaccagaaccag

SEQ ID NO: 442026 - DNA, 75 bp, synthetic construct
  source 1..75: mol_type = other DNA
gacgcctcaggaaaatgaagttgagattaaatccggtgatgcaaatcatctggttgttatgccacctaaattcgc

SEQ ID NO: 442027 - DNA, 75 bp, synthetic construct
  source 1..75: mol_type = other DNA
attagttaatgcagggaatcaacgcttaggtaatgactccaacttattgatagtgttttatgttcagataatgcc

SEQ ID NO: 442028 - DNA, 75 bp, synthetic construct
  source 1..75: mol_type = other DNA
accacaaccgcaaagggattcacgcaattaagcagcgccacggatagcgattctgaagaagtagcggcaacgccg

SEQ ID NO: 442029 - DNA, 75 bp, synthetic construct
  source 1..75: mol_type = other DNA
gaatacccgtcccacgaacaggtgatgcagtacggtgaggacgacctgacgtttgcctcgcgcctgctgtcggaa

SEQ ID NO: 442030 - DNA, 75 bp, synthetic construct
  source 1..75: mol_type = other DNA
gccggtacagggaatgccggtgcaggctgtcctgcgcaccctgtacggggtcatcaccggctttaaacatctctc

SEQ ID NO: 442031 - DNA, 75 bp, synthetic construct
  source 1..75: mol_type = other DNA
acggcgtcattaccggctttaaacatctctcatcgtcacaggacgaagcccgttacgaagtgcgccttgaacccc

SEQ ID NO: 442032 - DNA, 75 bp, synthetic construct
  source 1..75: mol_type = other DNA
tgggctgtttgatggtgaaacggaagccgtatgggggctgaacaccgcgtacagcgtggtggaaaaaagtgtctc

SEQ ID NO: 442033 - DNA, 75 bp, synthetic construct
  source 1..75: mol_type = other DNA
agggctacacgacggagccacggaagcggtatgggggctgaacaccgcgtacagcgtggtggaaaaaagcgtcac

SEQ ID NO: 442034 - DNA, 75 bp, synthetic construct
  source 1..75: mol_type = other DNA
tatcgaattttacgacgaccagagcggctatgagcgcgggctgacgctgccgcttcgccatccttcagggctgtt

SEQ ID NO: 442035 - DNA, 75 bp, synthetic construct
  source 1..75: mol_type = other DNA
tgcggcgatggtcatttggcggacagccatagatagccgtccggctgtgtgtaacgatgaggaaggaaccccggg

SEQ ID NO: 442036 - DNA, 75 bp, synthetic construct
  source 1..75: mol_type = other DNA
tgcggcgagggtcatttggcggactgccacagatagccgtccggttgtgtgcaacgatgaggaaggaatcccggg

SEQ ID NO: 442037 - DNA, 75 bp, synthetic construct
  source 1..75: mol_type = other DNA
atcgagcagcacatgtcccttaatcaggctgctgctcactttatgcttgaaccgccccgggtttcctggagagtg

SEQ ID NO: 442038 - DNA, 75 bp, synthetic construct
  source 1..75: mol_type = other DNA
aatcccgcgttggcggtttgctcggcggtaagcctggcgtcactgtgttccacatgggcgacagcaaaaaggcat

SEQ ID NO: 442039 - DNA, 75 bp, synthetic construct
  source 1..75: mol_type = other DNA
gtatgcgccggaagatcggggaatttgcgatgtcctcgtcgctaacggcaaaattatagccgttgccagcaatat

SEQ ID NO: 442040 - DNA, 75 bp, synthetic construct
  source 1..75: mol_type = other DNA
cagcattggagctgtcaaaagaccgacgcattgaggatcttgaaaggcaagttcgatttcttgaaacgcggcttg

SEQ ID NO: 442041 - DNA, 75 bp, synthetic construct
  source 1..75: mol_type = other DNA
aacatggagaaaaaggtttaattcccaaacctaaaggtgttagtgctgatccagagttgcgtattaaggtcgtga

SEQ ID NO: 442042 - DNA, 75 bp, synthetic construct
  source 1..75: mol_type = other DNA
tggcattggaacgttcgaaagataaacatattcaggagctggaaagaaaagttcggtcccttgaattacgggtac

SEQ ID NO: 442043 - DNA, 75 bp, synthetic construct
  source 1..75: mol_type = other DNA
gataaacagtaacggacaacttgctctggatttactgaagacagggaatgatagtatccctgctgcggttcctgt

SEQ ID NO: 442044 - DNA, 75 bp, synthetic construct
  source 1..75: mol_type = other DNA
ccaggtcaggacatgggttgccctctatgaaaaacatggagaaaaaggtttaattcccaaacctaaaggcgttag

SEQ ID NO: 442045 - DNA, 75 bp, synthetic construct
  source 1..75: mol_type = other DNA
ggtagtggttctgtagccaggtggctgaaggtctatgaagagcgcggagaagctggtttacgcgcgctcaagatt

SEQ ID NO: 442046 - DNA, 75 bp, synthetic construct
  source 1..75: mol_type = other DNA
gtagccgcaccgttgttgaaacagagcactggttagccgttgtaccttattgggcagcctggccgtttgaaacat

SEQ ID NO: 442047 - DNA, 75 bp, synthetic construct
  source 1..75: mol_type = other DNA
gacggaagccggcgtcacatccgtggtcggtctgctgggcaccgattctatctctcgccacccggagtcactgct

SEQ ID NO: 442048 - DNA, 75 bp, synthetic construct
  source 1..75: mol_type = other DNA
tggagagacacggtattgccgcagagggcagcagtcagaccatacaggcagccattcgccggacggcagagtata

SEQ ID NO: 442049 - DNA, 75 bp, synthetic construct
  source 1..75: mol_type = other DNA
aacaacagtggtttggaaatataagttctaagcaaaaagagttaaacctgataagatgtaaattaatggagaatt

SEQ ID NO: 442050 - DNA, 75 bp, synthetic construct
  source 1..75: mol_type = other DNA
gattgtttatataaaacaacggcaggaatattcgcaacaaattactttcgccacgaatcttcactgccgttataa

SEQ ID NO: 442051 - DNA, 75 bp, synthetic construct
  source 1..75: mol_type = other DNA
tgtacaggctgttgcttctgtgggtgaacgcttcaggtcgtgggttcaggaaaacccgcagcttgtacgcacgct

SEQ ID NO: 442052 - DNA, 75 bp, synthetic construct
  source 1..75: mol_type = other DNA
cggcgcaaagcacgcttggcgcactgggtaccgtaggtactgaagaactggaaagggtggcacggcaggcaatcg

SEQ ID NO: 442053 - DNA, 75 bp, synthetic construct
  source 1..75: mol_type = other DNA
gctgggtgggctgggggcggttagtgagaatgaactgacccgaatcacccgaaaaatgctggatatgcaggccgt

SEQ ID NO: 442054 - DNA, 75 bp, synthetic construct
  source 1..75: mol_type = other DNA
cgttgctggaaaccgtgcaggtgctggttaaagactatgatttcagtatcagcgatgccctgcgcccgctcacca

SEQ ID NO: 442055 - DNA, 75 bp, synthetic construct
  source 1..75: mol_type = other DNA
cacatgggcgatagcaaaaaagcattgcagccaatctacgatattcttgaaaactgcgatgttcccatcagcaag

SEQ ID NO: 442056 - DNA, 75 bp, synthetic construct
  source 1..75: mol_type = other DNA
ccggcgcatatcatgtgccttcccgcaccattacgggctctgtagaaaaagatgtggcgattattgatcgtgtga

SEQ ID NO: 442057 - DNA, 75 bp, synthetic construct
  source 1..75: mol_type = other DNA
tgctggaaaactgcgatgtgccgatcagcaagttgctgccgacccacgttaaccgcaacgttccgttgtttgagc

SEQ ID NO: 442058 - DNA, 75 bp, synthetic construct
  source 1..75: mol_type = other DNA
ttgctgccgacccacgttaaccgcaacgtaccgttgtttgagcaggcgctggagttcgcgcgcaaaggcggcacc

SEQ ID NO: 442059 - DNA, 75 bp, synthetic construct
  source 1..75: mol_type = other DNA
gacagaagcgggcgtcacgtcagtggttggtctgctgggcaccgactctatctctcgccacccggaatccctgct

SEQ ID NO: 442060 - DNA, 75 bp, synthetic construct
  source 1..75: mol_type = other DNA
aaggttgggtgactaaccctaaaggtgtgatagacgatcttgaggggaaagataccgaaggaaagactagagtcg

SEQ ID NO: 442061 - DNA, 75 bp, synthetic construct
  source 1..75: mol_type = other DNA
ggcaggcgctgccggaagagctacgcgtaagtccgcatcgttatctggcgacgaacagtccgcaggggccgtggt

SEQ ID NO: 442062 - DNA, 75 bp, synthetic construct
  source 1..75: mol_type = other DNA
ggcaggcgctgccggaagacctccgcataagtccgcatcgttatctggcgacgaacagtccgcaggggccgtggt

SEQ ID NO: 442063 - DNA, 75 bp, synthetic construct
  source 1..75: mol_type = other DNA
ggcaggcgctgccggaagacctacgcctaagtccgcatcgttatctggcgacgaacagtccgcaggggccgtggt

SEQ ID NO: 442064 - DNA, 75 bp, synthetic construct
  source 1..75: mol_type = other DNA
cccgtatccccccagtaatccaggaagtgcagatactcacactctttatcagaataattcaaatgcttataggct

SEQ ID NO: 442065 - DNA, 75 bp, synthetic construct
  source 1..75: mol_type = other DNA
ggcaggcgctgccggaagagctgcgcataagtccgcatcgttatctggcgacgaacagtccgcaggggccgtggt

SEQ ID NO: 442066 - DNA, 75 bp, synthetic construct
  source 1..75: mol_type = other DNA
ggcaggcgctgccggaagagcttcgcttaagtccgcatcgttatctggcgacgaacagtccgcaggggccgtggt

SEQ ID NO: 442067 - DNA, 75 bp, synthetic construct
  source 1..75: mol_type = other DNA
agccatatcagcgaagggcaccgggtgacggtgcattacgggtatgatgagaaaggccgcctgaccggtgagcgt

SEQ ID NO: 442068 - DNA, 75 bp, synthetic construct
  source 1..75: mol_type = other DNA
tcagccggggagcttcacaccactcatcagagttgaaactgccaccggtgaactggccagaacgcagcgccgcag

SEQ ID NO: 442069 - DNA, 75 bp, synthetic construct
  source 1..75: mol_type = other DNA
aaaatggatacagtgctaacagcaccaacgaaccttaattcaaataaggatctaatggctataacaacaaaagac

SEQ ID NO: 442070 - DNA, 75 bp, synthetic construct
  source 1..75: mol_type = other DNA
ggcaggcgctgccggaagatcttcgcataagtccgcatcgttatctggcgacgaacagtccgcaggggccgtggt

SEQ ID NO: 442071 - DNA, 75 bp, synthetic construct
  source 1..75: mol_type = other DNA
ggcaggcgctgccggaagatctacgcttaagtccgcatcgttatctggcgacgaacagtccgcaggggccgtggt

SEQ ID NO: 442072 - DNA, 75 bp, synthetic construct
  source 1..75: mol_type = other DNA
ggcaggcgctgccggaagaactacgcataagtccgcatcgttatctggcgacgaacagtccgcaggggccgtggt

SEQ ID NO: 442073 - DNA, 75 bp, synthetic construct
  source 1..75: mol_type = other DNA
taccaggaacaggtagcggtatgaaaggccaaggtccatcccttgatgttaatggtcgcgttgtaccatggaata

SEQ ID NO: 442074 - DNA, 75 bp, synthetic construct
  source 1..75: mol_type = other DNA
atggctggttaccaggaaaatcgttatagctttacagcaaaaggaggctcttatatctatagtagtgagggaggc

SEQ ID NO: 442075 - DNA, 75 bp, synthetic construct
  source 1..75: mol_type = other DNA
ggttattgcgcgttgccccctggtttttaccggtgagcatcgtagtggtgtggcaactggcctcctcggttggct

SEQ ID NO: 442076 - DNA, 75 bp, synthetic construct
  source 1..75: mol_type = other DNA
tggcaactggcctcgtcagttggctggttgtcgacgcgtattttgccctcaccggaaggggtggtgacggcgttc

SEQ ID NO: 442077 - DNA, 75 bp, synthetic construct
  source 1..75: mol_type = other DNA
cactccgtcacggctcagactatggcaacagaacatgcagaactagatttgattataaatatactcaataaattt

SEQ ID NO: 442078 - DNA, 75 bp, synthetic construct
  source 1..75: mol_type = other DNA
taaaggtaataactggattgcaagagcaaaaaagttacttgaagacagttatggaaaggaatctgattactacaa

SEQ ID NO: 442079 - DNA, 75 bp, synthetic construct
  source 1..75: mol_type = other DNA
ttatatctatagtagtgagggaggcttccgggatgaaacgggatcatttccagatggtgaaagagctataggcta

SEQ ID NO: 442080 - DNA, 75 bp, synthetic construct
  source 1..75: mol_type = other DNA
ctggcgaaccgctgtataccggacagcctgcccgccgtggaatggctgacctacggcagcggttacctggcaggc

SEQ ID NO: 442081 - DNA, 75 bp, synthetic construct
  source 1..75: mol_type = other DNA
tggcatcgtgcggcctgaccgtggagcagatgcaaaaccagatggacccggtgtacacgccggcgcgaaaaatcc

SEQ ID NO: 442082 - DNA, 75 bp, synthetic construct
  source 1..75: mol_type = other DNA
ggtaaggccgcgttattctgtattgcctgatatattcacacctataaatttagggctatttaaaaactgccaaga

SEQ ID NO: 442083 - DNA, 75 bp, synthetic construct
  source 1..75: mol_type = other DNA
tgttccccatttatatcaacacctggcatggcatccgtaatatcgatcgcgggctggtggagatggcgcgtagct

SEQ ID NO: 442084 - DNA, 75 bp, synthetic construct
  source 1..75: mol_type = other DNA
gatgtggctgacgctgattgttgccgaaaccatttctgccaattcaggcattggttatctggcgatgaatgcgcg

SEQ ID NO: 442085 - DNA, 75 bp, synthetic construct
  source 1..75: mol_type = other DNA
tctttgtggatgcgggaaacaaaaagctggtcttctggtttgtacgtgttgatgacgaagggtatccggaaatcg

SEQ ID NO: 442086 - DNA, 75 bp, synthetic construct
  source 1..75: mol_type = other DNA
gccgcgcgtggaacagtattccattgacgagatgttcctcgatatccggggcatcaaccgctgtattgactttga

SEQ ID NO: 442087 - DNA, 75 bp, synthetic construct
  source 1..75: mol_type = other DNA
caaaaggggatgataagtttatcaccaccgactatttgcaacagtgccgcgagaaggttttcaggccggatttgc

SEQ ID NO: 442088 - DNA, 75 bp, synthetic construct
  source 1..75: mol_type = other DNA
gcagcggtcaggtctctggacaggatatggctcgatggccaccgctacgcaaaagcggggataatgctcaatgat

SEQ ID NO: 442089 - DNA, 75 bp, synthetic construct
  source 1..75: mol_type = other DNA
tgcgaaatctaagcgagccacgacactgttgtcactcatgccggttgatgaagtctggggggtaggcaggcggat

SEQ ID NO: 442090 - DNA, 75 bp, synthetic construct
  source 1..75: mol_type = other DNA
ttatgtctcatctagaggggctggcgccgcgcgtggagcagtacagtattgacgagatgtttctggacgttcggg

SEQ ID NO: 442091 - DNA, 75 bp, synthetic construct
  source 1..75: mol_type = other DNA
ctgctgtcactgcagccggtggaggaaatctggggggtaggccgcaggatctcaaagaagctgaacacaatgggg

SEQ ID NO: 442092 - DNA, 75 bp, synthetic construct
  source 1..75: mol_type = other DNA
gcttcgcggtcgataaatatagcctctattttgacggacagcgcaccgaaagtaatagcggcgcgtcacgtgttg

SEQ ID NO: 442093 - DNA, 75 bp, synthetic construct
  source 1..75: mol_type = other DNA
taatagcgacattattattccggtgacggaggaatcgtgccggaacgcagcagcagacgggcaaactttgaagcc

SEQ ID NO: 442094 - DNA, 75 bp, synthetic construct
  source 1..75: mol_type = other DNA
acgtcatatccgtgctgcccgtgccaaaatgccgggcgtgtcccgcgtgctttgcgttgagtgtgaagcgccaat

SEQ ID NO: 442095 - DNA, 75 bp, synthetic construct
  source 1..75: mol_type = other DNA
gcaccgtaataagaccggcctggatctggaatacatggaatcagacggggcttgaattaggctggtttaagcaac

SEQ ID NO: 442096 - DNA, 75 bp, synthetic construct
  source 1..75: mol_type = other DNA
agcgggttctctgggacgttttggtaatgagatgagcggttggtttgacctgtgtagtggcacactaaatttggc

SEQ ID NO: 442097 - DNA, 75 bp, synthetic construct
  source 1..75: mol_type = other DNA
gtgaataaatggcgtaaccccggtgggtggttatgtgcggtagcattgtcttttgtctgcctgctttctgggtgc

SEQ ID NO: 442098 - DNA, 75 bp, synthetic construct
  source 1..75: mol_type = other DNA
agttctgcaggcatattgccgtgtttgtgaaaacatcgcctttcgccgtaactgaaccctactacggtaatctgg

SEQ ID NO: 442099 - DNA, 75 bp, synthetic construct
  source 1..75: mol_type = other DNA
gtgctggttgaggtcagccagaagctgcaggcccaacagcaggagaagcagcagcaggcgatgacggccgccgtg

SEQ ID NO: 442100 - DNA, 75 bp, synthetic construct
  source 1..75: mol_type = other DNA
aaacgataaattgatacttaccgagattccggatacgctaagatcagagattttatcagaattaggtgaagagga

SEQ ID NO: 442101 - DNA, 75 bp, synthetic construct
  source 1..75: mol_type = other DNA
ccacctatgaagaaatgcgccaggcagtctgccagtatgccgaacgtgcggcagaaaaattgcgtggtgaacgcc

SEQ ID NO: 442102 - DNA, 75 bp, synthetic construct
  source 1..75: mol_type = other DNA
ccactttaagaatgcctgtaagtatcttgagtaatgatgtccaggaagagttcgaactcattgatgctctcaaag

SEQ ID NO: 442103 - DNA, 75 bp, synthetic construct
  source 1..75: mol_type = other DNA
gaagtatgtgctctgttgaacaatctaactgtgcctatttaattactgataattgggatgactggtttgaatttt

SEQ ID NO: 442104 - DNA, 75 bp, synthetic construct
  source 1..75: mol_type = other DNA
ctggggagcagaaggcggatctgtcatggtggtcgagttctttgattatcagtgtatctggtgcagtcggctggc

SEQ ID NO: 442105 - DNA, 75 bp, synthetic construct
  source 1..75: mol_type = other DNA
agcaggagctttggggaacgtgtcacaacttatgaagccatgcgacaggcagtttgtcagtacgctgagcgtgca

SEQ ID NO: 442106 - DNA, 75 bp, synthetic construct
  source 1..75: mol_type = other DNA
tatccgaatgatcaatcatttaaaagccagagccgatgatgaatcaatgtctactggtggttatgtaataattgc

SEQ ID NO: 442107 - DNA, 75 bp, synthetic construct
  source 1..75: mol_type = other DNA
gagatgttcctcgatctgaccggtgtggagcactgcatggacctggaggacttcggccggcagctgcgacagcac

SEQ ID NO: 442108 - DNA, 75 bp, synthetic construct
  source 1..75: mol_type = other DNA
gcctcaaaagaggggaaacagtttcgtggcgtacttgctctgaccaggggaaatccgcagagaacgcggaaactg

SEQ ID NO: 442109 - DNA, 75 bp, synthetic construct
  source 1..75: mol_type = other DNA
agctgttcgacgaacgcccgccacgcccttacagtgctgagctgatgaaggttctggacgggatcaacaactcag

SEQ ID NO: 442110 - DNA, 75 bp, synthetic construct
  source 1..75: mol_type = other DNA
tactcaattgatgaaatgttcattgatttgcgggggataaatcattgcatctctccggagttttttggtcatcag

SEQ ID NO: 442111 - DNA, 75 bp, synthetic construct
  source 1..75: mol_type = other DNA
tccgccagcacgccgccgcgccattccgggagtgcagctttgcattacctgccaggaaatcgcagagctgaaagg

SEQ ID NO: 442112 - DNA, 75 bp, synthetic construct
  source 1..75: mol_type = other DNA
ggtgggcgaatttataaggatgagtcattcgaggttgcatttaaacggataacatttgaagagttgggcgttcaa

SEQ ID NO: 442113 - DNA, 75 bp, synthetic construct
  source 1..75: mol_type = other DNA
ggtcttggccctatatcatcaatggtgaaattggcggagagtttgggggtaatcgttgcgcatgttacgggagtc

SEQ ID NO: 442114 - DNA, 75 bp, synthetic construct
  source 1..75: mol_type = other DNA
gtgatgaacttttgcgccctgaagaacccggcatgctggccgaggcgattgaaatgctggatgatgcaacctggc

SEQ ID NO: 442115 - DNA, 75 bp, synthetic construct
  source 1..75: mol_type = other DNA
cagccataagctggaagttacaaactctgatttagctgccgacctcaagggggaatgcaaaaccatttatggtgt

SEQ ID NO: 442116 - DNA, 75 bp, synthetic construct
  source 1..75: mol_type = other DNA
ggggatgcaaaacaatttacggtgttattacccgtatcctcgaagcacgtatggcaaataacgccggaccactaa

SEQ ID NO: 442117 - DNA, 75 bp, synthetic construct
  source 1..75: mol_type = other DNA
gaacctaaattcagtgacatcattcagatagctaaaattactggtgcagacttaaacaccttagcttatggctat

SEQ ID NO: 442118 - DNA, 75 bp, synthetic construct
  source 1..75: mol_type = other DNA
ggttcgggcctgtgcccttcctctcgatgacgacgaaacacaggttctgcttaatgtgctgagtggctccgttgt

SEQ ID NO: 442119 - DNA, 75 bp, synthetic construct
  source 1..75: mol_type = other DNA
atatctttgatcgttatgcgcatctggttcgtgcctgtgcccttcctctcgataaagacgaaacacaggttctgc

SEQ ID NO: 442120 - DNA, 75 bp, synthetic construct
  source 1..75: mol_type = other DNA
agccagtcgcgaactggaatctcacggtatacgggcggacggaagtaaccgtgcggtcgagagggcaatcaggcg

SEQ ID NO: 442121 - DNA, 75 bp, synthetic construct
  source 1..75: mol_type = other DNA
acaatattgggtcgttggcgatggtagtccgtagtgcttcaatcgcaatgatgcgtaatgaaaggtatagcggag

SEQ ID NO: 442122 - DNA, 75 bp, synthetic construct
  source 1..75: mol_type = other DNA
aaagaaaaactcgacttttataccttactggacaattgggtgactaaagggatgaaaccagacgttgagcagcag

SEQ ID NO: 442123 - DNA, 75 bp, synthetic construct
  source 1..75: mol_type = other DNA
ctcagaagattggcaatgctttacgtaccattgatacctggcatccaaaggttgatgaattgggggctatagccg

SEQ ID NO: 442124 - DNA, 75 bp, synthetic construct
  source 1..75: mol_type = other DNA
tggtggagtcggttattccttatgaagaagcgaaaattcgtattcttaactcttctcatagctgtatcgcctggg

SEQ ID NO: 442125 - DNA, 75 bp, synthetic construct
  source 1..75: mol_type = other DNA
atcgctgcgtctggttgcttgtggggtatgacgaactggtcatgaaagcgtttcatgcttttcactacgggctga

SEQ ID NO: 442126 - DNA, 75 bp, synthetic construct
  source 1..75: mol_type = other DNA
atgcgaaggtcggtaatgaagcatcttcaccgcgggcaggcgcattacagtccgcactctcggtagagcttcata

SEQ ID NO: 442127 - DNA, 75 bp, synthetic construct
  source 1..75: mol_type = other DNA
atttttcacttcttaaatcacgctaaattaattaatcctgatgggagtataattaatgaaacagaactctcaggt

SEQ ID NO: 442128 - DNA, 75 bp, synthetic construct
  source 1..75: mol_type = other DNA
agcagcgcgttgaagaagaacgccagcgccatatccgtgctgcccgtgccaaaacaccgggcgtgtcccgcgtgc

SEQ ID NO: 442129 - DNA, 75 bp, synthetic construct
  source 1..75: mol_type = other DNA
ggtgtgcagctttgcattacctgtcaggaaatcgcagagctgaaaggcaaacattacaacggaggcgctgtatga

SEQ ID NO: 442130 - DNA, 75 bp, synthetic construct
  source 1..75: mol_type = other DNA
acccattatgccatccgcctgtgggaagggcgcaaaacggagaaggtatccggtgacggtaaatcccgcccgggt

SEQ ID NO: 442131 - DNA, 75 bp, synthetic construct
  source 1..75: mol_type = other DNA
gatgacactggaaaaaagatgtctgtctttattcagtgaaaacggatatgatcttcagacaggtgcatggttctg

SEQ ID NO: 442132 - DNA, 75 bp, synthetic construct
  source 1..75: mol_type = other DNA
cgctgatggagactcgcctgataacgaattctgtacagcatatgctgaagcaacaaaaaagcaggctggaaaaat

SEQ ID NO: 442133 - DNA, 75 bp, synthetic construct
  source 1..75: mol_type = other DNA
atctcagaggacaacggtttgctattcagtggaaacgactcgtaagaacgcttcgtcagtgggacaacttctggg

SEQ ID NO: 442134 - DNA, 75 bp, synthetic construct
  source 1..75: mol_type = other DNA
gcagaagggcttctgagcgacttaacgctgccggtcaatgccaccggcaccacgcagattgatcacgttcttatc

SEQ ID NO: 442135 - DNA, 75 bp, synthetic construct
  source 1..75: mol_type = other DNA
ctcctgctggcgttcttctcacgccctgggtgggatgcgaatgagcaacgtcgcgctgactatcaggaatggctg

SEQ ID NO: 442136 - DNA, 75 bp, synthetic construct
  source 1..75: mol_type = other DNA
gcttgctgatggggattcaggttcggtttgacggatggaaatttaaggttctgcagcgcggaacagcggaaagcc

SEQ ID NO: 442137 - DNA, 75 bp, synthetic construct
  source 1..75: mol_type = other DNA
gccggtggggagcctcggccccggctggaaaatgcctgcggatatccgcctacagctgcgcgataacacactgat

SEQ ID NO: 442138 - DNA, 75 bp, synthetic construct
  source 1..75: mol_type = other DNA
aacgcgcaggggctggcgaaccgctgtataccggacagcctgcccgccgtggaatggctgacttacggcagcggc

SEQ ID NO: 442139 - DNA, 75 bp, synthetic construct
  source 1..75: mol_type = other DNA
gtgcccccaccggcgtggcctgttcggtgtgccccggcggggtgacgtccggccatccggtcaatccgctgctcg

SEQ ID NO: 442140 - DNA, 75 bp, synthetic construct
  source 1..75: mol_type = other DNA
acctgaccggaaaactcacgcagagtgaagatgaggggcttgtcaccctctggtactacgatgaatcggaccgta

SEQ ID NO: 442141 - DNA, 75 bp, synthetic construct
  source 1..75: mol_type = other DNA
caccgggaaacgctgcgcagcttcggccgttatgaactcaccaccgcttacacccctgccgggcagttacagagc

SEQ ID NO: 442142 - DNA, 75 bp, synthetic construct
  source 1..75: mol_type = other DNA
cagtaccgcgcatacgacagccgtggacagttaattgcggtgaaagacatgcagggccatgaaacgcggtatgaa

SEQ ID NO: 442143 - DNA, 75 bp, synthetic construct
  source 1..75: mol_type = other DNA
gctctggagttgaaaggcggctggctgaaccgcaaaaccggggaggcgtttgttcgttacgcccgtctgctgttc

SEQ ID NO: 442144 - DNA, 75 bp, synthetic construct
  source 1..75: mol_type = other DNA
ccatccgccgggaacggctgacttccgcattgccagcgatcactatcatcgcgtggaggaagacgtagcgctgat

SEQ ID NO: 442145 - DNA, 75 bp, synthetic construct
  source 1..75: mol_type = other DNA
ccggataagctggagcctgacggtacggtaaatgacgactatcgtatcgcctttctcgacgcgcatatcgcacag

SEQ ID NO: 442146 - DNA, 75 bp, synthetic construct
  source 1..75: mol_type = other DNA
gtagtggatggtgatggtttccttgagaaacctcgacgtattcctggtgagcatatccccctcatcccggtttat

SEQ ID NO: 442147 - DNA, 75 bp, synthetic construct
  source 1..75: mol_type = other DNA
tcagatccctatagttggcatggagcaaattcgtggacttgagaagcactgggaggctcgcaacaagaaacgacc

SEQ ID NO: 442148 - DNA, 75 bp, synthetic construct
  source 1..75: mol_type = other DNA
tgccggataagaaggcgctgtaccagcagaatcatcatatgatgctggctcaggcgcagatcttcgccctgtgcc

SEQ ID NO: 442149 - DNA, 75 bp, synthetic construct
  source 1..75: mol_type = other DNA
ggttccgctgacagatataagctatgtcaggcagatggaaagctggatgatcaccacccggcccggcgtcgtgaa

SEQ ID NO: 442150 - DNA, 75 bp, synthetic construct
  source 1..75: mol_type = other DNA
agactgacaccacacgtatccagacggtatacgagccgggaagcttcacgccgctcatccgggtcgagacagaga

SEQ ID NO: 442151 - DNA, 75 bp, synthetic construct
  source 1..75: mol_type = other DNA
gctcgggctaccagacccgctatgaatacgaccgcttcggccagatgacggcggttcaccgcgaggaaggtatca

SEQ ID NO: 442152 - DNA, 75 bp, synthetic construct
  source 1..75: mol_type = other DNA
tgtgagacaaatgaatcaggaatatcggcagcatatggcacaacgaagatctatactacagatactagagcaaga

SEQ ID NO: 442153 - DNA, 75 bp, synthetic construct
  source 1..75: mol_type = other DNA
caacagtctcatcttagcttcgatgagttcctggctgttgccgctaaacagtccagcctgatggttgagtcactg

SEQ ID NO: 442154 - DNA, 75 bp, synthetic construct
  source 1..75: mol_type = other DNA
agcgatgccctgcgcccgctcaccagtagcgtagccggtttccttaacctgagcgggaaaggcgaaattctgcca

SEQ ID NO: 442155 - DNA, 75 bp, synthetic construct
  source 1..75: mol_type = other DNA
tggtgtccccggacgggctggagagccgccgggcatatgatgaaccgggcaggctggtatcggagacatcgcgct

SEQ ID NO: 442156 - DNA, 75 bp, synthetic construct
  source 1..75: mol_type = other DNA
cgcgaaaaatccacctgtaccactgcgaccatcgcggcctgccgctggcccttatcagcaaggaagggacaacag

SEQ ID NO: 442157 - DNA, 75 bp, synthetic construct
  source 1..75: mol_type = other DNA
actggatatggctgccacgctggcagtcctttcacaggtgacgggcgggatgctgcggagatcctgcgtacactg

SEQ ID NO: 442158 - DNA, 75 bp, synthetic construct
  source 1..75: mol_type = other DNA
gatatggctgccacgctggcagtgcctttcacaggtgacgggcgggatgctgcggagatcctgcgtacactgcct

SEQ ID NO: 442159 - DNA, 75 bp, synthetic construct
  source 1..75: mol_type = other DNA
agtgaagacgagggacttatcaccctctggcactacgatgcgtcggaccgcatcacgcaccggacggtgaacggt

SEQ ID NO: 442160 - DNA, 75 bp, synthetic construct
  source 1..75: mol_type = other DNA
gggacggcggacagagtacggtctgaatgtggtgtccggcgatatcacggacatcaccacaccggacgggcggga

SEQ ID NO: 442161 - DNA, 75 bp, synthetic construct
  source 1..75: mol_type = other DNA
cccaaaagccctgcacagcagcaagcagatgataatgctgcaaaagcattgacaaaatggtggaacgatacagca

SEQ ID NO: 442162 - DNA, 75 bp, synthetic construct
  source 1..75: mol_type = other DNA
ccatccgccgggaacggcggacttccgtatagccagcgaccactatcatcgcatggaggaggacgtagcgctgat

SEQ ID NO: 442163 - DNA, 75 bp, synthetic construct
  source 1..75: mol_type = other DNA
ctggagattgcccgttatgccctgaagtacggtctgaccatgccgggtaaacaccgccgcaccccgccgtacatg

SEQ ID NO: 442164 - DNA, 75 bp, synthetic construct
  source 1..75: mol_type = other DNA
aggtccaggcttttgggggctttttgactgcaatggtcatccccaatatcggtgcttttattgcctggggtttta

SEQ ID NO: 442165 - DNA, 75 bp, synthetic construct
  source 1..75: mol_type = other DNA
ataaaccgctgatattgattaataactatattggcgatcccaaactcgacactttatttaatcaattaaccgctg

SEQ ID NO: 442166 - DNA, 75 bp, synthetic construct
  source 1..75: mol_type = other DNA
gtcagatggagagctggatggtgaccacccgcccccgccggcgggagccgttatggccggtcacggatgagacaa

SEQ ID NO: 442167 - DNA, 75 bp, synthetic construct
  source 1..75: mol_type = other DNA
gtcaggcagatggagagctggatgatcaccacccggccccggcgccgtgcaccgttatgggctgtgacggatgaa

SEQ ID NO: 442168 - DNA, 75 bp, synthetic construct
  source 1..75: mol_type = other DNA
actggatatggctgccacgctggcagtgcctttcaccggtgacgggcgggatgctgcggagatcctgcgtacact

SEQ ID NO: 442169 - DNA, 75 bp, synthetic construct
  source 1..75: mol_type = other DNA
ggtggcctccaacccaggtccgggcctggggctgctgctggcgtttaccttgtttggtaaagggatgagtaaacg

SEQ ID NO: 442170 - DNA, 75 bp, synthetic construct
  source 1..75: mol_type = other DNA
tcatgaccgtcatgctgtggcgtctcgatgccggtgatatagctggcgcgctggaaattgcaccctacgcactga

SEQ ID NO: 442171 - DNA, 75 bp, synthetic construct
  source 1..75: mol_type = other DNA
tgatgaccgtcatgctgtggcgtctcgatgccggtgatatcgctggcgcgctggaaattgcgccatacgcgctga

SEQ ID NO: 442172 - DNA, 75 bp, synthetic construct
  source 1..75: mol_type = other DNA
cgaaaggctcgttcctggcgacaattgccggtgttacggtaggtaccctggtgtcctttgctatcacttccgtaa

SEQ ID NO: 442173 - DNA, 75 bp, synthetic construct
  source 1..75: mol_type = other DNA
ccgttggggatgcaacaggcttcggttaacggcaaatccatcttctttatggtggcgtcgaatccggggccaggg

SEQ ID NO: 442174 - DNA, 75 bp, synthetic construct
  source 1..75: mol_type = other DNA
ttgattaataactatattggcgatccaaaactcgacactttatttaatcaattaaccgccgaacataaacactga

SEQ ID NO: 442175 - DNA, 75 bp, synthetic construct
  source 1..75: mol_type = other DNA
caggtgcttgctgttccgccagcgtatacaagccagcgttgcgcgtcctgtggtcatacagcgaaagagaatcgc

SEQ ID NO: 442176 - DNA, 75 bp, synthetic construct
  source 1..75: mol_type = other DNA
tttattgccataattatatggcttataaaactgtgtctggtgcaaagaacaaaccacaaccatttatttttttaa

SEQ ID NO: 442177 - DNA, 75 bp, synthetic construct
  source 1..75: mol_type = other DNA
tgttgcattctcattttatgagatgggctttaatagtgacttgttatttctgtatctacttgcatttgtgcttgg

SEQ ID NO: 442178 - DNA, 75 bp, synthetic construct
  source 1..75: mol_type = other DNA
atgccgtggtataccgaagttaatgatatctatatggagttcagacgctcaccattctggatggttgccggttat

SEQ ID NO: 442179 - DNA, 75 bp, synthetic construct
  source 1..75: mol_type = other DNA
caacgttctgttgaacagagtcttgagcaactttctaacatttcgtcagagttcgaaccatcaagccagaagcgc

SEQ ID NO: 442180 - DNA, 75 bp, synthetic construct
  source 1..75: mol_type = other DNA
agaatgacgtgatttctaaggtctatcttcaccttgtccagcattgggacgttcaggagtttcttgaagtattcg

SEQ ID NO: 442181 - DNA, 75 bp, synthetic construct
  source 1..75: mol_type = other DNA
aggccagccgggcgatatcgaaacacttgagcaactgtgtcgattcttaggcccgggtaaaaccttctgtgccca

SEQ ID NO: 442182 - DNA, 75 bp, synthetic construct
  source 1..75: mol_type = other DNA
gaattgagttgtgctcttggatcatcccgtaccaacgcgacgcgtattgccgatgaactggaaaaacgcggttgg

SEQ ID NO: 442183 - DNA, 75 bp, synthetic construct
  source 1..75: mol_type = other DNA
ggaaaaccacagtattcagccttctgaattaagttgtgctcttggatcatcccgtaccaacgcgacgcgtattgc

SEQ ID NO: 442184 - DNA, 75 bp, synthetic construct
  source 1..75: mol_type = other DNA
caggtgcttgctgttccgccagcgtacacaagccagcgttgcgcgttctgtggtcatacagcgaaagagaatcgc

SEQ ID NO: 442185 - DNA, 75 bp, synthetic construct
  source 1..75: mol_type = other DNA
ccggaatcatttgacctggatggagtaagaccgtttgtgcggatcctgtccgaaaaagtgcgtgcgcgacgcgga

SEQ ID NO: 442186 - DNA, 75 bp, synthetic construct
  source 1..75: mol_type = other DNA
agcgccctactctggtatatgcctgaccagcgtcaccacatgttgttcgccaccatgtggaataccgggatccgt

SEQ ID NO: 442187 - DNA, 75 bp, synthetic construct
  source 1..75: mol_type = other DNA
gccgcgcacgcctttgctgaggcagtaaaacgctatcagatttcactcacagaaacagaagcgttggtacaagcc

SEQ ID NO: 442188 - DNA, 75 bp, synthetic construct
  source 1..75: mol_type = other DNA
aaccatttttgccggtatcagcgccggcggcatgtactgcccggagtgtggcatggttcactggtcagacggagt

SEQ ID NO: 442189 - DNA, 75 bp, synthetic construct
  source 1..75: mol_type = other DNA
tttttcactggctatcggcgtcacgggaaccgaggcgctggcaaatacctttagtcttgatcccttaggatcggt

SEQ ID NO: 442190 - DNA, 75 bp, synthetic construct
  source 1..75: mol_type = other DNA
gccatgacggagcactattatcgcctgcgggactatgccctccaacatcctgaagcccacgccattctgcgtatc

SEQ ID NO: 442191 - DNA, 75 bp, synthetic construct
  source 1..75: mol_type = other DNA
tgttgcgcagacctgaatattccgttctttgtggatgccggaaacaaaaaactggtcttctggtttgtacgtgtt

SEQ ID NO: 442192 - DNA, 75 bp, synthetic construct
  source 1..75: mol_type = other DNA
gccgtcaggtcacgggagttgtgaaaaatgtcactgtcagccagtcctgcggtaagtggtacatcagtattcaga

SEQ ID NO: 442193 - DNA, 75 bp, synthetic construct
  source 1..75: mol_type = other DNA
cctgtatcgcaaatatccgcagggactaccttcacaaagtcacaacgaccgtcagcaaaaaccacgcaatgatag

SEQ ID NO: 442194 - DNA, 75 bp, synthetic construct
  source 1..75: mol_type = other DNA
gacgaacagcgtatcgatttctggcctcagcactttggcactatcccgcagtggataaccctggaaccgcgtatt

SEQ ID NO: 442195 - DNA, 75 bp, synthetic construct
  source 1..75: mol_type = other DNA
aatcctatcagcagttcaaaagctaacacatcagcgagatcaactggtaatctcgatttatttaacgaacgcgtg

SEQ ID NO: 442196 - DNA, 75 bp, synthetic construct
  source 1..75: mol_type = other DNA
tggctggcaggtatgaaactcggcgacacaccgctggtggacttctcccgcgaccgcctgcaccgggaaacgctg

SEQ ID NO: 442197 - DNA, 75 bp, synthetic construct
  source 1..75: mol_type = other DNA
tttgcatggatggaccgcttctgtgaggcctacagcggcgatatctggtccttttacaccctcagcaatggcggc

SEQ ID NO: 442198 - DNA, 75 bp, synthetic construct
  source 1..75: mol_type = other DNA
agccagatggtttacaaacacgcgatttcaactgttgtcccgtctcgcccggtttctcatcacagtaacaatgcc

SEQ ID NO: 442199 - DNA, 75 bp, synthetic construct
  source 1..75: mol_type = other DNA
ggcttctggccgcagcactttggctccatcccacaatggataacccttgaacctcgcattttcgcctggatggat

SEQ ID NO: 442200 - DNA, 75 bp, synthetic construct
  source 1..75: mol_type = other DNA
caaaatgaccgggtaatggcgttgaccatcgatggtggcgtgacgctgtggacacaaagcgatctgctgcaccgc

SEQ ID NO: 442201 - DNA, 75 bp, synthetic construct
  source 1..75: mol_type = other DNA
tacttcaggaactaattgattgtggtgatattagtgctaaagatgcaaaaagcacacagaaagcctggaattgtc

SEQ ID NO: 442202 - DNA, 75 bp, synthetic construct
  source 1..75: mol_type = other DNA
caagctcccccgctatgtcgtgaagcgtcacgacgatgacttctttgacgaagaagacgcagaagttctgtgctt

SEQ ID NO: 442203 - DNA, 75 bp, synthetic construct
  source 1..75: mol_type = other DNA
cggagtcccccgcccttctgatgcttcccgtttgccgacatttttcagcagggaaaccgctggcttaactggctg

SEQ ID NO: 442204 - DNA, 75 bp, synthetic construct
  source 1..75: mol_type = other DNA
gcagcgaggatgaggggctggtcacccactggcactatgacgaagcagaccgcctcacgcaccgcaccgtgaagg

SEQ ID NO: 442205 - DNA, 75 bp, synthetic construct
  source 1..75: mol_type = other DNA
accaccgcttatacccctgccgggcagttacagagccagcacctgaacagcctgcagtatgaccgcgattacacc

SEQ ID NO: 442206 - DNA, 75 bp, synthetic construct
  source 1..75: mol_type = other DNA
atcaccggcgtgacggatggtgccgggcgtcacttccggctggtactgaccacgcaggcgcagcgggcagaagaa

SEQ ID NO: 442207 - DNA, 75 bp, synthetic construct
  source 1..75: mol_type = other DNA
tgaatgcggatgatggcaaagaaatctggtctgtcagtctggccgagaaagatggctggttctctaaagagcctg

SEQ ID NO: 442208 - DNA, 75 bp, synthetic construct
  source 1..75: mol_type = other DNA
ttcaggtacagctcaagcaggctgatgccgcgctgaaaacccttgataccatcaaaggtgaagggtgggctgcca

SEQ ID NO: 442209 - DNA, 75 bp, synthetic construct
  source 1..75: mol_type = other DNA
gcaactgcatttggtgcggcagtcgtcggtggcgataatggtcgcgtcagtgctgtgttgatgcagcagggacag

SEQ ID NO: 442210 - DNA, 75 bp, synthetic construct
  source 1..75: mol_type = other DNA
atggcccgttcagctaaaccccgtaaacgaaaatccgcatctcaaagaagcaaacttccccgctacgttgtaaaa

SEQ ID NO: 442211 - DNA, 75 bp, synthetic construct
  source 1..75: mol_type = other DNA
gaagctgacggcgctgttaaatggactgttaaccttgatatgccttcgctttctctgcgtggcgagtctgcgcca

SEQ ID NO: 442212 - DNA, 75 bp, synthetic construct
  source 1..75: mol_type = other DNA
atggcaacctggtcgtgggtgatagcgaaggttatctgcactggattaacgttgaagatggtcgtttcgttgccc

SEQ ID NO: 442213 - DNA, 75 bp, synthetic construct
  source 1..75: mol_type = other DNA
gaaaaaacccgacagatgtgacgtacttcaggaactaattgattgtggtgatattagtgctaaagatgcaaaaag

SEQ ID NO: 442214 - DNA, 75 bp, synthetic construct
  source 1..75: mol_type = other DNA
cccggcagcaggcctcttccggcgggacggaaccgtccgcttttcctgataccctgccggactacacggaatatg

SEQ ID NO: 442215 - DNA, 75 bp, synthetic construct
  source 1..75: mol_type = other DNA
aatttttatcagtatccgttaaatccgatctcagagatagacccacaagggttaaatccgttaattcttagtgtt

SEQ ID NO: 442216 - DNA, 75 bp, synthetic construct
  source 1..75: mol_type = other DNA
cgaccggctgaccacgatacagaacgacaggagccgcatccagacgatttatcagccggggagcttcacaccact

SEQ ID NO: 442217 - DNA, 75 bp, synthetic construct
  source 1..75: mol_type = other DNA
cagcacctgaacagcctgcagtatgaccgcgattacacctggaacgacaacggcgaactcatccgcatcagcagc

SEQ ID NO: 442218 - DNA, 75 bp, synthetic construct
  source 1..75: mol_type = other DNA
ggggcagcagtatgatgaggagtccggcctgtattacaaccgccaccgctattatgacccgctgcaggggcgata

SEQ ID NO: 442219 - DNA, 75 bp, synthetic construct
  source 1..75: mol_type = other DNA
gttatgataatccacacagtgacttaccctgcgcaacggacgatgccaccggcagccggaaaaccatgacgtgga

SEQ ID NO: 442220 - DNA, 75 bp, synthetic construct
  source 1..75: mol_type = other DNA
gctattcagcaaattacaggtgcgtcgcagcttgagaacatgccgagcaacgtcgctaccgataccgttgatagc

SEQ ID NO: 442221 - DNA, 75 bp, synthetic construct
  source 1..75: mol_type = other DNA
ggtttccatgattgcagataacgccactcaggctggcggtgatggcattcctatcgtggatgttgatttcattcc

SEQ ID NO: 442222 - DNA, 75 bp, synthetic construct
  source 1..75: mol_type = other DNA
cgaaaatccgccacaatttcccgcaggccattgcggtagagatggaagcgacagctatcgctcatgtctgccaca

SEQ ID NO: 442223 - DNA, 75 bp, synthetic construct
  source 1..75: mol_type = other DNA
cccgcgctgagcgtcttcacatccgcagcgaaatcaaccgcagactccatcgggctgcatctgtcgcctttatca

SEQ ID NO: 442224 - DNA, 75 bp, synthetic construct
  source 1..75: mol_type = other DNA
atgtctcgcgactgtacggtgaggtgcgcgcggtcgatggcgtcagtgttgcgataaaagatggcgagttcttct

SEQ ID NO: 442225 - DNA, 75 bp, synthetic construct
  source 1..75: mol_type = other DNA
aacaccaatctatggttatgtgtggctgaacatggaaacggcacatcagcttgagttgctatcgaatctgatttg

SEQ ID NO: 442226 - DNA, 75 bp, synthetic construct
  source 1..75: mol_type = other DNA
tttctactgttgtcccgtctcgcccggtttctcatcacagtaacaacgccggtggcagtaccagcagtaactacc

SEQ ID NO: 442227 - DNA, 75 bp, synthetic construct
  source 1..75: mol_type = other DNA
gggatagtcgcctgcctgatggcatacagccaccacgcttgccgcaccgagtgtgacgcgatgactgaacactat

SEQ ID NO: 442228 - DNA, 75 bp, synthetic construct
  source 1..75: mol_type = other DNA
gcgtctggagcttttacacactcaacaatagcggcgcatttatggctccggagcctgacggtgataaatggacat

SEQ ID NO: 442229 - DNA, 75 bp, synthetic construct
  source 1..75: mol_type = other DNA
gagtcagagcacgatgagaagtgggcattgttcaacagtatgaacggcaacggcgcggaacttactggcgaagcc

SEQ ID NO: 442230 - DNA, 75 bp, synthetic construct
  source 1..75: mol_type = other DNA
aagacggtggcagtgggggattcccgccggcacggtgcagatgctcgaccggctggaaagtgaaatcctggctga

SEQ ID NO: 442231 - DNA, 75 bp, synthetic construct
  source 1..75: mol_type = other DNA
gggaacaccaaataacacctatctaaaatataatcccaaagctaaagggaatggagttacaattatcaggcaagg

SEQ ID NO: 442232 - DNA, 75 bp, synthetic construct
  source 1..75: mol_type = other DNA
agacggatgccgcaggcaggacaacagagtacagcccggatgtggtgacgggcctcatcacgcgcatcaccacgc

SEQ ID NO: 442233 - DNA, 75 bp, synthetic construct
  source 1..75: mol_type = other DNA
taccggcgtaccgcgtgaagcctgcgccgctaaagccgcgcgtctcctcacccacctgaacgtgcctgaacgcct

SEQ ID NO: 442234 - DNA, 75 bp, synthetic construct
  source 1..75: mol_type = other DNA
gcgaatgcgtggtgctccacggccattccggcagcgggaaatcgaccctgctacgttcgctgtatgccaactatc

SEQ ID NO: 442235 - DNA, 75 bp, synthetic construct
  source 1..75: mol_type = other DNA
cgcgcctcgctcaccgtcaacgcgggcgaatgcgtggtgctccacggccactccggcagcgggaaatcaaccctg

SEQ ID NO: 442236 - DNA, 75 bp, synthetic construct
  source 1..75: mol_type = other DNA
gcgtgcgttttgcgttgggcctgatgtggctgacgctgattgttgccgaaaccatttctgccaattccggcattg

SEQ ID NO: 442237 - DNA, 75 bp, synthetic construct
  source 1..75: mol_type = other DNA
cgcatctggcgctgatcccgctggtgattttgtggtttggcattgatgaatccgcaaaaatctttctggtggcgc

SEQ ID NO: 442238 - DNA, 75 bp, synthetic construct
  source 1..75: mol_type = other DNA
ctggtcaccgcgccagcgcgcaaagtggtggaaatccgcaaaaccaccgtcggctgggtgagccagtttctgcgc

SEQ ID NO: 442239 - DNA, 75 bp, synthetic construct
  source 1..75: mol_type = other DNA
acaggggaccgctcattctggcgctactactagtttgtggggtaactctacccgtccggttgtatatgaagttgg

SEQ ID NO: 442240 - DNA, 75 bp, synthetic construct
  source 1..75: mol_type = other DNA
atgcaaggctacatcattcgaccaggtgtcggacagagatcttaaagaaaacattcaggttattgataatgccac

SEQ ID NO: 442241 - DNA, 75 bp, synthetic construct
  source 1..75: mol_type = other DNA
gcaggtcaggtttacggtctttctgcccgtggcctggcaattgataccgctttgccatccggtgaagaatttccg

SEQ ID NO: 442242 - DNA, 75 bp, synthetic construct
  source 1..75: mol_type = other DNA
tccgggcgtagccgtttctcgctttctaccttacctgcggcggatttcccgaacctcgatgactggcagagtgaa

SEQ ID NO: 442243 - DNA, 75 bp, synthetic construct
  source 1..75: mol_type = other DNA
aacccggacaaacatctggaagctggctgcgatctcctcaagcaggcgtttgctcgcgcggcaattctctctaac

SEQ ID NO: 442244 - DNA, 75 bp, synthetic construct
  source 1..75: mol_type = other DNA
tatacatacacgcttaaagaaaacggtatgccctatgcaggtgtcattgcacaggaagctctggaagcaatccca

SEQ ID NO: 442245 - DNA, 75 bp, synthetic construct
  source 1..75: mol_type = other DNA
aaacgccagatatgcaatatggcgacgttagcccggtaagcaatatctttaattttgagggtaactatacccgac

SEQ ID NO: 442246 - DNA, 75 bp, synthetic construct
  source 1..75: mol_type = other DNA
gacagtatgaaaacgtcagtagttattattccattccggtggggtactgggagtacggctttttctatagcaaaa

SEQ ID NO: 442247 - DNA, 75 bp, synthetic construct
  source 1..75: mol_type = other DNA
cttaagatggggaactgtctcatgtcgtatggtgtgcggggaagtaacgcgcttattaaatttgattacaccgac

SEQ ID NO: 442248 - DNA, 75 bp, synthetic construct
  source 1..75: mol_type = other DNA
agtgaaagatgccaagaaaaccactgaaatgcgtgctgcgctggtgaatgccgatcagacgttgagtgaaacctg

SEQ ID NO: 442249 - DNA, 75 bp, synthetic construct
  source 1..75: mol_type = other DNA
gtgactccgaaaggggagtggggtaaaggcagcgttgagctggtagaaattccaaccaacgatgaaaccaacgat

SEQ ID NO: 442250 - DNA, 75 bp, synthetic construct
  source 1..75: mol_type = other DNA
acgatgaaatcgtcagcatgctcggggccagctatttccgcgtgattggtgcaggtcaggtttatggcctttctg

SEQ ID NO: 442251 - DNA, 75 bp, synthetic construct
  source 1..75: mol_type = other DNA
cacgttggcgactttattttcacctccaaactggtggacggtcgcttccctgattaccgtcgagttctgccgaag

SEQ ID NO: 442252 - DNA, 75 bp, synthetic construct
  source 1..75: mol_type = other DNA
ctctatccggcatcaggaaaatctgtgcccaaatgggtaatccgcacacaatcgcctcaacaactggacggcctc

SEQ ID NO: 442253 - DNA, 75 bp, synthetic construct
  source 1..75: mol_type = other DNA
caatgccacaccaaatggtcgtctggcgtggatgccgctttctgacgggatcagcccgactcaaggggcggataa

SEQ ID NO: 442254 - DNA, 75 bp, synthetic construct
  source 1..75: mol_type = other DNA
ggttaacggtgggggtgatacctgtccgggctacgatgtgctgctgtttaccaaagggatgaatggcatcaaagc

SEQ ID NO: 442255 - DNA, 75 bp, synthetic construct
  source 1..75: mol_type = other DNA
ggggcgtttaccggctcgcgacgcggaggtcgcgccgggctgttcgaaattgcccacggcggtacgctgtttctg

SEQ ID NO: 442256 - DNA, 75 bp, synthetic construct
  source 1..75: mol_type = other DNA
cgggcagattaacgagctgaaagccaacggcaccgaagcggtggtcggcgcggggctgattaccgatctggcaga

SEQ ID NO: 442257 - DNA, 75 bp, synthetic construct
  source 1..75: mol_type = other DNA
ctggagaaatttaatggcgacagaacggcagcagcgaattatttaggtatcagtcggacaaccttctggcggcgg

SEQ ID NO: 442258 - DNA, 75 bp, synthetic construct
  source 1..75: mol_type = other DNA
gttcgctattatttaaacggtatgctgttcgaaaccgaaggcgaagagctgcgcaccgtggcgaccgacggtcac

SEQ ID NO: 442259 - DNA, 75 bp, synthetic construct
  source 1..75: mol_type = other DNA
tttgatatctgccgtggtctgcctgaaggcgcggaaattgccgtgcagctggaaggtgagcggatgctggtgcgc

SEQ ID NO: 442260 - DNA, 75 bp, synthetic construct
  source 1..75: mol_type = other DNA
tgttctgaacgcgctgaaatgcgaaaacgtccgcatgatgctgaccgattcggtttccagcgtgcagattgaaga

SEQ ID NO: 442261 - DNA, 75 bp, synthetic construct
  source 1..75: mol_type = other DNA
agggaacagtgcgacgacttgagtcagcaggtgcagagattagccgggcaggtggaccgcttgagtcggttattt

SEQ ID NO: 442262 - DNA, 75 bp, synthetic construct
  source 1..75: mol_type = other DNA
ttagtgatctttacggaggaactttaattttccctggcactgctggttatttgaaaatgggtaaatgcctcatgt

SEQ ID NO: 442263 - DNA, 75 bp, synthetic construct
  source 1..75: mol_type = other DNA
actgctagcttgtggggcaactctagccgtccggttgtatatgaagttggtgctgatggtggcgcgtatatgttc

SEQ ID NO: 442264 - DNA, 75 bp, synthetic construct
  source 1..75: mol_type = other DNA
ttaattgaattgccttttggcgaacagtcgcagaccattacggccatgtgcgcacatcatgctggaaaagcggtt

SEQ ID NO: 442265 - DNA, 75 bp, synthetic construct
  source 1..75: mol_type = other DNA
tgaggcgtcggatttgatgtatcacctgctggtgctattgcaggatcaggagctggatttgacggcggtgattga

SEQ ID NO: 442266 - DNA, 75 bp, synthetic construct
  source 1..75: mol_type = other DNA
ggggcggatcccgtttatcttttatttggtgtcaatgtttgttgggtggctggagcgcaaacgctcaccgctcga

SEQ ID NO: 442267 - DNA, 75 bp, synthetic construct
  source 1..75: mol_type = other DNA
caaaagttcagcctttcattgcactgttgctcgtcagtctggtcgttgcactagccgcggggatcccggcgggtg

SEQ ID NO: 442268 - DNA, 75 bp, synthetic construct
  source 1..75: mol_type = other DNA
acaaaccccctggacgcttgatcccgttgcggttggcgcgctcgactatcgccgccgtttttgtcgtgaactttt

SEQ ID NO: 442269 - DNA, 75 bp, synthetic construct
  source 1..75: mol_type = other DNA
gtctcttaaaccaagcgccatacgcggtaatgcttcggaaatcatggcattagcaggcatcgctaatggtggtcg

SEQ ID NO: 442270 - DNA, 75 bp, synthetic construct
  source 1..75: mol_type = other DNA
cgcaatctgcgcacgcgttacacctttttcaccaacattcccctcttgtgcactgcatgaccaacgatgtggtgc

SEQ ID NO: 442271 - DNA, 75 bp, synthetic construct
  source 1..75: mol_type = other DNA
caccataggaaatcagtgtcagcagcatacaaccgatatgactattgggatgagcgcatagaaatcatgtgctgg

SEQ ID NO: 442272 - DNA, 75 bp, synthetic construct
  source 1..75: mol_type = other DNA
ttacgccagcctgccggagagcgttgtagaacaggttcgcgctgcgtggaagaccaatattaaagacagtagcgg

SEQ ID NO: 442273 - DNA, 75 bp, synthetic construct
  source 1..75: mol_type = other DNA
tgatgtatgtccttggtgtgagtgatgcgacagaaagtaaaacctggtgtggatataataagattaatgaaatag

SEQ ID NO: 442274 - DNA, 75 bp, synthetic construct
  source 1..75: mol_type = other DNA
atgtcggatgatatatcactggcaatggaaggtgcgctggctgttattgctgttgtgggcgtttactgcctggtt

SEQ ID NO: 442275 - DNA, 75 bp, synthetic construct
  source 1..75: mol_type = other DNA
tgtacaggttaatccgggcgatatcgtgtttggcgatcgcgatggcttactgatcatccctcaggatgttgagaa

SEQ ID NO: 442276 - DNA, 75 bp, synthetic construct
  source 1..75: mol_type = other DNA
catccggatacattcgcaacgtcagatctgcattcaggcacgtccctgccgcgcttttacgccgacctgttacca

SEQ ID NO: 442277 - DNA, 75 bp, synthetic construct
  source 1..75: mol_type = other DNA
tagcgggagcttcacgaggtggacgcggtgtggatactactgacgccgcagcagatgcgttgcctgccgcacaat

SEQ ID NO: 442278 - DNA, 75 bp, synthetic construct
  source 1..75: mol_type = other DNA
gaagataaagaaatatttgaatatcctcaaggcgggattattgatttattctgcagttttaatagggtgaaaaaa

SEQ ID NO: 442279 - DNA, 75 bp, synthetic construct
  source 1..75: mol_type = other DNA
tcccccatcgaagcgcttaacgaggcccaggctcactatcttatctccctagataccaaagctctgactttcgcc

SEQ ID NO: 442280 - DNA, 75 bp, synthetic construct
  source 1..75: mol_type = other DNA
gtcgcgcagtccgacaggcactgaagtcaaagccacgtatccaggactacgaaattgatacaatcatcgttaacg

SEQ ID NO: 442281 - DNA, 75 bp, synthetic construct
  source 1..75: mol_type = other DNA
agtcgataaagcccatcagcagttgcccggtaagcggcagatgttccgtgccatgctggcgctgggctgccagtt

SEQ ID NO: 442282 - DNA, 75 bp, synthetic construct
  source 1..75: mol_type = other DNA
ctggttcgtaaacctgttctttttcacctcactgttgccgcgcgttattgcttatgcttcgtatgccttcctcgg

SEQ ID NO: 442283 - DNA, 75 bp, synthetic construct
  source 1..75: mol_type = other DNA
ttggatccagcacttaaacgtaggttctctttccaatatgagattaaatgcaatagatttgaattagatttatat

SEQ ID NO: 442284 - DNA, 75 bp, synthetic construct
  source 1..75: mol_type = other DNA
gctacttccgacaaaaagaacagcaaccggttgcaatcccccagacgcttccagaagctctgcgcctggctgccg

SEQ ID NO: 442285 - DNA, 75 bp, synthetic construct
  source 1..75: mol_type = other DNA
gcgccgtcgccagaagtgaagggcctggcagttttgttccccattttcttgatgcgctctggcaattgacgcagg

SEQ ID NO: 442286 - DNA, 75 bp, synthetic construct
  source 1..75: mol_type = other DNA
gttatcgaaaccgaagaggccagtcagtttgcggctatcgccagtgcgttgctgattaacgttggcacgctgacg

SEQ ID NO: 442287 - DNA, 75 bp, synthetic construct
  source 1..75: mol_type = other DNA
cggcaaaggtcagcagtggcttatgaagcgattgcttgatgctggtgtgctggtgcctgtcgcggcgacgcgcta

SEQ ID NO: 442288 - DNA, 75 bp, synthetic construct
  source 1..75: mol_type = other DNA
aagcgattgcttgatgctggtgtgctggtgtgctggtacctgtcgcggcaacgcgctaacagacgtagtaagaac

SEQ ID NO: 442289 - DNA, 75 bp, synthetic construct
  source 1..75: mol_type = other DNA
aatgccagacagcctattattgtaagcacagagcataagacgtttgataatatgattctgacaggcattgactac

SEQ ID NO: 442290 - DNA, 75 bp, synthetic construct
  source 1..75: mol_type = other DNA
ggatttatacaaactggttcgggatactgacagtgtttttcccgtccccgtaaattcggaactagggataatgac

SEQ ID NO: 442291 - DNA, 75 bp, synthetic construct
  source 1..75: mol_type = other DNA
cgaaatgggttaaggggctccagactcgcgagtcttcgaaccagaatcaaccagaagtggaacaaaccaagccag

SEQ ID NO: 442292 - DNA, 75 bp, synthetic construct
  source 1..75: mol_type = other DNA
atccaaaatgggtgaaggggatccagagtcgcgatgatgatgaccagaatcaggataaagcggaacaaaacagcc

SEQ ID NO: 442293 - DNA, 75 bp, synthetic construct
  source 1..75: mol_type = other DNA
agaagtcatccggcagcacaacatcacgttgctgcccgctgacctgatccgccatgccctgcacggcgatctgcc

SEQ ID NO: 442294 - DNA, 75 bp, synthetic construct
  source 1..75: mol_type = other DNA
tcaggttcacaacaaaatactggtgcatctgacacgaccgcacaaccagggccggtaaaagttaccgctgacgaa

SEQ ID NO: 442295 - DNA, 75 bp, synthetic construct
  source 1..75: mol_type = other DNA
gattgaaacccgcgactctgtgaaccagaaccagcacgaatcggaacaaaacgaccagaaagcggaacaaaacag

SEQ ID NO: 442296 - DNA, 75 bp, synthetic construct
  source 1..75: mol_type = other DNA
cccatgaagttattgagattttgaaaagcgatgctgccatcaccggtggccgtgtcactgaaatgactgttggaa

SEQ ID NO: 442297 - DNA, 75 bp, synthetic construct
  source 1..75: mol_type = other DNA
atggatttgatgatgtcaccgacttactgcgtaaaaccctggttagttacaacatccttaacttctggctggtgg

SEQ ID NO: 442298 - DNA, 75 bp, synthetic construct
  source 1..75: mol_type = other DNA
gcgaggcgtttgccgactactcgcggttgtatgttgatctcccaggtcacggtggttcggcagcaattagcgtcg

SEQ ID NO: 442299 - DNA, 75 bp, synthetic construct
  source 1..75: mol_type = other DNA
tgcggtcagaccggcggcggcaactgccctgattgtggcgcggtgatgggcgacgcaacataccaggaaacattc

SEQ ID NO: 442300 - DNA, 75 bp, synthetic construct
  source 1..75: mol_type = other DNA
aacagcctgaaccagtggcgcaacaggaagtggaaaaagtctgcaccgcctgcggtcagaccggcggcggcaact

SEQ ID NO: 442301 - DNA, 75 bp, synthetic construct
  source 1..75: mol_type = other DNA
aacttacaacgtctcatgtattttctggatttgggtgtgaaggtggtaatacatcgccctcattaacctggtctg

SEQ ID NO: 442302 - DNA, 75 bp, synthetic construct
  source 1..75: mol_type = other DNA
attctaattccagcggagcgttagttggttatatgcttaatgccaataaaattgcaaccgctgagataatacccg

SEQ ID NO: 442303 - DNA, 75 bp, synthetic construct
  source 1..75: mol_type = other DNA
ccgttaagctatctgaaacccagctgggataacggtctggcagggcagttgagcaaatttacgctcatggcgttg

SEQ ID NO: 442304 - DNA, 75 bp, synthetic construct
  source 1..75: mol_type = other DNA
tttccgccagttgattaccgtgctcggcgtactggcgggagcgggtatctttaacggtgtaactaagtacgttgc

SEQ ID NO: 442305 - DNA, 75 bp, synthetic construct
  source 1..75: mol_type = other DNA
ctgcgccgcgtggtcggcacttcatcagcgatggtacttggcttctctacgctgatggcgctggtttttgtgctg

SEQ ID NO: 442306 - DNA, 75 bp, synthetic construct
  source 1..75: mol_type = other DNA
ggtgaccagataaaagagttgtgggctgacagcgacggactgtgcctcttaaccaaacgcctggagcggggccgc

SEQ ID NO: 442307 - DNA, 75 bp, synthetic construct
  source 1..75: mol_type = other DNA
cagcgatggtgcttggcttctccacgctgatggcgctggtttttgtgctggcggctgcgccaatcagccagggat

SEQ ID NO: 442308 - DNA, 75 bp, synthetic construct
  source 1..75: mol_type = other DNA
cgctggtggtgattcctgccgtcatcatgttaattaagcgtggtgcaatcccgttaagctatctgaaacccagct

SEQ ID NO: 442309 - DNA, 75 bp, synthetic construct
  source 1..75: mol_type = other DNA
acgcgacccaactctgcaactgaccaccagccatctgtggaatttgccgttaatcggccttgagcgcctgctgct

SEQ ID NO: 442310 - DNA, 75 bp, synthetic construct
  source 1..75: mol_type = other DNA
caaaagttatcgatgaaatgcaacgcgaagcggcgcgccttgtacggcgagcgacaaacacgaaggttacgttcg

SEQ ID NO: 442311 - DNA, 75 bp, synthetic construct
  source 1..75: mol_type = other DNA
gaattggaatcggtaacgaaaaaagacactgataatatggctcgtaatgtgcgcgatgcgtttaccggattgtat

SEQ ID NO: 442312 - DNA, 75 bp, synthetic construct
  source 1..75: mol_type = other DNA
ggacggcggccagtacactggtcaagattggtgccgggttactggtcggtaagttgctggcggtgtcatttggtc

SEQ ID NO: 442313 - DNA, 75 bp, synthetic construct
  source 1..75: mol_type = other DNA
cagttgctaaaatcgacttctgtattaaacgtatccggatgcatgaacaaatgagcaggataatccggaagactg

SEQ ID NO: 442314 - DNA, 75 bp, synthetic construct
  source 1..75: mol_type = other DNA
ctgatctgcaccgaatgtcctggtctcagctggcaagagccgcggaagagtcgacagtacatcatgattatgccc

SEQ ID NO: 442315 - DNA, 75 bp, synthetic construct
  source 1..75: mol_type = other DNA
actggactgttgctaatattccagcaacggtaacatatttgcccgctgatgcaggaagacgtgatggtacaaaac

SEQ ID NO: 442316 - DNA, 75 bp, synthetic construct
  source 1..75: mol_type = other DNA
gtgactggctggtaaaagaagtcaacggcaaaccgtgtaacgtggttgagttgcaggggacggttggggcaagcg

SEQ ID NO: 442317 - DNA, 75 bp, synthetic construct
  source 1..75: mol_type = other DNA
gctgacgcttaccaaatctaccctgtacctgcctgataccgcaaaagaagagttagagaagaaaaaagatatggg

SEQ ID NO: 442318 - DNA, 75 bp, synthetic construct
  source 1..75: mol_type = other DNA
cgcccataacgacgacatggtgattggcgcaattcaggcaattaaagaagcgggtctgaagccgggtaaagatat

SEQ ID NO: 442319 - DNA, 75 bp, synthetic construct
  source 1..75: mol_type = other DNA
tttcatcgcggaactgaccggtcgtgggcaggatgtggcggaaggccgggtctgcgttccgggtgtgaagaaacc

SEQ ID NO: 442320 - DNA, 75 bp, synthetic construct
  source 1..75: mol_type = other DNA
aatatccgatgactctgaatgacctgtcgctgctgtgtgaatctgtagcaaaagccgttggcgtccctaatgggg

SEQ ID NO: 442321 - DNA, 75 bp, synthetic construct
  source 1..75: mol_type = other DNA
aaaagaggtgagcgtattgtgaaaataacatctgttggaggtaacaatattctatatggttcagcaattacagta

SEQ ID NO: 442322 - DNA, 75 bp, synthetic construct
  source 1..75: mol_type = other DNA
acgacaaaccggttatctggacggtatctgtaacgcggctgttcgagttgtttcgcgacataagcctggaattcg

SEQ ID NO: 442323 - DNA, 75 bp, synthetic construct
  source 1..75: mol_type = other DNA
ggcggcgctctccgccccattttctgctgcattacgccaggggttacaggcaagtgaaactgtgctgctgcacta

SEQ ID NO: 442324 - DNA, 75 bp, synthetic construct
  source 1..75: mol_type = other DNA
cagcaaggacgttttcgccgcgatctgttttatcgactgagtattttacgtctgcaattgccgccactgcgcgag

SEQ ID NO: 442325 - DNA, 75 bp, synthetic construct
  source 1..75: mol_type = other DNA
taagaaaggttttgccgaagctattaagaatgcgccaaatatcaaaattatccgctcgcaatccggtgatttcac

SEQ ID NO: 442326 - DNA, 75 bp, synthetic construct
  source 1..75: mol_type = other DNA
tttggcacgaacgaaaaattgagaagagaaagagtattcagtggcaagcgcacgttttcagaagtgatgcttgat

SEQ ID NO: 442327 - DNA, 75 bp, synthetic construct
  source 1..75: mol_type = other DNA
ggggccgcgccgggctgttcgaaattgcccacggcggcacgctgtttctggatgagataggcgaaatgccactac

SEQ ID NO: 442328 - DNA, 75 bp, synthetic construct
  source 1..75: mol_type = other DNA
aaggcatcgcgggtgaggggagtgcttcagatggcgtcgtgactcagcctgacggtagcagtgagcctcagcctg

SEQ ID NO: 442329 - DNA, 75 bp, synthetic construct
  source 1..75: mol_type = other DNA
gtcctgcgctctgaagaagtccggagcgcactgaaacagaaacttcgccataacctggaagcgcgtcttgatgca

SEQ ID NO: 442330 - DNA, 75 bp, synthetic construct
  source 1..75: mol_type = other DNA
gagccggaaggcatcgcgggtgaggggagtgcttcagatagcggtgaccccacaccggacagcgacatgatgatg

SEQ ID NO: 442331 - DNA, 75 bp, synthetic construct
  source 1..75: mol_type = other DNA
atgtcagaaattacatccttggtcactgctgaagcagtgaaggaagtcctgcgctctgaagaagtccggagcgca

SEQ ID NO: 442332 - DNA, 75 bp, synthetic construct
  source 1..75: mol_type = other DNA
caaaaaataaaatcattgtgctatctgataaaggaacgtcaacgcaattgtcagtcataaatgataatgagttgg

SEQ ID NO: 442333 - DNA, 75 bp, synthetic construct
  source 1..75: mol_type = other DNA
tggcgtgtggcggcacattttctggtgtcgttcattgttggtgtgctgggggcgcgtgtactgtcagcctggatt

SEQ ID NO: 442334 - DNA, 75 bp, synthetic construct
  source 1..75: mol_type = other DNA
ttttatctggccggtcttttgtcattgcctgaagaggtgacgggggatgcgttgatatatgccctgtatcagatg

SEQ ID NO: 442335 - DNA, 75 bp, synthetic construct
  source 1..75: mol_type = other DNA
atgtcagaaattacatccctggtcactgctgaagcagtgaaggacgtcctgcgctctgaagaagtcctgagcgca

SEQ ID NO: 442336 - DNA, 75 bp, synthetic construct
  source 1..75: mol_type = other DNA
cgccgcggatgaccgcgatggcgaacattgcgttgtttcgtctgtttaatcgcgatctgtttggcaatttcaatg

SEQ ID NO: 442337 - DNA, 75 bp, synthetic construct
  source 1..75: mol_type = other DNA
tcagtttatttcccccagccagcatgtggctgatgctttcaatagtctgtacggtccagggcgttgccggattat

SEQ ID NO: 442338 - DNA, 75 bp, synthetic construct
  source 1..75: mol_type = other DNA
ctgctgaagcagtgaaggacgtcctgcgctctgaagaagtcctgagtgcactgaaacagaaacttcgccataacc

SEQ ID NO: 442339 - DNA, 75 bp, synthetic construct
  source 1..75: mol_type = other DNA
tgagcggcgcaggcgctatcccttccctgacgtcgctcttacccgacatcagaaaaatgctgctggtcactgacc

SEQ ID NO: 442340 - DNA, 75 bp, synthetic construct
  source 1..75: mol_type = other DNA
ttgagtcgcgtcttgatgcagaagtggatgccattctggatgagctgctgggcgtaccagcggttccggagccgg

SEQ ID NO: 442341 - DNA, 75 bp, synthetic construct
  source 1..75: mol_type = other DNA
tccgtgagcagcgtacggcgctgcgcgagcaaattgacccgattctgaacaacacgatggtgcagctgtacaatg

SEQ ID NO: 442342 - DNA, 75 bp, synthetic construct
  source 1..75: mol_type = other DNA
taccaatcctcagggctggttaaatggcgatttcccggtgaaagatacaggcgcgctggatatgcgcgctattgg

SEQ ID NO: 442343 - DNA, 75 bp, synthetic construct
  source 1..75: mol_type = other DNA
ataacagctttgagcgtagccaaactgaacaggcgcagcgccagcagctcgacgcgacggttaaatcgtctgttg

SEQ ID NO: 442344 - DNA, 75 bp, synthetic construct
  source 1..75: mol_type = other DNA
gaagttaatattagaacagcttgagccagctattaataacaccatggcccagctatataacggtgaggttccaga

SEQ ID NO: 442345 - DNA, 75 bp, synthetic construct
  source 1..75: mol_type = other DNA
atggagctgccaggggatggtcacaagaacgcattctggaagaaatagaaagtgatgatcgcagtgccacagaaa

SEQ ID NO: 442346 - DNA, 75 bp, synthetic construct
  source 1..75: mol_type = other DNA
gacgccaggtgcaaagtcgtggtgtgcaaaccggtggttttcagaccttcgatgttcctcaagcaggtcaggtgc

SEQ ID NO: 442347 - DNA, 75 bp, synthetic construct
  source 1..75: mol_type = other DNA
atctgacaaccgactacctctatgaaggcgcacaggcctggtatcctcattactcctggcatagcgatggtcgct

SEQ ID NO: 442348 - DNA, 75 bp, synthetic construct
  source 1..75: mol_type = other DNA
ctctacagaccagcaatggagtcaatgggagaaactccccgatattgacccgaaagcatttcatcccatcaccga

SEQ ID NO: 442349 - DNA, 75 bp, synthetic construct
  source 1..75: mol_type = other DNA
atggattatcatattcctgatgagcgtgaggctcaccttggcgatagcccgcattataagaaatggtatgcacac

SEQ ID NO: 442350 - DNA, 75 bp, synthetic construct
  source 1..75: mol_type = other DNA
ttgatcgttatcccgttcgttatgaagcgtttcaacgatttggttcagatattttctggaaaaaaaacaaacggt

SEQ ID NO: 442351 - DNA, 75 bp, synthetic construct
  source 1..75: mol_type = other DNA
cgcctggcacgacgcgtattaagcgataatgaatgggagatctggaaaacgcaccatcagccggtgcgttttctg

SEQ ID NO: 442352 - DNA, 75 bp, synthetic construct
  source 1..75: mol_type = other DNA
atggcaatattaggtttaggcacggatatcgtggagatcgctcgcatagaagcggtaatcgcgcgatccggtgat

SEQ ID NO: 442353 - DNA, 75 bp, synthetic construct
  source 1..75: mol_type = other DNA
ggcccctgggatacgctagcccgcacacagacgaaaatcatgatcaacggagaacaactggatgccgacccggac

SEQ ID NO: 442354 - DNA, 75 bp, synthetic construct
  source 1..75: mol_type = other DNA
tacaactgccgccgctacgcgagcgggtggcggatattctgccgctggcggaaagctttttgaaaatgtctctgg

SEQ ID NO: 442355 - DNA, 75 bp, synthetic construct
  source 1..75: mol_type = other DNA
cgcagaaaacttctttgaggcgggcgcaacgtcgctgaatctggtgcaactgcacgttttgttacaacgtcacga

SEQ ID NO: 442356 - DNA, 75 bp, synthetic construct
  source 1..75: mol_type = other DNA
aactgaggtagcggaacgtttagggatcgatatagccgattatcgccaaatgttgctcgacaccaataacagcca

SEQ ID NO: 442357 - DNA, 75 bp, synthetic construct
  source 1..75: mol_type = other DNA
cgtcagtttatccatgagcagctgcaactggaccgtcagcgatttcagtctctgcaaaccccggaattcctgaaa

SEQ ID NO: 442358 - DNA, 75 bp, synthetic construct
  source 1..75: mol_type = other DNA
cgggtggcggatattctgccgctggcggaaagctttttgaaagtgtctctggcggcgctctccgccccgttttct

SEQ ID NO: 442359 - DNA, 75 bp, synthetic construct
  source 1..75: mol_type = other DNA
acctacatccgcaagaaactggcaaacgaacgctgcgacgccatcatcgctgctggctctaacggcgcatatctt

SEQ ID NO: 442360 - DNA, 75 bp, synthetic construct
  source 1..75: mol_type = other DNA
atccgttcaggggcagcaccgcaacgccggcaggcccgacaccagtgacacctgccgtcagcgtttcccgggctc

SEQ ID NO: 442361 - DNA, 75 bp, synthetic construct
  source 1..75: mol_type = other DNA
cctgagtaccatcctgaaaacaggcaaattaccgtctccgcaggtggtcgataatagcaacgatgcggaagatga

SEQ ID NO: 442362 - DNA, 75 bp, synthetic construct
  source 1..75: mol_type = other DNA
agagtctggtgaccgcaagttggagatcgtaaaactcgatgaccccaatcttattatcaacaaacgtttcaacgc

SEQ ID NO: 442363 - DNA, 75 bp, synthetic construct
  source 1..75: mol_type = other DNA
gaaaggtactctgggagagcaggtaaaggatatgggaaatttgaagatgaccgcgatagttaccctatgggtaat

SEQ ID NO: 442364 - DNA, 75 bp, synthetic construct
  source 1..75: mol_type = other DNA
atgtccagacgcaatactgacgctattaccattcatagcattttggactggatcgaggacaacctggaatcgcca

SEQ ID NO: 442365 - DNA, 75 bp, synthetic construct
  source 1..75: mol_type = other DNA
gctggcagttccgccagcagaatgccgccacaccggcactgaacaaacgcctccccgtctggtccgttaatgacc

SEQ ID NO: 442366 - DNA, 75 bp, synthetic construct
  source 1..75: mol_type = other DNA
tctcttcctggcgtgaattacaagagattgcgtcggttacccaatttattaatagacccgacaacactcgacgaa

SEQ ID NO: 442367 - DNA, 75 bp, synthetic construct
  source 1..75: mol_type = other DNA
gttggcgtgcgtatggctgttcacccggacgatccgccgcgcccaatcctcggcctgccgcgcattgtttctacc

SEQ ID NO: 442368 - DNA, 75 bp, synthetic construct
  source 1..75: mol_type = other DNA
ccggtggcgtaggtatcggcggcgtgctggagccgctgcaggctaatccgaccatcattgaagataactgcttca

SEQ ID NO: 442369 - DNA, 75 bp, synthetic construct
  source 1..75: mol_type = other DNA
ctgggccaccgtcggttcctgtgcgcaaatcggtaaaaacgttcatctctctggcggcgttggcattggtggcgt

SEQ ID NO: 442370 - DNA, 75 bp, synthetic construct
  source 1..75: mol_type = other DNA
cgcctgagacgataaaatatcagtaccatcagcttgtacataaacggattatactgatttcaataataacgctgg

SEQ ID NO: 442371 - DNA, 75 bp, synthetic construct
  source 1..75: mol_type = other DNA
gtggtgaaagcgattgttgaagaggaacaccgtcgtaaagcggaaggcaaagaagacctgatcccgatgcgtccg

SEQ ID NO: 442372 - DNA, 75 bp, synthetic construct
  source 1..75: mol_type = other DNA
atggaacagacctggcgctggtacggcccaaacgatccggtttctttagctgatgtccgtcaggcgggcgcaact

SEQ ID NO: 442373 - DNA, 75 bp, synthetic construct
  source 1..75: mol_type = other DNA
ccacagccatccttctgttggcaatcacctgggtgattcgcgctatcggaaagacggctcctttccagttcctgg

SEQ ID NO: 442374 - DNA, 75 bp, synthetic construct
  source 1..75: mol_type = other DNA
atcgaagtgggtccaacgtaccgtcgcagtcatggtgctcgctggggggcttgccattaccgtttatgcgtactg

SEQ ID NO: 442375 - DNA, 75 bp, synthetic construct
  source 1..75: mol_type = other DNA
tagacacaagttaccagtttgatatattgaatgataatcaaactattctaagtgatgcttataacgagacaaccg

SEQ ID NO: 442376 - DNA, 75 bp, synthetic construct
  source 1..75: mol_type = other DNA
tcatcctgcacgttctcttacctgctgttgagcgtgaagggctgacgattaaaacccgccgcgatggtgagttaa

SEQ ID NO: 442377 - DNA, 75 bp, synthetic construct
  source 1..75: mol_type = other DNA
gggccgagctcgctggacatcatggtctacaccttcaccaagaccacggtgtgggtcaccttccacgagatcaag

SEQ ID NO: 442378 - DNA, 75 bp, synthetic construct
  source 1..75: mol_type = other DNA
cagaaatacgcatacgaaacgaaggatggcaaatggctgataataagccatcaactggttgataaattaccagaa

SEQ ID NO: 442379 - DNA, 75 bp, synthetic construct
  source 1..75: mol_type = other DNA
ggcgtcattatcccgattggtatcgtcacatcgcttgtcggtgttccattatttattagtattattctgcgttat

SEQ ID NO: 442380 - DNA, 75 bp, synthetic construct
  source 1..75: mol_type = other DNA
gaaatattgcaaaagaaaaaacaatgcgtggatggtctggagattatgtgtgctgcgattgcggatacaacgact

SEQ ID NO: 442381 - DNA, 75 bp, synthetic construct
  source 1..75: mol_type = other DNA
ccacaaccgcgctatatcccgctcagccagccaatgcctttactggcaaacacaccgttcatcgtcaccggctcc

SEQ ID NO: 442382 - DNA, 75 bp, synthetic construct
  source 1..75: mol_type = other DNA
ccccccggatagcgtgccgttgtatctcaaacgactggaatattatcgccagctttatcggccgaagcaggttga

SEQ ID NO: 442383 - DNA, 75 bp, synthetic construct
  source 1..75: mol_type = other DNA
ctgatcggctggggctggtgctacgtgacgcacattttctttatatcgatgggcaccgttttgataacccggaga

SEQ ID NO: 442384 - DNA, 75 bp, synthetic construct
  source 1..75: mol_type = other DNA
tgattacccgttgtcactggcaagtgatatggtgctgccgtggccttggagcctacaacgctttatcaataacgt

SEQ ID NO: 442385 - DNA, 75 bp, synthetic construct
  source 1..75: mol_type = other DNA
cgctaccagatctcattcgcgctatcgtgcggccagtacagagtgatttcttgctggcggtagctgaggagggaa

SEQ ID NO: 442386 - DNA, 75 bp, synthetic construct
  source 1..75: mol_type = other DNA
ggctggcagaacaaaaagatgtgctgagcaccattctgaaaaccggcaaattaccgtccccacccacaggtcgtc

SEQ ID NO: 442387 - DNA, 75 bp, synthetic construct
  source 1..75: mol_type = other DNA
atatcctgcgggacttattacggtgagcaatgcggatacgatgcgggccattataggactgtagccgccgccgga

SEQ ID NO: 442388 - DNA, 75 bp, synthetic construct
  source 1..75: mol_type = other DNA
tttcctccctgttacgtataagtttgcttgcagcattatcggtagcctttgttgggccgattggttttattggtc

SEQ ID NO: 442389 - DNA, 75 bp, synthetic construct
  source 1..75: mol_type = other DNA
agcgaagcattatcacagacagaacgtgactatattcactattatcttgctgttcgttcaattgttttcaaactg

SEQ ID NO: 442390 - DNA, 75 bp, synthetic construct
  source 1..75: mol_type = other DNA
agaaaaagcgtttttcgacattcttgctcatatgcgcgataaatatcagttcacctatgacgatgaaaaaatgct

SEQ ID NO: 442391 - DNA, 75 bp, synthetic construct
  source 1..75: mol_type = other DNA
gcgcggtaaagatgacgacgagacgctttatgatttactgggcacaaaagaatatcgcaaagagctggataagca

SEQ ID NO: 442392 - DNA, 75 bp, synthetic construct
  source 1..75: mol_type = other DNA
ggcaccagcgaatacttgagcgcaaaagcgacgcgtaccgtttatcgcgataaaacaaaaaagttcgccggtagt

SEQ ID NO: 442393 - DNA, 75 bp, synthetic construct
  source 1..75: mol_type = other DNA
ataagtatttatacatatattatagaaggttatagctatgctattgagccaacctttcatctattatcaataatt

SEQ ID NO: 442394 - DNA, 75 bp, synthetic construct
  source 1..75: mol_type = other DNA
aactggcaatggtcgagcgcaacgaaaaaggacgccagatccgccgatacttcatcgagtgcgaaaagaaactac

SEQ ID NO: 442395 - DNA, 75 bp, synthetic construct
  source 1..75: mol_type = other DNA
gctggcttcccgccacgcgcaaattgtggcgcgtattgatacggtaaaacagcagtggcgcgacgcagtgggtga

SEQ ID NO: 442396 - DNA, 75 bp, synthetic construct
  source 1..75: mol_type = other DNA
agtttggcgatggcaatacataatgagagcgagcaacgtgatgggccatttatttctgtagattgtcagatgcta

SEQ ID NO: 442397 - DNA, 75 bp, synthetic construct
  source 1..75: mol_type = other DNA
gaagatggcattggaaccaatgtatatagtctttgtcgggaaacaaatttatatacacaactggaaggagcagaa

SEQ ID NO: 442398 - DNA, 75 bp, synthetic construct
  source 1..75: mol_type = other DNA
gctgcctgcgccgctgccgccgtaccgggtactgaccgggctggtggaccgcttcgggcgcacacagacgttcca

SEQ ID NO: 442399 - DNA, 75 bp, synthetic construct
  source 1..75: mol_type = other DNA
aacgggacctgacgggctggatgtcgctgtcacggaaaccggaagtgacctggtacggctgggacggcgaccggc

SEQ ID NO: 442400 - DNA, 75 bp, synthetic construct
  source 1..75: mol_type = other DNA
acgccactcatcagggttgaaaccgccaccggtgagctggcgaaaacgcagcgccgcagcctggcggatgcgctt

SEQ ID NO: 442401 - DNA, 75 bp, synthetic construct
  source 1..75: mol_type = other DNA
gggctaaacaggcgaacgacctggattacgccagcctgccggatagcgtagtggaacaggttcgcgctgcgtgga

SEQ ID NO: 442402 - DNA, 75 bp, synthetic construct
  source 1..75: mol_type = other DNA
cggaagaagggtataccctcgaccagttccgtaagcacctggagctgtacaaagatatcgacaaagcgaagctgc

SEQ ID NO: 442403 - DNA, 75 bp, synthetic construct
  source 1..75: mol_type = other DNA
accgaagaagaaattgctcaggctgctgttcgcttcgccactatgagcgacgaagacaaagcgcgtctgacccgt

SEQ ID NO: 442404 - DNA, 75 bp, synthetic construct
  source 1..75: mol_type = other DNA
tcgttgaagaaccgacgttaacaccgcatcagttcccgcgcggtgcgtcaccggggacgttcttgcacagtttgt

SEQ ID NO: 442405 - DNA, 75 bp, synthetic construct
  source 1..75: mol_type = other DNA
gttaagcaccatcacaagaagactgattacacaacatccggctttagtcgcgaggaagcgaagcaaattttaata

SEQ ID NO: 442406 - DNA, 75 bp, synthetic construct
  source 1..75: mol_type = other DNA
catggcgcaggtatgtgctgcgcaaatccgggactggctacaggccgggcagcggggcgaagcattgctgatgaa

SEQ ID NO: 442407 - DNA, 75 bp, synthetic construct
  source 1..75: mol_type = other DNA
aggccgcacaatggctgctgttagccgaacggcagatggatgaagcggcggtctttaccattcacggtttttgcc

SEQ ID NO: 442408 - DNA, 75 bp, synthetic construct
  source 1..75: mol_type = other DNA
tcttaatcagcagtcggttaacgatatgaatatgcgagcttcaactctgattgaacaagcgatggtcaggctgtt

SEQ ID NO: 442409 - DNA, 75 bp, synthetic construct
  source 1..75: mol_type = other DNA
acgggcctgacgttggccagcagatggcgctgcgtatgtatcaggacatggttgtaactgacgagaaatgcggat

SEQ ID NO: 442410 - DNA, 75 bp, synthetic construct
  source 1..75: mol_type = other DNA
tacaagggattatagagtgtagaaaaaatggacagtctttcgaccaggaacgacaccgggaaataataaaaatgc

SEQ ID NO: 442411 - DNA, 75 bp, synthetic construct
  source 1..75: mol_type = other DNA
tgccaccgcagaattgcgcggtcgtatccgtagcaatatccacgagttgcgcatcgcctgtctgcgtgaaaccac

SEQ ID NO: 442412 - DNA, 75 bp, synthetic construct
  source 1..75: mol_type = other DNA
gtcgatgctgcaggcattgccagcgtcgttgaagaaccgacgttaacaccgcatcagttcccgcgtggtgcgtca

SEQ ID NO: 442413 - DNA, 75 bp, synthetic construct
  source 1..75: mol_type = other DNA
atttccgcattcaggatcaggcgttctatcacgatcgccactcatttgaggctgttctggatcttaacgaagcgc

SEQ ID NO: 442414 - DNA, 75 bp, synthetic construct
  source 1..75: mol_type = other DNA
caaccctggcaggttaatgatgtttctacagcagagctgaatgcgaagacgttacaacgattgcccggcgataac

SEQ ID NO: 442415 - DNA, 75 bp, synthetic construct
  source 1..75: mol_type = other DNA
atccgcgactggctacaagccggacagcggggcgaagcgttgctgatgaacggcgacgaagcgcgtccggtgcgt

SEQ ID NO: 442416 - DNA, 75 bp, synthetic construct
  source 1..75: mol_type = other DNA
aggtgaaacgcagcctgcgatgaaaatgtggctgatggaaggcgaaagctgcggcgttggcgattatcaaagtac

SEQ ID NO: 442417 - DNA, 75 bp, synthetic construct
  source 1..75: mol_type = other DNA
gacgaacgcggctggctgacagacatcagccatatcagcgaagggcaccgggtgacggtgcattacgggtatgat

SEQ ID NO: 442418 - DNA, 75 bp, synthetic construct
  source 1..75: mol_type = other DNA
gcgcccttataaagaaacaaatctttctctacctgacgtgaattacaagagtttgcgccgtttacccaatttatt

SEQ ID NO: 442419 - DNA, 75 bp, synthetic construct
  source 1..75: mol_type = other DNA
atctcacgacagacgttgtctacagcggcgcaaacgcaactcttccccattactcttactatagcgatggtcgcg

SEQ ID NO: 442420 - DNA, 75 bp, synthetic construct
  source 1..75: mol_type = other DNA
gtttgcgccgtttacccaatttattaatagacccgacaacactagacaaatgggataaagtacctcctctgactg

SEQ ID NO: 442421 - DNA, 75 bp, synthetic construct
  source 1..75: mol_type = other DNA
atgactgacagtgaactgatgcagttaagcgaacaggttgggcaggcgctgaaagcccgtggcgcaaccgtaaca

SEQ ID NO: 442422 - DNA, 75 bp, synthetic construct
  source 1..75: mol_type = other DNA
atgattaatcgtaccaagctggagcacatcctcgaatatgccagacagcagaagcgctttggtcagcattgcaaa

SEQ ID NO: 442423 - DNA, 75 bp, synthetic construct
  source 1..75: mol_type = other DNA
atgattaatcgaaccaaactggaacacattctcgaatatgccaggcagcagaggcgctttggtcagcattgcaaa

SEQ ID NO: 442424 - DNA, 75 bp, synthetic construct
  source 1..75: mol_type = other DNA
tggagtgggtgggaaggtgcggtaatgcgttccaaactatattgttctactgagcctgtgtacgacttctggagc

SEQ ID NO: 442425 - DNA, 75 bp, synthetic construct
  source 1..75: mol_type = other DNA
caggaagcaacaactagccataaaaggggccgcagcccctaaagcttattatactaagcctgagctcggcatcca

SEQ ID NO: 442426 - DNA, 75 bp, synthetic construct
  source 1..75: mol_type = other DNA
cttacgctgcatcaggccctgaagcgggtggcagaagagggcgactgtgctgacaccgccaggagcctgcttggc

SEQ ID NO: 442427 - DNA, 75 bp, synthetic construct
  source 1..75: mol_type = other DNA
cgaaactttgtgaatgtagcgtcagccttgtaaaatctgtatgggctaaatttaaaaaagaaggaataaatcaca

SEQ ID NO: 442428 - DNA, 75 bp, synthetic construct
  source 1..75: mol_type = other DNA
taaacgcatcattgagtatcgttcaaggaagacgagtattgcggaaacagcgaaactttgtgaatgtagcgtcag

SEQ ID NO: 442429 - DNA, 75 bp, synthetic construct
  source 1..75: mol_type = other DNA
acgtcagaaagagggcatagaactggctaaacgcaaaggccggtatcagggccgaactgcagacttgctgcttca

SEQ ID NO: 442430 - DNA, 75 bp, synthetic construct
  source 1..75: mol_type = other DNA
tttccgcacacctgggtgacggatatcgatgccgaagcccatgtggtgaaaagtcagaataatcagtggcaatac

SEQ ID NO: 442431 - DNA, 75 bp, synthetic construct
  source 1..75: mol_type = other DNA
tcatggagattgccatgcgcaaggctggcaattctccggtaactacggatggctggataagctgtagtgatcgaa

SEQ ID NO: 442432 - DNA, 75 bp, synthetic construct
  source 1..75: mol_type = other DNA
tatttcccaggcggggttatcaataaagagaatttccagcgtgcacgcatggcggcagcacaaaaactggaaacc

SEQ ID NO: 442433 - DNA, 75 bp, synthetic construct
  source 1..75: mol_type = other DNA
ggcggcagcacaaaaactggaaactttaacctggcaatttcgtattcagggctggaacgtggcaatgggcgcttc

SEQ ID NO: 442434 - DNA, 75 bp, synthetic construct
  source 1..75: mol_type = other DNA
ccgcatccagacgatttatcagccggggagcttcacgccactcatcagagttgaaactgccaccggtgagctggc

SEQ ID NO: 442435 - DNA, 75 bp, synthetic construct
  source 1..75: mol_type = other DNA
ccgcgccagacccggagttacagctacagcaccaccggcaggctgaccggcgttcacaccaccgcagcgaatctg

SEQ ID NO: 442436 - DNA, 75 bp, synthetic construct
  source 1..75: mol_type = other DNA
ggatggtgccgggcgtcacttccggctggtactgaccacgcaggcgcagcgggcagaagaagcccggcagcaggc

SEQ ID NO: 442437 - DNA, 75 bp, synthetic construct
  source 1..75: mol_type = other DNA
ttccctacccgattgaaattatttccggtaatgaagaagcccgtctgatttttatgggcgtggaacatacccaac

SEQ ID NO: 442438 - DNA, 75 bp, synthetic construct
  source 1..75: mol_type = other DNA
ctattctcgttgaaagccgccggatgggttgtgtcagctttgcccagctttatttccctggcggggtcatcaata

SEQ ID NO: 442439 - DNA, 75 bp, synthetic construct
  source 1..75: mol_type = other DNA
gccgcgcagatggctccgggacatccttcgtcttcaccagctacctggcgaaagtgaacgaagaatggaaaaaca

SEQ ID NO: 442440 - DNA, 75 bp, synthetic construct
  source 1..75: mol_type = other DNA
cgccatcgtaattttgcatcgcttagtttaccgggcctttccgaagaacggaaaaccgtatttgtccctggactg

SEQ ID NO: 442441 - DNA, 75 bp, synthetic construct
  source 1..75: mol_type = other DNA
tctgtatagttggcacccatacgctgcgtcaggcgctgaacgccactgactttctgaaacgcgcggaaaaggtca

SEQ ID NO: 442442 - DNA, 75 bp, synthetic construct
  source 1..75: mol_type = other DNA
gctggaatgtggcaatgggcgcttccggcaccattaaagctgctcatgaagtgttgatggaaatgggcgagaaag

SEQ ID NO: 442443 - DNA, 75 bp, synthetic construct
  source 1..75: mol_type = other DNA
gcagagaagaaatccgtcttcatattgtttgcgatgttcctgatgaacttattgatttcacgtttgaatggaaag

SEQ ID NO: 442444 - DNA, 75 bp, synthetic construct
  source 1..75: mol_type = other DNA
tacatgttcgcggatgtttatttgctgacgaccaaggtcgatattctcggtgtatatctctacaaaaccgccttt

SEQ ID NO: 442445 - DNA, 75 bp, synthetic construct
  source 1..75: mol_type = other DNA
gaccaaggtcgatattctcggtgtatatctctacaaaaccgcctttgcctttaatgacttagggaaagcggcggc

SEQ ID NO: 442446 - DNA, 75 bp, synthetic construct
  source 1..75: mol_type = other DNA
gaatgaaagtacaacactttatatttccggagatgccagtgacaaagttgatttgggatctgatgatacaaaaag

SEQ ID NO: 442447 - DNA, 75 bp, synthetic construct
  source 1..75: mol_type = other DNA
acaggcgctgcagttgcttactgaaagagaactcaggcgagtccgccagcagcgtattgttgccagcggtgagaa

SEQ ID NO: 442448 - DNA, 75 bp, synthetic construct
  source 1..75: mol_type = other DNA
ttgtttaactggaaagccaccaaaaaaattaatttatggagatccagacattctgctttccgactattcagtttt

SEQ ID NO: 442449 - DNA, 75 bp, synthetic construct
  source 1..75: mol_type = other DNA
tttcagggatacggcacattgctattaatattttgacgaatgataaggtattcaaggcagggttaagacgtaaga

SEQ ID NO: 442450 - DNA, 75 bp, synthetic construct
  source 1..75: mol_type = other DNA
gcagaattattttcagggatacggcacatcgctattaatattttaacgaatgataaggttcaaggcagggttaag

SEQ ID NO: 442451 - DNA, 75 bp, synthetic construct
  source 1..75: mol_type = other DNA
cagggttaagacgtaagatgcgaaaagcagccatggacaggaactatctggcgtcagtccttgcggggagcgggc

SEQ ID NO: 442452 - DNA, 75 bp, synthetic construct
  source 1..75: mol_type = other DNA
ctttgcccctggggcaaaaaatgtctctgtagtggtgggtgttccggttccggacaatattcacccgatgaccaa

SEQ ID NO: 442453 - DNA, 75 bp, synthetic construct
  source 1..75: mol_type = other DNA
tctggaaagctttggctggccacattcagtggtgttaccacgacgaccgtaccagatgaaggggtcgctgcccgg

SEQ ID NO: 442454 - DNA, 75 bp, synthetic construct
  source 1..75: mol_type = other DNA
attcaaggcagggttaagacgtaagatgcgaaaagcagccatggacagaaactatctcgcgtcagtccttgcggg

SEQ ID NO: 442455 - DNA, 75 bp, synthetic construct
  source 1..75: mol_type = other DNA
tatacgttatacagcagtgtaagtggcgcaaatgtgtatattgataacaatattattgatgcgaatggtgtaatt

SEQ ID NO: 442456 - DNA, 75 bp, synthetic construct
  source 1..75: mol_type = other DNA
gtggatgtcacctttgaagatgaaaagggtggtaatcacaccgtgacgctggagaacggggataacggctggaca

SEQ ID NO: 442457 - DNA, 75 bp, synthetic construct
  source 1..75: mol_type = other DNA
gtggatgtcacctttgaagatgaaaagggtgttaagcacaccgtgacgctggagaacggggataacggctggaca

SEQ ID NO: 442458 - DNA, 75 bp, synthetic construct
  source 1..75: mol_type = other DNA
cagggaagaatgaaggtattgccggcttcgagaaagtggatatgactgttggcagcgatctgaaagctggcaata

SEQ ID NO: 442459 - DNA, 75 bp, synthetic construct
  source 1..75: mol_type = other DNA
gatggcaggccttttcgcattcctgtgtcagacactcagtcgtacaggcagttcggtaactccgtagtggtgccc

SEQ ID NO: 442460 - DNA, 75 bp, synthetic construct
  source 1..75: mol_type = other DNA
gcctttaatgccgagggtatggaaaaagttgttgctaccattacgggaacatctgataacgttacggcagctact

SEQ ID NO: 442461 - DNA, 75 bp, synthetic construct
  source 1..75: mol_type = other DNA
gtggatgtcacctttgaagatgaaaagggtggtaagcacaccgtgacgctggagaacggtgataacggctggaca

SEQ ID NO: 442462 - DNA, 75 bp, synthetic construct
  source 1..75: mol_type = other DNA
accgtgacgctggagaaaggggataacggctggacatccagtgacccgacgctgatcccggacagcaatggcgat

SEQ ID NO: 442463 - DNA, 75 bp, synthetic construct
  source 1..75: mol_type = other DNA
gcagtaacccggcgaagcccgggaatgtggttgattttgctgctgatacccagatcccgggggataccgatggtg

SEQ ID NO: 442464 - DNA, 75 bp, synthetic construct
  source 1..75: mol_type = other DNA
gtgatttaacactgaaatattcattatcctcatcagaagcggaaggcggggatttcggatatagcatcggtgtta

SEQ ID NO: 442465 - DNA, 75 bp, synthetic construct
  source 1..75: mol_type = other DNA
ctgcgttagatggcactgagcatagttatacgctttacagcagtgtaagtggagcaaatgtgtatattgataaca

SEQ ID NO: 442466 - DNA, 75 bp, synthetic construct
  source 1..75: mol_type = other DNA
cggacggcacgacggacacagtggagcacacgctgagcgcagatgaagtgactgcaggtaaagcagatgtgacca

SEQ ID NO: 442467 - DNA, 75 bp, synthetic construct
  source 1..75: mol_type = other DNA
cattgccaaagatccgagtggtaatgaaagtgacccgtcaaccgtgacgtcaaaaaccgatggtgtggcagatgc

SEQ ID NO: 442468 - DNA, 75 bp, synthetic construct
  source 1..75: mol_type = other DNA
tgcgagatcttatgcaacaggcccggcatgaacagcctcctgttaatgttagcgaagtggagacaatgcatcgcc

SEQ ID NO: 442469 - DNA, 75 bp, synthetic construct
  source 1..75: mol_type = other DNA
gcgtggagagcttgttgatgtgctgtgggggaactggaatggtcttccccgacagatgatgatgagctgccggaa

SEQ ID NO: 442470 - DNA, 75 bp, synthetic construct
  source 1..75: mol_type = other DNA
acggaaaatatcgcgttcacccgctggctgacacacctgcaggacggtgtactgctggatgagcaaaactgcctg

SEQ ID NO: 442471 - DNA, 75 bp, synthetic construct
  source 1..75: mol_type = other DNA
tgttctgaacggtgttccttctgcatatcactggtatacagaacggtatggcgtgaagtggccttgtgggtatga

SEQ ID NO: 442472 - DNA, 75 bp, synthetic construct
  source 1..75: mol_type = other DNA
ttagtgaaaagagtcacggcagagaagaaacccgtcttcatattgtttgcgatgtccctgatgagcttattgatt

SEQ ID NO: 442473 - DNA, 75 bp, synthetic construct
  source 1..75: mol_type = other DNA
gtggtactggccagcgtcgctgggaaggattaccggatgaggtcagggaaaccatcaccgtgcatttcaccgcaa

SEQ ID NO: 442474 - DNA, 75 bp, synthetic construct
  source 1..75: mol_type = other DNA
ggctgccggacgtggtgttgtatcgccggagaatatcgcgttcacccgctggctgaagcacctgcaggacggtgt

SEQ ID NO: 442475 - DNA, 75 bp, synthetic construct
  source 1..75: mol_type = other DNA
attgggcgctaaaatcgtcgctggataccctgaaccaggaaattcttgatatcaaaaatcaggagttatcgggaa

SEQ ID NO: 442476 - DNA, 75 bp, synthetic construct
  source 1..75: mol_type = other DNA
acatcaccacattaccgggcaggcagtggccaaaaattgaagcgtttattacctggctaagagaacaggtaaaaa

SEQ ID NO: 442477 - DNA, 75 bp, synthetic construct
  source 1..75: mol_type = other DNA
gttggtgcccgcattaggtgactttacacgccggtatccgtctatttcgctcaccgtgctcactggtaatgacaa

SEQ ID NO: 442478 - DNA, 75 bp, synthetic construct
  source 1..75: mol_type = other DNA
gaaagcgacgttattgcagaattaagccgccgtttcagctgcacgctggagcactggtatgccgaacagggctgt

SEQ ID NO: 442479 - DNA, 75 bp, synthetic construct
  source 1..75: mol_type = other DNA
atttctgtggctggcagttgtatgagcgcggagagctcgttgatgtgctgtggggggagctggaatggtcttccc

SEQ ID NO: 442480 - DNA, 75 bp, synthetic construct
  source 1..75: mol_type = other DNA
caaagtggaattaacgcacgaggggaaacgcgtttattgggcgctaaaatcgtcgctggataccctgaaccagga

SEQ ID NO: 442481 - DNA, 75 bp, synthetic construct
  source 1..75: mol_type = other DNA
atgccaaactggtgctcgaatcgtatgaatttttctggtgaaccggcacagattgctgagattaaacgactggcc

SEQ ID NO: 442482 - DNA, 75 bp, synthetic construct
  source 1..75: mol_type = other DNA
tctgctgcgtctggcattacccaatttagtaaacaagctattggcgggttaaacacagcgttaatggcactttca

SEQ ID NO: 442483 - DNA, 75 bp, synthetic construct
  source 1..75: mol_type = other DNA
cggatcgctgatcgcttccgttacaccgtggcaggttgagaagcccgccgcacgggttcccgtttcggcgtcgcc

SEQ ID NO: 442484 - DNA, 75 bp, synthetic construct
  source 1..75: mol_type = other DNA
ccatgaaaggcgtagccaaacaggtaaacggcttgcgtgacgacagcggcaaccgcaccccgcaatatgaagaaa

SEQ ID NO: 442485 - DNA, 75 bp, synthetic construct
  source 1..75: mol_type = other DNA
gcacgaacagccgcctgttaatgttagcgaactggagacaatgcatcgccttgtcaccgcagaaaaatttgatga

SEQ ID NO: 442486 - DNA, 75 bp, synthetic construct
  source 1..75: mol_type = other DNA
agtgaatggctttaacggtggtgttctgaacggtgttccttctgcatatcactggtatacggaacggtatggcgt

SEQ ID NO: 442487 - DNA, 75 bp, synthetic construct
  source 1..75: mol_type = other DNA
gacgcagcaggccggatcgctgatcgcttccgttacgccttggcaggttgagaagcccgccgcacggatgcctgt

SEQ ID NO: 442488 - DNA, 75 bp, synthetic construct
  source 1..75: mol_type = other DNA
cgtggcgaagccgatgtcggcagtattattacggcgcttaatctcgccatcaaaatgatttttaacacccaatga

SEQ ID NO: 442489 - DNA, 75 bp, synthetic construct
  source 1..75: mol_type = other DNA
attcccccaactcccctgcacaaccgcaaactgcgggcacattaacgctacttcctgtcgcgctacgtgaatctg

SEQ ID NO: 442490 - DNA, 75 bp, synthetic construct
  source 1..75: mol_type = other DNA
aacttcattcaggtggatttcgacacgccgtggtgtcagccggaaagcgacgttgttgcagaattaagccgccgt

SEQ ID NO: 442491 - DNA, 75 bp, synthetic construct
  source 1..75: mol_type = other DNA
cagcacatccgcgaagagttcaccgttgcccagctgcaggccgcacggcgcaaacgctcgcaactgaccgaccac

SEQ ID NO: 442492 - DNA, 75 bp, synthetic construct
  source 1..75: mol_type = other DNA
cttgaactggcgggacgtggcaaagccgatgtcggcagttttattacggcgcttaatctcgccatcaaaatgatt

SEQ ID NO: 442493 - DNA, 75 bp, synthetic construct
  source 1..75: mol_type = other DNA
cacatcggttgaccacggcaccgcgctggaactggcgggacgtggcaaagccgatgtcggcagttttattacggc

SEQ ID NO: 442494 - DNA, 75 bp, synthetic construct
  source 1..75: mol_type = other DNA
gaaagagataataaggtatacagaaatccccgctgggagggaaaagatgaaatattctgggggatgatgaattcg

SEQ ID NO: 442495 - DNA, 75 bp, synthetic construct
  source 1..75: mol_type = other DNA
ccgctgggtgcctggctggatgtgtacaccacgtccacaggcagagacggaaaccacggaataccgtgacaacca

SEQ ID NO: 442496 - DNA, 75 bp, synthetic construct
  source 1..75: mol_type = other DNA
atgcgcgactggtggcagccgacaaaagcaaacttcttcggacacctgaaaaagccgcagattatcgcagccctg

SEQ ID NO: 442497 - DNA, 75 bp, synthetic construct
  source 1..75: mol_type = other DNA
aagaaatcatatcccgcattggaatgtatggacatggtgcagggtataccgcagacgaggttaatgatctggctg

SEQ ID NO: 442498 - DNA, 75 bp, synthetic construct
  source 1..75: mol_type = other DNA
tgttgagacagggaataccgtagttgtgattgaacacgatatgcgtgcagtcgtgcaggctgactgggttatgga

SEQ ID NO: 442499 - DNA, 75 bp, synthetic construct
  source 1..75: mol_type = other DNA
atggcaataacaaagcaacgtgtagaagaaatcatatcccgtattgaaatgtatgggcatggcgcagggtataca

SEQ ID NO: 442500 - DNA, 75 bp, synthetic construct
  source 1..75: mol_type = other DNA
atgacagagaaacagacacggaaaaattgcacgcctatcaaggtgtactgtctgccagaagaaaaaatgttcatc

SEQ ID NO: 442501 - DNA, 75 bp, synthetic construct
  source 1..75: mol_type = other DNA
gctggcactggagcagatggcagaacaggggaaagcatggcccctgattgaaggcagtggcacgatttacggcat

SEQ ID NO: 442502 - DNA, 75 bp, synthetic construct
  source 1..75: mol_type = other DNA
tccctgtccgatatgttcggtgatctcagtactcaactgaataatctgcaggacacggcaacgtctgcattaagc

SEQ ID NO: 442503 - DNA, 75 bp, synthetic construct
  source 1..75: mol_type = other DNA
gaaaaatcagagatataatgcttgagccagatgatgagctatctgctatcaaccgtgctctgcgtaaggcctttt

SEQ ID NO: 442504 - DNA, 75 bp, synthetic construct
  source 1..75: mol_type = other DNA
gatgttttattatcaaaggataaatttttatcagccttagcatctcattatggcattgataattacactattcaa

SEQ ID NO: 442505 - DNA, 75 bp, synthetic construct
  source 1..75: mol_type = other DNA
caatacgcaatgctggaagcgataattgaattcttacgcgaggagtgctgcgtaaatagcaaaacacttggcgaa

SEQ ID NO: 442506 - DNA, 75 bp, synthetic construct
  source 1..75: mol_type = other DNA
ttacattcagcatcccttttcctaaaaaagtggactgcgccatgcttacccattctggtgatggtggtgcacctt

SEQ ID NO: 442507 - DNA, 75 bp, synthetic construct
  source 1..75: mol_type = other DNA
cgttccagcgcggcaagaacacaatgggctatttcagttacaggcgctttgttgctgctgacggcagcggcagga

SEQ ID NO: 442508 - DNA, 75 bp, synthetic construct
  source 1..75: mol_type = other DNA
actgttatggcctgcaagttttttcctggtccggtttcccggattgcaggcatgccagacacagcgccgtcaggc

SEQ ID NO: 442509 - DNA, 75 bp, synthetic construct
  source 1..75: mol_type = other DNA
ctgaagaagacgtcgaaggcaaaaaaaataaagatggtgcggaagtgcccaaagacagtgagtctggctttgttc

SEQ ID NO: 442510 - DNA, 75 bp, synthetic construct
  source 1..75: mol_type = other DNA
caacggggtttgatgaactggatgagatgacctgtggcctgcagcccggggatcttatccttctggcagcacgtc

SEQ ID NO: 442511 - DNA, 75 bp, synthetic construct
  source 1..75: mol_type = other DNA
tggcggcctgatgcttgataatgatcgctgggatgaagtggtgctgatgctcaggggggaggatttttctctggc

SEQ ID NO: 442512 - DNA, 75 bp, synthetic construct
  source 1..75: mol_type = other DNA
cacgtcttcgcagcagcatgatggatgatgaagagtgggcgagagtcacggcaaccatgggacgcttcatgaatg

SEQ ID NO: 442513 - DNA, 75 bp, synthetic construct
  source 1..75: mol_type = other DNA
gcggatgatcttgtcgacactgttgccagaaggccaattcagaaattgattgggggaatatggtacaacgtgggg

SEQ ID NO: 442514 - DNA, 75 bp, synthetic construct
  source 1..75: mol_type = other DNA
cactacgagctattagctctcgtagtgttaaacgttatggtgaaattagtgaaaatgtaggtacagaaactcgtc

SEQ ID NO: 442515 - DNA, 75 bp, synthetic construct
  source 1..75: mol_type = other DNA
gaacccggtttaaaggtgccttcctcactacgagccattagctctcgtaatgtaaaacggtttggtgaaattagt

SEQ ID NO: 442516 - DNA, 75 bp, synthetic construct
  source 1..75: mol_type = other DNA
aagtaacagcgcatggaataaagattggtgacactactattgattatgttgaagctgtgcggcgtcttaatgatg

SEQ ID NO: 442517 - DNA, 75 bp, synthetic construct
  source 1..75: mol_type = other DNA
aagcaacagccaatggtatacgaactggcagtatgacgattgattatcacgacgccatacgtcgtctggatgccg

SEQ ID NO: 442518 - DNA, 75 bp, synthetic construct
  source 1..75: mol_type = other DNA
cgctgaaattgctcaattcaataaagcaaagtgtgcaacgcaaatggcaccagattcaactttcaagatcgcatt

SEQ ID NO: 442519 - DNA, 75 bp, synthetic construct
  source 1..75: mol_type = other DNA
agataacaggcggcaggctgtcattgctggcactggagcagatggcagagcaggggaaagcatggcccctgattg

SEQ ID NO: 442520 - DNA, 75 bp, synthetic construct
  source 1..75: mol_type = other DNA
tacaagagtatatactggtgagggtaacgatacttttactatggatggtatgaatactgcattacgtgttatgta

SEQ ID NO: 442521 - DNA, 75 bp, synthetic construct
  source 1..75: mol_type = other DNA
ctgtgtggtgctgaaacccgcacgtcttaccccgctttctgtactgctgctaatggaaatcgtcggtgatttact

SEQ ID NO: 442522 - DNA, 75 bp, synthetic construct
  source 1..75: mol_type = other DNA
gcgaaacccacaagatgatgcttgagcattaccagcaaaccaagtgcctgctggtgagctactcggataaaccgt

SEQ ID NO: 442523 - DNA, 75 bp, synthetic construct
  source 1..75: mol_type = other DNA
aagcaaactggtactgcgatcccgaagcgcatatcttcaattcggacatccgcgatgtgacactcagtcataagg

SEQ ID NO: 442524 - DNA, 75 bp, synthetic construct
  source 1..75: mol_type = other DNA
agtgaagttaccggggttgccaaagatccgagcggtaatgaaagtgacccgtcaaccgtgacgtcaaaaactgat

SEQ ID NO: 442525 - DNA, 75 bp, synthetic construct
  source 1..75: mol_type = other DNA
ggatacggcagtgataatattacggtaactaaaaatctgaccggtaatatttctgtcggtgacaatgcggatacc

SEQ ID NO: 442526 - DNA, 75 bp, synthetic construct
  source 1..75: mol_type = other DNA
gacggaaagcactttttacctcagcaccgagaacgtatcgttttggtcggtttccgtcgtgatctgaacattcac

SEQ ID NO: 442527 - DNA, 75 bp, synthetic construct
  source 1..75: mol_type = other DNA
aagccaactggtttaacgatgcgcaggcacatactttcaatctcgatattcgggaagtcacgctcagtgataaac

SEQ ID NO: 442528 - DNA, 75 bp, synthetic construct
  source 1..75: mol_type = other DNA
aaaaatgactggagccgagagactcttaatcgctggattaatggtaagtatacacctaagttgctgacgtcggca

SEQ ID NO: 442529 - DNA, 75 bp, synthetic construct
  source 1..75: mol_type = other DNA
cgcaaaacattattccggtgacgctggagttgggcggtaagtcgccaaatatcttctttgctgatgtgatggatg

SEQ ID NO: 442530 - DNA, 75 bp, synthetic construct
  source 1..75: mol_type = other DNA
atgatgctggagcattaccagcaaaccaagtgcctgctggtgagctactcggataaaccgttggggctgttctga

SEQ ID NO: 442531 - DNA, 75 bp, synthetic construct
  source 1..75: mol_type = other DNA
gacggcaagcctttccgaattccggtttctgacacgcagtcatatcgtcagttcggtaactccgtcgtggttcct

SEQ ID NO: 442532 - DNA, 75 bp, synthetic construct
  source 1..75: mol_type = other DNA
ctattgatgaacaattaaaaatatcacaggcagttgactcgttactttcttttactcaaaaaagtgatttaagca

SEQ ID NO: 442533 - DNA, 75 bp, synthetic construct
  source 1..75: mol_type = other DNA
atcgatgctttggttaatcagaaccgcagagtcccgaacatgaagaaccgtgtcgatgaagctactgaacgtgca

SEQ ID NO: 442534 - DNA, 75 bp, synthetic construct
  source 1..75: mol_type = other DNA
ctgaataatctgcaggaaacggcaacgtctgccttaagcgatatcagtaaaacggtgggagggctgctgtcgtga

SEQ ID NO: 442535 - DNA, 75 bp, synthetic construct
  source 1..75: mol_type = other DNA
agataacaggcggcaggctgtcgttgctggcactggagcagatggcagaacaggggaaagcatggcccctgattg

SEQ ID NO: 442536 - DNA, 75 bp, synthetic construct
  source 1..75: mol_type = other DNA
tggcgacatgcggcaaacagccgggtaaaccgtcgtccgtccacgcaatttctgggaccggacaacgacatgctg

SEQ ID NO: 442537 - DNA, 75 bp, synthetic construct
  source 1..75: mol_type = other DNA
aggttcatacactggtgccagtcaggcttcatcaatggcaattgctgagctttcagcattgacaagcttatcttt

SEQ ID NO: 442538 - DNA, 75 bp, synthetic construct
  source 1..75: mol_type = other DNA
catcatctctcatcgctgatatcagtctatctggtacgccaggatcgccagggtagaacgctctattgtcatgct

SEQ ID NO: 442539 - DNA, 75 bp, synthetic construct
  source 1..75: mol_type = other DNA
aaactgctgtttctcggatcgtcctgtatctacccgaaactggcaaaacagccgatggcagaaagcgagttgttg

SEQ ID NO: 442540 - DNA, 75 bp, synthetic construct
  source 1..75: mol_type = other DNA
gctgtcgctcacccgcgttgatgaatcactggccgcgctttatggcgatatcggtaaacaggcggaatcgctcat

SEQ ID NO: 442541 - DNA, 75 bp, synthetic construct
  source 1..75: mol_type = other DNA
gctggcactggagcagatggcagaacaggggaaagcatggcccctgattgaaggcagcggcacgatttatggcat

SEQ ID NO: 442542 - DNA, 75 bp, synthetic construct
  source 1..75: mol_type = other DNA
tcgctcgcggccatgtatggcgacctgaaaacgcaggcggataatctggtcacgtcagctagtgaatgggcggga

SEQ ID NO: 442543 - DNA, 75 bp, synthetic construct
  source 1..75: mol_type = other DNA
gatcaccctcaaacgggttgatgagtcgctgtctgacatgttcgggagcctgagtgaccagctcagcaacctgca

SEQ ID NO: 442544 - DNA, 75 bp, synthetic construct
  source 1..75: mol_type = other DNA
cgcatgacaacttccacccgagtaattcgcatgtgatccctgcattgctgcgtcgcttccacgaggcgacggcac

SEQ ID NO: 442545 - DNA, 75 bp, synthetic construct
  source 1..75: mol_type = other DNA
aaccatgattgttgagcgttacggctcactaggcggcgtattgacgcaggttggtgtggaaagttttgcctggta

SEQ ID NO: 442546 - DNA, 75 bp, synthetic construct
  source 1..75: mol_type = other DNA
atgcaggcgattgaagcgttgcgtcaattccagccaggatttgaacaggcgcaattaaaaaatttcggtatgacg

SEQ ID NO: 442547 - DNA, 75 bp, synthetic construct
  source 1..75: mol_type = other DNA
tggcacttcattaacatgcgtatctggccgcgaatggttgatggggtagggatcctgcgtggtatcgaagctaac

SEQ ID NO: 442548 - DNA, 75 bp, synthetic construct
  source 1..75: mol_type = other DNA
agaacgacaaagtggtgactcaggcgacgcagaacgatccgcgcgtcaccaaagtggggaactttctgcgccgca

SEQ ID NO: 442549 - DNA, 75 bp, synthetic construct
  source 1..75: mol_type = other DNA
gatcgccactatcgccagcggcaatgtgcatataataagccatcccggaaacccgaacgtagtcaacccccaata

SEQ ID NO: 442550 - DNA, 75 bp, synthetic construct
  source 1..75: mol_type = other DNA
acgcgtgaatcacggcttattgagggggaaatacgtattgctgatgattacgtccttaatcaggggcgttgttcg

SEQ ID NO: 442551 - DNA, 75 bp, synthetic construct
  source 1..75: mol_type = other DNA
gcgtggccctgacttcattattcgccagcgatgaactggcaaaaaacggcccgtatttctgggggctggcctgtg

SEQ ID NO: 442552 - DNA, 75 bp, synthetic construct
  source 1..75: mol_type = other DNA
ccatatttctgggggctggcctgtggcgtgcctgcctttatctggtcactggtcggttcggtgcgctggctggta

SEQ ID NO: 442553 - DNA, 75 bp, synthetic construct
  source 1..75: mol_type = other DNA
gtcatccctgtattaaccaataaaccggttaccggacgtctatccgaagttttttcccgtctgttcagcgatatc

SEQ ID NO: 442554 - DNA, 75 bp, synthetic construct
  source 1..75: mol_type = other DNA
gcgcattttgaatgtttctccacgccgcttactgaacttccttgaatctcgcggtatggcaccgattgcggaatt

SEQ ID NO: 442555 - DNA, 75 bp, synthetic construct
  source 1..75: mol_type = other DNA
cggtgcagccagatgccatatccggcatatggactgccgaactggacagggaacagcgtaccgcgttgttatccc

SEQ ID NO: 442556 - DNA, 75 bp, synthetic construct
  source 1..75: mol_type = other DNA
ccgtatttctgggggctggcctgtggcgtgcctgtctttatctggtcactggccggttcggtgcgctggctggta

SEQ ID NO: 442557 - DNA, 75 bp, synthetic construct
  source 1..75: mol_type = other DNA
ggggatacattcgagaaccccagccttcgcacaacggctgaaagaaattatgaaagtacatgggtatcatagtct

SEQ ID NO: 442558 - DNA, 75 bp, synthetic construct
  source 1..75: mol_type = other DNA
acggcgaggcacgctccatgctattgcttaatcttatcaataaagaaattaagcacagcgtgaagaacaccgagt

SEQ ID NO: 442559 - DNA, 75 bp, synthetic construct
  source 1..75: mol_type = other DNA
cgccagcgatagtcccatcggcggtgattcatcagctatcggtatataaaccgaaagacattgtcgatccggcaa

SEQ ID NO: 442560 - DNA, 75 bp, synthetic construct
  source 1..75: mol_type = other DNA
aaatggaagaaaatgacatctttcttgatgatgagatcaaacatcaaagagccaagaataaagagtcttttggcg

SEQ ID NO: 442561 - DNA, 75 bp, synthetic construct
  source 1..75: mol_type = other DNA
attaaaatttttgcatggtggtataccggttcggtgagtattcttgccgcgttggtcgattcgttagttgatatc

SEQ ID NO: 442562 - DNA, 75 bp, synthetic construct
  source 1..75: mol_type = other DNA
ccgaaggaatgtcgcctgtgttgggttatggaatgtttatcttcggtctgcttggctattttggcctggaccgca

SEQ ID NO: 442563 - DNA, 75 bp, synthetic construct
  source 1..75: mol_type = other DNA
acgtactgcagtcagtgagccattgttccccaactacctgtttgtggaatttgatccagaagtgattcataccac

SEQ ID NO: 442564 - DNA, 75 bp, synthetic construct
  source 1..75: mol_type = other DNA
aggcgacggcgtttattgttacctcgcgcatcaaacgtcacccgcagaagtggaacccaaaatcgctgcaattta

SEQ ID NO: 442565 - DNA, 75 bp, synthetic construct
  source 1..75: mol_type = other DNA
gccgagtgtgggcagtgcgccatttggggtactggcggacaatttgcgctacccgattttgcataaactgaaaga

SEQ ID NO: 442566 - DNA, 75 bp, synthetic construct
  source 1..75: mol_type = other DNA
agctgttgctgaagctgctgctaagtatcaggtggcgctggaaatcaataactcctcattcttacattcgcgtaa

SEQ ID NO: 442567 - DNA, 75 bp, synthetic construct
  source 1..75: mol_type = other DNA
tggaacccaaaatcgctgcaatttatgagcgtttctgagcttaacgaaattcgcgatgtatttgatttccagtca

SEQ ID NO: 442568 - DNA, 75 bp, synthetic construct
  source 1..75: mol_type = other DNA
gttaaaccaaacctggtatcaggtccgtattggcgatcgactggcctatatcagcgcgctggatgcccaacccga

SEQ ID NO: 442569 - DNA, 75 bp, synthetic construct
  source 1..75: mol_type = other DNA
tggaacccaaaatcgctccaatttatgagcgtttctgagcttaacgaaattcgcgatgtttttgattttcagtca

SEQ ID NO: 442570 - DNA, 75 bp, synthetic construct
  source 1..75: mol_type = other DNA
cggttacaagagctggcgcgcctacttggcggcagtgaagtcacacgcaacacgctggcgaacgcgaaagaacta

SEQ ID NO: 442571 - DNA, 75 bp, synthetic construct
  source 1..75: mol_type = other DNA
gacaggggtatctcaaaacaatctcaaaaattatgaaatattgggaagaatgatacctggagaaacgttactcct

SEQ ID NO: 442572 - DNA, 75 bp, synthetic construct
  source 1..75: mol_type = other DNA
tcacaaaataaaatttaatggttcccttgaggactatataaacatggggcgaaacattattttttacataaaaat

SEQ ID NO: 442573 - DNA, 75 bp, synthetic construct
  source 1..75: mol_type = other DNA
gatagcgtaattattatctcatcaatcaccccaataaaaaacgaaactttaaaaatatatataaactcttttttt

SEQ ID NO: 442574 - DNA, 75 bp, synthetic construct
  source 1..75: mol_type = other DNA
tgccgctgtacgacacgccgctctccggggtgaatcgtattatcaaacggctggaggatatcgtgttggcgctgg

SEQ ID NO: 442575 - DNA, 75 bp, synthetic construct
  source 1..75: mol_type = other DNA
gccgggcaaattgaaccggctctctctcttgatgggtcagagactacggcaacgtcgcgccgctccgtccgcaaa

SEQ ID NO: 442576 - DNA, 75 bp, synthetic construct
  source 1..75: mol_type = other DNA
ttgcgctcattgctaaaaagcatggtatagccctggatgaaaccgatccgattatggtcgttcctaccctgcttc

SEQ ID NO: 442577 - DNA, 75 bp, synthetic construct
  source 1..75: mol_type = other DNA
ggcccgtcgtatcatctttgcggtgatgatcccggcgttgctgatctcctacgtcatctcgtcgctattctatat

SEQ ID NO: 442578 - DNA, 75 bp, synthetic construct
  source 1..75: mol_type = other DNA
atgaatagactgacattttttattgcaggtggcgtcctcctgctttccggttgcgccggaacgaactctgatttt

SEQ ID NO: 442579 - DNA, 75 bp, synthetic construct
  source 1..75: mol_type = other DNA
cagaccgtcaccgcgaccactccgtccggcagcagacctgcggtgacagcacatccggagcagaaactgctggca

SEQ ID NO: 442580 - DNA, 75 bp, synthetic construct
  source 1..75: mol_type = other DNA
aaactcttttttttgctcacctgaagaaagtggaaatgaattttcaactgctagcgggatatatcataagataaa

SEQ ID NO: 442581 - DNA, 75 bp, synthetic construct
  source 1..75: mol_type = other DNA
aacgtcagcgacacgctggccttcttcttcattgccttctggcgcagcccggatgcctttatggctgaacactgg

SEQ ID NO: 442582 - DNA, 75 bp, synthetic construct
  source 1..75: mol_type = other DNA
tccagtaactatctggttcagcttcccgtctccattttgggtttccataccacctggggcgcgtttagctttccg

SEQ ID NO: 442583 - DNA, 75 bp, synthetic construct
  source 1..75: mol_type = other DNA
gagcggggcgcttaaagtcggttgatgcggtaatcgtcaacggtggtgtccctcgcagcggtgaaatccccatgc

SEQ ID NO: 442584 - DNA, 75 bp, synthetic construct
  source 1..75: mol_type = other DNA
ctgctacgtcagcttggtgaatcaacccaggtgatgtgtgttacccacctgccacaagtcgcaggatgcggtcat

SEQ ID NO: 442585 - DNA, 75 bp, synthetic construct
  source 1..75: mol_type = other DNA
cgtctgcaggaactggcgcgcctacttggcggtagtgaagtcactcgcaacacgctggcgaacgcgaaagaacta

SEQ ID NO: 442586 - DNA, 75 bp, synthetic construct
  source 1..75: mol_type = other DNA
ctgatcgcattgagtttcgggtaactaccaacccgggtcagccaatgcagccaattgctaaagtcgcttctggcg

SEQ ID NO: 442587 - DNA, 75 bp, synthetic construct
  source 1..75: mol_type = other DNA
aatccgcagcccggcgagtttgaacaaatcgacgaagagtacaaacgtctggctaacagcggtcaattgcttacg

SEQ ID NO: 442588 - DNA, 75 bp, synthetic construct
  source 1..75: mol_type = other DNA
aaaattcctgcttgatggctatgccaatgaaacctctctactccaggaaatgaccgcacgttatcagttgtggca

SEQ ID NO: 442589 - DNA, 75 bp, synthetic construct
  source 1..75: mol_type = other DNA
gcgcgaactgggtcagttgctcatccagatccacggtcagcatgctcatcagttactcaccaaagccgagcacca

SEQ ID NO: 442590 - DNA, 75 bp, synthetic construct
  source 1..75: mol_type = other DNA
gtctgctggttgccctgaacaaaacccgcccttataccgccagcgagacgctgctgctggaagtgtcccgcgcca

SEQ ID NO: 442591 - DNA, 75 bp, synthetic construct
  source 1..75: mol_type = other DNA
ggccaactacatgccgcacaataaacgcagcggtgatttactggcgcggctgggatttgaaaaagaaggctatgc

SEQ ID NO: 442592 - DNA, 75 bp, synthetic construct
  source 1..75: mol_type = other DNA
ttatccgctgttattgtcggcagataccaccacagcacaggcgggtgatgaacctgtgttgatttatcaacgcac

SEQ ID NO: 442593 - DNA, 75 bp, synthetic construct
  source 1..75: mol_type = other DNA
gaagccgacatggtgcgtaccggcgctgctcgcgctgacctgtgcgcccgtttttctctgaaagatacgccagcg

SEQ ID NO: 442594 - DNA, 75 bp, synthetic construct
  source 1..75: mol_type = other DNA
ctgctggctttagggttcagtaaaggcactacgctggcgtttgtgatggcggccggattcattgccgataccgcc

SEQ ID NO: 442595 - DNA, 75 bp, synthetic construct
  source 1..75: mol_type = other DNA
gtgcgcctgcgttatcgactggagatgagcgataacctgagcgccgccgaatcccaggcgttgaatcgtgatatc

SEQ ID NO: 442596 - DNA, 75 bp, synthetic construct
  source 1..75: mol_type = other DNA
gtgacggtattgaccattatctggccccttcccgggcgcaaccccggtcttccgcagccgtgaccggtgactacc

SEQ ID NO: 442597 - DNA, 75 bp, synthetic construct
  source 1..75: mol_type = other DNA
tccggtctggttgatgcatagcgatcgtgttggctatgaaacgcttggccgtatctggcagtggctaaaaggttc

SEQ ID NO: 442598 - DNA, 75 bp, synthetic construct
  source 1..75: mol_type = other DNA
tgccgatggctttgcagcaaaattaggtgtcggaccgggaaacatttttcgaggatgcattgcacataataatgc

SEQ ID NO: 442599 - DNA, 75 bp, synthetic construct
  source 1..75: mol_type = other DNA
cggtttatgcagcaacgggttctaaacgcacggcgattctgtgggcggggatttctggactggcagaaattcttg

SEQ ID NO: 442600 - DNA, 75 bp, synthetic construct
  source 1..75: mol_type = other DNA
cctgaaggtctggcagtggcaggcccggtttatgcggcaacggggtctaaacgcaccgcgattctgtgggcgggg

SEQ ID NO: 442601 - DNA, 75 bp, synthetic construct
  source 1..75: mol_type = other DNA
atgcgttcatttccggcatcagcctgtcgtgccggccgtctggtcggtactgtggggatgctgtttctttccacc

SEQ ID NO: 442602 - DNA, 75 bp, synthetic construct
  source 1..75: mol_type = other DNA
ggtgaaccatgtgaacttcgcgttactggatctgttcggataccagtttgccccacgctatgcccaggttggcaa

SEQ ID NO: 442603 - DNA, 75 bp, synthetic construct
  source 1..75: mol_type = other DNA
tacctatgatcagctcagcactatccaggcgaactatcttcgcctggaaacattgaatgctgctaacgacaacat

SEQ ID NO: 442604 - DNA, 75 bp, synthetic construct
  source 1..75: mol_type = other DNA
ctgtagaccctttaatctcacgccaaaagagaacgaacggatttaccaacgtgttttccagctctgcaactacca

SEQ ID NO: 442605 - DNA, 75 bp, synthetic construct
  source 1..75: mol_type = other DNA
aaaagatttatttttcacacgagatgatagtggaaatattatctatcctgatttttttcttaatatcattcataa

SEQ ID NO: 442606 - DNA, 75 bp, synthetic construct
  source 1..75: mol_type = other DNA
gttactgcatctgtttgtggatgagaacattgatgataatcaacccttctcagtagtcagacaacaggcattgaa

SEQ ID NO: 442607 - DNA, 75 bp, synthetic construct
  source 1..75: mol_type = other DNA
ttgttgatcctgtggaggacaatcaccttcccaatctggatcacggcctgcttagtgattctggtgtgcgccacc

SEQ ID NO: 442608 - DNA, 75 bp, synthetic construct
  source 1..75: mol_type = other DNA
atctggaactgggctttggcatcgcgctggccgttgcattacacaatattcctgaaggtctggcagtggcgggtc

SEQ ID NO: 442609 - DNA, 75 bp, synthetic construct
  source 1..75: mol_type = other DNA
cgacagatgacgatgagctgccggaagtcaccggacctgcgtggatagtccaatgtggcgcattatggcggatga

SEQ ID NO: 442610 - DNA, 75 bp, synthetic construct
  source 1..75: mol_type = other DNA
atgccaaactggtgtagtaaccgtatgtatttttctgccgaaccggcacagattactgagattaaacgactggcc

SEQ ID NO: 442611 - DNA, 75 bp, synthetic construct
  source 1..75: mol_type = other DNA
tgctgcgtcgcttccacgaggcgacggcacagaatgcaccggacgtggtggtgtggggcagcggtacgccgatgc

SEQ ID NO: 442612 - DNA, 75 bp, synthetic construct
  source 1..75: mol_type = other DNA
caccctcagcgcaactgactcatcactttctgatggatgaagaaatcctgcctgtatgtagcccggagtacgctc

SEQ ID NO: 442613 - DNA, 75 bp, synthetic construct
  source 1..75: mol_type = other DNA
tggaatggtcttccccgacagatgacgatgagctgccggaagtcaccggacctgcgtggatagtcgacaaggtgg

SEQ ID NO: 442614 - DNA, 75 bp, synthetic construct
  source 1..75: mol_type = other DNA
atttctgtggctggcagttgtatgagcgcggagagctcgttgatgtgctgtgggggggaactggaatggtcttcc

SEQ ID NO: 442615 - DNA, 75 bp, synthetic construct
  source 1..75: mol_type = other DNA
tgccggaaaaaaccatgccgtttgacctgctgacggttttgccgacccgcctggatattgaagtgaatggcttta

SEQ ID NO: 442616 - DNA, 75 bp, synthetic construct
  source 1..75: mol_type = other DNA
acaccagcttattatcataatactagtaatcgcgacggacaaacaattgttatcgcaggttctggtgcgtatgcg

SEQ ID NO: 442617 - DNA, 75 bp, synthetic construct
  source 1..75: mol_type = other DNA
cggaaagcgacgttgttgcagaattaagccgccgtttcggctgcacgctggagcactggtacgccgaacagggct

SEQ ID NO: 442618 - DNA, 75 bp, synthetic construct
  source 1..75: mol_type = other DNA
ctggtcatcgcgggatggtcggttccgctatcacccgtcagctcgaacagcgcggtgatgtggaactggtattac

SEQ ID NO: 442619 - DNA, 75 bp, synthetic construct
  source 1..75: mol_type = other DNA
aaacgatttcaaaagttgttggttatcaaggggaggtcgtttttgattctaccaaacctgacggcactcctagaa

SEQ ID NO: 442620 - DNA, 75 bp, synthetic construct
  source 1..75: mol_type = other DNA
acggcggtgttctgaacggtgttccttctgcatatcactggtatacggaacggtatggcgtgaagtggccttgtg

SEQ ID NO: 442621 - DNA, 75 bp, synthetic construct
  source 1..75: mol_type = other DNA
cagcgttacatgctggtggtactgctgggctatttcaaagccaagccggtggtgctgaatcccggctttcatcag

SEQ ID NO: 442622 - DNA, 75 bp, synthetic construct
  source 1..75: mol_type = other DNA
gcggacgacggaaaagtcatcctgatggtgtcatctgaactacctgaaattatcaccgtctgcgaccgcatcgcc

SEQ ID NO: 442623 - DNA, 75 bp, synthetic construct
  source 1..75: mol_type = other DNA
ggatggcttacatcactgaaagccgccgggataacggtttttttcccaacttttccatcgctcagaacatggcga

SEQ ID NO: 442624 - DNA, 75 bp, synthetic construct
  source 1..75: mol_type = other DNA
atggtgaattaccgtcttatatcactggcgctaacacagcagtccagcgcgaacgtgactcgcagtttttctccg

SEQ ID NO: 442625 - DNA, 75 bp, synthetic construct
  source 1..75: mol_type = other DNA
ttgctggcgctggccctcgtcgttcttgccattgtggtacaaatggcggtaaccatggtgctgcatggtcaggtc

SEQ ID NO: 442626 - DNA, 75 bp, synthetic construct
  source 1..75: mol_type = other DNA
gtggtgtgctggcatggttaatcctcggtagcatgatttctccggtggtcatggcggcaatcatggcggcggttg

SEQ ID NO: 442627 - DNA, 75 bp, synthetic construct
  source 1..75: mol_type = other DNA
acgtaccgcgattctgtgggcgggcatttccgggctggcagaaattcttggtggtgtgctggcatggttaatcct

SEQ ID NO: 442628 - DNA, 75 bp, synthetic construct
  source 1..75: mol_type = other DNA
gaaatgcttcctgccgcattagccgccgaaggaatgtcgcctgtgttgggttatggaatgtttatcttcggtctg

SEQ ID NO: 442629 - DNA, 75 bp, synthetic construct
  source 1..75: mol_type = other DNA
ccgggatcggatgtgattattcatcaggacccttgttccgtcgtacccagggaggggaaacggtctatgctttca

SEQ ID NO: 442630 - DNA, 75 bp, synthetic construct
  source 1..75: mol_type = other DNA
ggtggcggatcaggtagagcaggctattttacggcgttttccgggatcggatgtgattatccatcaggacccctg

SEQ ID NO: 442631 - DNA, 75 bp, synthetic construct
  source 1..75: mol_type = other DNA
atggtgaattaccgtcttatatcactggagctaacaggaagcagtgtaggcatattttttccggaaggcagcagg

SEQ ID NO: 442632 - DNA, 75 bp, synthetic construct
  source 1..75: mol_type = other DNA
acctggagctgggatttggcatcgcactggccgtcgcgttgcacaatatccctgaaggtctggcagtggcaggcc

SEQ ID NO: 442633 - DNA, 75 bp, synthetic construct
  source 1..75: mol_type = other DNA
atttccggactggctgaaattctcggtggcgttctggcgtggttaattcttggcagcatgatttctccggtagtc

SEQ ID NO: 442634 - DNA, 75 bp, synthetic construct
  source 1..75: mol_type = other DNA
tccgcaggatgagctggataaaattttcgccatgtattaccaggttaaagatagtcatggtggtaaacctgccac

SEQ ID NO: 442635 - DNA, 75 bp, synthetic construct
  source 1..75: mol_type = other DNA
aaatcagtcagtctgaaagcgaatgttcagccgtcaaatgcgacgaataaggctgttacctggtcttccaaaaat

SEQ ID NO: 442636 - DNA, 75 bp, synthetic construct
  source 1..75: mol_type = other DNA
tcagcgcaactgactcatcactttctgatggatgaagaaatcctgcctgtatgtagcccggaatacgctcaaaga

SEQ ID NO: 442637 - DNA, 75 bp, synthetic construct
  source 1..75: mol_type = other DNA
gtggccaaaaattgaggcatttattacctggctaagagagcaggtatgtcagtcttgtcagtaccggtgataccg

SEQ ID NO: 442638 - DNA, 75 bp, synthetic construct
  source 1..75: mol_type = other DNA
ggtgatgctcgctggggttgttctggcctggctggcgtcgccagaaagccacggcaattcagcattgcgcgtctg

SEQ ID NO: 442639 - DNA, 75 bp, synthetic construct
  source 1..75: mol_type = other DNA
tggcttgtgtcgcgatcatcgtcgtattggcctttgctacccgttttctgtttagcacgccgacgaatatgatac

SEQ ID NO: 442640 - DNA, 75 bp, synthetic construct
  source 1..75: mol_type = other DNA
aattcaacaacctctattctggggggggggggcgcacttttgatcgtttaccataaaaaatggttaattctggtt

SEQ ID NO: 442641 - DNA, 75 bp, synthetic construct
  source 1..75: mol_type = other DNA
tctgcaacagctggtcgaggacgcgaaagcgggcaagattcataacgtctatatcgcgatgcaaatgtgcgacgg

SEQ ID NO: 442642 - DNA, 75 bp, synthetic construct
  source 1..75: mol_type = other DNA
agaaattacgatctatccgtatatcaacgaaacaattatttctggcggcaccgcgcatgaaggcggggcggtcca

SEQ ID NO: 442643 - DNA, 75 bp, synthetic construct
  source 1..75: mol_type = other DNA
caacttcactggagcgccggctggcgcagacctgtagcgggatttctgatctgcaggtgccgctgcgtgacttgt

SEQ ID NO: 442644 - DNA, 75 bp, synthetic construct
  source 1..75: mol_type = other DNA
gtggccaaaaattgaggcatttattacctggctaagagagcaggtatgtcagtcttgtcagtatcggcgataccg

SEQ ID NO: 442645 - DNA, 75 bp, synthetic construct
  source 1..75: mol_type = other DNA
ccccagtgcggtaagtcaccgtatcaatcagctggaagaagaattaggtattcagttgtttgttcgttcccatcg

SEQ ID NO: 442646 - DNA, 75 bp, synthetic construct
  source 1..75: mol_type = other DNA
aaggcgggcaagattcataacgtctatatcgccatgcagatgtgcgacggcgcgcgagtgaaaaagctggtacat

SEQ ID NO: 442647 - DNA, 75 bp, synthetic construct
  source 1..75: mol_type = other DNA
atgcgcacggctggtcgtgggcgagcggggcgctgcttgatgatttaatgccctggcgttggccgcgaattatgg

SEQ ID NO: 442648 - DNA, 75 bp, synthetic construct
  source 1..75: mol_type = other DNA
ggcgtgctgtttcagcaagtgctgcgtaacccgctggcggaaccgacgacgttgggcgttgctacaggcgcgcaa

SEQ ID NO: 442649 - DNA, 75 bp, synthetic construct
  source 1..75: mol_type = other DNA
attgtctttggcgtcgcgtgggggaaacggctgtcgccggtaacgctgattctcgcggggctggtagtgagcctt

SEQ ID NO: 442650 - DNA, 75 bp, synthetic construct
  source 1..75: mol_type = other DNA
cagtttgctgcgctggcaggggcttgtgttgttggcttaattgtctttggcgtcgcgtgggggaaacggctgtcg

SEQ ID NO: 442651 - DNA, 75 bp, synthetic construct
  source 1..75: mol_type = other DNA
tgccgcgtctggctatttcgctgttggttggcgcaggtctggggctggtgggcgtgctgtttcagcaagtgttgc

SEQ ID NO: 442652 - DNA, 75 bp, synthetic construct
  source 1..75: mol_type = other DNA
gattgccgctgcggcgttgacctggatgaacttctcgcaggcgctgccgcgtagtcagtgggcgcaggctgcctg

SEQ ID NO: 442653 - DNA, 75 bp, synthetic construct
  source 1..75: mol_type = other DNA
catcagtgcgctgctggtgaacgcggtggggattatcggctttatcgggttgttcgcgccgctgctggcgaaaat

SEQ ID NO: 442654 - DNA, 75 bp, synthetic construct
  source 1..75: mol_type = other DNA
gccggtaacgctgatcctcgcggggctggtagtgagcctttattgcggcgcaatcaatcagttactggttatctt

SEQ ID NO: 442655 - DNA, 75 bp, synthetic construct
  source 1..75: mol_type = other DNA
gcgaattatggcggcgctgtttgcgggcgtcatgctggcggtggcgggctgtattattcagcggctgaccggaaa

SEQ ID NO: 442656 - DNA, 75 bp, synthetic construct
  source 1..75: mol_type = other DNA
cgttccagatcccggcgggattattgtcgacgtttatcggcgcgccgtattttatttatttgctgagaaagcaga

SEQ ID NO: 442657 - DNA, 75 bp, synthetic construct
  source 1..75: mol_type = other DNA
cgccgccgggcgcggtggattttcaccacatcggatgctgctggcggggatggcattaagcaccgcgttcactat

SEQ ID NO: 442658 - DNA, 75 bp, synthetic construct
  source 1..75: mol_type = other DNA
ctgcccgcgggaagtctcggtgcggcggtgacgctgttgatcattatgatcgccgccgggcgcggtggattttca

SEQ ID NO: 442659 - DNA, 75 bp, synthetic construct
  source 1..75: mol_type = other DNA
ggtggtgataccgcgcgggccgtggggatggcattgacgccgacgcgagttgcgttgctgctgctggcggccagc

SEQ ID NO: 442660 - DNA, 75 bp, synthetic construct
  source 1..75: mol_type = other DNA
gtgcggatagtgcttcatcaagtgcaacagcggcaggaaaatctgcggatagcgcattgtcatcagcgacaacag

SEQ ID NO: 442661 - DNA, 75 bp, synthetic construct
  source 1..75: mol_type = other DNA
taatcagaacactactggtaatgctgcaaccgccacaaaattgcagacagcaaggaaaattgctggtgtggcgtt

SEQ ID NO: 442662 - DNA, 75 bp, synthetic construct
  source 1..75: mol_type = other DNA
atcgggtaatgcaagcacagcaaccaaattgcagacagcaagaaccatcggtggtgttagcttcgatggcactgc

SEQ ID NO: 442663 - DNA, 75 bp, synthetic construct
  source 1..75: mol_type = other DNA
ctctggatgaggtgacaatcgagcgtgaagacggtacagaagtaaccgttaagccgctaatgcagatcgtcaacg

SEQ ID NO: 442664 - DNA, 75 bp, synthetic construct
  source 1..75: mol_type = other DNA
ggatcgaacacatatttcatgctaacagcatcaggagacacattaggttcatggaacggtttgcgacctattata

SEQ ID NO: 442665 - DNA, 75 bp, synthetic construct
  source 1..75: mol_type = other DNA
gcgggtttctgctgaagaagggctaacggttattgttccaactcaggattataccgtcggtcaaacaacatataa

SEQ ID NO: 442666 - DNA, 75 bp, synthetic construct
  source 1..75: mol_type = other DNA
tcccacccggttgagaaagggctggcagtcagctggctgcttgaaaaacttcgggctgaacgaggagttttcccc

SEQ ID NO: 442667 - DNA, 75 bp, synthetic construct
  source 1..75: mol_type = other DNA
cgaatatgagggtactccggtgtatctggtcatgaagcaccgcgacagcacgaagcttgatgaactgaacgctgt

SEQ ID NO: 442668 - DNA, 75 bp, synthetic construct
  source 1..75: mol_type = other DNA
agcattagcgcgccggatatgaaggtcaacgatcgtgtcgcggctgaacgccaacatgtgctggcgtttgccctc

SEQ ID NO: 442669 - DNA, 75 bp, synthetic construct
  source 1..75: mol_type = other DNA
cgcagagcgtataacactaaaaacaaaccaacagcttctgatgtaggagcattaccgctttcaggtggcacatta

SEQ ID NO: 442670 - DNA, 75 bp, synthetic construct
  source 1..75: mol_type = other DNA
actactagcggtgccaatatgtacattgatccaaacccaggtatcaatacagtttggcgttcaacatcttcaagg

SEQ ID NO: 442671 - DNA, 75 bp, synthetic construct
  source 1..75: mol_type = other DNA
ctttaaaacttattcgcttatcagaagtaataaggaaaaccgggttcggcaagacgtggatttataaacttatca

SEQ ID NO: 442672 - DNA, 75 bp, synthetic construct
  source 1..75: mol_type = other DNA
gtgagtaaacgaattgcgctttttccggcgttattgttggcgttgctggtgattgccgctgtggtgctcacctgg

SEQ ID NO: 442673 - DNA, 75 bp, synthetic construct
  source 1..75: mol_type = other DNA
cgccttgcccgcaggcgggtattggtacaccggttgagctgtggggcaaggagatcaaaattgatgatgtcgccg

SEQ ID NO: 442674 - DNA, 75 bp, synthetic construct
  source 1..75: mol_type = other DNA
tccgatttattgatgggctgaaaatagattggtcagaaaaacagtgggggcacaaaagggggcatatttcattgt

SEQ ID NO: 442675 - DNA, 75 bp, synthetic construct
  source 1..75: mol_type = other DNA
cgattataaaacttgagttattcagtagtctcccctcttgcaactcacactcaaaactgcctaacgaaaagttat

SEQ ID NO: 442676 - DNA, 75 bp, synthetic construct
  source 1..75: mol_type = other DNA
gtggctaaatcccccgcagaacgcaaagccgctcagagagccagacaagctgaatccggtgtacgtaagctggag

SEQ ID NO: 442677 - DNA, 75 bp, synthetic construct
  source 1..75: mol_type = other DNA
gaaagctgcgaaaaaatagctgaaggtaaactacctgttacctgtcctgtctgtttcaccatatggcaggatgta

SEQ ID NO: 442678 - DNA, 75 bp, synthetic construct
  source 1..75: mol_type = other DNA
ccagcaccgcctgaccacctgcgtacacagcaactggcagctcaaagcactgcaaaatgcgcggctaaaagcgcc

SEQ ID NO: 442679 - DNA, 75 bp, synthetic construct
  source 1..75: mol_type = other DNA
gcaaacaatattggcgtgacgggcggcgcgtttgacagctatctgctgctacgcgggttgcgaacgctggtgccg

SEQ ID NO: 442680 - DNA, 75 bp, synthetic construct
  source 1..75: mol_type = other DNA
cgctggcattaggtgccgatctggtgttgcattcatgtacgaaatatctgaacggtcactcagacgtggtggccg

SEQ ID NO: 442681 - DNA, 75 bp, synthetic construct
  source 1..75: mol_type = other DNA
tctttgaggaagatttgcagattcgcttccgtccttcctacttcccgttcaccgagccttctgcagaagttgacg

SEQ ID NO: 442682 - DNA, 75 bp, synthetic construct
  source 1..75: mol_type = other DNA
gcgccattattgagaactcgcgccacgttatgctggttgtcgatcactcgaaatttggccgtaacgcgatggtca

SEQ ID NO: 442683 - DNA, 75 bp, synthetic construct
  source 1..75: mol_type = other DNA
atgcgcgaaaacgaaaataattccagggatttagaagtgaaacaaacacaacgtcacaacggtattatcgaactg

SEQ ID NO: 442684 - DNA, 75 bp, synthetic construct
  source 1..75: mol_type = other DNA
agagagttccagttaattcatgcccgtgtaatggtgactcgcaatgctgggtgactaaaggctggcatgaaacga

SEQ ID NO: 442685 - DNA, 75 bp, synthetic construct
  source 1..75: mol_type = other DNA
atctggcaccagtggttacagttctcttaattatcgaggggcttacggtaatactaatgtcggttacagtcgtaa

SEQ ID NO: 442686 - DNA, 75 bp, synthetic construct
  source 1..75: mol_type = other DNA
tgtattgtcgagtacaaacttcctgaagtttctcctggtaccttactgaaccagcagacagcaatctgtcgctaa

SEQ ID NO: 442687 - DNA, 75 bp, synthetic construct
  source 1..75: mol_type = other DNA
aaaatggcgatagcaaaacggttattgttgatgtgatcactcgtaatgcacagtttccacttaaggcaagagcta

SEQ ID NO: 442688 - DNA, 75 bp, synthetic construct
  source 1..75: mol_type = other DNA
gtattattcagcggctgaccggaaacccgatggcaagcccggaagtgctggggattagttccggcgcggcgtttg

SEQ ID NO: 442689 - DNA, 75 bp, synthetic construct
  source 1..75: mol_type = other DNA
ggcgtgctgtttcagcaagtgctgcgtaacccgctggcggaaccgacgacacttggcgttgctacaggcgcgcaa

SEQ ID NO: 442690 - DNA, 75 bp, synthetic construct
  source 1..75: mol_type = other DNA
ctggtggtgagcctttattgtggggcaattaatcagctactggttatcttccatcacgaccagctgcaaagcatg

SEQ ID NO: 442691 - DNA, 75 bp, synthetic construct
  source 1..75: mol_type = other DNA
tgctgcatcatccttcagtttatgattcaaagagagttacagcaatttggtgttagtttcaccaggcaaatatta

SEQ ID NO: 442692 - DNA, 75 bp, synthetic construct
  source 1..75: mol_type = other DNA
gctgataatgtcaaaatagagaaccagaccggaattcataccgactggcgtggctatgccatattaccatttgcg

SEQ ID NO: 442693 - DNA, 75 bp, synthetic construct
  source 1..75: mol_type = other DNA
atgcgctgccagtcgattcatgcccgtgtgatggtgattcagcatgttgggtgacacgtggctggcatgagacta

SEQ ID NO: 442694 - DNA, 75 bp, synthetic construct
  source 1..75: mol_type = other DNA
gtgtggatcactattgcaccgttcgtgacaactactgtcccacccggcccttttactattgatgatatcaactct

SEQ ID NO: 442695 - DNA, 75 bp, synthetic construct
  source 1..75: mol_type = other DNA
tgagtggttacaccgtcaagcctcctaccggagacaccaatgagcagacacaatttattgattattttaatctgt

SEQ ID NO: 442696 - DNA, 75 bp, synthetic construct
  source 1..75: mol_type = other DNA
ctgtaccgttaacgcaattagatctggcggtacacgtagccactaagcttaaccgctctcatctgctgaccgcac

SEQ ID NO: 442697 - DNA, 75 bp, synthetic construct
  source 1..75: mol_type = other DNA
ctcggcaccaatggcgtcggtaaatcgaccctgctgaaaacgctggtaggggatctggaaccggacaatggtact

SEQ ID NO: 442698 - DNA, 75 bp, synthetic construct
  source 1..75: mol_type = other DNA
gggaattccagtggaacagcactacggcccgatgagtgaagttgctcctggctggaagctgcgtgtgctgctggc

SEQ ID NO: 442699 - DNA, 75 bp, synthetic construct
  source 1..75: mol_type = other DNA
tgcagttcggcagtaagccgttgtttgaaaacatttccgtcaaatttggcggcggcaatcgttacggcctgattg

SEQ ID NO: 442700 - DNA, 75 bp, synthetic construct
  source 1..75: mol_type = other DNA
gattacatcgacgaacgttatgccaccgcgctgacccgcgaatctgtcgcgcaggcgttctacatttcaccaaac

SEQ ID NO: 442701 - DNA, 75 bp, synthetic construct
  source 1..75: mol_type = other DNA
cgttcccgctggcggctggaacttcccgcaatggcaaacacccgccaccaccttcagcgtgctgtttggcaaaca

SEQ ID NO: 442702 - DNA, 75 bp, synthetic construct
  source 1..75: mol_type = other DNA
atgtatcacgacgtcagctatctgctctcccgcctgatcaacggcccgctgtccctgcgccagatttactttgcc

SEQ ID NO: 442703 - DNA, 75 bp, synthetic construct
  source 1..75: mol_type = other DNA
gtaatctcctgttccaacgggcccccgatggtgaagagctggtttttgatgaagaagtgatcgagcgagttcgtg

SEQ ID NO: 442704 - DNA, 75 bp, synthetic construct
  source 1..75: mol_type = other DNA
gctgaacagcgccatgttactggtagctgaagatggcggatttacacttgaaattaacggcagcgaaaaagagct

SEQ ID NO: 442705 - DNA, 75 bp, synthetic construct
  source 1..75: mol_type = other DNA
aggtctcactgtgtacttcgccttaaaaagcggctctgccacattaacgtcattaacagcggtgaccgatcaaaa

SEQ ID NO: 442706 - DNA, 75 bp, synthetic construct
  source 1..75: mol_type = other DNA
aagttaatgatgcagaagccgaacattctgatcatggacgaaccgaccaaccacctggatatggaatctattgag

SEQ ID NO: 442707 - DNA, 75 bp, synthetic construct
  source 1..75: mol_type = other DNA
ctggctggaacaggtgctgaacgagcgtgacagcaccatgatcatcatctcgcacgaccgtcacttccttaacat

SEQ ID NO: 442708 - DNA, 75 bp, synthetic construct
  source 1..75: mol_type = other DNA
gtgttagtttccagtaacgtcaccatgcagttcggcagtaagccgttgtttgaaaacatttccgtcaaatttggc

SEQ ID NO: 442709 - DNA, 75 bp, synthetic construct
  source 1..75: mol_type = other DNA
ttacccgcgaatctgtcgcacaggcgttctatatttcgccaaattacctctcgcacctgtttcaaaaaacggggg

SEQ ID NO: 442710 - DNA, 75 bp, synthetic construct
  source 1..75: mol_type = other DNA
atgtcttattattcatgataataataagctcggtgatctaattgtattaagttcgatttatcgtgaactttatag

SEQ ID NO: 442711 - DNA, 75 bp, synthetic construct
  source 1..75: mol_type = other DNA
atgcgtttaggaacttttcacaaaaagaaaagattttatataaacaaaatcaagattaattttctttctttttta

SEQ ID NO: 442712 - DNA, 75 bp, synthetic construct
  source 1..75: mol_type = other DNA
cgtcaacgtaagcgtcagttccgtcaactgtggattgcgcgtatcaacgcagcagcacgtcagaacggtatttct

SEQ ID NO: 442713 - DNA, 75 bp, synthetic construct
  source 1..75: mol_type = other DNA
cctgctgaacttcatttaccggaaggacggcaaggacattgtgcctgaccgtatccgttccgcgctcgggcttgg

SEQ ID NO: 442714 - DNA, 75 bp, synthetic construct
  source 1..75: mol_type = other DNA
tgggggaagccaaacagggcgaagccacatcacacacttacgccattaaaaacacctactacaagctgagtgtta

SEQ ID NO: 442715 - DNA, 75 bp, synthetic construct
  source 1..75: mol_type = other DNA
gaatagtcattattaacccattaggtgcaaaaaaaatatgccgacttacgtttgagcaaataaaagttatatatc

SEQ ID NO: 442716 - DNA, 75 bp, synthetic construct
  source 1..75: mol_type = other DNA
taaacgacaactggcggagcaggctaaggaactggccatcctccaaaaggccgcgacatacttcgcgaagcgcct

SEQ ID NO: 442717 - DNA, 75 bp, synthetic construct
  source 1..75: mol_type = other DNA
tgcaatatattgccaaaattccccgccagcaggcgttgctgaaaatcttatatcacaaatgtgaatttaatgatg

SEQ ID NO: 442718 - DNA, 75 bp, synthetic construct
  source 1..75: mol_type = other DNA
aataacctcgatttagatgttgtgatgattattattgatggtgccttcagcggaattgttcaaaactggttaatg

SEQ ID NO: 442719 - DNA, 75 bp, synthetic construct
  source 1..75: mol_type = other DNA
cttcatgatcaccagacgcctttaccggagaaaagacaagagcacggttaaccgtctcctgatgtctgatattcg

SEQ ID NO: 442720 - DNA, 75 bp, synthetic construct
  source 1..75: mol_type = other DNA
cccgtattgaatggtgttcatcaggcgggcctgagtaccacgatagaattcattagcgcggaaaccagaccaatg

SEQ ID NO: 442721 - DNA, 75 bp, synthetic construct
  source 1..75: mol_type = other DNA
ttgatttcagcgaagaacagtcagtgacgttcattaacagcatcgtagacagcgaacatgtcgatcctgccatcg

SEQ ID NO: 442722 - DNA, 75 bp, synthetic construct
  source 1..75: mol_type = other DNA
gcagaagagttgggtttaaccacttccgccattagctacaccatcaagcgaatggaaacggggctggatgtggtg

SEQ ID NO: 442723 - DNA, 75 bp, synthetic construct
  source 1..75: mol_type = other DNA
cagtgcgtagcgggttaaatgacgacgaacagtatggttgcgttgtccctcccatccatctttccagcacctata

SEQ ID NO: 442724 - DNA, 75 bp, synthetic construct
  source 1..75: mol_type = other DNA
ccatctttccagcacctataactttaccggatttaatgaaccgcgcgcgcatgattactcgcgtcgcggcaaccc

SEQ ID NO: 442725 - DNA, 75 bp, synthetic construct
  source 1..75: mol_type = other DNA
ccttccaggtgtaaacactacgggtaatcagaacaccactggtaatgctgcaactgctacaaaacttcagactgc

SEQ ID NO: 442726 - DNA, 75 bp, synthetic construct
  source 1..75: mol_type = other DNA
actttaccggatttaatgaaccgcgcgtgcatgattactcgcgtcgcggcaacccgacgcgcgatgtggtccagc

SEQ ID NO: 442727 - DNA, 75 bp, synthetic construct
  source 1..75: mol_type = other DNA
tacggcggcagctatcgtctgttcgacagtctggcgaaacgtggttgttatcgcgtgctgtttgttgatcaaggt

SEQ ID NO: 442728 - DNA, 75 bp, synthetic construct
  source 1..75: mol_type = other DNA
gcatggcaccagaagcgcgtgctgccgccgggatctccgagacgctgctgcgtatctccaccggtattgaagatg

SEQ ID NO: 442729 - DNA, 75 bp, synthetic construct
  source 1..75: mol_type = other DNA
ttctgcgtctgcatcagccacctcagcatccgcttcaaaagatgaggcgaccaagcaggcatcagcagcgaagag

SEQ ID NO: 442730 - DNA, 75 bp, synthetic construct
  source 1..75: mol_type = other DNA
tgtaccactcattcatcatattcagcaattgaccaaaagggttgaggagcttgaaacgaagttaaattcacctaa

SEQ ID NO: 442731 - DNA, 75 bp, synthetic construct
  source 1..75: mol_type = other DNA
actaaatccacgaataacaccggggcgcatacgcacagtctgagtggctctacgggggctgccggtgctcatact

SEQ ID NO: 442732 - DNA, 75 bp, synthetic construct
  source 1..75: mol_type = other DNA
gtccattggcgtgaaccaacaaataatgattctccaggagatatttcctcaaatggtatggtcgctgaaggagtg

SEQ ID NO: 442733 - DNA, 75 bp, synthetic construct
  source 1..75: mol_type = other DNA
aaaattgcagacagcaaggaaaattgctggtgtggcgtttgatggctctgccgatataactttgactgcggctaa

SEQ ID NO: 442734 - DNA, 75 bp, synthetic construct
  source 1..75: mol_type = other DNA
gctgcggcaggctcaaaaacagcggctgcgtcgtctgccagtgccgcgtcaacaagtgccgggcaggcctcagcc

SEQ ID NO: 442735 - DNA, 75 bp, synthetic construct
  source 1..75: mol_type = other DNA
gaatcaggtggtttgtagggccccggggaaaagcttaattaatctcaacggtcacgcagttttagaaaaattatc

SEQ ID NO: 442736 - DNA, 75 bp, synthetic construct
  source 1..75: mol_type = other DNA
ccaggattcacgcatgttactggcgacccagcactctgccaccggccaggtgacgcagtggattaaaaaacaatt

SEQ ID NO: 442737 - DNA, 75 bp, synthetic construct
  source 1..75: mol_type = other DNA
gccagattttaggtgaaggaattggttttttgccggattacatggttcgcgaggcgatggagcaatccctgctgg

SEQ ID NO: 442738 - DNA, 75 bp, synthetic construct
  source 1..75: mol_type = other DNA
acgttttggcagcttcagtaaagccgcagaagagttgggtttaaccacttccgccattagctacaccatcaagcg

SEQ ID NO: 442739 - DNA, 75 bp, synthetic construct
  source 1..75: mol_type = other DNA
catagaagcacgtgtgcgcatttgtattaatcagctgctttatacgcccaaacacaccgcacgcttattacaggt

SEQ ID NO: 442740 - DNA, 75 bp, synthetic construct
  source 1..75: mol_type = other DNA
gcgccaggattcgcgcatgttactggcgactcagcattctgctacgggtcaggtgacgcagtggattaaaaaaca

SEQ ID NO: 442741 - DNA, 75 bp, synthetic construct
  source 1..75: mol_type = other DNA
ccaggattcacgcatgttactcgcaacccagcactctgccaccggtcaggtgacgcagtggattaaaaacaattt

SEQ ID NO: 442742 - DNA, 75 bp, synthetic construct
  source 1..75: mol_type = other DNA
gaatcagatggtttgtagggctccggggaatgagttgtctcaattgacagcaaatgctgttaagcggttcattga

SEQ ID NO: 442743 - DNA, 75 bp, synthetic construct
  source 1..75: mol_type = other DNA
aaacttccgtggggcgcgccgcatgaggaagaacgggcgaaacgactggcggaaggatttgcttatgttgaagta

SEQ ID NO: 442744 - DNA, 75 bp, synthetic construct
  source 1..75: mol_type = other DNA
gaatcagatggtatgtagggctccaagagaaaatttaattaacctcaacagtcaagcagttttggaaaagttatc

SEQ ID NO: 442745 - DNA, 75 bp, synthetic construct
  source 1..75: mol_type = other DNA
tttaccggggcgtattatcagttgaataatgacaactttgcaccaggaaaaacggcggctgcttattcgtttcaa

SEQ ID NO: 442746 - DNA, 75 bp, synthetic construct
  source 1..75: mol_type = other DNA
agcacagtcacaagcgcaggtggaatgcaaacagtagatatatcgctagtggcaggcccagcagacgcctcgcag

SEQ ID NO: 442747 - DNA, 75 bp, synthetic construct
  source 1..75: mol_type = other DNA
aagcgaacaatacgtagtttccctggcaacaggtgatcaaagcgtatttgaaaagcttgggtttgcttatgcgac

SEQ ID NO: 442748 - DNA, 75 bp, synthetic construct
  source 1..75: mol_type = other DNA
ttgagcatgctggatcttgttattgtgatttgtgtgcttcagataataaaagttcgcttaatttcaaaggtgagt

SEQ ID NO: 442749 - DNA, 75 bp, synthetic construct
  source 1..75: mol_type = other DNA
acgcttgagtcaacccaatcgataaaattaaaagtgggtgcaaatgagataacgatatccacatcagggataaat

SEQ ID NO: 442750 - DNA, 75 bp, synthetic construct
  source 1..75: mol_type = other DNA
tagtgttaaaaatggtaaaaagggagaaggtcatcagctggtttttgatgacaaagaaaatgaggaaaaaatcat

SEQ ID NO: 442751 - DNA, 75 bp, synthetic construct
  source 1..75: mol_type = other DNA
gcggcggaacgcgagcaaacccgccaattgctggctggcagcgtagcccgcctgtactgggagtggcaaacctag

SEQ ID NO: 442752 - DNA, 75 bp, synthetic construct
  source 1..75: mol_type = other DNA
cctgtcggttgtggtgcggatttatcagcttaaagacaaccggaattttgacagtgcggattatcaggcgctttt

SEQ ID NO: 442753 - DNA, 75 bp, synthetic construct
  source 1..75: mol_type = other DNA
gcggaaagttggcaggctgaccccgcagccaaaacgctaaccataaaactgaaaagcgatgcgaaatttgcctct

SEQ ID NO: 442754 - DNA, 75 bp, synthetic construct
  source 1..75: mol_type = other DNA
caaggtggggaatcaatatccgaagtatatacttatgaaataaaatgtcttagtaaggataattatcattctctg

SEQ ID NO: 442755 - DNA, 75 bp, synthetic construct
  source 1..75: mol_type = other DNA
gttgttggtcctgactccgaagaatattatacagacgaatacgggcgtgtaaaaatcagttttctctggggtgaa

SEQ ID NO: 442756 - DNA, 75 bp, synthetic construct
  source 1..75: mol_type = other DNA
tccacatcaggtatagatataaaagccgctaaaattactatagaagggcaggtatcggcagaggtcaaagcggcc

SEQ ID NO: 442757 - DNA, 75 bp, synthetic construct
  source 1..75: mol_type = other DNA
gacaggactacagaattacgtcgttatctctccatgctgtcaacaatgatatccacgacaggatcacgtgtgcgg

SEQ ID NO: 442758 - DNA, 75 bp, synthetic construct
  source 1..75: mol_type = other DNA
tgcggtgaacgtttcactcttgccggacaggactacagaattacgtcgttatctctccatgctgtcaacaatgat

SEQ ID NO: 442759 - DNA, 75 bp, synthetic construct
  source 1..75: mol_type = other DNA
attgtgataacagcatgcagcatacctgcattattgtgttacagccagaaatcactgagctggcaacgggtaaaa

SEQ ID NO: 442760 - DNA, 75 bp, synthetic construct
  source 1..75: mol_type = other DNA
cagaaatggcgatgcgagatccagggcagggcggccgccatcgtcagacctggcgatggtcgacgccggcgcgca

SEQ ID NO: 442761 - DNA, 75 bp, synthetic construct
  source 1..75: mol_type = other DNA
tcctgcggtgacgcaaaatagtttcaccccagacaggcttttaaccggaggtgaattaaaagacattgagaaggg

SEQ ID NO: 442762 - DNA, 75 bp, synthetic construct
  source 1..75: mol_type = other DNA
tactcagctttgcagctgtgggggcagtcgccaatatcgtgatgggtgtctccagattcatcatgatggggttgc

SEQ ID NO: 442763 - DNA, 75 bp, synthetic construct
  source 1..75: mol_type = other DNA
cctacctgcccactatctttggcctgtcggctgccagtgcagcgggtgaagcgatgagccagggacagtacacca

SEQ ID NO: 442764 - DNA, 75 bp, synthetic construct
  source 1..75: mol_type = other DNA
ctggttggctcggaagatttgccggtgctgaatgagaacacgttcaacagtcacgcccctgcgccatcgtcacgg

SEQ ID NO: 442765 - DNA, 75 bp, synthetic construct
  source 1..75: mol_type = other DNA
gtgacagttcggcagtggttaaacatctttacggcaatgtcgcgttacttcagcggaacatcaccgaactgggcg

SEQ ID NO: 442766 - DNA, 75 bp, synthetic construct
  source 1..75: mol_type = other DNA
tacgaaggcttcatgaccggcgcgatggagggagctaaaaagctggggctgtccttcacggactccaccggcaaa

SEQ ID NO: 442767 - DNA, 75 bp, synthetic construct
  source 1..75: mol_type = other DNA
ggctggccgttcacatcacccgccagctggcgattgattacgaagaccagggccgtaaggtgcgttatgagttca

SEQ ID NO: 442768 - DNA, 75 bp, synthetic construct
  source 1..75: mol_type = other DNA
acggtgtcacagggggccgatggcctgatgtgggtgacaccggctgaccagtcacagcctgacccacgggatgtg

SEQ ID NO: 442769 - DNA, 75 bp, synthetic construct
  source 1..75: mol_type = other DNA
ggaacaactgtcacaacaggggcactccggtaaggcggatgcgaacagcagtaccgacagcgatattcccctcgg

SEQ ID NO: 442770 - DNA, 75 bp, synthetic construct
  source 1..75: mol_type = other DNA
cggccaccggcgactgggtgttgtcctgtgtacgcggtgaagttcactccattacgtttgtcttcactgatggca

SEQ ID NO: 442771 - DNA, 75 bp, synthetic construct
  source 1..75: mol_type = other DNA
ggtcaggcggtacccggcagcggacagggcgatattccgctgggactggggctggatgcacagggcagcggactg

SEQ ID NO: 442772 - DNA, 75 bp, synthetic construct
  source 1..75: mol_type = other DNA
tcggcggcgggtttaaggatgtggcggactgggtgaaatcccgctacgggcagacctttgatgcggtgtatgtgc

SEQ ID NO: 442773 - DNA, 75 bp, synthetic construct
  source 1..75: mol_type = other DNA
ttgtaaacacaattttaaaagacagtttatttgaaccaccacaactcatattatataaagaacaggcgttgctgg

SEQ ID NO: 442774 - DNA, 75 bp, synthetic construct
  source 1..75: mol_type = other DNA
gtggataaataccgatcgtttaatcaagagcaggtgcagtcgcgtggcaatggagctaatgaactgacattaaat

SEQ ID NO: 442775 - DNA, 75 bp, synthetic construct
  source 1..75: mol_type = other DNA
gtgcgcactatagtgacgacggtaaaaactacctggattcaattctgtggcacatgaacgcagccgcgcgagcac

SEQ ID NO: 442776 - DNA, 75 bp, synthetic construct
  source 1..75: mol_type = other DNA
gtaaaagtcaaatttgacggacgttacacactgttttcggagtttcaggaaggcagctatgacttcggttactgc

SEQ ID NO: 442777 - DNA, 75 bp, synthetic construct
  source 1..75: mol_type = other DNA
tggcaggatacgaacagcagagaaacgaaacttctgatagtggaataggtgatccgagttttaaattgttagggg

SEQ ID NO: 442778 - DNA, 75 bp, synthetic construct
  source 1..75: mol_type = other DNA
gtcgctatcagaggttctgactctgataaataaagcgaccaaaatacctgttgctactatgatttcagagaggac

SEQ ID NO: 442779 - DNA, 75 bp, synthetic construct
  source 1..75: mol_type = other DNA
atattctcgcgacgccgagtattgtcactctagataacatggaagcgacgtttaatgtcggccaagaagtacccg

SEQ ID NO: 442780 - DNA, 75 bp, synthetic construct
  source 1..75: mol_type = other DNA
acaaaagacgcacgcaacgcagcattacagtttgcgacggattcaggtagtcaggtggggtcaatcagcgatgct

SEQ ID NO: 442781 - DNA, 75 bp, synthetic construct
  source 1..75: mol_type = other DNA
agagataaacctgggccaatggacaagcaagcgaacggactccttttatctcaaagatgatccaacgatgcctcg

SEQ ID NO: 442782 - DNA, 75 bp, synthetic construct
  source 1..75: mol_type = other DNA
atcatgagacatcttcatcgttagataaccacaaatctatcaaatcagaatcacatagtaagcacaaacatgata

SEQ ID NO: 442783 - DNA, 75 bp, synthetic construct
  source 1..75: mol_type = other DNA
tgcggtagtgaagatcttattaccggtacgccaaccggctttgctcaactgaatacgatgaccagcggcttccag

SEQ ID NO: 442784 - DNA, 75 bp, synthetic construct
  source 1..75: mol_type = other DNA
tgaaattattgtcagcaagcagcgtcaggggcccacaggcacggtgcgggtcagattcgacggccgttacacact

SEQ ID NO: 442785 - DNA, 75 bp, synthetic construct
  source 1..75: mol_type = other DNA
gctttctgaaaaagaagttcgcgcagatacggcagaattaacaattgcgattaactttaagggtaatgttcccgg

SEQ ID NO: 442786 - DNA, 75 bp, synthetic construct
  source 1..75: mol_type = other DNA
tggggggctgaattttcggccagctttaaagatacggatattcaggagttcattaatactgtcagcaaaaatctg

SEQ ID NO: 442787 - DNA, 75 bp, synthetic construct
  source 1..75: mol_type = other DNA
agcttgcaggaataatgagaaagataaaaatagggctggcgctaggatccggcgcggcgcgaggatggtcgcata

SEQ ID NO: 442788 - DNA, 75 bp, synthetic construct
  source 1..75: mol_type = other DNA
tgcggcaggacaattagcggtagagaagaaaatggatgaacttttaccgctggttcgaaccaacgttttgacctg

SEQ ID NO: 442789 - DNA, 75 bp, synthetic construct
  source 1..75: mol_type = other DNA
gcagatattcctccaccaacacgtgaagaacaaattgcatcagccgaaactaaaaagcagcaattgattaatcag

SEQ ID NO: 442790 - DNA, 75 bp, synthetic construct
  source 1..75: mol_type = other DNA
aagtaaaaggtactatgttgacgcttcagggatctgccatgacgcagataaaaggtggtatagtgaatattggat

SEQ ID NO: 442791 - DNA, 75 bp, synthetic construct
  source 1..75: mol_type = other DNA
tgcggcaggacaattggcggtagaaaagaaaatggatgaacttttaccgctggttcgaactaacgttttaatctg

SEQ ID NO: 442792 - DNA, 75 bp, synthetic construct
  source 1..75: mol_type = other DNA
ccatcttgctattcgcgcatcatgcagtattccaggactcatggcacccgttgcgcataacggctactggctggt

SEQ ID NO: 442793 - DNA, 75 bp, synthetic construct
  source 1..75: mol_type = other DNA
agttgaatgccgatgtctttttaccccggctgaaggtacagcgactggacagcatcagtgcgccggtgatgtgcc

SEQ ID NO: 442794 - DNA, 75 bp, synthetic construct
  source 1..75: mol_type = other DNA
atgaaatcgttaattatcgttaatccggctgactgtattggctgccgtacttgtgaagtagcctgtgtggtcgct

SEQ ID NO: 442795 - DNA, 75 bp, synthetic construct
  source 1..75: mol_type = other DNA
ggaatatgtcgccagacgagtagcggaagggcatacaaaaatggaaacaatacgcagcctgaagcgctatatctc

SEQ ID NO: 442796 - DNA, 75 bp, synthetic construct
  source 1..75: mol_type = other DNA
tcccgtgcaggcgttgagcataggggagctgatggtgcaggcaaactctgcccgctgcattggttgtcagagttg

SEQ ID NO: 442797 - DNA, 75 bp, synthetic construct
  source 1..75: mol_type = other DNA
cgacgcaggcgttacagttgatgactgagggagaacttaagcggatccgccagcaacgtattgctaccagcggtg

SEQ ID NO: 442798 - DNA, 75 bp, synthetic construct
  source 1..75: mol_type = other DNA
cagttgctgactgaaagagaactcaggcgagtccgccagcagcgtattgttgccagcagtgagaatcctctgtga

SEQ ID NO: 442799 - DNA, 75 bp, synthetic construct
  source 1..75: mol_type = other DNA
tatgtgaatcggcggaagaggtgttggcgttttaccgcaaagtggaggaagaccgtccaacgctggggtttgata

SEQ ID NO: 442800 - DNA, 75 bp, synthetic construct
  source 1..75: mol_type = other DNA
atacagctgaatatcttgatgccaatggctggacgctgctggatggcgcaaacggtgaacgatatatccgctgtc

SEQ ID NO: 442801 - DNA, 75 bp, synthetic construct
  source 1..75: mol_type = other DNA
acgttcacgcctggcgccacggatgaaacagcggattatctggatgctaacggctggacattacgtgacggagcg

SEQ ID NO: 442802 - DNA, 75 bp, synthetic construct
  source 1..75: mol_type = other DNA
cggtatgcggttctgacgtggaacgagtggaaggcgaggctgtggctcgctgtactggtggtttgatttgcgccg

SEQ ID NO: 442803 - DNA, 75 bp, synthetic construct
  source 1..75: mol_type = other DNA
aattgccggatacccatttgggacgcttaatgcaatttaaagcgtggggattacctgtcagtgatcgggtaacac

SEQ ID NO: 442804 - DNA, 75 bp, synthetic construct
  source 1..75: mol_type = other DNA
cgtccacacacctgctgacctgtttaaactcaccgcaggcaaactgaccggactggagagaatggggccgaaatc

SEQ ID NO: 442805 - DNA, 75 bp, synthetic construct
  source 1..75: mol_type = other DNA
caacacgaagatgcgcgaccgatcagcattcacgcccggcgcgacggatgatacagctgaatatcttgatgccaa

SEQ ID NO: 442806 - DNA, 75 bp, synthetic construct
  source 1..75: mol_type = other DNA
agatgtgattccctggcaggagttcgtcaacagcctggaagaaacacagtttctgtcccgtaaagataatttcaa

SEQ ID NO: 442807 - DNA, 75 bp, synthetic construct
  source 1..75: mol_type = other DNA
cgtcgcgccatatcagagcctgaaccactgactcccgtaggaaaaatcatgcaggcataccacgaaaaacagacc

SEQ ID NO: 442808 - DNA, 75 bp, synthetic construct
  source 1..75: mol_type = other DNA
gcctgtacctgctggccgttgacggcgatttccgtaagcgcatccaccgtctggcgggcgatatggggattatcg

SEQ ID NO: 442809 - DNA, 75 bp, synthetic construct
  source 1..75: mol_type = other DNA
cctgttggtcgtgaacttattcgcgatgtggtgttacttgcagccgatgaacaaccattcgattcagcgatcacc

SEQ ID NO: 442810 - DNA, 75 bp, synthetic construct
  source 1..75: mol_type = other DNA
tttcctgcgggaaccgcgggctttgagcaggggcattttaaatgcctgcatgccagttgtgcgcatcgtgatgac

SEQ ID NO: 442811 - DNA, 75 bp, synthetic construct
  source 1..75: mol_type = other DNA
tggtggaggacaccgcgcatacgattaataaaaaagtgggctggttgctgcacgggcaggagtcaattctggtgc

SEQ ID NO: 442812 - DNA, 75 bp, synthetic construct
  source 1..75: mol_type = other DNA
gatgctgtctacaccgacgccccgccgcctgcgggcgtgatgcaggtgctgacggaccatcatattcaactggag

SEQ ID NO: 442813 - DNA, 75 bp, synthetic construct
  source 1..75: mol_type = other DNA
cgaattacgcagccgtgatggcgggatcatcggcgaagcaacgctcgattttatctcccagttccgccttgattt

SEQ ID NO: 442814 - DNA, 75 bp, synthetic construct
  source 1..75: mol_type = other DNA
gcacgatcgcaaggccacccagaccgaagaaaaagagcgcatcgcccgcaaagtggcggagcaaatccccaacgg

SEQ ID NO: 442815 - DNA, 75 bp, synthetic construct
  source 1..75: mol_type = other DNA
atttccgcattattctcgccggtggcgaattacgcagccgcgatggcgggatcattggcgaagcgacgctcgatt

SEQ ID NO: 442816 - DNA, 75 bp, synthetic construct
  source 1..75: mol_type = other DNA
ctccacgctatttattgatatcggcactacgccggaagcggtggcgcacgcgttgctcaatcacagtaatctgcg

SEQ ID NO: 442817 - DNA, 75 bp, synthetic construct
  source 1..75: mol_type = other DNA
gtattatcgaactggttaagcagcagggctatgtcagcaccgaagagctggtagagcatttttccgtcagcccgc

SEQ ID NO: 442818 - DNA, 75 bp, synthetic construct
  source 1..75: mol_type = other DNA
atgaaaacactgcatgatcattatgatcgcctgtctgtcaggttatcgatcattatcacccgcttactggctggt

SEQ ID NO: 442819 - DNA, 75 bp, synthetic construct
  source 1..75: mol_type = other DNA
attattagttaacggtaaaagctacgaagcagtagctccccgccgtctgatatttcagtccaaaaactggtttct

SEQ ID NO: 442820 - DNA, 75 bp, synthetic construct
  source 1..75: mol_type = other DNA
tcacgcctaaaacggatgcaaatcagaaggctccttccccacagcccattcggcggattgccagccagacactgc

SEQ ID NO: 442821 - DNA, 75 bp, synthetic construct
  source 1..75: mol_type = other DNA
tacgttcggcatttcgattcccggtctacgtattgctggggggttaattgttgcatttatcggtttccgtatgct

SEQ ID NO: 442822 - DNA, 75 bp, synthetic construct
  source 1..75: mol_type = other DNA
ctatcgcgatgatcatcagttcggcatccactgtacgccagagttccactttcgctgactgggttctgctggtgg

SEQ ID NO: 442823 - DNA, 75 bp, synthetic construct
  source 1..75: mol_type = other DNA
gcctggggctggtggtgttgctgccgttagctaacccattaacaactgtcgcgttatttcttggcctggcaggca

SEQ ID NO: 442824 - DNA, 75 bp, synthetic construct
  source 1..75: mol_type = other DNA
aagcctttctgcgcaaagggatccaactttcccgcgccaacaatattgtttcattatctcgtccatcaggagcca

SEQ ID NO: 442825 - DNA, 75 bp, synthetic construct
  source 1..75: mol_type = other DNA
gcgagtcgaggaaaatgaagcactctctgcatcccatcacgcgctatgggccttgcttcgcgtcgcggccaacga

SEQ ID NO: 442826 - DNA, 75 bp, synthetic construct
  source 1..75: mol_type = other DNA
cgtggtgctgcgtcgcctgagagacgcgctgctgtcaggcgatccgattatctcggtgatcctctccagcgcggt

SEQ ID NO: 442827 - DNA, 75 bp, synthetic construct
  source 1..75: mol_type = other DNA
agcgaacgtgattcacgccacccgccatattggccgcacgctcgataatctgcgccccctgctcaagccaggcgg

SEQ ID NO: 442828 - DNA, 75 bp, synthetic construct
  source 1..75: mol_type = other DNA
gatgcgggttttctatgtggcgaaacaggtatcgctgggaaaaggagcttttggggagaccttactggataccat

SEQ ID NO: 442829 - DNA, 75 bp, synthetic construct
  source 1..75: mol_type = other DNA
aatggctgaaagggcgtggggttcagatcgaacgttataacctggcgcagcagcctatgagcttcgttgagaacg

SEQ ID NO: 442830 - DNA, 75 bp, synthetic construct
  source 1..75: mol_type = other DNA
agcgctcgatctccctcgcctggaagcgcttaaacagtgcgccacgcgactgcacgccatctacgtcgatcaact

SEQ ID NO: 442831 - DNA, 75 bp, synthetic construct
  source 1..75: mol_type = other DNA
agtcactccgcaggtcaatgaaggcgacgcggtactgctcgaaatagagcaggaggtttccagcgttgactcttc

SEQ ID NO: 442832 - DNA, 75 bp, synthetic construct
  source 1..75: mol_type = other DNA
gcaatgggcgaataaaaacgttggcgcacagcaatttaccaatacgggattaccggtttttaacgctgcgcaagg

SEQ ID NO: 442833 - DNA, 75 bp, synthetic construct
  source 1..75: mol_type = other DNA
gcgaatcgacgggaaatcaaaagcgctggttggctcggaagatttgccggtgctggatgagaacacgttcaacag

SEQ ID NO: 442834 - DNA, 75 bp, synthetic construct
  source 1..75: mol_type = other DNA
gttcgctgtgtgagaaactttgtgctgatgtgaactacagcggactgatttgcaaaaatccgttccacctggaat

SEQ ID NO: 442835 - DNA, 75 bp, synthetic construct
  source 1..75: mol_type = other DNA
gaaccagcctcatgcgcagttctggatggtttttgacgttgaccgcgagggggcagcgattgactggagcgaccg

SEQ ID NO: 442836 - DNA, 75 bp, synthetic construct
  source 1..75: mol_type = other DNA
atgacgatgtttgataacgtctggcagaccatcaaagacagtttccttaaatcatggaactggattgtagagaag

SEQ ID NO: 442837 - DNA, 75 bp, synthetic construct
  source 1..75: mol_type = other DNA
acgaaaccaatattttcaggctcatcgccagaatgtttggacacctggcatcggatgttaatgccccctcagcaa

SEQ ID NO: 442838 - DNA, 75 bp, synthetic construct
  source 1..75: mol_type = other DNA
tagaacaaaggcttctgtttcatacttgttaactatcttggctaaagctcaacaagtttccaaactgatttgcat

SEQ ID NO: 442839 - DNA, 75 bp, synthetic construct
  source 1..75: mol_type = other DNA
tagtagcacaaataggacagtattcgtggtgtatcacagtagttagcgtctgcttagttttcattggatggcgag

SEQ ID NO: 442840 - DNA, 75 bp, synthetic construct
  source 1..75: mol_type = other DNA
gccggaggactggttgcgcgaagtgatcgtgaagctcaatgactggccgtcgaaccgagtgcatgaactgctgcc

SEQ ID NO: 442841 - DNA, 75 bp, synthetic construct
  source 1..75: mol_type = other DNA
aagtgctactgcaaaatgagcgcgatgttccgttatccgcacaggcgttcaccgcgctttttgatggcggaccgg

SEQ ID NO: 442842 - DNA, 75 bp, synthetic construct
  source 1..75: mol_type = other DNA
tggtgatgatccacagtggatcgcgagatgtcggcttttacgtcggacgacgctggatggaccgtgcccgtgctg

SEQ ID NO: 442843 - DNA, 75 bp, synthetic construct
  source 1..75: mol_type = other DNA
tcgaattattcattaaaaatccgcttgaaaacagacttacccgtggcgagcaaatggaactagcacaaatagctt

SEQ ID NO: 442844 - DNA, 75 bp, synthetic construct
  source 1..75: mol_type = other DNA
ctatcaactatgaccgctcgcgctacgcattgttacccgaaacagagaaggcaaagatcgaaagttacattgaat

SEQ ID NO: 442845 - DNA, 75 bp, synthetic construct
  source 1..75: mol_type = other DNA
ggagccacatgcctggctgacggacgtcctgacgcgtctgccggaatggccggaggagcgactggcagagttgct

SEQ ID NO: 442846 - DNA, 75 bp, synthetic construct
  source 1..75: mol_type = other DNA
cgcttaccgatgaactgagctgcttcctgggtgacggagccgtacccctggacaataatatctgcgagcgtgcca

SEQ ID NO: 442847 - DNA, 75 bp, synthetic construct
  source 1..75: mol_type = other DNA
tggtcctgggcagaaaatcgtggctgttcgccggttcgcagatggcgggagaacgcgccgcgcaaataatgagct

SEQ ID NO: 442848 - DNA, 75 bp, synthetic construct
  source 1..75: mol_type = other DNA
cccgacaaccgggaaaacatcacgattcgtctggatggtcacatccagtccgttcagggtaaagagcgctatgaa

SEQ ID NO: 442849 - DNA, 75 bp, synthetic construct
  source 1..75: mol_type = other DNA
gctggctgacggagaaaccggaaaccgcaatgaaagccatcacccgcaatcttgaccgcgaaatctggcgtgacc

SEQ ID NO: 442850 - DNA, 75 bp, synthetic construct
  source 1..75: mol_type = other DNA
atgtcggacatcacaatcccccgtccggaagtcgtcaccgggcatacggatgttatctgctccaccagtatcaga

SEQ ID NO: 442851 - DNA, 75 bp, synthetic construct
  source 1..75: mol_type = other DNA
tgctgaagcaatttatcagcgagcaactcaccactccggcactgtcctgtaacgtatcttcaacggatgatatta

SEQ ID NO: 442852 - DNA, 75 bp, synthetic construct
  source 1..75: mol_type = other DNA
cagggaaaacatcaccattcatctggatgatcacatccagtctgttcagggtaaagagcgctatgatgatgagat

SEQ ID NO: 442853 - DNA, 75 bp, synthetic construct
  source 1..75: mol_type = other DNA
atgaaacaggattttcgctgcggttgctggctgatggagaaaccggaaatggcaatgaaaaccatcacccggaac

SEQ ID NO: 442854 - DNA, 75 bp, synthetic construct
  source 1..75: mol_type = other DNA
cggaagtggtcaccgggtatacggacgttatctgctccaccagtatccgacacgttgtgacggtacggaatgcag

SEQ ID NO: 442855 - DNA, 75 bp, synthetic construct
  source 1..75: mol_type = other DNA
atgctacatctgttcagcggcaaaccgatccccgacaaccgggaaaacatcactattcgtctggatggtcacatc

SEQ ID NO: 442856 - DNA, 75 bp, synthetic construct
  source 1..75: mol_type = other DNA
ggattttcgctgcggttgctggctgatggagaaacccgaaacagcaatgaaagccattacccggaatcttgaccg

SEQ ID NO: 442857 - DNA, 75 bp, synthetic construct
  source 1..75: mol_type = other DNA
caacaatctggtgaaatgggaccggtggagatttcatcttatcaccggacaacagactgaccgactcgccgatct

SEQ ID NO: 442858 - DNA, 75 bp, synthetic construct
  source 1..75: mol_type = other DNA
aatcagcgaagcgaacattctgagcacatttaaacaactgcaccagaacaaggatgaggtgtttgagcggggagt

SEQ ID NO: 442859 - DNA, 75 bp, synthetic construct
  source 1..75: mol_type = other DNA
ccgccctggactgggcgatgaaacagaattttcgctgtggctgctggctgatggaaaaaccggaagcagcaatga

SEQ ID NO: 442860 - DNA, 75 bp, synthetic construct
  source 1..75: mol_type = other DNA
accgaaaattcgcgaagcggtggaaaaagttaaagcagcaaaagctgtctggcaggaagaacggcgaaaacaaac

SEQ ID NO: 442861 - DNA, 75 bp, synthetic construct
  source 1..75: mol_type = other DNA
cacacaagtatttgaagcatacagcaaatttattggtcatgagcagcacgttgcgctggataccttattgccaac

SEQ ID NO: 442862 - DNA, 75 bp, synthetic construct
  source 1..75: mol_type = other DNA
aagttaagcgtggtgctggatgtctgggaaggggagccggaactcaacgtagaactgttgaagaaagtggatatc

SEQ ID NO: 442863 - DNA, 75 bp, synthetic construct
  source 1..75: mol_type = other DNA
ctgattaacgcctgccgtggcgcagtcgtcgataataccgcgctgctgacctgcctgaatgaaggccagaagtta

SEQ ID NO: 442864 - DNA, 75 bp, synthetic construct
  source 1..75: mol_type = other DNA
gtatcgcgttttcctcgaacgttgttaaccactacggtgcagggctacgaaggcaccggacgtggttttttgctg

SEQ ID NO: 442865 - DNA, 75 bp, synthetic construct
  source 1..75: mol_type = other DNA
cgaagaagccgcgcaggcgctgttcgcacttgatgatgttcgcactgagcgtttgcgcgatcgcataacgcaatg

SEQ ID NO: 442866 - DNA, 75 bp, synthetic construct
  source 1..75: mol_type = other DNA
attttgtccagcatctcaaacgcgtacttacggcggataacgacgctatcctctggcggcaaaaccagccgttct

SEQ ID NO: 442867 - DNA, 75 bp, synthetic construct
  source 1..75: mol_type = other DNA
tgaaaaaactgcgggcagaaatcgccctcggacgcgaaacactggatgagttcgaagatttgctggctgctcagg

SEQ ID NO: 442868 - DNA, 75 bp, synthetic construct
  source 1..75: mol_type = other DNA
tacatcagcgaacataatcgcctgattgaaactcatgcagtgtggctctggaatgagtttatgaaggaacacggc

SEQ ID NO: 442869 - DNA, 75 bp, synthetic construct
  source 1..75: mol_type = other DNA
atgactactgttaaccagatccctgatgcaaacattaccccctccctcccaccgaaaattcgcgaagcggtggat

SEQ ID NO: 442870 - DNA, 75 bp, synthetic construct
  source 1..75: mol_type = other DNA
cgtctaaatggttgcgtttgtatgtgtatgattatgaaatggttttcatgttgtacggtggggttaaaagggtgt

SEQ ID NO: 442871 - DNA, 75 bp, synthetic construct
  source 1..75: mol_type = other DNA
tgcggatattctgactttccatacgccactctttaaagacgggccgtacaaaacgctgcatctggcggatgaaaa

SEQ ID NO: 442872 - DNA, 75 bp, synthetic construct
  source 1..75: mol_type = other DNA
atgaatctttgctggcaggaaaacccattaaaatttgttggcactgccactgcggggaccgaccatgtcgatgaa

SEQ ID NO: 442873 - DNA, 75 bp, synthetic construct
  source 1..75: mol_type = other DNA
cggtgatcacccgaaatatcgaccgcagtatctggcgcgatctcatgctgaagtccgggatgttgactctgatgg

SEQ ID NO: 442874 - DNA, 75 bp, synthetic construct
  source 1..75: mol_type = other DNA
tgagcacgtttgaacaactgcatcagagcaaggatgaggtgtttgagcgaggggtgatcaacgtcttcaggggac

SEQ ID NO: 442875 - DNA, 75 bp, synthetic construct
  source 1..75: mol_type = other DNA
ggctctgcacacatcactttcaaaaggctggaactgattgacagaattaacgatataatagccaggcaatttctt

SEQ ID NO: 442876 - DNA, 75 bp, synthetic construct
  source 1..75: mol_type = other DNA
attatcaacaatctggtgagatgggaccggtggggatgtcatcttatcaccgggcaacagactgaccgactcgcc

SEQ ID NO: 442877 - DNA, 75 bp, synthetic construct
  source 1..75: mol_type = other DNA
cacattctggctgtacgaaagagtacactgctgcaaatcgacacacttatccggcaactggctgaaatctcagtt

SEQ ID NO: 442878 - DNA, 75 bp, synthetic construct
  source 1..75: mol_type = other DNA
cacattctggctgtacgaaagagtacactactgcaaatcgacacacttatccggcaactggctgaaatatcagca

SEQ ID NO: 442879 - DNA, 75 bp, synthetic construct
  source 1..75: mol_type = other DNA
atggagaaacaggaaaccgcaatgaaaaccatcacacgcaatcttgatcgcgaactctggcgtgacctgatgcaa

SEQ ID NO: 442880 - DNA, 75 bp, synthetic construct
  source 1..75: mol_type = other DNA
gtgctggcgaaagtctgggcgatggtgatggcgtcagtagcaccgccagcattgcaattgccattacccgatcat

SEQ ID NO: 442881 - DNA, 75 bp, synthetic construct
  source 1..75: mol_type = other DNA
cactgctgcaaatcgacacacttatccggcaactggctgaaatctcggtactgacagaaagtattggaggtaaaa

SEQ ID NO: 442882 - DNA, 75 bp, synthetic construct
  source 1..75: mol_type = other DNA
atggagaaaccggaaaccgcaatgaaagccatcacccgcaaccttgaccgcgaaatctggcgtgacctgatgcaa

SEQ ID NO: 442883 - DNA, 75 bp, synthetic construct
  source 1..75: mol_type = other DNA
ggtaccggtcactggagtacgataattttccggaaatcagtgaagcgaacattctgagcacatttgaacaactgc

SEQ ID NO: 442884 - DNA, 75 bp, synthetic construct
  source 1..75: mol_type = other DNA
gaacaaagatgaagtgtttgagcgaggggtgatcaacgtcttcaggggactgagctggaattacaaaaccaattg

SEQ ID NO: 442885 - DNA, 75 bp, synthetic construct
  source 1..75: mol_type = other DNA
aagccatcacccgcaatctcgatcgcgaaatctggcgtggcctgatgcaacgtttcgggatgctgtcattaatgg

SEQ ID NO: 442886 - DNA, 75 bp, synthetic construct
  source 1..75: mol_type = other DNA
atgacagaaagcatcagcggtaaaactgtccgggactgggccgtgaaacaggattttcgctgtggctgctggctg

SEQ ID NO: 442887 - DNA, 75 bp, synthetic construct
  source 1..75: mol_type = other DNA
caggaaatcctcggttgtccggtacaagttatcagcggtgaggaggaagctcgcctgatttatcagggtgttgct

SEQ ID NO: 442888 - DNA, 75 bp, synthetic construct
  source 1..75: mol_type = other DNA
gcggttggcaatgtctgcgcctgtttgctgaacgtctgcaagatatccctccctcgcaaattcgcgttgtcgcta

SEQ ID NO: 442889 - DNA, 75 bp, synthetic construct
  source 1..75: mol_type = other DNA
ctgcaccagaataaggatgaggtatttgagcgaggggtgatcaacgtcttcagaggactaagctggaattacaaa

SEQ ID NO: 442890 - DNA, 75 bp, synthetic construct
  source 1..75: mol_type = other DNA
gcctggtggtggatatcggcggagccagtactgaactggtaaccggcacgggtgcacaaaccacctctttgttca

SEQ ID NO: 442891 - DNA, 75 bp, synthetic construct
  source 1..75: mol_type = other DNA
cagctattgatctcggttcaaatagtttccatatgctggtagtgcgcgaggtggctggaagcatccagacgctga

SEQ ID NO: 442892 - DNA, 75 bp, synthetic construct
  source 1..75: mol_type = other DNA
gcggctggcaatgtctgcgcctgtttgctgaacgtctgcaagatatcccaccatcgcaaattcgcgttgtcgcta

SEQ ID NO: 442893 - DNA, 75 bp, synthetic construct
  source 1..75: mol_type = other DNA
tgagcacatttgaacaactgcaccagaataacgatgaagtgtttgaccggggcgtgatcaacgtcttcaaagggc

SEQ ID NO: 442894 - DNA, 75 bp, synthetic construct
  source 1..75: mol_type = other DNA
cactgctgcaaatcgacacacttatccggcaactggctgaaatctcggtgctgacggaaagcatcggaggtaaaa

SEQ ID NO: 442895 - DNA, 75 bp, synthetic construct
  source 1..75: mol_type = other DNA
gaataaagatgaggtgtttgagcgaggagtcatcaacgtcttcaggggactgagctggaattacaaaaccaactc

SEQ ID NO: 442896 - DNA, 75 bp, synthetic construct
  source 1..75: mol_type = other DNA
tcagcggtaaaccgatccccgacaaccgggaaaacataaccattcatctggatgatcacatccagtccgttcagg

SEQ ID NO: 442897 - DNA, 75 bp, synthetic construct
  source 1..75: mol_type = other DNA
ggctccgcgcacatcacgttcaggaaaccagagctgattgacaggcttaatgatattattgcgaaatactatcca

SEQ ID NO: 442898 - DNA, 75 bp, synthetic construct
  source 1..75: mol_type = other DNA
tgagcacatttgaacaactgcaccagaataacgatgacgtgtttgaccggggggtgatcaacgtcttcacagggc

SEQ ID NO: 442899 - DNA, 75 bp, synthetic construct
  source 1..75: mol_type = other DNA
tcgactgcgacggtacgctggtcgatagcgaggtcatttgctctcgcgcatatgtaacgatgtttcaggaatttg

SEQ ID NO: 442900 - DNA, 75 bp, synthetic construct
  source 1..75: mol_type = other DNA
gccgcgcattgggcaatactggctgcaactgcctgccacatttggcccacgggagctgcctgcgctttggcattt

SEQ ID NO: 442901 - DNA, 75 bp, synthetic construct
  source 1..75: mol_type = other DNA
atggctaataacaattcattcatccgtctttctgaggttatgcgccgtactggttacggtcgcgcatggatttat

SEQ ID NO: 442902 - DNA, 75 bp, synthetic construct
  source 1..75: mol_type = other DNA
gcggggtgagccccgtttaaccgtggtgttcggcaccaaaggcgggcgtccgcgagaaaccgttattctggatgt

SEQ ID NO: 442903 - DNA, 75 bp, synthetic construct
  source 1..75: mol_type = other DNA
gcaatggtggcgatggacctggggcatggcgacgggcgcggtcgctgggtgaagcaggtttacgcgcacgaatgg

SEQ ID NO: 442904 - DNA, 75 bp, synthetic construct
  source 1..75: mol_type = other DNA
gttcgccacattgaaagctacattcatgaaaggctggcgcaagggataagtaaacgcacgctgcaaaatgaaatg

SEQ ID NO: 442905 - DNA, 75 bp, synthetic construct
  source 1..75: mol_type = other DNA
ctggtggtggtggcgctttaccttatcgcccagatggtgggcgcaggtaaactgatcgagctgctgtttggcctt

SEQ ID NO: 442906 - DNA, 75 bp, synthetic construct
  source 1..75: mol_type = other DNA
ggcggtgcacccgaaaggtgtcgacatcatgaagccgggcgggctggtgaaagatccaatatctgcgctgtcgct

SEQ ID NO: 442907 - DNA, 75 bp, synthetic construct
  source 1..75: mol_type = other DNA
cgctttaccttatcgcccagatggtaggcgcaggtaaactcatcgaactgctgtttggccttaactatcacattg

SEQ ID NO: 442908 - DNA, 75 bp, synthetic construct
  source 1..75: mol_type = other DNA
cgaagcgcgtaagagcgtgttctacgccaccggatttatgggctacttctatatcctgacctttattatcggctt

SEQ ID NO: 442909 - DNA, 75 bp, synthetic construct
  source 1..75: mol_type = other DNA
gcttcctggtgggctggccgatcattttgttcctgattgccgaacgtctgcgtaacctcggtcgctacacctttg

SEQ ID NO: 442910 - DNA, 75 bp, synthetic construct
  source 1..75: mol_type = other DNA
atcatgaagccgggcgggctggtgaaagatcctatctccgcgctctctttggggctaggactgatgtttggtacg

SEQ ID NO: 442911 - DNA, 75 bp, synthetic construct
  source 1..75: mol_type = other DNA
aaggcgcggcatattgagggatatgttcgtgaacgactggcgcagggcatcacgaagcgttccctgcaaaatgag

SEQ ID NO: 442912 - DNA, 75 bp, synthetic construct
  source 1..75: mol_type = other DNA
cttttccctgtactgattgtgcttgcggtggtgagttccctgtcctggaccattattaaaggctatgtctatacc

SEQ ID NO: 442913 - DNA, 75 bp, synthetic construct
  source 1..75: mol_type = other DNA
ggctggctggcgctgtccatcccgtttatcgcatggggtatggttaaaggtttagggcaggtggtatcgcaggcg

SEQ ID NO: 442914 - DNA, 75 bp, synthetic construct
  source 1..75: mol_type = other DNA
cgcagtcaggaaggcggtggaaaacgcattaccgatcgccagacagcgcaatggcaggctgatcgacaagccaga

SEQ ID NO: 442915 - DNA, 75 bp, synthetic construct
  source 1..75: mol_type = other DNA
gatagcactaaacagcttcggccagatatccagaaaccggtatggcacaactcgcttcgcctgcctagtggagaa

SEQ ID NO: 442916 - DNA, 75 bp, synthetic construct
  source 1..75: mol_type = other DNA
ggctgaagccgtgagagaaggcgcgataaaaagtcaggaggcgaacgcaggtggaggccttcaggtttcacttga

SEQ ID NO: 442917 - DNA, 75 bp, synthetic construct
  source 1..75: mol_type = other DNA
gcggggcgtggtttcaggatacgctcaatggtgtggcgtcatttctggacagcagggcaggcgatgcgctgattg

SEQ ID NO: 442918 - DNA, 75 bp, synthetic construct
  source 1..75: mol_type = other DNA
gtaaagaacagggcgtgacgatgatccaggccgatgccgagcacgtttaccgcgcagaagtggcgcgtctgtttg

SEQ ID NO: 442919 - DNA, 75 bp, synthetic construct
  source 1..75: mol_type = other DNA
atagcgaactggaggtgattgcgggagcaaacgccttactggaaagcgtgaaagtgccgatgtgcgtcgtctcta

SEQ ID NO: 442920 - DNA, 75 bp, synthetic construct
  source 1..75: mol_type = other DNA
cttggcaccaaaggcgggcggccccgcgatacccttattcaggatactggcgcagttaaaaaggcgctggataat

SEQ ID NO: 442921 - DNA, 75 bp, synthetic construct
  source 1..75: mol_type = other DNA
gggtcatggcgacggtcgcggtcgctgggtgaaacaggtgtacggctaccgctggagggaggaatgactgaattc

SEQ ID NO: 442922 - DNA, 75 bp, synthetic construct
  source 1..75: mol_type = other DNA
gttcgtcacattgaaagctatattcatgacaggctggcgcaggagatcggtttgcgaacgctgcaaaatgaaatg

SEQ ID NO: 442923 - DNA, 75 bp, synthetic construct
  source 1..75: mol_type = other DNA
aatgactgcgatggatttgggccacggcgacgggcgcgggagttatgtggcgcaggtgtatgggcggcatgaaga

SEQ ID NO: 442924 - DNA, 75 bp, synthetic construct
  source 1..75: mol_type = other DNA
tctgtcaccttaaaaaaactatcttatataaataatatctcagcattacttagtgaatattatcatggtgattgc

SEQ ID NO: 442925 - DNA, 75 bp, synthetic construct
  source 1..75: mol_type = other DNA
tgccctgaccctattgcgacgccgcattttgtcctgcacctcaaacgtgtacttacggcgaataacgacgccatc

SEQ ID NO: 442926 - DNA, 75 bp, synthetic construct
  source 1..75: mol_type = other DNA
actccctgtatgggaagagtgggaaaaccaacctgatgccgactcgctgcgctggagtgattgccctgaccctat

SEQ ID NO: 442927 - DNA, 75 bp, synthetic construct
  source 1..75: mol_type = other DNA
atttccgcatttgaacagacgttatggcgaagcgagccagaaacgccgttaaaggtttatcaattattgtctggt

SEQ ID NO: 442928 - DNA, 75 bp, synthetic construct
  source 1..75: mol_type = other DNA
gaggatggtttaataagcgatgccaaagaagttttctcatggggacttctagctatcaaagaccagtcatcacct

SEQ ID NO: 442929 - DNA, 75 bp, synthetic construct
  source 1..75: mol_type = other DNA
aggtcgtgcgattgttactgcgcctgcgaaagccgcaacggatgtgctggcacagtttgcgggcgagaagtatcg

SEQ ID NO: 442930 - DNA, 75 bp, synthetic construct
  source 1..75: mol_type = other DNA
cattaacagcgcaaatgaaacgcgaagggattcgccgcttgttggtgttgagcggggaagagggctggtgctgtg

SEQ ID NO: 442931 - DNA, 75 bp, synthetic construct
  source 1..75: mol_type = other DNA
ggcacacggcagcaatccactggcggcgacgttacgcgggcggcgtgtcagccgcattgcagtccatccggcgcg

SEQ ID NO: 442932 - DNA, 75 bp, synthetic construct
  source 1..75: mol_type = other DNA
atggcgaaacgcttcctgttgatccactaaacgatgccatcctttctgacgacgactggcttgaactggccggtt

SEQ ID NO: 442933 - DNA, 75 bp, synthetic construct
  source 1..75: mol_type = other DNA
acgtgagcattaccgtttacgtcgcgatgcgcaagctctcgcgcagtggaatggcgaaacgcttcctgttgatcc

SEQ ID NO: 442934 - DNA, 75 bp, synthetic construct
  source 1..75: mol_type = other DNA
atctcaacaactcagtcaggcggtatgggcaggttttcgtcgccctcggggtaatctggtggcccagtcgctggc

SEQ ID NO: 442935 - DNA, 75 bp, synthetic construct
  source 1..75: mol_type = other DNA
gcgacattgcgcggacggcgggttagccggatagcagttcatccggctcgtcagcgggaaggcgcagggcgacag

SEQ ID NO: 442936 - DNA, 75 bp, synthetic construct
  source 1..75: mol_type = other DNA
acggcgatggcgctgttaccaatgagcgaagcgggtaaacaactggcacaacgtgagcattatcgtttacgccgc

SEQ ID NO: 442937 - DNA, 75 bp, synthetic construct
  source 1..75: mol_type = other DNA
ttaaaaaataatcacaaacaggaagaaattcaacaaaacaacagatataatgaagaaaataaacgacagaaatta

SEQ ID NO: 442938 - DNA, 75 bp, synthetic construct
  source 1..75: mol_type = other DNA
ggtaagccaggtgcgatttgtctttgcctgatgcgacgctggcgcgccgcatcaggcctacactactgcaatata

SEQ ID NO: 442939 - DNA, 75 bp, synthetic construct
  source 1..75: mol_type = other DNA
ctcaacgacgtgcaatccggcgtgctgaatatcatcttccgtattgccgacgatcagggactattgttactcgac

SEQ ID NO: 442940 - DNA, 75 bp, synthetic construct
  source 1..75: mol_type = other DNA
gagcgtgcgatggtgatcgcgccttgttcacggatggggccggtgacagaagatgagcgtaatggcttgattaat

SEQ ID NO: 442941 - DNA, 75 bp, synthetic construct
  source 1..75: mol_type = other DNA
ctttggtgagccgatgctggatatcaaagacttgatgcgcaccgatgccaacggtaaaggcgttattaatatcct

SEQ ID NO: 442942 - DNA, 75 bp, synthetic construct
  source 1..75: mol_type = other DNA
ggattaaaagatattttatttggcacgaccgggccgcgcggcgggaagaaagacggtgtggtacaaacgatggca

SEQ ID NO: 442943 - DNA, 75 bp, synthetic construct
  source 1..75: mol_type = other DNA
ggatgcgcaacgatgctaacggtaaaggcgttatcaatatcctcagcgccgaaaagctttatcagatgcctaaac

SEQ ID NO: 442944 - DNA, 75 bp, synthetic construct
  source 1..75: mol_type = other DNA
ggaaaaaaaactgtcctgcccgccgtcatcgtcacggtcacgggaaaaaaacgcgtgtggcggaaaaagaaaatc

SEQ ID NO: 442945 - DNA, 75 bp, synthetic construct
  source 1..75: mol_type = other DNA
cggctcaggaaagaatgcccggggctgacagtccacaggaactgatgaaaagggcaaaggagtatcaggataagt

SEQ ID NO: 442946 - DNA, 75 bp, synthetic construct
  source 1..75: mol_type = other DNA
gatatcgatgccagagctacacaagactttaaagaggccagcgattactttaccagtcgcaaggtcagtgagtcc

SEQ ID NO: 442947 - DNA, 75 bp, synthetic construct
  source 1..75: mol_type = other DNA
cgggtaaaaccgttacgctgcaaaaactggcggagtcattgtcggaaatcggcgtgccggtgtttatggctgatg

SEQ ID NO: 442948 - DNA, 75 bp, synthetic construct
  source 1..75: mol_type = other DNA
atgagcgaacccctgttaattgcccgcacgccggacacagaactgtttttactgccgggaatggctaaccgtcac

SEQ ID NO: 442949 - DNA, 75 bp, synthetic construct
  source 1..75: mol_type = other DNA
tttacgcccaaagatcagaaagcggtaaaagctgcggcgcaaaccatgcgggccaatccggcgtttgataccgaa

SEQ ID NO: 442950 - DNA, 75 bp, synthetic construct
  source 1..75: mol_type = other DNA
ctgacggaaagcattggaggtaaaaccacccgggactgggccatgaaacaggattttcgctgcggctgctggctc

SEQ ID NO: 442951 - DNA, 75 bp, synthetic construct
  source 1..75: mol_type = other DNA
ccttgctgagcagaaaatgcaactggaaaaccagctcgcaattgccgcacctaaagttgagtttgccgatcgcgt

SEQ ID NO: 442952 - DNA, 75 bp, synthetic construct
  source 1..75: mol_type = other DNA
gcaatgaaagccattacccggaatcttgagcgcgaaatctggcgtaacctgatgcagcgttccgggatgttttcc

SEQ ID NO: 442953 - DNA, 75 bp, synthetic construct
  source 1..75: mol_type = other DNA
aagagtacactactgcaaatcgacacgcttatccggcaactgacagaaatctcagcactgacggaaaatattggc

SEQ ID NO: 442954 - DNA, 75 bp, synthetic construct
  source 1..75: mol_type = other DNA
cggatatcaacttacaatcagttgtacttatgatgacgttgattatgaaaataaattgactaaagcatttatcgc

SEQ ID NO: 442955 - DNA, 75 bp, synthetic construct
  source 1..75: mol_type = other DNA
gcaggaaagctttgctgccctggcgctggctcatttctggctggtggggatctcaagtttgtttgccgtgatcat

SEQ ID NO: 442956 - DNA, 75 bp, synthetic construct
  source 1..75: mol_type = other DNA
cgaacttcggtgattatcaacattggtacggcgacgatcgcctcaacggtaggggccagcacgctgggtacgccc

SEQ ID NO: 442957 - DNA, 75 bp, synthetic construct
  source 1..75: mol_type = other DNA
tggcgaggccagcggaattttgattggaaactttgcaaaggttgtcggtattggtcaaaacaaactgtttgcatg

SEQ ID NO: 442958 - DNA, 75 bp, synthetic construct
  source 1..75: mol_type = other DNA
aggcgaacaaggaaagcgagacagtattgtcgttgtagcccagttgtcgccggaattcaccgctcgtcttgttga

SEQ ID NO: 442959 - DNA, 75 bp, synthetic construct
  source 1..75: mol_type = other DNA
ctctgagcttacaggtaagcgtcatgacaatgtgaaacgtactatcgaaatgctggctaaaaatggtgttatccg

SEQ ID NO: 442960 - DNA, 75 bp, synthetic construct
  source 1..75: mol_type = other DNA
tctcaagtttgtttgccgtgatcattggtactggtgccggaattgctgtcactcgcccgtggggcgcggagtttc

SEQ ID NO: 442961 - DNA, 75 bp, synthetic construct
  source 1..75: mol_type = other DNA
tcagtgaagagaatattctgagtacgtttgagcagctacaccagaataaggatgaagtgtttgagcgaggagtga

SEQ ID NO: 442962 - DNA, 75 bp, synthetic construct
  source 1..75: mol_type = other DNA
cgtacaatcggctttcgggaaggatgttcagcacgtttatctgccgtatgacctgcccgatgcgctcaaccgttt

SEQ ID NO: 442963 - DNA, 75 bp, synthetic construct
  source 1..75: mol_type = other DNA
ccgttcccctttgcattggtttagggttgggttcgaaagtcatccctccgcgtctgttatttgccggaatcatcc

SEQ ID NO: 442964 - DNA, 75 bp, synthetic construct
  source 1..75: mol_type = other DNA
agacggtaaaagtgaccacctttaaccgtcctaaggagatggcggatcaggtgtttacgcttaatgtgcttgatg

SEQ ID NO: 442965 - DNA, 75 bp, synthetic construct
  source 1..75: mol_type = other DNA
atttgcgcgtctttatgctggtggctcgccgggccggttttgctgccgtggcggaagaattaggcgtttcaccgg

SEQ ID NO: 442966 - DNA, 75 bp, synthetic construct
  source 1..75: mol_type = other DNA
ctggatgaccacatacagtccgttcagggtaaaggacgctatgaagatgagatgttcatcattaaatactttaag

SEQ ID NO: 442967 - DNA, 75 bp, synthetic construct
  source 1..75: mol_type = other DNA
accgattgaagtggcggaatcagtattgtttatggtgacccgctcgaaaaatgtcaccgtgcgagatttagtgat

SEQ ID NO: 442968 - DNA, 75 bp, synthetic construct
  source 1..75: mol_type = other DNA
tggcggctttagcgcccgtgggcaagcgggccagatgctgaaaaaagaaggcgtcacgctgatggttgaagctat

SEQ ID NO: 442969 - DNA, 75 bp, synthetic construct
  source 1..75: mol_type = other DNA
gacgctggcgtactgagcctgacttataccggtgaagatcgcgaacagatccgcgacattcttaacagtatcgcc

SEQ ID NO: 442970 - DNA, 75 bp, synthetic construct
  source 1..75: mol_type = other DNA
acgcactggtacaaatcgagcaaagcagcggcaattcgttagtgcaggatatcggctctgcgttagccaacaagc

SEQ ID NO: 442971 - DNA, 75 bp, synthetic construct
  source 1..75: mol_type = other DNA
aaaactacgacctggtgttgattgatacgccgccgattctggcagtgaccgatgcggcaattgttggtcgtcatg

SEQ ID NO: 442972 - DNA, 75 bp, synthetic construct
  source 1..75: mol_type = other DNA
gccagcaccgtcggcgatgtgcgcattgttgacccggcaatcacccagcctggtgtgctgaaaccgaagaaaggg

SEQ ID NO: 442973 - DNA, 75 bp, synthetic construct
  source 1..75: mol_type = other DNA
cacgctgctggagaaacggcaggcgctggaagacgaaaaagccaaacttaacggtcgcgtaacggcgatgccgaa

SEQ ID NO: 442974 - DNA, 75 bp, synthetic construct
  source 1..75: mol_type = other DNA
tatcgtctgtccatcaccgctaacgatacgggcagcgataacgctatgaaacttagcgtcagcggcgacagcgcc

SEQ ID NO: 442975 - DNA, 75 bp, synthetic construct
  source 1..75: mol_type = other DNA
ataaccggaatcgttgaatgggatatgagcatgtttaacgacacgccggattataagatcgtgacagggggttaa

SEQ ID NO: 442976 - DNA, 75 bp, synthetic construct
  source 1..75: mol_type = other DNA
agaaaggcaatgctaacgtggtgttctttgatggtatcaccgccggggaaaaagatttctcaacgctggtggcgc

SEQ ID NO: 442977 - DNA, 75 bp, synthetic construct
  source 1..75: mol_type = other DNA
ttccatcgttgaatatgcagcgtatggagatcttcaaaaaggggatcgagcaatcaatcctagctttgcaatcga

SEQ ID NO: 442978 - DNA, 75 bp, synthetic construct
  source 1..75: mol_type = other DNA
ggtacgtgataaccgtaactggtttttgtctgaattgtataacatgcagcatgtgagtcagataacccgtcatat

SEQ ID NO: 442979 - DNA, 75 bp, synthetic construct
  source 1..75: mol_type = other DNA
ttgatgatatatcaaatttaaaaaatgcgtaccctgcattcttcctagacacaaaaacattcttaaataacctga

SEQ ID NO: 442980 - DNA, 75 bp, synthetic construct
  source 1..75: mol_type = other DNA
ggcgtggttgaatgggatatgagcatgtttaacgacacgccggattataaaatcattacaggtaacagcgtgcaa

SEQ ID NO: 442981 - DNA, 75 bp, synthetic construct
  source 1..75: mol_type = other DNA
tggaaaataacaccagtgcctatggcaccggttttaccgtgaccattgaagctgctgaaggtgtgactaccggtg

SEQ ID NO: 442982 - DNA, 75 bp, synthetic construct
  source 1..75: mol_type = other DNA
gcagtatgagtgcgaaaggctactgttatgacaatgcctgtgtggaaagcttctttcattcgctgaaggtggaat

SEQ ID NO: 442983 - DNA, 75 bp, synthetic construct
  source 1..75: mol_type = other DNA
tctggattggcggcgagacaaacgagactgtaaccaaaacgactcaacgcatcctgtgtggtcgtatcgaagaga

SEQ ID NO: 442984 - DNA, 75 bp, synthetic construct
  source 1..75: mol_type = other DNA
catacgcagcaattcacgcgagcaaagcgtaaagctcttggcgagcttgccgcagagagaaaagtgtttcactca

SEQ ID NO: 442985 - DNA, 75 bp, synthetic construct
  source 1..75: mol_type = other DNA
gaacactttatcagccgggaaataatgcgggcaacggtgtttaattatatcgaatgtgattacaatcggtggcgg

SEQ ID NO: 442986 - DNA, 75 bp, synthetic construct
  source 1..75: mol_type = other DNA
atctgatgacgctggcaggctttaaaccggcaggtgtactgtgtgagttgacgaatgatgatggcaccatggcgc

SEQ ID NO: 442987 - DNA, 75 bp, synthetic construct
  source 1..75: mol_type = other DNA
cgctggcgctggcgattggcgcgtttggtatcgggacaacggagttctcgccaatgggcttgttgcccgtcattg

SEQ ID NO: 442988 - DNA, 75 bp, synthetic construct
  source 1..75: mol_type = other DNA
gcggtcaagtccctcccaatccttccgagctgttgatgagcgagcgtttcggcgaactgattgcctgggccagct

SEQ ID NO: 442989 - DNA, 75 bp, synthetic construct
  source 1..75: mol_type = other DNA
cctgagcgtcaccgaggatggtaaagagtccggtgtgctgacgctcacgatggtgggtgaagacaaagatcagat

SEQ ID NO: 442990 - DNA, 75 bp, synthetic construct
  source 1..75: mol_type = other DNA
accgcgcgcatcaggcgctgtacactcatcacctgctggaaagtaccgacagcgattgggggatctgcgaagtta

SEQ ID NO: 442991 - DNA, 75 bp, synthetic construct
  source 1..75: mol_type = other DNA
gctgaagaaagatgccgctggcgtcggtgaaatgtttattggtgacggtaaaagtacaggggtaaccaccggcat

SEQ ID NO: 442992 - DNA, 75 bp, synthetic construct
  source 1..75: mol_type = other DNA
taccggaagcgttgcgccttgctgctgatcttgctgagcagaaaatgcaactggaaaaccagctcgcaattgccg

SEQ ID NO: 442993 - DNA, 75 bp, synthetic construct
  source 1..75: mol_type = other DNA
atgcattggtttagggttgggttcgaaagccatccctccgcgtctgttatttgccggaatcatcctggcgatgct

SEQ ID NO: 442994 - DNA, 75 bp, synthetic construct
  source 1..75: mol_type = other DNA
gagtggaaactgctgtgggttaagctggaaggaaagccgcttccggcgcaggcaccgcccctgaaatgggcctga

SEQ ID NO: 442995 - DNA, 75 bp, synthetic construct
  source 1..75: mol_type = other DNA
gcatggtggttatccaggcgtttatagcggtacgggtgctgggcctgcggcagggaggtgtcagtgaagaaacac

SEQ ID NO: 442996 - DNA, 75 bp, synthetic construct
  source 1..75: mol_type = other DNA
cgccgctgatgacgcttctactttctcatcgtgcccgccgcagtgcgttgattttcctgatggcaattttcacgc

SEQ ID NO: 442997 - DNA, 75 bp, synthetic construct
  source 1..75: mol_type = other DNA
cggcggtagctggcgtcatctggcactcggcgtcgcgggctggatgcgttacacccaagggattgatgagcaagg

SEQ ID NO: 442998 - DNA, 75 bp, synthetic construct
  source 1..75: mol_type = other DNA
aactggcggcatggattgaagagaacgtcaccttcccgtgcactatggttgaccgtatcgttccggcggcgacgc

SEQ ID NO: 442999 - DNA, 75 bp, synthetic construct
  source 1..75: mol_type = other DNA
tccgcagacggcaattgtctccctgacggtcacggaaaaaggctactgtgccgatgcggcaagcggtcagttgga

SEQ ID NO: 443000 - DNA, 75 bp, synthetic construct
  source 1..75: mol_type = other DNA
aatatacctatgctgatgaaatcgtgaacagcgcgcttgagaaactgcgtaaaggctcgcgacagaatctcactg

SEQ ID NO: 443001 - DNA, 75 bp, synthetic construct
  source 1..75: mol_type = other DNA
cgtgatgccatcaacaacgcaaaagcaggtgttagcgcgagcattattaacgtgggtaacggtgattatcgtctg

SEQ ID NO: 443002 - DNA, 75 bp, synthetic construct
  source 1..75: mol_type = other DNA
gctggaaaacatcacgctgaacctgaacgatgtcaccacgggcaaccagacgttgaccattacccaagacaccgc

SEQ ID NO: 443003 - DNA, 75 bp, synthetic construct
  source 1..75: mol_type = other DNA
tgatttttaccactatcggttacgctggtggtcaggtgattgcgccgtggttgcacaatctcgaccagcatttga

SEQ ID NO: 443004 - DNA, 75 bp, synthetic construct
  source 1..75: mol_type = other DNA
accttcccggtcaacggcaaattcactcaggctcagcgtgaaatctacgacattgtgctggagtctcttgaaacc

SEQ ID NO: 443005 - DNA, 75 bp, synthetic construct
  source 1..75: mol_type = other DNA
ccacgaatttaaccgccacggtgcgcgctatccttcctataacaccattgtcggcagcggtgaaaacggctgcat

SEQ ID NO: 443006 - DNA, 75 bp, synthetic construct
  source 1..75: mol_type = other DNA
tctgagcacatttgaacaactgcaccagaaaaaagatgaggtgtttgatcggggcgtgatcaacgtcttcatagg

SEQ ID NO: 443007 - DNA, 75 bp, synthetic construct
  source 1..75: mol_type = other DNA
gtacgaatacgaaacgatactcgacaatgcacatttgatcgtctgtcggcgtccaggttacccacttgaaatggc

SEQ ID NO: 443008 - DNA, 75 bp, synthetic construct
  source 1..75: mol_type = other DNA
tatcagcgcggctaactcgtcgttaagcgggatccgtgatgccatcaacaacgcaaaagcaggcgtaagcgcaag

SEQ ID NO: 443009 - DNA, 75 bp, synthetic construct
  source 1..75: mol_type = other DNA
tctgagcacatttgaacaactgcaccagaataacgatgaggtgtttgaacggggcgtgatcaacgtcttcatagg

SEQ ID NO: 443010 - DNA, 75 bp, synthetic construct
  source 1..75: mol_type = other DNA
tctgagcacatttgaacaactgcaccagaaaaatgatgaggtgtttgagcggggcgtgatcaacgtcttcatagg

SEQ ID NO: 443011 - DNA, 75 bp, synthetic construct
  source 1..75: mol_type = other DNA
gtcgtggttctggtggtaggcgtgcgctggtggctgaaacggcgcgggaagaaaaagccggatcatcaggcgtaa

SEQ ID NO: 443012 - DNA, 75 bp, synthetic construct
  source 1..75: mol_type = other DNA
cttttctggatgcgaaaggaagcccttctgtggtggagcgtgcgatggtgatcgcgccttgttcgcggatggggc

SEQ ID NO: 443013 - DNA, 75 bp, synthetic construct
  source 1..75: mol_type = other DNA
atccccccgcgaaagggaaagaggtggcggtggatgacggtattcttggtggattgaaggatattttgtttggca

SEQ ID NO: 443014 - DNA, 75 bp, synthetic construct
  source 1..75: mol_type = other DNA
gcacgtcggacacagaactgtttttattgccgggaatggcgaatcgtcacgggctgattactggcgcaacgggga

SEQ ID NO: 443015 - DNA, 75 bp, synthetic construct
  source 1..75: mol_type = other DNA
tgggaccggtgggggtttcatcttatcaccgggcaacagactgaccgactcgtcgacctggaaagaatgctacat

SEQ ID NO: 443016 - DNA, 75 bp, synthetic construct
  source 1..75: mol_type = other DNA
aaggcgattcaggaactgggcaccggcgaggcgttgatctcttttctggatgcgaaaggaagcccttctgtggtg

SEQ ID NO: 443017 - DNA, 75 bp, synthetic construct
  source 1..75: mol_type = other DNA
gggcgacggtttcggatctggggccgctgttgttggcgcggctgttgaatctcaacgatgtgcagtctggcgtgc

SEQ ID NO: 443018 - DNA, 75 bp, synthetic construct
  source 1..75: mol_type = other DNA
ggctccgcgcatatcacgttcagaaaaccagaactggttgatcggctaaatgacatcattgcgaagtattatcca

SEQ ID NO: 443019 - DNA, 75 bp, synthetic construct
  source 1..75: mol_type = other DNA
ttatcgatgctgcctctattcccggcgtaggcccagcgcgtaaagcggcgttacggtcttttggtattgaaaccg

SEQ ID NO: 443020 - DNA, 75 bp, synthetic construct
  source 1..75: mol_type = other DNA
gtatctctttgtcatcggcacgcgttttatgtacggctttcgggtgataggtccaacgcttatcggtgccagcca

SEQ ID NO: 443021 - DNA, 75 bp, synthetic construct
  source 1..75: mol_type = other DNA
tttacgcccaaagatcagaaagcggtaaaagctgcggcgcaaaccatgcgccccacccctgcatttgatacggaa

SEQ ID NO: 443022 - DNA, 75 bp, synthetic construct
  source 1..75: mol_type = other DNA
ggcggtggatgacggcattcttggtggattaaaggatattttgtttggcactaccggaccacgcggcgggaagaa

SEQ ID NO: 443023 - DNA, 75 bp, synthetic construct
  source 1..75: mol_type = other DNA
cggaggtgatcagcgggcatacggacgttatctgctcaaccagtatccgccacattctggctgtacgaaagagta

SEQ ID NO: 443024 - DNA, 75 bp, synthetic construct
  source 1..75: mol_type = other DNA
gcggcacctttgatccggtgcactatggtcatcttaaacccgtggaaacgctggcgaatttgattggtctgacgc

SEQ ID NO: 443025 - DNA, 75 bp, synthetic construct
  source 1..75: mol_type = other DNA
atcactttcaaaaggctggagctgattgacagaattaacgatataatagccaggcactttccttctgtgctctca

SEQ ID NO: 443026 - DNA, 75 bp, synthetic construct
  source 1..75: mol_type = other DNA
tcagcggcaaaccgatccccgacaaccgggaaaacatcactattcatctggatgagcacatccggtctgttcagg

SEQ ID NO: 443027 - DNA, 75 bp, synthetic construct
  source 1..75: mol_type = other DNA
ccgggaaaacatcaccattcatctggatgaccacacccagtctgttcaaggtaaagaggactacgaagatgagat

SEQ ID NO: 443028 - DNA, 75 bp, synthetic construct
  source 1..75: mol_type = other DNA
gactgaccgactcgccgatctggaaagaatgctacatctgttcagcgacaaaccgattcccgacaaccgggaaaa

SEQ ID NO: 443029 - DNA, 75 bp, synthetic construct
  source 1..75: mol_type = other DNA
tccccgacaaccgggaaaacatcacccttcgtctggatgatcacatccagtctgttcagggtaaagaggactatg

SEQ ID NO: 443030 - DNA, 75 bp, synthetic construct
  source 1..75: mol_type = other DNA
cgttccgggatgctttccttaatggatgcacaggcccgtgatacatggtaccggtcactggagtacgataatttt

SEQ ID NO: 443031 - DNA, 75 bp, synthetic construct
  source 1..75: mol_type = other DNA
atcattaaatactttaagaagggatctgcacacatcactttcaaaaggctggagctgattgacagaattaacgat

SEQ ID NO: 443032 - DNA, 75 bp, synthetic construct
  source 1..75: mol_type = other DNA
gccgcagggaatgctgcgtattatcagcagttttggttttggacggcaggtggtagctccggcactgtcagcact

SEQ ID NO: 443033 - DNA, 75 bp, synthetic construct
  source 1..75: mol_type = other DNA
ctattacaccgcaccacccgtcgcgtcaccattacggaggaaggcgagcggatttatgaatgggcgcagcggatt

SEQ ID NO: 443034 - DNA, 75 bp, synthetic construct
  source 1..75: mol_type = other DNA
cgccaggtttctcaatatggcgtgcgtgtgggtgcggtgctgccaggaccagtagtcactgccctgcttgatgac

SEQ ID NO: 443035 - DNA, 75 bp, synthetic construct
  source 1..75: mol_type = other DNA
atcgtcaacaacctggtgaggtgggaccggtgggggtttcatcttatcaccgggcaacagactgaccgggttgcc

SEQ ID NO: 443036 - DNA, 75 bp, synthetic construct
  source 1..75: mol_type = other DNA
ggggagtgatcaacgtcttcaaagggctgagctgggattacaaaaccaactcaccctgtaaatttggcagtaaaa

SEQ ID NO: 443037 - DNA, 75 bp, synthetic construct
  source 1..75: mol_type = other DNA
ctgacccgcagtatcggaggaaaaaccgcgctggactgggctatgaagcaggatttccgttgcggctgctggttg

SEQ ID NO: 443038 - DNA, 75 bp, synthetic construct
  source 1..75: mol_type = other DNA
atggagaaacctgaaaccgcaatgaaagctatcacacgcaatctcgatcgtgaaatctggcgtgacctgatgcaa

SEQ ID NO: 443039 - DNA, 75 bp, synthetic construct
  source 1..75: mol_type = other DNA
ccggtcactggagtacgataattttccggaaatcagcgaagcgaacattctgagcacatttgaacaactacacca

SEQ ID NO: 443040 - DNA, 75 bp, synthetic construct
  source 1..75: mol_type = other DNA
cttatcaccgggcaacagactgaccgactcgtcgacctggaaagaatgctacatctgttcagcggcaaaccgatc

SEQ ID NO: 443041 - DNA, 75 bp, synthetic construct
  source 1..75: mol_type = other DNA
ccgggaaaacatcacccttcgtctggatgaccacatccagtctgttcagggtaaagaggactatgaagatgagat

SEQ ID NO: 443042 - DNA, 75 bp, synthetic construct
  source 1..75: mol_type = other DNA
atgtcagacatcacaatctcccgtccggaactggtcaccgggcatacggacgttatctgctcaaccagtatccgc

SEQ ID NO: 443043 - DNA, 75 bp, synthetic construct
  source 1..75: mol_type = other DNA
atcacgttcaggaaatcagagctggttgacaggctgaatgatattattgcgaaatactatccggaaaccttatcg

SEQ ID NO: 443044 - DNA, 75 bp, synthetic construct
  source 1..75: mol_type = other DNA
aaaccgcactggactggaccatgaaacaggattttcgctgtggctgctggctgatggagaaacctgaaaccacaa

SEQ ID NO: 443045 - DNA, 75 bp, synthetic construct
  source 1..75: mol_type = other DNA
ggcgcgacgcaggatgcaattgttgagatcactgcaactgacggcatgaccactcattacggtcaaattactcat

SEQ ID NO: 443046 - DNA, 75 bp, synthetic construct
  source 1..75: mol_type = other DNA
tggctgagtggggtcgatgaaaatcaacaatttaccgtgcactggggcgaccagaaaacgtgtgccattcatctg

SEQ ID NO: 443047 - DNA, 75 bp, synthetic construct
  source 1..75: mol_type = other DNA
cagcaccgctacgccatcaaagaaacgcggtcaaagttgaagggcacgatcggcagccggttgatgaacgagcgg

SEQ ID NO: 443048 - DNA, 75 bp, synthetic construct
  source 1..75: mol_type = other DNA
ccgcactggactgggcgatgaaacaggattttcgctgcggctgctggctcatggagaaaactgaaacggcaatga

SEQ ID NO: 443049 - DNA, 75 bp, synthetic construct
  source 1..75: mol_type = other DNA
ccacctcaatcggacacattctggctgtacgaaagaccacactgatgcaaatcgacacacttatccggcaactga

SEQ ID NO: 443050 - DNA, 75 bp, synthetic construct
  source 1..75: mol_type = other DNA
ggtgaatctgttgccaaacaaagcactatgcagcgtagcgcaactggcacctcttctcgttcaatgggtggctga

SEQ ID NO: 443051 - DNA, 75 bp, synthetic construct
  source 1..75: mol_type = other DNA
aataccattttcctgggccgaattctacttatggtgcttttagtgttccaacttccggaacaaaaatatcacaaa

SEQ ID NO: 443052 - DNA, 75 bp, synthetic construct
  source 1..75: mol_type = other DNA
tgcacaacttcaggcattgcttgatgacgaaaagagccgtgagcaactgattgcagagctgggcctcgcaggccg

SEQ ID NO: 443053 - DNA, 75 bp, synthetic construct
  source 1..75: mol_type = other DNA
ccaattaaaagaacttaacgaatttaatccgcagcctggagagtttgagcaaatcgacgaagagtacaaacgtct

SEQ ID NO: 443054 - DNA, 75 bp, synthetic construct
  source 1..75: mol_type = other DNA
tactgttacccgtggcggttttggtgaatctgttgccaaacaaagcactatgcagcgtagcgcaaccggcacctc

SEQ ID NO: 443055 - DNA, 75 bp, synthetic construct
  source 1..75: mol_type = other DNA
aactgtttctctgtatcaaaatgctgatgattgttcagccgcaaatcctggcaagagcgcagaatgcaccaccgc

SEQ ID NO: 443056 - DNA, 75 bp, synthetic construct
  source 1..75: mol_type = other DNA
cgcggatcagcgcccgccgcgcccaggccaaagagtgccagcgtcttgaaatcccgaatatgtcgccgctgctgt

SEQ ID NO: 443057 - DNA, 75 bp, synthetic construct
  source 1..75: mol_type = other DNA
tagtgtgcgatagcggtgcggggttttcgacggagcagctgttttccttgccaacaatcttgcaaaaaaaatgcg

SEQ ID NO: 443058 - DNA, 75 bp, synthetic construct
  source 1..75: mol_type = other DNA
tagtgtgcgatagcggtgcggggttttcgacggagcaagctgttttccttgccaacaatcttgcaaaaaaatgcg

SEQ ID NO: 443059 - DNA, 75 bp, synthetic construct
  source 1..75: mol_type = other DNA
caatgggcaatatccctgcgttccgtgcacaacttcaggcattgcttgatgacgaaaagagccgtgagcaactga

SEQ ID NO: 443060 - DNA, 75 bp, synthetic construct
  source 1..75: mol_type = other DNA
taggcaatattccggccttccgcgcacaacttcaggcgctactggaaaacgaagacagccgcgagcagctgatcc

SEQ ID NO: 443061 - DNA, 75 bp, synthetic construct
  source 1..75: mol_type = other DNA
cgctgacgcactggggattaccgagggggagaacgtcatccacctgcgcaccctgcgtcgtgtcaacggcgtcgc

SEQ ID NO: 443062 - DNA, 75 bp, synthetic construct
  source 1..75: mol_type = other DNA
atggccaaagtacaagggctctttgttggataccgaaaattcgctgttgatcgtgactggcttcgtcagcaggaa

SEQ ID NO: 443063 - DNA, 75 bp, synthetic construct
  source 1..75: mol_type = other DNA
gctcaatcacggtgctgcagggcatatacgtgttagtcagctccgatgcaagcgcccgactggctcccggcatta

SEQ ID NO: 443064 - DNA, 75 bp, synthetic construct
  source 1..75: mol_type = other DNA
cagcattaagtccggtgagcatgctctcatcgataacagcgaagctgtttctgcaaaatttgccagatatgtgcc

SEQ ID NO: 443065 - DNA, 75 bp, synthetic construct
  source 1..75: mol_type = other DNA
cacacagagtgacggggagctggttacggtcaccattaagacagctgctgcgaccggtaccctgaatgttctgct

SEQ ID NO: 443066 - DNA, 75 bp, synthetic construct
  source 1..75: mol_type = other DNA
cccgcacgctagaatacgacgacggcacaaaagaaatcagcacggtagatatttcagttatcgggattgttggta

SEQ ID NO: 443067 - DNA, 75 bp, synthetic construct
  source 1..75: mol_type = other DNA
gcctgacggatcgagaaaattgacaatgcttacagacggcgcgatgactccgtcaaaaatgtatgatcagaacca

SEQ ID NO: 443068 - DNA, 75 bp, synthetic construct
  source 1..75: mol_type = other DNA
cactgagtgagcggatttattcaggtacgcacggtaatgagtcggtggcagaaggtgtgtttacagtgaatgctg

SEQ ID NO: 443069 - DNA, 75 bp, synthetic construct
  source 1..75: mol_type = other DNA
gaatgtcgcgttgaatatcaaatcactagatgacttttccccggacaacgtagccagacaggttcctgaagtgaa

SEQ ID NO: 443070 - DNA, 75 bp, synthetic construct
  source 1..75: mol_type = other DNA
atgagcaaaaaatttgaaggcagcgtcgcgcctcgcgagcgtattaatatatcgtatgtcccaaaaacagatggc

SEQ ID NO: 443071 - DNA, 75 bp, synthetic construct
  source 1..75: mol_type = other DNA
gacgccagaaattttccgcagggcaatcccactgcagacccgtcacaggaaaagctgaaggtcttttatatcgat

SEQ ID NO: 443072 - DNA, 75 bp, synthetic construct
  source 1..75: mol_type = other DNA
tacgcatggtaatgagtcggtggcagaaggtgtgtttacagtgaatgctgccgaacaggaaaccgttattaatct

SEQ ID NO: 443073 - DNA, 75 bp, synthetic construct
  source 1..75: mol_type = other DNA
acttggcaaagatgatgaacgtgatttgtttccgacggcgctcaaaattgtgaacaccattaagccaaaagcagt

SEQ ID NO: 443074 - DNA, 75 bp, synthetic construct
  source 1..75: mol_type = other DNA
gaaactgcaatgcctgtacctgagaaagaagtgcaagcccccatcgtggaagtgaaaagccacgggcataagaaa

SEQ ID NO: 443075 - DNA, 75 bp, synthetic construct
  source 1..75: mol_type = other DNA
gatcgctaaaacaaaagtgcaatttgcggcaatatagttattccatgaccgtacaatcttgcattcagtgtaaat

SEQ ID NO: 443076 - DNA, 75 bp, synthetic construct
  source 1..75: mol_type = other DNA
gctgctccgacctttaaacttatggggtacacgacaacaaggacatcagtaaccttaaaagtatcaaccggaaat

SEQ ID NO: 443077 - DNA, 75 bp, synthetic construct
  source 1..75: mol_type = other DNA
tgactaacgcgcttgcgggtaagcaaccgaaggatgccaccctgacggcgctggcggagcttgctacatcagcag

SEQ ID NO: 443078 - DNA, 75 bp, synthetic construct
  source 1..75: mol_type = other DNA
agaaggggcggcatgaccagctgcttaccgcgcttcgtgcgctgctgttaagccgcaagaatccgtttggcgata

SEQ ID NO: 443079 - DNA, 75 bp, synthetic construct
  source 1..75: mol_type = other DNA
atacaaccacttcgtttttattacggtgcgcagctcaaacgggtagttattactataactggattgctattgggt

SEQ ID NO: 443080 - DNA, 75 bp, synthetic construct
  source 1..75: mol_type = other DNA
acagttgtattcccggttgcgtttaataatgcctgtgttgccgttgttgcaaattatgacaatgtcagcgcacct

SEQ ID NO: 443081 - DNA, 75 bp, synthetic construct
  source 1..75: mol_type = other DNA
ggctctcgaaaaccttggtttgggagaagcggcaaaacggaatgtgggaacaggggaaaatcagatacctgatat

SEQ ID NO: 443082 - DNA, 75 bp, synthetic construct
  source 1..75: mol_type = other DNA
tactggatatcaaaaattaccatcaggttttattcttcagtggggctcaatcggcgcaccaggcattgcacagga

SEQ ID NO: 443083 - DNA, 75 bp, synthetic construct
  source 1..75: mol_type = other DNA
ctctcgaaaaccttggtttgggagaaggtgctaactgggttatgttacctggaggaatgataattcagcgtgttt

SEQ ID NO: 443084 - DNA, 75 bp, synthetic construct
  source 1..75: mol_type = other DNA
tggaaagctgacaacgcagtccagtatctggattaatttccctgcagcattccctaatgactgtattgccggagg

SEQ ID NO: 443085 - DNA, 75 bp, synthetic construct
  source 1..75: mol_type = other DNA
tgggcgttatccctctggtatcaacaacagcttatggtggtgtatccagtaatattacaggttcatacgcgacgg

SEQ ID NO: 443086 - DNA, 75 bp, synthetic construct
  source 1..75: mol_type = other DNA
ggggaaaatcagataccggacatggcctcttttgccagtggtaatggatggatgaaattacccaacgggaaaatc

SEQ ID NO: 443087 - DNA, 75 bp, synthetic construct
  source 1..75: mol_type = other DNA
ggaaaatcagataccggacatggcctctttgccagtggtaatggatggatgaaattaccaacgggaaaatcctgc

SEQ ID NO: 443088 - DNA, 75 bp, synthetic construct
  source 1..75: mol_type = other DNA
tccgacaaataaattgcctgatttacgtggtgagtttattcgtggctgggatgacgggcggggattgatacaggt

SEQ ID NO: 443089 - DNA, 75 bp, synthetic construct
  source 1..75: mol_type = other DNA
atgcacagaataccaggcgagatactgcaccataaaactaaaaatatcaagctgatggctattgttcagcgttta

SEQ ID NO: 443090 - DNA, 75 bp, synthetic construct
  source 1..75: mol_type = other DNA
tgcagaagtggtcagagataactacggcaagctggacgatatcagcagaccgacacattacgcaccgccaccaca

SEQ ID NO: 443091 - DNA, 75 bp, synthetic construct
  source 1..75: mol_type = other DNA
cgtccgggataatcaccgcaaatacagcgatatcagcaatccgaaaattgaggcgtttcggcgaccaaatatggc

SEQ ID NO: 443092 - DNA, 75 bp, synthetic construct
  source 1..75: mol_type = other DNA
ttaatacggaagctcggcgccgtgtaaaatactggcgggaacatggttacgcatttagcggtaatcgcattctta

SEQ ID NO: 443093 - DNA, 75 bp, synthetic construct
  source 1..75: mol_type = other DNA
ttggttcagttgcacgggcgaccttaaagataaaactgttcttgagtttgaagtggcacgagatggaaaattgat

SEQ ID NO: 443094 - DNA, 75 bp, synthetic construct
  source 1..75: mol_type = other DNA
agccataatattaccagagcgttttttatatgatgtgagtaaagagtgcatcactcttaaagataagatcttcca

SEQ ID NO: 443095 - DNA, 75 bp, synthetic construct
  source 1..75: mol_type = other DNA
tacgctaatgcacggttcaccttcaatgcttcaacatctaccctgcgctatatgctctatgtgggctttatgggc

SEQ ID NO: 443096 - DNA, 75 bp, synthetic construct
  source 1..75: mol_type = other DNA
ttcgcgaatgcaaaattcacattcaaggcatcgactacaacgatgcgctacatgttatatgtcgggttcatggga

SEQ ID NO: 443097 - DNA, 75 bp, synthetic construct
  source 1..75: mol_type = other DNA
gtgatgactgcagaaggccctacgttaaccggctttaattctgcttacagaacgtcatcaaccagtgacacggta

SEQ ID NO: 443098 - DNA, 75 bp, synthetic construct
  source 1..75: mol_type = other DNA
cgcagcataacgccaaaagcgccaagctgatggccattgttcagcgtctacagcagattatggtcaacgaaaatc

SEQ ID NO: 443099 - DNA, 75 bp, synthetic construct
  source 1..75: mol_type = other DNA
cggctacagcgcacaacacgtgaatcattggttaaatcattttacatcgttcggtgtgctggattatgaagggat

SEQ ID NO: 443100 - DNA, 75 bp, synthetic construct
  source 1..75: mol_type = other DNA
tggttaaatcacctgagccattttggggtaattaagtatgaggctgtgaatagtcagacgttccgtttgctcgag

SEQ ID NO: 443101 - DNA, 75 bp, synthetic construct
  source 1..75: mol_type = other DNA
cctgatgccgaagaagatcgaaactgaaaatcagtttctgcgcctgctttcaaactcacctttgcaggtcgatat

SEQ ID NO: 443102 - DNA, 75 bp, synthetic construct
  source 1..75: mol_type = other DNA
attcattcctggcaccgcattcgcgctatgctgactttccggcagcgttgattcgtgattacaccgatctggaaa

SEQ ID NO: 443103 - DNA, 75 bp, synthetic construct
  source 1..75: mol_type = other DNA
catgcgcttctgacgcgtggctttgatgattcattcctggcaccacattcgcgctatgctgactttccggcagcg

SEQ ID NO: 443104 - DNA, 75 bp, synthetic construct
  source 1..75: mol_type = other DNA
agtctgccgcttattgtctctaacctggtgaatatcgtttcagcagatttctttggccttggttttcgcgaatat

SEQ ID NO: 443105 - DNA, 75 bp, synthetic construct
  source 1..75: mol_type = other DNA
gatggtctgattgtaactggcgcgccactgggtctggtggagtttaatgacgtcgcttactggccgcagatcaaa

SEQ ID NO: 443106 - DNA, 75 bp, synthetic construct
  source 1..75: mol_type = other DNA
ggcgcaggaatatttccgcgatgtggaagccggactagacccggatgtaccgtataactatttcccgcacaatga

SEQ ID NO: 443107 - DNA, 75 bp, synthetic construct
  source 1..75: mol_type = other DNA
gattaaagatctggcaaccttcagaactggctggatagttttaattcttctgctggttgggttctttgtcctcga

SEQ ID NO: 443108 - DNA, 75 bp, synthetic construct
  source 1..75: mol_type = other DNA
gctccacgctggcgtttgtgatggcagcgggctttatcgctgacacctccagcctgccgctcatcgtatcgaacc

SEQ ID NO: 443109 - DNA, 75 bp, synthetic construct
  source 1..75: mol_type = other DNA
atggctggacaaatcagcctgcacctcctgctgaggcaggaaaacatatttacaaaatcatatatgatggggtct

SEQ ID NO: 443110 - DNA, 75 bp, synthetic construct
  source 1..75: mol_type = other DNA
caggtgctggagtggtcgaaagatcacgtcacctcgacgctgtttgtctgttgggcggtacaggccgcgctcaat

SEQ ID NO: 443111 - DNA, 75 bp, synthetic construct
  source 1..75: mol_type = other DNA
ggttggcgctctttctatcgatggaagcactgcaactggcgttattaaagaggcgatgatctacgccaacgtgat

SEQ ID NO: 443112 - DNA, 75 bp, synthetic construct
  source 1..75: mol_type = other DNA
gccgtcgggtatcccggtcagcgcgattgctgctgtaggcgctgtcattctatttgcggtggcgaaacgaggcca

SEQ ID NO: 443113 - DNA, 75 bp, synthetic construct
  source 1..75: mol_type = other DNA
tattacttccgtacaggaattatcatgaccctgcctgtgctttttgtgacgctggtggcgctggcgctacgcctc

SEQ ID NO: 443114 - DNA, 75 bp, synthetic construct
  source 1..75: mol_type = other DNA
tgaacgggcgatcgatcgtcttcgttccaatagcgagtttgtaccgctatgcgtttctgcgctggcgcgagcgcg

SEQ ID NO: 443115 - DNA, 75 bp, synthetic construct
  source 1..75: mol_type = other DNA
cgctggcgcgagcgcgtgccgactggctgtacggcatcaatatgacccgtgcgtataccattctcggtcgcaatg

SEQ ID NO: 443116 - DNA, 75 bp, synthetic construct
  source 1..75: mol_type = other DNA
ttatattgataatcaggatgtttatcatcagccatccagtgtgttctttgttattaaaccgtctgcgtggggaaa

SEQ ID NO: 443117 - DNA, 75 bp, synthetic construct
  source 1..75: mol_type = other DNA
tcggtgctgacgcaaatcagcgaaaagcagtgtcgctatcaggactttatgcaaccgttggtggggacgctgtat

SEQ ID NO: 443118 - DNA, 75 bp, synthetic construct
  source 1..75: mol_type = other DNA
tatacgcaaccgctgctgggatgacaaaaaggtcgatgcacaccacgccatcatcccgaccgcgaggagttctgc

SEQ ID NO: 443119 - DNA, 75 bp, synthetic construct
  source 1..75: mol_type = other DNA
gctttccgtgggacgcgtgcagacgcccgtgctcgggctggtggtgcgccgcgatgaagagattgaaaacttcgt

SEQ ID NO: 443120 - DNA, 75 bp, synthetic construct
  source 1..75: mol_type = other DNA
tagcccctgccgacggcgagtattaccagaacctgacgccggtgaccgggcagctactgtgcgaagtggcgtctt

SEQ ID NO: 443121 - DNA, 75 bp, synthetic construct
  source 1..75: mol_type = other DNA
catctttggcgcgtcagaatctcaaatcatccacgtaaccgcctggacggaacgcgaagcgcgtagccgttgccc

SEQ ID NO: 443122 - DNA, 75 bp, synthetic construct
  source 1..75: mol_type = other DNA
tcacatcaaagttatggtgggctgggcgggggcttcttcggaagcgccggttccctttgacgccggttacgccaa

SEQ ID NO: 443123 - DNA, 75 bp, synthetic construct
  source 1..75: mol_type = other DNA
atgttaaatcataccacacacccgcaagggcgggactcacacaacctgaataaagcgggtgtaaaaaaccagttg

SEQ ID NO: 443124 - DNA, 75 bp, synthetic construct
  source 1..75: mol_type = other DNA
accttgtacacacacaaactgcctttgtgtggcgttttctggccctgaatatcggagaaaaaaaccagttgatcg

SEQ ID NO: 443125 - DNA, 75 bp, synthetic construct
  source 1..75: mol_type = other DNA
atttatccgcaccagcaaaatctggtgccgggattggcgtcctggtatttaacgaagcgcacaacacgcgccctg

SEQ ID NO: 443126 - DNA, 75 bp, synthetic construct
  source 1..75: mol_type = other DNA
acaaatgaaagtattaaaaccttatgttgactcaggaaaaattaaagtcgttggcgaccaatgggttgatggctg

SEQ ID NO: 443127 - DNA, 75 bp, synthetic construct
  source 1..75: mol_type = other DNA
gtctgatgttacaaaagctgccggacatgctcatcttattgctgctgtttgttcccgccaccagtcggcggttct

SEQ ID NO: 443128 - DNA, 75 bp, synthetic construct
  source 1..75: mol_type = other DNA
tccggagctgttcagcattcccggtgaatcaaaacgtgaaatcttccatagcctgatgctgcagaagttgccgga

SEQ ID NO: 443129 - DNA, 75 bp, synthetic construct
  source 1..75: mol_type = other DNA
tcgcctgaatgtgcctgcgctggtgcaggtggcggcgctcgccattattatgatccgtggcctcgacgtgctgat

SEQ ID NO: 443130 - DNA, 75 bp, synthetic construct
  source 1..75: mol_type = other DNA
ccttcatacaattgatgatttctttcttggttattttttcttctcgctattgcctttgtcctgcaacagactcgc

SEQ ID NO: 443131 - DNA, 75 bp, synthetic construct
  source 1..75: mol_type = other DNA
atctcactaaagcaaaaaaacttattcattttaccgataatagaagaataccaatacacgactcttaagtatcaa

SEQ ID NO: 443132 - DNA, 75 bp, synthetic construct
  source 1..75: mol_type = other DNA
ccgaacttcatggtggaccctaaaactcttcaatgcacgggtctgatcgaccttgggcggctcggaacagcagat

SEQ ID NO: 443133 - DNA, 75 bp, synthetic construct
  source 1..75: mol_type = other DNA
cgcaatggtctttcgagagcgttcgtcgaacagctgacgtaattgaggattctatagcccgggcaatgatgaccg

SEQ ID NO: 443134 - DNA, 75 bp, synthetic construct
  source 1..75: mol_type = other DNA
tatcgccggaattaattcgcttttgacgtcagcgcaaattaacgaagttaccccgcgaattattatagcgccgga

SEQ ID NO: 443135 - DNA, 75 bp, synthetic construct
  source 1..75: mol_type = other DNA
ctgctcgggaaatacgggaccctgcctaccgcaatttctgatattttaaatcagacagatgcgctaatcgttgcc

SEQ ID NO: 443136 - DNA, 75 bp, synthetic construct
  source 1..75: mol_type = other DNA
tgattttggtccgaaatctccagcacaaacaattacgttaatgtaccgcgttaataatgactatacagttgaagc

SEQ ID NO: 443137 - DNA, 75 bp, synthetic construct
  source 1..75: mol_type = other DNA
cggcagtagatgtcggggaggacgcgggaaatgtgactgcctcaccgttgcaatatttaagtggcggcagtgatg

SEQ ID NO: 443138 - DNA, 75 bp, synthetic construct
  source 1..75: mol_type = other DNA
gacgtaggcgggcaatcaagaccatattcagccattgctgctggtttacgagccagaattgataatgaaaaaggg

SEQ ID NO: 443139 - DNA, 75 bp, synthetic construct
  source 1..75: mol_type = other DNA
tgggcttgagagagatatcaaaggaaggccattaatttatcctatcgaaaattatgatgagtgtaagaaaaaatg

SEQ ID NO: 443140 - DNA, 75 bp, synthetic construct
  source 1..75: mol_type = other DNA
ccctttgcacctcacttctgcttaccaacgttgcggcacacgccaaagaagtcaaaataggtatggcgattgatg

SEQ ID NO: 443141 - DNA, 75 bp, synthetic construct
  source 1..75: mol_type = other DNA
catcaaagatcctgcgacgttcagaaccggctgggttgtgctcctccttctgctggtcggtttttttgtccttga

SEQ ID NO: 443142 - DNA, 75 bp, synthetic construct
  source 1..75: mol_type = other DNA
gcgtcagttatggtgccggtggatattgccgccattgtcgccacgctggtgatgctgcatctttttttccgcaaa

SEQ ID NO: 443143 - DNA, 75 bp, synthetic construct
  source 1..75: mol_type = other DNA
ttggcgaccaatgggttgatggctggttaccagaaaatgcgctaaaaattatggaaaacgcgctgacagctaaca

SEQ ID NO: 443144 - DNA, 75 bp, synthetic construct
  source 1..75: mol_type = other DNA
gtcaaaataggaatggcaattgatgatctccgtcttgagcgctggcaaaaagatcgtgatatctttgtaaaaaaa

SEQ ID NO: 443145 - DNA, 75 bp, synthetic construct
  source 1..75: mol_type = other DNA
atggaaaacgcgctaaccgccaataataacaaaattgatgctgtagttgcctcaaacgatgccaccgcaggtggg

SEQ ID NO: 443146 - DNA, 75 bp, synthetic construct
  source 1..75: mol_type = other DNA
atgagtgattccaacagccgtctggtctactcaacggaaaccggacgtattgatgagccaaaagcggccccagta

SEQ ID NO: 443147 - DNA, 75 bp, synthetic construct
  source 1..75: mol_type = other DNA
gaagaaaaaatgcggctgcggcggagcagtaaaagacggaattatcgaaatccagggagataagcgtgatttatt

SEQ ID NO: 443148 - DNA, 75 bp, synthetic construct
  source 1..75: mol_type = other DNA
tccagggcgataagcgtgatttattaaaatcactacttgaagcgaaagggatgaaggtaaaactcgcaggtggtt

SEQ ID NO: 443149 - DNA, 75 bp, synthetic construct
  source 1..75: mol_type = other DNA
tgctctggctgcacgtactttcgcagaagaatatgactatcagctggggatattacttccgtacagggattatca

SEQ ID NO: 443150 - DNA, 75 bp, synthetic construct
  source 1..75: mol_type = other DNA
gatgctgcatctgttcttccgcaaagatattccgccgacttacgacctggctctcctgaaagcacctgcaaaagc

SEQ ID NO: 443151 - DNA, 75 bp, synthetic construct
  source 1..75: mol_type = other DNA
tggagtgcaatgctaggcgcaggactggctttgatatctggcgttgtgcatgtaagcgatattccggtggtgtgg

SEQ ID NO: 443152 - DNA, 75 bp, synthetic construct
  source 1..75: mol_type = other DNA
tggaaagtttcatggggcaatgataaaaactcaaactgtattgtcgattacaagcttcctgaagtctctcctgga

SEQ ID NO: 443153 - DNA, 75 bp, synthetic construct
  source 1..75: mol_type = other DNA
gatgggcaatttatcgagtcgccacgtaccggcgaaaccattcggataagccgattagccgaacctttctggcag

SEQ ID NO: 443154 - DNA, 75 bp, synthetic construct
  source 1..75: mol_type = other DNA
gccgattagccgaacctttctggcaggaccattttttgggtgcgcgacggattttgacggaagagacgattttgt

SEQ ID NO: 443155 - DNA, 75 bp, synthetic construct
  source 1..75: mol_type = other DNA
cgcctggagcaacagcttggtaagccttacgtctggggcggcacgcggcctgataaatgcttcgactgcagcggg

SEQ ID NO: 443156 - DNA, 75 bp, synthetic construct
  source 1..75: mol_type = other DNA
gatgcaaaaccgtgcgcgattgctaaagcgataccacgcgcatctgaaaaaacaggccagctacattgtagaagg

SEQ ID NO: 443157 - DNA, 75 bp, synthetic construct
  source 1..75: mol_type = other DNA
atgtcttcgttcttgctcggcagatttctgcatccaggcgtgttttcgttatgcgttttgctccctttattcgcc

SEQ ID NO: 443158 - DNA, 75 bp, synthetic construct
  source 1..75: mol_type = other DNA
gacgatgacgacaatttaccgtttgtcctcgatgccatcctgaacaaaggggcgcgctacagtgccgttgagttg

SEQ ID NO: 443159 - DNA, 75 bp, synthetic construct
  source 1..75: mol_type = other DNA
cgtcccgcaacttccggaggacgggacacagataaccttcccctgggccggggaatggctgacggagccggagat

SEQ ID NO: 443160 - DNA, 75 bp, synthetic construct
  source 1..75: mol_type = other DNA
agtggtactgaaaccggtgcgacacttgcgctgagagaaaagaagagcgcttctctgataaaacttactggtccg

SEQ ID NO: 443161 - DNA, 75 bp, synthetic construct
  source 1..75: mol_type = other DNA
gatggcatcacctttggacagccgctgggcgacacaatggttctggttaaggctcctggcgctgataatgtcaaa

SEQ ID NO: 443162 - DNA, 75 bp, synthetic construct
  source 1..75: mol_type = other DNA
tattccaataatatatggcaaaacgatcgggatcatttactcgcttttacgcttaatgttccctttagtcattgg

SEQ ID NO: 443163 - DNA, 75 bp, synthetic construct
  source 1..75: mol_type = other DNA
ggggctgaatacggcttctgtcgccggtatgaatctgctggcggatgatgcctgtgtgccattaaccacaatggt

SEQ ID NO: 443164 - DNA, 75 bp, synthetic construct
  source 1..75: mol_type = other DNA
tgttttctctgcatttgggggctactcgtgtgatttataacattttttcctctggagaaacattaacaattatta

SEQ ID NO: 443165 - DNA, 75 bp, synthetic construct
  source 1..75: mol_type = other DNA
actggcatcttcagacgcagtccgctttgctggcacatctctgtcagcttgaaggtgaactgacgatacttcgcg

SEQ ID NO: 443166 - DNA, 75 bp, synthetic construct
  source 1..75: mol_type = other DNA
attcagcgcttcagacgcagtctgctctgctggctcatatcagtcagatggaaggcgagctgatgcggttacgag

SEQ ID NO: 443167 - DNA, 75 bp, synthetic construct
  source 1..75: mol_type = other DNA
gcaccgaaacaatattaaaacttccttattctaaaagttctgagagtgaatttgatattctcaaaaaatttaaag

SEQ ID NO: 443168 - DNA, 75 bp, synthetic construct
  source 1..75: mol_type = other DNA
tccaatagcgagtttgtaccgctgtgcgtttctgcactggcgcgggcgcgggctgactggctgtacggcattaat

SEQ ID NO: 443169 - DNA, 75 bp, synthetic construct
  source 1..75: mol_type = other DNA
tgtggcatcgggtgggggggctgttaaaaaagcacccaataagcgtgtgaaaaaagcggcaaagcccaaaacaga

SEQ ID NO: 443170 - DNA, 75 bp, synthetic construct
  source 1..75: mol_type = other DNA
ggcgatggctttattgagtgcggtaatggtcaggtggtgacctggtgtatcggtcacctgcttgagcaggcgcag

SEQ ID NO: 443171 - DNA, 75 bp, synthetic construct
  source 1..75: mol_type = other DNA
tttttcctgaggaccgtgagagtctgcagtggctttgtgtgaaaggcattccgccaaagcatgatgaccgatggg

SEQ ID NO: 443172 - DNA, 75 bp, synthetic construct
  source 1..75: mol_type = other DNA
atgatctggcagcctgagttcacagataaaacactctccaggaaacccggggcggttcaggtgcaacggtataga

SEQ ID NO: 443173 - DNA, 75 bp, synthetic construct
  source 1..75: mol_type = other DNA
caaaaaacaccagcaccttttatcataacgccaccgttatttcggcttgatgccttacaatccagtcgtcttcgt

SEQ ID NO: 443174 - DNA, 75 bp, synthetic construct
  source 1..75: mol_type = other DNA
cagtattcattacggcgctgatacctggaacgtgctggatattgttcagcgttgggacagcttgttcgcctcgtt

SEQ ID NO: 443175 - DNA, 75 bp, synthetic construct
  source 1..75: mol_type = other DNA
cgaaggaactggaaatcaatggacttcagatatcggaaaaaaccttaactcagggctttaatgatgcctctaata

SEQ ID NO: 443176 - DNA, 75 bp, synthetic construct
  source 1..75: mol_type = other DNA
atgtggccggcaaggtggagtggcagagggccggcaacaggctgaagggggttaacccgacgccgttttacatca

SEQ ID NO: 443177 - DNA, 75 bp, synthetic construct
  source 1..75: mol_type = other DNA
acggtcagtttatcgagtcaccgcgcaccggggaaaccattcgggtaagtcggttagccgaacctttctggcagg

SEQ ID NO: 443178 - DNA, 75 bp, synthetic construct
  source 1..75: mol_type = other DNA
taccggaacatctgactttactgaaacaagcacaaaagccaactgtacctgcatctgtgccattaacagtgccag

SEQ ID NO: 443179 - DNA, 75 bp, synthetic construct
  source 1..75: mol_type = other DNA
cttaggaagacatgaaagtttggtcagtggtcggataattcaggaactagaagtcaaatacgacctgactataac

SEQ ID NO: 443180 - DNA, 75 bp, synthetic construct
  source 1..75: mol_type = other DNA
gtaagagcattcttcataagacccctacaaacttctcagaagtctattcaacacatcatctaaaacctgcaagaa

SEQ ID NO: 443181 - DNA, 75 bp, synthetic construct
  source 1..75: mol_type = other DNA
cagaaaaaatggtgttgccgcgccatctgccaccagccagctatcaactcgcgctctggaagggatttttgaagc

SEQ ID NO: 443182 - DNA, 75 bp, synthetic construct
  source 1..75: mol_type = other DNA
gatggggttcagtgatactcatcttcgttgctatgtgcttcatgacgacggaggccagcatatccacattatcgc

SEQ ID NO: 443183 - DNA, 75 bp, synthetic construct
  source 1..75: mol_type = other DNA
gaggtaagagattcgctggtgttgttcgttatgtattgcaaccgggagcacatcataaaagcgatccagtcgtaa

SEQ ID NO: 443184 - DNA, 75 bp, synthetic construct
  source 1..75: mol_type = other DNA
tcctccacaaggttcctacaaacttctcagaagtctattcaacacatcatctgaaacctacaagaaaaattcgtt

SEQ ID NO: 443185 - DNA, 75 bp, synthetic construct
  source 1..75: mol_type = other DNA
acacaccgacaaaagaccaccctgctcctgctcctgctcctgctcctgctcctgctcctgctcctgctcctgctc

SEQ ID NO: 443186 - DNA, 75 bp, synthetic construct
  source 1..75: mol_type = other DNA
aaagcaacttaactacaaccccgaccacttagaagctttacgaaccaacacaccggcaaaagaccaccctgctcc

SEQ ID NO: 443187 - DNA, 75 bp, synthetic construct
  source 1..75: mol_type = other DNA
agctatgggaagtccattcttcacaaaacccacacacacttctcaaaaattcatgtaatccaacctttaaacaag

SEQ ID NO: 443188 - DNA, 75 bp, synthetic construct
  source 1..75: mol_type = other DNA
gatagcaccaagcatcttcgcccggatgtcgcaaaatcagtttggcacaactcgcttcgcttacccaacggtgaa

SEQ ID NO: 443189 - DNA, 75 bp, synthetic construct
  source 1..75: mol_type = other DNA
ggggtaagaactttgctggtgtggtccaatatgcattgaagccaggttcacatcataaaagtgctccaatcgtca

SEQ ID NO: 443190 - DNA, 75 bp, synthetic construct
  source 1..75: mol_type = other DNA
atcaagattggcgctactgcggtagcttatcgtctctccgaagttcaggcatggattaagggagaatggagtaat

SEQ ID NO: 443191 - DNA, 75 bp, synthetic construct
  source 1..75: mol_type = other DNA
gaggcggctatatgacgctcgcagaactgggcatggccttctggcatgatttagcggctccggtcattgctggca

SEQ ID NO: 443192 - DNA, 75 bp, synthetic construct
  source 1..75: mol_type = other DNA
agagaaaacccccgcacgttgcaggtatgcacctgacaacaccacgggggctaatcttgactctagaccactcaa

SEQ ID NO: 443193 - DNA, 75 bp, synthetic construct
  source 1..75: mol_type = other DNA
cacgggggctaatcttgaacctgaacaactcaagaatagccgcgaaacgttgtcattacaacacaggcggctata

SEQ ID NO: 443194 - DNA, 75 bp, synthetic construct
  source 1..75: mol_type = other DNA
tcttaagcagcgaccacctgcataacatcaccgaagtggcgattcaccgcctggagcagcagctaggtaagcctt

SEQ ID NO: 443195 - DNA, 75 bp, synthetic construct
  source 1..75: mol_type = other DNA
ctcccaggcgaaacgtctggattcggtactgcggctgatggataaccaggcaccaaccacatcggtgaaaccgcc

SEQ ID NO: 443196 - DNA, 75 bp, synthetic construct
  source 1..75: mol_type = other DNA
tcgcgaaagcgtgtaaatcgtattttgatattcctgttggcatgtattttgactattatcggtttgtttatcgca

SEQ ID NO: 443197 - DNA, 75 bp, synthetic construct
  source 1..75: mol_type = other DNA
cctggcttacgcgccgaacgcaaagtcatcagcaagttaagcccccgaagttacctaaaaagaagcctgatcccg

SEQ ID NO: 443198 - DNA, 75 bp, synthetic construct
  source 1..75: mol_type = other DNA
ctgacgaaaccgctggggataggcgttctcaccacagccgagaaaaaatcgctgctgaaaccggaacatcaggga

SEQ ID NO: 443199 - DNA, 75 bp, synthetic construct
  source 1..75: mol_type = other DNA
gataagctgcgtgagcagtacggggtcggaccgctatgcagcgaacaatcaattatgacgcaggtatcgtattaa

SEQ ID NO: 443200 - DNA, 75 bp, synthetic construct
  source 1..75: mol_type = other DNA
ccctgcaccgttgaagttgagcgataaacattggcaggcgctggcggaaaacaaccatttcttaagcagcgacca

SEQ ID NO: 443201 - DNA, 75 bp, synthetic construct
  source 1..75: mol_type = other DNA
tgtccttgccgtcgattccctcttttgtgttgtcgggattattgttgctttgcttgccgttttcttcatttgcca

SEQ ID NO: 443202 - DNA, 75 bp, synthetic construct
  source 1..75: mol_type = other DNA
ggcatcgagccaatccatgccaacagcccgcaggcaaaagggcgggtagagcgcgccaatcagacactacaggac

SEQ ID NO: 443203 - DNA, 75 bp, synthetic construct
  source 1..75: mol_type = other DNA
tttcactggttgaagagacacgcccattattgccaggcgtgcgtgaagctgttgcgttatgcaaagaacaaggtt

SEQ ID NO: 443204 - DNA, 75 bp, synthetic construct
  source 1..75: mol_type = other DNA
tgttagctaaacttcccaatggtttaatcatccaggtctttcggcgtaggcttgccaactcaacatcaattggta

SEQ ID NO: 443205 - DNA, 75 bp, synthetic construct
  source 1..75: mol_type = other DNA
atgagaattacattcagcatccctttccccaaaaagcggactgcgccatgcttactcattctggtgatggcggtg

SEQ ID NO: 443206 - DNA, 75 bp, synthetic construct
  source 1..75: mol_type = other DNA
aataccgttggcggcggaaccgggcgttctctggctaccgcggcaggtgctatcgcaggcggtgtagccggtcag

SEQ ID NO: 443207 - DNA, 75 bp, synthetic construct
  source 1..75: mol_type = other DNA
gtacaaattcaaggcggtgatgattccaacgttatcggcgcgattggcggcgcggtgcttggcggtttccttggg

SEQ ID NO: 443208 - DNA, 75 bp, synthetic construct
  source 1..75: mol_type = other DNA
cccgcatgcgttccatcgtcgttcctgcgccagaagcgcaaaatgatccacgttttgtattagcaaacgtcaaac

SEQ ID NO: 443209 - DNA, 75 bp, synthetic construct
  source 1..75: mol_type = other DNA
gatgcaaataaaacaagccaaaaatccacatctaaaagcaagcatgctataaggaatttaaatatttggattaat

SEQ ID NO: 443210 - DNA, 75 bp, synthetic construct
  source 1..75: mol_type = other DNA
aaatggtgctttctgttgttgattacaatccatcatcaggcgactttcactggagatggaggcaggggagagaga

SEQ ID NO: 443211 - DNA, 75 bp, synthetic construct
  source 1..75: mol_type = other DNA
cagataatggccggttacggtgagttatatctgaaagggcaggttccgtcggtctggcatggttcactgccggta

SEQ ID NO: 443212 - DNA, 75 bp, synthetic construct
  source 1..75: mol_type = other DNA
caggattctggccgatccctgatatgccaactttcgcatctgacagggggtgcattaggctgtcattggaataca

SEQ ID NO: 443213 - DNA, 75 bp, synthetic construct
  source 1..75: mol_type = other DNA
agggctggctacgccgacgcagtgccttaaagcctgtatgcgcctgacaccagatcgtatcttcatgacagagct

SEQ ID NO: 443214 - DNA, 75 bp, synthetic construct
  source 1..75: mol_type = other DNA
cggtacaacggccgtagcgtttcgtaaggatttggcggccgataaaaatctggagcagctgacccgcgaggggat

SEQ ID NO: 443215 - DNA, 75 bp, synthetic construct
  source 1..75: mol_type = other DNA
ggctctcgaaaaccttggtttgggagaagcggcaaaaaggaatgtgggtaacgggcaaaaccaaattccggatat

SEQ ID NO: 443216 - DNA, 75 bp, synthetic construct
  source 1..75: mol_type = other DNA
tgtcggaaccggtaataatcaactcccggacatgtccgcatttggtatgtcgcgaaacggacaaactgcctggga

SEQ ID NO: 443217 - DNA, 75 bp, synthetic construct
  source 1..75: mol_type = other DNA
ccaccacggcatttgtgaaatcggcgattgcggcaatggtgggttctgcacctgcggcactggatacactgaacg

SEQ ID NO: 443218 - DNA, 75 bp, synthetic construct
  source 1..75: mol_type = other DNA
tcctgcaatatggtagtggtgcggttacgccgacattatcgacgcaaacaatgagaattacattcagcatccctt

SEQ ID NO: 443219 - DNA, 75 bp, synthetic construct
  source 1..75: mol_type = other DNA
tcgattcctgccccgcaggttttgtctgtaaattttgaacatatcagtaattcagcgtggcgtgtggcaaccagt

SEQ ID NO: 443220 - DNA, 75 bp, synthetic construct
  source 1..75: mol_type = other DNA
gttaaccggctttaattctgcttacagaacgtcatcaaccagcgacacggtatcgatgaattacagttggtgggc

SEQ ID NO: 443221 - DNA, 75 bp, synthetic construct
  source 1..75: mol_type = other DNA
ttaatcgtcactctaccgatgtaattgtcacctggaatgcccgtaaggctgatgatgtccacattttaggaattg

SEQ ID NO: 443222 - DNA, 75 bp, synthetic construct
  source 1..75: mol_type = other DNA
aatggactggctaaagtcgtttacccaattgcactgcctaaactttcacgttttatcagtatcgcagaaagaata

SEQ ID NO: 443223 - DNA, 75 bp, synthetic construct
  source 1..75: mol_type = other DNA
tcagacccgtcgattcctgccccgcaggttttgtctgtaaattttgaacgtatcagtaattcagcgtggcgtgtg

SEQ ID NO: 443224 - DNA, 75 bp, synthetic construct
  source 1..75: mol_type = other DNA
ctggcgttgttcactactgcatttattattatctctcagttaactcatggtgtgaataaattctacaacacgcta

SEQ ID NO: 443225 - DNA, 75 bp, synthetic construct
  source 1..75: mol_type = other DNA
aagaaattcaggtagtgaaggtggcacaacttatttcggttccctgataactgcaccgggtggtacaggcggtgg

SEQ ID NO: 443226 - DNA, 75 bp, synthetic construct
  source 1..75: mol_type = other DNA
tccctgaaggaatggaaatatctgttaacgagaagggcgaacccattctgattgagattaaaccatctcaggtgg

SEQ ID NO: 443227 - DNA, 75 bp, synthetic construct
  source 1..75: mol_type = other DNA
ttttatgcccgctgccagatgtacgacggcagaccatcatcaaatgctttttcatggagggtttattgtgcgcct

SEQ ID NO: 443228 - DNA, 75 bp, synthetic construct
  source 1..75: mol_type = other DNA
cgcggatgcagtggaaaccctgcgggctaacggctttatcaccgcaggcagaacagatgaaaccaccggtgagtt

SEQ ID NO: 443229 - DNA, 75 bp, synthetic construct
  source 1..75: mol_type = other DNA
gcccgctgcggaacaatcggcgctggcgcagctggctgcgtggggaattgtgccgcaaccggctaatgaatcgcg

SEQ ID NO: 443230 - DNA, 75 bp, synthetic construct
  source 1..75: mol_type = other DNA
tgccctcgtcggcctgcaacccgcgatgctcgacgactacggcggcagcctgagcgaactggcgcgggagcaact

SEQ ID NO: 443231 - DNA, 75 bp, synthetic construct
  source 1..75: mol_type = other DNA
ttgctggggtatgtcgaaagcgccagtcatctgttgattctcgatgccattgattacgggctggaacccggaacg

SEQ ID NO: 443232 - DNA, 75 bp, synthetic construct
  source 1..75: mol_type = other DNA
atcgccagctatttaagcttcgtgatggcgctgtttatggcgtttggcgtttcgttcgaagtgccggtggcgatt

SEQ ID NO: 443233 - DNA, 75 bp, synthetic construct
  source 1..75: mol_type = other DNA
atgctgcggttatcgaacaaattcgtcgggctcgtccacactggctggatgtgcaaccgtcttcttcacttatca

SEQ ID NO: 443234 - DNA, 75 bp, synthetic construct
  source 1..75: mol_type = other DNA
tccgaagtgctggcgctggcggatattcgtggacatttgcctgagcaaatcgccctggtcgggctgcaaccggca

SEQ ID NO: 443235 - DNA, 75 bp, synthetic construct
  source 1..75: mol_type = other DNA
gtgtttacgcttaatgtgctggacaataaaaactacaccctgagcagtgatggcggctttagcgcccgtgggcaa

SEQ ID NO: 443236 - DNA, 75 bp, synthetic construct
  source 1..75: mol_type = other DNA
acagagccagctactggcggtggggatccaaccgatctggcgattgaagccatccgcagtctgcgtaccagtctg

SEQ ID NO: 443237 - DNA, 75 bp, synthetic construct
  source 1..75: mol_type = other DNA
acctcaatatcgacaacgcgtttatcagcattgttatcggccatacggtactgacgctaccctattcgatccgca

SEQ ID NO: 443238 - DNA, 75 bp, synthetic construct
  source 1..75: mol_type = other DNA
acggtcgcgtaacggcgatgccgaaaacccagcaggaaattgtccgtctgacccgcgatgtcgagtctgggcagc

SEQ ID NO: 443239 - DNA, 75 bp, synthetic construct
  source 1..75: mol_type = other DNA
tgaactgttgatgagcgaacgctttgccgaattggtgagctgggcgagtaaaaactacgacctggtgttgattga

SEQ ID NO: 443240 - DNA, 75 bp, synthetic construct
  source 1..75: mol_type = other DNA
tggcgtgctgaaaccgaagaaagggctgattattctcggtgcgattattcttggcctgatgctctccattgttgg

SEQ ID NO: 443241 - DNA, 75 bp, synthetic construct
  source 1..75: mol_type = other DNA
ttttacgttggtaaagggcgaaaccgggaagaggaaaacgacgctgaagcagaaagcgaaaaaactgaagaataa

SEQ ID NO: 443242 - DNA, 75 bp, synthetic construct
  source 1..75: mol_type = other DNA
gggcgtactggtcggtgaaaaactgatgattacccgtaacccgtggcgcagcgatgtggcacaggtggttctgac

SEQ ID NO: 443243 - DNA, 75 bp, synthetic construct
  source 1..75: mol_type = other DNA
ctgaaaaaagcgccttccgttgaggtatgtcgtgaactggctgtggcggcaccagaactccgcaaagtcacgcca

SEQ ID NO: 443244 - DNA, 75 bp, synthetic construct
  source 1..75: mol_type = other DNA
tgcacccggaacaactggatgcccctgcaccgcataccgaagtggccagtctgcaacccaatcatgtctggcaga

SEQ ID NO: 443245 - DNA, 75 bp, synthetic construct
  source 1..75: mol_type = other DNA
accgtgcacacaaccagcctgtgtcagaaaatctgctggagcaggatttttacgccagtgaccctaaacagaagt

SEQ ID NO: 443246 - DNA, 75 bp, synthetic construct
  source 1..75: mol_type = other DNA
ataaaaccagggcaaaccatagctattattggtgcaggtccaattggtttaagtaacgtacttacatcacaatta

SEQ ID NO: 443247 - DNA, 75 bp, synthetic construct
  source 1..75: mol_type = other DNA
atgacttatgtggaggccgcgaaagccctgcgcgataagttcagcgccaacggctttacctggacgccggaacat

SEQ ID NO: 443248 - DNA, 75 bp, synthetic construct
  source 1..75: mol_type = other DNA
ctggatgaccatcaccacgcaacagcttatcaaagcgccatcggtggatgtatgccgcgaactggccgttgccgc

SEQ ID NO: 443249 - DNA, 75 bp, synthetic construct
  source 1..75: mol_type = other DNA
tttgaaatcggtgtcttcttctcacgcttttatgttggtaaaggccgaaaccgggaagaagaaaacgacgctgaa

SEQ ID NO: 443250 - DNA, 75 bp, synthetic construct
  source 1..75: mol_type = other DNA
cgccggtgattctctatcaggtgtgggcgtttatcgccccggcgttgtataagcacgaacgtcgcctggtggtgc

SEQ ID NO: 443251 - DNA, 75 bp, synthetic construct
  source 1..75: mol_type = other DNA
taccgccagttaacggcacagtacccggacggcgtaccggaagcagcactggatgaagtcatggccacgctgacc

SEQ ID NO: 443252 - DNA, 75 bp, synthetic construct
  source 1..75: mol_type = other DNA
taccgccagttaacggcacagtaaccggacggcgtaccggaagccgcactggatgaagtcatggccacgctgacc

SEQ ID NO: 443253 - DNA, 75 bp, synthetic construct
  source 1..75: mol_type = other DNA
tcattggtccaaatatctgcgttaacatctggcgatatatttgctgcgctaccagttattaagcgtaagggtgtt

SEQ ID NO: 443254 - DNA, 75 bp, synthetic construct
  source 1..75: mol_type = other DNA
gaggggtcggttgtcagtctggcggccggagggatcagttttgccctgacggcatcggtcttctggctcagcacc

SEQ ID NO: 443255 - DNA, 75 bp, synthetic construct
  source 1..75: mol_type = other DNA
aacgaagacgcggtgatccgccgttgccgctttgaactgggtgtggaaataacatcaccagaaccggtctatcct

SEQ ID NO: 443256 - DNA, 75 bp, synthetic construct
  source 1..75: mol_type = other DNA
cggtatttgccgcacgcaccaccagtgcgttacagatcaacgatgatgaagtgatggattatcaatggtgtgatt

SEQ ID NO: 443257 - DNA, 75 bp, synthetic construct
  source 1..75: mol_type = other DNA
agatcgcgtgggggctggatgatggttctcgcatggtgttgaaggcagagaagcaggagtcaaccagtgagcaag

SEQ ID NO: 443258 - DNA, 75 bp, synthetic construct
  source 1..75: mol_type = other DNA
gcaatgatccaggtcgtgatgttaccaatgaggctgctcaattggtgtggcgactggtcatggctgaaggtggtg

SEQ ID NO: 443259 - DNA, 75 bp, synthetic construct
  source 1..75: mol_type = other DNA
tcttctggctcagcaccggcgatcgcgatgctgccctgcagacagctgctgtccaggcaggaaaaaccttcaccc

SEQ ID NO: 443260 - DNA, 75 bp, synthetic construct
  source 1..75: mol_type = other DNA
gttttgccgagcaaaatatttcattcacacgccatatgagttcgggcaacaccaccgacaacggcatctttggcc

SEQ ID NO: 443261 - DNA, 75 bp, synthetic construct
  source 1..75: mol_type = other DNA
acgctggtgacatctctggcactggtagctgtcacaaccggccctgacatgatcaaaatgttgcggggacggatc

SEQ ID NO: 443262 - DNA, 75 bp, synthetic construct
  source 1..75: mol_type = other DNA
ccggagggatcagttttgccctgacggcatcggtcttctggctcagcaccggcgatcgcgatgctgccctgcaga

SEQ ID NO: 443263 - DNA, 75 bp, synthetic construct
  source 1..75: mol_type = other DNA
gtggcgggcgggatactgttcagtccactgggaccatttggtgcactgacagggcgtgtggttggcggtgttctg

SEQ ID NO: 443264 - DNA, 75 bp, synthetic construct
  source 1..75: mol_type = other DNA
gcgatcgcatgggaaacccggagcataataaggcgaaagaggcagaactgctgcacgacagtaaagaggtgcttg

SEQ ID NO: 443265 - DNA, 75 bp, synthetic construct
  source 1..75: mol_type = other DNA
cggggtattccgctggtcgaagaggaagaaacctttgactggtcccacggtcatcttcaggtgccgttagtgatt

SEQ ID NO: 443266 - DNA, 75 bp, synthetic construct
  source 1..75: mol_type = other DNA
agatagtgtgggagctggatgatggttctcgcatggtgttgaaggcagaaaagcaggagtcatccaatgagcaag

SEQ ID NO: 443267 - DNA, 75 bp, synthetic construct
  source 1..75: mol_type = other DNA
agaacgtggttttgatttttttcaaggggggagaattaaaataggacaaactacaactgatggtgcgttatttga

SEQ ID NO: 443268 - DNA, 75 bp, synthetic construct
  source 1..75: mol_type = other DNA
ctcaggcatttatgaacaatgcaccttggtttaaagagtctccctcctcttgggatgatggggtaacgtctcttc

SEQ ID NO: 443269 - DNA, 75 bp, synthetic construct
  source 1..75: mol_type = other DNA
tttcattatcccagtcgctcggagatgaattaggggctttttatttgtctgcttatgatgataaatattggaata

SEQ ID NO: 443270 - DNA, 75 bp, synthetic construct
  source 1..75: mol_type = other DNA
tggcccctgtatatgtttatctggcaagtcaggagtcgagctacgtcaccgcagaagtgcacggtgtgtgcggcg

SEQ ID NO: 443271 - DNA, 75 bp, synthetic construct
  source 1..75: mol_type = other DNA
tgtatatgtttacctggcaagtcaggagtcgagctacgtcaccgcagaagtgcacggtgtctgcggcggcgagca

SEQ ID NO: 443272 - DNA, 75 bp, synthetic construct
  source 1..75: mol_type = other DNA
gggtctgcaatttttcggtgcggtgctcattatgaccgggctgtatatcaatgtatttggcttgcggtggcgtaa

SEQ ID NO: 443273 - DNA, 75 bp, synthetic construct
  source 1..75: mol_type = other DNA
aaggcggactttactggagatataccgcgccagtagaactctgggagcgcccattgccgccgtctggatgggggc

SEQ ID NO: 443274 - DNA, 75 bp, synthetic construct
  source 1..75: mol_type = other DNA
aggcctgttctggctcctggctgggctgattttcctgattacattatcaacagcagcatcattgatattgcgctt

SEQ ID NO: 443275 - DNA, 75 bp, synthetic construct
  source 1..75: mol_type = other DNA
tgttgatgtttatgtctgtcgtttcgtggatatctatgaggggccgacaattgaaggcggaaactactggcgcta

SEQ ID NO: 443276 - DNA, 75 bp, synthetic construct
  source 1..75: mol_type = other DNA
agaaaatgcaaatctgaatttaacttgggtgaggtgaatagtacttatcttaagaaaatatatttgacttgtaat

SEQ ID NO: 443277 - DNA, 75 bp, synthetic construct
  source 1..75: mol_type = other DNA
aaaattgatgatgactttgagcccaaacttatccacaccgttcgcggtgccggctatgtactggagatcaaagaa

SEQ ID NO: 443278 - DNA, 75 bp, synthetic construct
  source 1..75: mol_type = other DNA
caaagaaccaaattttaaagagtattttaaaaaatataaagatgcttctaatcatgaagaaaaaggtgatgtgcc

SEQ ID NO: 443279 - DNA, 75 bp, synthetic construct
  source 1..75: mol_type = other DNA
accgcaggcagcgaagggacatattcagaacggcacggagccagccatgatgcttgtcgttggggaacggatact

SEQ ID NO: 443280 - DNA, 75 bp, synthetic construct
  source 1..75: mol_type = other DNA
agtatcgttctcagcttaataatattgctgccgctccgtggttttgcggcgataccacctggtactggaaagaaa

SEQ ID NO: 443281 - DNA, 75 bp, synthetic construct
  source 1..75: mol_type = other DNA
gggaattcgatatgacgaatgccagttacgcccagcagccagcagcatttcttgcaatggtaccggagctttgtg

SEQ ID NO: 443282 - DNA, 75 bp, synthetic construct
  source 1..75: mol_type = other DNA
cctctgcgggtaccccactcgcccgggaagcaacgctggcaattaccctcgacgtaccggaagatactgacattt

SEQ ID NO: 443283 - DNA, 75 bp, synthetic construct
  source 1..75: mol_type = other DNA
ctgccgtgtggtgttggcggtggtcctggtggcgtcgcattcggtcttaaactggcgtttggcgatcatgttcac

SEQ ID NO: 443284 - DNA, 75 bp, synthetic construct
  source 1..75: mol_type = other DNA
gttcaggatattggtatcgacaaccttaccgcagcggatggccttgcagttggtcgcgcatcaggctttgtcggg

SEQ ID NO: 443285 - DNA, 75 bp, synthetic construct
  source 1..75: mol_type = other DNA
tccggcatcggacgattatggaaaagtgaaccgccccgggtttcctggagagtgttttatctgtgaactcaggct

SEQ ID NO: 443286 - DNA, 75 bp, synthetic construct
  source 1..75: mol_type = other DNA
acggatatggcaggtcagtgcgttggtggctctgctggcggtgttccctggatatgcggggacacgacgtatttc

SEQ ID NO: 443287 - DNA, 75 bp, synthetic construct
  source 1..75: mol_type = other DNA
tgaaagatgtgatgcgctttaacgagccgatgtacaaggttggagagcagaacagcgtctgtatgtcctgccatc

SEQ ID NO: 443288 - DNA, 75 bp, synthetic construct
  source 1..75: mol_type = other DNA
gcgtaacccggatgccgcctgtctggactgtcataaaccagataccgaaggtatgcatggcaaacatgcttccgt

SEQ ID NO: 443289 - DNA, 75 bp, synthetic construct
  source 1..75: mol_type = other DNA
actccgatgatatcgtgctgcaacgcatgagttgtatgaattgtagcgacggagacgtggtggtgctgatttctc

SEQ ID NO: 443290 - DNA, 75 bp, synthetic construct
  source 1..75: mol_type = other DNA
gcagctgaccgtgatagatgtgctggcaacaggatttactttgcgacgcggtgcaaaattcagagataacttgaa

SEQ ID NO: 443291 - DNA, 75 bp, synthetic construct
  source 1..75: mol_type = other DNA
tcacaggaagccgaatgcgaagctggatacattcggggtctttgataacggatggcacatgctggcttttgagtt

SEQ ID NO: 443292 - DNA, 75 bp, synthetic construct
  source 1..75: mol_type = other DNA
gtgagtctcagaaacttagaggtacggccagagcggaatatgttgaaattagcagtgcatttcgggcaggctgtg

SEQ ID NO: 443293 - DNA, 75 bp, synthetic construct
  source 1..75: mol_type = other DNA
acgccgaaaccggtaaatatcatgtgaatcaatataccggcgatgaaagccgcacccgcgtcactcagtgggaaa

SEQ ID NO: 443294 - DNA, 75 bp, synthetic construct
  source 1..75: mol_type = other DNA
gatatcaccgcttccagcgatggccgtgtggtggataaaagctgggtcgcgcgcgtcgcagaagtgattgatatt

SEQ ID NO: 443295 - DNA, 75 bp, synthetic construct
  source 1..75: mol_type = other DNA
caactggaagtcccccgtgatcagtatgccggcgctgttgaaaccatgaggaataagatccgcgaaggtaaagta

SEQ ID NO: 443296 - DNA, 75 bp, synthetic construct
  source 1..75: mol_type = other DNA
gccaaacatctattttctggtcgctaccaatggcgacgaccgcgtggggggcttttacgatgcaggcgggcctga

SEQ ID NO: 443297 - DNA, 75 bp, synthetic construct
  source 1..75: mol_type = other DNA
actggctgtctacgtcacaacccagcaactccaccggctcagtgttgttcagggtatgctgaagcacattgattt

SEQ ID NO: 443298 - DNA, 75 bp, synthetic construct
  source 1..75: mol_type = other DNA
gattttctcgatcgttgcctggacggcggtgactggtaccccttttcagaaggccgccgttttgtatcattccac

SEQ ID NO: 443299 - DNA, 75 bp, synthetic construct
  source 1..75: mol_type = other DNA
ctggcgcaaccagttactgcggtaataccaatactgatggcgacggtgtggggtatgctaaaccctccggcacac

SEQ ID NO: 443300 - DNA, 75 bp, synthetic construct
  source 1..75: mol_type = other DNA
gacggtcaacgaatggctgattttcttattaatgggcaaaagtttgatgaggttattttactgaaagatcaggat

SEQ ID NO: 443301 - DNA, 75 bp, synthetic construct
  source 1..75: mol_type = other DNA
ggagcaacaatgggcggtggattccattaccgactgcgcgcgtcgttttatggcacatcctcaggtcaaaggacg

SEQ ID NO: 443302 - DNA, 75 bp, synthetic construct
  source 1..75: mol_type = other DNA
gagtgctggttgaagaagatcgcgtcaaaattctggcaatgattcaggagcaggtgacatggcttgccggcagtt

SEQ ID NO: 443303 - DNA, 75 bp, synthetic construct
  source 1..75: mol_type = other DNA
cgtaccttccactaactacacatcaggtggcgcgtcaggaagctccgtactgtgggaatgtgacgcaacagattt

SEQ ID NO: 443304 - DNA, 75 bp, synthetic construct
  source 1..75: mol_type = other DNA
ggtggcgcgtcaggaagctccgtactgtgggaatgtgacgcaacagatttgccaaacatctattttctggtcgca

SEQ ID NO: 443305 - DNA, 75 bp, synthetic construct
  source 1..75: mol_type = other DNA
cggacagaacggacagtatcgttacatgggaaatcatggtcccatgcaaccccccgtgatcagtatgccggcgct

SEQ ID NO: 443306 - DNA, 75 bp, synthetic construct
  source 1..75: mol_type = other DNA
agatatttccctgaacgggatggttgctgaaggcgtgatgtatgatcgtctggttgttcctctcattcaccatat

SEQ ID NO: 443307 - DNA, 75 bp, synthetic construct
  source 1..75: mol_type = other DNA
agatgaggcgatcaggcaggcgtcagctgcgaagggcagtgccacgacggcatccacgaaggcaacagaggcagc

SEQ ID NO: 443308 - DNA, 75 bp, synthetic construct
  source 1..75: mol_type = other DNA
cctgacacgctcaccacgccgttagggagtttatggaaactgtatgtttacgcctggctggaggatacccatcaa

SEQ ID NO: 443309 - DNA, 75 bp, synthetic construct
  source 1..75: mol_type = other DNA
tcgcatccatgctcggtagtcgggtacgggtgaaaacctggagctggtttgccgatgataaacaggaaatccgcc

SEQ ID NO: 443310 - DNA, 75 bp, synthetic construct
  source 1..75: mol_type = other DNA
aggcccgtaatatcacccggttcgggaccatcgaatcggtcacttatgatattgccgagggttcggttgtcagtc

SEQ ID NO: 443311 - DNA, 75 bp, synthetic construct
  source 1..75: mol_type = other DNA
ttttgttgatactgaatatattatattacttgatgtcgatatttatccagactttgaattgtttgaaaaatataa

SEQ ID NO: 443312 - DNA, 75 bp, synthetic construct
  source 1..75: mol_type = other DNA
gcgcgacccgaacatgcgctaccatctggcgctgctggatggcgaagttgtcggcatgatcggcctgcatttgca

SEQ ID NO: 443313 - DNA, 75 bp, synthetic construct
  source 1..75: mol_type = other DNA
taagttactggcgtgggcagaagaagaagcccgccaggccggggccgaaatgaccgaactttcgaccaacgtgaa

SEQ ID NO: 443314 - DNA, 75 bp, synthetic construct
  source 1..75: mol_type = other DNA
aaagcagcgaatgacaatgcgaatggcagggtaccatctaaccgaaaagttaacgggaaagcactgacagcggat

SEQ ID NO: 443315 - DNA, 75 bp, synthetic construct
  source 1..75: mol_type = other DNA
cgcgcggcagagaatgccaggtacggatttatggcgtatgcaatggcaaccctgaaactacagttctggcgcatt

SEQ ID NO: 443316 - DNA, 75 bp, synthetic construct
  source 1..75: mol_type = other DNA
acttcgcagggcgaagcctatattggcgatcatttcattgtggctaacgcgattgtttactccttcggtaacgat

SEQ ID NO: 443317 - DNA, 75 bp, synthetic construct
  source 1..75: mol_type = other DNA
gttgtgggtggctgattttacctgggtaagcacatggcagggcttcgtttatgtggcgttcatcattgatgtgtt

SEQ ID NO: 443318 - DNA, 75 bp, synthetic construct
  source 1..75: mol_type = other DNA
aaaccgctgctggaaggccaggtaaactactggggcaactacccgaaattcttcgtctccatgatgaaggccttc

SEQ ID NO: 443319 - DNA, 75 bp, synthetic construct
  source 1..75: mol_type = other DNA
ctgaaagtctgcgaatacatcgctgagaccagtgctcacgataaaactgcctcgttcctttacgcgctcggctgg

SEQ ID NO: 443320 - DNA, 75 bp, synthetic construct
  source 1..75: mol_type = other DNA
aaaacgctaacgtcgtaatggtaatgggcggtaacgctgctgaagctcatccggtcgggttccgctgggcgatgg

SEQ ID NO: 443321 - DNA, 75 bp, synthetic construct
  source 1..75: mol_type = other DNA
atgcagaccgacgtactgaaccgcgaggtctgttttcacctgaacacgccgggaacgggagaccatcatgcttaa

SEQ ID NO: 443322 - DNA, 75 bp, synthetic construct
  source 1..75: mol_type = other DNA
gccgctgaacctgaagctcaccgttggcgacgccttcacctggctgctgaaacagagcggctacagcctgtgcgt

SEQ ID NO: 443323 - DNA, 75 bp, synthetic construct
  source 1..75: mol_type = other DNA
ccatcagaccttctggcatagttggcaggggccacttcttgaagggcaacaaagtagccaaaacgctaagcgaat

SEQ ID NO: 443324 - DNA, 75 bp, synthetic construct
  source 1..75: mol_type = other DNA
gatcgcctggaacgcgacaccctggatgatgatggtgaacgctttgaattcgaagctggcgattacctgatagat

SEQ ID NO: 443325 - DNA, 75 bp, synthetic construct
  source 1..75: mol_type = other DNA
tgttagtgccgcagtcgagaacgctaagcgccaaaataagcgcataaatgatcgttctgatgatcatgacgtgat

SEQ ID NO: 443326 - DNA, 75 bp, synthetic construct
  source 1..75: mol_type = other DNA
tccagccacattagtgtttactgatggtcattatcgcggcgtattgaatggcattcacccgtgggcagagctgat

SEQ ID NO: 443327 - DNA, 75 bp, synthetic construct
  source 1..75: mol_type = other DNA
cgcatggagggaaagtgccgcccctgatgctggagcaaatcaaagccgatctgcgtgctcctaagaccaataccg

SEQ ID NO: 443328 - DNA, 75 bp, synthetic construct
  source 1..75: mol_type = other DNA
ctggaacaagacctggacgaagacgaggaggaagacgaagaagttacccgcaagctatacggggatgatgattaa

SEQ ID NO: 443329 - DNA, 75 bp, synthetic construct
  source 1..75: mol_type = other DNA
ctgaaaaacaaagagttaatgctgttgttagtgccgctgtcgagaacgcgaagcgccaaaataagcgcataaaag

SEQ ID NO: 443330 - DNA, 75 bp, synthetic construct
  source 1..75: mol_type = other DNA
atacatgggtttgatgaaagctttcaaggtcatgggtatgaagattttgattttttgatacgtttatataaccat

SEQ ID NO: 443331 - DNA, 75 bp, synthetic construct
  source 1..75: mol_type = other DNA
tgacgtcccagtttgatttttatcacggtggtggtctggatgtttgttatttgagttttgctgaagtcggtgatg

SEQ ID NO: 443332 - DNA, 75 bp, synthetic construct
  source 1..75: mol_type = other DNA
aagaaggtctggtgaaatgggcattatgcggccattggggacaatcaccgcgtatttctgaactcgcagaacaaa

SEQ ID NO: 443333 - DNA, 75 bp, synthetic construct
  source 1..75: mol_type = other DNA
gtttgttatttgagttttgctgaagtcgaccagcacggtaacgtcggcgtacataaattcaatggtaaaatcatg

SEQ ID NO: 443334 - DNA, 75 bp, synthetic construct
  source 1..75: mol_type = other DNA
gagtaacgggcctggaagtactgctacgctggcggcatcctgtcgcgggagaaattcccccggatgccttcatta

SEQ ID NO: 443335 - DNA, 75 bp, synthetic construct
  source 1..75: mol_type = other DNA
tcagtctgtgcatgttttacggcatacctttgccactcactttatgattaatggtggaaacatcatcacattgca

SEQ ID NO: 443336 - DNA, 75 bp, synthetic construct
  source 1..75: mol_type = other DNA
gtgcagaagatggttaagaaagccacgctgcatcctaaagctgtccgtattccaggttatcttatcgatattgtg

SEQ ID NO: 443337 - DNA, 75 bp, synthetic construct
  source 1..75: mol_type = other DNA
tattgttatgctggctgataacatccttaacatgaatacgactcgcatattagtcgctattacttgtggtatatc

SEQ ID NO: 443338 - DNA, 75 bp, synthetic construct
  source 1..75: mol_type = other DNA
aagcgcttatcagttttagaaatgcccgtattctgtgggctggacatagtgagagccgaaaagccgttgaacaac

SEQ ID NO: 443339 - DNA, 75 bp, synthetic construct
  source 1..75: mol_type = other DNA
ttaggcgggctggatattatggcgctggtcgccgggaaacaggttgccattcctgatattgcagacctcaccagc

SEQ ID NO: 443340 - DNA, 75 bp, synthetic construct
  source 1..75: mol_type = other DNA
gtgcagaaaatggttaagaaagccacgctgcatcctaaatctgtccgtattccgggttatctggtggatattgtg

SEQ ID NO: 443341 - DNA, 75 bp, synthetic construct
  source 1..75: mol_type = other DNA
caccgaacgtgccgtcttcacgctgaaagaagacggtctgcatttaatcgaaatcgcccctggtgtcgatttgaa

SEQ ID NO: 443342 - DNA, 75 bp, synthetic construct
  source 1..75: mol_type = other DNA
catcagttttgcgcagtttgcctttctgttctgcgctattaactttggtatgcctgctggactggcttcgctggt

SEQ ID NO: 443343 - DNA, 75 bp, synthetic construct
  source 1..75: mol_type = other DNA
tggcgtcatccggtagcgggagaaattcccccggatgctttcatccactatgccgaggcacaaaagatgatagtg

SEQ ID NO: 443344 - DNA, 75 bp, synthetic construct
  source 1..75: mol_type = other DNA
taacagcggttcggcacaccgctgtacatatcagccgcattatacatacaacatcaacattcctgtgcgccacaa

SEQ ID NO: 443345 - DNA, 75 bp, synthetic construct
  source 1..75: mol_type = other DNA
ttatgtggtttggcctgcaatgttacgcggggtcactggcctgcttgattctgattggcaaaatctggccgggat

SEQ ID NO: 443346 - DNA, 75 bp, synthetic construct
  source 1..75: mol_type = other DNA
gacgttataaggttgatgtaagaccgcagggtgctgagggtaagcggattcgaaaaaccttcaccctgaaatcga

SEQ ID NO: 443347 - DNA, 75 bp, synthetic construct
  source 1..75: mol_type = other DNA
tgaccaaaattcagcaaaaacagggaatactgttgtttggctgcaatgatgttccaccccgcccactgacgggac

SEQ ID NO: 443348 - DNA, 75 bp, synthetic construct
  source 1..75: mol_type = other DNA
tacgcatcgatctattctaccaggatcataccgctaagtttttcctgcgggatcaccggcaactcgaatgggatg

SEQ ID NO: 443349 - DNA, 75 bp, synthetic construct
  source 1..75: mol_type = other DNA
atgcctaaatcttacacaccaaactggttttttaccgctttacttgataatcacatcaatcaaatgctggcacgt

SEQ ID NO: 443350 - DNA, 75 bp, synthetic construct
  source 1..75: mol_type = other DNA
agctctcaccagcaagatttcgatggtatagcactcattattggtaatactgcgatatcgacctttacgccgcat

SEQ ID NO: 443351 - DNA, 75 bp, synthetic construct
  source 1..75: mol_type = other DNA
ggcgttaatttcatgcaaggctactggattagtcgcccgttaccgctggacgattttgttcgctggctgaagaaa

SEQ ID NO: 443352 - DNA, 75 bp, synthetic construct
  source 1..75: mol_type = other DNA
attgctattgatgacttcggcaccgggcacagcgcgcttatctatcttgagcgttttacgctcgattatctgaaa

SEQ ID NO: 443353 - DNA, 75 bp, synthetic construct
  source 1..75: mol_type = other DNA
attcaaagttgattatgagaagttttgcgggattttacgcagagtgaaacctgatataccacccaatcaggcaac

SEQ ID NO: 443354 - DNA, 75 bp, synthetic construct
  source 1..75: mol_type = other DNA
gcaaggttactggattagtcgccctctgccgttggatgattttatccgctggttggagaaaccgcatacgccgca

SEQ ID NO: 443355 - DNA, 75 bp, synthetic construct
  source 1..75: mol_type = other DNA
aacgggtctggaagtgttactgcgctggcgtcatccggtagtgggtgaaatccccccggatgccttcattcatta

SEQ ID NO: 443356 - DNA, 75 bp, synthetic construct
  source 1..75: mol_type = other DNA
atggtgttctggctaaaaagagtgagttaattatctctctcttaacaggaagtatcaataatattgataaagtta

SEQ ID NO: 443357 - DNA, 75 bp, synthetic construct
  source 1..75: mol_type = other DNA
tgttacagctatgtcgggctttatggcaattccggaggctcgcgccgaaggattcatcgacgattcaaccttaac

SEQ ID NO: 443358 - DNA, 75 bp, synthetic construct
  source 1..75: mol_type = other DNA
aacgccagctatggcagaaaaaagagaacagcgaggcattcagggcgttgctggtggaaaatcttcagcaccggt

SEQ ID NO: 443359 - DNA, 75 bp, synthetic construct
  source 1..75: mol_type = other DNA
ggcagaactgcgtaagtctaagaaagccggtgctgatctgttgaaagagaatatgaagcgcaaggagaaagagcg

SEQ ID NO: 443360 - DNA, 75 bp, synthetic construct
  source 1..75: mol_type = other DNA
agcaccaggtagccaagaatccttaggcttaggaatcgcggccggtgtattaggtggcgtaacaactcttggcgg

SEQ ID NO: 443361 - DNA, 75 bp, synthetic construct
  source 1..75: mol_type = other DNA
gctactacagctctggctgctttaggtactggtatcgcaatggcatgcacaacaaatgcaagctcccaagaattc

SEQ ID NO: 443362 - DNA, 75 bp, synthetic construct
  source 1..75: mol_type = other DNA
tggtgctctggccggagaagaactgtctataactgacactatagaaaacgtggcgacaggcaatgtaagggcaaa

SEQ ID NO: 443363 - DNA, 75 bp, synthetic construct
  source 1..75: mol_type = other DNA
aagcggatgattaacctgttaatcatcgttctcagggcggttgttgctgtggctaacgcagtgatagcaatcctg

SEQ ID NO: 443364 - DNA, 75 bp, synthetic construct
  source 1..75: mol_type = other DNA
cggcactaatttctttaatgccaaaaactggcttcgccagaatggcgcaaaaggtgttattgaataccagcctgt

SEQ ID NO: 443365 - DNA, 75 bp, synthetic construct
  source 1..75: mol_type = other DNA
ttctattatggcttattggatgagaatattgtaagtaaaatttgcttagataacaatttagcagtaataaagtca

SEQ ID NO: 443366 - DNA, 75 bp, synthetic construct
  source 1..75: mol_type = other DNA
agcacaacattccttatatcgctattgaaacagactactccacctcagatgtcgggcagctcagtacccgtgtcg

SEQ ID NO: 443367 - DNA, 75 bp, synthetic construct
  source 1..75: mol_type = other DNA
agcgactggacccgcgtccacgcattttaatcaccggctgcccgattggcggcgcagcagaaaaagtggtgcgcg

SEQ ID NO: 443368 - DNA, 75 bp, synthetic construct
  source 1..75: mol_type = other DNA
atggtcagctatgacaagatccgcgcggaatatcgcgcaaagtatcgcgcttataaactggaattaatcgatgat

SEQ ID NO: 443369 - DNA, 75 bp, synthetic construct
  source 1..75: mol_type = other DNA
aaagcctctaatctgctcgcgggatctgtcgaacagctcggagaaagcgtcagcgaacttgatgatgttctgtca

SEQ ID NO: 443370 - DNA, 75 bp, synthetic construct
  source 1..75: mol_type = other DNA
cgaaactcgacaccacctttggtcagcagtttactaatctcaacgaaatgatgggacaaaccgttggcgctattc

SEQ ID NO: 443371 - DNA, 75 bp, synthetic construct
  source 1..75: mol_type = other DNA
aagcggcatggtacaaaacatgctgcaggatgtgctgaccgcgtttatggcgaaactcgacaccacctttggtca

SEQ ID NO: 443372 - DNA, 75 bp, synthetic construct
  source 1..75: mol_type = other DNA
agtttttgcaggtatttgcagtgatgcagtcgataaaactgatcaatgggcatacttccaatggtgcggctccac

SEQ ID NO: 443373 - DNA, 75 bp, synthetic construct
  source 1..75: mol_type = other DNA
cgttatggttatcagaaagatcaggcagaaaaagaggtcgtggattgggaaacccgcaatgaatatcgctggtaa

SEQ ID NO: 443374 - DNA, 75 bp, synthetic construct
  source 1..75: mol_type = other DNA
aaatataaacagtcaattaatagcatcaaaaataatgagcctgataatcaacttcagcatctgcagaatttgttt

SEQ ID NO: 443375 - DNA, 75 bp, synthetic construct
  source 1..75: mol_type = other DNA
ttctggtggcgattttcgaccactggattaagcgcgacgtcggcaaggttttcgtaatgaatatcgaatgggcgt

SEQ ID NO: 443376 - DNA, 75 bp, synthetic construct
  source 1..75: mol_type = other DNA
aaaaggaaggtggcactcctactaactggacaagatattcaaaatctaaattaacgaaatcagaatgcgaaaaaa

SEQ ID NO: 443377 - DNA, 75 bp, synthetic construct
  source 1..75: mol_type = other DNA
atggtcagctatgacaagatccgcgcagaatatcgcgcaaattatcgcgcttataaactggaattaatcgacgat

SEQ ID NO: 443378 - DNA, 75 bp, synthetic construct
  source 1..75: mol_type = other DNA
tgcatctggccgagagccagaaagtcgaaaatgaacgccttgctaatacgttaagcgcaacttaccgcgagtcag

SEQ ID NO: 443379 - DNA, 75 bp, synthetic construct
  source 1..75: mol_type = other DNA
gtggatcgagcgctggcggcgatcctgactattgccgcagcgattggctggtttaggcgagaagggggattcccc

SEQ ID NO: 443380 - DNA, 75 bp, synthetic construct
  source 1..75: mol_type = other DNA
ctggacaagatattcaaaatataaactaactaaatcagaatgcgaaaaaatgctctcaggtaaaaaagaagcagg

SEQ ID NO: 443381 - DNA, 75 bp, synthetic construct
  source 1..75: mol_type = other DNA
aactggcttcgccagaatggcgcaaaaggcgtcattgaataccagcctgtttttaattgcctgacgtgcagggaa

SEQ ID NO: 443382 - DNA, 75 bp, synthetic construct
  source 1..75: mol_type = other DNA
acattttattcgggtagttgataaaaacacgcttcagttcagagatgatgaaaacgatctgtatatacgtgtaaa

SEQ ID NO: 443383 - DNA, 75 bp, synthetic construct
  source 1..75: mol_type = other DNA
taccacggcaagcatattgcgtatttcatgcgacaagcattggcctggctggaagggcattcatgcagcgacgac

SEQ ID NO: 443384 - DNA, 75 bp, synthetic construct
  source 1..75: mol_type = other DNA
ctgattgcaaattaccagaaagggcgatggattatcttttgcggaacggactggtaagtgtggagggtgttttac

SEQ ID NO: 443385 - DNA, 75 bp, synthetic construct
  source 1..75: mol_type = other DNA
agtaaaggatccgctaaagaaaaccggtctgaaatatcgctgatagtcctagcaacacttggaattgcatcacca

SEQ ID NO: 443386 - DNA, 75 bp, synthetic construct
  source 1..75: mol_type = other DNA
gtccgcgggaagacaatgctgtttgggcaatggctggaacagaaagagatcccggatccctatcgtaaaagtcag

SEQ ID NO: 443387 - DNA, 75 bp, synthetic construct
  source 1..75: mol_type = other DNA
tcattcatttgttgtaaatcctgatgaattctcttgcgacacacaatttcttaagtgcccaataacattatgcgt

SEQ ID NO: 443388 - DNA, 75 bp, synthetic construct
  source 1..75: mol_type = other DNA
ggggggggggtggataagctgtagtgagcgaatgccggataccaaaacagccgttcttgttgccaaggagtttga

SEQ ID NO: 443389 - DNA, 75 bp, synthetic construct
  source 1..75: mol_type = other DNA
ggtaatgagtggaccggcaatcctgatattgataacgcaatcatcatgctcgaccgcatagatacggcggaaagt

SEQ ID NO: 443390 - DNA, 75 bp, synthetic construct
  source 1..75: mol_type = other DNA
cagggcgtccaccaatggcggttgggttcgatattgatgacacggttctgttttccagccccggattctggcgcg

SEQ ID NO: 443391 - DNA, 75 bp, synthetic construct
  source 1..75: mol_type = other DNA
atgaccactttcaccgacaaagaactgattaaagaaatcaaagagcgcatcggcagcctggacgtgcgagacaat

SEQ ID NO: 443392 - DNA, 75 bp, synthetic construct
  source 1..75: mol_type = other DNA
agttggtgagttttatgaattcaagccgggtgactggtatcagcgttcggtcggggataaagcaccaaagtgggt

SEQ ID NO: 443393 - DNA, 75 bp, synthetic construct
  source 1..75: mol_type = other DNA
gtacgacgacgatgagccaattggcggtgtaacccactggatgcctctaccagaaccgcctcgattaaaggagct

SEQ ID NO: 443394 - DNA, 75 bp, synthetic construct
  source 1..75: mol_type = other DNA
tgttctcagtaactgcaccacaaaaatagttcttcctgctccgaaggtgttcagttctgaatcattgccgcacaa

SEQ ID NO: 443395 - DNA, 75 bp, synthetic construct
  source 1..75: mol_type = other DNA
gatgtgtatgtgattatgcaggatggctggcaagccgccgcgcaaatccgcgagcttcaaccggtgaaaggcaaa

SEQ ID NO: 443396 - DNA, 75 bp, synthetic construct
  source 1..75: mol_type = other DNA
ttgctgcatatcattaaaagcctgaaaagtaccggcaaaggcgcggtgatcctgccccatggcgtactgtttcgc

SEQ ID NO: 443397 - DNA, 75 bp, synthetic construct
  source 1..75: mol_type = other DNA
gatgtctattgcgcaggtgacagcgattaccgtttcgcgctggagtccatttccaaagtctgtaccttagccctg

SEQ ID NO: 443398 - DNA, 75 bp, synthetic construct
  source 1..75: mol_type = other DNA
taaagatgtaaaggaagttgctgatcttcaggctcgcattcaaaccgcgcaaggcgcaattcagggcgagcaagc

SEQ ID NO: 443399 - DNA, 75 bp, synthetic construct
  source 1..75: mol_type = other DNA
ctgacgactggaagaaagtttatagcgatgccatgaactcatcatcgtccgtaactggtgatgttcaaagtatgg

SEQ ID NO: 443400 - DNA, 75 bp, synthetic construct
  source 1..75: mol_type = other DNA
agcgttcaaacctccacgccatagcgcaagatgaatcgccaaaacagattatccatcgtatcagcgaagacctgt

SEQ ID NO: 443401 - DNA, 75 bp, synthetic construct
  source 1..75: mol_type = other DNA
gtacttcctgcaccggagaaattcggttctgagtcattgccggacaattttactatgactgctgtcggtgtgatg

SEQ ID NO: 443402 - DNA, 75 bp, synthetic construct
  source 1..75: mol_type = other DNA
acggccctctctgtaccggataaacgcatatcagatgattttatgcatgctgttctcagtaactgcaccacagga

SEQ ID NO: 443403 - DNA, 75 bp, synthetic construct
  source 1..75: mol_type = other DNA
atgaaatgtatccgggtggtaaccgcagatgaacgtctgacggaagtttatacggaagatgcttccctgtcggaa

SEQ ID NO: 443404 - DNA, 75 bp, synthetic construct
  source 1..75: mol_type = other DNA
tggccgaaatgatgatggaagggctgtatggtcgctccggtgactgggcgtatcgcgttggtttaccgggcaaaa

SEQ ID NO: 443405 - DNA, 75 bp, synthetic construct
  source 1..75: mol_type = other DNA
tcgcgagcaggaaatcccccgcttcagtcgcatagtcccgctgtcagaaattgcggccaacgacttcaacctcaa

SEQ ID NO: 443406 - DNA, 75 bp, synthetic construct
  source 1..75: mol_type = other DNA
aattttaatatggctgctgtcggtgtgatgaagaaggggatgtcgatgcgtttattttcttctccggggcatatt

SEQ ID NO: 443407 - DNA, 75 bp, synthetic construct
  source 1..75: mol_type = other DNA
ttgatggagaaagctggtcagcgattgtcgattcgctgccttcgattgcgcgacatgctcaacaaaaacgcatca

SEQ ID NO: 443408 - DNA, 75 bp, synthetic construct
  source 1..75: mol_type = other DNA
tggatgcggtaaatcagcttgatttcaaccgctatgccacggcgctggcgaagtatcgccaacaacgggaggcga

SEQ ID NO: 443409 - DNA, 75 bp, synthetic construct
  source 1..75: mol_type = other DNA
gaaggattgaccgtggcggaaaacctctgcctcggtcaatggccccgacgcaacggcatgattgattactcgcaa

SEQ ID NO: 443410 - DNA, 75 bp, synthetic construct
  source 1..75: mol_type = other DNA
ttatatgcacaacaaaaacgtatcaccacgttcagcgcttctctggcggctcgtctggaaattgcactaaaaatt

SEQ ID NO: 443411 - DNA, 75 bp, synthetic construct
  source 1..75: mol_type = other DNA
taaccgctgcgccgtcctgtgcgccaatcttggcggcgacactgacaccatcggcgcgatggcaacggcgatttg

SEQ ID NO: 443412 - DNA, 75 bp, synthetic construct
  source 1..75: mol_type = other DNA
cgacatgcacagcaaaaacgcatcaccaccttcagcgcctcactggcggcgcggctggagattgcgctgaaaatt

SEQ ID NO: 443413 - DNA, 75 bp, synthetic construct
  source 1..75: mol_type = other DNA
tccttaaggcggatgttgtctgaacaaaatcggactttaaagatcattgacaagcatcaatttggtgttactaat

SEQ ID NO: 443414 - DNA, 75 bp, synthetic construct
  source 1..75: mol_type = other DNA
ggcgcagtatcgccgccaggattgcattgcgcacgggcgacatctggcaggcttcattcacgcctgctattcccg

SEQ ID NO: 443415 - DNA, 75 bp, synthetic construct
  source 1..75: mol_type = other DNA
tgaggacagtcggaaaagcattgcaacagttgaacgattattctctatgctaaagcttaatcgcgtgtttgataa

SEQ ID NO: 443416 - DNA, 75 bp, synthetic construct
  source 1..75: mol_type = other DNA
gccgcgcgtggtcattcttgatgaacccaccagttcgcttgccagtgcggaagttgaactggtgatcagcgccgt

SEQ ID NO: 443417 - DNA, 75 bp, synthetic construct
  source 1..75: mol_type = other DNA
atggcgcaggatgcccaacgttgcttacaggcgctgggtgttgatgttagccctgaacaacttgtttcaacgcta

SEQ ID NO: 443418 - DNA, 75 bp, synthetic construct
  source 1..75: mol_type = other DNA
caattgctgccagcaagttcaaagggattgtaacgttacacggttttcgttcgatgtggagtacgcttttaaatg

SEQ ID NO: 443419 - DNA, 75 bp, synthetic construct
  source 1..75: mol_type = other DNA
cgatgaatgaacactgcggcaagccgctcaatgatacccgtttgctggctttgatgggcgagctggaaggacgta

SEQ ID NO: 443420 - DNA, 75 bp, synthetic construct
  source 1..75: mol_type = other DNA
gcagcaacttccgcacagaaagcggcgctgtctaagctgtctccggaaatggtgagcgccagcactctggcaggc

SEQ ID NO: 443421 - DNA, 75 bp, synthetic construct
  source 1..75: mol_type = other DNA
acgaactggcaaaacgctttggtgcgccgagctacaaccgtttgcaggcagctgcgacttccgcacaaaaagcgg

SEQ ID NO: 443422 - DNA, 75 bp, synthetic construct
  source 1..75: mol_type = other DNA
ctactgcgaaagcttcctcggtgaagaacatcgcaagcagatcgagaaagaagcagtcgagattgttagcgaagt

SEQ ID NO: 443423 - DNA, 75 bp, synthetic construct
  source 1..75: mol_type = other DNA
cgccagcttgcgccgcagctccctgccatgcaaaacgaactgctggataaacactacctgcgtaagcatggagac

SEQ ID NO: 443424 - DNA, 75 bp, synthetic construct
  source 1..75: mol_type = other DNA
atcccctgcacgcgcctgatgaccgcagaagagatcaacggcgagtatgaataccagaccggcgaagtgatcatt

SEQ ID NO: 443425 - DNA, 75 bp, synthetic construct
  source 1..75: mol_type = other DNA
atcccctgcacgcgccagatgaccgcagaggagatcaacggcgagtatgaataccagactggcgaagtgatcatt

SEQ ID NO: 443426 - DNA, 75 bp, synthetic construct
  source 1..75: mol_type = other DNA
ctcggggaagaacatcgcaagcaaattgagaaagaagcggttgagattgttagcgaagttctgaaaaacgcgtaa

SEQ ID NO: 443427 - DNA, 75 bp, synthetic construct
  source 1..75: mol_type = other DNA
atgaacagacgatggcttactttatgtatatcggttctggggttattcgttgtcggaatatcacagggaatatca

SEQ ID NO: 443428 - DNA, 75 bp, synthetic construct
  source 1..75: mol_type = other DNA
cggtttgccgataagctgccgtcgtccccacgagaaaatatcgtttatcagtgctgggaacgtttttgccaggaa

SEQ ID NO: 443429 - DNA, 75 bp, synthetic construct
  source 1..75: mol_type = other DNA
cttggtgaagaacatcgcaagcagattgagaaagaagcggttgagattgttagcgaagttctgaaaaacgcgtaa

SEQ ID NO: 443430 - DNA, 75 bp, synthetic construct
  source 1..75: mol_type = other DNA
cgttgtctaagctgtctccggaaatggtgagcgccagcaccctggcaggtgacccgatcaccgcgcgtctgacgg

SEQ ID NO: 443431 - DNA, 75 bp, synthetic construct
  source 1..75: mol_type = other DNA
gtgctggcagcgaacggcgttgatgtcattgtgcaggaaaacaatggcttcactccgacacctgccatttccaat

SEQ ID NO: 443432 - DNA, 75 bp, synthetic construct
  source 1..75: mol_type = other DNA
tattagaagccaatttggcgctgccaaaacataacctggtcacgctcacatggggcaacgtcagcgccgttgatc

SEQ ID NO: 443433 - DNA, 75 bp, synthetic construct
  source 1..75: mol_type = other DNA
cgcttagtttatcgcgataaaagcggcgagcgtgactatgagctggaggataccagctatcgctgtgcacctttt

SEQ ID NO: 443434 - DNA, 75 bp, synthetic construct
  source 1..75: mol_type = other DNA
caggtgattgttaatggcaagccactgcccgccgatcgcaaaacttttcagattaaacgttggatgcctggcgaa

SEQ ID NO: 443435 - DNA, 75 bp, synthetic construct
  source 1..75: mol_type = other DNA
aaatagtctttggcataaaggtcgctggttgggtcatgccgatggatttcaaatcgtgcggcatgattcagccat

SEQ ID NO: 443436 - DNA, 75 bp, synthetic construct
  source 1..75: mol_type = other DNA
tcgatctggaaaaaatgaccgttgatgacatcatggtgccgcgcagtgaaattatcggtattgatatcaacgatg

SEQ ID NO: 443437 - DNA, 75 bp, synthetic construct
  source 1..75: mol_type = other DNA
cagatgagcttaccagataaaattattaatgttcctctacgctatgagcttgcttacggtggtatttggcaacca

SEQ ID NO: 443438 - DNA, 75 bp, synthetic construct
  source 1..75: mol_type = other DNA
acaggttatcggagcgcttctcggaagtcgggctggtcctgaatgcagggaaaacgaatatcgcctacattgaca

SEQ ID NO: 443439 - DNA, 75 bp, synthetic construct
  source 1..75: mol_type = other DNA
tatccgcagacaggctgatgcgtgcgctcattaacggggagtttgaaccgtatctccagccggtggtttctgcat

SEQ ID NO: 443440 - DNA, 75 bp, synthetic construct
  source 1..75: mol_type = other DNA
cggggagtttgaaccgtatctccagccggtggtttctgcatccgaccttactgtgtccggtgcagagcttctggt

SEQ ID NO: 443441 - DNA, 75 bp, synthetic construct
  source 1..75: mol_type = other DNA
tcggaaccggatgttccgtactgtcgtacctgaagcactttccggtcagttatataaaaatggacaggagcttca

SEQ ID NO: 443442 - DNA, 75 bp, synthetic construct
  source 1..75: mol_type = other DNA
atggtgagggagattgccagcatacctggttaactgatggacgctctgtcctgtgggctggcaaagtcctgaaaa

SEQ ID NO: 443443 - DNA, 75 bp, synthetic construct
  source 1..75: mol_type = other DNA
atgacgagggggattgccagcatacctggctcaccgatggacgttctgtcctttgggcaggcaaagtcctgaaaa

SEQ ID NO: 443444 - DNA, 75 bp, synthetic construct
  source 1..75: mol_type = other DNA
gggaaagaacacgcccaacaaggtgaatggctgcgttataacttaggcaagggaggttggttatcggtgaagcaa

SEQ ID NO: 443445 - DNA, 75 bp, synthetic construct
  source 1..75: mol_type = other DNA
caattagttaaatttcaacgcaataaaaagaaagtcggcctggttgtcaacgaatacggcgatattcaggggctg

SEQ ID NO: 443446 - DNA, 75 bp, synthetic construct
  source 1..75: mol_type = other DNA
cgagtggttctgctatcacccgctgtttggtaacttcctgcgccagcgctgccagtgggaactggcggcggagct

SEQ ID NO: 443447 - DNA, 75 bp, synthetic construct
  source 1..75: mol_type = other DNA
aatgcatgagtttctggtgcgcattcgtgcgcagctgttatgggcctgggcacggctggatgaagccgaagcgtc

SEQ ID NO: 443448 - DNA, 75 bp, synthetic construct
  source 1..75: mol_type = other DNA
accacttcctgcaaggccaatggcgcaacattgcccgtgcgcaaattttactcggcgagtttgaacctgcggaaa

SEQ ID NO: 443449 - DNA, 75 bp, synthetic construct
  source 1..75: mol_type = other DNA
cgtattctgcgagaaataaatcaacatcatcggcataaattcgcccatttcgatgagaatttcgttgaacgtctg

SEQ ID NO: 443450 - DNA, 75 bp, synthetic construct
  source 1..75: mol_type = other DNA
ttgtcctcgaagaactcaacgagaacgcccgcaatttacgattaatgagcgatctcaaccgtaacttgctgctgc

SEQ ID NO: 443451 - DNA, 75 bp, synthetic construct
  source 1..75: mol_type = other DNA
cgttaatgcggcaaactgaacagatggcacgccagcacgatgtctggcactacgccttgtggagtttaatccagc

SEQ ID NO: 443452 - DNA, 75 bp, synthetic construct
  source 1..75: mol_type = other DNA
tgtttatctggcaagtcaggagtcgagctacgtcaccgcagaagtgcacggcgtgtgcggcggcgagcatttagg

SEQ ID NO: 443453 - DNA, 75 bp, synthetic construct
  source 1..75: mol_type = other DNA
atgagtggctttcaaagtgtaattaaccagcaacaggcaccgggagttgaaggagatttcgcttcggctaaccct

SEQ ID NO: 443454 - DNA, 75 bp, synthetic construct
  source 1..75: mol_type = other DNA
agcaccgctgcaaattttgatgatgccgctggtctggttgctgaacgctatcacccgcatgttaatgcgcattat

SEQ ID NO: 443455 - DNA, 75 bp, synthetic construct
  source 1..75: mol_type = other DNA
gtttaatccagcaaagtgaaattctgtttgcccaagggttcctgcaaaccgcgtgggaaacgcaggaaaaagcgt

SEQ ID NO: 443456 - DNA, 75 bp, synthetic construct
  source 1..75: mol_type = other DNA
aattcgcccattttgatgagaatttcgttgaacgtctgctaaatcatccggaagtaccagaattgatccgtacca

SEQ ID NO: 443457 - DNA, 75 bp, synthetic construct
  source 1..75: mol_type = other DNA
ccgtctgaccaaacttgatgcgcagctgaaagagcagatgaaccgcattatcgaaacgcgcagcgatggcctgac

SEQ ID NO: 443458 - DNA, 75 bp, synthetic construct
  source 1..75: mol_type = other DNA
gcgacctactttgtccgggccattggcgactcgatgaaagatatgggcctgcactccggcgatttaatggttgtc

SEQ ID NO: 443459 - DNA, 75 bp, synthetic construct
  source 1..75: mol_type = other DNA
tgaacaatgcttattccccaatttaccctgaccccgatgaactgacaatttttggcgtagtgactcattgggttc

SEQ ID NO: 443460 - DNA, 75 bp, synthetic construct
  source 1..75: mol_type = other DNA
ctgagaaaatcgccatccctttatttctcgagcggtgtgcagctggcttccccagccctgctcaggattatactt

SEQ ID NO: 443461 - DNA, 75 bp, synthetic construct
  source 1..75: mol_type = other DNA
agataaatgcatgtttgacgcagagcacgaaataacaaaaaggtttgatgaaatctgcgcattgcaacaaaaact

SEQ ID NO: 443462 - DNA, 75 bp, synthetic construct
  source 1..75: mol_type = other DNA
agtttctgagcaaaattagctggttgttaggcttagctgcgcagtgggtgcgtttccgtgatgacatcatgactg

SEQ ID NO: 443463 - DNA, 75 bp, synthetic construct
  source 1..75: mol_type = other DNA
ggcaaaacaagatctgatgcatttctttgaattgctgcgcggtaatggcgatgttgaccaggcacgattgcacta

SEQ ID NO: 443464 - DNA, 75 bp, synthetic construct
  source 1..75: mol_type = other DNA
tcagaacatatcgccgttaagccatcacccccctctcagtgcagtgaaaaaatctgccgttacgttttttgaaaa

SEQ ID NO: 443465 - DNA, 75 bp, synthetic construct
  source 1..75: mol_type = other DNA
gcagggggtaaaagcgatgggcctggaggcgtgtatgacgctgggtacgttgagtgaatctcaggcgcagcgcct

SEQ ID NO: 443466 - DNA, 75 bp, synthetic construct
  source 1..75: mol_type = other DNA
ggcagcgaataaagtggtgacgaatgcgctgttaacgcgtggcgatctggtgctcttcgaccgtaacaaccataa

SEQ ID NO: 443467 - DNA, 75 bp, synthetic construct
  source 1..75: mol_type = other DNA
tgccgatgaattccgcctcatcctccctctactcagaggaactgcagatattcggcgtgatgatcgcattcatac

SEQ ID NO: 443468 - DNA, 75 bp, synthetic construct
  source 1..75: mol_type = other DNA
tggcgagttcaccgtcaagcgtctgcagcttaagccccgtatagccctgctgccgatgaattccgcctcatcctc

SEQ ID NO: 443469 - DNA, 75 bp, synthetic construct
  source 1..75: mol_type = other DNA
tgacggaaatatccatgagctgggaacgaacacctttgggcttatcagtactcaaagtgaagatgaaataagaga

SEQ ID NO: 443470 - DNA, 75 bp, synthetic construct
  source 1..75: mol_type = other DNA
atgtcatcaatccgcttaactacgagaatgaaagaggaaatcgctcgtaacgctttaattaagtccggggtgttc

SEQ ID NO: 443471 - DNA, 75 bp, synthetic construct
  source 1..75: mol_type = other DNA
gtaacggtgttgagcctcggttgtgtggtgattattgttgccgccaacatcgtcggcatcggcatggcgaattaa

SEQ ID NO: 443472 - DNA, 75 bp, synthetic construct
  source 1..75: mol_type = other DNA
tggcagagttctgtcgtcagaagcgccctgcagcctgggaagcgcctcacccgcttgaacgcgcgttgcgtgccc

SEQ ID NO: 443473 - DNA, 75 bp, synthetic construct
  source 1..75: mol_type = other DNA
gcgataacatgctacgtctgtgggatgacctgaatgaccgttacgcgccgccggaagttgtgcgtgagctggcgc

SEQ ID NO: 443474 - DNA, 75 bp, synthetic construct
  source 1..75: mol_type = other DNA
ggtttctaccctactggctaaaattgttactacccataagctcaaactgaaaaacgtctatgacccgacctgtgg

SEQ ID NO: 443475 - DNA, 75 bp, synthetic construct
  source 1..75: mol_type = other DNA
ttcgtctggcaaaagtgaaagatttgtcgctaaaagccgacttttcgctggcaaaaccgctgatcattcacaatg

SEQ ID NO: 443476 - DNA, 75 bp, synthetic construct
  source 1..75: mol_type = other DNA
ctacgctgctgcctgtttttctgttcggcgctatgtgggggatcggtaatatcaactacggcctgaccatgcgtt

SEQ ID NO: 443477 - DNA, 75 bp, synthetic construct
  source 1..75: mol_type = other DNA
actgaacttgaagaagtaacaaagttaaagaaccagcttgcacttgacgccagagttattgcgtttggcggtaaa

SEQ ID NO: 443478 - DNA, 75 bp, synthetic construct
  source 1..75: mol_type = other DNA
tcattttactcatgcgatgtcagttcatgttcgatttatctgactgtatctggaagaagggttggctggcattca

SEQ ID NO: 443479 - DNA, 75 bp, synthetic construct
  source 1..75: mol_type = other DNA
cagagttattgcgtttggcggtaaaaagaaaactgaggaagtggatcatttatattccaagttagtagctataag

SEQ ID NO: 443480 - DNA, 75 bp, synthetic construct
  source 1..75: mol_type = other DNA
ggctcatgtagtgctgtgtggcacagctggtcctgaaaacttgccattaagtgagaggcgctatgttcatacccg

SEQ ID NO: 443481 - DNA, 75 bp, synthetic construct
  source 1..75: mol_type = other DNA
cccgaccaaacgtactcacatggcggtacatcccatgggcaaaccggcggtcactcactatcgcatcatggaaca

SEQ ID NO: 443482 - DNA, 75 bp, synthetic construct
  source 1..75: mol_type = other DNA
catcgaaatggaatggcatgcgcctattccacaagatatggtggagctgattgaggtgatgcgcgccgatttcga

SEQ ID NO: 443483 - DNA, 75 bp, synthetic construct
  source 1..75: mol_type = other DNA
gtgttgaccccgttgacggccttcgcgggagtgcggttgcgctggcctgccatgatgcgactcacttgcatcggc

SEQ ID NO: 443484 - DNA, 75 bp, synthetic construct
  source 1..75: mol_type = other DNA
ctgatgcaggtgaactcatcgcatatcccgctcctgaaacagaaagggattatccgaaacccgcaggacctgctc

SEQ ID NO: 443485 - DNA, 75 bp, synthetic construct
  source 1..75: mol_type = other DNA
tggtgcggattcgtgatgccgaagggcgaattgcggcagaaggggcgttgccttatccacctggcgtgctttgcg

SEQ ID NO: 443486 - DNA, 75 bp, synthetic construct
  source 1..75: mol_type = other DNA
atttgggaccaaaagcgtgagcatgaagatttatccaacgctgtagtgacacgacaatgcaccatcagaggccag

SEQ ID NO: 443487 - DNA, 75 bp, synthetic construct
  source 1..75: mol_type = other DNA
ctttcacgcgaagtgacaatgtcacaggatgcattacttgccgcattgcgcttaagcgccggttcgcctggcgcg

SEQ ID NO: 443488 - DNA, 75 bp, synthetic construct
  source 1..75: mol_type = other DNA
agccgccagcggaaacctggtttttcctcgctacacgagaacttgaacgcttactggcaacactgcgcagccgtt

SEQ ID NO: 443489 - DNA, 75 bp, synthetic construct
  source 1..75: mol_type = other DNA
cgtgcgtgaagtcaccgaaaagctgaatgaacacgcacgattaggcggtgcgaaagttgtctgggtcaccgatgc

SEQ ID NO: 443490 - DNA, 75 bp, synthetic construct
  source 1..75: mol_type = other DNA
aaaacggggcaacgtgtttctggactggcatttggcgggattctcttttttcaaaagtttggtatgggactggcg

SEQ ID NO: 443491 - DNA, 75 bp, synthetic construct
  source 1..75: mol_type = other DNA
tattatcattatcattctctgttggggcggttacagggtctttactccccggcgtaacaacgtttcacatggtga

SEQ ID NO: 443492 - DNA, 75 bp, synthetic construct
  source 1..75: mol_type = other DNA
caactgggttatcaaatagcaatgggggcaatgggaattctggcaacgtgtttatgcctgtattgtttttttagc

SEQ ID NO: 443493 - DNA, 75 bp, synthetic construct
  source 1..75: mol_type = other DNA
ttgcgatcattatgtttggcgggattattcgtaactctgtcgctgcatattatgcaaaatattacctgagtggtg

SEQ ID NO: 443494 - DNA, 75 bp, synthetic construct
  source 1..75: mol_type = other DNA
gggggctttatcggaatcgctttagcctatttggattatcaacctggtgtagaacaaacaccacaggcgctgtgg

SEQ ID NO: 443495 - DNA, 75 bp, synthetic construct
  source 1..75: mol_type = other DNA
gggcaatgggaattctggcaacgtgtttatgcctgtattgtttttttagcgtgagagagcgcatctaccatccaa

SEQ ID NO: 443496 - DNA, 75 bp, synthetic construct
  source 1..75: mol_type = other DNA
ctggtattcgctgctagcggcccttaatcatgaacaagctccggcgcgtttacactggctggcaacgttgctgat

SEQ ID NO: 443497 - DNA, 75 bp, synthetic construct
  source 1..75: mol_type = other DNA
ctggataacgtccgcgccgtgccgttgttcagcctgtttgcactgattagccttgcgtctctggctctgtatggc

SEQ ID NO: 443498 - DNA, 75 bp, synthetic construct
  source 1..75: mol_type = other DNA
gatcattctcggttcctggtgggcttattgcgaactgggctggggcggttggtggttttgggatccggttgaaaa

SEQ ID NO: 443499 - DNA, 75 bp, synthetic construct
  source 1..75: mol_type = other DNA
tatggcggtttgatggtagcggcgagcgtggcgctggcgagtctactgcgcggcgagtttgatggtgcctgcgcc

SEQ ID NO: 443500 - DNA, 75 bp, synthetic construct
  source 1..75: mol_type = other DNA
atgatgcggctcaccagcatcggcactctggcacagttcgcgctcctgctgcttgcctttggcgtactgacgtat

SEQ ID NO: 443501 - DNA, 75 bp, synthetic construct
  source 1..75: mol_type = other DNA
gtttgctctgttgatgctggtggtgattgtgctggcgacgtttgtctctggcaaacgcgcgcagcttccggcgct

SEQ ID NO: 443502 - DNA, 75 bp, synthetic construct
  source 1..75: mol_type = other DNA
tgtggggcggtcatgaaggttcgctgctgctttgggtgctgttgctttccgcctggagcgcgctgtttgcctggc

SEQ ID NO: 443503 - DNA, 75 bp, synthetic construct
  source 1..75: mol_type = other DNA
tattacactcttgcacctgaaaaaggaaagaacgcgctgggcattgatgctgtgcgtgaagtcactgaaaaattg

SEQ ID NO: 443504 - DNA, 75 bp, synthetic construct
  source 1..75: mol_type = other DNA
ctttcacgtgaagtgacaatgtcacaagaggcgttgcttgccgcactgcgcttaagcgccggttcgcccggcgcg

SEQ ID NO: 443505 - DNA, 75 bp, synthetic construct
  source 1..75: mol_type = other DNA
cctgagcgccggttcgcctggtgcggcattggggctgtttcaaggggatatctggcaggcacgtgagacactttg

SEQ ID NO: 443506 - DNA, 75 bp, synthetic construct
  source 1..75: mol_type = other DNA
cgaatttgctggcgctgggcactacctggctggagtgcattaacggcggggatcatcctcggttcctggtgggcc

SEQ ID NO: 443507 - DNA, 75 bp, synthetic construct
  source 1..75: mol_type = other DNA
tgctgcaacatcccggtcttatctttcatccaccgctgctttaccttggctatggcggtttgatggtagcggcga

SEQ ID NO: 443508 - DNA, 75 bp, synthetic construct
  source 1..75: mol_type = other DNA
gtgctgataggcgcgccgacgggggttgcctgctcggtgtgtcctaaaaaaaaggacagtccaaattatggcaac

SEQ ID NO: 443509 - DNA, 75 bp, synthetic construct
  source 1..75: mol_type = other DNA
atgagtagaaataacgaaacaagcggcgttgaactggttgtcgtgggcgtatttgctttctgtctggcagttgtt

SEQ ID NO: 443510 - DNA, 75 bp, synthetic construct
  source 1..75: mol_type = other DNA
gatggaagtggcgcatttgcagaccagttgaataatgccaccgcgccttttgttcagacgcagtttgcctggaat

SEQ ID NO: 443511 - DNA, 75 bp, synthetic construct
  source 1..75: mol_type = other DNA
gatttgcgctgggaagtggtgcgcaagttgcgtctagtggcgatatttatggttcagtgtgggaaaacaactggt

SEQ ID NO: 443512 - DNA, 75 bp, synthetic construct
  source 1..75: mol_type = other DNA
gaaacagtagagttagcagcaaggaaagataatctaacaacagaggatgtacaaaaaaatattaaaagaaatatt

SEQ ID NO: 443513 - DNA, 75 bp, synthetic construct
  source 1..75: mol_type = other DNA
gtccgtgatgggcttttggaagtggtttggcgaggagtaggaagggaacataagtatcggactacaaagatattt

SEQ ID NO: 443514 - DNA, 75 bp, synthetic construct
  source 1..75: mol_type = other DNA
aaccaattcttaaggaagctgccggagttcgtgaaacgggtgggctggttttcgatgatatggtttcgtggtacg

SEQ ID NO: 443515 - DNA, 75 bp, synthetic construct
  source 1..75: mol_type = other DNA
ggggagtgcgtgccacagtgtccgcatcaggcgttgcagattgttgacggcaaagtggtgtggaacgctgtggtt

SEQ ID NO: 443516 - DNA, 75 bp, synthetic construct
  source 1..75: mol_type = other DNA
caactgttgcagagcttggtgatgattcaggctggcatttctatagtcagcgaaatacagataactcggtaatat

SEQ ID NO: 443517 - DNA, 75 bp, synthetic construct
  source 1..75: mol_type = other DNA
acatatccgttcgcggcgggatactgattctgctaactggtctgaatgggcgcaggtctatacgtcaaaagattc

SEQ ID NO: 443518 - DNA, 75 bp, synthetic construct
  source 1..75: mol_type = other DNA
atcaggcattgcagattgttaatggcaaagtggagtggaacgctgtagtctgcgagcagtgcgatacctgcctga

SEQ ID NO: 443519 - DNA, 75 bp, synthetic construct
  source 1..75: mol_type = other DNA
gcgcagcatcagcctgcttgcagagcgcggtaagctgacggaactgcgtttactggtgatcccaggccaggtgga

SEQ ID NO: 443520 - DNA, 75 bp, synthetic construct
  source 1..75: mol_type = other DNA
atcaggcgttgcagattattaacagcaaagtagtgtggaacgcagccgtctgcgagcagtgtgatacctgtctga

SEQ ID NO: 443521 - DNA, 75 bp, synthetic construct
  source 1..75: mol_type = other DNA
gaaacagtagagttagcagccaagaaagaaaaactgactgactcacaaattcagcaatctataaagctgaatata

SEQ ID NO: 443522 - DNA, 75 bp, synthetic construct
  source 1..75: mol_type = other DNA
tacaattaagcattgtcggtgatggtgagcaaaaagattatctttataaattagctaaggattgtgatattgaat

SEQ ID NO: 443523 - DNA, 75 bp, synthetic construct
  source 1..75: mol_type = other DNA
tgccattatgtttctcatatatcgcttcctgttatatgtgccatttttttaggcagaagattgcgtgtaataagt

SEQ ID NO: 443524 - DNA, 75 bp, synthetic construct
  source 1..75: mol_type = other DNA
aaaccattgtatatagacaaggcattttggaccgtcgatacaatgtattacacggaagtatttgattgcattata

SEQ ID NO: 443525 - DNA, 75 bp, synthetic construct
  source 1..75: mol_type = other DNA
agtcgaagcgcgggcaatggctgacagaggtttatcaacctatgaggccgtatatcaactaaacaaactggaaga

SEQ ID NO: 443526 - DNA, 75 bp, synthetic construct
  source 1..75: mol_type = other DNA
ccgtggataattgaattaagctgtagtagcggactgcatgtcatcgcccatgcggattaccccaatgatatttat

SEQ ID NO: 443527 - DNA, 75 bp, synthetic construct
  source 1..75: mol_type = other DNA
cccgtggcaagacttgctgatctcggttggtgacgttatcgatcgtggcccggagagtttgcgttgcctgcaatt

SEQ ID NO: 443528 - DNA, 75 bp, synthetic construct
  source 1..75: mol_type = other DNA
acaacgctgccgggaaaatattcatcgttttattcacaacattatttatgacatccctgggaacgcaactcaggc

SEQ ID NO: 443529 - DNA, 75 bp, synthetic construct
  source 1..75: mol_type = other DNA
attacggttggtcaacatcttcatatagagatgagtcattgtcggcgttggctgtccccaaccttgcaaatgacc

SEQ ID NO: 443530 - DNA, 75 bp, synthetic construct
  source 1..75: mol_type = other DNA
aaaagtgatccatacacgaacaattagtcgatctgatataggctcatttacaggctcatttgtcggcaatgttaa

SEQ ID NO: 443531 - DNA, 75 bp, synthetic construct
  source 1..75: mol_type = other DNA
tggatggaatttgtatcagtatcctttgaatcccctacaagtgattgaccctatggggttatttgcgatttggga

SEQ ID NO: 443532 - DNA, 75 bp, synthetic construct
  source 1..75: mol_type = other DNA
ggtgatgaagtgggtgtccacggcgtaccagtggctgtttgtggacagcggatttatggcctggatgaagcaggg

SEQ ID NO: 443533 - DNA, 75 bp, synthetic construct
  source 1..75: mol_type = other DNA
atgtcaaaccactgtttaaaaacacagtaaacactgctataattgacagagtcatttatgacagaatagttgaac

SEQ ID NO: 443534 - DNA, 75 bp, synthetic construct
  source 1..75: mol_type = other DNA
agtcagcgagtattccgctttcagaatggagttgctattgcttttaaaaacattcaggcaggtgatagtaaaaag

SEQ ID NO: 443535 - DNA, 75 bp, synthetic construct
  source 1..75: mol_type = other DNA
catcggcattcggcatgatccccaaactggtcgaaagcgcaggcaacagcgaaagcgcgggatcgatgactgcca

SEQ ID NO: 443536 - DNA, 75 bp, synthetic construct
  source 1..75: mol_type = other DNA
tgattgccaccaccgccttagcaacgggtgtgtatgcagttgcgggctttacctttgtttatgcggtgggctatc

SEQ ID NO: 443537 - DNA, 75 bp, synthetic construct
  source 1..75: mol_type = other DNA
ggattgatccggagatccgtgcactggtggctgcgatgaacattcacggcttccgtacatatgcttcctgtcagg

SEQ ID NO: 443538 - DNA, 75 bp, synthetic construct
  source 1..75: mol_type = other DNA
aatgacctgtcacgggataatccgaagtggtcagactggaaaatcagagggcaggaactgctgaacagcaaaaag

SEQ ID NO: 443539 - DNA, 75 bp, synthetic construct
  source 1..75: mol_type = other DNA
ggtttacaggaaacggtaaacaaggctggtaacgccgtccaaaagacaggcgatatcttgtccggtgggcttact

SEQ ID NO: 443540 - DNA, 75 bp, synthetic construct
  source 1..75: mol_type = other DNA
atacactacccttccgtgagaaatttaagatgaaatcagaagacacccttgactggtatccggcacaactaccgc

SEQ ID NO: 443541 - DNA, 75 bp, synthetic construct
  source 1..75: mol_type = other DNA
gcttcagcctgaaggccctcatcactggtatcaccggtactgtcgtcgctcactgcgtgcaggcttcaggacgct

SEQ ID NO: 443542 - DNA, 75 bp, synthetic construct
  source 1..75: mol_type = other DNA
ggaagatattcgcaacaacgattacaacctcaatatcccgcgctatgtcgatacctttgaagcggaagaagagat

SEQ ID NO: 443543 - DNA, 75 bp, synthetic construct
  source 1..75: mol_type = other DNA
aaatctacggtcaggaaatgaaccgtaccacctacaacctagcccgtatgaacatgattttgcatggcgttcact

SEQ ID NO: 443544 - DNA, 75 bp, synthetic construct
  source 1..75: mol_type = other DNA
tttcgtacatatgcgtcctgtcaggggcatggtttccctgttacgaaactgccgccttatatcgcctttgcctgt

SEQ ID NO: 443545 - DNA, 75 bp, synthetic construct
  source 1..75: mol_type = other DNA
ggtggccgcgatgaacgttcacggattccgtacatatgcctcctgtcagggacatggtttccctgttacaaagct

SEQ ID NO: 443546 - DNA, 75 bp, synthetic construct
  source 1..75: mol_type = other DNA
tggtatcaccggtactgtcgccgctcactgcgtgcagacttcaggacgctgatatcgttgctgaagtcgttatct

SEQ ID NO: 443547 - DNA, 75 bp, synthetic construct
  source 1..75: mol_type = other DNA
atcgacgcgcttctgtatgggcgcggcgtggaagaatccccacgaacgcgatatgccgtacctggaacaaatggt

SEQ ID NO: 443548 - DNA, 75 bp, synthetic construct
  source 1..75: mol_type = other DNA
gaatcaaaacattatcccttccttattgttgtggagtcagagagtaaatggcatttattagtcattaaaaaaata

SEQ ID NO: 443549 - DNA, 75 bp, synthetic construct
  source 1..75: mol_type = other DNA
aatatgaatcacagaagaagattgctatgcaggctgatattgagcagcttacgaagatttctcagaaatatagca

SEQ ID NO: 443550 - DNA, 75 bp, synthetic construct
  source 1..75: mol_type = other DNA
tctacaccgtgctggcggaaggtgacgaccagcaagatccgattgtcgactgcgcgcggtgctggacgggcatat

SEQ ID NO: 443551 - DNA, 75 bp, synthetic construct
  source 1..75: mol_type = other DNA
actctcggagataacgacactggtattaaacagggcggcgacggtgtccttttattctattcaaatggacaactg

SEQ ID NO: 443552 - DNA, 75 bp, synthetic construct
  source 1..75: mol_type = other DNA
ttcacgctatccagctccaacaactccacgaagaacgtagggtttaatttatggggcgcttcatcaagaccaact

SEQ ID NO: 443553 - DNA, 75 bp, synthetic construct
  source 1..75: mol_type = other DNA
tgttcaattgatggcgcgtggtggtcgttatgaaaaagccggacacgcaattaccggattaagaatcattggtga

SEQ ID NO: 443554 - DNA, 75 bp, synthetic construct
  source 1..75: mol_type = other DNA
agttttacggcaatatcatcaccacacgtacctaccaggaacgccttgatacgctggaaaaagtgcgcgaggccg

SEQ ID NO: 443555 - DNA, 75 bp, synthetic construct
  source 1..75: mol_type = other DNA
gaggcgtgtatgacgctgggtacattaagtgaatcccaggcgcagcgcctcgcggacgccgggctggattactac

SEQ ID NO: 443556 - DNA, 75 bp, synthetic construct
  source 1..75: mol_type = other DNA
gctggcaggggataacgaacaacagcaacgtcttgaacaggcgctgatgaccccggacaccgacgaatattacaa

SEQ ID NO: 443557 - DNA, 75 bp, synthetic construct
  source 1..75: mol_type = other DNA
ccgcctgaacggcaacgaccttctgccgccgttgccgccctcggtcaatcccttaacccgccgttcggtggacga

SEQ ID NO: 443558 - DNA, 75 bp, synthetic construct
  source 1..75: mol_type = other DNA
gttcgcctgggtacgcgtgttgttcaattgatggcgcgtggtggtcgttatgaaaaagccggacacgcaattacc

SEQ ID NO: 443559 - DNA, 75 bp, synthetic construct
  source 1..75: mol_type = other DNA
taaaactgccggggcatcagcacagcgtacagcacgtgaaaatctggatatctgggatgccagcctgaacaaaaa

SEQ ID NO: 443560 - DNA, 75 bp, synthetic construct
  source 1..75: mol_type = other DNA
gggcaatttgctgttttgtcctctttattgtggtgtgcctttttctggcgacacatatgaagggagcttttcggg

SEQ ID NO: 443561 - DNA, 75 bp, synthetic construct
  source 1..75: mol_type = other DNA
ctgccagcggttatgcacacccccaaattatccccggcgctatttatctggataagaacggtaacagagtaacgg

SEQ ID NO: 443562 - DNA, 75 bp, synthetic construct
  source 1..75: mol_type = other DNA
atgagaacatatttatctggcttgactgccagcggttatgcacatcccaaaattatccccggcgctatttatcgg

SEQ ID NO: 443563 - DNA, 75 bp, synthetic construct
  source 1..75: mol_type = other DNA
ccttgcgtattggtgatgaagaaattcagcttaacgctgacgatgatgatcacattgacgggcaacctgcaccgc

SEQ ID NO: 443564 - DNA, 75 bp, synthetic construct
  source 1..75: mol_type = other DNA
aacaaaccagaatattgctgaccatcaaaaacgggaaagtaatattcattcgccatgttcatgacgatgaacttg

SEQ ID NO: 443565 - DNA, 75 bp, synthetic construct
  source 1..75: mol_type = other DNA
aaataacaaacgctccggtggagaaagggaaataccagtccatcaacaaagttaaagaacccgccagggtaagat

SEQ ID NO: 443566 - DNA, 75 bp, synthetic construct
  source 1..75: mol_type = other DNA
taatccactcttccgcgttcaggcgattacagtcgaagacacaggtgctggggctgggcgagagcgacttctacc

SEQ ID NO: 443567 - DNA, 75 bp, synthetic construct
  source 1..75: mol_type = other DNA
gcgcacaaggtgcgcaagttaagaacaatcaacaggtagacacccgcagcacgttatacgccgcactgcaaaatg

SEQ ID NO: 443568 - DNA, 75 bp, synthetic construct
  source 1..75: mol_type = other DNA
tatcgccacaggacgtcgcccgttttcgcgaacaactggaacaagccgaatgggtggatggacgcgtcaccaccg

SEQ ID NO: 443569 - DNA, 75 bp, synthetic construct
  source 1..75: mol_type = other DNA
aatcccgacttccagaaataaccatgtgtcacgtgtggatgtggataaaaaactacaggaactgaaaaacatgat

SEQ ID NO: 443570 - DNA, 75 bp, synthetic construct
  source 1..75: mol_type = other DNA
agatgtacgccaccgcgcaatctcgtgaaaccggaattgcctccgttaaagccaatggcacaagccagacggtga

SEQ ID NO: 443571 - DNA, 75 bp, synthetic construct
  source 1..75: mol_type = other DNA
gtggactccatttgttgaagttggtaacgtttcagttaatagcaccagcgatgagcgccagactcgcttccgtgt

SEQ ID NO: 443572 - DNA, 75 bp, synthetic construct
  source 1..75: mol_type = other DNA
tatgatttatgtattgacgataaggttttccggttaattgatgtacctggcattgaaggcaatgaaaattgctat

SEQ ID NO: 443573 - DNA, 75 bp, synthetic construct
  source 1..75: mol_type = other DNA
gaggtgacgaccgataaaaccagcgagaacgtgctgaactgcacgcttaccctgcgtgaagtcatcataacgcag

SEQ ID NO: 443574 - DNA, 75 bp, synthetic construct
  source 1..75: mol_type = other DNA
ctcccggacacagcagatcaccgtcgctgataaaaccaacatgaaggaaggggccagcacgtcggcggtacagaa

SEQ ID NO: 443575 - DNA, 75 bp, synthetic construct
  source 1..75: mol_type = other DNA
atcgatttgtttatcggcgacgaaattgacgatgcactcgatacagccggtcttgaacgcctcatgggtattctg

SEQ ID NO: 443576 - DNA, 75 bp, synthetic construct
  source 1..75: mol_type = other DNA
aaacgcgccagcgaagtcactatggagtgcgggttttctggtggcggatccattctcgattttgtggatgtctcg

SEQ ID NO: 443577 - DNA, 75 bp, synthetic construct
  source 1..75: mol_type = other DNA
gcctcagcgccggactgagcccgaaagagacttatcagcaattgctggatctccagtcctctcgggtgccgttcg

SEQ ID NO: 443578 - DNA, 75 bp, synthetic construct
  source 1..75: mol_type = other DNA
atggatattttatcagcgatttttcgccagcaatcccggcgaattggcatattaattcccagcgtggtcgtctcc

SEQ ID NO: 443579 - DNA, 75 bp, synthetic construct
  source 1..75: mol_type = other DNA
caatcggtggcccgaccgatcccttgccgattggcgcggcatttaccggtttgattctggtgaacaccttttact

SEQ ID NO: 443580 - DNA, 75 bp, synthetic construct
  source 1..75: mol_type = other DNA
tattttgcttggtatggcgggaattttgtatgcggtgatcggcggactgcgcgcaatggcagtggcagactccat

SEQ ID NO: 443581 - DNA, 75 bp, synthetic construct
  source 1..75: mol_type = other DNA
cattttcgaaacacaaatcagtcgaatcacaacattaaaaaaacaactggagggcatgccttatggaacaattca

SEQ ID NO: 443582 - DNA, 75 bp, synthetic construct
  source 1..75: mol_type = other DNA
tgttacgcctttcctgaatacacgcacagccgagtatctcaatacgttgtctgacgggaatattactgctgagtg

SEQ ID NO: 443583 - DNA, 75 bp, synthetic construct
  source 1..75: mol_type = other DNA
atgaagtttttaaagctccaggttgagaattttatggctatcgccagcgcggaggtcgagttagatcagcgtggt

SEQ ID NO: 443584 - DNA, 75 bp, synthetic construct
  source 1..75: mol_type = other DNA
ggtaacactgtctgaagtcgagatggaaattcgctcgctgccagaacagatccgtgatacggaaaatgcgattgc

SEQ ID NO: 443585 - DNA, 75 bp, synthetic construct
  source 1..75: mol_type = other DNA
cgccacaggacgtcgcgcgtcttcgtgaacaactggaacaagccgaatggattgatggtcgtgtcaccactggcg

SEQ ID NO: 443586 - DNA, 75 bp, synthetic construct
  source 1..75: mol_type = other DNA
ggtgtcgcggcggtcactgattcatgccagggatatgatgtcaaagcgagttgtcaggccagcaggcaaagcctt

SEQ ID NO: 443587 - DNA, 75 bp, synthetic construct
  source 1..75: mol_type = other DNA
ggaatgattaaatacaacccagcgcaggagttgggcggtgcgatagaaaccaataaaacccgtcatcgccctgcc

SEQ ID NO: 443588 - DNA, 75 bp, synthetic construct
  source 1..75: mol_type = other DNA
aaagttgtaatcatttatccatctcgcctgattcgaggcgatttacaagataatttaatacaggaatctcaatga

SEQ ID NO: 443589 - DNA, 75 bp, synthetic construct
  source 1..75: mol_type = other DNA
atcggcgatgcgttttcgacctgaaaacggggatgtaatttttgccgacagccaggggatttcacgtataagcgt

SEQ ID NO: 443590 - DNA, 75 bp, synthetic construct
  source 1..75: mol_type = other DNA
ctttttattacagctggctgcaccatcgtgggcgccgcagtaggcgccgcgatagcgatacttttactgagataa

SEQ ID NO: 443591 - DNA, 75 bp, synthetic construct
  source 1..75: mol_type = other DNA
cgtgaggaatttcttgctaaattccgccgtgcgcaggcgtccagtgctgagacgcttacccgtcagatccttttt

SEQ ID NO: 443592 - DNA, 75 bp, synthetic construct
  source 1..75: mol_type = other DNA
tttcgttttttgatactgagacatataacaaatttaaagaaaatgaagccagggatagaaagaactgtcgaaaga

SEQ ID NO: 443593 - DNA, 75 bp, synthetic construct
  source 1..75: mol_type = other DNA
tctaacgattagtatcacgactaactatcaccaacattatcttgatagtggtgtgataagtggaatgtctcggct

SEQ ID NO: 443594 - DNA, 75 bp, synthetic construct
  source 1..75: mol_type = other DNA
aaccttcacaccagacggacatttcacccgcattctgtcacgccctgattttttacaggcgttacctcatttccg

SEQ ID NO: 443595 - DNA, 75 bp, synthetic construct
  source 1..75: mol_type = other DNA
tcaatctaagggtatctatcctgcaaatatcaatgatgcactggcacatgttgcgcgattaaaagcagaggggaa

SEQ ID NO: 443596 - DNA, 75 bp, synthetic construct
  source 1..75: mol_type = other DNA
tttgcggcgggcactggtatctgactggagaacatcatcatcgcgtggcggtgtttccgctgaacgatatccatg

SEQ ID NO: 443597 - DNA, 75 bp, synthetic construct
  source 1..75: mol_type = other DNA
cgctgtcaaaactgattttgcgtcatcgtcgggtgatggctgaaaaagggatcaccgcaaaagcagagcaacggg

SEQ ID NO: 443598 - DNA, 75 bp, synthetic construct
  source 1..75: mol_type = other DNA
ggatgagttatgaagaagtcgatcaatccgcactcatccatctcggtgctaacgttgcttctctcacgttgtcgg

SEQ ID NO: 443599 - DNA, 75 bp, synthetic construct
  source 1..75: mol_type = other DNA
aggcctggataaattacccgaaacggtagaacgctatactggcggtctcaatgatgaatggttaatggcagccga

SEQ ID NO: 443600 - DNA, 75 bp, synthetic construct
  source 1..75: mol_type = other DNA
gtgaaaggtgagaaagtgttgaacgtgaaagagatgaagctttcagggcaacataactacaccaatgcgctggcg

SEQ ID NO: 443601 - DNA, 75 bp, synthetic construct
  source 1..75: mol_type = other DNA
ttcccattattccgttctttgtcgcttcactcattctcgatggttctgcaaccatgattcacagcctggtcacta

SEQ ID NO: 443602 - DNA, 75 bp, synthetic construct
  source 1..75: mol_type = other DNA
cttttgctagccgactacaacggattctaaaagacttaggctggtctcaatctgagttagctcgccatattgggg

SEQ ID NO: 443603 - DNA, 75 bp, synthetic construct
  source 1..75: mol_type = other DNA
cgattcgaaagcgaccaacgtcggcagtacggaagcggcgctgaatggcctgcacgtagacggcacgctgcattt

SEQ ID NO: 443604 - DNA, 75 bp, synthetic construct
  source 1..75: mol_type = other DNA
tgaaagagatgaagctttccgggcaacataactataccaatgccctggcggcgctggcgctggctgacgctgcag

SEQ ID NO: 443605 - DNA, 75 bp, synthetic construct
  source 1..75: mol_type = other DNA
agcggcgagtatttcctctgttgggtatggtggcgctgacactgttgtatggtgcccggcaaacaggaatagata

SEQ ID NO: 443606 - DNA, 75 bp, synthetic construct
  source 1..75: mol_type = other DNA
cgatatcggcgatgcgttttcgacctgaaaacggggatgtaatttttgccgacagccaggggatttcacgtataa

SEQ ID NO: 443607 - DNA, 75 bp, synthetic construct
  source 1..75: mol_type = other DNA
tttacagcgcccatagcgaaagaaaagtcagtcaaacattgtggtggctgtaaagatcagggcgtcagatcgctg

SEQ ID NO: 443608 - DNA, 75 bp, synthetic construct
  source 1..75: mol_type = other DNA
tggttccatcatcaggaagggaaggatattgcggcaaaaacgctggaagtgctgaagaaatatggttacaccggt

SEQ ID NO: 443609 - DNA, 75 bp, synthetic construct
  source 1..75: mol_type = other DNA
cgttactacgcgatagatttcacgctcgatgaaattaagtcgctgaaatttaccgaaggtttcgatattgaaaac

SEQ ID NO: 443610 - DNA, 75 bp, synthetic construct
  source 1..75: mol_type = other DNA
ctgattatctggttattctccggcatctttggtgggctcatcagcgcctgttatgcgttacgcgaaagtgagcag

SEQ ID NO: 443611 - DNA, 75 bp, synthetic construct
  source 1..75: mol_type = other DNA
gaacgatccgggtattctggttacgcaatctgtgcataaacagcaggctggtttttcccagacttcacaaatcca

SEQ ID NO: 443612 - DNA, 75 bp, synthetic construct
  source 1..75: mol_type = other DNA
atggcttccgataacctggtcagtatcaccattaacgataaatccctgcgccggagcctccgtgcgctggatctg

SEQ ID NO: 443613 - DNA, 75 bp, synthetic construct
  source 1..75: mol_type = other DNA
tggtgaaagcggtactgctgaaaatgcaaagcagtgacacgccgtccgccgccgttcatgagatgggcgttttcg

SEQ ID NO: 443614 - DNA, 75 bp, synthetic construct
  source 1..75: mol_type = other DNA
actcaccgcgacctgccaaaagcgatggcgcgcggggaattccgtgaagacctctattaccgcctcaacgttgtc

SEQ ID NO: 443615 - DNA, 75 bp, synthetic construct
  source 1..75: mol_type = other DNA
gcgcccgctgggcagcaaccgcgatattgatatcgacgtgcggattatttccgccactcaccgcgacctgccaaa

SEQ ID NO: 443616 - DNA, 75 bp, synthetic construct
  source 1..75: mol_type = other DNA
ttcagtttcctcaccaagcctgtcgataaagatgcgctatatcaggcaattgacgatgcgctggaacaatccgcg

SEQ ID NO: 443617 - DNA, 75 bp, synthetic construct
  source 1..75: mol_type = other DNA
ctttcagccgttaccggcggggctataggtctgttgttcgaaagcgtgttgatggtgctgctcaaacctgttctg

SEQ ID NO: 443618 - DNA, 75 bp, synthetic construct
  source 1..75: mol_type = other DNA
aaaactggctgaagaagtgtggttttgttgatatccgcattgcggatgtgagcgttaccacgaccgaagagcagc

SEQ ID NO: 443619 - DNA, 75 bp, synthetic construct
  source 1..75: mol_type = other DNA
gaaattaaaccgtatcgtcttgatttattgcatagcgttacggcagaaagcgaagagccactgagcgcagggcaa

SEQ ID NO: 443620 - DNA, 75 bp, synthetic construct
  source 1..75: mol_type = other DNA
tttcagccgttaccggtggggcgataggcctgttgttcgaaaacgtgttgatggtgctgctcaagcccgttctgc

SEQ ID NO: 443621 - DNA, 75 bp, synthetic construct
  source 1..75: mol_type = other DNA
ctttttaatcaacatcgccacagaacaggttacaccgctaaaagcgttcctcgcggaacatcagatagtcccgga

SEQ ID NO: 443622 - DNA, 75 bp, synthetic construct
  source 1..75: mol_type = other DNA
atatcagcgatcgcatggagaagggcttaagccagcaaagccgtgagtttatggcgggcgatcgggcgttgcgca

SEQ ID NO: 443623 - DNA, 75 bp, synthetic construct
  source 1..75: mol_type = other DNA
agcctgaaaattccggctctggcagagcgcacagaagacattccgcttctggcaaatcacctgttgcgccaggcg

SEQ ID NO: 443624 - DNA, 75 bp, synthetic construct
  source 1..75: mol_type = other DNA
gacgcttcccgatggggaaatctgactttcgtgtgcacactttcgaagaagagattgaatttgttcaggggttaa

SEQ ID NO: 443625 - DNA, 75 bp, synthetic construct
  source 1..75: mol_type = other DNA
gatgtgaatcagttatatgatgctctgtataacaaagcgggtgtaaatgggttgtttactgatttccctgataaa

SEQ ID NO: 443626 - DNA, 75 bp, synthetic construct
  source 1..75: mol_type = other DNA
ggaacctgggtaaattacagctatgactggatgtttaagccgggtgccatgaagcaggtggcggaatatgccgac

SEQ ID NO: 443627 - DNA, 75 bp, synthetic construct
  source 1..75: mol_type = other DNA
agagaatcagtgaaaccactgaacgcgcccgccgcaaagcagacctgctgcggggtggcctgaccagtggaaaca

SEQ ID NO: 443628 - DNA, 75 bp, synthetic construct
  source 1..75: mol_type = other DNA
cttattggtaaagtatggcctgtcgttgttgctgtggttggtgcaggccttgccattcgtatttttaaaaaattc

SEQ ID NO: 443629 - DNA, 75 bp, synthetic construct
  source 1..75: mol_type = other DNA
ataaaattgctttggcttcaactgcgctttttatttctgcaagttcttttgcggctgaaggcgctacaggtggta

SEQ ID NO: 443630 - DNA, 75 bp, synthetic construct
  source 1..75: mol_type = other DNA
gcagcggaaggcggtacgctgtttctcgatgagattggcgacatgcccgcgccgttgcaggtcaaactgctgcgt

SEQ ID NO: 443631 - DNA, 75 bp, synthetic construct
  source 1..75: mol_type = other DNA
acagcaaaccgtttattgctattaactgtggcgcattgcctgagcagttgctggaatcagaactgttcggtcatg

SEQ ID NO: 443632 - DNA, 75 bp, synthetic construct
  source 1..75: mol_type = other DNA
atgagccataaacctgcgcatttattactggtcgatgacgatccgggattgctgaaactgcttggcctgcgcctg

SEQ ID NO: 443633 - DNA, 75 bp, synthetic construct
  source 1..75: mol_type = other DNA
ctttcgtgtccacactttcgaagaagagattgaatttattcagggattaaatcactcgacggggaaaaatattgg

SEQ ID NO: 443634 - DNA, 75 bp, synthetic construct
  source 1..75: mol_type = other DNA
tttaccggagcatacgctgccagcaaaagcgatggcatatgcacagggggctgactatctggagcaggatttggt

SEQ ID NO: 443635 - DNA, 75 bp, synthetic construct
  source 1..75: mol_type = other DNA
aagctgctgcaaatcaccaaaggcaacgtcacccacgcggcgagaatggcggggcgcaaccggacagaattttat

SEQ ID NO: 443636 - DNA, 75 bp, synthetic construct
  source 1..75: mol_type = other DNA
tgtagatatccgcattgcggatgtgagcgttaccactacagaagagcagcgacgcactgaatggatggttaccga

SEQ ID NO: 443637 - DNA, 75 bp, synthetic construct
  source 1..75: mol_type = other DNA
gcaccttccagcatgtgcgtctgttccgtgaaatgacggtgattgaaaacttgctggtggcgcagcatcagcaac

SEQ ID NO: 443638 - DNA, 75 bp, synthetic construct
  source 1..75: mol_type = other DNA
gtatgcctggtgcgcgctggacaccttgatatttccggcgctgatcggccgtacagctcgcgtctcatcgcattg

SEQ ID NO: 443639 - DNA, 75 bp, synthetic construct
  source 1..75: mol_type = other DNA
gagcgagtggccgccgtactcgaacaggccaccagtaccgaatatgacaaagatgggaacatcatcggctacggc

SEQ ID NO: 443640 - DNA, 75 bp, synthetic construct
  source 1..75: mol_type = other DNA
cgtgattttacccatacgactcagatgaatactaactcagtcgatcttcgttatcgtaatattccgttatgggat

SEQ ID NO: 443641 - DNA, 75 bp, synthetic construct
  source 1..75: mol_type = other DNA
gggcttgaattaggctggtttaagcaacagaacaaaactcagcagggggtaacactaaatgaatcggcttataaa

SEQ ID NO: 443642 - DNA, 75 bp, synthetic construct
  source 1..75: mol_type = other DNA
ccgctggcaaacggtacgccggagcagatccgtaataacccggacgtgatccgtgcctatttaggtgaggcataa

SEQ ID NO: 443643 - DNA, 75 bp, synthetic construct
  source 1..75: mol_type = other DNA
tcctatggtcggcgcgaccccgcttccctggaacagttgcgcgccaccttcgcaaaggaaggcatccccccggaa

SEQ ID NO: 443644 - DNA, 75 bp, synthetic construct
  source 1..75: mol_type = other DNA
gattccagacgccttggaaacctatgcgtttcagctctcggtgttgctgccaagactccgccgtaagacgcgatc

SEQ ID NO: 443645 - DNA, 75 bp, synthetic construct
  source 1..75: mol_type = other DNA
gacaccgcgccaccactctcgctgctggcgttgctttcccagcggagcggcatcgagctggaccggctgcgctgt

SEQ ID NO: 443646 - DNA, 75 bp, synthetic construct
  source 1..75: mol_type = other DNA
aaggatgaattgcggaaaaatatgaagcgttacaaagggatcgcctgggatcaaagccccatgttcaaaaagctg

SEQ ID NO: 443647 - DNA, 75 bp, synthetic construct
  source 1..75: mol_type = other DNA
tttctctcccgtttgccttatggtgcgaaaacaaaccctgtcgatgagtttgattttgaagaagatgcggatggc

SEQ ID NO: 443648 - DNA, 75 bp, synthetic construct
  source 1..75: mol_type = other DNA
ctcgttcaaagagcgtgaagatatgcagcgctggctcaatgaatggatcatgaactacgttgatgccgatccggt

SEQ ID NO: 443649 - DNA, 75 bp, synthetic construct
  source 1..75: mol_type = other DNA
atggcgcatggtcgctattactatggtgaccataccaatgggatcgcctggcgtttaatctctcagggcgagatg

SEQ ID NO: 443650 - DNA, 75 bp, synthetic construct
  source 1..75: mol_type = other DNA
ggttaacaacctggctggtctggcgtcgcggtgcgaaaacgcgtcctcttgaagcgtttattcaactgctcgatg

SEQ ID NO: 443651 - DNA, 75 bp, synthetic construct
  source 1..75: mol_type = other DNA
tggccgttggctgagaaatggcgctggttaacgacctggctggtctggcgtcgcggggcgaaaacgcgtccgctt

SEQ ID NO: 443652 - DNA, 75 bp, synthetic construct
  source 1..75: mol_type = other DNA
tagccaacaaattctcgcgttagtggatgaagcgcggagcgttgtcgctggcgatgagccgcaaggtttattttc

SEQ ID NO: 443653 - DNA, 75 bp, synthetic construct
  source 1..75: mol_type = other DNA
ctgctgccgttaggtattgaacaacttccggcactgaaagcctttgataccgtcttttcgatgggcgtgctttac

SEQ ID NO: 443654 - DNA, 75 bp, synthetic construct
  source 1..75: mol_type = other DNA
gtctctggccgattttctcgacccgcatgatccgggtaagacggtggaaggttatcctgcgcctaaacgcgcggt

SEQ ID NO: 443655 - DNA, 75 bp, synthetic construct
  source 1..75: mol_type = other DNA
ttgatcgcaatgtgcatggcggcatggggatcatgatcgatgatattgtcgctggggtgatttccgctggaatac

SEQ ID NO: 443656 - DNA, 75 bp, synthetic construct
  source 1..75: mol_type = other DNA
cggcaaaagtattaccagtgtaacaacctggaatgcggcgtatgcttctcaacactggaagccttccataaattc

SEQ ID NO: 443657 - DNA, 75 bp, synthetic construct
  source 1..75: mol_type = other DNA
catctgcccgtatccgcaccagtcgtccggaaaatgattcaaacaccgtgagacaaaagtattatcagtgtaaca

SEQ ID NO: 443658 - DNA, 75 bp, synthetic construct
  source 1..75: mol_type = other DNA
ctgagctggtggtccctgattttgccgatcacgtactgaaacgtgaggcgacgtacccaacggggctgcctaccg

SEQ ID NO: 443659 - DNA, 75 bp, synthetic construct
  source 1..75: mol_type = other DNA
atggatctgacccaactggagatgttcaacgcggttgccgaagctggcagcattacccaggctgcagcaaaagtg

SEQ ID NO: 443660 - DNA, 75 bp, synthetic construct
  source 1..75: mol_type = other DNA
atgttccgttgtccgctttgtggcgcatctgcccgtatccgcaccagtcgcccggaaaatgattcgaataccgtg

SEQ ID NO: 443661 - DNA, 75 bp, synthetic construct
  source 1..75: mol_type = other DNA
agggtacagagcggataccgtgggaagattttccgggatctcacagggggaatactcagattaatcttgatattt

SEQ ID NO: 443662 - DNA, 75 bp, synthetic construct
  source 1..75: mol_type = other DNA
gcgccgggacaaacctggacaacctcgcaggcaatatgaacacaaagcgcctggttatcactccggcaacggata

SEQ ID NO: 443663 - DNA, 75 bp, synthetic construct
  source 1..75: mol_type = other DNA
cgtgacgattaccgtgctatcgcgcgagggtgacggcactgctagtcctgaactactggcgattgttgataaagc

SEQ ID NO: 443664 - DNA, 75 bp, synthetic construct
  source 1..75: mol_type = other DNA
ctgtgaaaggtgccggtaccaccctctggctttacaccggaacgggcaacgctttcgctaacccactctcggata

SEQ ID NO: 443665 - DNA, 75 bp, synthetic construct
  source 1..75: mol_type = other DNA
ggtcgggatattcgccgtagcgccatttttgccgccctgcatgttgagggtgtgcagcgtgtggaactggcttct

SEQ ID NO: 443666 - DNA, 75 bp, synthetic construct
  source 1..75: mol_type = other DNA
cagcggcaaaagccagcctgcagaagtacatcgccagtcagacgcgtcttggtcggaatattcgccgtagcgcca

SEQ ID NO: 443667 - DNA, 75 bp, synthetic construct
  source 1..75: mol_type = other DNA
gcgaaaggctgcacactggcttatgcgagtaataacgaccttgatgtgatggccggaaacaacaacaccgcgcga

SEQ ID NO: 443668 - DNA, 75 bp, synthetic construct
  source 1..75: mol_type = other DNA
taaaaaaattgagcaatgcacgtcaggtgcaattacgaaatctgacttaagaccggatatctatccgaaagatta

SEQ ID NO: 443669 - DNA, 75 bp, synthetic construct
  source 1..75: mol_type = other DNA
gtcggttatatcggtactaacggtaaaacgttaatgcctggagcagacagtattatggtcgcaccgtttgcctct

SEQ ID NO: 443670 - DNA, 75 bp, synthetic construct
  source 1..75: mol_type = other DNA
aactgttctggagaccaaaagcaattgagttaaaagacggcgagatagtccccgtgcataaaatgacggtaaccc

SEQ ID NO: 443671 - DNA, 75 bp, synthetic construct
  source 1..75: mol_type = other DNA
gcaggcaccgtcgaaatcatcgttatgagcaatgacggtaactttgtggcgatctgcaaagtcactgtttcctga

SEQ ID NO: 443672 - DNA, 75 bp, synthetic construct
  source 1..75: mol_type = other DNA
agaaaaactgggcatcaaactggataaagagcagctgatcgctggtgttcaggatgcatttgctgataagagcaa

SEQ ID NO: 443673 - DNA, 75 bp, synthetic construct
  source 1..75: mol_type = other DNA
gcgaaaggtaaagagtaccgcgagaaatttgccaaagagaaaggtgtgaaaacctcttcaactggcctggtttat

SEQ ID NO: 443674 - DNA, 75 bp, synthetic construct
  source 1..75: mol_type = other DNA
tgatgcaactctgtatttttatccggggccggaggccgagccaatccgtcaggccgcagaggaaaaactgaaggc

SEQ ID NO: 443675 - DNA, 75 bp, synthetic construct
  source 1..75: mol_type = other DNA
tctgagccggttgttaagctgctgcaggagaacgcttaccgggaggttatctggcgtcagcgcgtgaatgaatcg

SEQ ID NO: 443676 - DNA, 75 bp, synthetic construct
  source 1..75: mol_type = other DNA
ccgctggccgatatcgtgcttaacagcacgcaggcgtctttctgtaccgaatacagcgtcgtgaccggaggctcg

SEQ ID NO: 443677 - DNA, 75 bp, synthetic construct
  source 1..75: mol_type = other DNA
cctttggcggatgtggtcctgaacaaaacacaggcggcatcatgtacgcagtggagcgtaaccaacggaggaacg

SEQ ID NO: 443678 - DNA, 75 bp, synthetic construct
  source 1..75: mol_type = other DNA
caatgccacaaaattatctaaaaccaagagattggctaagtacctctccacgtttatgggatgatggaatacccg

SEQ ID NO: 443679 - DNA, 75 bp, synthetic construct
  source 1..75: mol_type = other DNA
ccactggccgacatcgtgctcaacagtacgcaggcgtctttctgcaccgaataccgcgtcgtgaccggaggctcg

SEQ ID NO: 443680 - DNA, 75 bp, synthetic construct
  source 1..75: mol_type = other DNA
gatggaatctgacacggattatcgtctgcgtattcagcaggcgtttgaaggtttaagcgtcgccgggtcggtggg

SEQ ID NO: 443681 - DNA, 75 bp, synthetic construct
  source 1..75: mol_type = other DNA
ttcatccgaaagatgagcaggaagcagtgatccgcacgctggaactggaatctgaacccgttaccaaattgttgc

SEQ ID NO: 443682 - DNA, 75 bp, synthetic construct
  source 1..75: mol_type = other DNA
atgccgattatcgacctgaaccagctacccgcaccggatgtggttgaggagctggactttgaaaccattcttgcc

SEQ ID NO: 443683 - DNA, 75 bp, synthetic construct
  source 1..75: mol_type = other DNA
ctgcgcacgcaacaggcgtttgagggattgagcgtggcgggtccggtcggcgcatatgagtatcacggtcgcagc

SEQ ID NO: 443684 - DNA, 75 bp, synthetic construct
  source 1..75: mol_type = other DNA
gctgaatgccgaagatgtgcgcccggtggccgaccgggttaccgtccagtcagccgagattgtgccgtaccagat

SEQ ID NO: 443685 - DNA, 75 bp, synthetic construct
  source 1..75: mol_type = other DNA
gccgacgggcgggtcgctgacgtctcggtcgcaagtccgtcgccagcctgcgtgacgattaccgtgctatcgcgc

SEQ ID NO: 443686 - DNA, 75 bp, synthetic construct
  source 1..75: mol_type = other DNA
ccgctggccgacatcgtgctcaacaatacgcaggcatctttctgtaccgaatacaacgtcgtgaccggaggttcg

SEQ ID NO: 443687 - DNA, 75 bp, synthetic construct
  source 1..75: mol_type = other DNA
actcaatacttgaacaacttgccctcaactttccagttaggctttgttgctgactatggtggactggagatgttt

SEQ ID NO: 443688 - DNA, 75 bp, synthetic construct
  source 1..75: mol_type = other DNA
cttcacagcgcgaactatttccgctgacggttatggcacaacatggttacctgctccctgcgacttccggattga

SEQ ID NO: 443689 - DNA, 75 bp, synthetic construct
  source 1..75: mol_type = other DNA
atccccgtgaagtggtgaagtcagcgcttcgctttaatgctgcagctgtcgtgctggtacataaccatccatccg

SEQ ID NO: 443690 - DNA, 75 bp, synthetic construct
  source 1..75: mol_type = other DNA
atggcgggactggagcgggaagagttccgggtgctgtatctgaataaccagaatcagctgattgctggtgaaacc

SEQ ID NO: 443691 - DNA, 75 bp, synthetic construct
  source 1..75: mol_type = other DNA
gccaggctgaccgccgcctcacggaacgtcttaagcaggcactggacctggtggatatccgcctgccggaccatc

SEQ ID NO: 443692 - DNA, 75 bp, synthetic construct
  source 1..75: mol_type = other DNA
acaggagagtgaaacactgtttgccggttcggttaatcatgtgcaggtccatccccgtgaggtggtgaagtcagc

SEQ ID NO: 443693 - DNA, 75 bp, synthetic construct
  source 1..75: mol_type = other DNA
ggcggttatggctcaacatgattacctgcttaccgcgacatccggactaacaccctatgctcaacggaccatccg

SEQ ID NO: 443694 - DNA, 75 bp, synthetic construct
  source 1..75: mol_type = other DNA
aacccgaacaacccaacgggcgcggtgtattccaaagagcttttaatggagattgttgagattgcgcgccagcat

SEQ ID NO: 443695 - DNA, 75 bp, synthetic construct
  source 1..75: mol_type = other DNA
tgttaccgttgaggatatttacatcggcaatggtgtatcagagctaatcgttcaggcgatgcaagcgttactgaa

SEQ ID NO: 443696 - DNA, 75 bp, synthetic construct
  source 1..75: mol_type = other DNA
tggatggtgctgaacgggccgaaaaaacacgccaaaggctacatcgaaggtctggaaatgctggcctcaatgcga

SEQ ID NO: 443697 - DNA, 75 bp, synthetic construct
  source 1..75: mol_type = other DNA
gtggatatccgtctgctggaccacctggtggtcggcggcatggatgtcatctcgtttgccgaacgcggctggctt

SEQ ID NO: 443698 - DNA, 75 bp, synthetic construct
  source 1..75: mol_type = other DNA
tggatggtgctgaacgggccgaaaaaacacgccaaaggttatatcgaaggtctggaaatgctggcctcaatgcgg

SEQ ID NO: 443699 - DNA, 75 bp, synthetic construct
  source 1..75: mol_type = other DNA
tgttaccgtggaagatatttacatcggcaatggtgtatcggagcttatcgttcaggcaatgcaagcattgctgaa

SEQ ID NO: 443700 - DNA, 75 bp, synthetic construct
  source 1..75: mol_type = other DNA
gtggatatccgcctgccggaccatctggtggttggcggcatggaagtagtgtcattcgctgaacgcggctggctg

SEQ ID NO: 443701 - DNA, 75 bp, synthetic construct
  source 1..75: mol_type = other DNA
gcggttccataaaacaatcctgaacgaattttatcaggtaacgttccgtaaaaaactgtacggcgatcttgatac

SEQ ID NO: 443702 - DNA, 75 bp, synthetic construct
  source 1..75: mol_type = other DNA
ttgattacgccgtcgctttcccggcacacagtcagcaccggacgcagcaacgagctgcgtaaacagggcgttttt

SEQ ID NO: 443703 - DNA, 75 bp, synthetic construct
  source 1..75: mol_type = other DNA
ccatctgcgttttatgcttcaaatccacctacagctaaatttctatgtaaaggtggactatgtacaataggttct

SEQ ID NO: 443704 - DNA, 75 bp, synthetic construct
  source 1..75: mol_type = other DNA
gatcgtgtactgccgttttatgcgtctcagggcctgccgatgctgagaatactgaatcgccacgggtttaacaga

SEQ ID NO: 443705 - DNA, 75 bp, synthetic construct
  source 1..75: mol_type = other DNA
gtaagctttacgtcaccaaaacaccgattagcgcggctgacttactgaatgatcgtgtactgccgttttatgcgt

SEQ ID NO: 443706 - DNA, 75 bp, synthetic construct
  source 1..75: mol_type = other DNA
tgaaagcactggaagaaaaagtagcccgtgatggcattgagctaactgacagccagatcgcagcactggagcgta

SEQ ID NO: 443707 - DNA, 75 bp, synthetic construct
  source 1..75: mol_type = other DNA
aggcggcctatcactctatactggcccggtgatcaccagttaccgctatacccaatatgactccagcgatgcagg

SEQ ID NO: 443708 - DNA, 75 bp, synthetic construct
  source 1..75: mol_type = other DNA
aggcggcttatcactctatactggcccggtgatcaccagctaccgctatacccaatatgactccagcgatgcagg

SEQ ID NO: 443709 - DNA, 75 bp, synthetic construct
  source 1..75: mol_type = other DNA
tatgccgggttaacttccattaccgcgggctacgattttaccgattattctggcgatcatggcaaccgtaattta

SEQ ID NO: 443710 - DNA, 75 bp, synthetic construct
  source 1..75: mol_type = other DNA
ccccctatgcccaacgcaccattcgtcgtgccatcaacctgctggataaatatctgcgccagcccggcatatcct

SEQ ID NO: 443711 - DNA, 75 bp, synthetic construct
  source 1..75: mol_type = other DNA
atgaataccacattatccccgctgtcatctcagcctgaactctttcccctggcgattatggcccagcatggttgt

SEQ ID NO: 443712 - DNA, 75 bp, synthetic construct
  source 1..75: mol_type = other DNA
aggcggcctatcactctatactggcccggtgatcaccaggtaccgctatacccattatgactccagcgatgcagg

SEQ ID NO: 443713 - DNA, 75 bp, synthetic construct
  source 1..75: mol_type = other DNA
ggaagaagaatatggtcgcgtgccagtgccggaagagcttgatccgctggcgttcggcagtgctgttatcttccc

SEQ ID NO: 443714 - DNA, 75 bp, synthetic construct
  source 1..75: mol_type = other DNA
cgggcttaaagataaacgtgataaggccgatgaggtggatttcccccccgtcgtcaataaagaagtttgccagtt

SEQ ID NO: 443715 - DNA, 75 bp, synthetic construct
  source 1..75: mol_type = other DNA
cacaatcgctttgcgcttaacgccgaaggattacaggcgctacaggatgtggtgccgttagtgctggaggcggca

SEQ ID NO: 443716 - DNA, 75 bp, synthetic construct
  source 1..75: mol_type = other DNA
cagggcgttagcgcgttaatggcgctgaaaccagaaaccgccacgcgcctgcgtaacggtgagcgggaagaggtg

SEQ ID NO: 443717 - DNA, 75 bp, synthetic construct
  source 1..75: mol_type = other DNA
aatgattttggcgtccgggcggtggcgtcagtgctgaatgaagcgcggaaacgtgcacagccaatgcctcacccg

SEQ ID NO: 443718 - DNA, 75 bp, synthetic construct
  source 1..75: mol_type = other DNA
atcacgaagtattgaaagatatggaagctggcaagtatgacgctgatttgaatctggcgttacagattgttgata

SEQ ID NO: 443719 - DNA, 75 bp, synthetic construct
  source 1..75: mol_type = other DNA
ggttatcgctacactaaatattacgatgatgttgaagtcgatgcctggcaaggcggcgtatcgctctacactggc

SEQ ID NO: 443720 - DNA, 75 bp, synthetic construct
  source 1..75: mol_type = other DNA
aatggaataactggctgacaacccgcacgggtattgcctttgccgataatacaccggtctttgcccgccaggatt

SEQ ID NO: 443721 - DNA, 75 bp, synthetic construct
  source 1..75: mol_type = other DNA
aaaaacgcttttcacgaccggttatcgctacactaaatattacgatgatgtcgaagtcgatgcctggcaaggcgg

SEQ ID NO: 443722 - DNA, 75 bp, synthetic construct
  source 1..75: mol_type = other DNA
tctgagccgattgtgaagctgttgcaggaaaatgcttatcgggagattatctggcgtcagcgggtgaatgagtcg

SEQ ID NO: 443723 - DNA, 75 bp, synthetic construct
  source 1..75: mol_type = other DNA
ctggcccgtcaggcgcatacgagtattttgcacgcagcgccagcggtctggtgcgtgatgcgcgggccatcagcc

SEQ ID NO: 443724 - DNA, 75 bp, synthetic construct
  source 1..75: mol_type = other DNA
gtagccgaccgcgtgaccgtgcagtctgccgccattgttgaatatcagataaacgccacgctttacctttaccca

SEQ ID NO: 443725 - DNA, 75 bp, synthetic construct
  source 1..75: mol_type = other DNA
aatcgccggtgaactggggctggaatttaaagcgggcctattaccagaagataaagtcaaagcggtgaccgagct

SEQ ID NO: 443726 - DNA, 75 bp, synthetic construct
  source 1..75: mol_type = other DNA
tgaagccagaaaccgccacgcgtctgagtaacggtgagcgtgaagaggtggcaataaacagcctgcggcctggcg

SEQ ID NO: 443727 - DNA, 75 bp, synthetic construct
  source 1..75: mol_type = other DNA
cgttgacgcataaccacctgcgcggcctggtgcaaatgattgaactggcgcgcgccactcacgcgaatattcgcc

SEQ ID NO: 443728 - DNA, 75 bp, synthetic construct
  source 1..75: mol_type = other DNA
ataccctgcgcgccgatgccgccactgccatcagtgaactgaactctctgggcgtcaaaggggtgatcctcaccg

SEQ ID NO: 443729 - DNA, 75 bp, synthetic construct
  source 1..75: mol_type = other DNA
aacttaaaaggacttacgaagaaatggtattattccataatgatattattaagaataaaatcagttttttagaat

SEQ ID NO: 443730 - DNA, 75 bp, synthetic construct
  source 1..75: mol_type = other DNA
aggttaacaatagagcaagttgaaagtgttccatatgttgtttctgaatctattaagaacgatttctttccgaca

SEQ ID NO: 443731 - DNA, 75 bp, synthetic construct
  source 1..75: mol_type = other DNA
tttttggttttctctgtgtattcattatccctttagggatatatatacctttttatcttttaaagagaatgaaaa

SEQ ID NO: 443732 - DNA, 75 bp, synthetic construct
  source 1..75: mol_type = other DNA
gacgtggcgctggaaaccgccgacgcagcattaacccataaccacctgcgcggcctggtgcaaatgattgaactg

SEQ ID NO: 443733 - DNA, 75 bp, synthetic construct
  source 1..75: mol_type = other DNA
cattgagcggtttatcgaccgtttcagccgtatctatacgcccgcgattatggccgtcgctctgctggtgacgct

SEQ ID NO: 443734 - DNA, 75 bp, synthetic construct
  source 1..75: mol_type = other DNA
ctgggggttaaaggagtgatcctcaccggcgataatccacgcgcagcggcggcaattgccggggagctggggctg

SEQ ID NO: 443735 - DNA, 75 bp, synthetic construct
  source 1..75: mol_type = other DNA
cccgtgtgcgttagttatctccacgcccgcggcgattacctccgggctggcagcagcagcgcgtcgtggggcgtt

SEQ ID NO: 443736 - DNA, 75 bp, synthetic construct
  source 1..75: mol_type = other DNA
gggtctggagcagtttaatcatccgttcgggcaactggcgtttatcgcgaccacgctggttgggctgtacccgat

SEQ ID NO: 443737 - DNA, 75 bp, synthetic construct
  source 1..75: mol_type = other DNA
cagggcgtcagcgcattaatggcgttgaaaccagaaaccgccacgcgcctgcgtaacggcgaacgtgaagaagtg

SEQ ID NO: 443738 - DNA, 75 bp, synthetic construct
  source 1..75: mol_type = other DNA
cgcacgcgtacccagcaggcttttgaaggtctgagcgtggccgggccaacggctgcatatgagttttggggccgt

SEQ ID NO: 443739 - DNA, 75 bp, synthetic construct
  source 1..75: mol_type = other DNA
gcgacgctgctgaacaatggtaaaaatgccgcagcattgtatggcgacaatgccgcatacgtattggctaataag

SEQ ID NO: 443740 - DNA, 75 bp, synthetic construct
  source 1..75: mol_type = other DNA
ggctcatgccatggtgctggaagccaattcagcaaaggttattcctgagtttttgccattttttctgcagtctga

SEQ ID NO: 443741 - DNA, 75 bp, synthetic construct
  source 1..75: mol_type = other DNA
tagattctgaaaatagcattaacagcagtattgttgctgatcaaggacaggtgtatatgtcagggttacctgaag

SEQ ID NO: 443742 - DNA, 75 bp, synthetic construct
  source 1..75: mol_type = other DNA
gaagaaaaggagattatactcaggccagagaatggggatatgatgaaaatggtaatttagttgccaaaagagata

SEQ ID NO: 443743 - DNA, 75 bp, synthetic construct
  source 1..75: mol_type = other DNA
aacctgcgcgaagatgaggcatatatcaccttcatcggagtacagggccgggagctgagttatccgaaagaaatg

SEQ ID NO: 443744 - DNA, 75 bp, synthetic construct
  source 1..75: mol_type = other DNA
tcaaagatcgctataccacatcagcgaaacaagcactgaaagatgccggacttaacgtaaatgcagtgtcaaact

SEQ ID NO: 443745 - DNA, 75 bp, synthetic construct
  source 1..75: mol_type = other DNA
gtcgcgatgcttgtttacggcatcgtcatgaaatccgggctgaatgagatcctcttctatgtggtgttcacactg

SEQ ID NO: 443746 - DNA, 75 bp, synthetic construct
  source 1..75: mol_type = other DNA
gatatcgtgcttaacagcacgcaggcgtctttctgtactgaataccgcgtcgtgaccggaggctcggatgagtga

SEQ ID NO: 443747 - DNA, 75 bp, synthetic construct
  source 1..75: mol_type = other DNA
tcattaggtacacaaaatggccaatcatatagatttatgtactctagaggtttcggcgatagtaatacgacttta

SEQ ID NO: 443748 - DNA, 75 bp, synthetic construct
  source 1..75: mol_type = other DNA
aagtgatgcatttaattcaaggttgtttgaattatatttgaacgctgtattttatgaactcgactttgaaatgaa

SEQ ID NO: 443749 - DNA, 75 bp, synthetic construct
  source 1..75: mol_type = other DNA
gtatctttggtaatgccctgttactgtccggtatcaccgcgactattgcctattctcaggatcgcgaccagaaca

SEQ ID NO: 443750 - DNA, 75 bp, synthetic construct
  source 1..75: mol_type = other DNA
ccacaaacccgcgatgaaatgctgcaagaaattgctaacgttcgccgtcagatggaacagaacaacgctggcgat

SEQ ID NO: 443751 - DNA, 75 bp, synthetic construct
  source 1..75: mol_type = other DNA
acgttcagcgggtacaacgccgacaaccggttaagctggcagcgcagcctgataaccgacagccggaacccgccg

SEQ ID NO: 443752 - DNA, 75 bp, synthetic construct
  source 1..75: mol_type = other DNA
actgagcagccaccgtcgtcttacgggcagtatacagagctggcagtatacgccgcgggggctgttgacgctcca

SEQ ID NO: 443753 - DNA, 75 bp, synthetic construct
  source 1..75: mol_type = other DNA
cacagatgaagagaaacgggagacgcgctggcattataccgcggagggatggattgccagtctgagcaacggcaa

SEQ ID NO: 443754 - DNA, 75 bp, synthetic construct
  source 1..75: mol_type = other DNA
ggaaaacggtacgcatcagctataaccgtctggggctgccggagacggtcagccatcccggtaaacagcaggacc

SEQ ID NO: 443755 - DNA, 75 bp, synthetic construct
  source 1..75: mol_type = other DNA
gaatcggagccgatcaccatgctgctggaagagaattgctatcgcgaattgctgttgcgccagcgggtgaatgaa

SEQ ID NO: 443756 - DNA, 75 bp, synthetic construct
  source 1..75: mol_type = other DNA
agcggatggctgacggcagagcacagcgtgcacggcagcataaagtaccggcgtgacgcgctgggcaatcccacc

SEQ ID NO: 443757 - DNA, 75 bp, synthetic construct
  source 1..75: mol_type = other DNA
cgcgacgggcttcacctgtacctaccgctgggaagaggttgaaggtttcccccgcgtggtggaacactcgaccag

SEQ ID NO: 443758 - DNA, 75 bp, synthetic construct
  source 1..75: mol_type = other DNA
tctcaaatatattgatccgcttggattatgtaaggttgaaggcgcaagagcgcgacaagcgcaaatgttacaaga

SEQ ID NO: 443759 - DNA, 75 bp, synthetic construct
  source 1..75: mol_type = other DNA
cagcagcaacagcgagacgcggtatcagtacgatgcgctgggcaggcgcatcagcaaggcgacatatggccgcca

SEQ ID NO: 443760 - DNA, 75 bp, synthetic construct
  source 1..75: mol_type = other DNA
catctggaacgcagacggtgaagtcggcggcatcaatgacaaactgcgcggctgcctggtgttcagctatgaccg

SEQ ID NO: 443761 - DNA, 75 bp, synthetic construct
  source 1..75: mol_type = other DNA
gagcctggcgtcaggcggcaaagctgggttcgaaattcggcaccaaatgtgcggcaaaatttattggcgggcaac

SEQ ID NO: 443762 - DNA, 75 bp, synthetic construct
  source 1..75: mol_type = other DNA
tcaccttcatcggtgtacagggccgggaactgagttatccgaaagggatgctgacaccgggtcaccagatattcg

SEQ ID NO: 443763 - DNA, 75 bp, synthetic construct
  source 1..75: mol_type = other DNA
ttaccgggatggccgtttccgaggtcgctatggggttgttcagtaacccggtggatgtcactacagggcaaaaaa

SEQ ID NO: 443764 - DNA, 75 bp, synthetic construct
  source 1..75: mol_type = other DNA
tataacaaccattcatgctaattctgttcagggggccatttattcgttgcagcaaattgctgcgagcggcagtga

SEQ ID NO: 443765 - DNA, 75 bp, synthetic construct
  source 1..75: mol_type = other DNA
ggtgttcctgaaagatcgtctggcgaaatatgaatactccgttgcagagtactacaccgaacgtggcgcatgggt

SEQ ID NO: 443766 - DNA, 75 bp, synthetic construct
  source 1..75: mol_type = other DNA
atgacgcgcatgaaatatctggtggcagccgccacattaagtctgtttttggcgggttgctcgggttcaaaggaa

SEQ ID NO: 443767 - DNA, 75 bp, synthetic construct
  source 1..75: mol_type = other DNA
tccttgcctgctgtggtgcggtatgcttttttattttcttcttcaccctcctgccggaatcactcatggtcctca

SEQ ID NO: 443768 - DNA, 75 bp, synthetic construct
  source 1..75: mol_type = other DNA
ctcctgtcgccagccacgggcgaacccggcctgacggtagccatttcattcgatcaggcgcgttattgacaggtg

SEQ ID NO: 443769 - DNA, 75 bp, synthetic construct
  source 1..75: mol_type = other DNA
aacaaaaactggattttatacaaggagggctgaggcagctcagaattgattttctgtatgctaaagaattgccag

SEQ ID NO: 443770 - DNA, 75 bp, synthetic construct
  source 1..75: mol_type = other DNA
ttagtcttaagtagctccagacagccttatgaagcacgagtattcaaaagcatagatggtgcagctgcagaacta

SEQ ID NO: 443771 - DNA, 75 bp, synthetic construct
  source 1..75: mol_type = other DNA
tgattgggttgatggcctatcctatccgccacagtttatcgcccgaaatgcagaataaagccttagaaaaagcgg

SEQ ID NO: 443772 - DNA, 75 bp, synthetic construct
  source 1..75: mol_type = other DNA
ggcgaatccggcgaaaatcgctacccgtaaggcttcgcaaaatacgcttaacgcttacgggcctatgctaccgga

SEQ ID NO: 443773 - DNA, 75 bp, synthetic construct
  source 1..75: mol_type = other DNA
cggtgatattgctatttcaattgaagatccaccggaagttcctgttcagggaaattatggtgataatcaggaagg

SEQ ID NO: 443774 - DNA, 75 bp, synthetic construct
  source 1..75: mol_type = other DNA
attcctctgattgaactcggtgtacctcctgtcgccagccacgggcgtacacggcctgacggtagccatttcatt

SEQ ID NO: 443775 - DNA, 75 bp, synthetic construct
  source 1..75: mol_type = other DNA
ccggcctgacggtagccatttcattcgatcaggcgcgttattgacaggtgtcgactttgataattcatcgatcgc

SEQ ID NO: 443776 - DNA, 75 bp, synthetic construct
  source 1..75: mol_type = other DNA
gccgtcagagcctgcttcagcttatgcgtctgactgaagacgtaccggatgcgagacaggaactgcttaaccgtc

SEQ ID NO: 443777 - DNA, 75 bp, synthetic construct
  source 1..75: mol_type = other DNA
ggccagtagtcaggtggcagtacaactcagtgcgccacttcgtaccgatgccgttaataaaaaagcccgtgacga

SEQ ID NO: 443778 - DNA, 75 bp, synthetic construct
  source 1..75: mol_type = other DNA
gatcgggcgctgggggtggatgagcaattttaccatcaggtaattggagaggcttaccgacataaggtgctgttt

SEQ ID NO: 443779 - DNA, 75 bp, synthetic construct
  source 1..75: mol_type = other DNA
acaacggctgaagtattggtttaaactggcagatccgcaaacgcgcaataacttcctgcaatgggcggaaaaaca

SEQ ID NO: 443780 - DNA, 75 bp, synthetic construct
  source 1..75: mol_type = other DNA
atgtgcggtgtctgtccgtctgcagtggggactgcgggtgatggccgagcggatgattaagtgtctgccacgcga

SEQ ID NO: 443781 - DNA, 75 bp, synthetic construct
  source 1..75: mol_type = other DNA
gctatatgacgctggtggatctacctggcgttggtgaaagtggtgaacgtgatgccgaatatgccgccctgtatc

SEQ ID NO: 443782 - DNA, 75 bp, synthetic construct
  source 1..75: mol_type = other DNA
atttttaccgtcaggtgattggcgagcagtactggcataaggtgctgtttgtcatcagtcaggccgacaagattg

SEQ ID NO: 443783 - DNA, 75 bp, synthetic construct
  source 1..75: mol_type = other DNA
gctttatgaccatagtagatctgcccggtgtcggtgaaagcaaaagtcgtgatgcggaatatgctgcgatgtatc

SEQ ID NO: 443784 - DNA, 75 bp, synthetic construct
  source 1..75: mol_type = other DNA
tcagtcgtcaggaattgctctggcttatgagtctgactgaagactgtccggatatgcaccagaaactgcttaacc

SEQ ID NO: 443785 - DNA, 75 bp, synthetic construct
  source 1..75: mol_type = other DNA
atatataacatcctggcgttttgtgcgtgtattgcatggattccctgtattattgctgcgttcggcgttgatggt

SEQ ID NO: 443786 - DNA, 75 bp, synthetic construct
  source 1..75: mol_type = other DNA
tgattatgaggtcgaggttgaacgctataacaaatccgcgaaacgcgcttcactaccgcaatttgccacgatgat

SEQ ID NO: 443787 - DNA, 75 bp, synthetic construct
  source 1..75: mol_type = other DNA
gctttatgacactggtggatttacccggcgtcggggagtctgagcgccgggatacagagtacgccgcgctgtacc

SEQ ID NO: 443788 - DNA, 75 bp, synthetic construct
  source 1..75: mol_type = other DNA
gttatcagtcagtccgacaaggttgaacccaccagcggtggtgaaaagctgtctacagagcagaaacaaaatatc

SEQ ID NO: 443789 - DNA, 75 bp, synthetic construct
  source 1..75: mol_type = other DNA
atcgcgcaccacggcggctttgtgccgtataccgcgacgttcctgatgtttgttgaatacgcccgtaacgccgcg

SEQ ID NO: 443790 - DNA, 75 bp, synthetic construct
  source 1..75: mol_type = other DNA
atcctgatgctggaaggatttttccatgctcaggatctggagatttatgaccagcaccgcctgaccacctgcgta

SEQ ID NO: 443791 - DNA, 75 bp, synthetic construct
  source 1..75: mol_type = other DNA
cttgggggataaatgttgatgaggcattctttctaggtggggtcgagaaaacaaaaatacttaaagctttcaatc

SEQ ID NO: 443792 - DNA, 75 bp, synthetic construct
  source 1..75: mol_type = other DNA
gctaaaaaaaatagcgagattacaagaccgattacctgcaagagttgattattcaccgataagaattgctcttgt

SEQ ID NO: 443793 - DNA, 75 bp, synthetic construct
  source 1..75: mol_type = other DNA
agcacaggcttttgctattaagtgggtggcggtcggtatcgctgtgtctccgatgctgtatgggctggcaaaact

SEQ ID NO: 443794 - DNA, 75 bp, synthetic construct
  source 1..75: mol_type = other DNA
ggccttgaactgaaagcgcctgtaactgatgacatcagcagagcactggcttttgccattaagtgggtggcggtc

SEQ ID NO: 443795 - DNA, 75 bp, synthetic construct
  source 1..75: mol_type = other DNA
taaaagcgaacgcttacgggcacggtattgagcgtatctggagcgcgctcggggccaccgatggctttgcattgc

SEQ ID NO: 443796 - DNA, 75 bp, synthetic construct
  source 1..75: mol_type = other DNA
tttttacgatgtttgtggatggtgaaaacgaagtgggtaatgtgacctccgtcactcggcccaaactgacgcgca

SEQ ID NO: 443797 - DNA, 75 bp, synthetic construct
  source 1..75: mol_type = other DNA
tttttacgatgtttgtggatggtgaaaacgaagtgggtaaagtgacctccgtcactctgcccaaactgacgcgca

SEQ ID NO: 443798 - DNA, 75 bp, synthetic construct
  source 1..75: mol_type = other DNA
ctcggactggatgacggcgcactggatgcctcgttcaccaccggtggggttgaaaaagagctgctccaggaatac

SEQ ID NO: 443799 - DNA, 75 bp, synthetic construct
  source 1..75: mol_type = other DNA
tgcgcggacgtgtgacggaaattgatatgggggaagccaaacagggcgaagccacatcacacacttacgccatta

SEQ ID NO: 443800 - DNA, 75 bp, synthetic construct
  source 1..75: mol_type = other DNA
ggcggcacgattgacggcacgctgctgcgttttgtgggtgaatactacaccgatgcagaaagcgacctgtatgaa

SEQ ID NO: 443801 - DNA, 75 bp, synthetic construct
  source 1..75: mol_type = other DNA
tttttacgttgtttgtggatggtgaaaacgaagtgggtaaagtgacctccgtcactcggcccaaactgacgcgca

SEQ ID NO: 443802 - DNA, 75 bp, synthetic construct
  source 1..75: mol_type = other DNA
atcgccgggatgatagccggtaacgccatggtagcggtggggttgtgttacaacaatttagggcaacgggtcatt

SEQ ID NO: 443803 - DNA, 75 bp, synthetic construct
  source 1..75: mol_type = other DNA
aacgtatcaagtccgcagcggcactctgggtaccggggacacgcgaagaggtcattgagggcatcagactgctcg

SEQ ID NO: 443804 - DNA, 75 bp, synthetic construct
  source 1..75: mol_type = other DNA
ggctgaaacagaaatgaatgacaccattggcgacatcactgcacgttataccccgctcaccgagagcctgaaaaa

SEQ ID NO: 443805 - DNA, 75 bp, synthetic construct
  source 1..75: mol_type = other DNA
taacgataattagtgaacgttaccctgagctaaaggcccaggaactctatcaaaatttggtaatgactccaactt

SEQ ID NO: 443806 - DNA, 75 bp, synthetic construct
  source 1..75: mol_type = other DNA
cccaggatgaggaatatcgggagtcggtactgccttcaaatgtttctgcccgcgtggcagtagaagcgggtattg

SEQ ID NO: 443807 - DNA, 75 bp, synthetic construct
  source 1..75: mol_type = other DNA
tgcgctgagtcaaagccaaaccctaaattgcttgagcacatatgttcttttgaaggagttagtgttgaagatgcg

SEQ ID NO: 443808 - DNA, 75 bp, synthetic construct
  source 1..75: mol_type = other DNA
tgacacacggtgaagctggtaattatttattatccagcagcgaaatgattgtaggtaaaacaaaaaattccacgt

SEQ ID NO: 443809 - DNA, 75 bp, synthetic construct
  source 1..75: mol_type = other DNA
tatttattttcaatttatcaggctgtggatataacgatattcaaacctatgatgagcaggttaacgcttcctggt

SEQ ID NO: 443810 - DNA, 75 bp, synthetic construct
  source 1..75: mol_type = other DNA
cagcgacggtgagtttgccgccattcttgaggatgtgcgcacagtccgcgaattaggttttcctggactggtgac

SEQ ID NO: 443811 - DNA, 75 bp, synthetic construct
  source 1..75: mol_type = other DNA
ccggagcaggagtccgtgcagaaaacctgcaccacttcctcgatgccggagtgctggaagtccatagctccgcgg

SEQ ID NO: 443812 - DNA, 75 bp, synthetic construct
  source 1..75: mol_type = other DNA
aattatttgccggatgacgtcgcagctgtgagtaaagcaccaataatagattttagccagaatgctaatgcgcat

SEQ ID NO: 443813 - DNA, 75 bp, synthetic construct
  source 1..75: mol_type = other DNA
atggcaaaaagtacaaaaggggcaaaacgtatcaagtccgcagcggcactctgggtaccggggacacgcgaagag

SEQ ID NO: 443814 - DNA, 75 bp, synthetic construct
  source 1..75: mol_type = other DNA
gattacacaccgaagaaaaattatttgccggatgacgtcgcagctgtgagtaaagcaccaataatagattttagc

SEQ ID NO: 443815 - DNA, 75 bp, synthetic construct
  source 1..75: mol_type = other DNA
gttagcgctggggccgaattgattgccgatgggaacattcatgtctatggcatgatgcgcggtcgtgcgcttgca

SEQ ID NO: 443816 - DNA, 75 bp, synthetic construct
  source 1..75: mol_type = other DNA
gatattctactgttgactatttgtgccgttatttctggtgcagaaggctgggaagatatagaggattttggggaa

SEQ ID NO: 443817 - DNA, 75 bp, synthetic construct
  source 1..75: mol_type = other DNA
attacagacaaacctggaaagtggaacataaattatcggatattctactgttgactatttgtgccgttatttctg

SEQ ID NO: 443818 - DNA, 75 bp, synthetic construct
  source 1..75: mol_type = other DNA
gatgcaataacggcattgcgaaaccatctggataccgccaaacaatcaatgattctttccatcaggcaacatcac

SEQ ID NO: 443819 - DNA, 75 bp, synthetic construct
  source 1..75: mol_type = other DNA
ctgagcaacttaatctcgggttgacggcaggtaaagtgtggttcaacaccccaaccgatgattataacggtctgc

SEQ ID NO: 443820 - DNA, 75 bp, synthetic construct
  source 1..75: mol_type = other DNA
tacgggtatagcctttgctgataatacccctgtctttgcgcgtcaggattttcgtcaggatattaatctgaagct

SEQ ID NO: 443821 - DNA, 75 bp, synthetic construct
  source 1..75: mol_type = other DNA
agaaattaatgccaacaccgtctgaagatgcgttaaaacagatggtggatgataagaaagaacgattgaaggggc

SEQ ID NO: 443822 - DNA, 75 bp, synthetic construct
  source 1..75: mol_type = other DNA
tgtcaagttagtactggtgatgttagtaaaactattcagttaggagaagtttcagctgctcagctgaagaatggt

SEQ ID NO: 443823 - DNA, 75 bp, synthetic construct
  source 1..75: mol_type = other DNA
agcttagcagtgttcttaacagggaatgtacgcgaagccgcgtccactgtcagagcaaaaaacgtgcactggaaa

SEQ ID NO: 443824 - DNA, 75 bp, synthetic construct
  source 1..75: mol_type = other DNA
atatttctattattcccgattacagacaagcctggaaagtggaacacaaattgtcttatattctactgttgacta

SEQ ID NO: 443825 - DNA, 75 bp, synthetic construct
  source 1..75: mol_type = other DNA
acgcggtcacgcagacgcagattggcaaagattgctacgtggtggacagccagacagtggctaaaaccagtgata

SEQ ID NO: 443826 - DNA, 75 bp, synthetic construct
  source 1..75: mol_type = other DNA
atgggacttttgcgaggacagatttggtgtaaaagatatactaccattctctatttcagatatggatcttccgat

SEQ ID NO: 443827 - DNA, 75 bp, synthetic construct
  source 1..75: mol_type = other DNA
catgaactttcaagaaaaagtcccgagactatagatttctgctatatagatcctccttataatacgggtaataaa

SEQ ID NO: 443828 - DNA, 75 bp, synthetic construct
  source 1..75: mol_type = other DNA
ggctttcaagcattcagccaaacaaagtccgccctgaaatccgcgacaaggtaatccagtatcaggaagagtgtg

SEQ ID NO: 443829 - DNA, 75 bp, synthetic construct
  source 1..75: mol_type = other DNA
gatataagaggactgaagaagaggcttcgggaggatttggttgcgtgatcaaatgcttggatactcacctcgaaa

SEQ ID NO: 443830 - DNA, 75 bp, synthetic construct
  source 1..75: mol_type = other DNA
cgtctgacgccttatagatttaatgatgatgttcttatcaatgcagagcaaatcataccggttcctgaattggaa

SEQ ID NO: 443831 - DNA, 75 bp, synthetic construct
  source 1..75: mol_type = other DNA
agcagtgcactatctttgcgatgaatcctctgactggttcccggatctcgatgacattcgcgccaaaattacgcc

SEQ ID NO: 443832 - DNA, 75 bp, synthetic construct
  source 1..75: mol_type = other DNA
cattacctttaacggactgtcgaaaacgtaccgcgttgcaggcttccgtcaggggtggatggtgttgaacgggcc

SEQ ID NO: 443833 - DNA, 75 bp, synthetic construct
  source 1..75: mol_type = other DNA
cacttccgcattgtcacgctaccgcgtgtcgatgatatcgagctgtctttgagtaagttcgcgcgtttcctttct

SEQ ID NO: 443834 - DNA, 75 bp, synthetic construct
  source 1..75: mol_type = other DNA
atgccctagttgatactattttgaaatcttggtcaagaaatgttgagaacgttaaactggcttttgataacaatg

SEQ ID NO: 443835 - DNA, 75 bp, synthetic construct
  source 1..75: mol_type = other DNA
tctactgttgacggagtggagcaattaaaagaggaatatacagaattatatgatccagctcaggaatgctggaaa

SEQ ID NO: 443836 - DNA, 75 bp, synthetic construct
  source 1..75: mol_type = other DNA
taatatgtattatcctttatatttcaattcattaacgggtgaagtgctagttgaacctgatattggtttaaaaga

SEQ ID NO: 443837 - DNA, 75 bp, synthetic construct
  source 1..75: mol_type = other DNA
atagcgtcataaatcaggtgattgaagatatggcgaggggcaatattccttctccgctgccttcacaaagcggac

SEQ ID NO: 443838 - DNA, 75 bp, synthetic construct
  source 1..75: mol_type = other DNA
gttgcctttaaagcatttcatcgggctgcggagttatttgataagtgcataggtatgacttggtttaacatctct

SEQ ID NO: 443839 - DNA, 75 bp, synthetic construct
  source 1..75: mol_type = other DNA
gaatgcgaatgggcggtggatactgatgttctagaggaagatcatccggaaatacggattgagctaggcagaatg

SEQ ID NO: 443840 - DNA, 75 bp, synthetic construct
  source 1..75: mol_type = other DNA
ctgggtgtgtatttcttcgggaattatattaatcctgtttggcatggtgccaaaaatggcggtgctggtcgcctc

SEQ ID NO: 443841 - DNA, 75 bp, synthetic construct
  source 1..75: mol_type = other DNA
cagggaaaaaatgagcgagatgacctccagaagtctaatggtgatggatatggtttctctgccagctatgagttt

SEQ ID NO: 443842 - DNA, 75 bp, synthetic construct
  source 1..75: mol_type = other DNA
agtttggtggtgatggctggacgcagaccgataactttatgacggcccgaacttccggtgtcctgacttaccgta

SEQ ID NO: 443843 - DNA, 75 bp, synthetic construct
  source 1..75: mol_type = other DNA
ttaacctgattgatgaaagtgaatttacccggaaagccggtgttgcgacagataatatcgttgctgtgggtatga

SEQ ID NO: 443844 - DNA, 75 bp, synthetic construct
  source 1..75: mol_type = other DNA
ggcccaattggcacggtgagattggcttttaacggccagtattcacgatttgataactatgctggtgctgactgg

SEQ ID NO: 443845 - DNA, 75 bp, synthetic construct
  source 1..75: mol_type = other DNA
aattgccgagatttctcgctcactgaaggctttggcgaaggaattacaagtaccggtggtggcattgtcacaact

SEQ ID NO: 443846 - DNA, 75 bp, synthetic construct
  source 1..75: mol_type = other DNA
gaagagttgtttcagcgaccgcatgatggtgtaacggggcttgataccggatttaccgatctcaataagaagacg

SEQ ID NO: 443847 - DNA, 75 bp, synthetic construct
  source 1..75: mol_type = other DNA
agactatatctttattgagctgaaatgtactaagcgttcatctgccttaaaaagaggattgcaagcagaccattt

SEQ ID NO: 443848 - DNA, 75 bp, synthetic construct
  source 1..75: mol_type = other DNA
tgataccagccccagtgcgggccgtcattcaggccgtgcgcatcgccgtagtgtcagtggcccgtgctgtctggg

SEQ ID NO: 443849 - DNA, 75 bp, synthetic construct
  source 1..75: mol_type = other DNA
gctatataacgctgatggatctgcccggcgtgggcgaaagtggcgctcgcgataccgagtatgctgcgctgtacc

SEQ ID NO: 443850 - DNA, 75 bp, synthetic construct
  source 1..75: mol_type = other DNA
gggagattatcaatttaatgttcagccagcgtatttcctggctagccgccgtgcgtatcaggcataaattatcgc

SEQ ID NO: 443851 - DNA, 75 bp, synthetic construct
  source 1..75: mol_type = other DNA
atgatcgatctggaaaaccaggaacgggagattatcaatttaatgttcagccagggtatatcctggctaaccgcc

SEQ ID NO: 443852 - DNA, 75 bp, synthetic construct
  source 1..75: mol_type = other DNA
caaacatcaaaagcaaaatggcagaaatttatggttgtccaccagagttgctgatatgcccttcctggatgacgg

SEQ ID NO: 443853 - DNA, 75 bp, synthetic construct
  source 1..75: mol_type = other DNA
atagttggtgggaaaaactatggggatcaggacctggttaaatatattgatgttggagcaacatattacttcaac

SEQ ID NO: 443854 - DNA, 75 bp, synthetic construct
  source 1..75: mol_type = other DNA
ggtattgtcgcggcagtgatgggggtggttcacgcgctgggatcggctgaccggcctgccgccgaactgggggcg

SEQ ID NO: 443855 - DNA, 75 bp, synthetic construct
  source 1..75: mol_type = other DNA
cggatttatttccccgctggcaagtgttttgcgccagaaaagcgcagagaccagcaaaatgatgcagtgcgtcaa

SEQ ID NO: 443856 - DNA, 75 bp, synthetic construct
  source 1..75: mol_type = other DNA
agggctatcttcgtttgaatttggcttgcagtcgagaaaagttatatatggggcttacgcgcattgcaggtgtaa

SEQ ID NO: 443857 - DNA, 75 bp, synthetic construct
  source 1..75: mol_type = other DNA
tattagcgccacttatcggtcgcttgatgcctttattcccgccactggttaccggtgtggttattacttctatcg

SEQ ID NO: 443858 - DNA, 75 bp, synthetic construct
  source 1..75: mol_type = other DNA
cagcgagcgcccgtcgttcgtcgaactggaagagcacgttcgtgcagtgaaaaatccgcaacagcagacgacaac

SEQ ID NO: 443859 - DNA, 75 bp, synthetic construct
  source 1..75: mol_type = other DNA
gggcatgttttcgttggagcgcgatattgaaaatcctcgcgagagcgagatcttcgccagttatcctcgcattat

SEQ ID NO: 443860 - DNA, 75 bp, synthetic construct
  source 1..75: mol_type = other DNA
gatatcgcgattttgtaaactccccatccgtactgaatataattgcaactattattgcctataacgaatgtgagg

SEQ ID NO: 443861 - DNA, 75 bp, synthetic construct
  source 1..75: mol_type = other DNA
cgaacattttgactgttcaggcactggttcgatgattttcttaatttgctacttttccactttcagtatgctaat

SEQ ID NO: 443862 - DNA, 75 bp, synthetic construct
  source 1..75: mol_type = other DNA
gtcccgaggacaggatgttatggttggtggtgtgaaccatggcgatcaggatctggttaaatatattgatgtcgg

SEQ ID NO: 443863 - DNA, 75 bp, synthetic construct
  source 1..75: mol_type = other DNA
acgttcctgcgctaacgggttcgtatatgatttcacctgatgaaaatttcaatcaccaattcagaacgatatcga

SEQ ID NO: 443864 - DNA, 75 bp, synthetic construct
  source 1..75: mol_type = other DNA
tgaatggagataacattctcatttttacgcctgtttataacgcattttttgatgtaattaaacaaagtggtcgaa

SEQ ID NO: 443865 - DNA, 75 bp, synthetic construct
  source 1..75: mol_type = other DNA
caaagatggtgttattatgtaatcctcataacccgacaggaaccgtctggtcggaagaagatctgcataaaatcg

SEQ ID NO: 443866 - DNA, 75 bp, synthetic construct
  source 1..75: mol_type = other DNA
tgatgtaccaacatcatggcaagccctgtcagataaagatccttcacaatctgatccgattactcgtgcagtgat

SEQ ID NO: 443867 - DNA, 75 bp, synthetic construct
  source 1..75: mol_type = other DNA
cgatcaggaacggcatcagaaagtgttgtactacagacaagtaaaaaaactcagcattagagaaacagcagatgc

SEQ ID NO: 443868 - DNA, 75 bp, synthetic construct
  source 1..75: mol_type = other DNA
cttgatgccattctggctgtacagcatcatcgtattcagcgttttgaaaagggttttctgctccgggggcttgat

SEQ ID NO: 443869 - DNA, 75 bp, synthetic construct
  source 1..75: mol_type = other DNA
ccaacttgaagcattgctgcccaaagtcagggcatgcctggacagcttacaagctatgcgccatcttggtcatgt

SEQ ID NO: 443870 - DNA, 75 bp, synthetic construct
  source 1..75: mol_type = other DNA
tggctccccggaaaaccaatgtatttgcgtgcatcaggttttatttctgtcagtcatttttctgtttcgacctgt

SEQ ID NO: 443871 - DNA, 75 bp, synthetic construct
  source 1..75: mol_type = other DNA
catcgacggaagatcagttcgccgatcgggcaaaagagatgctggagcagttcgttcaggagcgggggcataaaa

SEQ ID NO: 443872 - DNA, 75 bp, synthetic construct
  source 1..75: mol_type = other DNA
gacaatgactgcctgtggaagaaagccgatacagccttcagtggttaccagttgctgctggagtatttcagcttc

SEQ ID NO: 443873 - DNA, 75 bp, synthetic construct
  source 1..75: mol_type = other DNA
tttggtatgtctgactctgttaatctttgggaacaaaatgctaaagtaagaggatttgggttgtcgggtgaaata

SEQ ID NO: 443874 - DNA, 75 bp, synthetic construct
  source 1..75: mol_type = other DNA
taaccatctccaaaatgaagaattttaccaaaacttactgacacttcccgtcgatgatgcaaaagcactttttgt

SEQ ID NO: 443875 - DNA, 75 bp, synthetic construct
  source 1..75: mol_type = other DNA
tttgccggagcttactgaaagtctggtcagtatgctctggcctcattacctgcgtactatcccgtccctgtcggt

SEQ ID NO: 443876 - DNA, 75 bp, synthetic construct
  source 1..75: mol_type = other DNA
ttcctggccctgtacgccgatatgaatcagttcaatcagctcacactgattgttcagcctgaaggaaaatgcatc

SEQ ID NO: 443877 - DNA, 75 bp, synthetic construct
  source 1..75: mol_type = other DNA
caacgggcagcttccgcgcagggcgctggaaagtacgctcctggacagggtggtcaaaaccggcaaagtccccgt

SEQ ID NO: 443878 - DNA, 75 bp, synthetic construct
  source 1..75: mol_type = other DNA
gtcagggcatgtctgatgagtttgcaagcaatacgtcatcttgggcatgttgagctggtgcaggcaaccagcggc

SEQ ID NO: 443879 - DNA, 75 bp, synthetic construct
  source 1..75: mol_type = other DNA
cacgcatctgtttattccactgcgtcgacggcttcagtgccaacagccgactctgcagacattattggcgatcct

SEQ ID NO: 443880 - DNA, 75 bp, synthetic construct
  source 1..75: mol_type = other DNA
tgctggtgtggtgcggtgaaaatcgaacctccgcccaacagcagcaactcaccagttggcaagaacaaggccatg

SEQ ID NO: 443881 - DNA, 75 bp, synthetic construct
  source 1..75: mol_type = other DNA
gctacggtttcggcaaaacggataaatgtccctacttctacttttctgatctggtggtcggtgaaaccacctgcg

SEQ ID NO: 443882 - DNA, 75 bp, synthetic construct
  source 1..75: mol_type = other DNA
gaagtggaagacctcgccgacgcaatacgtcaaagtatgataaccgagtataaaactgataaaattacacacatg

SEQ ID NO: 443883 - DNA, 75 bp, synthetic construct
  source 1..75: mol_type = other DNA
atcgtcgcctgcatgcgatgctcaggcatgaggggttcggctatcagaaaaggttgtgcgcagacttatggtgga

SEQ ID NO: 443884 - DNA, 75 bp, synthetic construct
  source 1..75: mol_type = other DNA
aagccggtgataaatacgccacgatacgtacgatgctgacagatatctttaacagtaattaccagtgttatggct

SEQ ID NO: 443885 - DNA, 75 bp, synthetic construct
  source 1..75: mol_type = other DNA
taaccggacataccgtacagaaatactcgatttttatctgttcagaacgctgaatgaagtgcgggaaatcacgga

SEQ ID NO: 443886 - DNA, 75 bp, synthetic construct
  source 1..75: mol_type = other DNA
ggcagaggcactggaaaaccaggggaaatgggcgcaggcggcagcacttcagcggcaacgactggcgctggatgt

SEQ ID NO: 443887 - DNA, 75 bp, synthetic construct
  source 1..75: mol_type = other DNA
aaggtgaacttgtcagtttcaacactgatggttggatcaacgtcacaggtgttgctgagagatttgggaaacgca

SEQ ID NO: 443888 - DNA, 75 bp, synthetic construct
  source 1..75: mol_type = other DNA
atgtcacttgtcaccgatctacccgccattttcgatcagttctctgaagctcgccagaaaggctttctcaccgtc

SEQ ID NO: 443889 - DNA, 75 bp, synthetic construct
  source 1..75: mol_type = other DNA
gtgttcagctccgttgccgcacgaggctatgtttttctccctcgccctttcagggagagggccggggtgagggtg

SEQ ID NO: 443890 - DNA, 75 bp, synthetic construct
  source 1..75: mol_type = other DNA
gcaacgatttctgctcttccagtagcgccagacgcgcagtgtaatcgcccgccgcttccagcttgcgcagctcag

SEQ ID NO: 443891 - DNA, 75 bp, synthetic construct
  source 1..75: mol_type = other DNA
atgaaagggattatcctggcgggcggttctggcactcgcctgcacccgattacgcgcggtgtgtcgaagcagcta

SEQ ID NO: 443892 - DNA, 75 bp, synthetic construct
  source 1..75: mol_type = other DNA
aaaaaattgatctcatatttcgtacatatttactttcttttttttatggccgtaaaatgtacagagtaccagagt

SEQ ID NO: 443893 - DNA, 75 bp, synthetic construct
  source 1..75: mol_type = other DNA
gctctggttcttgcaacatcgatttatgtagtaatatctttcgtgaccttatcgaaagataatcttctcacacta

SEQ ID NO: 443894 - DNA, 75 bp, synthetic construct
  source 1..75: mol_type = other DNA
aagaaaatgggcagaaagcgcatcgtattgagatcggtgattttgataaccttcacgtcactgccacaacgaaag

SEQ ID NO: 443895 - DNA, 75 bp, synthetic construct
  source 1..75: mol_type = other DNA
caagagaaaatttcatcaatcacttcacttgctatagaaagagatgagatacaaaaaaaaaacggagttgcaaat

SEQ ID NO: 443896 - DNA, 75 bp, synthetic construct
  source 1..75: mol_type = other DNA
gcgtttcctgatttttctgccatctacaaatttacaggtgaatcagcttggattgattttatcaacaagttttcg

SEQ ID NO: 443897 - DNA, 75 bp, synthetic construct
  source 1..75: mol_type = other DNA
ttattatcttttaaaggcagaagtatatctttttctccttcatttattggttttattaatagcattatttctcca

SEQ ID NO: 443898 - DNA, 75 bp, synthetic construct
  source 1..75: mol_type = other DNA
caaccgtgcctacaaccgtgcttcggcagatatcaacggtaaaccgtgggatccgaaacggatgctgatccagtg

SEQ ID NO: 443899 - DNA, 75 bp, synthetic construct
  source 1..75: mol_type = other DNA
aaaaatccaatagtttttcttggatattctttaactgacaggaatgtaaagaaacttctttctgatttttcctca

SEQ ID NO: 443900 - DNA, 75 bp, synthetic construct
  source 1..75: mol_type = other DNA
aaaggccaagataatcatcactacaaattatgatgctttcatagaaaatttacttcaagagcaaaatgtaactcc

SEQ ID NO: 443901 - DNA, 75 bp, synthetic construct
  source 1..75: mol_type = other DNA
tcccggaaagctcgcaactacctgcaaattctgccacaacagataaacggcaatgtgttcagttacacctcatcc

SEQ ID NO: 443902 - DNA, 75 bp, synthetic construct
  source 1..75: mol_type = other DNA
taccctgcaactgtcgggtacagaaacgggctgtttgtcgtgacactgcacgatttcgaccttgaaacccgtgca

SEQ ID NO: 443903 - DNA, 75 bp, synthetic construct
  source 1..75: mol_type = other DNA
tgggggacatgccgggataaccccgttgaactggtgcgtaagccccgtgtctctccgggacgggaacgacgtctg

SEQ ID NO: 443904 - DNA, 75 bp, synthetic construct
  source 1..75: mol_type = other DNA
agaaattttggcgcaggactggctctctgaatttagactactttaccgtttgttttcacttaaagtggataacgg

SEQ ID NO: 443905 - DNA, 75 bp, synthetic construct
  source 1..75: mol_type = other DNA
aggactggctttctgatttcaggctgctttatcgtctgttttctcttaaagtggataacggaatgaagcgtcaga

SEQ ID NO: 443906 - DNA, 75 bp, synthetic construct
  source 1..75: mol_type = other DNA
ggataaattgaatgatctaaaacattcactggatgtgtttatttcaacattcagtatcgataacgtgtttttttc

SEQ ID NO: 443907 - DNA, 75 bp, synthetic construct
  source 1..75: mol_type = other DNA
cgacaactgtactttactggatttttgtaattctggttaccctctctctgaaattgcttgtcgattgtatctata

SEQ ID NO: 443908 - DNA, 75 bp, synthetic construct
  source 1..75: mol_type = other DNA
gaacctcgactacaaatggttcgtggtgccatcactgatcgccatgatcaccactatcggcgtaatgatcgtcac

SEQ ID NO: 443909 - DNA, 75 bp, synthetic construct
  source 1..75: mol_type = other DNA
tggtttcgccgctcaccacctggcagatcttcatcggcaaagccgtaccggcattaattgtcgccaccttccagg

SEQ ID NO: 443910 - DNA, 75 bp, synthetic construct
  source 1..75: mol_type = other DNA
ttttgcccgcgccagcgcctttacccacgtactgctgctgaaaagtccgcaggagatccgcccaaccatcgacac

SEQ ID NO: 443911 - DNA, 75 bp, synthetic construct
  source 1..75: mol_type = other DNA
tcagagaccgaacgcaaaacaaggatgagctgataaatgtacagggacaattagacgtactgaatcagaccctgc

SEQ ID NO: 443912 - DNA, 75 bp, synthetic construct
  source 1..75: mol_type = other DNA
tagttttctcaatgacgttgtttctccggatgatttgcttgacgttcagctcagagaccgaacgcaaaacaagga

SEQ ID NO: 443913 - DNA, 75 bp, synthetic construct
  source 1..75: mol_type = other DNA
gtaactttgtttcttttgatgatttaatagacgttcagttaagaaaacgaacacaaaaccaagataacttaataa

SEQ ID NO: 443914 - DNA, 75 bp, synthetic construct
  source 1..75: mol_type = other DNA
tacattgagtgatcaggaaaaaaacgagctcctgttgtttcctgataaattgaatgatctaaaacattcactgga

SEQ ID NO: 443915 - DNA, 75 bp, synthetic construct
  source 1..75: mol_type = other DNA
aatcagctatagtaataactgcactgtgttttcttggatatagtgcatattgttcatataatgtatatgatataa

SEQ ID NO: 443916 - DNA, 75 bp, synthetic construct
  source 1..75: mol_type = other DNA
actctgtaagaattgacattttgttccctaatttttctgccacctataagtttacaggagaaacagcctggattg

SEQ ID NO: 443917 - DNA, 75 bp, synthetic construct
  source 1..75: mol_type = other DNA
tacgcatccccggcatggaaatgctggtaaagaactatggcatcatgctacgcattcaatataaacaaaaacttt

SEQ ID NO: 443918 - DNA, 75 bp, synthetic construct
  source 1..75: mol_type = other DNA
ggttatcttattggtaagccgcagccgttaattgatacgctgaatgaaatcgaacccattcgcgaaagtgcctga

SEQ ID NO: 443919 - DNA, 75 bp, synthetic construct
  source 1..75: mol_type = other DNA
tgtatttgcaacgcgaattgaaagataaagtcgcgatgatgaatcgactacagcaggcgctggaacacaaccatt

SEQ ID NO: 443920 - DNA, 75 bp, synthetic construct
  source 1..75: mol_type = other DNA
agcagagaaaatctggtcggcgtcatgccctttaacctcgggaccttaatcaattatcaggccttgctggtgggt

SEQ ID NO: 443921 - DNA, 75 bp, synthetic construct
  source 1..75: mol_type = other DNA
ttgttcgcaccttccttagggatttttgtccgcaaatatgcagagctgggtttttacgaaacgctctcattaacg

SEQ ID NO: 443922 - DNA, 75 bp, synthetic construct
  source 1..75: mol_type = other DNA
agttatctggtgttctcctttatcgtcaattatatggctgttctggctacccgtcagagagtggttagcaggcgc

SEQ ID NO: 443923 - DNA, 75 bp, synthetic construct
  source 1..75: mol_type = other DNA
agtttttcctttcatccatgctttgcctggggctgtttaccgccgcccgtgtttgcgaacaggtacgcgccgcta

SEQ ID NO: 443924 - DNA, 75 bp, synthetic construct
  source 1..75: mol_type = other DNA
ctttgtcgatctgcgcctggattatcgctttcctcgtcggttcattttttggcattttacgtaccgttccaaacc

SEQ ID NO: 443925 - DNA, 75 bp, synthetic construct
  source 1..75: mol_type = other DNA
cgctttcctcgtcggttcatttttcggcattttacgtaccgttccaaaccgttttctctccggtctgggtacgtt

SEQ ID NO: 443926 - DNA, 75 bp, synthetic construct
  source 1..75: mol_type = other DNA
cacactggctgacatcattgctggagccgggcgaatctgtttatcagctttccggcaacgaccttgcgttacgat

SEQ ID NO: 443927 - DNA, 75 bp, synthetic construct
  source 1..75: mol_type = other DNA
aaatacgtgataaatggtgggggcttccgctgatcctgccttctttaattttacctgttttcgcacaaataaata

SEQ ID NO: 443928 - DNA, 75 bp, synthetic construct
  source 1..75: mol_type = other DNA
atgtctatagactggaactggggtatttttttacaacaagccccgttcggcaataccacctatcttggttgggtc

SEQ ID NO: 443929 - DNA, 75 bp, synthetic construct
  source 1..75: mol_type = other DNA
ggcgcgtttccctgttgatatcggccgtttgttggctgaataccagatagaagcatggcagcttattttcgaagt

SEQ ID NO: 443930 - DNA, 75 bp, synthetic construct
  source 1..75: mol_type = other DNA
acaggcgccaattcattgggtttcggttgcacaaattgaaaatagcctcgcagggcgtccgccaatggcggtggg

SEQ ID NO: 443931 - DNA, 75 bp, synthetic construct
  source 1..75: mol_type = other DNA
cgcgcaagcaattgaaaatctcaagcagaagttagtggagtgcaatcgctataactactgcgcagatgcagttaa

SEQ ID NO: 443932 - DNA, 75 bp, synthetic construct
  source 1..75: mol_type = other DNA
tgattaaagaaatcaaagagcgcataggcagcctggacgtgagagacaatattgagcgccgggcttatgaaatag

SEQ ID NO: 443933 - DNA, 75 bp, synthetic construct
  source 1..75: mol_type = other DNA
aattgatatacatgtccgccgtggcgataccatcttttttgtgactggtcgtagcccaacgaaaacagaaacggt

SEQ ID NO: 443934 - DNA, 75 bp, synthetic construct
  source 1..75: mol_type = other DNA
atgggctggtctcatgtgatcctgctccctttcttcacaaaagccgcagataatccttcctttctcacactgctg

SEQ ID NO: 443935 - DNA, 75 bp, synthetic construct
  source 1..75: mol_type = other DNA
catgtacgccgcggtgacgcgatcttctttgtgactggtcgtagcccgacgaaaacagaaacggtttcaaaaacg

SEQ ID NO: 443936 - DNA, 75 bp, synthetic construct
  source 1..75: mol_type = other DNA
cagctgcggctggctatacattacccctggaaattctcaaaagtacgcgtggatattatattggcactcagtgtt

SEQ ID NO: 443937 - DNA, 75 bp, synthetic construct
  source 1..75: mol_type = other DNA
caacaggtaacgtttaattatctgttagcgcaaggggagtatcgtatctccacattgctcgctgtattgtttgct

SEQ ID NO: 443938 - DNA, 75 bp, synthetic construct
  source 1..75: mol_type = other DNA
acttgatgccacgctgacggcattggcagggctggcaaccggtgaaaataaactcccgtatttcactggaaatga

SEQ ID NO: 443939 - DNA, 75 bp, synthetic construct
  source 1..75: mol_type = other DNA
tatgtcacgaaaatcgatgattgggcagctgctgaacgtggggccgtccgagcgtctgagcggtagtctggcttg

SEQ ID NO: 443940 - DNA, 75 bp, synthetic construct
  source 1..75: mol_type = other DNA
atgaaactctttgcccagggctcttcactggacctcagccatcctcacgtaatggggatcctcaacgttacgcca

SEQ ID NO: 443941 - DNA, 75 bp, synthetic construct
  source 1..75: mol_type = other DNA
ccgcacaggccggctatacgttaccccttcaggttctcagcagcgtacgtggttattatattggtactcagtgtg

SEQ ID NO: 443942 - DNA, 75 bp, synthetic construct
  source 1..75: mol_type = other DNA
tcgctggcggtggcattattaacgccgaagcgagtgaattgttgcgtgagtttgtcgagttaactggcgttcccg

SEQ ID NO: 443943 - DNA, 75 bp, synthetic construct
  source 1..75: mol_type = other DNA
ctggtggtcggtgaaaccacctgcgacggcaaaaagaaaatgtatgaatacatggcggaatttaagcccgttcat

SEQ ID NO: 443944 - DNA, 75 bp, synthetic construct
  source 1..75: mol_type = other DNA
gttccacctctgatgaaaccattgaagaagccgagaaagatctgccgcgcaacctctgcccgctgattaaaagca

SEQ ID NO: 443945 - DNA, 75 bp, synthetic construct
  source 1..75: mol_type = other DNA
aacgtctatagtgcgggtgacagtgattaccgctttgcgctggaatccatctcgaaagtctgtacgttagccctt

SEQ ID NO: 443946 - DNA, 75 bp, synthetic construct
  source 1..75: mol_type = other DNA
cctcaattctggtcttaaagccctgattgagcgcgtcgatacgacaacttcttcagtagataaactcaccgcgtc

SEQ ID NO: 443947 - DNA, 75 bp, synthetic construct
  source 1..75: mol_type = other DNA
gctggcggataaatatctggcgattggctgctcctgtgtttcgccgaacgatcagcgcctgcaaatgctcagcca

SEQ ID NO: 443948 - DNA, 75 bp, synthetic construct
  source 1..75: mol_type = other DNA
tgaactggatgcaatgaccgcccgcgttcgtcagcagtgggaagaaggccagcgactggacccgcgcccacgcat

SEQ ID NO: 443949 - DNA, 75 bp, synthetic construct
  source 1..75: mol_type = other DNA
atataaggggttggattcagtcccacggctatgatgaaggttatattttgcaggcccgtttctggaatgagcgcc

SEQ ID NO: 443950 - DNA, 75 bp, synthetic construct
  source 1..75: mol_type = other DNA
aaaccaattggcgcgattcctgcaatgcagacaagggaagggcgcttcatcttcaccgtagctttccaaaccatc

SEQ ID NO: 443951 - DNA, 75 bp, synthetic construct
  source 1..75: mol_type = other DNA
cgggtacgacgaaggttatattttgcaggcccgtttctggaatgagcgatccaattcgaataacagcagatatat

SEQ ID NO: 443952 - DNA, 75 bp, synthetic construct
  source 1..75: mol_type = other DNA
taccggattacacgatcagatttctgttcaggatattggcatcgacaaccttaccgcagcggatggccttgcggt

SEQ ID NO: 443953 - DNA, 75 bp, synthetic construct
  source 1..75: mol_type = other DNA
agaacaactgcgtaatgccactcatctggtgtgggcgacgggaggtggaatggtgccggaagaagaaatggaaca

SEQ ID NO: 443954 - DNA, 75 bp, synthetic construct
  source 1..75: mol_type = other DNA
ttaccgcagcggatggccttgcagttggtcgcgcatcaggctttgtcgggcgggcaatggagcgtctactggatg

SEQ ID NO: 443955 - DNA, 75 bp, synthetic construct
  source 1..75: mol_type = other DNA
atgcaagcaaaagcgcaagccgctttggtacggaggccaaagaagcctctgcgtccgtgagtggcatgaatacgc

SEQ ID NO: 443956 - DNA, 75 bp, synthetic construct
  source 1..75: mol_type = other DNA
gccgcgcagtctgacccgaactgtttctttattgatgacgagaattcccgcacgttgttccttgggtattccgtc

SEQ ID NO: 443957 - DNA, 75 bp, synthetic construct
  source 1..75: mol_type = other DNA
gcgcaggaagaaggcattcgtcttgaaccttcggcactggcgggtatggcggggcctcagcgcgtgtgcgcatca

SEQ ID NO: 443958 - DNA, 75 bp, synthetic construct
  source 1..75: mol_type = other DNA
attggtcgacgaatgtgccttacccgcgaaggaaaaaagctgctgccgcacatttatgaactcaccagagtgatg

SEQ ID NO: 443959 - DNA, 75 bp, synthetic construct
  source 1..75: mol_type = other DNA
aagctcgcgtggataatccaaccgtaactactgtgacaataggatatggtggcactggtgcaagtgcgtcggttg

SEQ ID NO: 443960 - DNA, 75 bp, synthetic construct
  source 1..75: mol_type = other DNA
ctggatcgcagcctgtttccctatgcgcggcccaattattttcagtcagcggaagatgaacaacgtctcttttcc

SEQ ID NO: 443961 - DNA, 75 bp, synthetic construct
  source 1..75: mol_type = other DNA
ttttttgccgaaccaacgcactccccttgtatgttgttaggcgtccatacaggattacacgatcagatttctgtt

SEQ ID NO: 443962 - DNA, 75 bp, synthetic construct
  source 1..75: mol_type = other DNA
agatgacgaaaagaacaagctattggcaccgttacgtgaaacggtaaacaaaagctatctggagcctgcgcaaaa

SEQ ID NO: 443963 - DNA, 75 bp, synthetic construct
  source 1..75: mol_type = other DNA
aaatcgcgactcttaatgatcagcttgaaaaagcgaaaaaggaaggaaataccgagcagattcagaaactgcaag

SEQ ID NO: 443964 - DNA, 75 bp, synthetic construct
  source 1..75: mol_type = other DNA
ctggcaaaagagacggcagaatcccagatagagaaaatactcgaagagaatagagactttgcggcaacgttcgtg

SEQ ID NO: 443965 - DNA, 75 bp, synthetic construct
  source 1..75: mol_type = other DNA
taatccgtgaagctctcagagagctggaattgggtgaaaactcggcactgttgtcggttagttggttagggaaaa

SEQ ID NO: 443966 - DNA, 75 bp, synthetic construct
  source 1..75: mol_type = other DNA
ataccagaaggctctggacaaagccgatcagcttatggggcaaatgggtgaaagctctaaggctacggtatcgtt

SEQ ID NO: 443967 - DNA, 75 bp, synthetic construct
  source 1..75: mol_type = other DNA
tggattcgatggattgatgtccggttcttctggctcaacttccgggttcaacaatctgaccagttctgctgccga

SEQ ID NO: 443968 - DNA, 75 bp, synthetic construct
  source 1..75: mol_type = other DNA
gggcatgaatgcctatctgaaactgaatacccaaagccaggagatgctgctgataccaagccaggccgttatcga

SEQ ID NO: 443969 - DNA, 75 bp, synthetic construct
  source 1..75: mol_type = other DNA
tgataccaagccaggccgttattgataccggtaaagaacagcgcgtgattactgtcgatggtgaaggccagtttg

SEQ ID NO: 443970 - DNA, 75 bp, synthetic construct
  source 1..75: mol_type = other DNA
agaattctgcttcatccttagagtttaaacagcacgtgcactaccattgtttctgcatatcgccacaccatcgcc

SEQ ID NO: 443971 - DNA, 75 bp, synthetic construct
  source 1..75: mol_type = other DNA
gcgttatggcgtgactcgccaggtcccggctatgtgcatttccctgactggctggggagctggttttacgacgaa

SEQ ID NO: 443972 - DNA, 75 bp, synthetic construct
  source 1..75: mol_type = other DNA
gcagaaaaacgccgtcgccggaagaaaaaactgcggacggagcgtgcggaagataatccatggataacatcagga

SEQ ID NO: 443973 - DNA, 75 bp, synthetic construct
  source 1..75: mol_type = other DNA
attgcgtcattctggatggagggtccggcagctgcttatcagacactctcgcaactcgtttacaaactgcttact

SEQ ID NO: 443974 - DNA, 75 bp, synthetic construct
  source 1..75: mol_type = other DNA
gacctgctcacccgcgcggggttcacgggcgaccaggcgcaggagctgcagtggcaccgcattcgctggccgcta

SEQ ID NO: 443975 - DNA, 75 bp, synthetic construct
  source 1..75: mol_type = other DNA
caccctgcgcgccccgaacatgcaactggccgttgagctgacggacgccggccgggcgctggccgccccgcttct

SEQ ID NO: 443976 - DNA, 75 bp, synthetic construct
  source 1..75: mol_type = other DNA
cagatggtggaagaactcagcgggatgatggatgtgcaggtcaatatcgacgaccagggcaactacaacgtcacc

SEQ ID NO: 443977 - DNA, 75 bp, synthetic construct
  source 1..75: mol_type = other DNA
agttacaagagaaaggctatttactcaaacgcccggacggttcgttatggcagtgggataaatggcagccaggtc

SEQ ID NO: 443978 - DNA, 75 bp, synthetic construct
  source 1..75: mol_type = other DNA
ggtaatagtttaactgttaatggtgatataggaaccaatgcttgggtatatgcaaatcgttttgcaattaatagc

SEQ ID NO: 443979 - DNA, 75 bp, synthetic construct
  source 1..75: mol_type = other DNA
cgctgacgaacaggcgcgcgtcctggcagagcagcgcgcgacggcgatccgggttctgcccctggtccggatgaa

SEQ ID NO: 443980 - DNA, 75 bp, synthetic construct
  source 1..75: mol_type = other DNA
acgtaccaccacatttatgtccgccgggatgactctggtggagagctcgccgggacgtgacatctgcgacagcaa

SEQ ID NO: 443981 - DNA, 75 bp, synthetic construct
  source 1..75: mol_type = other DNA
tggacagcggcgaaatatcacagccctttattgatgcggttaacgattatgtgaatacccagggccaccacggac

SEQ ID NO: 443982 - DNA, 75 bp, synthetic construct
  source 1..75: mol_type = other DNA
gaattaccactctgacgctatctaccgcagcatgattgccagcgtgctgggcctgagcattgatcgcatctactt

SEQ ID NO: 443983 - DNA, 75 bp, synthetic construct
  source 1..75: mol_type = other DNA
cggttgcctacgataacaaaggcaatgcctcaaaacgcgtgcagacagaggtggtcattaagcacgcgtcagcag

SEQ ID NO: 443984 - DNA, 75 bp, synthetic construct
  source 1..75: mol_type = other DNA
cctgtggccgtggatggtatcagtcatgtggccagcgaggaaaactggctgacggtgccgggtgccgatgaagaa

SEQ ID NO: 443985 - DNA, 75 bp, synthetic construct
  source 1..75: mol_type = other DNA
caacactgaacctcagcgatgaggagattcagacgttattgcgcaatgtggaaaatctggttcgctgtgcatttc

SEQ ID NO: 443986 - DNA, 75 bp, synthetic construct
  source 1..75: mol_type = other DNA
caacatcaccccaaaaccggccagtaaggccagtggcgtgatctggtttgccaaaaccagggcaaatgatgacgt

SEQ ID NO: 443987 - DNA, 75 bp, synthetic construct
  source 1..75: mol_type = other DNA
acccgcgagttcgaccgccagatggacgagcgcgtggtgaagctgtggcgcgaaggccagttcaaagagttctgc

SEQ ID NO: 443988 - DNA, 75 bp, synthetic construct
  source 1..75: mol_type = other DNA
atgggtaagttagcattagcagcaaaaatcacgcacgtgccgtcgatgtatctctctgaactgccggggaaaaac

SEQ ID NO: 443989 - DNA, 75 bp, synthetic construct
  source 1..75: mol_type = other DNA
cggtgaaccgcgccgctcccgtatcgccagtttctggatggaagggccagctgctgcgtatcagacctgggcgca

SEQ ID NO: 443990 - DNA, 75 bp, synthetic construct
  source 1..75: mol_type = other DNA
aacgctcccggcttatcgtaagcgtaaactgaccgccgtatgtagccatcagacgagaattggtaacttagacgc

SEQ ID NO: 443991 - DNA, 75 bp, synthetic construct
  source 1..75: mol_type = other DNA
acgcagcgataagttacatctgaaggacgccgccaccctgctcggggtttcagagatgacgattcgccgcgattt

SEQ ID NO: 443992 - DNA, 75 bp, synthetic construct
  source 1..75: mol_type = other DNA
gacgccgccgccctgcttggggtttcggagatgacgattcgtcgcgatctgaacaaccacagtgcgcccgtcgtt

SEQ ID NO: 443993 - DNA, 75 bp, synthetic construct
  source 1..75: mol_type = other DNA
cgaccagggcaactacaacgttaccctgaaaaacggtcagccgctggtgagcgggcagcaaagttcgaccatcgc

SEQ ID NO: 443994 - DNA, 75 bp, synthetic construct
  source 1..75: mol_type = other DNA
gaaagattagagcaactggtagccagggatctacgtcagcttgaactggccctgacagcttcgccaccccactag

SEQ ID NO: 443995 - DNA, 75 bp, synthetic construct
  source 1..75: mol_type = other DNA
cagcacggcagcaccacgctggagcaggtgctggacaaggctgaatccgaagggcgcatcttcaaaagcgaacgc

SEQ ID NO: 443996 - DNA, 75 bp, synthetic construct
  source 1..75: mol_type = other DNA
gaccgccaccgctgtgctgtcggctgaagatatcgccgccgcacgtctgctgggtaaaaccgaagccgagttcct

SEQ ID NO: 443997 - DNA, 75 bp, synthetic construct
  source 1..75: mol_type = other DNA
cacgatgaaaaaagagattgaagcgctggatgatgcggaagctatactggcgtataaggtcggcatggctgacag

SEQ ID NO: 443998 - DNA, 75 bp, synthetic construct
  source 1..75: mol_type = other DNA
gcgcaacatgaaaaaagagattgcagaacttcaggatgcggaggccattcagcgttacgttgtgggctggcccac

SEQ ID NO: 443999 - DNA, 75 bp, synthetic construct
  source 1..75: mol_type = other DNA
gtcactggtctgaactatcaccggaagagcaggtccgtttctggcaggactacgaagcgggcattgaaagctcat

SEQ ID NO: 444000 - DNA, 75 bp, synthetic construct
  source 1..75: mol_type = other DNA
gcacggcacagcatccagcatgaacagtctgatcaacgctaaaacagtgaaaaagcctgatgagcaaacgcgtaa

SEQ ID NO: 444001 - DNA, 75 bp, synthetic construct
  source 1..75: mol_type = other DNA
gtaatccgcagcacccggaagtgcaggccgccattgaacaggcgatcgtgcaaatccgtgaagcgggcaaagctc

SEQ ID NO: 444002 - DNA, 75 bp, synthetic construct
  source 1..75: mol_type = other DNA
agatatattttttgaagcaaataatataaatggtcaatatattgtgtcaatattaagtgataagttttcagaaga

SEQ ID NO: 444003 - DNA, 75 bp, synthetic construct
  source 1..75: mol_type = other DNA
taccgaatatgtcgcgctgtcggcacagcacggcagcaccacgctggagcagttgctggataaggccgagtccga

SEQ ID NO: 444004 - DNA, 75 bp, synthetic construct
  source 1..75: mol_type = other DNA
atgagcaatgatatcgcaatcacatcacaaccaggcgcaactgtaggtactgctgcggcaatcttcagcccggag

SEQ ID NO: 444005 - DNA, 75 bp, synthetic construct
  source 1..75: mol_type = other DNA
cgatgaattacagcactgtctccgaactggataaggcttacaaatacattgcacaaaaactttcagatgatgacg

SEQ ID NO: 444006 - DNA, 75 bp, synthetic construct
  source 1..75: mol_type = other DNA
gtaatgcgatggaagcggcgaactacacgtttgagcacaatgggcgtaaatgggactacgggaagtcaacgcaga

SEQ ID NO: 444007 - DNA, 75 bp, synthetic construct
  source 1..75: mol_type = other DNA
gtatcaaatgaagcatctcagccattgccggacatagcacagcgtctgatggaccatcttgcagagcatggtatt

SEQ ID NO: 444008 - DNA, 75 bp, synthetic construct
  source 1..75: mol_type = other DNA
ggacttgccgcgcggacgtcttacattccgcatcctgaaagaactgtcccgcaccatcggaaaagagatcgtgcc

SEQ ID NO: 444009 - DNA, 75 bp, synthetic construct
  source 1..75: mol_type = other DNA
cggagaaggtattgctgtggcctcgacgcttgaagcactggctggcgctttttccgccacgactgaagatgctca

SEQ ID NO: 444010 - DNA, 75 bp, synthetic construct
  source 1..75: mol_type = other DNA
atggacatgattaacatcggctacagcggcgcatcaaccgcgcaggtggagctgaacgtcacggcgcaaaacacc

SEQ ID NO: 444011 - DNA, 75 bp, synthetic construct
  source 1..75: mol_type = other DNA
gcatgaaagaacttgctgacaagaagtttattgcagagaccatgatacagaactattacttcattaatccagact

SEQ ID NO: 444012 - DNA, 75 bp, synthetic construct
  source 1..75: mol_type = other DNA
aatgaaaatactggagagcaagttggtaatggcggtttctatcaggctatggaggttgataagacacagttcgtg

SEQ ID NO: 444013 - DNA, 75 bp, synthetic construct
  source 1..75: mol_type = other DNA
ctgatttgccgcagtgaccttgatgccacccttgcgctccgtaaccatttgaattcagctaaacaatcaatgatt

SEQ ID NO: 444014 - DNA, 75 bp, synthetic construct
  source 1..75: mol_type = other DNA
agctgtttgagctacgcgaaatgctcgaaacacattcacttcagcactttctcaacctgcctgatcatgatcccc

SEQ ID NO: 444015 - DNA, 75 bp, synthetic construct
  source 1..75: mol_type = other DNA
tcacactacggcaaaaatgtttttattgttgcaacttgcgtaattattcaggtcagtttggaacgccctgtataa

SEQ ID NO: 444016 - DNA, 75 bp, synthetic construct
  source 1..75: mol_type = other DNA
agatgttgttttaaacagacaatatgcgttttatctaaacgaaaaagccattcaaatttactcgcaaattttcct

SEQ ID NO: 444017 - DNA, 75 bp, synthetic construct
  source 1..75: mol_type = other DNA
tggagctcgaccgcctccacccgcagtatgacgtttgatatgcaggatgcggtcgaattcagcgagaaatttcat

SEQ ID NO: 444018 - DNA, 75 bp, synthetic construct
  source 1..75: mol_type = other DNA
tgccgcagtgaccttgatgccacccttgcgctccgtaaccatttgaattcagctaaacaatcaatgattcgatcc

SEQ ID NO: 444019 - DNA, 75 bp, synthetic construct
  source 1..75: mol_type = other DNA
gcagtagatttgaaagcgctgggtgagttcaccattacgctggactgcgacgtgctccaggctgatggcggcacc

SEQ ID NO: 444020 - DNA, 75 bp, synthetic construct
  source 1..75: mol_type = other DNA
cgcactgcttctatcaccggtgcttgtgttgcactagccgatgccctgaataaactggttgaaaatggcaagctg

SEQ ID NO: 444021 - DNA, 75 bp, synthetic construct
  source 1..75: mol_type = other DNA
caggggacggcagaaggcgaaccgttcacccacgaagaattactcaccttgttggctctggcccgaggggaatcg

SEQ ID NO: 444022 - DNA, 75 bp, synthetic construct
  source 1..75: mol_type = other DNA
tcgttgcccggcaacatagtgtagcagccagccagttatttctctggcgtaagcaataccaggaaggaagtctta

SEQ ID NO: 444023 - DNA, 75 bp, synthetic construct
  source 1..75: mol_type = other DNA
tattgaagaaggtgtgccgcgcttcctgaaaggacagggacaaggctggatcaccgcagaatacggtatgctgcc

SEQ ID NO: 444024 - DNA, 75 bp, synthetic construct
  source 1..75: mol_type = other DNA
cccgaagcttataaacattataaaattaacatcatatcgttatcagaaattgaagcaagtgaggatatattaata

SEQ ID NO: 444025 - DNA, 75 bp, synthetic construct
  source 1..75: mol_type = other DNA
ttccgcattcaggatatcggcgactccgtctccggcacactgcacgtccgcgttgaagaacagaatggtcaggtg

SEQ ID NO: 444026 - DNA, 75 bp, synthetic construct
  source 1..75: mol_type = other DNA
aaacgataaaaccactgtaatcgcgctgcgcgaaatcgaagaaggtttgatcaacaaccagatcctcgacgttcg

SEQ ID NO: 444027 - DNA, 75 bp, synthetic construct
  source 1..75: mol_type = other DNA
tatctaaaattcagaaatgttatcaccggggcctttttagatactccaactaaaagttatgatttttttggagat

SEQ ID NO: 444028 - DNA, 75 bp, synthetic construct
  source 1..75: mol_type = other DNA
gcctgttggttcgcgatgggattgcttggcatcacaatggcggacattaccgccatctggagcaatattgagtcc

SEQ ID NO: 444029 - DNA, 75 bp, synthetic construct
  source 1..75: mol_type = other DNA
gattgccatttggtggctatcagtagataattatttcggatatccgttatctgaaaataatatctataaaaaagg

SEQ ID NO: 444030 - DNA, 75 bp, synthetic construct
  source 1..75: mol_type = other DNA
ccggtgcatctgctgccttatctcgcctgggcgttttccgttgaccgctgggatcgcaactggccggaagagaca

SEQ ID NO: 444031 - DNA, 75 bp, synthetic construct
  source 1..75: mol_type = other DNA
gccccactaatcagcattgagcgttttgtgtggttggttgggtatctaaataatcggtggggtactgatcaggat

SEQ ID NO: 444032 - DNA, 75 bp, synthetic construct
  source 1..75: mol_type = other DNA
caaggtcgccccgctaatcagtattgagcgttttgtgtggttggtggggtatctgaataaccgctggggaacaga

SEQ ID NO: 444033 - DNA, 75 bp, synthetic construct
  source 1..75: mol_type = other DNA
agctgttgagcagcctggaacagattgtttttaaagatgaaacgcagaagattactctgacgcatagaacaacgt

SEQ ID NO: 444034 - DNA, 75 bp, synthetic construct
  source 1..75: mol_type = other DNA
tatgagtttcaatacagaagggatgtatcgtggaactatcggcaacgatggtaaagctatcgtatcaatttatga

SEQ ID NO: 444035 - DNA, 75 bp, synthetic construct
  source 1..75: mol_type = other DNA
attaatggtagtggtggtgtcattgttctagataagaatggtaattatactatgagtttcaatacagaagggatg

SEQ ID NO: 444036 - DNA, 75 bp, synthetic construct
  source 1..75: mol_type = other DNA
ataaacaaaagaccatttccaaaagagcggtcaatgcaaacaacaagaatcttgaatctgttttctgggagaatt

SEQ ID NO: 444037 - DNA, 75 bp, synthetic construct
  source 1..75: mol_type = other DNA
ttggtggcgtcggactgactcaatcactggctctggatctggcggagtacggcattacggtgcattcactaatgc

SEQ ID NO: 444038 - DNA, 75 bp, synthetic construct
  source 1..75: mol_type = other DNA
gatgaaatctttggtcgcgtggatttactggtctacagcgccggaattgcaaaagcagcctttatcagcgatttc

SEQ ID NO: 444039 - DNA, 75 bp, synthetic construct
  source 1..75: mol_type = other DNA
cttccaaagaaagatgtgcggtagagttcgccacacgtaaaaaatccaagactcaacgaaagaaaagcaaagccc

SEQ ID NO: 444040 - DNA, 75 bp, synthetic construct
  source 1..75: mol_type = other DNA
actggcgttggatcttgcggagtacggcattacggtgcattcactgatgctcggtaacttgctgaaatcacctat

SEQ ID NO: 444041 - DNA, 75 bp, synthetic construct
  source 1..75: mol_type = other DNA
tactggtctacagcgccggaattgctaaagcagcgtttatcagcgatttccaactgggggattttgaccgctcgc

SEQ ID NO: 444042 - DNA, 75 bp, synthetic construct
  source 1..75: mol_type = other DNA
gtgctgatgccaccagcgagcagagcgtactggcactctctcgtggggtagatgagatctttggtcgtgtggatt

SEQ ID NO: 444043 - DNA, 75 bp, synthetic construct
  source 1..75: mol_type = other DNA
aaacgataaaaccacagtaattgcgcttcgcgaaatcgaagaaggtctgattaacaatcagatcctcgatgctcg

SEQ ID NO: 444044 - DNA, 75 bp, synthetic construct
  source 1..75: mol_type = other DNA
gtgttttgttattcgatgctaacggagaaggctggcttattggctggcgttctctctggtacacctggggacaaa

SEQ ID NO: 444045 - DNA, 75 bp, synthetic construct
  source 1..75: mol_type = other DNA
aactctgttgctcccgatgatagataccgccgagcaggcgcggcaggtggtgtctgcgatgcgctatccacctca

SEQ ID NO: 444046 - DNA, 75 bp, synthetic construct
  source 1..75: mol_type = other DNA
ctacagtgatgccctggataagcgactggcgatatttaaatcaggcaaaaatgagccacgcataaaaggtagtta

SEQ ID NO: 444047 - DNA, 75 bp, synthetic construct
  source 1..75: mol_type = other DNA
gcgcacggaagcccttgcaagacagcttaacgataccgccagcgctcaggccgaacgacttcaccccattaacga

SEQ ID NO: 444048 - DNA, 75 bp, synthetic construct
  source 1..75: mol_type = other DNA
gctttcttgatgatggtctgaaaacggccgctgccggcgacggttattttcagcttgtcgccgatccggaggcca

SEQ ID NO: 444049 - DNA, 75 bp, synthetic construct
  source 1..75: mol_type = other DNA
gtcgccagatgctgatgctaggtaaacgtctgacggcacatgaagcccaggcggcgaatttaattgatgaagtag

SEQ ID NO: 444050 - DNA, 75 bp, synthetic construct
  source 1..75: mol_type = other DNA
cgcatattaagcaactgattctggcactggaaaataaacatgccgattacccgcaccagctactggccggattaa

SEQ ID NO: 444051 - DNA, 75 bp, synthetic construct
  source 1..75: mol_type = other DNA
ctttacagcttttgcgtgatgacgatgaaacaagatcgccaaattcgtcggttgaagaaacctcctccttcagag

SEQ ID NO: 444052 - DNA, 75 bp, synthetic construct
  source 1..75: mol_type = other DNA
aacaagtcctggatattggcgcgcaaactctactgatcccgatggtcgatactgccgatcaggcacgtcaggtgg

SEQ ID NO: 444053 - DNA, 75 bp, synthetic construct
  source 1..75: mol_type = other DNA
ttaaacgcggtaatgatgtttttaatcgcctacgcaatttaccgcaattaacggttgcgaatctaaacggtcaca

SEQ ID NO: 444054 - DNA, 75 bp, synthetic construct
  source 1..75: mol_type = other DNA
ttagtcgaattaacggcaaccggcgataaattcttttgtgcgggcggcgatattaaatcgtggtcagcctattcg

SEQ ID NO: 444055 - DNA, 75 bp, synthetic construct
  source 1..75: mol_type = other DNA
tgttgcccccggcgacagcgtgcagggctggcaactgttgcaactggacggcagtcacgccactttccgtaaagg

SEQ ID NO: 444056 - DNA, 75 bp, synthetic construct
  source 1..75: mol_type = other DNA
ccgaaggcaccgtggagatttaacaatcgtgccttcaggttttcctatttgaggatgcccggcgcgtcagtattt

SEQ ID NO: 444057 - DNA, 75 bp, synthetic construct
  source 1..75: mol_type = other DNA
ccacggttcgaaagatatgccagagcgcaacatcgtagaagacattaagttcgcccaggaaattatcaataaaaa

SEQ ID NO: 444058 - DNA, 75 bp, synthetic construct
  source 1..75: mol_type = other DNA
cgaccagtacgcgaagaagatgttatcgctatccgcaataaagccgctcgcgctttacaggctgtctttgccggt

SEQ ID NO: 444059 - DNA, 75 bp, synthetic construct
  source 1..75: mol_type = other DNA
gcaaccatgcacaaggggtttcgctttcctgtgcgatgctggggattgatggtaaagtcgtgatgccgaaaggcg

SEQ ID NO: 444060 - DNA, 75 bp, synthetic construct
  source 1..75: mol_type = other DNA
ttgctattgatgacatcattgaagcaaaacaacgactggctgggcgaatttataaaacaggcatgcctcgctcca

SEQ ID NO: 444061 - DNA, 75 bp, synthetic construct
  source 1..75: mol_type = other DNA
atgcagcgtacgggttcatttaaaattcgtggcgcatttaataaattaagttcactgactgatgcggaaaaacgt

SEQ ID NO: 444062 - DNA, 75 bp, synthetic construct
  source 1..75: mol_type = other DNA
ggatctacgtggatgggcaacaaacgaacacaccgcccggcaactacacactgaccctgaccgggggttactggg

SEQ ID NO: 444063 - DNA, 75 bp, synthetic construct
  source 1..75: mol_type = other DNA
gggtcaaagttcagggggaccagacactcacgccgactggtaattacactttaacactgactggcggttactgga

SEQ ID NO: 444064 - DNA, 75 bp, synthetic construct
  source 1..75: mol_type = other DNA
cgcttccgggggcaatcgccttactcaatcatttgaataaagcaggtattccgtgggccattgtgacttctggct

SEQ ID NO: 444065 - DNA, 75 bp, synthetic construct
  source 1..75: mol_type = other DNA
ggaccggctacgggttatcgcctgcaaggggaacgctgggaagaaatcaaaaatatccccggcgcacttgatccc

SEQ ID NO: 444066 - DNA, 75 bp, synthetic construct
  source 1..75: mol_type = other DNA
ccacggttcgaaagatatgcctgagcgcaatattgtggaagacatcaagttcgcccaggagattatcaataaaaa

SEQ ID NO: 444067 - DNA, 75 bp, synthetic construct
  source 1..75: mol_type = other DNA
cccgccggaccccgtctcaacaggctcatgtcaccaatgttaaagataaccctgtacaaatcgctgctgatgctg

SEQ ID NO: 444068 - DNA, 75 bp, synthetic construct
  source 1..75: mol_type = other DNA
cagcggttggataccgtcacatgaatgtactggacgatattcttacgccactgcgaatttatgatgcaagtgcgc

SEQ ID NO: 444069 - DNA, 75 bp, synthetic construct
  source 1..75: mol_type = other DNA
atgcaagaaaatcaaaagaatacgaagaaagagatatacaacctgaacaaattacaaaaacgtctgcgtcgtaac

SEQ ID NO: 444070 - DNA, 75 bp, synthetic construct
  source 1..75: mol_type = other DNA
attacaaaaacgtctgcgtcgtaacgtgggcgaagccattgctgacttcaatatgattgaagaaggcgatcgcat

SEQ ID NO: 444071 - DNA, 75 bp, synthetic construct
  source 1..75: mol_type = other DNA
tcacacactccctctgatttcgtgtggtcatcaaaagatagttccttttgccgcgttaataaaagctgatgaatg

SEQ ID NO: 444072 - DNA, 75 bp, synthetic construct
  source 1..75: mol_type = other DNA
tctggttttgcagtaacggcatttttaaggattaaagagtgggatattgcaaccaacatacttaatcgcgagggg

SEQ ID NO: 444073 - DNA, 75 bp, synthetic construct
  source 1..75: mol_type = other DNA
atttttgcctttaatggctgtgagcgcagattcaaacaacctgtaagtgaagataactggcaacaggaagtatca

SEQ ID NO: 444074 - DNA, 75 bp, synthetic construct
  source 1..75: mol_type = other DNA
tgattcgtccgctggcctactgccgcgagaaagatattcagcgctttgccgatgcaaaagcgttcccgattattc

SEQ ID NO: 444075 - DNA, 75 bp, synthetic construct
  source 1..75: mol_type = other DNA
tggcttcagtttcccggtcattacccgccagatcgccaacatttactgtgcatgggggtgtggcgaaccaacacc

SEQ ID NO: 444076 - DNA, 75 bp, synthetic construct
  source 1..75: mol_type = other DNA
gacggctatcgttaaccgcttgctttggatgcaaaaccattacccgcttacaggcgaagatgtcgttgcccaaaa

SEQ ID NO: 444077 - DNA, 75 bp, synthetic construct
  source 1..75: mol_type = other DNA
ttatcgacctgcgaaccaacattgatccgcacggtactgcgcaggcattaatgcaggcggatttgcaacaagatc

SEQ ID NO: 444078 - DNA, 75 bp, synthetic construct
  source 1..75: mol_type = other DNA
gatgtagtggaagagtaccagcaatatcgcgaaagcgaagcctggcagcgtgatgcggctttctgggcggatcaa

SEQ ID NO: 444079 - DNA, 75 bp, synthetic construct
  source 1..75: mol_type = other DNA
agcttaaaattcgcgggcagcgtattgagctgggtgaaatcgatcgcgtgatgcaggcactgccggatgtcgggc

SEQ ID NO: 444080 - DNA, 75 bp, synthetic construct
  source 1..75: mol_type = other DNA
cgctggatacgggttatccggacgatcgcctgaagatgatgctggaagatgcgcgcccgtcgctgttaatcacca

SEQ ID NO: 444081 - DNA, 75 bp, synthetic construct
  source 1..75: mol_type = other DNA
aactaatatacttaaccgtgagggaatttttgcctttaatggctgtgagcgcagattcaaacaacctgtaagtga

SEQ ID NO: 444082 - DNA, 75 bp, synthetic construct
  source 1..75: mol_type = other DNA
ctgccgtggacgctgaaatcgcacagtgaagatgccgatggcgtagcgctgacttttgaactgacacaaagcgac

SEQ ID NO: 444083 - DNA, 75 bp, synthetic construct
  source 1..75: mol_type = other DNA
gcctgcgcacggttttgcccgcaacctgccgtggacgctgaaatcacatcatgaagatgctgatggcgtagcgct

SEQ ID NO: 444084 - DNA, 75 bp, synthetic construct
  source 1..75: mol_type = other DNA
gacatcagtatccggaaaattaaaagaaaaccaggaaggaaagaagggagtattcatagtaaaaatatcagacag

SEQ ID NO: 444085 - DNA, 75 bp, synthetic construct
  source 1..75: mol_type = other DNA
tactctcctgctccagcaacaggcagccgccaggccgctccgtggccgaacgcacagccaggctaccagaaacag

SEQ ID NO: 444086 - DNA, 75 bp, synthetic construct
  source 1..75: mol_type = other DNA
cgcgacggcaacatttcacttttagccctggcggtagcggaacgctggctgcgtcaggtgcaactgacgccgggg

SEQ ID NO: 444087 - DNA, 75 bp, synthetic construct
  source 1..75: mol_type = other DNA
cgtgggtaagacttgtgaaattgatcttgaagcgcacggcgaatttgaaaccacctctgccctgcatacctactt

SEQ ID NO: 444088 - DNA, 75 bp, synthetic construct
  source 1..75: mol_type = other DNA
gttaaccgaaaagcaaaagcaacaaccgctgtcatttgatgagatgttcattgatattggcgcgaacagccgcga

SEQ ID NO: 444089 - DNA, 75 bp, synthetic construct
  source 1..75: mol_type = other DNA
ccgcattaataaaagctgatgaatgcatcatttcaaaaattgcttcatattctggttttgctgtaacagcctttt

SEQ ID NO: 444090 - DNA, 75 bp, synthetic construct
  source 1..75: mol_type = other DNA
gtcattcaatagcttattatgatattcacacactccctctgatttcgtgtggacatcaaaagatagttccttttg

SEQ ID NO: 444091 - DNA, 75 bp, synthetic construct
  source 1..75: mol_type = other DNA
tgagaatgtgattatacggcagaatacgaccattggcgaaaaggaatctgacagcagagagaattatatcgttat

SEQ ID NO: 444092 - DNA, 75 bp, synthetic construct
  source 1..75: mol_type = other DNA
gtgctgccccaccattcaggtgtcgtcattcacggaaacgtaaagatcggtgagaatgtgattatacggcagaat

SEQ ID NO: 444093 - DNA, 75 bp, synthetic construct
  source 1..75: mol_type = other DNA
tggtgggcgctacaacgtgatgggcggcgggcgtccggttgtcgcgctgtgtctgccaactcgttatctgcacgc

SEQ ID NO: 444094 - DNA, 75 bp, synthetic construct
  source 1..75: mol_type = other DNA
agcgcatctggcaacgttacttgaacaacaaccgcacggcccttattacctgctggggtattcccttggcggtac

SEQ ID NO: 444095 - DNA, 75 bp, synthetic construct
  source 1..75: mol_type = other DNA
tgcgcggcagttttgccggaacggcgcaggtgttccaggagacgatgaactcgcaggtgatcctgattatcgccg

SEQ ID NO: 444096 - DNA, 75 bp, synthetic construct
  source 1..75: mol_type = other DNA
ggtggcggtgttcctgccgctgctgttgatgggcggattgccgggccgactgttacgcgagtttgccgtgacgct

SEQ ID NO: 444097 - DNA, 75 bp, synthetic construct
  source 1..75: mol_type = other DNA
ggctgctctatattggccttatcaaaattgacggtgaagtcgtctggcaggccggaaatcaggaaacagaggcag

SEQ ID NO: 444098 - DNA, 75 bp, synthetic construct
  source 1..75: mol_type = other DNA
cgctggcagatccagaccaacgatgagctgaaaactgccgccgaataccagccgttgattattcattacaacaac

SEQ ID NO: 444099 - DNA, 75 bp, synthetic construct
  source 1..75: mol_type = other DNA
atcgccacggtgtatatcgtgctgggtatcctttacgagagttacgtacatccgctgacgattctctccaccctg

SEQ ID NO: 444100 - DNA, 75 bp, synthetic construct
  source 1..75: mol_type = other DNA
tcactattgtcggcggtctggtaatgagtcagctcctgacgctatataccacgccggtggtgtatctttttttcg

SEQ ID NO: 444101 - DNA, 75 bp, synthetic construct
  source 1..75: mol_type = other DNA
aaaggggaaagcctcaagggaaacggtaagccgcgtcctgctgatgctgcgaataaccggctggctcagcctctg

SEQ ID NO: 444102 - DNA, 75 bp, synthetic construct
  source 1..75: mol_type = other DNA
gccattatcgcagccatcttgcgctgatcgaatcgcgtctggacagcccacagacgcccagccagatggcgaagc

SEQ ID NO: 444103 - DNA, 75 bp, synthetic construct
  source 1..75: mol_type = other DNA
agcacgatgagcccctgacgttcagcgatgcggaaatgctcgacccccgtttccttgatacggtggcggatgcct

SEQ ID NO: 444104 - DNA, 75 bp, synthetic construct
  source 1..75: mol_type = other DNA
ctattggtattgatatcgacccacaggccattcaggccagccgcgacaatgctgaacgtaatggtgtttctgatc

SEQ ID NO: 444105 - DNA, 75 bp, synthetic construct
  source 1..75: mol_type = other DNA
aattgacggtgaagaggtttaccgggcagagcgcgaagctgattcacagccagcgccagctacaccaccaacaga

SEQ ID NO: 444106 - DNA, 75 bp, synthetic construct
  source 1..75: mol_type = other DNA
tgtacaccagcggtctgggctacctcaaccggatccgggaagtgaccccaaaaaaaggcgaaccgttcctgtgtt

SEQ ID NO: 444107 - DNA, 75 bp, synthetic construct
  source 1..75: mol_type = other DNA
cgcggtaagttgcaggacttcatgaaaattatccgtgacgatccggcggtggataatgtcaccggctttaccggc

SEQ ID NO: 444108 - DNA, 75 bp, synthetic construct
  source 1..75: mol_type = other DNA
agctaaaaattcgcgggcagcgtattgaactgggcgaaatcgatcgcgtgatgcaggcactgccggatgtcgaac

SEQ ID NO: 444109 - DNA, 75 bp, synthetic construct
  source 1..75: mol_type = other DNA
ccggggcaggtgatggtcgcgtcaaccgtcgccaaactggcaacgattattgatgctgaagaagacagcacccgg

SEQ ID NO: 444110 - DNA, 75 bp, synthetic construct
  source 1..75: mol_type = other DNA
tttgatgtctcggtgtgggagtttttctggccgtttattgccggggctaaactggtgatggctgaaccggaagcg

SEQ ID NO: 444111 - DNA, 75 bp, synthetic construct
  source 1..75: mol_type = other DNA
ctggatgaagtctgcgaagcgcatctggcaacgttacttgagcaacaaccgcacggcccttattacctgctgggg

SEQ ID NO: 444112 - DNA, 75 bp, synthetic construct
  source 1..75: mol_type = other DNA
cagttgcgcgaaacattgccaccgcatatggtgcccgtggttctgctgcaacttccgcagttgccgcttagcgcc

SEQ ID NO: 444113 - DNA, 75 bp, synthetic construct
  source 1..75: mol_type = other DNA
tgtttaccaccattgaaggcaactacgctgatgctgtgcgcctgctgacgactgctcatagcgtaccgtttgacg

SEQ ID NO: 444114 - DNA, 75 bp, synthetic construct
  source 1..75: mol_type = other DNA
acgctgaacgcctgaaaatgctgatcgcccagttcgccgcgaccccggcgctgttgtgtggtgatgtcgatatta

SEQ ID NO: 444115 - DNA, 75 bp, synthetic construct
  source 1..75: mol_type = other DNA
gtgaagttttttgccctcttcatttaccgcccggtggcgacgattttactgtcggttgccattaccctgtgcggc

SEQ ID NO: 444116 - DNA, 75 bp, synthetic construct
  source 1..75: mol_type = other DNA
tttggtcgcatgttggtagccctgcaacaaggctatggcaagtcgctgaaatgggtgctcaatcatacccgtctg

SEQ ID NO: 444117 - DNA, 75 bp, synthetic construct
  source 1..75: mol_type = other DNA
gtatgcgcagctggcgcagatcaacgccactcaggttgagattccagaaaccacgctgagcgcgctggtggcaga

SEQ ID NO: 444118 - DNA, 75 bp, synthetic construct
  source 1..75: mol_type = other DNA
ttaccggctgatttatgccgcgaatggcaacagttaaccggcgtgccgttgcataatctatatggcccgacggaa

SEQ ID NO: 444119 - DNA, 75 bp, synthetic construct
  source 1..75: mol_type = other DNA
cgctggatacgggctatccggacgatcgcctgaaaatgatgctggaagatgcgcgtccgtcgctgttaatcacca

SEQ ID NO: 444120 - DNA, 75 bp, synthetic construct
  source 1..75: mol_type = other DNA
ctgcggacatcactcggcattcagctcgctcctgcgctggtggcctgtagtgcctggctgagcgtcaacggcggc

SEQ ID NO: 444121 - DNA, 75 bp, synthetic construct
  source 1..75: mol_type = other DNA
cagttcgggagaattacccacggcactgcggacatcactcggcattcagctcgctcctgcgctggtggcctgtag

SEQ ID NO: 444122 - DNA, 75 bp, synthetic construct
  source 1..75: mol_type = other DNA
atgcgagacttaaccctcaaattcataaacaaggccgacttttcggcctttatggatagcattggttatgaagat

SEQ ID NO: 444123 - DNA, 75 bp, synthetic construct
  source 1..75: mol_type = other DNA
cggttctgaagtggttaacgggggtgatctggcgtttgatcgcgaagagatcccactacaaccggcgggctggca

SEQ ID NO: 444124 - DNA, 75 bp, synthetic construct
  source 1..75: mol_type = other DNA
gcagaagtgcgccatccggtgatgagcagttttgttagtttgtttccggcaacgacgatgctggtagcaattggt

SEQ ID NO: 444125 - DNA, 75 bp, synthetic construct
  source 1..75: mol_type = other DNA
atctggggattattgactagcgcatttattacccgactcatacgctttccgcatagcgtgctggcggaagttcgc

SEQ ID NO: 444126 - DNA, 75 bp, synthetic construct
  source 1..75: mol_type = other DNA
ggttgttgaccagaactacacagtggcagatgccaccaaagctatggatgtcggcctttccacgatgacaagatg

SEQ ID NO: 444127 - DNA, 75 bp, synthetic construct
  source 1..75: mol_type = other DNA
cgataacaccagaacaaatcgaaatacgtgagttgaggaaaaagctacaacgtattgaaatggagaatgaaatat

SEQ ID NO: 444128 - DNA, 75 bp, synthetic construct
  source 1..75: mol_type = other DNA
tttttatcgcaatggaaattgcctatctgtgtgcagcgagggtttccgatgtgttatcactgaaatgggagcaga

SEQ ID NO: 444129 - DNA, 75 bp, synthetic construct
  source 1..75: mol_type = other DNA
aagatggatattttgtaaacgtacgcatcattaatgatacgcaaatatcgtcattattcgatgaatacgcggttg

SEQ ID NO: 444130 - DNA, 75 bp, synthetic construct
  source 1..75: mol_type = other DNA
gaaacggtggtctcaccacaagccgttttcgatgcgccacaactcaccactgtcgccaaagaatggccgctgttt

SEQ ID NO: 444131 - DNA, 75 bp, synthetic construct
  source 1..75: mol_type = other DNA
gcctctatacccgcttatggcatgacagcgtcagcagtactgcgctccatcgccagcacaacatgaaggaggaaa

SEQ ID NO: 444132 - DNA, 75 bp, synthetic construct
  source 1..75: mol_type = other DNA
atgcgagacttaaccctcaaatttgccgacagagccgacttttcggcctttatggagagcactggctattatgac

SEQ ID NO: 444133 - DNA, 75 bp, synthetic construct
  source 1..75: mol_type = other DNA
aactgcgcatcccgttggttggggtaggcacgcgcgacgcctacctagccatccgctccgatgaccagttggaaa

SEQ ID NO: 444134 - DNA, 75 bp, synthetic construct
  source 1..75: mol_type = other DNA
tgaaatcaaatccggtgcaaaaacgtccgtctggctgttcctgctgggcccgtctggctgttcctgctgggcgta

SEQ ID NO: 444135 - DNA, 75 bp, synthetic construct
  source 1..75: mol_type = other DNA
tgtcaacagcccgagtatgggactggttgagaagccgctgatgaacaccactaacgcaatcctgatcatcatgct

SEQ ID NO: 444136 - DNA, 75 bp, synthetic construct
  source 1..75: mol_type = other DNA
gtggccgcgtgtggggggatatcccggacaacagcgtccagccgggagccggaaatggcgaaccggtcacggcag

SEQ ID NO: 444137 - DNA, 75 bp, synthetic construct
  source 1..75: mol_type = other DNA
ggtaaacaaccctattcaccaaatgagtttttccagctgctgctgatccgcaactggcaacagtgggagaaagaa

SEQ ID NO: 444138 - DNA, 75 bp, synthetic construct
  source 1..75: mol_type = other DNA
gctgatggcggcggccatcgtcgccgtggagagcggcgaggaagcgatcaaccatcgcacactcagcatggcctg

SEQ ID NO: 444139 - DNA, 75 bp, synthetic construct
  source 1..75: mol_type = other DNA
gacagggccgacttttcggcctttatggacaggactggctattatgatgacgagtcgatgcaggatgatattctt

SEQ ID NO: 444140 - DNA, 75 bp, synthetic construct
  source 1..75: mol_type = other DNA
gacagggccgacttttcggcctttatggatagaattggctattatgatgacgagtcgatgcaggatgatattctt

SEQ ID NO: 444141 - DNA, 75 bp, synthetic construct
  source 1..75: mol_type = other DNA
gacagggccgacttttcggcctttatggaaagcaatggctattatgatgacgagtcgatgcaggatgatattctt

SEQ ID NO: 444142 - DNA, 75 bp, synthetic construct
  source 1..75: mol_type = other DNA
tctgctgtactctcaggctgcaaccgcaaaagcactgatgccgatggccctggcactgaacgtttcaccgctgac

SEQ ID NO: 444143 - DNA, 75 bp, synthetic construct
  source 1..75: mol_type = other DNA
tcatcttcttctttgcttctgctctgctgtactctcaggctgcaaccgcaaaagcactgatgccgatggctctgg

SEQ ID NO: 444144 - DNA, 75 bp, synthetic construct
  source 1..75: mol_type = other DNA
gacagggccgacttttcggcctttatggagagtattggctattatgatgacgagtcgatgcaggatgatattctt

SEQ ID NO: 444145 - DNA, 75 bp, synthetic construct
  source 1..75: mol_type = other DNA
gaaaaagcaaaacagttaccaacatccgcctatgtaatcagtaatcaatacggcaaccgatatatgtacaaaggc

SEQ ID NO: 444146 - DNA, 75 bp, synthetic construct
  source 1..75: mol_type = other DNA
ggatcgttttcagccgaccaccattgtgaacaccgatgatgccatctttggttccggttattttgtggttggtaa

SEQ ID NO: 444147 - DNA, 75 bp, synthetic construct
  source 1..75: mol_type = other DNA
aggctcagcgttacccgttggtgtacctgttccgtggccttcagccacaccgccaacaggctggctgaaatgcaa

SEQ ID NO: 444148 - DNA, 75 bp, synthetic construct
  source 1..75: mol_type = other DNA
gagaaggctctgcattacctgttggcgtgcctgttccgtggccttcagaaacgccaccaacgggatggcttaagt

SEQ ID NO: 444149 - DNA, 75 bp, synthetic construct
  source 1..75: mol_type = other DNA
caaaagtggaacagtactcaactgacaggaaaagtacgcatcattcagtatatcgccgggaggaaatcggcaaaa

SEQ ID NO: 444150 - DNA, 75 bp, synthetic construct
  source 1..75: mol_type = other DNA
aaattcagtgggcaaaggacggcagcctgacgccggaagaggtagatcatgtcattgcgctggcgcagaagctga

SEQ ID NO: 444151 - DNA, 75 bp, synthetic construct
  source 1..75: mol_type = other DNA
gcaatggacagggacgcgttgcctggcacttgcaggagcagagttcaaccattctggtgctgaataaaaccgggc

SEQ ID NO: 444152 - DNA, 75 bp, synthetic construct
  source 1..75: mol_type = other DNA
tctggttcatatctagtttacttcatgacggtgttggtagctgttttcgcagcgtatatcgcgctccagaagcag

SEQ ID NO: 444153 - DNA, 75 bp, synthetic construct
  source 1..75: mol_type = other DNA
ggaatggtgccaggctacgctgcagctggcgcgttgatctacgttggcgtgttgatgacctcaagtcttgctcgc

SEQ ID NO: 444154 - DNA, 75 bp, synthetic construct
  source 1..75: mol_type = other DNA
gaagggcgcgatatggacgtgacggtaaaaccggcggcgcatcctgtggggacgacgctggaggtgctggatctg

SEQ ID NO: 444155 - DNA, 75 bp, synthetic construct
  source 1..75: mol_type = other DNA
gtcggcggtcgcacggggctgactgcggttgttgttggcgttatgttcctgctggttatgttcttctcaccgctg

SEQ ID NO: 444156 - DNA, 75 bp, synthetic construct
  source 1..75: mol_type = other DNA
cgaagttaggacatgagcgcgcggctgaactgaaggcatcatgcggtgctgtcgacgtgcgcagcctggcgcaac

SEQ ID NO: 444157 - DNA, 75 bp, synthetic construct
  source 1..75: mol_type = other DNA
cgcaaagtaaagcgatccaactggcgacccattccgattacagccacaccggtatgctggtgatacgcaacaaac

SEQ ID NO: 444158 - DNA, 75 bp, synthetic construct
  source 1..75: mol_type = other DNA
cgataacaccagaacaaatcgaaatacgtgagctgaggaaaaagctacaacgcattgaaatggagaatgaatcta

SEQ ID NO: 444159 - DNA, 75 bp, synthetic construct
  source 1..75: mol_type = other DNA
aagtaaaaccactcgatccttcaagaaatttagaatggtgtgcgtctgaagggtatcgctcagttgtcgtttatt

SEQ ID NO: 444160 - DNA, 75 bp, synthetic construct
  source 1..75: mol_type = other DNA
gaggattatatccggggccagacggtcatcgaagccaagctggacgcgctctacaacaaactggaactggtacag

SEQ ID NO: 444161 - DNA, 75 bp, synthetic construct
  source 1..75: mol_type = other DNA
agtttaaacgcgaatccgctcaactggtggttgaccagatatacacggtggcagatgccgccaaagctatggatg

SEQ ID NO: 444162 - DNA, 75 bp, synthetic construct
  source 1..75: mol_type = other DNA
agtaatcaatacggcaaccgatatatgtacaaaggctttaacgaaatgtgggtagaagcaagaaatcgcgcaggc

SEQ ID NO: 444163 - DNA, 75 bp, synthetic construct
  source 1..75: mol_type = other DNA
gaagggcaagtgctaatctatgacaggaaggttaaagtttcaccaacacttgatgtcccgttacctgaaaatatt

SEQ ID NO: 444164 - DNA, 75 bp, synthetic construct
  source 1..75: mol_type = other DNA
atatgctgaaggaaagaaatattgaaacggttcttgaatttagagctgaaaatcgatcagcgaaaactgcacagt

SEQ ID NO: 444165 - DNA, 75 bp, synthetic construct
  source 1..75: mol_type = other DNA
agtttaaacgcgaatccgctcaactggtagttgaccagatatacacagtggcagatgccgccaaagctatggatg

SEQ ID NO: 444166 - DNA, 75 bp, synthetic construct
  source 1..75: mol_type = other DNA
tctggcgtttagcaccgaggagttagcgcagattgaccagcatatcgccgatggcgagctgaatctgtggcaagc

SEQ ID NO: 444167 - DNA, 75 bp, synthetic construct
  source 1..75: mol_type = other DNA
acggatgcatcgtgaagggaataaagttcgtggtctgacgccgaaaatgcttaccgaagccaacctcaacagcct

SEQ ID NO: 444168 - DNA, 75 bp, synthetic construct
  source 1..75: mol_type = other DNA
agtttaaacgcgaatccgctcaactggtggttgaccagaaatacactgtggcagatgccgccaaagctatggatg

SEQ ID NO: 444169 - DNA, 75 bp, synthetic construct
  source 1..75: mol_type = other DNA
agtttaaacgcgaatccgctcaactggtcgttgaccagatatacaccgtggcagatgccgccaaagctatggatg

SEQ ID NO: 444170 - DNA, 75 bp, synthetic construct
  source 1..75: mol_type = other DNA
agtttaaacgcgaatccgctcaactggtagttgaccagagatacactgtggcagatgccgccaaagctatggatg

SEQ ID NO: 444171 - DNA, 75 bp, synthetic construct
  source 1..75: mol_type = other DNA
gtcggtgcctttattgttgatatttcaaacagtatcttaattaaaatatttattgaaattggtacatactttacc

SEQ ID NO: 444172 - DNA, 75 bp, synthetic construct
  source 1..75: mol_type = other DNA
gtgcgcaaacgaaacagtcatcttgtcaggtggccgcgtggcatttgttgagccggatgttgaacttgggctggt

SEQ ID NO: 444173 - DNA, 75 bp, synthetic construct
  source 1..75: mol_type = other DNA
gaagcttttgagcaaccaagcgtcaaaagaaaaatcaatgcaaatcccgggtcaaatttgggtgcaaatcaacag

SEQ ID NO: 444174 - DNA, 75 bp, synthetic construct
  source 1..75: mol_type = other DNA
gcagactggaggctctgtctgcatcaccggagaacgatttgccacgctcatggtggctgcgtcttttacagagag

SEQ ID NO: 444175 - DNA, 75 bp, synthetic construct
  source 1..75: mol_type = other DNA
atgagtatgccactgctggcccgtgtgcaggcaaatgttccggcctgggcacatgaacagctggctgcatgggat

SEQ ID NO: 444176 - DNA, 75 bp, synthetic construct
  source 1..75: mol_type = other DNA
agcgaaagcgcgacaactctcttcgtgacctctggagaacacctgactggctgttttctgccattcaacgttatc

SEQ ID NO: 444177 - DNA, 75 bp, synthetic construct
  source 1..75: mol_type = other DNA
tgaatactgcgtccgggaccgataatgaactcgctcaatcaatcgcgagcgctatcgtttcacagtcacaagagc

SEQ ID NO: 444178 - DNA, 75 bp, synthetic construct
  source 1..75: mol_type = other DNA
gcaatgacagtgttttcacgattgggagtatttatgacgttcacatcgtttatggcaatgaagcacacacaatga

SEQ ID NO: 444179 - DNA, 75 bp, synthetic construct
  source 1..75: mol_type = other DNA
ccagctggaaaaatatctggagccgatccctaaagcggactgggagcaggtgaaagcgtattactacgccatgta

SEQ ID NO: 444180 - DNA, 75 bp, synthetic construct
  source 1..75: mol_type = other DNA
taacacgctggacgtttatcactacgtgaacgggcgtcgcgttcgcgagattgttgctgctggccgggaaattgt

SEQ ID NO: 444181 - DNA, 75 bp, synthetic construct
  source 1..75: mol_type = other DNA
gcgagattgttgccgctggccgtgaaattgttgttgattcaccagaggttgcagacctcatcgcagctgatcacg

SEQ ID NO: 444182 - DNA, 75 bp, synthetic construct
  source 1..75: mol_type = other DNA
gtttatcactacgtgaacgggcgtcgcgttcgcgagattgttgccgcaggccgtgaaattgttgttgattcaccg

SEQ ID NO: 444183 - DNA, 75 bp, synthetic construct
  source 1..75: mol_type = other DNA
gtcaacgcgccgatgggactttacgctaccgctgcaccgtgggcgtaaaagaaggtgggaaatatatctaccggg

SEQ ID NO: 444184 - DNA, 75 bp, synthetic construct
  source 1..75: mol_type = other DNA
ggcaaatggtttaactacttcttcgcgctctattggtacaactgtgctgaataatgacgcagcgcattataatgt

SEQ ID NO: 444185 - DNA, 75 bp, synthetic construct
  source 1..75: mol_type = other DNA
taccgaactgtatccgaaatctttacataatcgttttgaagaactccaaagagcagaaacaagacctcttgacac

SEQ ID NO: 444186 - DNA, 75 bp, synthetic construct
  source 1..75: mol_type = other DNA
acccggcgaaaagcgctcgtccatatctacttaaacttggtttgattggtaaatcaaaccgtcgtaatcgtagac

SEQ ID NO: 444187 - DNA, 75 bp, synthetic construct
  source 1..75: mol_type = other DNA
tagacgtcatttccgctgccgcactgagtgaacaacagctcgcgaaaatttctgctgcgatggaaaacgtctgtc

SEQ ID NO: 444188 - DNA, 75 bp, synthetic construct
  source 1..75: mol_type = other DNA
gccgcgagtgaggctaccgccgaggtagacgtcatttccgccaccgcgttgagtgaactacagcttatgaaaatt

SEQ ID NO: 444189 - DNA, 75 bp, synthetic construct
  source 1..75: mol_type = other DNA
cccatcagcaagttggacagaaagtaccgctttaccaacgccgccggcaggccactcattagtgacgccctctgt

SEQ ID NO: 444190 - DNA, 75 bp, synthetic construct
  source 1..75: mol_type = other DNA
cataaacagcctttatcaagccgcctctgatgaaaaaagagccattgtggcttttctcttatcagcaaatgccac

SEQ ID NO: 444191 - DNA, 75 bp, synthetic construct
  source 1..75: mol_type = other DNA
tggttctattgacgagctctataataaggcttcgagagaaaaaaaggctatcattgattttgtcctcttagagca

SEQ ID NO: 444192 - DNA, 75 bp, synthetic construct
  source 1..75: mol_type = other DNA
atgctgttcaaagttcagttaccgctggcgatgccgaccattatggcgggcgttaaccagacgctgatgctggcc

SEQ ID NO: 444193 - DNA, 75 bp, synthetic construct
  source 1..75: mol_type = other DNA
gactaaaatccgatggcacaccacgctatcgctgtaatgtgattatcaaagaaaaaggtgttatcacttacaggg

SEQ ID NO: 444194 - DNA, 75 bp, synthetic construct
  source 1..75: mol_type = other DNA
agtaaagacaaacttccagaactatggcgtttcttttctgatgtagttggtccagagcattggggccttaacaaa

SEQ ID NO: 444195 - DNA, 75 bp, synthetic construct
  source 1..75: mol_type = other DNA
aaatgaaggtaggtaactatttgaaaaatcaagaatcaaaacggaaaagccagaatatcaccaagacaggtactt

SEQ ID NO: 444196 - DNA, 75 bp, synthetic construct
  source 1..75: mol_type = other DNA
atgacgcatcatctgtttcattccgtacgttatccgttcggccgaccaacgattgtccgtgaggttgcggtaatt

SEQ ID NO: 444197 - DNA, 75 bp, synthetic construct
  source 1..75: mol_type = other DNA
agagcaattcgcgtctatcccgctacgagaagaaaccattgaggaaaactcacagcaagcggtctttaatgctgt

SEQ ID NO: 444198 - DNA, 75 bp, synthetic construct
  source 1..75: mol_type = other DNA
tattcagaaaacacgccgggcagcaaacaacgccgcagtaaatcttcttaattcccttccgcccggcttcgatgg

SEQ ID NO: 444199 - DNA, 75 bp, synthetic construct
  source 1..75: mol_type = other DNA
gtattggtggtgccgaatggcatgaccgatggtacgaaatataaaaaattgcgcgataaagtcagccgtaaagcg

SEQ ID NO: 444200 - DNA, 75 bp, synthetic construct
  source 1..75: mol_type = other DNA
tcgggtaggctcaccacaagaaaaggtcaatgttcactactattgtggcaaaggcacatttgatgacttccgtct

SEQ ID NO: 444201 - DNA, 75 bp, synthetic construct
  source 1..75: mol_type = other DNA
ctgaagtaggtattaacttgcacatcgggacaaccgatatccaccatctgacactaccctggactcctgctagta

SEQ ID NO: 444202 - DNA, 75 bp, synthetic construct
  source 1..75: mol_type = other DNA
aacagcccgattgatgctttcaacatgctgtctactgtcattccgcaggaagagtggatgcgcatgggtattgtt

SEQ ID NO: 444203 - DNA, 75 bp, synthetic construct
  source 1..75: mol_type = other DNA
ggatattcttgtcgtgttacaggcgaaaaaagtcaggcgcgccagcgccgcgcacgcaccgagttcccacgagga

SEQ ID NO: 444204 - DNA, 75 bp, synthetic construct
  source 1..75: mol_type = other DNA
aacaagacggatattcttgtcgtgttacaggcgaaaaaagtcaggcgcgccagcgccgcgcacgcaccgagttcc

SEQ ID NO: 444205 - DNA, 75 bp, synthetic construct
  source 1..75: mol_type = other DNA
cattgcgatttataacaaacagggtattgactacgtggcgccgttcacgccgaaagcgtatgtgccgccgcagga

SEQ ID NO: 444206 - DNA, 75 bp, synthetic construct
  source 1..75: mol_type = other DNA
tgtattcacaggtgaaaagagtgatgacggtagccgttgttattctggtgtcatcgaatctcattacagcaccga

SEQ ID NO: 444207 - DNA, 75 bp, synthetic construct
  source 1..75: mol_type = other DNA
tcatcgaatctcattacagcaccgctgactggtcgtttattctttctgagtacaaaaactggctgaatgacaagg

SEQ ID NO: 444208 - DNA, 75 bp, synthetic construct
  source 1..75: mol_type = other DNA
atgataacgataataatcggtgtatcgagagttattgattataaaataggggaaatgtctgttgatattccacca

SEQ ID NO: 444209 - DNA, 75 bp, synthetic construct
  source 1..75: mol_type = other DNA
tgcggatgacgctgatgaacgcgccattatgctggcggcaaatccggaagaacgacgcgcaattatggctcgtca

SEQ ID NO: 444210 - DNA, 75 bp, synthetic construct
  source 1..75: mol_type = other DNA
atgcggcagccgtgcctgcccgtcctgcggaaagaaggccacagacctgtggatagcgacacagctgaatcgtct

SEQ ID NO: 444211 - DNA, 75 bp, synthetic construct
  source 1..75: mol_type = other DNA
tatctctcagccaaaaatgatgctggccttgagggcatggaaggtattgccgccgactataacgaaggtgcacgc

SEQ ID NO: 444212 - DNA, 75 bp, synthetic construct
  source 1..75: mol_type = other DNA
aacagtccgattgatgccttcaacatgctgtctactgtcattccgcaggaagagtggatgcgcatgggcatcatt

SEQ ID NO: 444213 - DNA, 75 bp, synthetic construct
  source 1..75: mol_type = other DNA
atgcagtcagaactgcatctggtggtggtgatgttactgagtttgacggtgacgatgtttgttgagtttttccgc

SEQ ID NO: 444214 - DNA, 75 bp, synthetic construct
  source 1..75: mol_type = other DNA
acatggacaagcgcgctggcagaacggttaaaccaacgctttcaggcttatgaaattccgggccttgaagcaaag

SEQ ID NO: 444215 - DNA, 75 bp, synthetic construct
  source 1..75: mol_type = other DNA
gtacctgaccaactcatgcggcagccgtgcctgcccgtcctgcggaaagaaggccacagacctgtggacagcgac

SEQ ID NO: 444216 - DNA, 75 bp, synthetic construct
  source 1..75: mol_type = other DNA
ttggacaaaataattgattcaattagccaggccaccagcattggggcgctgattgaaattgttagtcggttgcat

SEQ ID NO: 444217 - DNA, 75 bp, synthetic construct
  source 1..75: mol_type = other DNA
ttatgatggcgtaataggtcaaaaaatcgggcgagcatcggatatagcgcctgagcggtggatttaccctgatgg

SEQ ID NO: 444218 - DNA, 75 bp, synthetic construct
  source 1..75: mol_type = other DNA
attaagagcggcatcaacaaaaacggacagaaatatacgctttcagcactaagcaaagctaaaaaaagagtgcgt

SEQ ID NO: 444219 - DNA, 75 bp, synthetic construct
  source 1..75: mol_type = other DNA
agaagaacaagattaaggatcaggccgcgaataccggtacaacgaagaagcagaatatcccgtactttgaggata

SEQ ID NO: 444220 - DNA, 75 bp, synthetic construct
  source 1..75: mol_type = other DNA
gctattcgcaatggggtaatgaatgttattgctggtaaacctggtaatgcatggggcggtgggtcagctattaaa

SEQ ID NO: 444221 - DNA, 75 bp, synthetic construct
  source 1..75: mol_type = other DNA
tctggcatgagtttgatggtctgaaatgggttaaggacacgacaaccaaatcctccgcgcttgatgtaagtcgat

SEQ ID NO: 444222 - DNA, 75 bp, synthetic construct
  source 1..75: mol_type = other DNA
aacataccttcggtaatttcctcatacaatcctataatgacaaagttgatggatatctacggcaaaagcgcccct

SEQ ID NO: 444223 - DNA, 75 bp, synthetic construct
  source 1..75: mol_type = other DNA
cgtgcttattatgcgtccagtatagctattatgacatcgcaagggacgtgggttagtgctttagaacgcctagag

SEQ ID NO: 444224 - DNA, 75 bp, synthetic construct
  source 1..75: mol_type = other DNA
gtgccgttcatgcagaagcacgaaacaacgccgactgaatacatcgctaattggtaaaaaaaggccccgcaaatc

SEQ ID NO: 444225 - DNA, 75 bp, synthetic construct
  source 1..75: mol_type = other DNA
atgtttaagctccttatcaccctgattaactaccagaacggcgacgttcgccagatgattcattcctgggaatat

SEQ ID NO: 444226 - DNA, 75 bp, synthetic construct
  source 1..75: mol_type = other DNA
agcgcgacttactaccttcgcgccagcggtgacagtatgtccgacggcagcctttacaatggcgatctgctggtt

SEQ ID NO: 444227 - DNA, 75 bp, synthetic construct
  source 1..75: mol_type = other DNA
attattttttttcatctgcatgtattattgttctttcttcatgacctacatcctgtgttatgttccagttgcagt

SEQ ID NO: 444228 - DNA, 75 bp, synthetic construct
  source 1..75: mol_type = other DNA
aagaacagaaagaccggacacagttcgccctggaatgtatccgatacatcgcaacgcggtcgctgaatgacgcta

SEQ ID NO: 444229 - DNA, 75 bp, synthetic construct
  source 1..75: mol_type = other DNA
atgtgcaataacacccgtccggacgcagccgccgaagcaatcaaaacactgattgatatttctgttatcgcggac

SEQ ID NO: 444230 - DNA, 75 bp, synthetic construct
  source 1..75: mol_type = other DNA
atgtcctgggcatgtcaaaacatgttttctggtcgttacaggccgaggacagtgacgccaacagcctcaacaaca

SEQ ID NO: 444231 - DNA, 75 bp, synthetic construct
  source 1..75: mol_type = other DNA
agacaaaggatgaagcgggaaatgattctgagtcagaggtgacggcagttaaacgcattccctataaccctgacc

SEQ ID NO: 444232 - DNA, 75 bp, synthetic construct
  source 1..75: mol_type = other DNA
tagatccgtttcggacagaagaaccggaacaacctccagtggaggacagaggcaatgataacccctttgcatcgt

SEQ ID NO: 444233 - DNA, 75 bp, synthetic construct
  source 1..75: mol_type = other DNA
cgccctggaatgtatccgatacatcgcaacgcggtcactgaatgacgctaaaaatattcttgttgccgattgtga

SEQ ID NO: 444234 - DNA, 75 bp, synthetic construct
  source 1..75: mol_type = other DNA
gtgaaaaagatgcaatctatcgtactcgcactttccctggttctggtcgctcccatggcagcgcaggctgcggaa

SEQ ID NO: 444235 - DNA, 75 bp, synthetic construct
  source 1..75: mol_type = other DNA
tgaaaatgctgagttcggattccgaactcagtgaaaaacaggggcaaaaaatactgagttcggattccgaaccat

SEQ ID NO: 444236 - DNA, 75 bp, synthetic construct
  source 1..75: mol_type = other DNA
ataagatggcgtggatgatgattcggctgtatgcacagaataatgaaggcgcagttttccccacatatgacgaac

SEQ ID NO: 444237 - DNA, 75 bp, synthetic construct
  source 1..75: mol_type = other DNA
tacgcttcagaatcccgttggctggatgctggctgtgatgaaacgtgcgcgtgaagggaactttaactcgccgga

SEQ ID NO: 444238 - DNA, 75 bp, synthetic construct
  source 1..75: mol_type = other DNA
ctggatccacggctttccccccttgataagatgggctggatgatgatccgcctgtatgcgcagaataatgaaggc

SEQ ID NO: 444239 - DNA, 75 bp, synthetic construct
  source 1..75: mol_type = other DNA
aacgtgcagaacccatttcagcagagcgtctgagcggcattgtggctgggttacgggcctccctgcgcaaccgtt

SEQ ID NO: 444240 - DNA, 75 bp, synthetic construct
  source 1..75: mol_type = other DNA
atggcgttacctgcggaaagcctgattgcgtataccctggaaaaaatgaaacatcgtatggccaccggagcccga

SEQ ID NO: 444241 - DNA, 75 bp, synthetic construct
  source 1..75: mol_type = other DNA
gccaggctggatagcccggagatacgccaatactgcaaacttaaaagcaacgatgcacagtggctggaggaaacg

SEQ ID NO: 444242 - DNA, 75 bp, synthetic construct
  source 1..75: mol_type = other DNA
atgaatatccggcgaaaaaaatcaccatcaacctggctccagctgatctgccaaaagaagggggacgatatgatt

SEQ ID NO: 444243 - DNA, 75 bp, synthetic construct
  source 1..75: mol_type = other DNA
ggagaactggcgcttacaggcgctctgcgtggcgttcccggcgcaatctccagtgcaactgaagctattaagtcg

SEQ ID NO: 444244 - DNA, 75 bp, synthetic construct
  source 1..75: mol_type = other DNA
ttgcgcatacgctcagaaaaatgaaggccagcatggcagagaaagccagtcgtgaggagggcaggatacgcagtg

SEQ ID NO: 444245 - DNA, 75 bp, synthetic construct
  source 1..75: mol_type = other DNA
atggcaaagatccgatatctgcagggcacgcatgatggccgggccggggatatccgtgatgtcgcacagccgtgt

SEQ ID NO: 444246 - DNA, 75 bp, synthetic construct
  source 1..75: mol_type = other DNA
gcctgatagccgatcatctgcaggctgtctgtgcgtttctggaaggtaagcacgctctcgaacgcccgaaaccaa

SEQ ID NO: 444247 - DNA, 75 bp, synthetic construct
  source 1..75: mol_type = other DNA
gtatgacgtggtggataacggcaccacgaatttacgtcaggggcgtgtgcgtattcgctacaaatatacgcccgt

SEQ ID NO: 444248 - DNA, 75 bp, synthetic construct
  source 1..75: mol_type = other DNA
atgtcaattgagcatattttaatcgggaaacatcatgggggttctgattgctggagagctccacttttgttattt

SEQ ID NO: 444249 - DNA, 75 bp, synthetic construct
  source 1..75: mol_type = other DNA
cggcagtgacggaagaacaacacgttcaggccgctgaggcccgccgtaatctggccacagtacttaaacgcaacg

SEQ ID NO: 444250 - DNA, 75 bp, synthetic construct
  source 1..75: mol_type = other DNA
acccgacgctggttgctgcggtacagatggatgacacgggtactacccgtatcggtaaattcgtcttcaaccatc

SEQ ID NO: 444251 - DNA, 75 bp, synthetic construct
  source 1..75: mol_type = other DNA
gtccactgacacctgcgaacgtgaaggatgttatcagcgccatcagggcaaaactggattcgctggttactgccg

SEQ ID NO: 444252 - DNA, 75 bp, synthetic construct
  source 1..75: mol_type = other DNA
gtaacggaagtccataacacagatcagtttggtcctgttaaagctgcagtgacatttgaagttatatatccataa

SEQ ID NO: 444253 - DNA, 75 bp, synthetic construct
  source 1..75: mol_type = other DNA
gcaactggaatcgtcgaatgataagctgcaaatgttgttaacaaaggacggtaagccaaatggaacatatttatg

SEQ ID NO: 444254 - DNA, 75 bp, synthetic construct
  source 1..75: mol_type = other DNA
ggcagttaaaagcgtcctctgtaaaaaatattttcgatctgccatttagtgagggcttaattcgttcgttgaatc

SEQ ID NO: 444255 - DNA, 75 bp, synthetic construct
  source 1..75: mol_type = other DNA
caatctctggctgcctgcaggcgttgaaggcgtctggcagctttgggaacagccacagaacaccacagagaggga

SEQ ID NO: 444256 - DNA, 75 bp, synthetic construct
  source 1..75: mol_type = other DNA
atgacgaatattaccgacagacatacacttcgccgcatgtcctggtcggaactcaccacggcagcacaggacaca

SEQ ID NO: 444257 - DNA, 75 bp, synthetic construct
  source 1..75: mol_type = other DNA
gatcgtgacctatttcctgactatctttgctggtactggcaacatctctctggcgacactgccagttatcgctga

SEQ ID NO: 444258 - DNA, 75 bp, synthetic construct
  source 1..75: mol_type = other DNA
cgtgagatgattctggcgcatgaaaagtggttgccgaacttcgctgattgcattgctgatctcaaaaaggcacat

SEQ ID NO: 444259 - DNA, 75 bp, synthetic construct
  source 1..75: mol_type = other DNA
gatctgaaagttaagcctaaagagctggagcagcgcggcggggcttattactctgacgcggcgtgcgaagtgatt

SEQ ID NO: 444260 - DNA, 75 bp, synthetic construct
  source 1..75: mol_type = other DNA
atggctgaaacccgtttccatggcgtgcgggtccgggagaatgcggatctggtcacggccattaatgatattgac

SEQ ID NO: 444261 - DNA, 75 bp, synthetic construct
  source 1..75: mol_type = other DNA
tctttgaggtgtatacccgaaccgcacaggtgctggctgattcaattgcggaagcgcagtttgaaaccatcgaca

SEQ ID NO: 444262 - DNA, 75 bp, synthetic construct
  source 1..75: mol_type = other DNA
gttgccgccgcatgagattgcggtcaacatccctggatttatcgacgctgtgcaggttatcttcagcggccatac

SEQ ID NO: 444263 - DNA, 75 bp, synthetic construct
  source 1..75: mol_type = other DNA
tcggtcagtgcattgttagccgaagcgcttgtgcttaagctgcgcaagcagtcagtagccgcaacgttaaaagat

SEQ ID NO: 444264 - DNA, 75 bp, synthetic construct
  source 1..75: mol_type = other DNA
gatgtactgaatatcgccgccgattatgctgatttcgtgacagaggttattttaagaaaaacgacggacggggat

SEQ ID NO: 444265 - DNA, 75 bp, synthetic construct
  source 1..75: mol_type = other DNA
gggggggttatgcgtgatgatcgttttaattccctgaaacaggaattttccggcgttcctgatgatgcggctgat

SEQ ID NO: 444266 - DNA, 75 bp, synthetic construct
  source 1..75: mol_type = other DNA
gatattctcaatattgcgtcggactatgcggaatatgtggcagaggcgcgttacagaagaaaattcccggaggat

SEQ ID NO: 444267 - DNA, 75 bp, synthetic construct
  source 1..75: mol_type = other DNA
cgccagaaattcaacgaacgtgaagtgatgctcttatggccggacttcatcgcctacaacccgaaaagtggcgaa

SEQ ID NO: 444268 - DNA, 75 bp, synthetic construct
  source 1..75: mol_type = other DNA
cgcgcaccaaagaaaacaccgacctccagaccgcgatcaatgacattgattcaacggtcattggtctggttgcgg

SEQ ID NO: 444269 - DNA, 75 bp, synthetic construct
  source 1..75: mol_type = other DNA
gatttcacggtgtgcgcgtcacggagaataccgaccttgtgacggccattaatgacgttgattccagcgtcattg

SEQ ID NO: 444270 - DNA, 75 bp, synthetic construct
  source 1..75: mol_type = other DNA
gtcaggcaacaccgctggatacatttaaaacctctgtccgtgccggtcattcggttgaacagattatgcaatatc

SEQ ID NO: 444271 - DNA, 75 bp, synthetic construct
  source 1..75: mol_type = other DNA
cttatacccataaccagcgtcagacctcccgcattatgctgctggtgttgattgcagctataccgggaatcgctg

SEQ ID NO: 444272 - DNA, 75 bp, synthetic construct
  source 1..75: mol_type = other DNA
tcgctgtccaacgttccggttaaaaatgtgctggggatgtcgaggcatgtgttctggtcgttgcaggccgaagac

SEQ ID NO: 444273 - DNA, 75 bp, synthetic construct
  source 1..75: mol_type = other DNA
ctggtgtggtccgtggcggtcacgcccacgattgaaaagctcagtgtctgggagttagatggcaaacacggctgg

SEQ ID NO: 444274 - DNA, 75 bp, synthetic construct
  source 1..75: mol_type = other DNA
tgtgaatgtccatcaccgaacccgacagaagcacgaccaacgctatataaaactgagtcaacattggcggcgggg

SEQ ID NO: 444275 - DNA, 75 bp, synthetic construct
  source 1..75: mol_type = other DNA
ccggttagtacaaccgggaaattacccgcagccggtgattatagcggtgtggcaacaatgcatgttgaattggat

SEQ ID NO: 444276 - DNA, 75 bp, synthetic construct
  source 1..75: mol_type = other DNA
tattatccacgttatctatgggttcagcgtttgctcagtccagtaacctgtctcatgatgcacatcgcttcgtaa

SEQ ID NO: 444277 - DNA, 75 bp, synthetic construct
  source 1..75: mol_type = other DNA
ggatattccattcggagaatatcaggcccatgattttaaagggcgtgccggacaaccaccacaaaatgttcagaa

SEQ ID NO: 444278 - DNA, 75 bp, synthetic construct
  source 1..75: mol_type = other DNA
aacttgtttacggtgctgtatccgggaaacagttcagctggaaggaccaagggatgaacctcaccatgaaggata

SEQ ID NO: 444279 - DNA, 75 bp, synthetic construct
  source 1..75: mol_type = other DNA
tccggcttatgcgtctgactgaagacgtaccagatgtgagacaggaactgcttaaccgtttgttgtccggtaaaa

SEQ ID NO: 444280 - DNA, 75 bp, synthetic construct
  source 1..75: mol_type = other DNA
tatccggcgtctctggcaggagaaagtggatgcaatgcaggagtctgccacccgtcagcgtgaacaggataccat

SEQ ID NO: 444281 - DNA, 75 bp, synthetic construct
  source 1..75: mol_type = other DNA
tgggtccttcagcatgatcaacggggaccagcttgtgcaggtggcccgtggtattgcccagggtgcggctatcta

SEQ ID NO: 444282 - DNA, 75 bp, synthetic construct
  source 1..75: mol_type = other DNA
tgcaaggttagatggtggcgaagagatcactatcgacaggatcaagttagacctcttcaataatgtgaattttaa

SEQ ID NO: 444283 - DNA, 75 bp, synthetic construct
  source 1..75: mol_type = other DNA
tccgaatgatgatgaaacccgcttttataccgaaacctttgtatcggcgtatggtgaggaagggcctcccggacc

SEQ ID NO: 444284 - DNA, 75 bp, synthetic construct
  source 1..75: mol_type = other DNA
gggattcgtactgtatgccgggacaaacggtctggtatctgttgatgtaaacggtaatacagcactggcaacgga

SEQ ID NO: 444285 - DNA, 75 bp, synthetic construct
  source 1..75: mol_type = other DNA
acccccacgggcgtatttactacactgacgggcgttttcctaaagtgacggatgcgactattgccacaaaagggg

SEQ ID NO: 444286 - DNA, 75 bp, synthetic construct
  source 1..75: mol_type = other DNA
tgaatgaaatggcagccgacgatgccctttcagaagctgtcagggaaaaagcggcatacgctgctgcaaacttac

SEQ ID NO: 444287 - DNA, 75 bp, synthetic construct
  source 1..75: mol_type = other DNA
tttgcgtgcaaatgaatttgtcacatcgttgccgtctctgaaagaagctgggattaaggctggtttttctgcttt

SEQ ID NO: 444288 - DNA, 75 bp, synthetic construct
  source 1..75: mol_type = other DNA
aggccatgcaacagagcatgcaatattcagaagcacagcgaatcattgctccctggtatttctttgtggaacgga

SEQ ID NO: 444289 - DNA, 75 bp, synthetic construct
  source 1..75: mol_type = other DNA
agcctgctgttaaccatagcgttcaggtggcgatcgctggtgccggcccggttgggctgatgatggcgaactatc

SEQ ID NO: 444290 - DNA, 75 bp, synthetic construct
  source 1..75: mol_type = other DNA
tgcgtggagatgagtttgtcacgtcattacgggcgctgaaagagactggaattaaggctggcttttctgcttttg

SEQ ID NO: 444291 - DNA, 75 bp, synthetic construct
  source 1..75: mol_type = other DNA
atgaaaatcgaaaaattgcgtgaaatttttagtgaaaatggcctctatgctgtgcacgttgagaatggtgctatt

SEQ ID NO: 444292 - DNA, 75 bp, synthetic construct
  source 1..75: mol_type = other DNA
atggataagctggaaataaacgatcagtttgccgttatcttatttgaagataaaacaggcggcgcatggtgtaag

SEQ ID NO: 444293 - DNA, 75 bp, synthetic construct
  source 1..75: mol_type = other DNA
agagtacgatctcggccagggtgccgggttttatgtcaatgccacacaggagccgtggaaagcgcattatcagat

SEQ ID NO: 444294 - DNA, 75 bp, synthetic construct
  source 1..75: mol_type = other DNA
gtctgtactgttcagcagggcggtgatgtttctgacgataacccgaatgatgacgaaacccggttttatacggaa

SEQ ID NO: 444295 - DNA, 75 bp, synthetic construct
  source 1..75: mol_type = other DNA
cactgacgatggaacaacaataactaactcagatacaacgaaagaagccgttctggcaatcaataacgaagactc

SEQ ID NO: 444296 - DNA, 75 bp, synthetic construct
  source 1..75: mol_type = other DNA
agtccggagcatatatcgacctcatcggtaagtacgttcaccatgacaacgagtataccgcaactttcgccggcc

SEQ ID NO: 444297 - DNA, 75 bp, synthetic construct
  source 1..75: mol_type = other DNA
agcggagcatttaggtgaaggcctagagagattaattgatggttatactccagcatcgtacattgtattaaataa

SEQ ID NO: 444298 - DNA, 75 bp, synthetic construct
  source 1..75: mol_type = other DNA
gggctcggcggcggcgctgttgactccatggtatcaggtatattcccggattttggtagcaccatgagtcagcct

SEQ ID NO: 444299 - DNA, 75 bp, synthetic construct
  source 1..75: mol_type = other DNA
tacagggtggcttaggtgactttttaaccgctatcgagaaagggcttgttaaagctggtgatacactactaatcg

SEQ ID NO: 444300 - DNA, 75 bp, synthetic construct
  source 1..75: mol_type = other DNA
atgaaacgtgccatttcttacatcaggttttcatctgagaagcaatcccgaggtgattcattacgccgacagtct

SEQ ID NO: 444301 - DNA, 75 bp, synthetic construct
  source 1..75: mol_type = other DNA
gttgaggctacaccgtgaacacatctcaagcaatatagaaaagctggtacaactatcacttgaaattgatgcgta

SEQ ID NO: 444302 - DNA, 75 bp, synthetic construct
  source 1..75: mol_type = other DNA
ggtaggccaggttattgatcgtaaactcaccagcaaaggcgtcacctttaccgtcgccatcgagcctcagcatcg

SEQ ID NO: 444303 - DNA, 75 bp, synthetic construct
  source 1..75: mol_type = other DNA
gtggtgattgatgtcctgatcgagcggcgttttaccgacctggtgaaaaaaggtagccgtttctggaacgtttcc

SEQ ID NO: 444304 - DNA, 75 bp, synthetic construct
  source 1..75: mol_type = other DNA
tgaccggcaaaaccttcgagttggtgccgggcgacggtgagccacgtaaagagtttattgttgttcctggcgaaa

SEQ ID NO: 444305 - DNA, 75 bp, synthetic construct
  source 1..75: mol_type = other DNA
tgaggagagtttgcgtaaatctgagcgtatacaggctgcatggaaccgtaaaaaagaactcatctctgaaggtat

SEQ ID NO: 444306 - DNA, 75 bp, synthetic construct
  source 1..75: mol_type = other DNA
agatgtagaccaagcaagtgagctactcagaaacattcttcgctctggtgtagatgtggtcaccttgtccgatgg

SEQ ID NO: 444307 - DNA, 75 bp, synthetic construct
  source 1..75: mol_type = other DNA
atccgttgttctgaatgtggtcatgctctgattatcacaggctttagcgatacaagaaacgggatttatcgttgt

SEQ ID NO: 444308 - DNA, 75 bp, synthetic construct
  source 1..75: mol_type = other DNA
aagatggtcactgattggcttaaggctcatcctgagtactatctggatgaatcccttacttttcgtgatttaggc

SEQ ID NO: 444309 - DNA, 75 bp, synthetic construct
  source 1..75: mol_type = other DNA
accccgaaaggctgtgaagagattgcaggttattacccgtctgtaattgatgagacaacattctacaaagtccag

SEQ ID NO: 444310 - DNA, 75 bp, synthetic construct
  source 1..75: mol_type = other DNA
gaacgctattaccaacaagctaaaacaactaaagaatgagttatcacaggttgatgcggatatcgagaaggagac

SEQ ID NO: 444311 - DNA, 75 bp, synthetic construct
  source 1..75: mol_type = other DNA
tggtacgcgcttctcagtggtcacaccgcaaatttcggcagctggcgttgagcatcttgatactatcctccagcc

SEQ ID NO: 444312 - DNA, 75 bp, synthetic construct
  source 1..75: mol_type = other DNA
gcggttctattggtaggatacttgatcatgcagaaacagcaaacgcagccacaaataaatttagactcaagagcg

SEQ ID NO: 444313 - DNA, 75 bp, synthetic construct
  source 1..75: mol_type = other DNA
attatcggagtcggtcagtacggcattaaatcagacgcaacagacactaaccagagtgaacaactcattagaagc

SEQ ID NO: 444314 - DNA, 75 bp, synthetic construct
  source 1..75: mol_type = other DNA
cgctaatctgtacaataaaatcttcgaagcgaataaaccgatgctaaaaagcccggataaaatttatccggggca

SEQ ID NO: 444315 - DNA, 75 bp, synthetic construct
  source 1..75: mol_type = other DNA
gtaagaacggcatcacgtgtcggagctgttggggggagtttctcataccgccagcctcaggtgaataccaacctc

SEQ ID NO: 444316 - DNA, 75 bp, synthetic construct
  source 1..75: mol_type = other DNA
ctttcatgaaaaagttacttttatcggccatgttctttggtgtgttctccatgcagcaggtccatgctgccaacg

SEQ ID NO: 444317 - DNA, 75 bp, synthetic construct
  source 1..75: mol_type = other DNA
ctgacgccagatgccaccgggaacggaaaagcagtaacgaggtctttgaatttctggagaagaagctttatctgg

SEQ ID NO: 444318 - DNA, 75 bp, synthetic construct
  source 1..75: mol_type = other DNA
tcccgatcttggttcgctgaatagtggttcgctggtctattttcgcaagatcccggtgggacgtgtctacgacta

SEQ ID NO: 444319 - DNA, 75 bp, synthetic construct
  source 1..75: mol_type = other DNA
ggtctggaagtcggtacggttaccggaatgacgctggggacattgtcagatcgcgtgatgattgcgatgcgcatc

SEQ ID NO: 444320 - DNA, 75 bp, synthetic construct
  source 1..75: mol_type = other DNA
atgagtcaggaaacgcccgcttcgacgactgaagcgcagattaaaactaaacgccgtatctcacctttctggctg

SEQ ID NO: 444321 - DNA, 75 bp, synthetic construct
  source 1..75: mol_type = other DNA
attgtcgaagcgccggaggccggttcgttaggcattgggacgcccgtattgttccgtggtctggaagtgggcaca

SEQ ID NO: 444322 - DNA, 75 bp, synthetic construct
  source 1..75: mol_type = other DNA
ggcgttgatgccaatgtcagtatcagtggcgcgaaggtgaaactggaaagtctggcggcactggttaacggtgcg

SEQ ID NO: 444323 - DNA, 75 bp, synthetic construct
  source 1..75: mol_type = other DNA
gtttctcggtgccagcgcttcggaatggatcaatggcggtatccgcattttgccgggcaaaaaaggtgagatgaa

SEQ ID NO: 444324 - DNA, 75 bp, synthetic construct
  source 1..75: mol_type = other DNA
atgaaagaatatcacggtgaaaagagatacaaagactacctgttaaagcgttacagcatttctcgtgaaggtcat

SEQ ID NO: 444325 - DNA, 75 bp, synthetic construct
  source 1..75: mol_type = other DNA
ggcaatccacatggacatctcatattacgtggtggtagagagccgaactatggtttgtcggatataacgaaggca

SEQ ID NO: 444326 - DNA, 75 bp, synthetic construct
  source 1..75: mol_type = other DNA
actggctaaaggcagttatagcgacaatgtacgccttgatccgtgggtgtttatgttctctgcagggtaccgttt

SEQ ID NO: 444327 - DNA, 75 bp, synthetic construct
  source 1..75: mol_type = other DNA
ccattccgactgtgcgttgctggagcgcgatggcaacatttcacttttatccttgccagtggcagaacgttggct

SEQ ID NO: 444328 - DNA, 75 bp, synthetic construct
  source 1..75: mol_type = other DNA
gaaaaagcgcagtctgccctggcggaattgggtattgatttccagtccgatgcgcagcatgtgaccatcagggcc

SEQ ID NO: 444329 - DNA, 75 bp, synthetic construct
  source 1..75: mol_type = other DNA
atggtcgcatgatgcgcgatcgcctgatcaatcatgcgatccgccaggcctgtgaagacaaactgggggccgatc

SEQ ID NO: 444330 - DNA, 75 bp, synthetic construct
  source 1..75: mol_type = other DNA
accttctttgataatggatttaacgatcatggcaaagaggcggggctttccgatctcagtctgaaagattcctgg

SEQ ID NO: 444331 - DNA, 75 bp, synthetic construct
  source 1..75: mol_type = other DNA
acattataaatgctggaatgaagttatctgatgttactaaggaaaagagcaagtattgggttgttatacatggtg

SEQ ID NO: 444332 - DNA, 75 bp, synthetic construct
  source 1..75: mol_type = other DNA
ggcaatccacatggacatctaatattacgtggaggtagagaacctaactatggtttgtctgatataactaaggca

SEQ ID NO: 444333 - DNA, 75 bp, synthetic construct
  source 1..75: mol_type = other DNA
aactacaccaccttctttgataatggcttcaatgacaccggtaaaagccttggattatctgaccttagtctgaaa

SEQ ID NO: 444334 - DNA, 75 bp, synthetic construct
  source 1..75: mol_type = other DNA
atgaaaaaattaacagtggcggctttggcagtaacaacacttttctctggcacagcctttgcgcatgaagcaggc

SEQ ID NO: 444335 - DNA, 75 bp, synthetic construct
  source 1..75: mol_type = other DNA
ccaattataagctgggcggtgcacagcaacacgatagcgtacgcctcgatccgtgggtgtttatgttctcagcag

SEQ ID NO: 444336 - DNA, 75 bp, synthetic construct
  source 1..75: mol_type = other DNA
cgcgacggcaacatttcactttttatccttgccagtggcagaacgttggctgcgtcaggcacaattgacgccggg

SEQ ID NO: 444337 - DNA, 75 bp, synthetic construct
  source 1..75: mol_type = other DNA
tgatgcagcaggaattaaccatatcgcagagatactcacgccacaaaatgtaaaagccattagccgatattcctc

SEQ ID NO: 444338 - DNA, 75 bp, synthetic construct
  source 1..75: mol_type = other DNA
atgcagcaggaattaaccatatcgcaaggatacttaccccacaaaatgtaaaagccattagcagatattcctcag

SEQ ID NO: 444339 - DNA, 75 bp, synthetic construct
  source 1..75: mol_type = other DNA
gtcatcggcaaaggcacggcctcattttgtgcttgtgttgaagtaaaaaccagaacatgggcaaatatgcaaggt

SEQ ID NO: 444340 - DNA, 75 bp, synthetic construct
  source 1..75: mol_type = other DNA
agaaaacaagcagcttcgccgggccgaaaatcggcaagcccgattgaaaggggaaaaagtgacttacaaaaccaa

SEQ ID NO: 444341 - DNA, 75 bp, synthetic construct
  source 1..75: mol_type = other DNA
aacagcaaactaactcacgggtctttaaatccccactcgtgtctttttcaacagtgaccggttccggccgattcg

SEQ ID NO: 444342 - DNA, 75 bp, synthetic construct
  source 1..75: mol_type = other DNA
atgttaaagcaggtgtatgaaatgaaagtccagattttaaacaataactgtgaagtcgtttggtcatacgacata

SEQ ID NO: 444343 - DNA, 75 bp, synthetic construct
  source 1..75: mol_type = other DNA
actttaacggaactgacgcaaacgtcaggagacgctctaccgtatcaggtgcatcagttcgccatcgccccggcg

SEQ ID NO: 444344 - DNA, 75 bp, synthetic construct
  source 1..75: mol_type = other DNA
gaaaaagcgcagtcggcgctggcagaattaggcatcgaatttcagtccgatgcgcagtatgtgaccatcagggcc

SEQ ID NO: 444345 - DNA, 75 bp, synthetic construct
  source 1..75: mol_type = other DNA
ggcggggcggatcccactgttagtgggcggtacgatgttgtatttcaaggcattgctggaagggttgtcgccgct

SEQ ID NO: 444346 - DNA, 75 bp, synthetic construct
  source 1..75: mol_type = other DNA
aacctcgtaaaaagtattcgaatgaattcaaacttcgtatggttgaactggcatcacaacctagagcttgtgttg

SEQ ID NO: 444347 - DNA, 75 bp, synthetic construct
  source 1..75: mol_type = other DNA
aagggcgtgtttcgcggcgtcttccggtaacgacctcttctgacactggcgttgaattattacctgtagaaataa

SEQ ID NO: 444348 - DNA, 75 bp, synthetic construct
  source 1..75: mol_type = other DNA
agcgtcggcacccacgacattctgttttgcgccatcgaagcgattcatcgtcacgccacaccctacgggctggtg

SEQ ID NO: 444349 - DNA, 75 bp, synthetic construct
  source 1..75: mol_type = other DNA
tcggagcgtgtaaaaacggatattaataaaaacaattttaatgatgttctggctgatatctccccgtctgtgcgt

SEQ ID NO: 444350 - DNA, 75 bp, synthetic construct
  source 1..75: mol_type = other DNA
tttggcgtgagtgggttgaatttcgccaggcattgcgaaaaccgattcgaacggagcagggcgctaacggggcta

SEQ ID NO: 444351 - DNA, 75 bp, synthetic construct
  source 1..75: mol_type = other DNA
attgcaatgagcagtggaactgcagctttgcatacagcacttgttctttctgaggttggtatctctgacgaagtc

SEQ ID NO: 444352 - DNA, 75 bp, synthetic construct
  source 1..75: mol_type = other DNA
aggaggggttcctgtttttgctgatgtagataaaaacacaggatgtcttgatcccgattctattattgagatgat

SEQ ID NO: 444353 - DNA, 75 bp, synthetic construct
  source 1..75: mol_type = other DNA
tgaccagtgacggaatatttaatataacctgtaagaattttaatattactgcaacagagaacggaaaaataaata

SEQ ID NO: 444354 - DNA, 75 bp, synthetic construct
  source 1..75: mol_type = other DNA
gcattttacctatgtcaccacgttcgaactgcaccccaccagtgaagtctaccgcccacagcgaaccctgagcaa

SEQ ID NO: 444355 - DNA, 75 bp, synthetic construct
  source 1..75: mol_type = other DNA
aaaagtttgaccctctggatattgctttgccgaactggatttctgtctcgctttggcgtgagtgggttgaatttc

SEQ ID NO: 444356 - DNA, 75 bp, synthetic construct
  source 1..75: mol_type = other DNA
ttaggtgtatggcggttacgtaataatactgtttatagtggctccaattgggattcgattagcaccagtttgcaa

SEQ ID NO: 444357 - DNA, 75 bp, synthetic construct
  source 1..75: mol_type = other DNA
acagtggggaaaagaaaacaatcagcaatgtacagggattatagctgtgccagaaacatataccaaaggtatcta

SEQ ID NO: 444358 - DNA, 75 bp, synthetic construct
  source 1..75: mol_type = other DNA
cctttggatcattgctgacattaggggatagtacatcaattgtcggtgaggatggtgaggtttatattactggtg

SEQ ID NO: 444359 - DNA, 75 bp, synthetic construct
  source 1..75: mol_type = other DNA
ttgattcattctataaaagattagttcatttaccttgtggttggtggatcgacgaaataacacgtagcaaaatta

SEQ ID NO: 444360 - DNA, 75 bp, synthetic construct
  source 1..75: mol_type = other DNA
ttttacaaaggcggatctccgtgagttcggtcttaaagttgacgacattcccgcgttacaagtaatggatgatga

SEQ ID NO: 444361 - DNA, 75 bp, synthetic construct
  source 1..75: mol_type = other DNA
aaatgcgcaaggcgtttatactgatttttggggaaatgcgattgttcccaatatgacgaattatcgacataacgc

SEQ ID NO: 444362 - DNA, 75 bp, synthetic construct
  source 1..75: mol_type = other DNA
tagtatcgaactggacggcggcggcaaacggtatatcagcgggctggtgacggcggcgagggtggtcggccatga

SEQ ID NO: 444363 - DNA, 75 bp, synthetic construct
  source 1..75: mol_type = other DNA
tctattaaattaaaaactcctgacaccctgaacataggctatgtttcccccgcagccaacctgcagctcaaatcg

SEQ ID NO: 444364 - DNA, 75 bp, synthetic construct
  source 1..75: mol_type = other DNA
ttagtgctggctgatgccattaatgtccacaaggcatgcgcagattcgccgctggtgtgttattaccagaaaggg

SEQ ID NO: 444365 - DNA, 75 bp, synthetic construct
  source 1..75: mol_type = other DNA
ggctgaagctggataaggagtttatccacaccattacggccagtgagcgactgcgcaccgggcagtgggtactag

SEQ ID NO: 444366 - DNA, 75 bp, synthetic construct
  source 1..75: mol_type = other DNA
accagtgacggaatatttaatataacctgtaagaattttaatattacagcaacagagaacggaaaaataaataca

SEQ ID NO: 444367 - DNA, 75 bp, synthetic construct
  source 1..75: mol_type = other DNA
gctcgaaccgtggttaaaaatactgacccacactagtgactacaaagcgtttcagaataaaaacgtggtggacat

SEQ ID NO: 444368 - DNA, 75 bp, synthetic construct
  source 1..75: mol_type = other DNA
gaccacgctatttatacaggacaacgcgcagcacagcggccaggatcagcattttacttactcaaccagctttga

SEQ ID NO: 444369 - DNA, 75 bp, synthetic construct
  source 1..75: mol_type = other DNA
tggtcataaagcgtgtcctgactcgccactggtggagtggcaccaggaagggctgaaactggacaaggaatttat

SEQ ID NO: 444370 - DNA, 75 bp, synthetic construct
  source 1..75: mol_type = other DNA
accctcatgaccgggtacacctttacgttgatgaatcacccgacggcagaaattaatcaggaatatctgctggta

SEQ ID NO: 444371 - DNA, 75 bp, synthetic construct
  source 1..75: mol_type = other DNA
tgacccataccagcgactacaaagcgttccagaataaaactgtggtggatattctcgatgaagtactggatgaat

SEQ ID NO: 444372 - DNA, 75 bp, synthetic construct
  source 1..75: mol_type = other DNA
ggcatgatccagatcccgcgtattggccaggaagtgctggtggatttcaaaaatggtgacccggatttacccatc

SEQ ID NO: 444373 - DNA, 75 bp, synthetic construct
  source 1..75: mol_type = other DNA
aacgcatacagtcatggtcgatcgcacaaaaaccattgttaaaaatgaaaccatcagcgtgggagaagaccgcaa

SEQ ID NO: 444374 - DNA, 75 bp, synthetic construct
  source 1..75: mol_type = other DNA
atgaacccggatggcggcacagccatgactgcggatgatattgccccgttacctaccccggacgtttctgaataa

SEQ ID NO: 444375 - DNA, 75 bp, synthetic construct
  source 1..75: mol_type = other DNA
taccgctggtcggcagaacttctgaaacaggtgattgccgccaacccgggtgaccagggcgcgtgccacagacta

SEQ ID NO: 444376 - DNA, 75 bp, synthetic construct
  source 1..75: mol_type = other DNA
ggtaaatcagaattacgccaaatcattaccgtttagcgatcgtcaggattttgacgacgcccagcgcggatttat

SEQ ID NO: 444377 - DNA, 75 bp, synthetic construct
  source 1..75: mol_type = other DNA
tatcaggtgcgcggccaggatatctctaacattacgttcgttgagggcgagaaaggcattattgttatcgacccg

SEQ ID NO: 444378 - DNA, 75 bp, synthetic construct
  source 1..75: mol_type = other DNA
ttagccacgatttagcgccgcaatttcttgaagcgggctgcgtggtgttcgacctttccggcgcgtttcgtgtta

SEQ ID NO: 444379 - DNA, 75 bp, synthetic construct
  source 1..75: mol_type = other DNA
tcgggctgccgttctgtgatatcgggtttgccgttcagggcgagcatctgattattgtggcgaccgaagacaatt

SEQ ID NO: 444380 - DNA, 75 bp, synthetic construct
  source 1..75: mol_type = other DNA
tctggggcaataagcatatcaatgattatattggtaaatatcgcgataccatcaagtacattcacgatcagaccc

SEQ ID NO: 444381 - DNA, 75 bp, synthetic construct
  source 1..75: mol_type = other DNA
tatcaggtgcgcagccaggatatctcgaacatcaccttcattgaaggtgatacgggcatcatcgtcattgacccg

SEQ ID NO: 444382 - DNA, 75 bp, synthetic construct
  source 1..75: mol_type = other DNA
ggtagcgaagcgccagccgaaatgcacttctatattccggccctgaaagccctgtgtaccgccgagaacgccacg

SEQ ID NO: 444383 - DNA, 75 bp, synthetic construct
  source 1..75: mol_type = other DNA
gcgatggattgtggtttgttgaaattgaaggaaaaatcagtgttcgcgaggtaataagaataccggtaggtaaag

SEQ ID NO: 444384 - DNA, 75 bp, synthetic construct
  source 1..75: mol_type = other DNA
gcccagcgtggatttatcgctccgctgctggatgaaggtattctgcgtgatgcgaacggtaaaatttactaccgc

SEQ ID NO: 444385 - DNA, 75 bp, synthetic construct
  source 1..75: mol_type = other DNA
ttattggcaatggcgcgaaactggaagaaattatcgcctgtctggataatttcgatttgtgggtgaatatcgtaa

SEQ ID NO: 444386 - DNA, 75 bp, synthetic construct
  source 1..75: mol_type = other DNA
ccggcgttgaaagccctgtgcacagcggaaaacagcacccataccctgcataacttctacaccctgcgtggcgcg

SEQ ID NO: 444387 - DNA, 75 bp, synthetic construct
  source 1..75: mol_type = other DNA
acggttataagacgcgccaagccttagctgatcacttaggtatttcaaaaagcacattagccacaagatatatgc

SEQ ID NO: 444388 - DNA, 75 bp, synthetic construct
  source 1..75: mol_type = other DNA
agtttaaacgcgactccgctcaactggttgttgaccagaaatacacggtggcagatgccgccaaagctatggatg

SEQ ID NO: 444389 - DNA, 75 bp, synthetic construct
  source 1..75: mol_type = other DNA
accccggaacaaattgaaatccgtgagctcaggaaaaagctacaacgtattgaaatggaaaatgaaatattaaaa

SEQ ID NO: 444390 - DNA, 75 bp, synthetic construct
  source 1..75: mol_type = other DNA
ggcctttccacaatgacaagatgggtcaaacaactgcgtgatgagcgtcagggcaaaacaccaaaagcctctccg

SEQ ID NO: 444391 - DNA, 75 bp, synthetic construct
  source 1..75: mol_type = other DNA
taaaaaaggctgttgtagattcaatctgtcaatgcaacacccctttcaattatctctttcggtgttttgaacttc

SEQ ID NO: 444392 - DNA, 75 bp, synthetic construct
  source 1..75: mol_type = other DNA
gcagatgccgccaaagctatggatgttggcctttccacaatgacaagatgggtcaaacaactgcgtgatgagcgt

SEQ ID NO: 444393 - DNA, 75 bp, synthetic construct
  source 1..75: mol_type = other DNA
acgtgagctgaggaaaaagctacaacgcattgaaatggagaatgaaatattaaaaaaggctactgcgctcttgat

SEQ ID NO: 444394 - DNA, 75 bp, synthetic construct
  source 1..75: mol_type = other DNA
atctcgcattgtttttacttcctgtcgacagggaatatacggtttactacacataaccagagtatgatcacggtg

SEQ ID NO: 444395 - DNA, 75 bp, synthetic construct
  source 1..75: mol_type = other DNA
atctcgcattgtttttatttcctgtctacagggaatatacgctttaccacacataaccatagtatgatcacggta

SEQ ID NO: 444396 - DNA, 75 bp, synthetic construct
  source 1..75: mol_type = other DNA
ctgatttatcgcctccagattgtgtcaccacagagaacaaccggcttagctctgttatatccttgcttatttcat

SEQ ID NO: 444397 - DNA, 75 bp, synthetic construct
  source 1..75: mol_type = other DNA
acttacccgtggcgctggcaccggcaatggggctgaacgccttcttcgcgttcgtggtcgtgggggcgatgggga

SEQ ID NO: 444398 - DNA, 75 bp, synthetic construct
  source 1..75: mol_type = other DNA
gtgcaccgggcgctggcgcgatctgaacctgtgtgtggtggtggtagcggcgctatttgcgttgaaaatcatcct

SEQ ID NO: 444399 - DNA, 75 bp, synthetic construct
  source 1..75: mol_type = other DNA
ggtgatgatgccctttactttctcgatcaccgaagggattgcactcggctttatgtcgtactgcatcatgaaagt

SEQ ID NO: 444400 - DNA, 75 bp, synthetic construct
  source 1..75: mol_type = other DNA
gccatgttagcgagagtttaaaaacttcaataatgcaaaaccgtgggggacagaaagtaattgagcgtatacttg

SEQ ID NO: 444401 - DNA, 75 bp, synthetic construct
  source 1..75: mol_type = other DNA
tttattagcccggaagccaattttgcctgctggggcgaagataaagtggtcggcaaggcgttggataaccgcatc

SEQ ID NO: 444402 - DNA, 75 bp, synthetic construct
  source 1..75: mol_type = other DNA
ggtaaccatacgcacacacaagggagtgaaaatccctggtgtgattggttccgtcgcgcctcatgcgttaacgga

SEQ ID NO: 444403 - DNA, 75 bp, synthetic construct
  source 1..75: mol_type = other DNA
tttattagcccggaagccaattttgcctgctggggcgaagataaagtggtcggcaaggcgctggataatcgcatc

SEQ ID NO: 444404 - DNA, 75 bp, synthetic construct
  source 1..75: mol_type = other DNA
attgttaacggcatgggtccggatcgcagcggcttcctgtcagcgttctttgcgctggtcggcacgcacggtctg

SEQ ID NO: 444405 - DNA, 75 bp, synthetic construct
  source 1..75: mol_type = other DNA
ctatgaattccatcacctgattgttaacgacatgggcccggatcgcagcggcttcctgtcagcgttctttgcgct

SEQ ID NO: 444406 - DNA, 75 bp, synthetic construct
  source 1..75: mol_type = other DNA
atcttcggattttggatctacctgatgagcgactgcattctgttttctatcttgtttgctacctatgccgttctg

SEQ ID NO: 444407 - DNA, 75 bp, synthetic construct
  source 1..75: mol_type = other DNA
tgccggtcgcacctccgcaaaagagaaaaatgcgacgctgattgaagcaattaaatcggcgaaattgccgcacga

SEQ ID NO: 444408 - DNA, 75 bp, synthetic construct
  source 1..75: mol_type = other DNA
atgaccctacgcaagatcctcgcgctgacttgcttgctactgccgatgatggcctccgcgcataaattcgaaact

SEQ ID NO: 444409 - DNA, 75 bp, synthetic construct
  source 1..75: mol_type = other DNA
tgggccaaagacggggcgctcactcaggaagaggtgcagcaagtgatggacctgctgcaaaagttgctcaaataa

SEQ ID NO: 444410 - DNA, 75 bp, synthetic construct
  source 1..75: mol_type = other DNA
tatggtcacccacatcgacgagagcggttttctgcgcttcaccaccattggtggctggtggaatcagtcgatgct

SEQ ID NO: 444411 - DNA, 75 bp, synthetic construct
  source 1..75: mol_type = other DNA
taacgtgggtgatatcgctaaggtaagcgtcagtggactaggcgatcgcttcattgataaagtaaatgacgcgaa

SEQ ID NO: 444412 - DNA, 75 bp, synthetic construct
  source 1..75: mol_type = other DNA
gacttttgaattgacacaaagcgaagagacgaaaaaattctggccgcacgactttacgctgttagcgcatttccg

SEQ ID NO: 444413 - DNA, 75 bp, synthetic construct
  source 1..75: mol_type = other DNA
tctgggaacaatcctggcaatggcagtggtacaggttctggtgcatctggtgtgcttcctgcacatgaataccaa

SEQ ID NO: 444414 - DNA, 75 bp, synthetic construct
  source 1..75: mol_type = other DNA
ccatcgaacgtttaattacagcctacggctttaacacgcgacaagccttggcggatcacttgaatgtatcaaaaa

SEQ ID NO: 444415 - DNA, 75 bp, synthetic construct
  source 1..75: mol_type = other DNA
tcacagagtacgatggctaacagatatgctcgtgacacttttcctgctgattgggttgtcatttgcagtatagag

SEQ ID NO: 444416 - DNA, 75 bp, synthetic construct
  source 1..75: mol_type = other DNA
acatgcgagacatttttccggcagactggatcatccaatgctgtttagaaacaggagtgtctctcgagtggttat

SEQ ID NO: 444417 - DNA, 75 bp, synthetic construct
  source 1..75: mol_type = other DNA
gtgattttcactccacatttgggcaatttcccgcgcggtattctcgaaaccattacctgtcgcctgaagcctggc

SEQ ID NO: 444418 - DNA, 75 bp, synthetic construct
  source 1..75: mol_type = other DNA
cacagctggcgctgaaaccgttgattgatgccgatcttcttgacctcaatcagtggccggtgatcaacgctacca

SEQ ID NO: 444419 - DNA, 75 bp, synthetic construct
  source 1..75: mol_type = other DNA
gtggtgtgagcggagcaggacgtaaggcagcgatttcaaatagtttttgtgaagttagcctgcaaccgtatggtg

SEQ ID NO: 444420 - DNA, 75 bp, synthetic construct
  source 1..75: mol_type = other DNA
gttatgcagatgacctcacattctcgtgtaatatccctaatgtactgaaagctgttccttcaacaattgaggcgt

SEQ ID NO: 444421 - DNA, 75 bp, synthetic construct
  source 1..75: mol_type = other DNA
caggtaaggacattttcgaactaccgttcgttctggttgaaactttcttgctgttgttcagctccatcacctacg

SEQ ID NO: 444422 - DNA, 75 bp, synthetic construct
  source 1..75: mol_type = other DNA
aaacaacaaaagccaggttatctcctggctggcgttgacttggttgtttggtgccggatttatcgggatggaaat

SEQ ID NO: 444423 - DNA, 75 bp, synthetic construct
  source 1..75: mol_type = other DNA
attcaatgcgctcttgaaacaggaacttcattactctggctcacaaacggcaatggccccaaatttatcgataat

SEQ ID NO: 444424 - DNA, 75 bp, synthetic construct
  source 1..75: mol_type = other DNA
tgtaagcaatggagaaaaacatgtcatatgtgataaagaatttcacctaattagagatggaaaatggttagtagg

SEQ ID NO: 444425 - DNA, 75 bp, synthetic construct
  source 1..75: mol_type = other DNA
gtacctgattcgcaagaactttaacatcgcgcagaacgatatgatttcgacctacgggttgagcatgacgcagct

SEQ ID NO: 444426 - DNA, 75 bp, synthetic construct
  source 1..75: mol_type = other DNA
atggcatttgctacgccaaacgatgtgataacccatgtgccttcgtccgttgatgctccgagaaagccagatatt

SEQ ID NO: 444427 - DNA, 75 bp, synthetic construct
  source 1..75: mol_type = other DNA
atctggtgcgcaataacgggatagcggctaatgcggtggccctgcataaggatcatattgtcgggcatatgtttc

SEQ ID NO: 444428 - DNA, 75 bp, synthetic construct
  source 1..75: mol_type = other DNA
ttaatcaggtccatatggcggagaattttaagctgttcagtaaggcatttggttttaccggaaaagttattgatc

SEQ ID NO: 444429 - DNA, 75 bp, synthetic construct
  source 1..75: mol_type = other DNA
actgccggcaggacattattctgaccatgtgcgccttgacccgtgggtgtttatgttctctgcgggttatcgttt

SEQ ID NO: 444430 - DNA, 75 bp, synthetic construct
  source 1..75: mol_type = other DNA
aaaaaaacattgtctggcgttatgaaaacttttcactggagtggcagtccgccatcacgcaggccatcaacttga

SEQ ID NO: 444431 - DNA, 75 bp, synthetic construct
  source 1..75: mol_type = other DNA
gcaggatttggcgggcaaatggcggagtggttgccacctgcgcagagtgccgatgcggccctgctgcccgcgttg

SEQ ID NO: 444432 - DNA, 75 bp, synthetic construct
  source 1..75: mol_type = other DNA
agatgatccaacagagggaccactaactaaagaagaacatacttctttgattaaggctatgaatcatgcatatag

SEQ ID NO: 444433 - DNA, 75 bp, synthetic construct
  source 1..75: mol_type = other DNA
ctttactagattgctataaggactctaatggcaccattaaccctaaaattatcgatgagttattaaaagcatcta

SEQ ID NO: 444434 - DNA, 75 bp, synthetic construct
  source 1..75: mol_type = other DNA
actcagtggttgtatcggcgggttaataaattaggtatcaaaaaattatatttcttatcccgcgatggatggatt

SEQ ID NO: 444435 - DNA, 75 bp, synthetic construct
  source 1..75: mol_type = other DNA
actcaaaattagttcctgaagtagaccatttacgtgttgcaatgtcgcattcaaaagcgatctcttatgatcttt

SEQ ID NO: 444436 - DNA, 75 bp, synthetic construct
  source 1..75: mol_type = other DNA
agaaagaagctgctaaagctggtatcaagatttctaggcgttgtcctgcatggttaaggctgaatgatgaccgta

SEQ ID NO: 444437 - DNA, 75 bp, synthetic construct
  source 1..75: mol_type = other DNA
gtgagtggattcactggtaagcacttgaaaggtggcttaggtgacttcttaaccgctatcgagaaagggcttgtt

SEQ ID NO: 444438 - DNA, 75 bp, synthetic construct
  source 1..75: mol_type = other DNA
gtaaatcatttaaaaatagagttaagtatatattaaaagatgatcatgatttcatttgtagcaatatgtcagcag

SEQ ID NO: 444439 - DNA, 75 bp, synthetic construct
  source 1..75: mol_type = other DNA
ggtatcgctggtctgtccgttgctgctgactccctgtctgcaatcaaatatgcgaaagttaaaccgattcgtgac

SEQ ID NO: 444440 - DNA, 75 bp, synthetic construct
  source 1..75: mol_type = other DNA
ggtcgtatggccatcgatggtctgaaagaagtacaggaagcggtgatgctgatagaagccggacatgggaacgtc

SEQ ID NO: 444441 - DNA, 75 bp, synthetic construct
  source 1..75: mol_type = other DNA
agagtcagaattcaggatttccttgcaatcaatgtatgttttttattccgattgatcgcagtgaggtgaatcaac

SEQ ID NO: 444442 - DNA, 75 bp, synthetic construct
  source 1..75: mol_type = other DNA
accagggtaagaaatctcaattccgagatcataaagagctaatatccaaactaatatcaaatcgtcaaccaggtc

SEQ ID NO: 444443 - DNA, 75 bp, synthetic construct
  source 1..75: mol_type = other DNA
ttgcatggctctcttacatggtatcaggatgattttttaatagttaatgagataagtgcatctcaggcatatgat

SEQ ID NO: 444444 - DNA, 75 bp, synthetic construct
  source 1..75: mol_type = other DNA
tactttgatagttttgtgaaacatcttccttatccggtgttgttcccaagagaaaatactgttgatgacttggtt

SEQ ID NO: 444445 - DNA, 75 bp, synthetic construct
  source 1..75: mol_type = other DNA
ttattcgtgaaggtgtgggcgttcatgcttttaacggtgaaatttttgtgcagccggtctgggaggtggagacca

SEQ ID NO: 444446 - DNA, 75 bp, synthetic construct
  source 1..75: mol_type = other DNA
cgcagctgtttcgtacgcgttttaaagccgtgagtccgaaacgggtggacacgccagggcacggtatggggaacc

SEQ ID NO: 444447 - DNA, 75 bp, synthetic construct
  source 1..75: mol_type = other DNA
tgataatgtatgttgttctattccagtttgataattctgactatcttctttatattcttgtcgaaaggttgttta

SEQ ID NO: 444448 - DNA, 75 bp, synthetic construct
  source 1..75: mol_type = other DNA
gaccacatcgtcgggtcatttttcagactcagttatcgaccaagctggcgttatctgggaataaatgaggaggat

SEQ ID NO: 444449 - DNA, 75 bp, synthetic construct
  source 1..75: mol_type = other DNA
atgaaaataccatctttggtgggacctgacgggaaaacatcccttcgggaatacgcaggatatcatggcggtgga

SEQ ID NO: 444450 - DNA, 75 bp, synthetic construct
  source 1..75: mol_type = other DNA
gataatccattgatttatatgctgatgaagtattcgcgctggtatgacacgaataacgtgacgctgggtggcgtc

SEQ ID NO: 444451 - DNA, 75 bp, synthetic construct
  source 1..75: mol_type = other DNA
agtggacgatgggaacggatcccgtgtgaacttcccaccgggcgtccggccatgctgcatattttcgagccggtg

SEQ ID NO: 444452 - DNA, 75 bp, synthetic construct
  source 1..75: mol_type = other DNA
caaatcgaaatacgtaagctgaggaaaaagctacaacgcattgaaatggagaatgaaatattaaaaaaggctact

SEQ ID NO: 444453 - DNA, 75 bp, synthetic construct
  source 1..75: mol_type = other DNA
caactgcgtgatgagcgtcagggcaaaacaccaaaagcctctccgataacaccagaacaaatcgaaatacgtgaa

SEQ ID NO: 444454 - DNA, 75 bp, synthetic construct
  source 1..75: mol_type = other DNA
tgattttaaaggtaaatcatatcttaacagcaaagacagttatgtaatgttgaatgataaacactggtttttttt

SEQ ID NO: 444455 - DNA, 75 bp, synthetic construct
  source 1..75: mol_type = other DNA
gaccacatcgtcgggtcatttttcagactcagttatcgaccgagctggcgctatcttggcatcaatgaggaggat

SEQ ID NO: 444456 - DNA, 75 bp, synthetic construct
  source 1..75: mol_type = other DNA
tcttactttatttctgtatttaaagatttctatggcatgaccccactccattatgttagccagcatagagaacgt

SEQ ID NO: 444457 - DNA, 75 bp, synthetic construct
  source 1..75: mol_type = other DNA
atgtgaacggcgttccgcttcgggagagcctaagctacaacgggggcggcgcaggatttggcgggcaaatggcag

SEQ ID NO: 444458 - DNA, 75 bp, synthetic construct
  source 1..75: mol_type = other DNA
agttgcgggcgtggaacccaccgggtgaaagtgtggatgcagccctgctgcccaactttacccgtggcaatgccc

SEQ ID NO: 444459 - DNA, 75 bp, synthetic construct
  source 1..75: mol_type = other DNA
ccttacaccagaggtgtttcgcgttgcagcgcaacatagcacagagcctgctgaaacagagtcggaaaaagaacg

SEQ ID NO: 444460 - DNA, 75 bp, synthetic construct
  source 1..75: mol_type = other DNA
caaataccagtatggcaacgtagcgctacgcccatcctcaccctgccatgcctgacgccagacgtctttcgcgtt

SEQ ID NO: 444461 - DNA, 75 bp, synthetic construct
  source 1..75: mol_type = other DNA
cggcatgtttattttcccgtcgattatcgcgctgattgtcggttttatcggcctgcgttacggcagtgactcccc

SEQ ID NO: 444462 - DNA, 75 bp, synthetic construct
  source 1..75: mol_type = other DNA
tggttttttattacatagtatcaatttatcctgcgccattgtctatggctttacagggagcttctgcggatgaaa

SEQ ID NO: 444463 - DNA, 75 bp, synthetic construct
  source 1..75: mol_type = other DNA
atcacctatggcgtgggtaaaacgctggtttcctattacgctgacggcaaaaatactaagcagttcctgccattc

SEQ ID NO: 444464 - DNA, 75 bp, synthetic construct
  source 1..75: mol_type = other DNA
ttggcatcaaatgcagcatgtatcttgtgggccgcttctttgattttccactcaagatatcgacctttttcggtg

SEQ ID NO: 444465 - DNA, 75 bp, synthetic construct
  source 1..75: mol_type = other DNA
ctggcgatagtggtgctcggcggtatgggctcgcaatttgcagtgattctggcggcagttctgctggtggtgtcg

SEQ ID NO: 444466 - DNA, 75 bp, synthetic construct
  source 1..75: mol_type = other DNA
catcagcgccgcgtttgcgggttttgccggaacgctgtttgcggcgcgtcagggctttgtcagcccggaatcctt

SEQ ID NO: 444467 - DNA, 75 bp, synthetic construct
  source 1..75: mol_type = other DNA
ctaaagatatcgacatttttcggcgatgcagatgctattttcacggtcgttgatttgcttagccttttcaccgct

SEQ ID NO: 444468 - DNA, 75 bp, synthetic construct
  source 1..75: mol_type = other DNA
ttgctgctggtactgaccgggccggaaacggaagggcggctacagcatatggttaatgtcctcaatagtcggcag

SEQ ID NO: 444469 - DNA, 75 bp, synthetic construct
  source 1..75: mol_type = other DNA
atccactggaataataccgggctggatatgggctatggcgcggcgtgggggcgttttgatggcaatcaggaaacg

SEQ ID NO: 444470 - DNA, 75 bp, synthetic construct
  source 1..75: mol_type = other DNA
cctcgtggcgctgctggtgcttgcggtagcgtggccgtttatggtgtcacgtgggacggtggatattgccactct

SEQ ID NO: 444471 - DNA, 75 bp, synthetic construct
  source 1..75: mol_type = other DNA
ctgtttgtcattaaccgcctgctgcggatgccgctggggcgtgcgtgggaagcgttgcgtgaagatgaaatcgcc

SEQ ID NO: 444472 - DNA, 75 bp, synthetic construct
  source 1..75: mol_type = other DNA
tttctggtctgctggtgctggggtacggcggtttttacgccatcggcgcttacacttttgcgctgctcaatcact

SEQ ID NO: 444473 - DNA, 75 bp, synthetic construct
  source 1..75: mol_type = other DNA
cggctgggatacgttcagcaatttctttggcctgaaatacgacccgtccgatcgcgtcatcttcctctacctggt

SEQ ID NO: 444474 - DNA, 75 bp, synthetic construct
  source 1..75: mol_type = other DNA
cggtggtttttacgccatcggcgcttacacctttgccttgctcaatcactattacggtcttggcttctggacctg

SEQ ID NO: 444475 - DNA, 75 bp, synthetic construct
  source 1..75: mol_type = other DNA
catccgatggcagtgggtgtttattggcactgcggtggtctttttcttccagcttgtgcgacctgcgtttcagaa

SEQ ID NO: 444476 - DNA, 75 bp, synthetic construct
  source 1..75: mol_type = other DNA
tcgaaatcaccgaggagcaggcgttttctaacgcagaaagcagtatgtataacattgaacaactgcataaatttg

SEQ ID NO: 444477 - DNA, 75 bp, synthetic construct
  source 1..75: mol_type = other DNA
ataaaaatatcctcacgctcatctcagcttagtcatctttttaatcagggtgtcaactctatggagttgttaatt

SEQ ID NO: 444478 - DNA, 75 bp, synthetic construct
  source 1..75: mol_type = other DNA
tcccagttatgtctgacttaacctatttagattttgatagtaatagcgagattttaaaaagcctgaccggaaaag

SEQ ID NO: 444479 - DNA, 75 bp, synthetic construct
  source 1..75: mol_type = other DNA
gacggcaattctggcgataaagcacccagtccgatggaaatggtgttgatggcggcaggtggttgtagtgccatt

SEQ ID NO: 444480 - DNA, 75 bp, synthetic construct
  source 1..75: mol_type = other DNA
atgaccccaggattgctgagaacagtattcagcgtggaagcggaaatacccccccggagccggtatctggcaggc

SEQ ID NO: 444481 - DNA, 75 bp, synthetic construct
  source 1..75: mol_type = other DNA
gacgctgttaaactgtttttcgcggcttttaatgccgcagtctggcaccgtatttctcggcgataatcccataaa

SEQ ID NO: 444482 - DNA, 75 bp, synthetic construct
  source 1..75: mol_type = other DNA
aagtccttgttgatcacaatcaaccttttcctcagggaaaaaaagtcgcgagatgctctcaagaaattactaata

SEQ ID NO: 444483 - DNA, 75 bp, synthetic construct
  source 1..75: mol_type = other DNA
atgaccggagcattgcgccgggatgcgtatgttctccccggacagacagtctcagttcgtagaatctataaatta

SEQ ID NO: 444484 - DNA, 75 bp, synthetic construct
  source 1..75: mol_type = other DNA
aacgataaaaaagttggctcctttagggaaggtgcgaataagcggggaaattcttctcggctgactcagtcattt

SEQ ID NO: 444485 - DNA, 75 bp, synthetic construct
  source 1..75: mol_type = other DNA
gtaccccttaccgtcattccttggctggcgaaacggtgacaatgcctgggtgtcatttattaatgcgctgagtca

SEQ ID NO: 444486 - DNA, 75 bp, synthetic construct
  source 1..75: mol_type = other DNA
agtaaaactgacctctgaacgccgcgaagaggcaccacgcctgtttacgcacattaatctgcattttatcgtcac

SEQ ID NO: 444487 - DNA, 75 bp, synthetic construct
  source 1..75: mol_type = other DNA
atgcaagcgcgtgtgaagtgggtcgaagggttaacctttctgggcgaatccgcctctggtcaccagattttaatg

SEQ ID NO: 444488 - DNA, 75 bp, synthetic construct
  source 1..75: mol_type = other DNA
ggcgcaaggcacaccagaagaggtgatgaccccaggattgctgagaacagtattcagcgtggaagcggaaatacc

SEQ ID NO: 444489 - DNA, 75 bp, synthetic construct
  source 1..75: mol_type = other DNA
tgtccgttggcagtgggtgtttatcggcacggcggtggtctttttcttccagcttttgcgaccggctttccagaa

SEQ ID NO: 444490 - DNA, 75 bp, synthetic construct
  source 1..75: mol_type = other DNA
taaatggtacgaggacggcacgctaaatctggcggcaaactgccttgaccgccatctgcaagaaaacggcgatcg

SEQ ID NO: 444491 - DNA, 75 bp, synthetic construct
  source 1..75: mol_type = other DNA
attactggatcaccgggcgtgtggacgatgtactgaacgtttctggtcaccgtctggggactgcggagattgaat

SEQ ID NO: 444492 - DNA, 75 bp, synthetic construct
  source 1..75: mol_type = other DNA
ccggttcggcaacgcgtccgttcttcggtgtgcaaccggcactggtagataacgaaggcaatccgctggagggcg

SEQ ID NO: 444493 - DNA, 75 bp, synthetic construct
  source 1..75: mol_type = other DNA
gaagaaagcattattactgacgatgaaaacccttttgtggcacatcgaccgtcagcggtgcagggggaagcaaga

SEQ ID NO: 444494 - DNA, 75 bp, synthetic construct
  source 1..75: mol_type = other DNA
cagaaaaacctgattgcctacgtcccgcagtcagaagaagtggactggtcctttcctgtactggtggaagatgtg

SEQ ID NO: 444495 - DNA, 75 bp, synthetic construct
  source 1..75: mol_type = other DNA
gtctttctggcgagagcgattgcacagcagggtgatgtgagatcctgctggatgaaccttttactggcgttgatg

SEQ ID NO: 444496 - DNA, 75 bp, synthetic construct
  source 1..75: mol_type = other DNA
tgtttattctctatacctccggttctaccggaaaaccaaaaggcgtactgcacactaccggcggttatctggtgt

SEQ ID NO: 444497 - DNA, 75 bp, synthetic construct
  source 1..75: mol_type = other DNA
ggaagcgtgggagtggtactggaaaaaatcggcaacgagaaatgtccggtggtcgatacctggtggcagaccgaa

SEQ ID NO: 444498 - DNA, 75 bp, synthetic construct
  source 1..75: mol_type = other DNA
ccgtatcagaaggtgaagaacacctcttttgcccctggcaatgtctcaattaaatggtacgaagacggcacgttg

SEQ ID NO: 444499 - DNA, 75 bp, synthetic construct
  source 1..75: mol_type = other DNA
gtgggagtggtactggaaaaaaatcggcaacgagaaatgtccggtggtcgatacctggtggcagaccgaaaccgg

SEQ ID NO: 444500 - DNA, 75 bp, synthetic construct
  source 1..75: mol_type = other DNA
tcacttccgacgaaggtgtgcgtgccgggcgcagcattccactgaagaaaaacgtcgatgacgcactaaaaaacc

SEQ ID NO: 444501 - DNA, 75 bp, synthetic construct
  source 1..75: mol_type = other DNA
ggcgcgcgtcgcgatgaagatggctattactggatcaccgggcgcgtggacgacgtgctgaacgtctccggtcac

SEQ ID NO: 444502 - DNA, 75 bp, synthetic construct
  source 1..75: mol_type = other DNA
gttaatcaggtaaaagacgctggtctgaaagggcgcggcggcgcgggcttttcgactggcttgaagtggagcctg

SEQ ID NO: 444503 - DNA, 75 bp, synthetic construct
  source 1..75: mol_type = other DNA
tatagagccagagttgggactgctggctataaaacagcacttaggggatttagccgtgaaggaaagaaaatattt

SEQ ID NO: 444504 - DNA, 75 bp, synthetic construct
  source 1..75: mol_type = other DNA
ctgagatatcattatgatgaagtcgattacaatactcattttggaggggagtattacccgagttttctattggaa

SEQ ID NO: 444505 - DNA, 75 bp, synthetic construct
  source 1..75: mol_type = other DNA
cgcagccgggttagccaggatgaaagcgaggcgtgacgcagctcgccagcgcaaacaggaatactactccccaac

SEQ ID NO: 444506 - DNA, 75 bp, synthetic construct
  source 1..75: mol_type = other DNA
cggcggcttttacgccatcggcgcttacacctttgcgctgctcaatcactattacggcttgggcttctggacctg

SEQ ID NO: 444507 - DNA, 75 bp, synthetic construct
  source 1..75: mol_type = other DNA
gaagataaagcgtcactggtgaatatcatctatgacaagcgtctgtctggtatgtcgatgtttgctatctgtaaa

SEQ ID NO: 444508 - DNA, 75 bp, synthetic construct
  source 1..75: mol_type = other DNA
atcaggtgatttctttggtgacaactcactggcaacaagacgtatcagaggcatatgtcggtacatcattcgttc

SEQ ID NO: 444509 - DNA, 75 bp, synthetic construct
  source 1..75: mol_type = other DNA
ttgcagtgggtgctgatcccgcgaatgcacgatttgttagataacaaccagccgttaccgggcgcttttgctgtt

SEQ ID NO: 444510 - DNA, 75 bp, synthetic construct
  source 1..75: mol_type = other DNA
ttgcagtgggtgcttatcccacgaatgcacgatttattagataacaaccagccattaccgggggcatttgccgtg

SEQ ID NO: 444511 - DNA, 75 bp, synthetic construct
  source 1..75: mol_type = other DNA
catctccgcgtttgccctgaaagcgtaccgtggctacatcttcctgcgtggcgagtatatcgaagcggcagtgaa

SEQ ID NO: 444512 - DNA, 75 bp, synthetic construct
  source 1..75: mol_type = other DNA
cgacccgaatgaaatcatatcctccggggatgtgcggttaatcgcaatcagggttgaaaactggacgcgcaaggc

SEQ ID NO: 444513 - DNA, 75 bp, synthetic construct
  source 1..75: mol_type = other DNA
gttataacgttgcctcgcgcaagcgtcgccggttcctcaatcggtggattaagtcgctggcgaccgaagccgggc

SEQ ID NO: 444514 - DNA, 75 bp, synthetic construct
  source 1..75: mol_type = other DNA
cgatttacgctcgtgggaaaccaggcataaccttgaaacgcttgccgaacgtgccggactggttacacgcagcga

SEQ ID NO: 444515 - DNA, 75 bp, synthetic construct
  source 1..75: mol_type = other DNA
agcggacagaacgcttgagccagttatacagcgagaacaggagataagggacgaacggctgatacaggagcgcga

SEQ ID NO: 444516 - DNA, 75 bp, synthetic construct
  source 1..75: mol_type = other DNA
cgcttacgcaacgggacaacgcgatgctgaacgagcaggtcatgcagttgagtcagcaggtgcagcacttgagcg

SEQ ID NO: 444517 - DNA, 75 bp, synthetic construct
  source 1..75: mol_type = other DNA
agctttgagcgcgtactgatgcccggtctcgaaaagaatcagtacagcatcctgtgggtggagcaccaggacaag

SEQ ID NO: 444518 - DNA, 75 bp, synthetic construct
  source 1..75: mol_type = other DNA
ccgcggtactggtgggcagcgccgacttcggccgtgcctcgggcctcaagccgcgggcgcgggtgcgtgccttcg

SEQ ID NO: 444519 - DNA, 75 bp, synthetic construct
  source 1..75: mol_type = other DNA
aaccgaagccatcccctacgacgggacgacatggatccgcctgaaacaggagtagcggaaaatgacagagctgga

SEQ ID NO: 444520 - DNA, 75 bp, synthetic construct
  source 1..75: mol_type = other DNA
tggagaaaaaccggcggagcgtactgcggactgccgggcggacatggctcaccatcctgatggtgtcagcgctgc

SEQ ID NO: 444521 - DNA, 75 bp, synthetic construct
  source 1..75: mol_type = other DNA
cagaactgacccgtaatgtgctggaactggcgcaacagcagggtttgcagattcattatcaatatcagttacagg

SEQ ID NO: 444522 - DNA, 75 bp, synthetic construct
  source 1..75: mol_type = other DNA
agattaaaggcgttacaggtgttgcgacaaattgtggtggtatcacttatccgcaaggcggctggctgtgtccgg

SEQ ID NO: 444523 - DNA, 75 bp, synthetic construct
  source 1..75: mol_type = other DNA
atcagcagcagaatcgccaacggttgattgattgcttcccgcaggcgcagtggacgaaagaagttgatgtcagtg

SEQ ID NO: 444524 - DNA, 75 bp, synthetic construct
  source 1..75: mol_type = other DNA
atcttgaccatcagagagcaggaaaacacgctggcgaaactcgaggcaaaaacctggggggtgacgttcgtcaat

SEQ ID NO: 444525 - DNA, 75 bp, synthetic construct
  source 1..75: mol_type = other DNA
gccatattccaacaacgccggaactggcgaagctgaagcaggtgctgtgctatgacggttatctcacgccacaaa

SEQ ID NO: 444526 - DNA, 75 bp, synthetic construct
  source 1..75: mol_type = other DNA
ttattgtgcggatgaggcccccgcgctcggtgcttccggcaatcgccagggggcgctgtatccgctcttaagtaa

SEQ ID NO: 444527 - DNA, 75 bp, synthetic construct
  source 1..75: mol_type = other DNA
ttgccggtaagaagacgcgtgctcgtgttgatggcattcgttatcaggttgatattaataaccttacccaacgcg

SEQ ID NO: 444528 - DNA, 75 bp, synthetic construct
  source 1..75: mol_type = other DNA
gtaatgttgtgattcttaaaggtgttactattggggataattctgttattggtgctggttgcatagttacaagag

SEQ ID NO: 444529 - DNA, 75 bp, synthetic construct
  source 1..75: mol_type = other DNA
acgaggtgtatcacatcaactggcaggatattcgacctgagcatctgctcacgatcatgtgctgttttgccacgg

SEQ ID NO: 444530 - DNA, 75 bp, synthetic construct
  source 1..75: mol_type = other DNA
agggatggaaagatacagagagctaaaactccagaagctattatccctgccgcaaaataacaaaggtgctttcga

SEQ ID NO: 444531 - DNA, 75 bp, synthetic construct
  source 1..75: mol_type = other DNA
ggcgcatcgaaaaatctggctgaaagcatcgacaaggtgctgaggcccaccagccttaaatgcggtgggcgacct

SEQ ID NO: 444532 - DNA, 75 bp, synthetic construct
  source 1..75: mol_type = other DNA
gtgtttttcaatgaaaaggtatcccctgcctatggtgaaggccttcagttggccttaatggcaaatcgtgaattc

SEQ ID NO: 444533 - DNA, 75 bp, synthetic construct
  source 1..75: mol_type = other DNA
taatgccgaactacaccatgcagacgcggcgctttgatctctccggctttctgttgctggcggttggcatggcgg

SEQ ID NO: 444534 - DNA, 75 bp, synthetic construct
  source 1..75: mol_type = other DNA
tgcagagcgcgtcggtggatgtggtatggatggcggaacagccgctttccccagggcagagttacgacatcaaaa

SEQ ID NO: 444535 - DNA, 75 bp, synthetic construct
  source 1..75: mol_type = other DNA
ggatcaaacatctggtagtggcgatcaacaagatggatctggtggattacagcgaagaaacgttcacccgcattc

SEQ ID NO: 444536 - DNA, 75 bp, synthetic construct
  source 1..75: mol_type = other DNA
tcgccaatgaaggcggcgtcgaagcctggatgatcgcgcaacaacataaaagcctgctgcgttttctgacctgtg

SEQ ID NO: 444537 - DNA, 75 bp, synthetic construct
  source 1..75: mol_type = other DNA
gtgagaagaataattcagatatcaggatggttgttattcattatgggtctgatcatcatcatgcttttttccggg

SEQ ID NO: 444538 - DNA, 75 bp, synthetic construct
  source 1..75: mol_type = other DNA
acaattaccgggcaatctggatatccgctttgtgccactctccgcgctggaaggcgataatgtggcttcgcaaag

SEQ ID NO: 444539 - DNA, 75 bp, synthetic construct
  source 1..75: mol_type = other DNA
agcctgctgcgttttctgacctgtggcagcgttgatgacggcaaaagtaccctgataggtcgcctgttgcacgat

SEQ ID NO: 444540 - DNA, 75 bp, synthetic construct
  source 1..75: mol_type = other DNA
attcgttatcaacatcagttgcaggatttattgcgtaaggatgacgggtggcaactgacatttgcagatcatcag

SEQ ID NO: 444541 - DNA, 75 bp, synthetic construct
  source 1..75: mol_type = other DNA
gcgtgaaggggaaaaactggcccccgtgatggcgaaaacgcgtattttgcgggcttactctggcgtgcgtccgct

SEQ ID NO: 444542 - DNA, 75 bp, synthetic construct
  source 1..75: mol_type = other DNA
ctgggatctgggggcaacacattgccgaatatgccgatctgcgcattcgcatgttcccggcgaaaggatcgctgc

SEQ ID NO: 444543 - DNA, 75 bp, synthetic construct
  source 1..75: mol_type = other DNA
ttgatggtaaagcttttaattgcccgcactgtggtgtttattccaagcaaagctggcggtcaatggtgggagttg

SEQ ID NO: 444544 - DNA, 75 bp, synthetic construct
  source 1..75: mol_type = other DNA
tacgtcgccgtacccgtgtcggaatgggcacttgtcagggcgaactctgtgcctgccgcgctgccgggctactgc

SEQ ID NO: 444545 - DNA, 75 bp, synthetic construct
  source 1..75: mol_type = other DNA
atctccctgcctgccccacttcgcggttctgccgtttatcgtcatggcgatcgcacacctgcgtggcttagcgaa

SEQ ID NO: 444546 - DNA, 75 bp, synthetic construct
  source 1..75: mol_type = other DNA
actgcgcgaaagcgaatttacccgctgggtttatcagggactgtgtggtctggagaaggagcagaaagatgcgct

SEQ ID NO: 444547 - DNA, 75 bp, synthetic construct
  source 1..75: mol_type = other DNA
agtcgacctccggcgcaacctctaaccgtgtacaaagtagcgacgtttttattgcccgctcacaccacggctccg

SEQ ID NO: 444548 - DNA, 75 bp, synthetic construct
  source 1..75: mol_type = other DNA
cagaacgaagtggagcagtccacttacaacttcgaatacgcggatgtggacttcctgttcacctgctttgagcag

SEQ ID NO: 444549 - DNA, 75 bp, synthetic construct
  source 1..75: mol_type = other DNA
ttttactgatgaagattacgaacgaatcaacagtgaagttgatcgcctctgcaaacgttgcgacccaataagcga

SEQ ID NO: 444550 - DNA, 75 bp, synthetic construct
  source 1..75: mol_type = other DNA
cattaatctgtcacctaaaggcgctgccgcactccttcgtctttgcctccaaaagctaatggtccacttaggcga

SEQ ID NO: 444551 - DNA, 75 bp, synthetic construct
  source 1..75: mol_type = other DNA
agtaccaattattcggtagaagagattgccaccaagatcctcgatatcatgggccttagccgccgaatgtactag

SEQ ID NO: 444552 - DNA, 75 bp, synthetic construct
  source 1..75: mol_type = other DNA
ctgacaccccgcataatccactcgacgtccttgcgcagcaaaccgttgccgccgcggcgatggaggcattacagg

SEQ ID NO: 444553 - DNA, 75 bp, synthetic construct
  source 1..75: mol_type = other DNA
gttatgcagtaacagatgcggaatccgcccgcgaatgcattagtgagaaccagattttaaaacgcatcgcgcgtc

SEQ ID NO: 444554 - DNA, 75 bp, synthetic construct
  source 1..75: mol_type = other DNA
cagtatcgtcaatctatcacctaaaggggctgcggcactccttcgtctatgcctccagaaactgatggttcattt

SEQ ID NO: 444555 - DNA, 75 bp, synthetic construct
  source 1..75: mol_type = other DNA
gttggatgtatttactccattgttgaaactttttgctaacgagccactcgaaagacttatgtatacgattatcat

SEQ ID NO: 444556 - DNA, 75 bp, synthetic construct
  source 1..75: mol_type = other DNA
cactggtccagcgagctgctgacatctgtcgtatcgttggtaatcaagcggtacatccgggtgaaattaacattg

SEQ ID NO: 444557 - DNA, 75 bp, synthetic construct
  source 1..75: mol_type = other DNA
taaatttaatcatgactggtgcggcgtaacgcagctagcctgggatgagaaaagccagcacaaaatcgcgcagat

SEQ ID NO: 444558 - DNA, 75 bp, synthetic construct
  source 1..75: mol_type = other DNA
gttgttgaattttgcaggagatcagcaagcgactcatagtgtggtggtactggcgaacgggcatcaaatcagccg

SEQ ID NO: 444559 - DNA, 75 bp, synthetic construct
  source 1..75: mol_type = other DNA
tgaaagtttcactgagcatccttgcccattattaaaagggccgcatctttgcgtgaatgatattattcatgggtg

SEQ ID NO: 444560 - DNA, 75 bp, synthetic construct
  source 1..75: mol_type = other DNA
gcctgatggcggaatgggctactgacgcggtgtgccgcaaactgggcaacacgcgcccctgcatcactgccgata

SEQ ID NO: 444561 - DNA, 75 bp, synthetic construct
  source 1..75: mol_type = other DNA
actgcgttgaacaaactaacggtctgtttatcactctgccggaagatgacctctccttccaggccacgttcatcc

SEQ ID NO: 444562 - DNA, 75 bp, synthetic construct
  source 1..75: mol_type = other DNA
ctctctttccaggctacgtttattcgcgcttgtcaggaggcggggatcagcgcggaagccattgatccgcagcaa

SEQ ID NO: 444563 - DNA, 75 bp, synthetic construct
  source 1..75: mol_type = other DNA
tctgtcacctaaaggcgctgccgcactcctgcgtttgagtcttcaaaagctgatggttcatctcggtgagccggg

SEQ ID NO: 444564 - DNA, 75 bp, synthetic construct
  source 1..75: mol_type = other DNA
tatttaaaaaagaagctttcaattgcccctattgtcatgcttttgccaggcaggaatggaatcagctatatgcgt

SEQ ID NO: 444565 - DNA, 75 bp, synthetic construct
  source 1..75: mol_type = other DNA
tatgcctgaaggtccacgccaaggtattgagaatcaggataagaaggcaagggaacagcaacaggccgctaacga

SEQ ID NO: 444566 - DNA, 75 bp, synthetic construct
  source 1..75: mol_type = other DNA
aaatggagcaggataatctcattagtcgggcaaagctggcgcatgatcagcagcgttttaacccggacatggtca

SEQ ID NO: 444567 - DNA, 75 bp, synthetic construct
  source 1..75: mol_type = other DNA
ttgcagaaccgcaccatgacggtaccgtgcactggcacctgctgtgcttcatgcgcaaaaaagaccgtcgatcca

SEQ ID NO: 444568 - DNA, 75 bp, synthetic construct
  source 1..75: mol_type = other DNA
cacgcttccacgcaacccttaacaacggcagaccaaatccgaagtggaccagcgccacagtccgccagagcagtg

SEQ ID NO: 444569 - DNA, 75 bp, synthetic construct
  source 1..75: mol_type = other DNA
gcgggagctggttgcccggctcaggctggtaaaaccgaaacggaaaaaggcatacaagcagaatatttctgagca

SEQ ID NO: 444570 - DNA, 75 bp, synthetic construct
  source 1..75: mol_type = other DNA
ctgatgctgccggggaaaggcgtaacgaaaaaacagcctccgttaccggacagcaagaaggctgaatgtagttta

SEQ ID NO: 444571 - DNA, 75 bp, synthetic construct
  source 1..75: mol_type = other DNA
gggcgtctctgcatcgtgttcagcagttccgcttctttggtattccgggacgtcaggcttaccgtgaacttcgct

SEQ ID NO: 444572 - DNA, 75 bp, synthetic construct
  source 1..75: mol_type = other DNA
aatcgctcagcaaaaactggtcgatatggttccggaagagctgcgggatatctttgcgccgttaattgacgagca

SEQ ID NO: 444573 - DNA, 75 bp, synthetic construct
  source 1..75: mol_type = other DNA
gcgtcgccatatgtcagctatgaagcagtgatccataagcgcgaacagcgccgtaaatcattggagtttttccgc

SEQ ID NO: 444574 - DNA, 75 bp, synthetic construct
  source 1..75: mol_type = other DNA
taagctatttctgctgattaatcagtttgaaaaacagcagattaaaaaaggtcgcgatatcaccagtgcgcggat

SEQ ID NO: 444575 - DNA, 75 bp, synthetic construct
  source 1..75: mol_type = other DNA
gctcgcatgagctggtcaacgaagacggtgacacgctggacatggaagatgtggtgaacgccagcaacagcaacc

SEQ ID NO: 444576 - DNA, 75 bp, synthetic construct
  source 1..75: mol_type = other DNA
aaaagcgtcgccgcaagctagtgccttatgaactgatcccaccatcgctggcgcgcatgctgtgtgcggactggt

SEQ ID NO: 444577 - DNA, 75 bp, synthetic construct
  source 1..75: mol_type = other DNA
gaccgcgaggagctgggcaccaacaccgggccgcgcttcaaatccgagctaatcaacccgcgcaagggcacgccg

SEQ ID NO: 444578 - DNA, 75 bp, synthetic construct
  source 1..75: mol_type = other DNA
tgctggctggtcaggcggcaaggcagcagggtgacaaaaaagtaggtgcgccggtactggatgatccgcgtcttg

SEQ ID NO: 444579 - DNA, 75 bp, synthetic construct
  source 1..75: mol_type = other DNA
aaatggagcaggataagctaattagccgggcaaagctggcgcatgagcagcagcgttttaatccagacatggtca

SEQ ID NO: 444580 - DNA, 75 bp, synthetic construct
  source 1..75: mol_type = other DNA
ccgggcaaagctggtgcatgagcagcagcgttttaatccggacatggtcatactggcggacgttaacgcccagcc

SEQ ID NO: 444581 - DNA, 75 bp, synthetic construct
  source 1..75: mol_type = other DNA
ctgatgctgccggggaaaggcgtaacgaaaaaacagcctccgttaccggatagcaaggaggctgaatgcagttta

SEQ ID NO: 444582 - DNA, 75 bp, synthetic construct
  source 1..75: mol_type = other DNA
cctgtgttaaaggtctggagcttatcgcagaaatgcgcagtgactgtgccgttttctacaccatcacctgtccgt

SEQ ID NO: 444583 - DNA, 75 bp, synthetic construct
  source 1..75: mol_type = other DNA
atttcgtaaggcgatgcacaaagccggattgcgctggtatggcgtgcgggtggctgagccgcatcatgacggtac

SEQ ID NO: 444584 - DNA, 75 bp, synthetic construct
  source 1..75: mol_type = other DNA
aaatggagcaggataagctcattagtcgggcaaagctggcgcatgagcagcagcgttttaatccggatatggtca

SEQ ID NO: 444585 - DNA, 75 bp, synthetic construct
  source 1..75: mol_type = other DNA
ggcgtggtctggctggggagatcagcaaggaaacgggtaaatccctgcgtgataacgctgaatacgttaatgcct

SEQ ID NO: 444586 - DNA, 75 bp, synthetic construct
  source 1..75: mol_type = other DNA
caaggaaacgggtaaatccctgcgtgataacgccgaatacgttaatgcctgggcgtctttgcatcgtgttcagca

SEQ ID NO: 444587 - DNA, 75 bp, synthetic construct
  source 1..75: mol_type = other DNA
gggcgtctctgcatcgtgttcagcagttccgcttctttggtattccggggcgccaggcttaccgtgaactgcgat

SEQ ID NO: 444588 - DNA, 75 bp, synthetic construct
  source 1..75: mol_type = other DNA
atgagtcatgacgatatgagcaactctagcggctttaacgaggccgctgcagcattttcatggaacggcccgaaa

SEQ ID NO: 444589 - DNA, 75 bp, synthetic construct
  source 1..75: mol_type = other DNA
gagctggcagtaaggttgcgcctggttaaaccgaaaaggtgtaaagactacaaacagcgaattacagatcatcag

SEQ ID NO: 444590 - DNA, 75 bp, synthetic construct
  source 1..75: mol_type = other DNA
atgaactcattccgggttcgctggcacgtatgttgtgcgccgactggtggtatcggaaattatggaagatgcgtt

SEQ ID NO: 444591 - DNA, 75 bp, synthetic construct
  source 1..75: mol_type = other DNA
atgcgcttaatctggtcattattttcggtagctgcgcagcattgattctgatgagctttttgtttcgtcgtggga

SEQ ID NO: 444592 - DNA, 75 bp, synthetic construct
  source 1..75: mol_type = other DNA
aagatatgcgtgtgttactggctccgatggagggagtgcttgactctctggtgcgtgaattgctgaccgaagtta

SEQ ID NO: 444593 - DNA, 75 bp, synthetic construct
  source 1..75: mol_type = other DNA
atggctcataacaatgaaatggcccatgcccaggcccgtattaatgaaatcaaccagcgtgttatcgctggcagc

SEQ ID NO: 444594 - DNA, 75 bp, synthetic construct
  source 1..75: mol_type = other DNA
gggcatccagttgctgcagatcgccatggctcataacaatgaaatggcccatgcccaggcccgtattaatgaaat

SEQ ID NO: 444595 - DNA, 75 bp, synthetic construct
  source 1..75: mol_type = other DNA
ctcattgaagaagggctggctctgaaactggagaacggacgttttgcaccgggcatccagttactgcagatcgcc

SEQ ID NO: 444596 - DNA, 75 bp, synthetic construct
  source 1..75: mol_type = other DNA
gggcgacgttactcaaagatcctgaactcatctaccagggtgcaaaagcgatgcgcgaagctgtaccggcgcatt

SEQ ID NO: 444597 - DNA, 75 bp, synthetic construct
  source 1..75: mol_type = other DNA
gatggagggtgtgcttgactctctggtgcgtgaattgctgaccgaagttaacgactacgatctgtgcatcaccga

SEQ ID NO: 444598 - DNA, 75 bp, synthetic construct
  source 1..75: mol_type = other DNA
tctggtggtgatggtggcgacgtttatctcgctggtcgccgccggatggatttttaccgcgctgatttatctcgt

SEQ ID NO: 444599 - DNA, 75 bp, synthetic construct
  source 1..75: mol_type = other DNA
agaattgtctcggtttctggcgctataaagaagacagcaaaggcaagccgaagaaagaagaagattccgccgttg

SEQ ID NO: 444600 - DNA, 75 bp, synthetic construct
  source 1..75: mol_type = other DNA
ttctttaacccggtccaccgaatgccgttggtagaaattattcgcggcgagaaaagctccgacgaaaccatcgcg

SEQ ID NO: 444601 - DNA, 75 bp, synthetic construct
  source 1..75: mol_type = other DNA
ctgattgaagaagggctggcgctcaagcttgaaaacgggcgttttgctcctggtgtacagcttttgcaaatcgcc

SEQ ID NO: 444602 - DNA, 75 bp, synthetic construct
  source 1..75: mol_type = other DNA
cggcagcactgcacgagtcaccggcaaacatcaaccgggcactcaacaccctcattgaagaagggttggccctga

SEQ ID NO: 444603 - DNA, 75 bp, synthetic construct
  source 1..75: mol_type = other DNA
ggcgtcgctgtttttccggctgatacgcacggcctgccgtcaacgtcttgaggggcgggaatcatgtcaaagctg

SEQ ID NO: 444604 - DNA, 75 bp, synthetic construct
  source 1..75: mol_type = other DNA
gcatccttcgcgtactcaaagccctgaaaggctactcgctcaccgggctgtccaatggcgaactagcggcggcgt

SEQ ID NO: 444605 - DNA, 75 bp, synthetic construct
  source 1..75: mol_type = other DNA
gaccaggaaagaaaggtgttgatggaaaatatcagcgccgccgagaaggcgatgatgcgcaataccgttcgtatt

SEQ ID NO: 444606 - DNA, 75 bp, synthetic construct
  source 1..75: mol_type = other DNA
cgccttcgggctaacaaccttgtcgccgcagagaatattggccggtggttgaccaagctggatgatgctgaaggg

SEQ ID NO: 444607 - DNA, 75 bp, synthetic construct
  source 1..75: mol_type = other DNA
ccgccgactaacccatttcaacccggtaaccagcaggcgttaaagcatggtggttacgcccgccgccttctgctt

SEQ ID NO: 444608 - DNA, 75 bp, synthetic construct
  source 1..75: mol_type = other DNA
gaactcgctgttttcgtcgatcagcgtagaaaacccaggacgaatgaccaaccggcgcattaccacgaccattgg

SEQ ID NO: 444609 - DNA, 75 bp, synthetic construct
  source 1..75: mol_type = other DNA
gtaaagcgataccgcaagcatcctcgcccacaccttgaggatctggaaagcggaagacgtgagtcactgccagat

SEQ ID NO: 444610 - DNA, 75 bp, synthetic construct
  source 1..75: mol_type = other DNA
gtggaatgcgcgacctgtcgattatcgcaaccccccccgcccgtcgtctggcggtcaaaacgtttgtccgcgaat

SEQ ID NO: 444611 - DNA, 75 bp, synthetic construct
  source 1..75: mol_type = other DNA
catctggagcacggtgtcggacgctatgccggaatgaccacgctggaagcaggcggcattactggcgagtatctg

SEQ ID NO: 444612 - DNA, 75 bp, synthetic construct
  source 1..75: mol_type = other DNA
caatttaggtttccagaaactgccagacctggccgttcaggcgcaacaaaaagcgccgctggatgcgctgcgtaa

SEQ ID NO: 444613 - DNA, 75 bp, synthetic construct
  source 1..75: mol_type = other DNA
accggcgatctggaaaacagtgccgaacgtttccaggctgatacgctggcgcgttttgaaagtcgcggcgtcgat

SEQ ID NO: 444614 - DNA, 75 bp, synthetic construct
  source 1..75: mol_type = other DNA
atgcggtgcttagtgacatgtgtcagccgctggcaatggatcgtctggtgtgcggcgatgttggctttggtaaaa

SEQ ID NO: 444615 - DNA, 75 bp, synthetic construct
  source 1..75: mol_type = other DNA
ccaccattatcgaaaccgggatcgacattcctaccgccaacaccattatcattgaacgcgcggatcacttcggtc

SEQ ID NO: 444616 - DNA, 75 bp, synthetic construct
  source 1..75: mol_type = other DNA
gtgaaacgcctgtccaccctggtagctgcgcatatgagtatgtgccttgatgtagcttgtggtgatttgtatgcc

SEQ ID NO: 444617 - DNA, 75 bp, synthetic construct
  source 1..75: mol_type = other DNA
agttcactggcatctgttgtgttttatgcgcaaaaaagatcgccgcaccattactgctttgttgcgtaagtttgc

SEQ ID NO: 444618 - DNA, 75 bp, synthetic construct
  source 1..75: mol_type = other DNA
ctatttacgtgagacgattaagccatgtttggaacgactggagcatgtacgcgacagtcagctatctgcatcttt

SEQ ID NO: 444619 - DNA, 75 bp, synthetic construct
  source 1..75: mol_type = other DNA
ctatttgcgtgagacgattaaaccatgtctggaacgactggagcatgtacgcgacagccagctatctgcatcttt

SEQ ID NO: 444620 - DNA, 75 bp, synthetic construct
  source 1..75: mol_type = other DNA
gaaagaggtcgatttactccttcgcggtggcagtattccgtcaggatcaggcctgcgtatcttctatcggaacca

SEQ ID NO: 444621 - DNA, 75 bp, synthetic construct
  source 1..75: mol_type = other DNA
ctaaataacggcaggccaaacccgacctggaccaacgcgacagtaagacaaagcagtgattatttggtcggcatg

SEQ ID NO: 444622 - DNA, 75 bp, synthetic construct
  source 1..75: mol_type = other DNA
tgctgtctgcctggtcagcaaaaaagcatatccctatgtcagctatgaagccgtgacgcataaacgtgagcagcg

SEQ ID NO: 444623 - DNA, 75 bp, synthetic construct
  source 1..75: mol_type = other DNA
cgaaatggagcaggataagctcattagccgggcaaagttggcgcatgagcagcagcgttttaacccggacatggt

SEQ ID NO: 444624 - DNA, 75 bp, synthetic construct
  source 1..75: mol_type = other DNA
ttctggcggacgtcaacgcccagccttcccatatcagcaagcccctgatgcaacgtattgaatacttcagcaacc

SEQ ID NO: 444625 - DNA, 75 bp, synthetic construct
  source 1..75: mol_type = other DNA
tccttcgcggcggcagtattccgtcaggagcaggcttgcgtatcttctatcggaaccagcgtttgtgggaagatg

SEQ ID NO: 444626 - DNA, 75 bp, synthetic construct
  source 1..75: mol_type = other DNA
atgagtcatgccgatatgaacaactgcagcggcgttaacgaggtcgccgcagcattctcatggaacagtccgaaa

SEQ ID NO: 444627 - DNA, 75 bp, synthetic construct
  source 1..75: mol_type = other DNA
agcattctcatggaacagcccgaaaaaggttattaacccttatctggacccggcggaagttgcgccggtttctgc

SEQ ID NO: 444628 - DNA, 75 bp, synthetic construct
  source 1..75: mol_type = other DNA
agcgacgtcgatgagatcctccacttttcggaactcggcgtggtattcctgatgtttatcatcggccttgagttg

SEQ ID NO: 444629 - DNA, 75 bp, synthetic construct
  source 1..75: mol_type = other DNA
aaaaccgaagccaaaatcatcagcctgttgagggagttacgcgcggaaggcaaaacgatgcttgtctcaacgcac

SEQ ID NO: 444630 - DNA, 75 bp, synthetic construct
  source 1..75: mol_type = other DNA
ctgatgctgccggggaaaggcgtaacgaaaaaacagcctccgttaccggaaagcaagcaggctgaatgtagttta

SEQ ID NO: 444631 - DNA, 75 bp, synthetic construct
  source 1..75: mol_type = other DNA
gaagaaagcattattactgacgatgaacccccttttgtggcacatcgaccgtcagcggtgcagagggaagaaaga

SEQ ID NO: 444632 - DNA, 75 bp, synthetic construct
  source 1..75: mol_type = other DNA
gcaagcgagcgatcagcaccaggcggaagagatgaacgccgaagatccgctgtttattctctacacctccggttc

SEQ ID NO: 444633 - DNA, 75 bp, synthetic construct
  source 1..75: mol_type = other DNA
gcctgcgcccgcattggcgcggtacattcggtgattttcggcggcttctcgccggaagccgttgccggacgcatt

SEQ ID NO: 444634 - DNA, 75 bp, synthetic construct
  source 1..75: mol_type = other DNA
gccggaagccgcggttgcgatgctggcctgcgcccgcattggcgcggtgcattcggtgattttcggcggcttctc

SEQ ID NO: 444635 - DNA, 75 bp, synthetic construct
  source 1..75: mol_type = other DNA
actcgcgttaagcgaagctctggcgagccagccggaatccccttctgtccccattcataaccaaattcgcggtga

SEQ ID NO: 444636 - DNA, 75 bp, synthetic construct
  source 1..75: mol_type = other DNA
gtgatgatccgttacggctggtcggcgaaaaactgattaaagaaaatactgccgctatgtacgcaacgctaaacg

SEQ ID NO: 444637 - DNA, 75 bp, synthetic construct
  source 1..75: mol_type = other DNA
ggcttgctgctcggtttgttctttatctctgtcggcatgtcgctcaatctcggggtgctttatacccatctgttg

SEQ ID NO: 444638 - DNA, 75 bp, synthetic construct
  source 1..75: mol_type = other DNA
acaacgcaatctgaacaatactgctcactatgtgttttggcttctcacattaatcgcttcatacacaccagataa

SEQ ID NO: 444639 - DNA, 75 bp, synthetic construct
  source 1..75: mol_type = other DNA
caatgccctacaacagcgagcttctcattgcctgtataccatcgccgaagagcaagcgacaaatagcgcgtcgat

SEQ ID NO: 444640 - DNA, 75 bp, synthetic construct
  source 1..75: mol_type = other DNA
gtagtaaagttcgcgcaaaaactcggctataaaggttttccagctttaaaactggcattgagcgaagcactggca

SEQ ID NO: 444641 - DNA, 75 bp, synthetic construct
  source 1..75: mol_type = other DNA
tcgggcaaagctggcgcatgaacagcagcgtttttacccggacatggtcattctggcggacgtcagcgcccagcc

SEQ ID NO: 444642 - DNA, 75 bp, synthetic construct
  source 1..75: mol_type = other DNA
tcttctggggcagtaaaaacattttcggtctggcgaatcctgacgatgtgcggaatatctgtgatgccaaaggca

SEQ ID NO: 444643 - DNA, 75 bp, synthetic construct
  source 1..75: mol_type = other DNA
atgattacacattttcgtcaagccatagaagaagcgctgccctggctttcctcatttggcgctgacccaacgggt

SEQ ID NO: 444644 - DNA, 75 bp, synthetic construct
  source 1..75: mol_type = other DNA
ccgtggttaacggcggtaacctcgacgggcaattcggcgcgctggcggcgtggctggcgattgactggctgaaaa

SEQ ID NO: 444645 - DNA, 75 bp, synthetic construct
  source 1..75: mol_type = other DNA
gtgcgctatgcgtttgtctccccaggacttgcggcgctgccggcgtttatcggtgaaaacccgatgaatatcgtc

SEQ ID NO: 444646 - DNA, 75 bp, synthetic construct
  source 1..75: mol_type = other DNA
aaatcctccacgcggtgggcggtgcggagaacatccgtatgctcacccattgcgcgacccggttgcgcatggagt

SEQ ID NO: 444647 - DNA, 75 bp, synthetic construct
  source 1..75: mol_type = other DNA
ttgcggatttactctgccggacgccccgctaactccgcgtcaggatattaaagcctttgtcgaactgcatatcga

SEQ ID NO: 444648 - DNA, 75 bp, synthetic construct
  source 1..75: mol_type = other DNA
gcgtatgttgtgcgccgactggtggtaccggaaattatggaaaatgcgttgcgaatggtgggaagagcagttgcg

SEQ ID NO: 444649 - DNA, 75 bp, synthetic construct
  source 1..75: mol_type = other DNA
tgtctggagcgactggattgtgtacgtgacagtcagctatctgcttctttccgttttatggcaagccatcaaggg

SEQ ID NO: 444650 - DNA, 75 bp, synthetic construct
  source 1..75: mol_type = other DNA
agtccaggggatttgatggcagcgagaaagaggtcgatttactgcttcgcggcggcagtattccatcaggagcag

SEQ ID NO: 444651 - DNA, 75 bp, synthetic construct
  source 1..75: mol_type = other DNA
aactgcatatcgaacagggctgtgtgctggaaagtaatgggcaatcaattggcgtggtgaatgcaattgtcgggc

SEQ ID NO: 444652 - DNA, 75 bp, synthetic construct
  source 1..75: mol_type = other DNA
caaggaaacgggtaaatccctgcgtgataatgctgaatacgttaatgcttgggcgtctctgcatcgtgttcagca

SEQ ID NO: 444653 - DNA, 75 bp, synthetic construct
  source 1..75: mol_type = other DNA
catccgtgaagaccgcgaggagctgggcaataacactgggccgcgctttaagtctgagttgattaacccgcgcaa

SEQ ID NO: 444654 - DNA, 75 bp, synthetic construct
  source 1..75: mol_type = other DNA
tatcactgttatcgcccatacccgtttgaaccaatggtgaggacggggcgaaatggcgaaatgttccagccttgg

SEQ ID NO: 444655 - DNA, 75 bp, synthetic construct
  source 1..75: mol_type = other DNA
aaaaataggtccgaggtgtgtcgcttttgttgaaagtgagattgatgaatggattgaaacgactattcgaaactc

SEQ ID NO: 444656 - DNA, 75 bp, synthetic construct
  source 1..75: mol_type = other DNA
actgggctataaaacgccgctacccgccattattgatgcctgcgccgcacgcggtattggcgcaattgcccccta

SEQ ID NO: 444657 - DNA, 75 bp, synthetic construct
  source 1..75: mol_type = other DNA
actgggctataaaacgccgctacccgccattattgatgcctgcgccgcacgcggtattggcgcgattgccccctg

SEQ ID NO: 444658 - DNA, 75 bp, synthetic construct
  source 1..75: mol_type = other DNA
aatgatgatcctcttgttgaaagaacatacgataacgttaactcaatagatgatggtgctccatatggagagtct

SEQ ID NO: 444659 - DNA, 75 bp, synthetic construct
  source 1..75: mol_type = other DNA
ttgccaaaaatcattatcattaccattctgattttgagcgctgtatttaatcttcctttattatttattatattc

SEQ ID NO: 444660 - DNA, 75 bp, synthetic construct
  source 1..75: mol_type = other DNA
cgccgcgccggggtgtcctattttctacaggaacgccgtggcgattacaagacgtggctgtctcttgaccgtgcc

SEQ ID NO: 444661 - DNA, 75 bp, synthetic construct
  source 1..75: mol_type = other DNA
ggatttatccggctgggaaaacgtctgggctttgagcgaatgccggatgatgaggatggcttcatggtgttcagg

SEQ ID NO: 444662 - DNA, 75 bp, synthetic construct
  source 1..75: mol_type = other DNA
ggcctattgacctggtgagcgcgtcgaaggcggagatgtccaaacgctatggctttatctatgtcgatcgcgacg

SEQ ID NO: 444663 - DNA, 75 bp, synthetic construct
  source 1..75: mol_type = other DNA
ggataaggtggaagccgacggcagcatcaacgacgattaccggatcagctatcttaacgaccatctggtgcaggt

SEQ ID NO: 444664 - DNA, 75 bp, synthetic construct
  source 1..75: mol_type = other DNA
tgtggctggatcgcgaaggtggcagcaagattaataccggcgttggcttctttgatcacatgctggatcagatcg

SEQ ID NO: 444665 - DNA, 75 bp, synthetic construct
  source 1..75: mol_type = other DNA
aatttacctaccagcgcgtgggcgatctcagcactgaaatgatcgagcacttcttccgttcgctctcttacacca

SEQ ID NO: 444666 - DNA, 75 bp, synthetic construct
  source 1..75: mol_type = other DNA
acgactgcgggagctgggctttaaggtacgtcagaaggggcgctggcggaaagcatccatgaaatacctgttaac

SEQ ID NO: 444667 - DNA, 75 bp, synthetic construct
  source 1..75: mol_type = other DNA
aagcaaatcactactcgtaagactgattgctttatgtggtgatatgatgataaaagttgattatccattgaaaaa

SEQ ID NO: 444668 - DNA, 75 bp, synthetic construct
  source 1..75: mol_type = other DNA
ttgaaggcgcggacgaccatacgatcatgggtatcccacaggcacgggatatggaccgggtcacctgcggcagat

SEQ ID NO: 444669 - DNA, 75 bp, synthetic construct
  source 1..75: mol_type = other DNA
tcaacgcgaaattccgcgagctgaaaaccggcggttacatcatcgatgcgacgtgctggtttgacgaagaggcca

SEQ ID NO: 444670 - DNA, 75 bp, synthetic construct
  source 1..75: mol_type = other DNA
atgagcaccactgacgcgttgacgtggtattacggcgtcattaatttgaaaacgggacaatcgacgacgactatt

SEQ ID NO: 444671 - DNA, 75 bp, synthetic construct
  source 1..75: mol_type = other DNA
atccgcaggtagtcggtctgaataatggttcagcgtgggggacggtgaataccgcgtatcaagggtgcctggtta

SEQ ID NO: 444672 - DNA, 75 bp, synthetic construct
  source 1..75: mol_type = other DNA
aaagatataaatgggatagtgctcatgagatgggacataaagttatggataaatatggttctgaatcatggacac

SEQ ID NO: 444673 - DNA, 75 bp, synthetic construct
  source 1..75: mol_type = other DNA
ataccgctgggtggcgcatggggcagttatcgtatgaccaccgaccagaacggcaagacgtcacaacaggcctct

SEQ ID NO: 444674 - DNA, 75 bp, synthetic construct
  source 1..75: mol_type = other DNA
tctgaaatacagccttgctgccggtgagtatcgtgccggtaattacgacagcggtaaaccgcgattcgggcaatt

SEQ ID NO: 444675 - DNA, 75 bp, synthetic construct
  source 1..75: mol_type = other DNA
ctctctgctggcattaacgattgccagctcgttacctgcgtatggcggaaaatttaaccctaaatttctcgaaaa

SEQ ID NO: 444676 - DNA, 75 bp, synthetic construct
  source 1..75: mol_type = other DNA
agtacgaagaatacagaaaaaatagattttaccatcacaaataaaggcgatgaggctgaagcgctttctctggaa

SEQ ID NO: 444677 - DNA, 75 bp, synthetic construct
  source 1..75: mol_type = other DNA
tgccggatagccagcgtggctttgctccggtggtgcgtggcatcgccaaaagtaacgctgaagtgagtatcgaac

SEQ ID NO: 444678 - DNA, 75 bp, synthetic construct
  source 1..75: mol_type = other DNA
cagtcttatcgcttcctctattcgaaaagttttgagggtggcactgacctgcgtctgttgggctacaaatactca

SEQ ID NO: 444679 - DNA, 75 bp, synthetic construct
  source 1..75: mol_type = other DNA
ttgagaaatggcacgctgtatacgggttcaacaaaatcatttcagccttgcctggctaacgcgcgttcaaccgtt

SEQ ID NO: 444680 - DNA, 75 bp, synthetic construct
  source 1..75: mol_type = other DNA
ggtcttaccttacgaggcattgaacaacggacgaatctccgttatgggcaaatagaaaaagcactgaaattattg

SEQ ID NO: 444681 - DNA, 75 bp, synthetic construct
  source 1..75: mol_type = other DNA
tcgtgggcatacggtgattatcgtcacccacgatccgcaggtcgctgctcaggccgagcgggtgatcgaaattcg

SEQ ID NO: 444682 - DNA, 75 bp, synthetic construct
  source 1..75: mol_type = other DNA
tgaaactggataaagaaaaagttcctatgacttctgataagaagccgccgcgcgaagggtgcctgatggtttact

SEQ ID NO: 444683 - DNA, 75 bp, synthetic construct
  source 1..75: mol_type = other DNA
ggcgtttgtgattacccctcctttgatgccaggtccggcgttgctggttgacgatatcgtggattctgcatggac

SEQ ID NO: 444684 - DNA, 75 bp, synthetic construct
  source 1..75: mol_type = other DNA
agattccgcagttggcatattgctttgtggtggtgaagaccgcgctattcatcaattcttccgtgaaagcgcctt

SEQ ID NO: 444685 - DNA, 75 bp, synthetic construct
  source 1..75: mol_type = other DNA
ataagttgctgcaaggtggcgtagattgtctgctgatttcacctgaacggttggcgaatcaggattttcttgaaa

SEQ ID NO: 444686 - DNA, 75 bp, synthetic construct
  source 1..75: mol_type = other DNA
aacaaagcaatggccacagttttccggtgtggtcgcgctgacggcagaaaaccgtaatcggctcttgaaactact

SEQ ID NO: 444687 - DNA, 75 bp, synthetic construct
  source 1..75: mol_type = other DNA
aatcgctacatcgaccgttgttaacgacggaattgccgtccggggctaatcccgtatcctcaccgattattaact

SEQ ID NO: 444688 - DNA, 75 bp, synthetic construct
  source 1..75: mol_type = other DNA
aggcacttctgacgacaggaagtgatggtaaagcgacttttgatgtgacgcaaaacgagacttatgggctggcaa

SEQ ID NO: 444689 - DNA, 75 bp, synthetic construct
  source 1..75: mol_type = other DNA
cttcgtcaacgcagcgacggccccgcgcaagttttttgtcatccggattacgccggagagatcggccttatcatg

SEQ ID NO: 444690 - DNA, 75 bp, synthetic construct
  source 1..75: mol_type = other DNA
gcaacaggcgctggaagcgcgtatttcagcggcgctgcgggagaagaaacagacccatttcctgcatcaaaataa

SEQ ID NO: 444691 - DNA, 75 bp, synthetic construct
  source 1..75: mol_type = other DNA
ccgttatggtttttaacggagagaaaaatgtgccggcagacagtctgaaaccgcagccacttattcttccggacc

SEQ ID NO: 444692 - DNA, 75 bp, synthetic construct
  source 1..75: mol_type = other DNA
cggttataaaattctttgtaagccgctgctttccggtaactatgaaattactgaacttgatccggtgaatgacca

SEQ ID NO: 444693 - DNA, 75 bp, synthetic construct
  source 1..75: mol_type = other DNA
acagcgattacggccgttaccataagcgtagtgaaattcagggtaatttgacacagcaattgggcacctatgggt

SEQ ID NO: 444694 - DNA, 75 bp, synthetic construct
  source 1..75: mol_type = other DNA
atggcgcgcagttgcctggaacatatcgcgtttctttaatcgtcaatgaacaaaaaatggaaacgcgcactctgg

SEQ ID NO: 444695 - DNA, 75 bp, synthetic construct
  source 1..75: mol_type = other DNA
gtgaatacttaccacatcacactaccctggccgccgagcaataaccgctactaccgccataatcgagggcgcacg

SEQ ID NO: 444696 - DNA, 75 bp, synthetic construct
  source 1..75: mol_type = other DNA
cctgctcttacaatttttttgcgatggcggagctgttgcaccgcctggcaaagggtgaaaaggggacgccagaat

SEQ ID NO: 444697 - DNA, 75 bp, synthetic construct
  source 1..75: mol_type = other DNA
ttgcagtggagcagtgattggtgctggtagtgtggttacaaagcccgtgctggtaaaaggcgtgtatgccggtaa

SEQ ID NO: 444698 - DNA, 75 bp, synthetic construct
  source 1..75: mol_type = other DNA
atggatggtcgtttcgcgcacttacacttcttttttcccttttctttatctgtattggcgcttacggttgcaggc

SEQ ID NO: 444699 - DNA, 75 bp, synthetic construct
  source 1..75: mol_type = other DNA
cagatagcatttgctcattatttattgttaatagtaatgtggcatcaatctccttagggaatgaatccttttcaa

SEQ ID NO: 444700 - DNA, 75 bp, synthetic construct
  source 1..75: mol_type = other DNA
gtgaatacttacgacatcacaataccctggcccccgagcaataaccgctagtaccgccataatcgcgggcgcacc

SEQ ID NO: 444701 - DNA, 75 bp, synthetic construct
  source 1..75: mol_type = other DNA
gtgaatacttaccacatcacaatcccctggcccccgagcaataaccgctagtaccgccataatcgcgggcgcaca

SEQ ID NO: 444702 - DNA, 75 bp, synthetic construct
  source 1..75: mol_type = other DNA
tcaggtcgttgattaccgcgttgtgaagatgcccgttaccaagggtggaaagctggagctgaccatcactgaact

SEQ ID NO: 444703 - DNA, 75 bp, synthetic construct
  source 1..75: mol_type = other DNA
gaggagtatggcccagccttcccagcaatcgtcgattgttataccagtccacccacgttagtgtggccagttcca

SEQ ID NO: 444704 - DNA, 75 bp, synthetic construct
  source 1..75: mol_type = other DNA
taaaaacgcaatgctggatatcggcctggctatgcctgtgaaaatccgcattgagtgccacatgccggatcgccg

SEQ ID NO: 444705 - DNA, 75 bp, synthetic construct
  source 1..75: mol_type = other DNA
tatccctgcgtgacgatccggcacaggaaaccctgcgtttcagcgccgatgccagccttgccttcccgtgcagtg

SEQ ID NO: 444706 - DNA, 75 bp, synthetic construct
  source 1..75: mol_type = other DNA
cgtaaagtcaaaggtgttattcactgggtgagcgcggcacatgcgctgccggttgaaatccgtctgtacgaccgt

SEQ ID NO: 444707 - DNA, 75 bp, synthetic construct
  source 1..75: mol_type = other DNA
catcagcgatgccctggaaggtattacgcactctctgtgtacgcttgagttccaggacaaccgtcgcctgtacga

SEQ ID NO: 444708 - DNA, 75 bp, synthetic construct
  source 1..75: mol_type = other DNA
tctaatgcccgcaatggctactcgtcaaaaacgctgctttgcgatgacggcgagattgagctgaacacaccgtga

SEQ ID NO: 444709 - DNA, 75 bp, synthetic construct
  source 1..75: mol_type = other DNA
gatcatgcgctacgtttgcgccagtctctggaacgtttacgagtcgtttgttggccgtggaaaggtgcgcctggt

SEQ ID NO: 444710 - DNA, 75 bp, synthetic construct
  source 1..75: mol_type = other DNA
tgcctcgatagccgccattctacggcggaaaaaccggtatttaaccgcaccgttggctgcgtgatacctgggcga

SEQ ID NO: 444711 - DNA, 75 bp, synthetic construct
  source 1..75: mol_type = other DNA
ctgcggatgatttcctgtcggtgattaacccggaatcgctggtgatcaaacagggctttgctgaaccgtcgctga

SEQ ID NO: 444712 - DNA, 75 bp, synthetic construct
  source 1..75: mol_type = other DNA
cagaaagtggtgccgacgcgtggagcgattgtcagagcgcgttttgatacccgtgttggttaccgcgtattaatg

SEQ ID NO: 444713 - DNA, 75 bp, synthetic construct
  source 1..75: mol_type = other DNA
tcgtttcttatattccaagagcttcgaaagcggcaccgatttccgcctcgcgggctatcgatactctaccagcgg

SEQ ID NO: 444714 - DNA, 75 bp, synthetic construct
  source 1..75: mol_type = other DNA
gcagcatgggaatgaaacgtattgtggtgcaggtggttaaccgctttggttatcgtcgggtgctggtggcaacca

SEQ ID NO: 444715 - DNA, 75 bp, synthetic construct
  source 1..75: mol_type = other DNA
agaaagctggatacgcatcgtattaggtaacactgtaacagtgggtagcggagcgaccattttaacaacagaaat

SEQ ID NO: 444716 - DNA, 75 bp, synthetic construct
  source 1..75: mol_type = other DNA
ctggaacgacgcaggtaaacagaacacggtatcggcgggttacaacggacgtattggcaaggtcagttacagtat

SEQ ID NO: 444717 - DNA, 75 bp, synthetic construct
  source 1..75: mol_type = other DNA
atcaggtggcgcgcggcacggtccctgaatctttatgggatgaaggtatcccggcattgctactggattacagtt

SEQ ID NO: 444718 - DNA, 75 bp, synthetic construct
  source 1..75: mol_type = other DNA
tggttctttttggcacttgtgctctgctctactcacaaggcgcgaccacgccgttaattatcccgcttgccgtgg

SEQ ID NO: 444719 - DNA, 75 bp, synthetic construct
  source 1..75: mol_type = other DNA
aaatgctgatggttacgacagatgaagtctggtttcggtatctcgactattcgggccagacaaaggcggtccggg

SEQ ID NO: 444720 - DNA, 75 bp, synthetic construct
  source 1..75: mol_type = other DNA
cgaccggtggtcgtctgtatgccgcaggccgcgcgggtgaacgtttcggcgtgcgtaactccggtgctatcaccg

SEQ ID NO: 444721 - DNA, 75 bp, synthetic construct
  source 1..75: mol_type = other DNA
ctatcatttttcatttatggtcgaatgaaattcttgccgacaattttaactatagttttatccgcggcggcagca

SEQ ID NO: 444722 - DNA, 75 bp, synthetic construct
  source 1..75: mol_type = other DNA
tgcataaatacgagaataatagcagcatcaaacctggtgcgacgctttccgtaggattgttcctgctggcgacgg

SEQ ID NO: 444723 - DNA, 75 bp, synthetic construct
  source 1..75: mol_type = other DNA
tcttgcatcttatgttgccgttacgggagtattcgtgcttccaacgtatccaacatcactcgccgcgatggaatt

SEQ ID NO: 444724 - DNA, 75 bp, synthetic construct
  source 1..75: mol_type = other DNA
gcgaacagagcacattttatgggctttaatatttttacagcaataagaacattaaaagaacaaaaagaagaaata

SEQ ID NO: 444725 - DNA, 75 bp, synthetic construct
  source 1..75: mol_type = other DNA
ttacgaatatcagcgcattgatgttaatagcccaacctggggcggtttaccgcgctggaatactgatggcagcag

SEQ ID NO: 444726 - DNA, 75 bp, synthetic construct
  source 1..75: mol_type = other DNA
agtttctacaacttcaacggtaacttcccgcagaccaactgggcaccgcaaagcctggcacaggacgataccaca

SEQ ID NO: 444727 - DNA, 75 bp, synthetic construct
  source 1..75: mol_type = other DNA
ctggttcggcattatgaatgtctggacgctgctcgttcccgcagcacttttcttttttggtgccgggatgctgtt

SEQ ID NO: 444728 - DNA, 75 bp, synthetic construct
  source 1..75: mol_type = other DNA
tcggcaatggcttacggggacaccgacgggttacgtatcaggcggtacgcaccttcaacctgagcagtgaagtgg

SEQ ID NO: 444729 - DNA, 75 bp, synthetic construct
  source 1..75: mol_type = other DNA
ttaatatttttacagcaataagaacattaaaagaacaaaaagaagaaatagaaaagctcaaacacggacataaag

SEQ ID NO: 444730 - DNA, 75 bp, synthetic construct
  source 1..75: mol_type = other DNA
agtaggtgcaagcttaaatctcagtaagagctttaataatatttcggtatctctgaatgccggatattcccgact

SEQ ID NO: 444731 - DNA, 75 bp, synthetic construct
  source 1..75: mol_type = other DNA
gatggagacgccgcccacgattcatgactttggtggcttcccgcaggcgctgtacgatacgcattatcctgctcc

SEQ ID NO: 444732 - DNA, 75 bp, synthetic construct
  source 1..75: mol_type = other DNA
gcccgtaaaggcgcaaaagtgggtgccgccgttggcgcggtcactggcgttctgaccggcaatggtcttgaaggc

SEQ ID NO: 444733 - DNA, 75 bp, synthetic construct
  source 1..75: mol_type = other DNA
atgacggtgcgtctgtatcatgacgcgatggtggctgaagtgtgttcaagtcagcagatttttcgcttcaaagcg

SEQ ID NO: 444734 - DNA, 75 bp, synthetic construct
  source 1..75: mol_type = other DNA
aatgttggtcgccagtggcaacgtggtgcataacctgcgtacagtgaagtggcacggtgatagttcaccgtatcc

SEQ ID NO: 444735 - DNA, 75 bp, synthetic construct
  source 1..75: mol_type = other DNA
acgttatcgaacccaacgccagagcattatttgccgttgttgtatgtgttaggtgcgtgggatgggcaggagcca

SEQ ID NO: 444736 - DNA, 75 bp, synthetic construct
  source 1..75: mol_type = other DNA
tgtacgacacccattatccggctcctggatcaccggctttggctcagcgattggttgagctgttagcgccagtgc

SEQ ID NO: 444737 - DNA, 75 bp, synthetic construct
  source 1..75: mol_type = other DNA
accgctgaacgtgtagaaaaatgggttaaacagatttctgaagagctgcatctcgacgaaattctcaatgcctga

SEQ ID NO: 444738 - DNA, 75 bp, synthetic construct
  source 1..75: mol_type = other DNA
cttatctttatctgtatgtttttgctggctgtctttacattttatgagtttatttcttcgatgagcatacgctat

SEQ ID NO: 444739 - DNA, 75 bp, synthetic construct
  source 1..75: mol_type = other DNA
taataaaaacttttacaatgcagaatttgatgctgcacggcaatgctatatcattgaaaatgatgcaaacagcca

SEQ ID NO: 444740 - DNA, 75 bp, synthetic construct
  source 1..75: mol_type = other DNA
gcaattcggcttgatgcacaaatcaggaaccagtttcatcaactgaaagaggatgagcacttccttcgatatcgg

SEQ ID NO: 444741 - DNA, 75 bp, synthetic construct
  source 1..75: mol_type = other DNA
cgaaaccggagcatggaaagacgctgttgactgggtactcaaagaggcttgcaaggctgtaaacattagcatcaa

SEQ ID NO: 444742 - DNA, 75 bp, synthetic construct
  source 1..75: mol_type = other DNA
ttgaaccgcgcggtgcaaccatcgttggtcactggccaaccgcgggctaccacttcgaagcgtcaaaaggtctgg

SEQ ID NO: 444743 - DNA, 75 bp, synthetic construct
  source 1..75: mol_type = other DNA
gtcagactggatgaatagccgtttgaccaccacgctggccatcttccgtattgagcaggataatgtcgcgcagtc

SEQ ID NO: 444744 - DNA, 75 bp, synthetic construct
  source 1..75: mol_type = other DNA
gttaagtaacaaagctgattttatatctgtcgacaaggaatctgccaaacttttcatttcaggcgttgactttcc

SEQ ID NO: 444745 - DNA, 75 bp, synthetic construct
  source 1..75: mol_type = other DNA
taacatttttagaactggttattcctcccatctctaatcaagaagcggtttggtttaaagacgaaccttttgccg

SEQ ID NO: 444746 - DNA, 75 bp, synthetic construct
  source 1..75: mol_type = other DNA
acgaccagaccatccgcgagcgagtacaggcagcaggtgtcgtgggtgctggcggcgcaggttttccaacccata

SEQ ID NO: 444747 - DNA, 75 bp, synthetic construct
  source 1..75: mol_type = other DNA
taaaaaatggcgcaacagcggttccttttgatatcacgctacagaactgtattcgtgttcgcaatatagaaacaa

SEQ ID NO: 444748 - DNA, 75 bp, synthetic construct
  source 1..75: mol_type = other DNA
gctggccagtggtgctgacaaggatgcagttgtgcgggaggctcttcttcgtgagtttgacaacccgccctttaa

SEQ ID NO: 444749 - DNA, 75 bp, synthetic construct
  source 1..75: mol_type = other DNA
ttaagtgccggagcgcgaaatttactgcaacactacaattttccggggaacgttcgtgaactggaacatgctatt

SEQ ID NO: 444750 - DNA, 75 bp, synthetic construct
  source 1..75: mol_type = other DNA
ctcatcttcgtgctgaaggtggtggatttattcccctgaaaattggcataaacaatgatatttcagcatttctgg

SEQ ID NO: 444751 - DNA, 75 bp, synthetic construct
  source 1..75: mol_type = other DNA
tgcatggacgctgacagttctgacagcactgttacgccaggcaggttgcccgacggtttatcctcttgcccttgc

SEQ ID NO: 444752 - DNA, 75 bp, synthetic construct
  source 1..75: mol_type = other DNA
tgctggttgacgatatcgtggattctgcatggacgctgacagttctgacagcactgttacgccaggcaggttgcc

SEQ ID NO: 444753 - DNA, 75 bp, synthetic construct
  source 1..75: mol_type = other DNA
ggcggcgcaggttttccaacccatattaagctacaagcgcgtgttgacactttcctggtgaatgcggcggaatgc

SEQ ID NO: 444754 - DNA, 75 bp, synthetic construct
  source 1..75: mol_type = other DNA
gaacccatgttgaaagtggaccagcagttaatggcacagcaagccagccgcctgctccgcggtgttcactatgca

SEQ ID NO: 444755 - DNA, 75 bp, synthetic construct
  source 1..75: mol_type = other DNA
gtggcgaaaccaataacggtaaccgtccccatcggcatgtctttacgtgaagtcctggcgctggcgggcggcgca

SEQ ID NO: 444756 - DNA, 75 bp, synthetic construct
  source 1..75: mol_type = other DNA
tattttcaacccgacgtttactcttcatctattagaagagagcattgctgaagcctgggttacccgtaaaccgac

SEQ ID NO: 444757 - DNA, 75 bp, synthetic construct
  source 1..75: mol_type = other DNA
atgtgggtaacgggcaaaaccaaattcctgatatgtcagcgtgggagtgtgggggagatacaacgacgggatgga

SEQ ID NO: 444758 - DNA, 75 bp, synthetic construct
  source 1..75: mol_type = other DNA
tgaaaccaagaatggctatggacggattgttcatcttaattcactggcgatggacgtaatcagaacactgccaac

SEQ ID NO: 444759 - DNA, 75 bp, synthetic construct
  source 1..75: mol_type = other DNA
ctgttcgggggttcactgacactgcgtgactacgatggtcaggttgcagaggctatggccctggtacgagcgctg

SEQ ID NO: 444760 - DNA, 75 bp, synthetic construct
  source 1..75: mol_type = other DNA
accaggtgacgaaaaacttctcgttacaggggaacgtcaataacctgttcgacaaaacctacgataccaacgtgg

SEQ ID NO: 444761 - DNA, 75 bp, synthetic construct
  source 1..75: mol_type = other DNA
ccgacaccgtgacaccgtatggcaccttccgcgccgagcaaggtagctacgcgctggtggatctcttcacccgct

SEQ ID NO: 444762 - DNA, 75 bp, synthetic construct
  source 1..75: mol_type = other DNA
ggactggatgaatagccgtctgaccaccacgttagccatcttccgtattgagcaggataatgtcgctcagtccac

SEQ ID NO: 444763 - DNA, 75 bp, synthetic construct
  source 1..75: mol_type = other DNA
tatcgcaacgttaatttatctgccctttgttgtggtggctaacaaagcacaaaacgcgattgataaagaagagag

SEQ ID NO: 444764 - DNA, 75 bp, synthetic construct
  source 1..75: mol_type = other DNA
tcgatacggatgatggcttattcttttaccgccccggatattatgaaggcactggtagcagccaaaaaacgggga

SEQ ID NO: 444765 - DNA, 75 bp, synthetic construct
  source 1..75: mol_type = other DNA
acgctggtcagcccgccggaaggcatcaacagcacggtgacgattaaatccctgaccggcggaacggacagggaa

SEQ ID NO: 444766 - DNA, 75 bp, synthetic construct
  source 1..75: mol_type = other DNA
taaagctcatccgtgaatctgaacgccttaaaactaaggaacttgctgaattaattggaattaattactacacat

SEQ ID NO: 444767 - DNA, 75 bp, synthetic construct
  source 1..75: mol_type = other DNA
aggggcgtgggatgggcaggagccaattaccattccggtcgatggtatagaaatgggcagtttaagtatgctgtc

SEQ ID NO: 444768 - DNA, 75 bp, synthetic construct
  source 1..75: mol_type = other DNA
tcatcgtaactgggtcattaagttacctgatagcgttccgacatcggtttcgcgctctttctcagcattaattcc

SEQ ID NO: 444769 - DNA, 75 bp, synthetic construct
  source 1..75: mol_type = other DNA
aaaagttgaaacagggagagcttcctttttctgtatcaatgctgatttacgacctccgtaagccgacaattattt

SEQ ID NO: 444770 - DNA, 75 bp, synthetic construct
  source 1..75: mol_type = other DNA
aagccccgactggcagctttgagctggcaactccacgtgatcgtaatggttattttgaaccccaactggtgaaga

SEQ ID NO: 444771 - DNA, 75 bp, synthetic construct
  source 1..75: mol_type = other DNA
ggatggtatcctaacgccattaatcaaacagttaacagaaaccgctctggccgctgaactcgactcccatctggc

SEQ ID NO: 444772 - DNA, 75 bp, synthetic construct
  source 1..75: mol_type = other DNA
aacggcaagccaatcgatgatacgcactctcatggcggtgttcagcgcggtggaagcagtaccgacggggtaaac

SEQ ID NO: 444773 - DNA, 75 bp, synthetic construct
  source 1..75: mol_type = other DNA
ggtgctgagacgacgcttacatctgaacgggaaacaacaaagaaccagatccgtgtcgccttgcctggcattgtt

SEQ ID NO: 444774 - DNA, 75 bp, synthetic construct
  source 1..75: mol_type = other DNA
aggctaagttgcatctccgtattgacgacgattacggagattcagaccttaccttaaaaattcagggcggcagcg

SEQ ID NO: 444775 - DNA, 75 bp, synthetic construct
  source 1..75: mol_type = other DNA
caagaaagatgcagcaccggatgattcctcacattcaggaaagtacactccctgtagcattgagcaaggtgaagg

SEQ ID NO: 444776 - DNA, 75 bp, synthetic construct
  source 1..75: mol_type = other DNA
tctcgtgccatgcttattggttcatattctgaattatcgttatcaaaagccagggaactggcaaaagaactttcc

SEQ ID NO: 444777 - DNA, 75 bp, synthetic construct
  source 1..75: mol_type = other DNA
catccggatatcctgcgacgccgtatcgagaaagacatcaatcctaatattgggcatctaaaaatcgaagatgtt

SEQ ID NO: 444778 - DNA, 75 bp, synthetic construct
  source 1..75: mol_type = other DNA
aatccggccaagcattaaccggcaaggatggtatcctaacgccattaatcaaacagttaacagaaaccgctctgg

SEQ ID NO: 444779 - DNA, 75 bp, synthetic construct
  source 1..75: mol_type = other DNA
gattccgcatattcaagaaagtacactccctgtagcattgagcaaggtgaagagtaacctgcccgacgtgcctaa

SEQ ID NO: 444780 - DNA, 75 bp, synthetic construct
  source 1..75: mol_type = other DNA
cgatggacccgccgtatttttgattacggtatcaaacgacatatgcttgaaagcaatcctaccagtgcttttgaa

SEQ ID NO: 444781 - DNA, 75 bp, synthetic construct
  source 1..75: mol_type = other DNA
cgtagtgacgacggcagcacctattttgatcttaatcctgatacccggaaaattaaaattgtcgccccgggtggt

SEQ ID NO: 444782 - DNA, 75 bp, synthetic construct
  source 1..75: mol_type = other DNA
cgaccgaacaaagtggtacttatttaattttatttagcgccagtgatgccttgttttggttcttcccgataatcc

SEQ ID NO: 444783 - DNA, 75 bp, synthetic construct
  source 1..75: mol_type = other DNA
tacatgactggttgtgtttcccacgacgaaagcattaataaaaatgcgcagggcaacatactgaatatgatcccc

SEQ ID NO: 444784 - DNA, 75 bp, synthetic construct
  source 1..75: mol_type = other DNA
atggcgaaggaagcctcacaagaacgcgtaagaaaagcttcggatggtatgcagaagtgatcaaaacgcgggggc

SEQ ID NO: 444785 - DNA, 75 bp, synthetic construct
  source 1..75: mol_type = other DNA
ttgccagcagaatatcaggtcgaatccgtgattaaacttcaggttcccgctctggacggtgaacgccacctggtg

SEQ ID NO: 444786 - DNA, 75 bp, synthetic construct
  source 1..75: mol_type = other DNA
atgggtaaaaaaacagcaccgttactcccttatacgaatcagatgcttagtgaatttggtgagcggctgaaactt

SEQ ID NO: 444787 - DNA, 75 bp, synthetic construct
  source 1..75: mol_type = other DNA
aaactgggatttaccggacgtggggaagggattgcctgtgaagctgtggcgctactcattaaggcaacaaaatga

SEQ ID NO: 444788 - DNA, 75 bp, synthetic construct
  source 1..75: mol_type = other DNA
aaaaagacagcatcgagatgcgcaaaatttatgcaggctttattgcgcaacagattgaaaacggtaattctgtca

SEQ ID NO: 444789 - DNA, 75 bp, synthetic construct
  source 1..75: mol_type = other DNA
ttttcgcccgacagccgtgtatggtcccggcgataaagagttaaaaccgctgtttgactggatgctgcgcggtct

SEQ ID NO: 444790 - DNA, 75 bp, synthetic construct
  source 1..75: mol_type = other DNA
cgatgagtgcctgctggtgttctccgatcgctgcattgatttctggtggcagaacggtggcgtacaggaggcggt

SEQ ID NO: 444791 - DNA, 75 bp, synthetic construct
  source 1..75: mol_type = other DNA
atgaccagcatttgtggaaaaacatctctgcgaaaaatgattgtcagcgtatggcgtttaccctaagcgcctata

SEQ ID NO: 444792 - DNA, 75 bp, synthetic construct
  source 1..75: mol_type = other DNA
tcgtgatgcgcgacccggtgctgtaccgtattaagtttgctgaacaccaccagactggcaacaagtggtgcatct

SEQ ID NO: 444793 - DNA, 75 bp, synthetic construct
  source 1..75: mol_type = other DNA
tcgcttgattaccagcgtgctaatgtcaaagtgattgcttctgatgcgggtgttaccgcttgccacaatggcgga

SEQ ID NO: 444794 - DNA, 75 bp, synthetic construct
  source 1..75: mol_type = other DNA
tatcaaaggccagagagacagccaaagagctatcggctcgcgttgcgctgggctatgacgttgcaggagagaagc

SEQ ID NO: 444795 - DNA, 75 bp, synthetic construct
  source 1..75: mol_type = other DNA
gacaaagtgggcaaagcccgtatccgcaccgtgcgcggctttggctatatgctggtcgcaaatgaggaaaactaa

SEQ ID NO: 444796 - DNA, 75 bp, synthetic construct
  source 1..75: mol_type = other DNA
atgaaaatactgattgttgaagacgatacgctgttattgcaggggctgattctggcggcacaaaccgaaggctac

SEQ ID NO: 444797 - DNA, 75 bp, synthetic construct
  source 1..75: mol_type = other DNA
aaaatacttgaatttgttgagctggatgaaactgagcttgttgattttggtaaagatatcagaatcgttttggct

SEQ ID NO: 444798 - DNA, 75 bp, synthetic construct
  source 1..75: mol_type = other DNA
agaccagattgcgggcacgctgtcagggtttggtgaactatttacaatactggctctggttgtattgtatttttt

SEQ ID NO: 444799 - DNA, 75 bp, synthetic construct
  source 1..75: mol_type = other DNA
cacatgatgaaagtgcgcggaaaataggggcgtacttaatgtggacggcggtgagtaccacatgtgtgaccagtt

SEQ ID NO: 444800 - DNA, 75 bp, synthetic construct
  source 1..75: mol_type = other DNA
catatgcataatttaactccccgtgagaagtttgcagaattaagtcgggcagtaactttactttataccaaccgc

SEQ ID NO: 444801 - DNA, 75 bp, synthetic construct
  source 1..75: mol_type = other DNA
aaaactagccgaaaaatacacatcagacaagattattatatctggtggacatactgttgtgaatttgaatgaccg

SEQ ID NO: 444802 - DNA, 75 bp, synthetic construct
  source 1..75: mol_type = other DNA
atactgcccgatgcactgcatgccaccattgcggcactgatgacagtttacgatcaggagctgctcatgaaggag

SEQ ID NO: 444803 - DNA, 75 bp, synthetic construct
  source 1..75: mol_type = other DNA
tctgacaccggaaaataaagctgagcatgaagagatcaaagcggcgttgttccgggaaatcaggaagattgctga

SEQ ID NO: 444804 - DNA, 75 bp, synthetic construct
  source 1..75: mol_type = other DNA
ttggtgtggttatcgcttacaccaccctgtatgtgatagcgtttattatttgcccgtttattcgcgtcgaacaac

SEQ ID NO: 444805 - DNA, 75 bp, synthetic construct
  source 1..75: mol_type = other DNA
attcatggaatccggtcgtttacacccgacagaagctggtacaccacagggaggcattatttcccctgtactggc

SEQ ID NO: 444806 - DNA, 75 bp, synthetic construct
  source 1..75: mol_type = other DNA
acataataaaatcaacacatgagctaaatataaaacctgatttcctcatggaaataaatgatttctacatggaaa

SEQ ID NO: 444807 - DNA, 75 bp, synthetic construct
  source 1..75: mol_type = other DNA
tgggaacacaaagtttcccgcaggcggatttcgatggcccgcacaatctgatgatgcagatcttcacctcgcaag

SEQ ID NO: 444808 - DNA, 75 bp, synthetic construct
  source 1..75: mol_type = other DNA
atgccaaaactcacagacatgcagatccgcgcgtggataaaggccggagagcgattcgagggacgggcggacggg

SEQ ID NO: 444809 - DNA, 75 bp, synthetic construct
  source 1..75: mol_type = other DNA
tccagataagggcatggataaaggccggagaacactttgagggacgcgccgatggcaacggtctgtatttgtgct

SEQ ID NO: 444810 - DNA, 75 bp, synthetic construct
  source 1..75: mol_type = other DNA
aattagatccggttccgtcagcgatgattggactgtcactgaacaccgccgcctatgctgccgaaacgctgcggg

SEQ ID NO: 444811 - DNA, 75 bp, synthetic construct
  source 1..75: mol_type = other DNA
ggcgctggcgcagtggtgtgatttgctggtggcactggagcgcggcgaagaatacaacgttacaccgctgagaaa

SEQ ID NO: 444812 - DNA, 75 bp, synthetic construct
  source 1..75: mol_type = other DNA
gcgctgaaatgccggacgtgccgaatttcactattcacgacttccggcgcacggcccgcacccatttagccgcgc

SEQ ID NO: 444813 - DNA, 75 bp, synthetic construct
  source 1..75: mol_type = other DNA
gcagagaagaacgccatgcgcgtttcagagcttgccgctgaatactttgagcgtcagatccttccgcgctggaag

SEQ ID NO: 444814 - DNA, 75 bp, synthetic construct
  source 1..75: mol_type = other DNA
tcatgcaatagcgcgtgggtacttccggcgcggaaaatgcagcacaggatgatcccccacattcaggagagcacc

SEQ ID NO: 444815 - DNA, 75 bp, synthetic construct
  source 1..75: mol_type = other DNA
tgggcgtcaccctgcacctgaaaaccaaaggcaaaaatgaccaccaccgtgtggagagcctgtttaaagcctttg

SEQ ID NO: 444816 - DNA, 75 bp, synthetic construct
  source 1..75: mol_type = other DNA
ccacccacggcggttttcgcatggagattgccgtcaagggcgatctgtatatagacgatcaccacaccgttgaag

SEQ ID NO: 444817 - DNA, 75 bp, synthetic construct
  source 1..75: mol_type = other DNA
gccatgcgaatggcaaagggctttagccgtgagaatgagttaacgctgaagctgctgcttgtcacttgcgtgaga

SEQ ID NO: 444818 - DNA, 75 bp, synthetic construct
  source 1..75: mol_type = other DNA
catttggtacttaccgggcgaacgcacaaagacaggcgacgggattgatattccgctgccaaagcaggctatcga

SEQ ID NO: 444819 - DNA, 75 bp, synthetic construct
  source 1..75: mol_type = other DNA
tgaagagttaatccggttctttcaggccatgcgtaccgcaaagggattcagccgacagaacgagctaaccttcaa

SEQ ID NO: 444820 - DNA, 75 bp, synthetic construct
  source 1..75: mol_type = other DNA
gtgtgttgttgatgggattatccagcgaggccggacggctgctggcacaacagtttgaacagcaccaaatccaga

SEQ ID NO: 444821 - DNA, 75 bp, synthetic construct
  source 1..75: mol_type = other DNA
ccgaggttatcgtcccaggtatcgatctgagccgtaaggtgaaaccgaccgcgttcaaacgtgatgtgctggctt

SEQ ID NO: 444822 - DNA, 75 bp, synthetic construct
  source 1..75: mol_type = other DNA
cctgctggctaaactggaaggaaatgccacgggcgataacgataataaacctgacgctaatccgaccggtgacgg

SEQ ID NO: 444823 - DNA, 75 bp, synthetic construct
  source 1..75: mol_type = other DNA
tcttgcccatttgcgccacccgattattggcgacagcaaacatggtgatttacgccagaatcgcagcggtgctga

SEQ ID NO: 444824 - DNA, 75 bp, synthetic construct
  source 1..75: mol_type = other DNA
tcttgcccatttgcgtcatccgattattggcgatagcaaacatggcgatttacgccagaatcgcagcggtgctga

SEQ ID NO: 444825 - DNA, 75 bp, synthetic construct
  source 1..75: mol_type = other DNA
cgaggccggacggctgctggcacaacagtttgaacagcaccaaatccagaaacgttaccatgcgattgtgcgcgg

SEQ ID NO: 444826 - DNA, 75 bp, synthetic construct
  source 1..75: mol_type = other DNA
gaagccgggtacgccactggctgacgtgcttaacagtatgatgcagatccacgttaataccccttacctgcttaa

SEQ ID NO: 444827 - DNA, 75 bp, synthetic construct
  source 1..75: mol_type = other DNA
ttccggcaaaatcggtgattgaactttatagcacaacgctacattactgccctatgagtatcaatgcacaacctt

SEQ ID NO: 444828 - DNA, 75 bp, synthetic construct
  source 1..75: mol_type = other DNA
tcaggacaccctgcaagctatgatgcaggatgctggattcgaaagtgtcgactattacaacctgacggcaggggt

SEQ ID NO: 444829 - DNA, 75 bp, synthetic construct
  source 1..75: mol_type = other DNA
acgatatcaaaaccttgctcaaagccctgctggctaagctcgaaggaactgcgacgggcgataacgacaataagc

SEQ ID NO: 444830 - DNA, 75 bp, synthetic construct
  source 1..75: mol_type = other DNA
atcaggtattccatccggccacgctcgcctcattcgaagggatgagcatcacgatcctgcatcctgaagatgaaa

SEQ ID NO: 444831 - DNA, 75 bp, synthetic construct
  source 1..75: mol_type = other DNA
gtggaaccgcatgcgtgcggccatcaagacaggagatgccgacaccatgaacgaactggtggagtcggctcccgc

SEQ ID NO: 444832 - DNA, 75 bp, synthetic construct
  source 1..75: mol_type = other DNA
tcttgcccatttgcgccacccgattattggcgatagcaaacatggcgatttacgccagaatcgcagcggtgctga

SEQ ID NO: 444833 - DNA, 75 bp, synthetic construct
  source 1..75: mol_type = other DNA
cagacccaggctgtggacagtaactctattccgctggattattcgttactttacagcaatattttcgagttccag

SEQ ID NO: 444834 - DNA, 75 bp, synthetic construct
  source 1..75: mol_type = other DNA
aaagaattttgttgcacacattgatcacatgaacagcttcagtgaaattgcgcataaaagcggcaaggaggcagg

SEQ ID NO: 444835 - DNA, 75 bp, synthetic construct
  source 1..75: mol_type = other DNA
cccaacattgacttttaccgatattaaccgcgtcagcgaactgctctctgttcccacgaaagatgcctcacgaga

SEQ ID NO: 444836 - DNA, 75 bp, synthetic construct
  source 1..75: mol_type = other DNA
gtgaatacttacaacatcacaatgccctggcccccgagcaataaccgctagtaccgccataatcgcgggcgcacc

SEQ ID NO: 444837 - DNA, 75 bp, synthetic construct
  source 1..75: mol_type = other DNA
ataagaatagtggcgatgcgccagctgctgcgccagctgctgcgccaggtaataatgaaaccactgaacctgtgg

SEQ ID NO: 444838 - DNA, 75 bp, synthetic construct
  source 1..75: mol_type = other DNA
ttggagtcattaccaaagattgcccgcttacttaaatccgaaatcaatggcaattcatggcatgttggtgatttg

SEQ ID NO: 444839 - DNA, 75 bp, synthetic construct
  source 1..75: mol_type = other DNA
ggcagatagcagttgaactgaaacggcacccagtaagtgtcattaacaagctggtgaagtacctagacgatgaca

SEQ ID NO: 444840 - DNA, 75 bp, synthetic construct
  source 1..75: mol_type = other DNA
cactggtcgggctgggtaatcagagcgtgcgtgacaggcttgccattaaccacagcaaaatgctggcctacgccg

SEQ ID NO: 444841 - DNA, 75 bp, synthetic construct
  source 1..75: mol_type = other DNA
ttgcttccggtgggatgcacagacattaacagagcgggccagctgtttgacgcggcggcgcaggtctgccggatt

SEQ ID NO: 444842 - DNA, 75 bp, synthetic construct
  source 1..75: mol_type = other DNA
ccaacaatcgcgctttcgacggttgttctctgctggcgatgggaatgttgatgctgagtttctggctgaaagaaa

SEQ ID NO: 444843 - DNA, 75 bp, synthetic construct
  source 1..75: mol_type = other DNA
ttcttttcggtataagggatcaactggactactgcgttcagttgaatatacggtgtgagcgtcgcaaaaatgagc

SEQ ID NO: 444844 - DNA, 75 bp, synthetic construct
  source 1..75: mol_type = other DNA
gcaggaagaaacgcaaagctttcttgataagttaattcaggatgcggggtatcccgttgacaagacgtttattgc

SEQ ID NO: 444845 - DNA, 75 bp, synthetic construct
  source 1..75: mol_type = other DNA
cctcgccgatatcaatgaatccatgctcaaaatggggcgcgagaaactgcgtaatatcggcgtgattggcaacgt

SEQ ID NO: 444846 - DNA, 75 bp, synthetic construct
  source 1..75: mol_type = other DNA
aaagcatttatgaataataactatgttggtctggtactgtttttagggctggcaatgagttactggcatttctga

SEQ ID NO: 444847 - DNA, 75 bp, synthetic construct
  source 1..75: mol_type = other DNA
tggaagaggctatcgatttctcccgtcagatgcgtgaaatcacccttggcgaaaaccccaacgtcaccattccgc

SEQ ID NO: 444848 - DNA, 75 bp, synthetic construct
  source 1..75: mol_type = other DNA
tacgggcaatgtcggttattgccgtccagtatcggctggcaccggaacatactttccccgccgcccatgatgatg

SEQ ID NO: 444849 - DNA, 75 bp, synthetic construct
  source 1..75: mol_type = other DNA
atgttaactggggcttttctctgtctgccttacggcggcatgcccgaggcagacagcctcaagcacccgcagcaa

SEQ ID NO: 444850 - DNA, 75 bp, synthetic construct
  source 1..75: mol_type = other DNA
ttactgctgctctggccaactttgtgggcgctatgggtggcgacaccaggtgttccccagctctggatcctggcg

SEQ ID NO: 444851 - DNA, 75 bp, synthetic construct
  source 1..75: mol_type = other DNA
agctgctggcgtttcaccgcttaatgcgtacggataagccaattggcgcgttactgctgctctggccaactttgt

SEQ ID NO: 444852 - DNA, 75 bp, synthetic construct
  source 1..75: mol_type = other DNA
aaacagcccgtaccgcgatcgcagcgttgaagagaacctggcgctgttcgagaaaatgcgtaccggcggttttga

SEQ ID NO: 444853 - DNA, 75 bp, synthetic construct
  source 1..75: mol_type = other DNA
tagccttggtaaacgcgtgcgtttccttcgtcaggtgcaacatgagcttaaactggagaatattgagccagtaca

SEQ ID NO: 444854 - DNA, 75 bp, synthetic construct
  source 1..75: mol_type = other DNA
gagtttccgtcagagccagcgtttgatggtgtaattagccgtgcttttgcctctctgaacgatatggtgagctgg

SEQ ID NO: 444855 - DNA, 75 bp, synthetic construct
  source 1..75: mol_type = other DNA
tcgccaatgaaggcggcgttgaagcctggatgattgcgcaacaacataaaagcctgctgcgttttctgacctgtg

SEQ ID NO: 444856 - DNA, 75 bp, synthetic construct
  source 1..75: mol_type = other DNA
gctgatttttatcgatcgcctgagcaatgtgaccgtaggtgccggtatggtgcacgagccagttagccaggcaac

SEQ ID NO: 444857 - DNA, 75 bp, synthetic construct
  source 1..75: mol_type = other DNA
ttcgaactggaattgaatgccctggttcgccgccactttccacactggggcgcgcgcgatttgctgggggataaa

SEQ ID NO: 444858 - DNA, 75 bp, synthetic construct
  source 1..75: mol_type = other DNA
attgagcctcagattaatgttaagcgtcttgcaggacgcgtaatgttaactggggcttttctctatctgccgttg

SEQ ID NO: 444859 - DNA, 75 bp, synthetic construct
  source 1..75: mol_type = other DNA
cggaaaatctttcgattgaagatttttattgtcgatttttggttgttgatgacatctggatcccattgggagaat

SEQ ID NO: 444860 - DNA, 75 bp, synthetic construct
  source 1..75: mol_type = other DNA
tcggttgttattgcggtattgcacaggcggccgatagcgatatcacatttcatggcacattggtttcgccgcccg

SEQ ID NO: 444861 - DNA, 75 bp, synthetic construct
  source 1..75: mol_type = other DNA
gttagcggcctggggattgagctacagcaaaacggccagccgtttaagctgggaacaccgttgaaaattgacccg

SEQ ID NO: 444862 - DNA, 75 bp, synthetic construct
  source 1..75: mol_type = other DNA
gtgattggcaacgttgagtatgttcaggcgaacgctgaggcgctgccgttcccggataacacctttgattgcatc

SEQ ID NO: 444863 - DNA, 75 bp, synthetic construct
  source 1..75: mol_type = other DNA
ccgaccggcattctgcgtgcggtagatcgcttggcactgttgcaaatagtcggtggtgataaacttatcatcccc

SEQ ID NO: 444864 - DNA, 75 bp, synthetic construct
  source 1..75: mol_type = other DNA
ggctgcatcgggcagtgattgtcctgttctgtcttgccttgctggtcgccctgatgcaaggtgcgtcttggttta

SEQ ID NO: 444865 - DNA, 75 bp, synthetic construct
  source 1..75: mol_type = other DNA
ccggcgttaacggcggtaccggtcaaaaagagcggcgtcgatttgcctgaggccaactttgaagcctgggctacg

SEQ ID NO: 444866 - DNA, 75 bp, synthetic construct
  source 1..75: mol_type = other DNA
ccgcaccagaagtgatgcacgatacacgccgtttcgtgcccacgctggtcggcttcgcggtactgggtgccagtt

SEQ ID NO: 444867 - DNA, 75 bp, synthetic construct
  source 1..75: mol_type = other DNA
atttgcgctctgctggttgtttctactgcaccagaagtgatgcacgactcacgccgtttcgtgcccacgctggtc

SEQ ID NO: 444868 - DNA, 75 bp, synthetic construct
  source 1..75: mol_type = other DNA
actaaaagccaacctgataaatcataacctgactcaggagcaggtgatggaagccgcattgaggagcgaacatca

SEQ ID NO: 444869 - DNA, 75 bp, synthetic construct
  source 1..75: mol_type = other DNA
tttacggttttgctggcctgtcgcaggccgcgattaacgatattacttttcacggcacgctggtctcgccgcccg

SEQ ID NO: 444870 - DNA, 75 bp, synthetic construct
  source 1..75: mol_type = other DNA
ggcggtaagcacggacatcgcaggcctggggattcggcttaaacaggcagggcagagctttaagctgaatacgcc

SEQ ID NO: 444871 - DNA, 75 bp, synthetic construct
  source 1..75: mol_type = other DNA
tactcagagagtgtggaagattatcaaattagacggattagccaagcttttattaagcttaaacaggaagatgtt

SEQ ID NO: 444872 - DNA, 75 bp, synthetic construct
  source 1..75: mol_type = other DNA
agcccttgctctgctcatgttccttgccctgacgggactgcgtctgggggaaacccgtcatcttcgccttgagga

SEQ ID NO: 444873 - DNA, 75 bp, synthetic construct
  source 1..75: mol_type = other DNA
gtcacagcacaatcaaagtaacagaactttacttgcacgcctccccggcacgttatcacgaagttgttaaccggg

SEQ ID NO: 444874 - DNA, 75 bp, synthetic construct
  source 1..75: mol_type = other DNA
aatgaattcaggaaactttctctcgaacaagagaaaaaacacatcaagataaatgaaaaaataaacacattgatt

SEQ ID NO: 444875 - DNA, 75 bp, synthetic construct
  source 1..75: mol_type = other DNA
atgaatagtagagtaaccaaccctgagtcgtacatattttctgcaatcatctatattggcaaagataacttcacc

SEQ ID NO: 444876 - DNA, 75 bp, synthetic construct
  source 1..75: mol_type = other DNA
aagggaaggaagtaatggaacatgaagtgaaggagtatttaaaagataaactaaacaatgtgagcaaatgggaat

SEQ ID NO: 444877 - DNA, 75 bp, synthetic construct
  source 1..75: mol_type = other DNA
ttcgcacaacctccttatttttagtagtggccatggctgggtgccaaaatcctcagcttactgaacggcaaaaaa

SEQ ID NO: 444878 - DNA, 75 bp, synthetic construct
  source 1..75: mol_type = other DNA
agtatcgcgtatggggtgaggatgaaagcatgggtaatgcggcaatcacaccactatgggaagcgctccagaatg

SEQ ID NO: 444879 - DNA, 75 bp, synthetic construct
  source 1..75: mol_type = other DNA
catgatgatcgatgaggacactcacgcgcatctgaccccggaagcgatccctgaactgctggagcggtataaatg

SEQ ID NO: 444880 - DNA, 75 bp, synthetic construct
  source 1..75: mol_type = other DNA
agtcgtgacgatatcctgcggcaggccagtgaagcggtgatccgcgaacggctaccggaaacggccctgctgtcg

SEQ ID NO: 444881 - DNA, 75 bp, synthetic construct
  source 1..75: mol_type = other DNA
gcggcacggtacctgaaaacgagatgtaaccgcagtgatttgcctgatgagcaggcgatcctgaacgtcgctaac

SEQ ID NO: 444882 - DNA, 75 bp, synthetic construct
  source 1..75: mol_type = other DNA
cagtcaccctccatccataagcaggccactgttcctccgagcgaacaactggaacaaatggcgtcgattgtctct

SEQ ID NO: 444883 - DNA, 75 bp, synthetic construct
  source 1..75: mol_type = other DNA
tgaggtaagcccaaaaacctcccttcaattttcaagtgctaccagccatgaacacagtgatgtaaacattcaaat

SEQ ID NO: 444884 - DNA, 75 bp, synthetic construct
  source 1..75: mol_type = other DNA
gcgttccgccgcaactgatgggggcgatgccgggcgaaaaaagtgcgtttggtgatgtggagaaggccgcgcggg

SEQ ID NO: 444885 - DNA, 75 bp, synthetic construct
  source 1..75: mol_type = other DNA
tgcggatacattccgcaagctctactacgataatggctcgcatgccgggtgtattatctatgttggtacgcctca

SEQ ID NO: 444886 - DNA, 75 bp, synthetic construct
  source 1..75: mol_type = other DNA
atcccgtcgtgcgtcctggcatcagtcggctttgtacttcaagcgcaacgccctgaacgggtgctttattccgca

SEQ ID NO: 444887 - DNA, 75 bp, synthetic construct
  source 1..75: mol_type = other DNA
cgcgccgcgatgacggcgtggcgctggcagaggcactgcgccgccagccgtcgttaagcgccttctcgttcgacg

SEQ ID NO: 444888 - DNA, 75 bp, synthetic construct
  source 1..75: mol_type = other DNA
gatgatgttcgccgcacgttcaattggtgattttgttgaacgccatccatcagtgaaaatgttggcgctctcttt

SEQ ID NO: 444889 - DNA, 75 bp, synthetic construct
  source 1..75: mol_type = other DNA
ctttgtcatgatgtgataacctgttcagtctgtggttatttgttgctaaaagtcgtctctaggcgacttttaggg

SEQ ID NO: 444890 - DNA, 75 bp, synthetic construct
  source 1..75: mol_type = other DNA
accacccgctgagggagtacgcccgaaatatcctttctttcattggccacaggacagacaaggaagttaacaaaa

SEQ ID NO: 444891 - DNA, 75 bp, synthetic construct
  source 1..75: mol_type = other DNA
aaaaacacatcaagataaatgaaaaaataaacacattgattggggtttttaataaaatcattgcaataagtcaat

SEQ ID NO: 444892 - DNA, 75 bp, synthetic construct
  source 1..75: mol_type = other DNA
aagatagaagacatattaagataaatgaaaaaataaacacactgattgggattgttaataaaaatatcgcaataa

SEQ ID NO: 444893 - DNA, 75 bp, synthetic construct
  source 1..75: mol_type = other DNA
ggtgacgttgagaaagcggcgagggtgtttttcatcaacgagttgcaacctgtcatggaggccatgaagcatgtc

SEQ ID NO: 444894 - DNA, 75 bp, synthetic construct
  source 1..75: mol_type = other DNA
atgagttatttcgacaaactgggcgataaattacgtcatctgcatattgtcgacagcgacggggccagcgacacg

SEQ ID NO: 444895 - DNA, 75 bp, synthetic construct
  source 1..75: mol_type = other DNA
gtggtggtggtgcatttaaaaacgtgctcattcatgcgcccaacgggggcaaagaaggggtgcaaattttgccgt

SEQ ID NO: 444896 - DNA, 75 bp, synthetic construct
  source 1..75: mol_type = other DNA
ccgaggcttttgagctgagtgcggcagagcgtgaagcgattgagcacgagatgcaccactacgaagacccgcgtg

SEQ ID NO: 444897 - DNA, 75 bp, synthetic construct
  source 1..75: mol_type = other DNA
tgagtttttcaatgcgaaatcccggcagcaagcgcaaccgcagcccgttgtcagtaaaaatgaagaagaggacta

SEQ ID NO: 444898 - DNA, 75 bp, synthetic construct
  source 1..75: mol_type = other DNA
ttacctgttgccgtactgggcgcaggctttgccgtgtatgagtttttcaacgcgaaatcccggcaacaagtgcaa

SEQ ID NO: 444899 - DNA, 75 bp, synthetic construct
  source 1..75: mol_type = other DNA
attagtccatggagataccacaactacttttgctagtagcttggcgtgttattatcaaaaaattgatgtcgggca

SEQ ID NO: 444900 - DNA, 75 bp, synthetic construct
  source 1..75: mol_type = other DNA
acctgatcgccggtttcctgtttgtttgctacatccaggtcagcaacctgttgccggttgccggttgccgtactg

SEQ ID NO: 444901 - DNA, 75 bp, synthetic construct
  source 1..75: mol_type = other DNA
gcaggcgctggtgaaagcgatgcccgcctggctgaccacggctttgaagtggcaggcggtattctgcctgccgtt

SEQ ID NO: 444902 - DNA, 75 bp, synthetic construct
  source 1..75: mol_type = other DNA
cccacggctttgaagtggctggcggtattctgcctgccgttggttttggcttgctgctgcgcgtaatgttcaaag

SEQ ID NO: 444903 - DNA, 75 bp, synthetic construct
  source 1..75: mol_type = other DNA
aactgctcttgatgattttccgattgtctgggcctgcacacctgcgcgggaactgggctttacgcttgccgatcg

SEQ ID NO: 444904 - DNA, 75 bp, synthetic construct
  source 1..75: mol_type = other DNA
gcaggcagcgcagttattgacggaacaccttattcgcaatgggcatcagcgtatcgcctggctgggagggcaaag

SEQ ID NO: 444905 - DNA, 75 bp, synthetic construct
  source 1..75: mol_type = other DNA
attgccggtgcggcaggaagcagtgatgacctgcggcgcatggcagaagaaaaagacatcccggtgatttttgca

SEQ ID NO: 444906 - DNA, 75 bp, synthetic construct
  source 1..75: mol_type = other DNA
tgccgtttggatacagcaatcccctgagtgttatgttcaaccagttactgaaacaggcaaggcaatctgatggta

SEQ ID NO: 444907 - DNA, 75 bp, synthetic construct
  source 1..75: mol_type = other DNA
catcttattcgtagtgggcatcagcgtatcgcctggctgggagggctaagctcttctctgactcgtgcggagcgg

SEQ ID NO: 444908 - DNA, 75 bp, synthetic construct
  source 1..75: mol_type = other DNA
ttcatgatgttgcgctggccgcgggtgtgtcagtgagtactgtttcgctggtactgagcggcaaagggcggattt

SEQ ID NO: 444909 - DNA, 75 bp, synthetic construct
  source 1..75: mol_type = other DNA
atgcaaaatctcattctaaagaatggtaacgaagaattgattatcactgatgaaacattcaatgctacggcttat

SEQ ID NO: 444910 - DNA, 75 bp, synthetic construct
  source 1..75: mol_type = other DNA
gaatatgtgatgcatcagtggctgtgggatcttttccctggcggcaaagaaaggcaatttctttatcgtcgggaa

SEQ ID NO: 444911 - DNA, 75 bp, synthetic construct
  source 1..75: mol_type = other DNA
gtaccggacaatccctttgtttcaacctgcgggcgaatccaacaatttgtaaagcgggcaaacgccacgacttgc

SEQ ID NO: 444912 - DNA, 75 bp, synthetic construct
  source 1..75: mol_type = other DNA
atgtacctctcaagaataaccttacataccgctcagcttttgcctgcgcagttgctgcatctggtggatcgcggt

SEQ ID NO: 444913 - DNA, 75 bp, synthetic construct
  source 1..75: mol_type = other DNA
tctatcaagcctcaatggttgcctgtcgcgctattccgcaaattctcggctatgaaacgccaagtacctggcttt

SEQ ID NO: 444914 - DNA, 75 bp, synthetic construct
  source 1..75: mol_type = other DNA
atttggaaatatgtctccgctggcgtggcgtaacgatgtggaattacagcaatcgtgtaatacaagcaacatccc

SEQ ID NO: 444915 - DNA, 75 bp, synthetic construct
  source 1..75: mol_type = other DNA
ccgagccagggttatttctgcaacgtctctgcctggggtatggcaaaagccgggcgttcggctgtggtctgatgt

SEQ ID NO: 444916 - DNA, 75 bp, synthetic construct
  source 1..75: mol_type = other DNA
gagaagggcgtggatgtggtttcttctttcgcctcttcttctactctggcccgtcagattgaagcgggtgcacct

SEQ ID NO: 444917 - DNA, 75 bp, synthetic construct
  source 1..75: mol_type = other DNA
agtggaatatccggttgctgttgtggaagggcataacaatgcgacagtgaaagcattttacgattatctgaaggg

SEQ ID NO: 444918 - DNA, 75 bp, synthetic construct
  source 1..75: mol_type = other DNA
ttgccggggcggcgctctctttcaccgttgctggcaacgcgttggcggatgaagggaaaatcacggtttttgctg

SEQ ID NO: 444919 - DNA, 75 bp, synthetic construct
  source 1..75: mol_type = other DNA
atttatcccactgcgcatgatgcgttatatcctggcggtgatggagcagcatattgaagagcataagtgtgcgcc

SEQ ID NO: 444920 - DNA, 75 bp, synthetic construct
  source 1..75: mol_type = other DNA
ggatgacccggagtacggacgggagatttatggcgagtcaaagtcattcagtctggtggatgtcagtacgcttga

SEQ ID NO: 444921 - DNA, 75 bp, synthetic construct
  source 1..75: mol_type = other DNA
caccatcaataaaaatggtcgtcagattgtggctgttgaaggaacagcaaataccactgtggtttatgccggcgg

SEQ ID NO: 444922 - DNA, 75 bp, synthetic construct
  source 1..75: mol_type = other DNA
aaaaacacggcaaaaattactttgaaaatggatatgatgcccgccatgctgcatttttagaagataactttaaaa

SEQ ID NO: 444923 - DNA, 75 bp, synthetic construct
  source 1..75: mol_type = other DNA
ttacatttaaaaactggtttgaaaaagagtcagatgatctctctaatcatcagatagagcagatttttgataaag

SEQ ID NO: 444924 - DNA, 75 bp, synthetic construct
  source 1..75: mol_type = other DNA
atataggtgataacttaggaaaggcaggcagtgtactgtcaacgtttcaaaattttctgggtactgcactttcct

SEQ ID NO: 444925 - DNA, 75 bp, synthetic construct
  source 1..75: mol_type = other DNA
agatggtcgagagataaaagttgataaaatacctcataataataatgaacggtcaggttatataaaagccagtaa

SEQ ID NO: 444926 - DNA, 75 bp, synthetic construct
  source 1..75: mol_type = other DNA
acgttgggagtaaaataggcggaaccgctgagaatgtaggtaataatctgggaaaagccggaacagttctttcag

SEQ ID NO: 444927 - DNA, 75 bp, synthetic construct
  source 1..75: mol_type = other DNA
ggtgataaaggtaatgacacactgagtggtggaaacggagatgaccagctctatggcggtgatggcaacgataag

SEQ ID NO: 444928 - DNA, 75 bp, synthetic construct
  source 1..75: mol_type = other DNA
tctttgcaccacaattagacaaattactgcaaaagtatcaaaaagcaggtaataaattaggtggcagtgctgaaa

SEQ ID NO: 444929 - DNA, 75 bp, synthetic construct
  source 1..75: mol_type = other DNA
tccttgaggcttcaaagcaggcaatgtttgaacatgttgccagtaaaatggctgatgttattgctgaatgggaga

SEQ ID NO: 444930 - DNA, 75 bp, synthetic construct
  source 1..75: mol_type = other DNA
tgctgctggatgcgcttattcagctgaaagagaaagatcccagcctgtcgttccgccgctcctgccgtgaaggtg

SEQ ID NO: 444931 - DNA, 75 bp, synthetic construct
  source 1..75: mol_type = other DNA
aagtggcacgccgcaatactgcgtctgatcaggtgacccagcacgttcactttgtcgataagaaacgcaaacgcg

SEQ ID NO: 444932 - DNA, 75 bp, synthetic construct
  source 1..75: mol_type = other DNA
tggatatcgaagagttgccgcacgtcgtcaactatgaactgccaaacgtaccggaagattatgtccaccgtattg

SEQ ID NO: 444933 - DNA, 75 bp, synthetic construct
  source 1..75: mol_type = other DNA
ttctcaatatattatcgcacagcgtgctgcacaggggttatctacatctgctgctgctgccggtttaattgcttc

SEQ ID NO: 444934 - DNA, 75 bp, synthetic construct
  source 1..75: mol_type = other DNA
cctcctgctcagctactgaaggcgtggtgcgtaacggtaaaagtactgccggacatcagagctatctctgctctc

SEQ ID NO: 444935 - DNA, 75 bp, synthetic construct
  source 1..75: mol_type = other DNA
tgtgcggttccgacggtctgaacatgaacggcaagaatggtctggcctgtattaccccgatttcggcactcaacc

SEQ ID NO: 444936 - DNA, 75 bp, synthetic construct
  source 1..75: mol_type = other DNA
atagccgtgataccgagactgacagtcgccttgacggtttgagtgatgcattcagtgtattccgctgtcacagca

SEQ ID NO: 444937 - DNA, 75 bp, synthetic construct
  source 1..75: mol_type = other DNA
gaagcggaagaaggtcgcgacatgatgttgctggatgcgcttatccagctgaaagagaaagatcccagcctgtcg

SEQ ID NO: 444938 - DNA, 75 bp, synthetic construct
  source 1..75: mol_type = other DNA
cgttgccatccttatcgcagactggaaacgtgggagtgggaaacggcgcatgtggtgtttgacgccgctgaactt

SEQ ID NO: 444939 - DNA, 75 bp, synthetic construct
  source 1..75: mol_type = other DNA
tgatgatcttcaggagctggaactgaagggcggtgaaacgatccgcgcgaagctggtgattggtgccgacggcgc

SEQ ID NO: 444940 - DNA, 75 bp, synthetic construct
  source 1..75: mol_type = other DNA
catccatccgctggcggggcagggggtgaatcttggttatcgtgatgtcgatgccctgattgatgttctggtgaa

SEQ ID NO: 444941 - DNA, 75 bp, synthetic construct
  source 1..75: mol_type = other DNA
atgcgctgattgacgttctggtgaatgcccgcagctacggtgaagcgtgggccagttatcctgtcctcaagcgtt

SEQ ID NO: 444942 - DNA, 75 bp, synthetic construct
  source 1..75: mol_type = other DNA
cggcatcgcgacgggaataatcgtcagcctgaatatcccctttatccgtcaggggcttttttatcccgccagtcc

SEQ ID NO: 444943 - DNA, 75 bp, synthetic construct
  source 1..75: mol_type = other DNA
gcaccggctgttgtcccggcaggcgttctccgcctttgcgctggactggtttgtcttcgggaatgcgtttcttga

SEQ ID NO: 444944 - DNA, 75 bp, synthetic construct
  source 1..75: mol_type = other DNA
gccggtgatggaggcgatgaagcacgttaatgactggctgggcgaggaggtgatccgctttaacccttacgcact

SEQ ID NO: 444945 - DNA, 75 bp, synthetic construct
  source 1..75: mol_type = other DNA
tattccacatcctctgctgtcccgccaggagttcgccggggtggcgatggactggtttgtgttcggtaatgcctg

SEQ ID NO: 444946 - DNA, 75 bp, synthetic construct
  source 1..75: mol_type = other DNA
ggtgatgtcacgtaatcagcaaaaaaacgcgctggttagcgaaaccatcaaagccaaccagttgtggagtgaagt

SEQ ID NO: 444947 - DNA, 75 bp, synthetic construct
  source 1..75: mol_type = other DNA
tgcgcgacggtgaagataattaccagctctatctgattcgcccggccagcagttctcaatccgatttcatcaact

SEQ ID NO: 444948 - DNA, 75 bp, synthetic construct
  source 1..75: mol_type = other DNA
tacggaatgccggaatatctcggcggcctgttgtctgccagtctgtcgcactcggcagatcgttttcgcaaactc

SEQ ID NO: 444949 - DNA, 75 bp, synthetic construct
  source 1..75: mol_type = other DNA
aaagacggccttcagattattcctctgtcagaagtcgcggcgaaggatgagtttttgaatatcaaaaatgttagt

SEQ ID NO: 444950 - DNA, 75 bp, synthetic construct
  source 1..75: mol_type = other DNA
attgcagtaaagtgtaacattctgaccagtacctacatccctcacccactactcagccagcaggctttttcacgt

SEQ ID NO: 444951 - DNA, 75 bp, synthetic construct
  source 1..75: mol_type = other DNA
tttggtgatgtggagaaggcggccagagtgtttgcgatcaacgaactgatgccggtgatggaggcgatgaagcac

SEQ ID NO: 444952 - DNA, 75 bp, synthetic construct
  source 1..75: mol_type = other DNA
cgtcatggaggccatgaagcatatcaatgactggcttggcgaagaggtgctccgctttaacccttacgcactgct

SEQ ID NO: 444953 - DNA, 75 bp, synthetic construct
  source 1..75: mol_type = other DNA
ccaattgcggtgaaatgcaacattctgaccagtacctacatccctcacccgctgctcagccagcaggctttttca

SEQ ID NO: 444954 - DNA, 75 bp, synthetic construct
  source 1..75: mol_type = other DNA
accgcgcagcggtggatcacaacgcagaatctggcggcgctgcggcagaggcgtttagctttggcgacccggtgc

SEQ ID NO: 444955 - DNA, 75 bp, synthetic construct
  source 1..75: mol_type = other DNA
tgcgcgacggcgaagataattaccaactctatctgatccgcccggccagcagttctcaatccgattttattaact

SEQ ID NO: 444956 - DNA, 75 bp, synthetic construct
  source 1..75: mol_type = other DNA
gatgtgccggaggatgaactgtgcggcgtagcgcccggaagagtattgccggtatcagagcaatggcatccactg

SEQ ID NO: 444957 - DNA, 75 bp, synthetic construct
  source 1..75: mol_type = other DNA
agttgaagagtacacggtggacaacaccaccaaatgttccgtgtttcggacattccagggctggacagcgctctc

SEQ ID NO: 444958 - DNA, 75 bp, synthetic construct
  source 1..75: mol_type = other DNA
gcatccgggctgacgaatttatccggaggaattgtaagagtaaaatcaaatgaggatgagagtgaactattgaat

SEQ ID NO: 444959 - DNA, 75 bp, synthetic construct
  source 1..75: mol_type = other DNA
ggtgtttattgagggacgtctattatccgaaaaccatagtaattatagagaacttagtgcacgtattaatcataa

SEQ ID NO: 444960 - DNA, 75 bp, synthetic construct
  source 1..75: mol_type = other DNA
ggaaacttcagtttcctgtatggtgatggtgcaagaggaaattatcaaaatatttcgtataccgatggttttaat

SEQ ID NO: 444961 - DNA, 75 bp, synthetic construct
  source 1..75: mol_type = other DNA
ttttcattttgtttattcctggtttatgttttggaacgaatggtttagagagtaaaaaaaatattcctgaagaat

SEQ ID NO: 444962 - DNA, 75 bp, synthetic construct
  source 1..75: mol_type = other DNA
gcgaggtgctgacgattattcgtcagcagtacgggattgaactgccggaggaagaagccgggaatatcgcctttc

SEQ ID NO: 444963 - DNA, 75 bp, synthetic construct
  source 1..75: mol_type = other DNA
cattttgctgtattcagagaaatagcagatattgcaatgacgttaataggaaatggctttcctatggatgatacc

SEQ ID NO: 444964 - DNA, 75 bp, synthetic construct
  source 1..75: mol_type = other DNA
accgccattcagcagcatcgtggctgggttaaagcagaagacagcccgctgggcggtttacggctggtgatttgg

SEQ ID NO: 444965 - DNA, 75 bp, synthetic construct
  source 1..75: mol_type = other DNA
gcgtatggtatttagattctggagtaaatgaattagatacagctcgtttaccttatggtagttacgatcttaaat

SEQ ID NO: 444966 - DNA, 75 bp, synthetic construct
  source 1..75: mol_type = other DNA
tgttcggtaacgcattccttgagcttcggagcaatatgctcggcgaaccgcttaaattacggcacgcactggcga

SEQ ID NO: 444967 - DNA, 75 bp, synthetic construct
  source 1..75: mol_type = other DNA
tctgcgctttactttaagcgcaatgtattactcggttgctacatcccgcacccgctgctttcccggcaggatttc

SEQ ID NO: 444968 - DNA, 75 bp, synthetic construct
  source 1..75: mol_type = other DNA
gacgatgatcctacaccaataataacagcatcagcatccccaaggatagaatcaactaaatcaaaagcaaaggta

SEQ ID NO: 444969 - DNA, 75 bp, synthetic construct
  source 1..75: mol_type = other DNA
cgtcacagcgcgcaaattatcgctttgtccaattgacatcaagcccggatgtattcgagcaatataaaaactttc

SEQ ID NO: 444970 - DNA, 75 bp, synthetic construct
  source 1..75: mol_type = other DNA
gaatggcttcgcttaacctctcttgataaacttcctcctgtcgttcctgctataaatattgaagcttggaaatca

SEQ ID NO: 444971 - DNA, 75 bp, synthetic construct
  source 1..75: mol_type = other DNA
caaaccctattaatcggtaccagagaacaactactaccacatcacacaaatgaaagagggataatgaaatgccgg

SEQ ID NO: 444972 - DNA, 75 bp, synthetic construct
  source 1..75: mol_type = other DNA
gggaggcatcaacaaaaccgagctatgggaaccagttgatgccaaaggcgaactacacggcggctcatatcgttc

SEQ ID NO: 444973 - DNA, 75 bp, synthetic construct
  source 1..75: mol_type = other DNA
tgtgttaataaaaaaattcactaaccttacagctgggttgctatccaacgccgcactctcttgcatttctgaaat

SEQ ID NO: 444974 - DNA, 75 bp, synthetic construct
  source 1..75: mol_type = other DNA
gatgaatatcgcgcattaatggccggtgaggaccgctatctgatgacggaatccaacaccctggaggaaatcgag

SEQ ID NO: 444975 - DNA, 75 bp, synthetic construct
  source 1..75: mol_type = other DNA
tcgataacgccgcagaaccttatcgtattaaaaccgtgcgtaacaaaggctatctttttgcgcctcatgcgtggg

SEQ ID NO: 444976 - DNA, 75 bp, synthetic construct
  source 1..75: mol_type = other DNA
gatgacgtaaaagcgtgggtcagcaatacgctgaagacgtttgattttgaacgtcgttcactggtgatgctggcg

SEQ ID NO: 444977 - DNA, 75 bp, synthetic construct
  source 1..75: mol_type = other DNA
ataaaaaagaatcacctgaaagcttgttaagaacacattgcatcagtgttcgactgaaccatgaagaactacagc

SEQ ID NO: 444978 - DNA, 75 bp, synthetic construct
  source 1..75: mol_type = other DNA
aaagcactgacatggcggagatccgtaacgcccggggtaatgtccgggaagcgattgcagcccttcaggctgccg

SEQ ID NO: 444979 - DNA, 75 bp, synthetic construct
  source 1..75: mol_type = other DNA
gcaaatgcgtccggcggcccctggcgcaatacctgaaggtaacaaagcaattctgccgcgccctgatgaaggtga

SEQ ID NO: 444980 - DNA, 75 bp, synthetic construct
  source 1..75: mol_type = other DNA
ttaatggcagcattcttagaaatgccaagttctccggtacgatctgtgaaggcgtggattttaccgattgtgatc

SEQ ID NO: 444981 - DNA, 75 bp, synthetic construct
  source 1..75: mol_type = other DNA
cataccgattctggtgcgctggaacggtggttattacccgcttatcagcgcgtttttgccaatgtgtttaatggt

SEQ ID NO: 444982 - DNA, 75 bp, synthetic construct
  source 1..75: mol_type = other DNA
ccattccgttgcccccgttgaaaatcaacagggctggggcaacgtgatgtacattcctgcggcaccgatgtgcga

SEQ ID NO: 444983 - DNA, 75 bp, synthetic construct
  source 1..75: mol_type = other DNA
ttgccatatctgcgcttgcggcgacttctgcgtgggctgcacctgtacaggtgggcgaagcggcagggtcggcag

SEQ ID NO: 444984 - DNA, 75 bp, synthetic construct
  source 1..75: mol_type = other DNA
cgggcagctggcgcaggtcattaatggcttccgggatacgtatggtctgagtgttattcccgtttccgtggatgg

SEQ ID NO: 444985 - DNA, 75 bp, synthetic construct
  source 1..75: mol_type = other DNA
tcttggccctgccgttaacagtttcggcggcaacgcagtgcggaccattccgctttgatgctggtaatgatggcc

SEQ ID NO: 444986 - DNA, 75 bp, synthetic construct
  source 1..75: mol_type = other DNA
tcactccgtcgcgccggtagacaatcaacaaggctgggggaacgtgatgtatattcccgccgcgccgatgtgcga

SEQ ID NO: 444987 - DNA, 75 bp, synthetic construct
  source 1..75: mol_type = other DNA
cctgcaacacctgcaacacctgcaacatctgaaactgctaaaatacctgaaatacctggaacacataaaatacct

SEQ ID NO: 444988 - DNA, 75 bp, synthetic construct
  source 1..75: mol_type = other DNA
actggcgtaacctttactggaagtgaccttagtaacgcgtatcttgaacacatagatttcacaaccgtgattcta

SEQ ID NO: 444989 - DNA, 75 bp, synthetic construct
  source 1..75: mol_type = other DNA
gaaaaatgtctatcttgatggagcatatctgaacaatgatagtattgtgaaacaagccaaaaataataccgagaa

SEQ ID NO: 444990 - DNA, 75 bp, synthetic construct
  source 1..75: mol_type = other DNA
cccaaatgaaacactgaaaacagcagttaaaccggaatggtttgaacgtcataagattgaattaggttattgggg

SEQ ID NO: 444991 - DNA, 75 bp, synthetic construct
  source 1..75: mol_type = other DNA
tactgaatctttttattcaccttatctctaatcccgacaatcttgaattaaccttaaatcgatattcatcaacaa

SEQ ID NO: 444992 - DNA, 75 bp, synthetic construct
  source 1..75: mol_type = other DNA
tgtaacacctcaaatacctgaaacacctaaagtaattcttacaggagcaatactaaattattcagatctatccgg

SEQ ID NO: 444993 - DNA, 75 bp, synthetic construct
  source 1..75: mol_type = other DNA
aaagcgtgggtcagcgatacgctgaagacgtttgattttgagcgtcgttcactggtgatgctggcgttgtggtaa

SEQ ID NO: 444994 - DNA, 75 bp, synthetic construct
  source 1..75: mol_type = other DNA
atgaacgctaagataattgcctcgctggccttcaccagcatgttcagcctcagcaccctgttaaatccggcatac

SEQ ID NO: 444995 - DNA, 75 bp, synthetic construct
  source 1..75: mol_type = other DNA
gaagacgaaatatgcctgttttatttatatcgaaagaacaatatacaatcacgataatccatctgatgaaacacc

SEQ ID NO: 444996 - DNA, 75 bp, synthetic construct
  source 1..75: mol_type = other DNA
aaggggtaggtgattttacattccccgtgttgccagatggatctctgttgctggcgctggtgaaccgccccggga

SEQ ID NO: 444997 - DNA, 75 bp, synthetic construct
  source 1..75: mol_type = other DNA
agaagcttggcgtgaaggtgaacgccttctttgccccggactacgcgggcattatccagggaatgcgcttcaaca

SEQ ID NO: 444998 - DNA, 75 bp, synthetic construct
  source 1..75: mol_type = other DNA
attatccagggaatgcgcttcaacaaagtggatatcgcctggtacggcaacctgtcggcgatggaagcggtggat

SEQ ID NO: 444999 - DNA, 75 bp, synthetic construct
  source 1..75: mol_type = other DNA
aaaccaccgagattcaggcgcagctggatgacctggaccgcctgaacaacgcgttaagcgcgatgagttcggtga

SEQ ID NO: 445000 - DNA, 75 bp, synthetic construct
  source 1..75: mol_type = other DNA
caactggcgcaacaaaccgggtcgctgaagtcatcaaccgaacagaaagtcattacgacaacgaagaaagctgta

SEQ ID NO: 445001 - DNA, 75 bp, synthetic construct
  source 1..75: mol_type = other DNA
aacgcccgccagcgtatacaatcggcatcacctgaacaacgtcaggttttcgggagaaagttcaggagagccgcc

SEQ ID NO: 445002 - DNA, 75 bp, synthetic construct
  source 1..75: mol_type = other DNA
aaaccggttcgctgaagtcatcaaccgaacagaaagttattaccacaacgaagaaagctgtaccggtaaaacaga

SEQ ID NO: 445003 - DNA, 75 bp, synthetic construct
  source 1..75: mol_type = other DNA
actgaagacgcgttcgcgaaagccactggtacgaaggacaaagaactcttcctgatcgatggcgctacccatatc

SEQ ID NO: 445004 - DNA, 75 bp, synthetic construct
  source 1..75: mol_type = other DNA
atggcaagacaaaccaaacctctatccgttaaagaaatcgaatctgctaaacccaaggaagcggactacgttctc

SEQ ID NO: 445005 - DNA, 75 bp, synthetic construct
  source 1..75: mol_type = other DNA
ttatcatcaccacgatcctgatcatgatagggcacaccattacggtagtttggattgtgccgccatgccatattc

SEQ ID NO: 445006 - DNA, 75 bp, synthetic construct
  source 1..75: mol_type = other DNA
tccgccagcgacttcaagcgcaccgtcaacgccgggcatgaaaccaacgcgctggccgtcgccaacaagcaggtg

SEQ ID NO: 445007 - DNA, 75 bp, synthetic construct
  source 1..75: mol_type = other DNA
cctctcctgaaataaaaagtagcgtcctgaacgatctttatagcattgctaatttcctcccggacaataatctga

SEQ ID NO: 445008 - DNA, 75 bp, synthetic construct
  source 1..75: mol_type = other DNA
acatctaaaatacctgcaacactagcaacactagcaacactagcaacactagcaacactagcaacactagcaaca

SEQ ID NO: 445009 - DNA, 75 bp, synthetic construct
  source 1..75: mol_type = other DNA
attcaccggatattattggtcttcactcctctaaggctggaattgttggtcgactagcagcttgtcgattaaata

SEQ ID NO: 445010 - DNA, 75 bp, synthetic construct
  source 1..75: mol_type = other DNA
atgcagtcatcattgcctcctcggtttgtaaatagaacttctaataagactgtcgagttgatatctgtagcacga

SEQ ID NO: 445011 - DNA, 75 bp, synthetic construct
  source 1..75: mol_type = other DNA
taatagaaaaaataattgaacctctagcaagtaaaattattacagtttctgaacaagacaaacagttagcattgg

SEQ ID NO: 445012 - DNA, 75 bp, synthetic construct
  source 1..75: mol_type = other DNA
gaagctattaatgatggaattacagggtttcttgtggaaagagaagatgttgatgggttgaaacataaattatgt

SEQ ID NO: 445013 - DNA, 75 bp, synthetic construct
  source 1..75: mol_type = other DNA
ctgctgcggcggctatctgaaccattacggcgactactcctccgcgcaaattgcggatcctccgcgcaaattgcg

SEQ ID NO: 445014 - DNA, 75 bp, synthetic construct
  source 1..75: mol_type = other DNA
caattacgcgccatcagccctggcgcgtagcctcaaactcaatcaaacacataccattggcatgttgatcactgc

SEQ ID NO: 445015 - DNA, 75 bp, synthetic construct
  source 1..75: mol_type = other DNA
ttcaataaagtggatatcgcctggtacggcaacctgtcggcgatggaagcggtggatcgcgccaacggccaggtc

SEQ ID NO: 445016 - DNA, 75 bp, synthetic construct
  source 1..75: mol_type = other DNA
atcaatgatagtgacttaagatataaattgggaaatgctgggagagttaaataccaaaataatttcacatttgaa

SEQ ID NO: 445017 - DNA, 75 bp, synthetic construct
  source 1..75: mol_type = other DNA
gattctatatttgtttggaaaagacgcattagacctacaaataatagacaaggtcgtatatagattttctgggtt

SEQ ID NO: 445018 - DNA, 75 bp, synthetic construct
  source 1..75: mol_type = other DNA
tttcataacatgcattttgaaattatcacattgtttggtcttccattttatatattgttaggttgtgtgtttttt

SEQ ID NO: 445019 - DNA, 75 bp, synthetic construct
  source 1..75: mol_type = other DNA
taatggaacaacaacttcagttatagaagtatcaggacaacaacttcctgatctattgagtgtgctacaagataa

SEQ ID NO: 445020 - DNA, 75 bp, synthetic construct
  source 1..75: mol_type = other DNA
atgaaactacattttgaatctgaccttacctatcagcaaaatgccataacatcggtctgtgatttgtttgaaggg

SEQ ID NO: 445021 - DNA, 75 bp, synthetic construct
  source 1..75: mol_type = other DNA
aaaaatcactaaaaccctgaaagaaactcttctcgatggcacttttgctgttagcgaaaggttccttcctcttca

SEQ ID NO: 445022 - DNA, 75 bp, synthetic construct
  source 1..75: mol_type = other DNA
tcccgacaccattagggacttataatcctgactgggccttagtcattgaggataatggtgaagaacatatctatt

SEQ ID NO: 445023 - DNA, 75 bp, synthetic construct
  source 1..75: mol_type = other DNA
gtatatgacggtatgacactcgatgacgaaacaggacgtgatatttatcagggttaccggataagtgagatccgc

SEQ ID NO: 445024 - DNA, 75 bp, synthetic construct
  source 1..75: mol_type = other DNA
tgtaccgccttgatgccattgatgcttacaaccaaaaactggtcaaacagatcgaggttgccgggcttgaagtcc

SEQ ID NO: 445025 - DNA, 75 bp, synthetic construct
  source 1..75: mol_type = other DNA
gcactttcttaccaccaaagccaacagcacagaaattatatgcaaccagaaaacctccttacactagcaaaattt

SEQ ID NO: 445026 - DNA, 75 bp, synthetic construct
  source 1..75: mol_type = other DNA
atattcgaacgtcatcttgataaaggaacgcgcccgggggaaacccccataagcgctaacttaagggttgtggta

SEQ ID NO: 445027 - DNA, 75 bp, synthetic construct
  source 1..75: mol_type = other DNA
acacttacattaacgcgtttttcgggtacaccatcggtgagcatacgaataatcgctgtctgtcgatggttgatt

SEQ ID NO: 445028 - DNA, 75 bp, synthetic construct
  source 1..75: mol_type = other DNA
tggaaacgccttctaatacctactatatgcaagttggtgatgtcgtgggtgatattgacccgatgctcatccagc

SEQ ID NO: 445029 - DNA, 75 bp, synthetic construct
  source 1..75: mol_type = other DNA
tatgaaagaaggtgatatcgtaggtgatattgacccaatgcttatccagcggcatatgattagacgtacaatccg

SEQ ID NO: 445030 - DNA, 75 bp, synthetic construct
  source 1..75: mol_type = other DNA
atgaaaggtaaacatcaagacactaaagccctgtctgacgtgctagcggaaatgcaacggcaggatgccaaatgg

SEQ ID NO: 445031 - DNA, 75 bp, synthetic construct
  source 1..75: mol_type = other DNA
attttagtgctttaaaagcagaaaaaatcaatgcggcaaaatatgttcgagccacagccattacagaaataatga

SEQ ID NO: 445032 - DNA, 75 bp, synthetic construct
  source 1..75: mol_type = other DNA
caaccgattactggcgacaacattgttaatgtgctggatgatttccgtcaggcgggttacaccgtggtgaccact

SEQ ID NO: 445033 - DNA, 75 bp, synthetic construct
  source 1..75: mol_type = other DNA
ggctatccgtaccgcagaaggcggcgcagagcacgttcagccgattactggcgacaacattgttaacgtgctgga

SEQ ID NO: 445034 - DNA, 75 bp, synthetic construct
  source 1..75: mol_type = other DNA
ttacgctgaatacgatcccggatttggctgcgctggctaagaatcataacgtcaaccacttcacgctggcatttg

SEQ ID NO: 445035 - DNA, 75 bp, synthetic construct
  source 1..75: mol_type = other DNA
ctgcaggaagcagcgatgacctgcgacggatggcagaagaaaaagctatcccggtgattttcgcttcccgtgcca

SEQ ID NO: 445036 - DNA, 75 bp, synthetic construct
  source 1..75: mol_type = other DNA
ccaatccagagaactataaaaataatatatctatgtttaattcgttaggaggggctccattattaacaataaagc

SEQ ID NO: 445037 - DNA, 75 bp, synthetic construct
  source 1..75: mol_type = other DNA
tccgtgaccgtaagcgtgaagagtcgccgtggcgcactatttcccgcgcaccgggcgatgaaatgccggagaagg

SEQ ID NO: 445038 - DNA, 75 bp, synthetic construct
  source 1..75: mol_type = other DNA
gtccggcccgtggaccaacaacgtcgcgccgggcaaaaacatctccactatgggtaatgccagtcagttaagcaa

SEQ ID NO: 445039 - DNA, 75 bp, synthetic construct
  source 1..75: mol_type = other DNA
ctatcacacctgttacatcggcaaatggcatctcgacggtcatgactatttcggcactggcgagtgtccgccgga

SEQ ID NO: 445040 - DNA, 75 bp, synthetic construct
  source 1..75: mol_type = other DNA
gacttcccgaccatcaaagaatggatcggggcgcgtcagctgaaagaactggctcaggccgggtatgtcattacc

SEQ ID NO: 445041 - DNA, 75 bp, synthetic construct
  source 1..75: mol_type = other DNA
actcactgcaggcgtggagtggccaggaaggcagcgaaatttaccatgttatcttcaatggtaatgtttatcaga

SEQ ID NO: 445042 - DNA, 75 bp, synthetic construct
  source 1..75: mol_type = other DNA
gcgaaaatcagccttggttgcgctacgttctcactgggctgatgtgcagaatgaacaccttgcgcggcacggcca

SEQ ID NO: 445043 - DNA, 75 bp, synthetic construct
  source 1..75: mol_type = other DNA
cacgagttcctgtacggcgtggacggtcgctgtaatgcgggcttcggcttctggcagaccgccgtcggttccgtg

SEQ ID NO: 445044 - DNA, 75 bp, synthetic construct
  source 1..75: mol_type = other DNA
tccgctcagaactactcgactcgcgttttggcgcaaaggcaatttccactatcgcggaatctaaacgttttccgc

SEQ ID NO: 445045 - DNA, 75 bp, synthetic construct
  source 1..75: mol_type = other DNA
acctggccactttctgccagacctgggacgacgagaaagtccataaattgatggatttttcgatgaaaaaaaact

SEQ ID NO: 445046 - DNA, 75 bp, synthetic construct
  source 1..75: mol_type = other DNA
ttcggtctggctccgctgggctgcggctgggttatctggcgtgacgaagaagcgctgccgcaggaactggtgttc

SEQ ID NO: 445047 - DNA, 75 bp, synthetic construct
  source 1..75: mol_type = other DNA
ctgcgcggctggcaggttccggccttcactctcggcggtgaagccaccgacatcgtggtgatgcgcattatgtgt

SEQ ID NO: 445048 - DNA, 75 bp, synthetic construct
  source 1..75: mol_type = other DNA
acctggccactttctgccagacctgggacgacgagaaggtccataaattgatggatttctcgattaaaaaaaact

SEQ ID NO: 445049 - DNA, 75 bp, synthetic construct
  source 1..75: mol_type = other DNA
acctggccactttctgccagacctgggacgacgagaacgtccataaattgatggatttgtcgattaaaaaaaact

SEQ ID NO: 445050 - DNA, 75 bp, synthetic construct
  source 1..75: mol_type = other DNA
acctggccactttctgccagacctgggacgacgagaatgtccataaattgatggatttctcgataaaaaaaaact

SEQ ID NO: 445051 - DNA, 75 bp, synthetic construct
  source 1..75: mol_type = other DNA
aaacctgggagtgggaaacggcacatgtggtatttgacgcagccgaattaaagttgccgttgcttggctacatgg

SEQ ID NO: 445052 - DNA, 75 bp, synthetic construct
  source 1..75: mol_type = other DNA
gcgttgaacaatagcctttttgatgttggcattatgctgattgcaggcgtggtgggctatttcatgcagaaagga

SEQ ID NO: 445053 - DNA, 75 bp, synthetic construct
  source 1..75: mol_type = other DNA
cgggggcaggaccccatcgacgggcagctggcgcaggtcattaatggcttcagggatacctatggtctgagtgtt

SEQ ID NO: 445054 - DNA, 75 bp, synthetic construct
  source 1..75: mol_type = other DNA
ccattgtcggcggaggaatggtcggcggcgcactggcgctgggactggcacagcacggattttcggtaacggtaa

SEQ ID NO: 445055 - DNA, 75 bp, synthetic construct
  source 1..75: mol_type = other DNA
gtttccgctgacgcgtcgccatgcgttgcagtacgtgcagccagggcttgcgctggtgggcgatgccgcgcatac

SEQ ID NO: 445056 - DNA, 75 bp, synthetic construct
  source 1..75: mol_type = other DNA
atgcgcagtcgtgcatgttgattagcgtccagtgcgagaacgatcccggcgacagcacctggcagcaatttactc

SEQ ID NO: 445057 - DNA, 75 bp, synthetic construct
  source 1..75: mol_type = other DNA
cactgggctgtggctgggttatctggcgtgacgaagaggcgctgccgaaagaactggtgttcaacgttgactatc

SEQ ID NO: 445058 - DNA, 75 bp, synthetic construct
  source 1..75: mol_type = other DNA
tccgctcagaactactcgattcacgttttggtgccaaggctatttcgactatcgctgactcaaaacgatttccgc

SEQ ID NO: 445059 - DNA, 75 bp, synthetic construct
  source 1..75: mol_type = other DNA
tccgctcagaactactcgattcacgttttggtgccaagtccatttcaactatcgctgactcaaaacgatttccgc

SEQ ID NO: 445060 - DNA, 75 bp, synthetic construct
  source 1..75: mol_type = other DNA
tccgctcagaactactcgattcacgttttggtgccaagaccatttctactatcgctgactcaaaacgatttccgc

SEQ ID NO: 445061 - DNA, 75 bp, synthetic construct
  source 1..75: mol_type = other DNA
atggataagaagcaagtaacggatttaaggtcggaactactcgattcacgttttggcgcgaagtcaatttcgact

SEQ ID NO: 445062 - DNA, 75 bp, synthetic construct
  source 1..75: mol_type = other DNA
atggataagaagcaagtaacggatttaaggtcggaactactcgattcacgttttggcgccaagtcgatttcaact

SEQ ID NO: 445063 - DNA, 75 bp, synthetic construct
  source 1..75: mol_type = other DNA
atggataagaagcaagtaacggatttaaggtcggaactactcgattcacgttttggcgcaaagtcgatttccact

SEQ ID NO: 445064 - DNA, 75 bp, synthetic construct
  source 1..75: mol_type = other DNA
gatcggaactactcgattcacgttttggtgccaaggccatttcgactatcgcagaatcaaaacgctttccgctgc

SEQ ID NO: 445065 - DNA, 75 bp, synthetic construct
  source 1..75: mol_type = other DNA
gatccgaactactcgattcacgttttggtgcgaaggccatttcgactatcgcagaatcaaaacgctttccgctgc

SEQ ID NO: 445066 - DNA, 75 bp, synthetic construct
  source 1..75: mol_type = other DNA
caggtgattgcccagtactatgaatttctgcgcctcggccgtgaaggttacaccaaagtgcagaatgcctcttat

SEQ ID NO: 445067 - DNA, 75 bp, synthetic construct
  source 1..75: mol_type = other DNA
gtatgacctctctgaacgtctgcgtctgcgcggctggcaggttccggccttcaccctcggcggtgaagccaccga

SEQ ID NO: 445068 - DNA, 75 bp, synthetic construct
  source 1..75: mol_type = other DNA
ggtctgaactactcgattcacgttttggtgctaaggccatttcgactatcgcagaatcaaaacgctttccgctgc

SEQ ID NO: 445069 - DNA, 75 bp, synthetic construct
  source 1..75: mol_type = other DNA
gttcagaactactcgattcacgttttggtgctaaggccatttcgactatcgcagaatcaaaacgctttccgctgc

SEQ ID NO: 445070 - DNA, 75 bp, synthetic construct
  source 1..75: mol_type = other DNA
tacttatattaaaattgtttgttatctaacaattcaatctcgttattttaaaaatggcgaacgagttaagctttt

SEQ ID NO: 445071 - DNA, 75 bp, synthetic construct
  source 1..75: mol_type = other DNA
cgtcgacgggctattgatgcgctgctgcaggggctgtgtttccactatgacccgctggccaaccgtgtccagtgc

SEQ ID NO: 445072 - DNA, 75 bp, synthetic construct
  source 1..75: mol_type = other DNA
tgcttagccatattgagcatgaggtgctggtgattgaggagcgcctcaatgaactcaatgaaactatgttcaggg

SEQ ID NO: 445073 - DNA, 75 bp, synthetic construct
  source 1..75: mol_type = other DNA
gttcaatatttataagtctttcagggcaaataagtgtgcagatctctgtattagccaagtagtgaatatggagga

SEQ ID NO: 445074 - DNA, 75 bp, synthetic construct
  source 1..75: mol_type = other DNA
ggcaaaacattgagtgagatacgagccttaaccgcaaatggttttattaagttcaatatttataagtctttcagg

SEQ ID NO: 445075 - DNA, 75 bp, synthetic construct
  source 1..75: mol_type = other DNA
gttttccctcgcggtggtggctgcacactgacttttcctgttaaagctggtgatgaatgccttgttatctttgcg

SEQ ID NO: 445076 - DNA, 75 bp, synthetic construct
  source 1..75: mol_type = other DNA
aacggcaagccaatcgatgatacgcacactcatggcggtgttcagcgcggtggaagcaataccgatagggtaaac

SEQ ID NO: 445077 - DNA, 75 bp, synthetic construct
  source 1..75: mol_type = other DNA
gaatcagcggtatcagtagcagttcggtagagctgcgcagcgatgacggcggcacaaagttaagccttaacccat

SEQ ID NO: 445078 - DNA, 75 bp, synthetic construct
  source 1..75: mol_type = other DNA
tggtgactttggagcaattgcctgacattcgcgatttagaacgtcaacatgagcggggaattcagcatgaaattg

SEQ ID NO: 445079 - DNA, 75 bp, synthetic construct
  source 1..75: mol_type = other DNA
gaaaggaatctttcattcttacccgtattgagttgttcaactggggcggttttcatggattgcatcaggcagcaa

SEQ ID NO: 445080 - DNA, 75 bp, synthetic construct
  source 1..75: mol_type = other DNA
gaaatggggcaaatcctgcgtcaggcacgcgcggcagggctgaaaactcagtttatggggccggaaggcgtggct

SEQ ID NO: 445081 - DNA, 75 bp, synthetic construct
  source 1..75: mol_type = other DNA
gtcagtgggaaaatggcaaatgcgccattcctgatcgtgtagtcgagcaactgggtgatgctgccaacttactga

SEQ ID NO: 445082 - DNA, 75 bp, synthetic construct
  source 1..75: mol_type = other DNA
atttctcagagtaaagtgaaccgccccgggtttcctggagagtgttttatctgtgaactcaggctgccagatcat

SEQ ID NO: 445083 - DNA, 75 bp, synthetic construct
  source 1..75: mol_type = other DNA
agccgaaagccgcgctggtaacggaaagtgatggtaaggcctttcctcagccagcaggtgctgcgttaccagtcc

SEQ ID NO: 445084 - DNA, 75 bp, synthetic construct
  source 1..75: mol_type = other DNA
acctgcgcaatcgggcgtttctcttcgtggcatacaataccctgatgcgtatgtcagaaatctcgcgcatccgtg

SEQ ID NO: 445085 - DNA, 75 bp, synthetic construct
  source 1..75: mol_type = other DNA
ctcgatagccctgtatcggaagttttgccaaaattgttcagggatactgtcatggtcgaaatcgacctagcaaac

SEQ ID NO: 445086 - DNA, 75 bp, synthetic construct
  source 1..75: mol_type = other DNA
agccattgggtaaagcacagagctatagcagcgacgagctgaaaaatgcgccagagtttaatccagcgacgcttt

SEQ ID NO: 445087 - DNA, 75 bp, synthetic construct
  source 1..75: mol_type = other DNA
ccgggtttcctggagagtgttttatctgtgaactcaggctgccagatcatcgtttccgatggaagcataataagc

SEQ ID NO: 445088 - DNA, 75 bp, synthetic construct
  source 1..75: mol_type = other DNA
cctgagtgagccggttgcccgttccgggaagctgccgacactggcaccgccgttactgcgccagctggctgccat

SEQ ID NO: 445089 - DNA, 75 bp, synthetic construct
  source 1..75: mol_type = other DNA
ggcggctgctcgagcggtgcgacggcaagcagctggcggcgtggatgcgtaagacctgcctcgatgagaagccgg

SEQ ID NO: 445090 - DNA, 75 bp, synthetic construct
  source 1..75: mol_type = other DNA
atcaggatgggatgctgattacgcctacaggcattccatatgaaaaactgacggagtcgcatattgtctttattg

SEQ ID NO: 445091 - DNA, 75 bp, synthetic construct
  source 1..75: mol_type = other DNA
ctgcaatggagaaaatattcagcgacgcctgggtgttgctgaataaaagagatgctacgccaaacaaagggagat

SEQ ID NO: 445092 - DNA, 75 bp, synthetic construct
  source 1..75: mol_type = other DNA
ctcgtggtcttgcgtggtttccgatctccccggaagctgcccgcgaatacctgcttcaactgcatgatgcggatc

SEQ ID NO: 445093 - DNA, 75 bp, synthetic construct
  source 1..75: mol_type = other DNA
ccggttactggaacgctgcgagggtaaacgactggcagaatggatgcggcgggtctgtctgggggagccggttgc

SEQ ID NO: 445094 - DNA, 75 bp, synthetic construct
  source 1..75: mol_type = other DNA
gatgatgaaacgaaactgttactggcatggaaaaaatatcgggtgctgcttatgcgtgttaatgtagtaaaaccc

SEQ ID NO: 445095 - DNA, 75 bp, synthetic construct
  source 1..75: mol_type = other DNA
tgccactgtcagatatcgggagtaccagagagcgtccgtcatcttgagataagaggtcacgccacagacagcata

SEQ ID NO: 445096 - DNA, 75 bp, synthetic construct
  source 1..75: mol_type = other DNA
atgcttcctacatcgcaattacgaccgtccgggacattctactccaattccgcagaaacatcagcaggcatcaaa

SEQ ID NO: 445097 - DNA, 75 bp, synthetic construct
  source 1..75: mol_type = other DNA
agcgaaatcacaccaattcagatagaagaagcgcgggccagtggtcgtttatatatcaaagattgtgatattgag

SEQ ID NO: 445098 - DNA, 75 bp, synthetic construct
  source 1..75: mol_type = other DNA
gatattcataatctggcggagctgcggggaattacgctggcggaagatggcgcgctacgtatcggctctgcaacg

SEQ ID NO: 445099 - DNA, 75 bp, synthetic construct
  source 1..75: mol_type = other DNA
atgttcaaggttaatagaacatatcctgcaccaaagtctctttccaagaaagcacgttatgatggtgctgatgta

SEQ ID NO: 445100 - DNA, 75 bp, synthetic construct
  source 1..75: mol_type = other DNA
gggctggcacgttcggtgcaggacgggctgaaagctgctaacgccaatgtcgttttcttcgacggcattaccgct

SEQ ID NO: 445101 - DNA, 75 bp, synthetic construct
  source 1..75: mol_type = other DNA
ataaaaagcctgcatattgaattaaataattcatcttttattcattctgtgccagaaggcgttgaacacctgaaa

SEQ ID NO: 445102 - DNA, 75 bp, synthetic construct
  source 1..75: mol_type = other DNA
gcggctatgaaactattgccgacaccatgactaacccggcttatcgcaaagcggcctttgccctgatgatgcagg

SEQ ID NO: 445103 - DNA, 75 bp, synthetic construct
  source 1..75: mol_type = other DNA
ttcttgcctcatttaccggaagaaatcacagcgataacaatagagaactgtaataagctgacaggtcttacaggg

SEQ ID NO: 445104 - DNA, 75 bp, synthetic construct
  source 1..75: mol_type = other DNA
gcctgttaccatgacggggcattcagaacctgtcacggtggatacatgtttatttgacgggaccggggctggcga

SEQ ID NO: 445105 - DNA, 75 bp, synthetic construct
  source 1..75: mol_type = other DNA
aactaaagccacaacagaccttatcgttacggggaaatggagggctgggtattgccccaccagacacggcgatgg

SEQ ID NO: 445106 - DNA, 75 bp, synthetic construct
  source 1..75: mol_type = other DNA
caggaagtgtcctgctgttatccggttgcgccggaatgaaaagtgaatttgattgcaatgccacagccagtaaca

SEQ ID NO: 445107 - DNA, 75 bp, synthetic construct
  source 1..75: mol_type = other DNA
gggattatgatcctgacggcgattgtgatctccgtactgctgtgggcttacccctccaatccgtacgtctggtgc

SEQ ID NO: 445108 - DNA, 75 bp, synthetic construct
  source 1..75: mol_type = other DNA
ttggacgcaaagggaaaccgacgcgtcctgtcaaacaaaaggtaagccgtcgtcgttacgaagatgacgatgatt

SEQ ID NO: 445109 - DNA, 75 bp, synthetic construct
  source 1..75: mol_type = other DNA
tgttgttgggggcgttgaacttaacgccaatcgaagtggcgcaggccttccagactatcgccagcggtggtaatc

SEQ ID NO: 445110 - DNA, 75 bp, synthetic construct
  source 1..75: mol_type = other DNA
cgcagcagcagcaacctgctcaacaagagcagaaagacagcgacggcgtggcgggctggattaaggaaatgtttg

SEQ ID NO: 445111 - DNA, 75 bp, synthetic construct
  source 1..75: mol_type = other DNA
aaaacactgattaattcacagagtgtaacaaaaatgattacctgtggtgagaacggtcaccctgtcattgttgac

SEQ ID NO: 445112 - DNA, 75 bp, synthetic construct
  source 1..75: mol_type = other DNA
gaaagaatatcgagtgctattgatgcgtattaatacttcaacagcactcgatattgaatggcctacgcctccggc

SEQ ID NO: 445113 - DNA, 75 bp, synthetic construct
  source 1..75: mol_type = other DNA
gggatggcgctggggctgcctgcggttacggacacctggattaagctgggcgtgccgaaagatcagctgaatccg

SEQ ID NO: 445114 - DNA, 75 bp, synthetic construct
  source 1..75: mol_type = other DNA
aactggttgtaccgttctttaaagatgtgatgccgcagttaggtttgttctacatcctgctggcctacttcgtta

SEQ ID NO: 445115 - DNA, 75 bp, synthetic construct
  source 1..75: mol_type = other DNA
tgtaggttcgctggcgttaggtggtgcgttaggcattatcgccgtactgctacgtcaggaattcctgctggtgat

SEQ ID NO: 445116 - DNA, 75 bp, synthetic construct
  source 1..75: mol_type = other DNA
tgatctccgtactgctgtgggcttacccgtccaatccgtacgtctggtgcgtgttggtggtgctggtaggttacg

SEQ ID NO: 445117 - DNA, 75 bp, synthetic construct
  source 1..75: mol_type = other DNA
aacgcgctgttccggcgcaggcggcgtatctgacactatggaccatgcagcaggttgtacaacgcggtacgggtc

SEQ ID NO: 445118 - DNA, 75 bp, synthetic construct
  source 1..75: mol_type = other DNA
ctgtatcagagcttcccgcaggcagaacgcgctgttccggcgcaggcggcgtatctgacactatggaccatgcag

SEQ ID NO: 445119 - DNA, 75 bp, synthetic construct
  source 1..75: mol_type = other DNA
agattatcgatggtgaactgtatgaaatgctcagcgcgcgtcctctgggcgtacagccgcgcggtggggtaatct

SEQ ID NO: 445120 - DNA, 75 bp, synthetic construct
  source 1..75: mol_type = other DNA
atgtctaaaatttggtcaaaagaagaaactctctggagcttcgcactctacggcacagccgttggcgcaggcacg

SEQ ID NO: 445121 - DNA, 75 bp, synthetic construct
  source 1..75: mol_type = other DNA
tgaaagtcgcttatctcatcatctgcataagtgtactgttctttgtctttagctgcctgctttctattccacctt

SEQ ID NO: 445122 - DNA, 75 bp, synthetic construct
  source 1..75: mol_type = other DNA
cattgattgcctatttcttatttctttccatttaccttgtcggtagttggcaacctgatctattaacgacccagg

SEQ ID NO: 445123 - DNA, 75 bp, synthetic construct
  source 1..75: mol_type = other DNA
gtgttagcggtcgatgatgatggcgaaacgatggttgtcactgcatcttccgttgaacaaaaccttaaagatgca

SEQ ID NO: 445124 - DNA, 75 bp, synthetic construct
  source 1..75: mol_type = other DNA
cggtgaaagggggctgggcgacggcatttaaagcaccttcgctgttgcaacttagccctgactggacgagcaatt

SEQ ID NO: 445125 - DNA, 75 bp, synthetic construct
  source 1..75: mol_type = other DNA
cctgactggacgagcaattcctgccgtggcgcatgtaagattgtgggtagcccggatctgaaaccagaaaccagc

SEQ ID NO: 445126 - DNA, 75 bp, synthetic construct
  source 1..75: mol_type = other DNA
tgtcgatgaagagcatccgcacattgttgtgaaggccgatgctgataaacaggcgctggagctgctggtgaaagc

SEQ ID NO: 445127 - DNA, 75 bp, synthetic construct
  source 1..75: mol_type = other DNA
atctgatgacgctggcaggctttaaaccagctggtgtgctgtgtgagctgactaatgacgatggcacgatggcgc

SEQ ID NO: 445128 - DNA, 75 bp, synthetic construct
  source 1..75: mol_type = other DNA
tatgatcttcccggcagaaaccatgactgttgagcagatggcgctgaccattcgccacgggagtggtattgtttg

SEQ ID NO: 445129 - DNA, 75 bp, synthetic construct
  source 1..75: mol_type = other DNA
aaaaaaagccgtgcatttaaccgcgcactgtcaattatgttggtatcactgattactttcatcgtctgctgcatc

SEQ ID NO: 445130 - DNA, 75 bp, synthetic construct
  source 1..75: mol_type = other DNA
atgtctaatatttggtctaaagaagaaactctgtggagtttcgcgctctacggcacagccgttggtgcaggcacg

SEQ ID NO: 445131 - DNA, 75 bp, synthetic construct
  source 1..75: mol_type = other DNA
gccgcaggggatgctgcgtattatcagcagctttggttttggacgacaggtagtggctccggcgttatcagcgct

SEQ ID NO: 445132 - DNA, 75 bp, synthetic construct
  source 1..75: mol_type = other DNA
ataaccgtaagggcgttagtattcgtggtctggacagcagctacaccctgattcttgtcgacggtaaacgcgtta

SEQ ID NO: 445133 - DNA, 75 bp, synthetic construct
  source 1..75: mol_type = other DNA
tgcagatgctggttttatgatgttgcaggagcatgcgacatggcctgatggcggtaatgctgttgagcctggaat

SEQ ID NO: 445134 - DNA, 75 bp, synthetic construct
  source 1..75: mol_type = other DNA
atggcagtaaaaactccgcttaagtgggtgggcagcaaagcccgccttatgccgcagttgcttccccatctgccg

SEQ ID NO: 445135 - DNA, 75 bp, synthetic construct
  source 1..75: mol_type = other DNA
atgctgccgtacgcaaggggacgtaaagaagatgtgagcgatacccattttattttcgtagttacctcatggaaa

SEQ ID NO: 445136 - DNA, 75 bp, synthetic construct
  source 1..75: mol_type = other DNA
cggagcgacagcgttatgccggaaataaataccggatgaagccctcgctgaaccgtgaattttatatccggtttg

SEQ ID NO: 445137 - DNA, 75 bp, synthetic construct
  source 1..75: mol_type = other DNA
atgaatcgcatttattgtgcgattggcacaataaatgttgatatacatatgttgcgtaatgtccaaaaagatgac

SEQ ID NO: 445138 - DNA, 75 bp, synthetic construct
  source 1..75: mol_type = other DNA
gttgcgtaatgtccaaaaagatgacattatcgattcaacgggatatcatctttttggtgggtgccagttagtacg

SEQ ID NO: 445139 - DNA, 75 bp, synthetic construct
  source 1..75: mol_type = other DNA
atcgtattagcatcagccgcacgtctgacgttaacgctgcaccgggttaccagaactttgtcggttttgaaacgg

SEQ ID NO: 445140 - DNA, 75 bp, synthetic construct
  source 1..75: mol_type = other DNA
aaatcggtcagaaatggtcgggcactgttacgatcgataccaccattcaggaacatcgcgatcgtggtgacacat

SEQ ID NO: 445141 - DNA, 75 bp, synthetic construct
  source 1..75: mol_type = other DNA
acttagcgatgcggtgaacctgaccgggggaacccagctccaaaacgtctgccagccagtacgcgctgtttgtgg

SEQ ID NO: 445142 - DNA, 75 bp, synthetic construct
  source 1..75: mol_type = other DNA
gggtcgggctgtgtttgtccgcgatttcttgtgcatggcctgtgttagcggttgatgatgatggcgaaacgatgg

SEQ ID NO: 445143 - DNA, 75 bp, synthetic construct
  source 1..75: mol_type = other DNA
tggacgatcatgaaacctacggcgaacactggagtccgcgtgcctatctggtctataacgctaccgataccgtaa

SEQ ID NO: 445144 - DNA, 75 bp, synthetic construct
  source 1..75: mol_type = other DNA
aacaaaaacccgggcaatagcagcccaattacttccgaaagtaatactgtcgacggtaaatacacattgccgctg

SEQ ID NO: 445145 - DNA, 75 bp, synthetic construct
  source 1..75: mol_type = other DNA
gcaggatttgggggggtgtagagctatacttagcaatcttgatgaagtatataatacatatgataatattaaaaa

SEQ ID NO: 445146 - DNA, 75 bp, synthetic construct
  source 1..75: mol_type = other DNA
tttgtactcactggtatctacatctggcgggcaaatggcgaattcgaccgtcttaacaacgaagtcctgcatgag

SEQ ID NO: 445147 - DNA, 75 bp, synthetic construct
  source 1..75: mol_type = other DNA
attcgagccagacgctcgcggattgtgcttaaggaagagcacaaagcgatgctgaaattatgggaaaacaggtaa

SEQ ID NO: 445148 - DNA, 75 bp, synthetic construct
  source 1..75: mol_type = other DNA
attttatatttaattaagtatgaacgttatctggataaggaggataagaaagccatagaaaaaagaataaatgat

SEQ ID NO: 445149 - DNA, 75 bp, synthetic construct
  source 1..75: mol_type = other DNA
tttccactatcaggaatgttgtgaaaacgtctggattgaggacattgttggcgacctgacagacctggaaggagt

SEQ ID NO: 445150 - DNA, 75 bp, synthetic construct
  source 1..75: mol_type = other DNA
gaaaaaaccagaaatcaggacgtgacgtaagagaggtgggctggaccagcctgtttcaggcggtggctgagccct

SEQ ID NO: 445151 - DNA, 75 bp, synthetic construct
  source 1..75: mol_type = other DNA
cgtaagagaggcgggctggaccagcctgtttcaggcggtggctgagcccttttccggcgcctggcagcaggccgt

SEQ ID NO: 445152 - DNA, 75 bp, synthetic construct
  source 1..75: mol_type = other DNA
cgattgctttacacggatgaagacgatgataaggcaattcgccaaggatatcatattagggatgcggatcgccct

SEQ ID NO: 445153 - DNA, 75 bp, synthetic construct
  source 1..75: mol_type = other DNA
ttgatgcagtcagatttggttatggggcaataaaaaaattaattagttatcgaattatccctatgcttgatttgc

SEQ ID NO: 445154 - DNA, 75 bp, synthetic construct
  source 1..75: mol_type = other DNA
cacaaccaccgaacgactggcacaactcagcatcgttggactgcgaaattcattgttcttctgggatggaagcga

SEQ ID NO: 445155 - DNA, 75 bp, synthetic construct
  source 1..75: mol_type = other DNA
attttgattctgccggttgtctggagtgcggcacctgtcgggtgctgtgcggcaacactattctcgaacagtggc

SEQ ID NO: 445156 - DNA, 75 bp, synthetic construct
  source 1..75: mol_type = other DNA
gatttacaaaaagcacttttagtacagtcacttccattagtaatttctgcgattggattaaatatatttatattg

SEQ ID NO: 445157 - DNA, 75 bp, synthetic construct
  source 1..75: mol_type = other DNA
ataattttagcatttatagctgctgttatcgttgcaattaccttacctgttgcaatcgactatcttaattttcca

SEQ ID NO: 445158 - DNA, 75 bp, synthetic construct
  source 1..75: mol_type = other DNA
aagcaaagagatccaatctaatatttctgcgttgaacaaatatgactggaaaattgttggtgaaactttcaatag

SEQ ID NO: 445159 - DNA, 75 bp, synthetic construct
  source 1..75: mol_type = other DNA
cggcggacggtaaaagtctcaccccggatgatgtgcgtccgatgcttgaacagatggtgaaggaggctgtaagcc

SEQ ID NO: 445160 - DNA, 75 bp, synthetic construct
  source 1..75: mol_type = other DNA
tgttcagaatcggcgaaacttaccaccccggcgatacggtgacgtggggggctcgttgtggcactgcaacagtat

SEQ ID NO: 445161 - DNA, 75 bp, synthetic construct
  source 1..75: mol_type = other DNA
acggaagcgccagcgacgcagtggcggcagagccgcagacgcggcgtgagcgcaaccatgcggagatggagcggg

SEQ ID NO: 445162 - DNA, 75 bp, synthetic construct
  source 1..75: mol_type = other DNA
ttggtacgcctttcgaacgcgttgaaaacgcgctggttgcactgcgtgaaggacgcggtgtaatggtgcttgatg

SEQ ID NO: 445163 - DNA, 75 bp, synthetic construct
  source 1..75: mol_type = other DNA
cagcgtacggaaaaaacattttccctgccggtgatgctctaccgcggtgtgttcagagccggtgaaacctaccac

SEQ ID NO: 445164 - DNA, 75 bp, synthetic construct
  source 1..75: mol_type = other DNA
gcggtcgctgcctctgacggtaataaggcaatcactgaaacagagcatgatgcggtgaaggcgatgttcaggggg

SEQ ID NO: 445165 - DNA, 75 bp, synthetic construct
  source 1..75: mol_type = other DNA
atcattacgagaatccgcgtaacgtgggttccttcgacaacaacgacgagaacgtgggcagcggcatggtgggtg

SEQ ID NO: 445166 - DNA, 75 bp, synthetic construct
  source 1..75: mol_type = other DNA
gaaacgacgcagatctacacgcgggtagccatcggtcacttacaggaagttcacgcgctgacgcacccggaagag

SEQ ID NO: 445167 - DNA, 75 bp, synthetic construct
  source 1..75: mol_type = other DNA
aatggtcacacatcaatagggattattggtagaaaagagaagcacaaaggaactagcgaaattatttcagtattg

SEQ ID NO: 445168 - DNA, 75 bp, synthetic construct
  source 1..75: mol_type = other DNA
acagataagcctggcggtgctggaagcgtaccagcgccatcttcgcagctaccgcaaggccgacgggaacacgct

SEQ ID NO: 445169 - DNA, 75 bp, synthetic construct
  source 1..75: mol_type = other DNA
acgctgccgaaggaggagaaacggcttccggcgcaggtgttcagcgagcaggaaacgcggcaggtgttacagagt

SEQ ID NO: 445170 - DNA, 75 bp, synthetic construct
  source 1..75: mol_type = other DNA
cacccggaagagcaggatgagacgtggacagatcggcacggaagcgccagcgacgcggtggcggcagagccgcag

SEQ ID NO: 445171 - DNA, 75 bp, synthetic construct
  source 1..75: mol_type = other DNA
gcgcagtcgaaggtgttgattgtggagtttcatcaaccgattgccgccagagtgcttgaagaggcgcaaaagcgc

SEQ ID NO: 445172 - DNA, 75 bp, synthetic construct
  source 1..75: mol_type = other DNA
gattcgcattaacccgaatcgcagcggtgaagagacggtgctgcggattttgcgtgagagtattgccagtattta

SEQ ID NO: 445173 - DNA, 75 bp, synthetic construct
  source 1..75: mol_type = other DNA
tcttctggtacatgatgcgcctgtttatccgactacgcgggtcattattgagcagatggggctgacgcttattac

SEQ ID NO: 445174 - DNA, 75 bp, synthetic construct
  source 1..75: mol_type = other DNA
aacgctggaaacactaggatttttattactcgttacgggttttgtaataacgctaataattgtcagtggcaaaac

SEQ ID NO: 445175 - DNA, 75 bp, synthetic construct
  source 1..75: mol_type = other DNA
aacattgcgcgattcgcattaacccaaatcgcagcggtgaagagacgatattgcggatcttgcgtgaaagtattg

SEQ ID NO: 445176 - DNA, 75 bp, synthetic construct
  source 1..75: mol_type = other DNA
tagtcccggaaaacaccgggcagtctgtgggacgagtggattatccggatgtgttcgaacaggtctggcgggagt

SEQ ID NO: 445177 - DNA, 75 bp, synthetic construct
  source 1..75: mol_type = other DNA
cctgaatcgttcgggcatccagcctctgcacagcaaatgctcgtttgcgaattatcaggtgcagaacgacgggca

SEQ ID NO: 445178 - DNA, 75 bp, synthetic construct
  source 1..75: mol_type = other DNA
ttcagcgtatgcgctgaaagccgattcgggcgctgtgcagcaggtgatgacccaaaggccggaacaatcacacca

SEQ ID NO: 445179 - DNA, 75 bp, synthetic construct
  source 1..75: mol_type = other DNA
cagattcagggcgctcaggcgctggaagtcttgcgtgggctggtgtttgcgccagtgatgcacgcggtgcaggcg

SEQ ID NO: 445180 - DNA, 75 bp, synthetic construct
  source 1..75: mol_type = other DNA
ggtattacaccagataattgatcgccggacagcatcactgtgcagtgtcgggatgttaacaaacctgaatcatgc

SEQ ID NO: 445181 - DNA, 75 bp, synthetic construct
  source 1..75: mol_type = other DNA
agccgatcgggtagtcccggaaaacaccgggcagcctgtgggacgagtggattatccggatgtgttcgaacaggt

SEQ ID NO: 445182 - DNA, 75 bp, synthetic construct
  source 1..75: mol_type = other DNA
cattaggtaatgctctgctttcaatcagcaaaggttttgtcggtaactatgaaaaacttattaaagattaccaaa

SEQ ID NO: 445183 - DNA, 75 bp, synthetic construct
  source 1..75: mol_type = other DNA
tacctgaacattcgttcgctggtggtgtttggtggtgtgagtattaacccgcagatgatgaaactgcgtggcggc

SEQ ID NO: 445184 - DNA, 75 bp, synthetic construct
  source 1..75: mol_type = other DNA
gcgaccgatatcgccgcgcgtggcctggatatcgaagagttgccacacgtcgtcaactatgagctgccaaacgta

SEQ ID NO: 445185 - DNA, 75 bp, synthetic construct
  source 1..75: mol_type = other DNA
gaaaccagcaagacatggacttcaggcgagaagacggtttattgcagtttctgcaataaatcccagtacgaagtc

SEQ ID NO: 445186 - DNA, 75 bp, synthetic construct
  source 1..75: mol_type = other DNA
attctgctcgatatggacacaccgggcgggatggtggcgggagcatttgactgtgctgacatcatcgcccgtgtg

SEQ ID NO: 445187 - DNA, 75 bp, synthetic construct
  source 1..75: mol_type = other DNA
ttgttcagcgagcgacgacgttttttggaccggaccggaattttgaaaacccctggctgctcccggtaagcggca

SEQ ID NO: 445188 - DNA, 75 bp, synthetic construct
  source 1..75: mol_type = other DNA
atgggctttgctcattatctcgaagccctcgatttccagcgggagatcgtcaaaattcacgccgtttttggtggt

SEQ ID NO: 445189 - DNA, 75 bp, synthetic construct
  source 1..75: mol_type = other DNA
tatcagtgcgtggtgccgaccacctggaacgccagcccgcgcgatcccaaaggcagattggcgcttatgaagcgg

SEQ ID NO: 445190 - DNA, 75 bp, synthetic construct
  source 1..75: mol_type = other DNA
tgatgtcggcgctgaacctgccgctttccggtatccagtcaacgttgggccgcattttgtgccgcgcgcacgaag

SEQ ID NO: 445191 - DNA, 75 bp, synthetic construct
  source 1..75: mol_type = other DNA
cggttgtggcgcacgtcttcggtgaacgcactctggccacactggaacgtcttctgagcctgctgtcggcctttg

SEQ ID NO: 445192 - DNA, 75 bp, synthetic construct
  source 1..75: mol_type = other DNA
gatacaccatcaataatgccggacgccgcctggtggttgacccaattacgcgcattgaaggccacatgcgctgcg

SEQ ID NO: 445193 - DNA, 75 bp, synthetic construct
  source 1..75: mol_type = other DNA
taccagtgcgtggtgccgaccacctggaacgccagcccgcgcgatccgaaagggcagattggcgcctatgaggcc

SEQ ID NO: 445194 - DNA, 75 bp, synthetic construct
  source 1..75: mol_type = other DNA
atgggctttgcccactatctcgaagctctcgatttccagcgtgaaattgtcaaaatccacgcggtctttggcggt

SEQ ID NO: 445195 - DNA, 75 bp, synthetic construct
  source 1..75: mol_type = other DNA
atcaggtcgggcgtcatccgttcgatggcattaccgacccgtggtacaaccccggcgatgtcaaaggcagcgata

SEQ ID NO: 445196 - DNA, 75 bp, synthetic construct
  source 1..75: mol_type = other DNA
aaaccgcctgaagaaattcgttgaaggcgggcagttggggatcttccgcaatggctactgggggcacccgcagta

SEQ ID NO: 445197 - DNA, 75 bp, synthetic construct
  source 1..75: mol_type = other DNA
gtgattaacggcgacttcaaaaatgtgctgccagtggatttggttgatccgcagcaggtgcaggagtttgtcgac

SEQ ID NO: 445198 - DNA, 75 bp, synthetic construct
  source 1..75: mol_type = other DNA
cttgtggcacgacgagcaaaagaaaacgattcaagcatttggacatcaggccaaggccattaacagcatgaatat

SEQ ID NO: 445199 - DNA, 75 bp, synthetic construct
  source 1..75: mol_type = other DNA
gcgtcatgccctggaagaaaccccggcgtttcagcagcatgttgagaaactggagcagggcgaccgtgaaagttt

SEQ ID NO: 445200 - DNA, 75 bp, synthetic construct
  source 1..75: mol_type = other DNA
tttgtattgggcgcaggcgtggtggtgttaatttcgacccttgtcggcgaagagaaattcctcgactggggatgg

SEQ ID NO: 445201 - DNA, 75 bp, synthetic construct
  source 1..75: mol_type = other DNA
ggtaattgccaccaacgtgacttactacatgttgctgacctatatgccgagttatttgtcgcataacctgcatta

SEQ ID NO: 445202 - DNA, 75 bp, synthetic construct
  source 1..75: mol_type = other DNA
actttgagcagcaactgattatgacatctccgaattcttcatcctcaatatctcgccttgcgcgaaagttaagaa

SEQ ID NO: 445203 - DNA, 75 bp, synthetic construct
  source 1..75: mol_type = other DNA
atgcaatggaatggttcgattttggtgtttatggttttgttgcttacgcattaggtaaagtttttttcccggggg

SEQ ID NO: 445204 - DNA, 75 bp, synthetic construct
  source 1..75: mol_type = other DNA
atcatcgccattatgattggcatgctgtttgtgcagccagtaatggggctgctgagcgaccgttttggtcgtcgt

SEQ ID NO: 445205 - DNA, 75 bp, synthetic construct
  source 1..75: mol_type = other DNA
atcacaccaactgcagcagcctgaagccgattccgccattcagcgggaagccgatcaggtagtcccggaaaacac

SEQ ID NO: 445206 - DNA, 75 bp, synthetic construct
  source 1..75: mol_type = other DNA
tacttggcgactaccgggaaaacgggaacggaatttgttcagcgagcgacgacgttttttggaccggaccggaat

SEQ ID NO: 445207 - DNA, 75 bp, synthetic construct
  source 1..75: mol_type = other DNA
caatggtggcgggtgtcgcgcttagttgcgtcagctatggatttgttgctcgcattgtttcaaaacatcagatca

SEQ ID NO: 445208 - DNA, 75 bp, synthetic construct
  source 1..75: mol_type = other DNA
atatggtcgccagaagatcctcgctatcactattgtgattatgtcgatcagtacgttctgtattggcttaatacc

SEQ ID NO: 445209 - DNA, 75 bp, synthetic construct
  source 1..75: mol_type = other DNA
acgccaggtgctgaaagaggacaacggcaatatttcgcaaaccgcaaaatctccggcagagcgcaagagggcgca

SEQ ID NO: 445210 - DNA, 75 bp, synthetic construct
  source 1..75: mol_type = other DNA
ggcgggaatacccgttgcgtgccggggcaaacccgaagaaatccgctttcagtgcctggaaggccagattacgcg

SEQ ID NO: 445211 - DNA, 75 bp, synthetic construct
  source 1..75: mol_type = other DNA
gcatgcgcgaagctctcgtagcgccactggatttcacctctctgcgtgatgctgtaaccgagttcgaacagcgtc

SEQ ID NO: 445212 - DNA, 75 bp, synthetic construct
  source 1..75: mol_type = other DNA
tgatgaactgctggcacagtgtgacatgaacgccacggaacttagcgagcaggatgtctggggtaaatccacccc

SEQ ID NO: 445213 - DNA, 75 bp, synthetic construct
  source 1..75: mol_type = other DNA
ggctggcgcaaggtcctgcctggcagccaactggtgtgtttgcccgtggctgatggcggcgaaggcacgctcgaa

SEQ ID NO: 445214 - DNA, 75 bp, synthetic construct
  source 1..75: mol_type = other DNA
atgctgaaaatgaaaccggcgctgaaaaaaacgctgatggcggtagcgtgcctgagcgcagtaccggcagcccag

SEQ ID NO: 445215 - DNA, 75 bp, synthetic construct
  source 1..75: mol_type = other DNA
tacgtgacggtgattggtattggcggcagtgaaaaacaggcgaaggaaggtgagtttgaggccgtgatgctggca

SEQ ID NO: 445216 - DNA, 75 bp, synthetic construct
  source 1..75: mol_type = other DNA
aaaatgaccattgaagaaatggcggaaaaactgaaagtcgccacaaccgccctccgggcacatgccagaaggcac

SEQ ID NO: 445217 - DNA, 75 bp, synthetic construct
  source 1..75: mol_type = other DNA
tcaaccagaaagaacgctggcagcgttttaactggccggatgaacagtggcaacccggcgcatcgctgagctgga

SEQ ID NO: 445218 - DNA, 75 bp, synthetic construct
  source 1..75: mol_type = other DNA
cgcacctcatgcgtggctgccgtcaccggtctgggcgggcgtcaccggcgataacgcgcggggtcgcactgtagg

SEQ ID NO: 445219 - DNA, 75 bp, synthetic construct
  source 1..75: mol_type = other DNA
cctgacggatgcagtatccggcgacagcctgactgccggagaggcacccgcggcgctggcgttatccggtgatga

SEQ ID NO: 445220 - DNA, 75 bp, synthetic construct
  source 1..75: mol_type = other DNA
attgagcgcatccgcgatattttctactcgctttgcaatgatgagagtatgtaccgtttcatcgacaatcgcttt

SEQ ID NO: 445221 - DNA, 75 bp, synthetic construct
  source 1..75: mol_type = other DNA
tcactgccgatatcacccgccacgtcctgctactcagccgctggaaagccaccgatttgttcctgaaagatattc

SEQ ID NO: 445222 - DNA, 75 bp, synthetic construct
  source 1..75: mol_type = other DNA
cggtcaaggcagcaaatgacaacgcaaattcacgtctggcgaaaaatcagaacggtgcagatatccaggataaat

SEQ ID NO: 445223 - DNA, 75 bp, synthetic construct
  source 1..75: mol_type = other DNA
cggtggcgcagaacatttaggtctatggagaaacagcagttcagcaatagcttcttttgaacgacattaccccga

SEQ ID NO: 445224 - DNA, 75 bp, synthetic construct
  source 1..75: mol_type = other DNA
accaacattcccgaaggtatggactggggcgtcattgatggcaacctgataaacatctcagttggtccgagtgat

SEQ ID NO: 445225 - DNA, 75 bp, synthetic construct
  source 1..75: mol_type = other DNA
ttgggagaattctggcgttatcgtgtgggtgattatcgcattctgtgtgaaatcagggatgacgaactgattatt

SEQ ID NO: 445226 - DNA, 75 bp, synthetic construct
  source 1..75: mol_type = other DNA
cttctggcgcacatacccactcagtatcaggtaccgctacaagtgctggggcacatgcacacactgttggtattg

SEQ ID NO: 445227 - DNA, 75 bp, synthetic construct
  source 1..75: mol_type = other DNA
tgcaaatagtgctggcgcacatactcataccgttccattaaggagaccaaacagtggcggtatgaatttcgactg

SEQ ID NO: 445228 - DNA, 75 bp, synthetic construct
  source 1..75: mol_type = other DNA
ccaatagatttacaaaattccatgaaatagcgcactatgaaaattatgagtatctttcatcctccgaagacatat

SEQ ID NO: 445229 - DNA, 75 bp, synthetic construct
  source 1..75: mol_type = other DNA
aaattgataaaaagtatggctaatgacatttcagaatttaaaaatgcattaacgatcttgtgtgataataaaata

SEQ ID NO: 445230 - DNA, 75 bp, synthetic construct
  source 1..75: mol_type = other DNA
gtaaactgaaaaaccagccggaactgagcgaagacaccatcaaaaaagcagtggaatcgctgtcgctggaactgg

SEQ ID NO: 445231 - DNA, 75 bp, synthetic construct
  source 1..75: mol_type = other DNA
atgaaacgttcacaaattaattatgttattgataaagcacatgccattgcgcagaccttccgcgtttgtttgcca

SEQ ID NO: 445232 - DNA, 75 bp, synthetic construct
  source 1..75: mol_type = other DNA
ccgttgcgaatgataaagccgttggatggaactggagtagcggagcctataacgcaactattgatggggcatcaa

SEQ ID NO: 445233 - DNA, 75 bp, synthetic construct
  source 1..75: mol_type = other DNA
tcaacggcaaatacatccaacaaattatgaccatctggcattgatagctacctggaaacaaggcccagctacatt

SEQ ID NO: 445234 - DNA, 75 bp, synthetic construct
  source 1..75: mol_type = other DNA
caggtgaccaacgcccccgacccacaggagatgacccagcaactggcgcagacagtcttgcagggcaaaaccgtt

SEQ ID NO: 445235 - DNA, 75 bp, synthetic construct
  source 1..75: mol_type = other DNA
atgcctcataacccaaatacctggctggagttggtccagagctggtggcgtggagacacaccactgggcgcagtg

SEQ ID NO: 445236 - DNA, 75 bp, synthetic construct
  source 1..75: mol_type = other DNA
ctcacaggaacctccatttgtgctggcgagaatgccgcagcgaccggatctgaaccgccccgggtttcctggaga

SEQ ID NO: 445237 - DNA, 75 bp, synthetic construct
  source 1..75: mol_type = other DNA
aatggtggggcgtgggaccgtccatccgtgctttgtttggcagataactatgatgaagcctgtgaacttgccgaa

SEQ ID NO: 445238 - DNA, 75 bp, synthetic construct
  source 1..75: mol_type = other DNA
ttctgtcggatgcagaaaaaagggttgccagaaagctgctcgggtatatctgtcggttccgtttcagggatgcag

SEQ ID NO: 445239 - DNA, 75 bp, synthetic construct
  source 1..75: mol_type = other DNA
taattttgcgacgctggcagtggagaatgtggggttaaataaattcattaaggatgattgctttatttatacaag

SEQ ID NO: 445240 - DNA, 75 bp, synthetic construct
  source 1..75: mol_type = other DNA
aaacgtccgtgattacagcaaatacctgaacattcgttcgctggtggtgtttggcggtgtcagcattaacccgca

SEQ ID NO: 445241 - DNA, 75 bp, synthetic construct
  source 1..75: mol_type = other DNA
aagctgccagcgaagcgccagaacctgttgttctccgccactttctctgacgatattaaaaacctggcggaaaaa

SEQ ID NO: 445242 - DNA, 75 bp, synthetic construct
  source 1..75: mol_type = other DNA
acagagctggtggcgtggagacacaccgctgggcgcagtaattatgtcgatcgttatggctggcttgcgcattgc

SEQ ID NO: 445243 - DNA, 75 bp, synthetic construct
  source 1..75: mol_type = other DNA
tggcctaaatcactttctgttgccattggtggtggggtggggctgattggtgttgatgctattcgtggtgcggca

SEQ ID NO: 445244 - DNA, 75 bp, synthetic construct
  source 1..75: mol_type = other DNA
tggaggccatgaaggcaacaggaaatatgccagccaccgatgctttcctggctgatgtacgagcggaggtgttta

SEQ ID NO: 445245 - DNA, 75 bp, synthetic construct
  source 1..75: mol_type = other DNA
ctgcattgcccaaaaattttgactgcactcctaacgagaaacgctccaaagcccagctggacgcctggtggaacc

SEQ ID NO: 445246 - DNA, 75 bp, synthetic construct
  source 1..75: mol_type = other DNA
cacctcatgcgtggctgccgtcaccggtctgggcgggcgtgaccggcgataacgcgcggggtcgcacggtgggct

SEQ ID NO: 445247 - DNA, 75 bp, synthetic construct
  source 1..75: mol_type = other DNA
ctgaaaaacttccgcctgccgggacaggtatttctgaccggcaggagtatgaaggatgcggaagagtatggggaa

SEQ ID NO: 445248 - DNA, 75 bp, synthetic construct
  source 1..75: mol_type = other DNA
gctggaccagcacgcaggcgatggagcgtattctggccgactggcggggaagctggagctttatccgcctgctgg

SEQ ID NO: 445249 - DNA, 75 bp, synthetic construct
  source 1..75: mol_type = other DNA
acactatcgataatttctatccggggattgtggctcatatccaaaatttatggcatccgtcgggaacaaagacga

SEQ ID NO: 445250 - DNA, 75 bp, synthetic construct
  source 1..75: mol_type = other DNA
aaaaacttccgcttgccggggcaggtatttctgaccggcaggagtatgacggatgcggaagaatatggggaagac

SEQ ID NO: 445251 - DNA, 75 bp, synthetic construct
  source 1..75: mol_type = other DNA
atcccgtgaaggcgacgtgcctgccgggccgctggataaaaccttcgcgccgctgctgcggttgctgggcgataa

SEQ ID NO: 445252 - DNA, 75 bp, synthetic construct
  source 1..75: mol_type = other DNA
tcctctttaggacaaaataatttaattttgaaaaaatgtgcctcagttaaatatgcattaaaagcacgaggcgtt

SEQ ID NO: 445253 - DNA, 75 bp, synthetic construct
  source 1..75: mol_type = other DNA
gtcctgtgcgggggtggaagaaacaggacactcacacagattcttgtgggtcgatgctattcctttctggattat

SEQ ID NO: 445254 - DNA, 75 bp, synthetic construct
  source 1..75: mol_type = other DNA
ggcctgccacggggcgggagcgtcgcggaaaaaggctagtttttgcatttccatggtggcggcagcatgtttggt

SEQ ID NO: 445255 - DNA, 75 bp, synthetic construct
  source 1..75: mol_type = other DNA
gtgtggggttactgctccttgttgtgttgttgctcattttgtttgttctggctcagaccacaccgctgatatcag

SEQ ID NO: 445256 - DNA, 75 bp, synthetic construct
  source 1..75: mol_type = other DNA
gtggcaggcggcggcagtcagggaaaaccgtggcctgtcagactcgctggcgaaatcggcacaggaactgtttaa

SEQ ID NO: 445257 - DNA, 75 bp, synthetic construct
  source 1..75: mol_type = other DNA
aacagacggtgccggggatgttcacccgtcaggcgtgggaaggacaggtcagggaagccatcgagcaggtggtga

SEQ ID NO: 445258 - DNA, 75 bp, synthetic construct
  source 1..75: mol_type = other DNA
aggtgcgatggatctcgatgcctatctacttattatcatccttaaacccgaagcgcataaaatggcacgcaacaa

SEQ ID NO: 445259 - DNA, 75 bp, synthetic construct
  source 1..75: mol_type = other DNA
gcgcgccgactgggtttcaataaggcggatgaaatcactatcgtcttctgtggctcgaaaaagagtctggcgaat

SEQ ID NO: 445260 - DNA, 75 bp, synthetic construct
  source 1..75: mol_type = other DNA
ctttacctcaatggcgggtggtaatgtcgcggctgcagtttgctctgcgtcagcatccagtctgctggggatttt

SEQ ID NO: 445261 - DNA, 75 bp, synthetic construct
  source 1..75: mol_type = other DNA
aacgagtctgagcaacatgctgtcttctaccgagcaattgagcgactttggaatgtgcataacggaacaaataat

SEQ ID NO: 445262 - DNA, 69 bp, synthetic construct
  source 1..69: mol_type = other DNA
atgcaatatgcgaaacctgtcaccctgaacgttgaagagtgcgaccgcctttcttttctgccttacctg

SEQ ID NO: 445263 - DNA, 75 bp, synthetic construct
  source 1..75: mol_type = other DNA
attgccattctgaagcctgaacctcataaactggctcgagataacaaccaaatgcataaaattggaaaaatggca

SEQ ID NO: 445264 - DNA, 75 bp, synthetic construct
  source 1..75: mol_type = other DNA
taacggcatctggcacaaagtcggttggggttcgctgctgtttattgtggtagttagctgcgtattgctggctat

SEQ ID NO: 445265 - DNA, 75 bp, synthetic construct
  source 1..75: mol_type = other DNA
gtgaaaaaatttctgagcgtgctggagaacctcacgaatgctttccggatgccggatggtgcatctgagatgacg

SEQ ID NO: 445266 - DNA, 75 bp, synthetic construct
  source 1..75: mol_type = other DNA
aaaggttgttggacttaagcaaaacgcgctgtttgcctggttacgggagaacggcatcctgatagcgtccggtgg

SEQ ID NO: 445267 - DNA, 75 bp, synthetic construct
  source 1..75: mol_type = other DNA
ggttttctctacttgtgcattctccccgctaccgtgcagtctgcaatcgccttcacgtcaatggcgggcggtaac

SEQ ID NO: 445268 - DNA, 75 bp, synthetic construct
  source 1..75: mol_type = other DNA
ggtaaaattatgctgcaactgctgctgccgtttgtgttggggcatctttcccggccgtggattggtgactgggtg

SEQ ID NO: 445269 - DNA, 75 bp, synthetic construct
  source 1..75: mol_type = other DNA
gcacgccgactgggcttcaataaggcagatgaaattactatcgtcttttgtggttcgaaaaagagtctggcaaat

SEQ ID NO: 445270 - DNA, 75 bp, synthetic construct
  source 1..75: mol_type = other DNA
agctacactcgctttaattgatccagctagtatccctagtggagttaaagcggcttacgaccatttcataaagta

SEQ ID NO: 445271 - DNA, 75 bp, synthetic construct
  source 1..75: mol_type = other DNA
tagtcggttacaagaaggtaagggacttcaagaactcatctctgcattttctgctttcttaaataaacatattga

SEQ ID NO: 445272 - DNA, 75 bp, synthetic construct
  source 1..75: mol_type = other DNA
caggccataaattcggtctggctccgctaggctgcggctgggttatctggcgtgatgaagaagcgctgccgcagg

SEQ ID NO: 445273 - DNA, 75 bp, synthetic construct
  source 1..75: mol_type = other DNA
gccaaactggggccgtatgagttcatctgtacgggtcgcccggacgaaggcatcccggcggtttgcttcaaactg

SEQ ID NO: 445274 - DNA, 75 bp, synthetic construct
  source 1..75: mol_type = other DNA
gccataaaagcattctggcgaatgtcgagcagattaaaacgattgccgacttcaccaccaacgatcgctttatgt

SEQ ID NO: 445275 - DNA, 75 bp, synthetic construct
  source 1..75: mol_type = other DNA
ctgttgctggaagactacaaagcctccctgaaatatctcagcgaccacccgaaactgcagggtattgcccagcag

SEQ ID NO: 445276 - DNA, 75 bp, synthetic construct
  source 1..75: mol_type = other DNA
aagaattatatactgaattatcgatgaaatccttttttattgcacaaaaatattcattggactcatttgttgaga

SEQ ID NO: 445277 - DNA, 75 bp, synthetic construct
  source 1..75: mol_type = other DNA
ttgtggcggtggtgggccgcagcggtggtgggccgcagcggtggtggcaaaagtaccctgctgcgcctgctggca

SEQ ID NO: 445278 - DNA, 75 bp, synthetic construct
  source 1..75: mol_type = other DNA
ccaagctggtgagcggcaggcccggtgaggaagtcaaacagcggctacgtactggtactgtggtaaccacagatg

SEQ ID NO: 445279 - DNA, 75 bp, synthetic construct
  source 1..75: mol_type = other DNA
tggggtaacggggataaagttactgatgtccagtgggcacaccctggctggtttggcactgctgaaaagggagaa

SEQ ID NO: 445280 - DNA, 75 bp, synthetic construct
  source 1..75: mol_type = other DNA
gcattttgtcggcaataaacttactacatcgaaagaagagattatccagtgggctacgaaaaaacaccctaaagc

SEQ ID NO: 445281 - DNA, 75 bp, synthetic construct
  source 1..75: mol_type = other DNA
cggatatcgtctgggacttccgcctgccgcgtgtgaaatcgatcagtgcttcaggccataaattcggtctggctc

SEQ ID NO: 445282 - DNA, 75 bp, synthetic construct
  source 1..75: mol_type = other DNA
gcagtgcgggcggagtggcgattaaggctggttcattaatagccgtgctcattttgcgccagaccaacaactata

SEQ ID NO: 445283 - DNA, 75 bp, synthetic construct
  source 1..75: mol_type = other DNA
gagattgtcggggagatgattaaccataatccggactctctgtacccgaaaagacgtcagctggacccgtattct

SEQ ID NO: 445284 - DNA, 75 bp, synthetic construct
  source 1..75: mol_type = other DNA
tttcgcctggttgatgctgaaggtttaataaaccgtatgggctttaataacctcggcgttgataacctcgtagag

SEQ ID NO: 445285 - DNA, 75 bp, synthetic construct
  source 1..75: mol_type = other DNA
ggactgacctttaaaaacccgcttggtctagctgctggtcttgataaagacggggagtgtattgatgcccttggt

SEQ ID NO: 445286 - DNA, 75 bp, synthetic construct
  source 1..75: mol_type = other DNA
gctgcttatttggcgaccgttcatcagtcctcgacggatgtttactactgaagtggtcaacaaaaactggccacc

SEQ ID NO: 445287 - DNA, 75 bp, synthetic construct
  source 1..75: mol_type = other DNA
ctggaaaacggcgacgtgacgctgctcgataacgcgatcggcgcgaacttcgcggtaattggctggggatgcaat

SEQ ID NO: 445288 - DNA, 75 bp, synthetic construct
  source 1..75: mol_type = other DNA
cccttttccagctcgatccagagcgtgctcatgagtttacttttcagcaattacgccgtattaccggaacaccgt

SEQ ID NO: 445289 - DNA, 75 bp, synthetic construct
  source 1..75: mol_type = other DNA
acagaaattattcgccgcttgtcgcaggaattaaacggtcgtttaccgatcattggtgttggtggtattgactcg

SEQ ID NO: 445290 - DNA, 75 bp, synthetic construct
  source 1..75: mol_type = other DNA
tatgtcacactgcaacgaggctcggcttatggcggcgtgttatctagtttttccgggaccgtaaaatataatggc

SEQ ID NO: 445291 - DNA, 75 bp, synthetic construct
  source 1..75: mol_type = other DNA
gctgctgatttggcgaccgttcatcagtcctcgacgaatgtttactactgtatccaaagcggcattgatggcgat

SEQ ID NO: 445292 - DNA, 75 bp, synthetic construct
  source 1..75: mol_type = other DNA
gtgagaaacagactaatttttaccttacttttgaattgtggtttaagagcaggagaactattaaatctaaaagtt

SEQ ID NO: 445293 - DNA, 75 bp, synthetic construct
  source 1..75: mol_type = other DNA
cggaatgttccatatatgcgagctcagccaattgaccgatatcatttcagataaccagttgcctttatcggcgca

SEQ ID NO: 445294 - DNA, 75 bp, synthetic construct
  source 1..75: mol_type = other DNA
atgaacattctgttagcgtttaaagccgaaccggatgccggaatgctggcggaaaaagagtggcaggcggctcag

SEQ ID NO: 445295 - DNA, 75 bp, synthetic construct
  source 1..75: mol_type = other DNA
agcgatacagtgcctgcaactggaaaggccggagcaacgacgtggcgcgacgttgattgatgggcaaacagcaga

SEQ ID NO: 445296 - DNA, 75 bp, synthetic construct
  source 1..75: mol_type = other DNA
gcgccaaatcagtggattgtggtagatatcgccaacgatccgttaagtacgccgcatatctatttgtgttgcgat

SEQ ID NO: 445297 - DNA, 75 bp, synthetic construct
  source 1..75: mol_type = other DNA
gattaagcagcaaggtaggcataagcttggatttgagaagattgcaaggggtgcaattaaagcaggtatccccag

SEQ ID NO: 445298 - DNA, 75 bp, synthetic construct
  source 1..75: mol_type = other DNA
ctggagcgatgaagaagccgcccgcgcgctgctgaaagaccagttccgatataaaactgaggaggttttcgacct

SEQ ID NO: 445299 - DNA, 75 bp, synthetic construct
  source 1..75: mol_type = other DNA
gctgacgacgcgctaaattctgagtgggtaagccacggtgcaatctggaataacccaccgtacagcaatatcagg

SEQ ID NO: 445300 - DNA, 75 bp, synthetic construct
  source 1..75: mol_type = other DNA
atgccagacgttcatgcacgactttccccgtcatcggcgcatcgatggatgcgctgcccaggaagtctggcgctg

SEQ ID NO: 445301 - DNA, 75 bp, synthetic construct
  source 1..75: mol_type = other DNA
gaagaatctttcggaactgccgacggcataatcatcgctggtagcgaattacaaatccacgacctgaaatatggc

SEQ ID NO: 445302 - DNA, 75 bp, synthetic construct
  source 1..75: mol_type = other DNA
atgaactggtccgcacagtaattaccgttgatgacggatgcgaccatacccagcgttttatctggatgatgaata

SEQ ID NO: 445303 - DNA, 75 bp, synthetic construct
  source 1..75: mol_type = other DNA
gatgaaagctttgtggtgatccatttccgtaatctggaaggaattgatttcccctggctactggcgatgttgcag

SEQ ID NO: 445304 - DNA, 75 bp, synthetic construct
  source 1..75: mol_type = other DNA
gaccaccaccaccagcctcgggtttcgtaaaatattcgcgcagttaaatctgcatgcacccgaggtggaaggcga

SEQ ID NO: 445305 - DNA, 75 bp, synthetic construct
  source 1..75: mol_type = other DNA
agtcctcgacgaatgtttactaccgtatccaaagcggcattgatggcgatcgggcagggcgtcaggagggcggca

SEQ ID NO: 445306 - DNA, 75 bp, synthetic construct
  source 1..75: mol_type = other DNA
tacgacgaagccgtaccgtggaatcaggtgccaggtacatttaccccgtggcaggcgctgccagaacccaccgat

SEQ ID NO: 445307 - DNA, 75 bp, synthetic construct
  source 1..75: mol_type = other DNA
cgagaagcagtgatggactcagtagtgcgctcaatggaagactatatcaactacatcacaccgcagttttcccgc

SEQ ID NO: 445308 - DNA, 75 bp, synthetic construct
  source 1..75: mol_type = other DNA
gaaatctcgcaaatatctgcatacctacgacgaagccgtaccgtggaatcaggtaccggggacattcaccccctg

SEQ ID NO: 445309 - DNA, 75 bp, synthetic construct
  source 1..75: mol_type = other DNA
gcacagtactatgaattcctgcgcctcggtcgtgaaggctatacaaaagtacagaacgcttccaaacgcacgttc

SEQ ID NO: 445310 - DNA, 75 bp, synthetic construct
  source 1..75: mol_type = other DNA
gcacagtactatgaattcctgcgcctcggtcgtgaaggctatacaaaagtacagaacgcatcctaacgcacgttc

SEQ ID NO: 445311 - DNA, 75 bp, synthetic construct
  source 1..75: mol_type = other DNA
acctggccactttctgccagacctgggacgacgagaaggtccataaattgatggatttttcaataaagaaaaact

SEQ ID NO: 445312 - DNA, 75 bp, synthetic construct
  source 1..75: mol_type = other DNA
gcacagtactatgaattcctgcgcctcggtcgtgaaggctatacaaaagtacagaacgcctcctaccgcacgttc

SEQ ID NO: 445313 - DNA, 75 bp, synthetic construct
  source 1..75: mol_type = other DNA
gcacagtactatgaattcctgcgcctcggtcgtgaaggctatacaaaagtacagaacgcttccgagcgcacgttc

SEQ ID NO: 445314 - DNA, 75 bp, synthetic construct
  source 1..75: mol_type = other DNA
gcacagtactatgaattcctgcgcctcggtcgtgaaggctatacaaaagtacagaacgcttcccaccgcacgttc

SEQ ID NO: 445315 - DNA, 75 bp, synthetic construct
  source 1..75: mol_type = other DNA
agatagatattgacctgaagacaaaaaatttactggtgagccagcgccaggctgaggccgcattagacgacattg

SEQ ID NO: 445316 - DNA, 75 bp, synthetic construct
  source 1..75: mol_type = other DNA
gggttatctggcgtgatgaagaagcgctgccgcaggaactggtgttcaacgttgactatctcggtggtcagattg

SEQ ID NO: 445317 - DNA, 75 bp, synthetic construct
  source 1..75: mol_type = other DNA
cgggtcgcccggacgaaggcatcccggcggtttgcttcaaactgaaagatggtgaagatccgggatacaccctgt

SEQ ID NO: 445318 - DNA, 75 bp, synthetic construct
  source 1..75: mol_type = other DNA
acctggccactttctgccagacctgggacgacgagaatgtccataaattgatggatttttctataaagaaaaact

SEQ ID NO: 445319 - DNA, 75 bp, synthetic construct
  source 1..75: mol_type = other DNA
acctggccactttctgccagacctgggacgacgagaaagtccataaattgatggatttttcgataaagaaaaact

SEQ ID NO: 445320 - DNA, 75 bp, synthetic construct
  source 1..75: mol_type = other DNA
ttatccagattgaagggcaaaaagcgtttatccctggctggggcgcactggacgcattaatccgctggtttgctt

SEQ ID NO: 445321 - DNA, 75 bp, synthetic construct
  source 1..75: mol_type = other DNA
gcacagtactatgaattcctgcgcctcggtcgtgaaggctatacaaaagtacagaacgcgtcctagcgcacgttc

SEQ ID NO: 445322 - DNA, 75 bp, synthetic construct
  source 1..75: mol_type = other DNA
aagaccatcaaccccacggggattatttcgattggtccgtggcaggatcttgatgaaccgcacgggcgggacgtt

SEQ ID NO: 445323 - DNA, 75 bp, synthetic construct
  source 1..75: mol_type = other DNA
tgccgtagtgttggcaacgaggcagtatgtggatgaaagcctgactcgccacgcgcagtcccgtaaccatcctga

SEQ ID NO: 445324 - DNA, 75 bp, synthetic construct
  source 1..75: mol_type = other DNA
ccggcgggtcaggtgattgcacagtactatgaattcctgcgcctcggtcgtgaaggctataccaaagtacagaac

SEQ ID NO: 445325 - DNA, 75 bp, synthetic construct
  source 1..75: mol_type = other DNA
aaattgatggatttatccattaacaaaaactggatcgacaaagaagaatatccgcaatccgcagccatcgacctg

SEQ ID NO: 445326 - DNA, 75 bp, synthetic construct
  source 1..75: mol_type = other DNA
ccgtaatcattacttccgcagccataagaccatcaaccctacggggattatttcaattggtccgtggcaggatct

SEQ ID NO: 445327 - DNA, 75 bp, synthetic construct
  source 1..75: mol_type = other DNA
gtggactacgctggtccgttttgatccggtgtatgtcacccactttaagtgtgataagcaccgcatcagcgatta

SEQ ID NO: 445328 - DNA, 75 bp, synthetic construct
  source 1..75: mol_type = other DNA
gctccgaactactcgattcacgttttggcgcaaagccgatttcgactatcgcagaatcaaaacgttttccgctgc

SEQ ID NO: 445329 - DNA, 75 bp, synthetic construct
  source 1..75: mol_type = other DNA
gttccgaactactcgattcacgttttggcgccaagccgatttcgactatcgcagaatcaaaacgctttccgctgc

SEQ ID NO: 445330 - DNA, 75 bp, synthetic construct
  source 1..75: mol_type = other DNA
gatccgaactactcgattcacgttttggcgctaagccgatttcgactatcgcagaatcaaaacggtttccgctgc

SEQ ID NO: 445331 - DNA, 75 bp, synthetic construct
  source 1..75: mol_type = other DNA
tcggtcgtgaaggctataccaaagtacagaacgcttcctaccaggttgctgcttatctggcggatgaaatcgcca

SEQ ID NO: 445332 - DNA, 75 bp, synthetic construct
  source 1..75: mol_type = other DNA
catactggcatgtcacaaactgaggataatcttcatgcagtcgctatgaagattactgcagatattatgcaagat

SEQ ID NO: 445333 - DNA, 75 bp, synthetic construct
  source 1..75: mol_type = other DNA
tcagttgtttatggacccgaaacgcatgattgaagcctgcgacgaaaataccatcggcgtggtgccgactttcgg

SEQ ID NO: 445334 - DNA, 75 bp, synthetic construct
  source 1..75: mol_type = other DNA
ctttcggtatttatatgggcgtctggttcccgacagtaccgcactggatttgggtgttgagcgtggtattaatca

SEQ ID NO: 445335 - DNA, 75 bp, synthetic construct
  source 1..75: mol_type = other DNA
gacggtcgtcgtgcgggtactccgtttgcccctggcgctaacccgatgcacggtcgtgaccgcaaaggggccgtg

SEQ ID NO: 445336 - DNA, 75 bp, synthetic construct
  source 1..75: mol_type = other DNA
tatggggccggcaccggaacctaacctgaccattctttggtcggaagaattaccgattgccttcaaaaaatatgc

SEQ ID NO: 445337 - DNA, 75 bp, synthetic construct
  source 1..75: mol_type = other DNA
gcaaggcagtcagttattgagtgccttcggtggctggggcattgctcttggtgcggcacttacggttggtgtatc

SEQ ID NO: 445338 - DNA, 75 bp, synthetic construct
  source 1..75: mol_type = other DNA
gcgacgccagccaccacggaattgtgggaaaaagtcatggaaggcatccgtatcgaaaatgcgactcacgcgcca

SEQ ID NO: 445339 - DNA, 75 bp, synthetic construct
  source 1..75: mol_type = other DNA
accatggcgtgcggcatcgcaggtctgtcggtggcgacggattccctgtctgctatcaaatatgctcgcgtgaaa

SEQ ID NO: 445340 - DNA, 75 bp, synthetic construct
  source 1..75: mol_type = other DNA
cctgctggatggttatttccaccacgaagcggatgtggaaggcggtcagcacctcaacgtcaacgtgatgaatcg

SEQ ID NO: 445341 - DNA, 75 bp, synthetic construct
  source 1..75: mol_type = other DNA
ggctgacaaagtgtggatcttcgcacatctgttgatgccgcgtctggcacaggtaaaacagcagccggaagaaga

SEQ ID NO: 445342 - DNA, 75 bp, synthetic construct
  source 1..75: mol_type = other DNA
taccaaacagctttggcaggataaatttggcctgcgcatccttgaaggctacggtgtgaccgagtgcgcgcctgt

SEQ ID NO: 445343 - DNA, 75 bp, synthetic construct
  source 1..75: mol_type = other DNA
gctgaaatcaaaaccattttcacttcccgtcagtttctcgataaaggcaaactctggcatctgccggagcaactt

SEQ ID NO: 445344 - DNA, 75 bp, synthetic construct
  source 1..75: mol_type = other DNA
atggcgatgaaatggcgttggcgcaagcgtatggaagctgcaggcaaaccaacggataaaccaaacctggtgtgc

SEQ ID NO: 445345 - DNA, 75 bp, synthetic construct
  source 1..75: mol_type = other DNA
atggatttgtcgatcaataaaaactggatcgacaaagaagaatatccgcaatccgcagccatcgacctgcgttgc

SEQ ID NO: 445346 - DNA, 75 bp, synthetic construct
  source 1..75: mol_type = other DNA
gaagagggcggtcgcctgcaactgaaagggccgaacattatgaacggctacctgcgggtagagaagcctggtgta

SEQ ID NO: 445347 - DNA, 75 bp, synthetic construct
  source 1..75: mol_type = other DNA
cggcggcattaatatgattagaagttcattccacgcgtatggtcgtgaaatggacagcgaatttgaatacatctt

SEQ ID NO: 445348 - DNA, 75 bp, synthetic construct
  source 1..75: mol_type = other DNA
ggatcggtacggttagctgaacttgaagcggaagtgttgcagcgggtgatgcaacgaggacattcggaacaaccg

SEQ ID NO: 445349 - DNA, 75 bp, synthetic construct
  source 1..75: mol_type = other DNA
caaagcctccctgaaatatctcagcgatcacccgaaactgcagggtattgcccagcagaacagctttaaacatac

SEQ ID NO: 445350 - DNA, 75 bp, synthetic construct
  source 1..75: mol_type = other DNA
tttgccatcaacttctcccgcccggcgggtcaggtaattgcacagtactatgaattcctgcgcctcggtcgtgaa

SEQ ID NO: 445351 - DNA, 75 bp, synthetic construct
  source 1..75: mol_type = other DNA
tgatcgcttcgctggcaacttttgccacggtgtgggtgtggattatgattttgttgtcgcagattgccttccgtc

SEQ ID NO: 445352 - DNA, 75 bp, synthetic construct
  source 1..75: mol_type = other DNA
cgtatttctctgtatgttggtttcgcgtggattgttgtgctgttgattggctggatgtttaaacgccgccgcgat

SEQ ID NO: 445353 - DNA, 75 bp, synthetic construct
  source 1..75: mol_type = other DNA
cgacgccgccagcggtggcttcctggcaccgttcgtcgccccggatatcgtctgggacttccgcctgccgcgtgt

SEQ ID NO: 445354 - DNA, 75 bp, synthetic construct
  source 1..75: mol_type = other DNA
tgatgcgtactgacttcaatagcgacgattacgcgattgcctgttgcgtcagcccaatggtgattggtaagcaaa

SEQ ID NO: 445355 - DNA, 75 bp, synthetic construct
  source 1..75: mol_type = other DNA
aacactatcaataagttggagtcattacctgaatttgaatatctgtttaccgatctgcgtaaaacccataaccag

SEQ ID NO: 445356 - DNA, 75 bp, synthetic construct
  source 1..75: mol_type = other DNA
accatggcgtgcggcatcgcgggcctgtcggtggcgacggactccctgtctgccatcaaatatgcccgcgtgaaa

SEQ ID NO: 445357 - DNA, 75 bp, synthetic construct
  source 1..75: mol_type = other DNA
ccaaacctggtgtgcggtccggtacaaatctgctggcataaatttgcccgctactgggatgtggagctgcgtgag

SEQ ID NO: 445358 - DNA, 75 bp, synthetic construct
  source 1..75: mol_type = other DNA
gtgaaatcgatcagtgcttcaggccataaattcggtctggctccgctgggctgcggctgggttatctggcgtgac

SEQ ID NO: 445359 - DNA, 75 bp, synthetic construct
  source 1..75: mol_type = other DNA
tgaagattcaggttggcccgaaaacggctccgttgatggatgacgtgctggactacgacaaagtgatggatagcc

SEQ ID NO: 445360 - DNA, 75 bp, synthetic construct
  source 1..75: mol_type = other DNA
agttgcgctggcctggttgttgagtaaaccgggcattgccgcaccgattatcggaacttctcgggaggaacagct

SEQ ID NO: 445361 - DNA, 75 bp, synthetic construct
  source 1..75: mol_type = other DNA
aagtggggaaaaatctctaccaagaaagcgatgaaaatgacgcacaaattgcagaacgcttaacgggcgtcagtg

SEQ ID NO: 445362 - DNA, 75 bp, synthetic construct
  source 1..75: mol_type = other DNA
aaaccgggcattgccgcaccgattatcggtacatcgcgggaagaacagcttgatgagctactgaacgcggtggat

SEQ ID NO: 445363 - DNA, 75 bp, synthetic construct
  source 1..75: mol_type = other DNA
atctatttatggcactggcccctagtagtattgttaacatactcaggagaacagaaaaacccaatactgattgtt

SEQ ID NO: 445364 - DNA, 75 bp, synthetic construct
  source 1..75: mol_type = other DNA
cagtcagccaatgcggttaaggcgatgaaacaagagggtgcattctcgttaagcagggttaagcgtatcgccttt

SEQ ID NO: 445365 - DNA, 75 bp, synthetic construct
  source 1..75: mol_type = other DNA
gcgactgacgcgtccgtggggagaaactaccgcacgactggtgtctgatgaggtggggaaaaatctctataaaga

SEQ ID NO: 445366 - DNA, 75 bp, synthetic construct
  source 1..75: mol_type = other DNA
tgtcggtctatgacgagatccggcatctcttaccggatctccattacatttatgctttcgataacgtcgctttcc

SEQ ID NO: 445367 - DNA, 75 bp, synthetic construct
  source 1..75: mol_type = other DNA
gaatctctggtgcgatgttgtaatagaagacgtgaaaaacccatatttattaagcttttgtaagaaactaaactt

SEQ ID NO: 445368 - DNA, 75 bp, synthetic construct
  source 1..75: mol_type = other DNA
tcatcatgacgtttaccgttaccagcatcaacgcacgcaaaaagggaaactcccatacacaggatctgttatcac

SEQ ID NO: 445369 - DNA, 75 bp, synthetic construct
  source 1..75: mol_type = other DNA
tccgcgtactggacgactggtgtgagtccttcccgggttatcatatttattatccgaatcgtcgcttactttcac

SEQ ID NO: 445370 - DNA, 75 bp, synthetic construct
  source 1..75: mol_type = other DNA
tctcggattactggtttcaacagtcgcatcaatccttaattttgtgacggctcgcattttgttaagggctggcag

SEQ ID NO: 445371 - DNA, 75 bp, synthetic construct
  source 1..75: mol_type = other DNA
agcccctgatgcaaaatcagtcgatgcgaatattgccttttgtatggcaatgacgccagaagctgaacagttatt

SEQ ID NO: 445372 - DNA, 75 bp, synthetic construct
  source 1..75: mol_type = other DNA
atttacattatgtgtagtactattagttattggttggctatggttaccaaatgaagacctaaaaatactttcagg

SEQ ID NO: 445373 - DNA, 75 bp, synthetic construct
  source 1..75: mol_type = other DNA
cctcaccggatatcaacactgaagatttcagcgcggcggtggatttcttagggctgcaaaaagaggtagatcgca

SEQ ID NO: 445374 - DNA, 75 bp, synthetic construct
  source 1..75: mol_type = other DNA
ctgcgggtgcctcactggtgcaaatttattctggttttatttttaaaggcccgccgctgattaaagaaatcgtta

SEQ ID NO: 445375 - DNA, 75 bp, synthetic construct
  source 1..75: mol_type = other DNA
aggcaaaacccgcgtggcaattgcactaagcaaactgatgattgatgctcgctgggtaaaacgcgtcctgtttct

SEQ ID NO: 445376 - DNA, 75 bp, synthetic construct
  source 1..75: mol_type = other DNA
tgactacttctttggcgatatcccgtgtacgcgcgggttaagcgaagaagaagtgcagggggaatacgagctaaa

SEQ ID NO: 445377 - DNA, 75 bp, synthetic construct
  source 1..75: mol_type = other DNA
atgggattattcaattataagtcttatgctccagctcaaataagagagcttgtttctggatcttataatcttgcc

SEQ ID NO: 445378 - DNA, 75 bp, synthetic construct
  source 1..75: mol_type = other DNA
agtggaagaactcaggttatcttcggaatatgtcgattcaagaggtttttatcgctttcccagtccggttacagg

SEQ ID NO: 445379 - DNA, 75 bp, synthetic construct
  source 1..75: mol_type = other DNA
ctgccatatttgtgccacgacggtcgctgctggggaagcaaaaatggtcgaccaatctattacgatgatgaccat

SEQ ID NO: 445380 - DNA, 75 bp, synthetic construct
  source 1..75: mol_type = other DNA
aatggcctggatatcttgccacaatacctgttttaggtgcaatgctaatactatttacaaatagacagtcatcat

SEQ ID NO: 445381 - DNA, 75 bp, synthetic construct
  source 1..75: mol_type = other DNA
tatacttggcattaaacgagattttcatcaatgcaatgaattcgcagaaaaaacaatcaatgagttaaatagcaa

SEQ ID NO: 445382 - DNA, 75 bp, synthetic construct
  source 1..75: mol_type = other DNA
cctatcccggtatgatgaaaatcatggaccatttcgatgtcggttatttcgatttgatcatcgccgatgaatccc

SEQ ID NO: 445383 - DNA, 75 bp, synthetic construct
  source 1..75: mol_type = other DNA
ttcaaactctatcgccagcaggtgcagggagcgctggagccgctgttccagcaaaatccggtgctgaagaaaatc

SEQ ID NO: 445384 - DNA, 75 bp, synthetic construct
  source 1..75: mol_type = other DNA
atcttcaggtcgtgcagatgaaaaacgtctggaagatgcaatcagggctcaggatgaaagccgtgagcgcgaact

SEQ ID NO: 445385 - DNA, 75 bp, synthetic construct
  source 1..75: mol_type = other DNA
ggcatatcggtaatagtgtcaatgactggtgtctggttgtccttttttatcgacagcgcaccagctccgacgatt

SEQ ID NO: 445386 - DNA, 75 bp, synthetic construct
  source 1..75: mol_type = other DNA
atagtttgctaggtcaggtttttgaattattaaaagatcgccgcgcctcggtcatgtattttgccgaccacggcc

SEQ ID NO: 445387 - DNA, 75 bp, synthetic construct
  source 1..75: mol_type = other DNA
tgatgttttcgattttgtgatgctaagaaaggagtttactgaggataagcaaggtaaccccacccctgaagggca

SEQ ID NO: 445388 - DNA, 75 bp, synthetic construct
  source 1..75: mol_type = other DNA
cggtcgctttaggtatttcctcagatgaagagttgattgggtcgttcattaaagatggtttatcagaattagaca

SEQ ID NO: 445389 - DNA, 75 bp, synthetic construct
  source 1..75: mol_type = other DNA
taaaaggagttaagggagaagttttcaccctaatcaatttatataataaaaggatgaaaacacacattgataata

SEQ ID NO: 445390 - DNA, 75 bp, synthetic construct
  source 1..75: mol_type = other DNA
aacgtgaccctacgaagaagaacgtctattttcatggaggcagggaggctagccagcaggcatatcatgtcccga

SEQ ID NO: 445391 - DNA, 75 bp, synthetic construct
  source 1..75: mol_type = other DNA
gctagccagcaggcatatcatgtcccgatgtttatctggtatagccccgttcttggggatggcgtggatcgcaca

SEQ ID NO: 445392 - DNA, 75 bp, synthetic construct
  source 1..75: mol_type = other DNA
tttctcgccgatgaaaatgccggggaaccgcagcagcaagtagccaagtctaaccttaatcctgagatggaatat

SEQ ID NO: 445393 - DNA, 75 bp, synthetic construct
  source 1..75: mol_type = other DNA
tgatataggtatggcattggctgggtataattctggctatgctcgtattaatgccgtaagaaacggtaaatctac

SEQ ID NO: 445394 - DNA, 75 bp, synthetic construct
  source 1..75: mol_type = other DNA
agacctggcattcagaacatataaggccagcatggaaatgaaggatttccctaaatgtggttctgaaagagaagc

SEQ ID NO: 445395 - DNA, 75 bp, synthetic construct
  source 1..75: mol_type = other DNA
taacccgcaaaacatcccaaataacccgcaaacgccccaaaataacccgcaaacacattgctgaaagcaggggtg

SEQ ID NO: 445396 - DNA, 75 bp, synthetic construct
  source 1..75: mol_type = other DNA
ccgcagcagagaaacgattttcggccaataaaattgccatgaaagcaattcgtgatgccgttggggctgaagaat

SEQ ID NO: 445397 - DNA, 75 bp, synthetic construct
  source 1..75: mol_type = other DNA
ctcaaaatgaagtggtcaacaaaaactggccaccgagttagagttttttccagtatcgattttccgattcgtttg

SEQ ID NO: 445398 - DNA, 75 bp, synthetic construct
  source 1..75: mol_type = other DNA
gagaaaaactttatgaaacactagtatcaagagaggaaatggcaaaagcacaagatatggggcgctactttagaa

SEQ ID NO: 445399 - DNA, 75 bp, synthetic construct
  source 1..75: mol_type = other DNA
atgaaactctcccgtttatttccgctgctggcggccagcctgcacgcagaaaatacgcacaaggaggtgcgtatc

SEQ ID NO: 445400 - DNA, 75 bp, synthetic construct
  source 1..75: mol_type = other DNA
atataatccagacggtgattattgccgggttggttacacttgttattagcgtaaaatggcgggattttttgctgt

SEQ ID NO: 445401 - DNA, 75 bp, synthetic construct
  source 1..75: mol_type = other DNA
cgactggtggcagccgacaaaagcaaacttcttcggacacctgaaaaagccgcagattatcgatgccctgaatga

SEQ ID NO: 445402 - DNA, 75 bp, synthetic construct
  source 1..75: mol_type = other DNA
cggactggttacacttgttattagcgtaaaatggcgggattttttgctgttcagctttgattatcaacaggcgca

SEQ ID NO: 445403 - DNA, 75 bp, synthetic construct
  source 1..75: mol_type = other DNA
gatgggtgacgcgatgagtcatgcggtttttcctggcatcgtgcttgcctggattctggggttacctctggctac

SEQ ID NO: 445404 - DNA, 75 bp, synthetic construct
  source 1..75: mol_type = other DNA
aatatggtagtgcctcaacaggcgttgctgaaacaggctggggtgcaggtgctggcgtttgaggcgaattcactg

SEQ ID NO: 445405 - DNA, 75 bp, synthetic construct
  source 1..75: mol_type = other DNA
atgatatggaaacggaaaatcaccctggaagcactgaatgctatgggtgaaggaaacatggtggggttcctggat

SEQ ID NO: 445406 - DNA, 75 bp, synthetic construct
  source 1..75: mol_type = other DNA
aaggctatatcagacgcttccgccttgctgaattgctgggcgttagtgtttcaaccattgatcgcaaagttcgca

SEQ ID NO: 445407 - DNA, 75 bp, synthetic construct
  source 1..75: mol_type = other DNA
gctgggcgagaagattaccgcctttgatgcggctgatattcacaactggctggcggagcgccggggaaaggtggc

SEQ ID NO: 445408 - DNA, 75 bp, synthetic construct
  source 1..75: mol_type = other DNA
tgccgtgaaaccagcgaagaggcgctgcaatttttgtggctggcgaaaacgctttatcctgcgcgatttgctgat

SEQ ID NO: 445409 - DNA, 75 bp, synthetic construct
  source 1..75: mol_type = other DNA
attagctgaagcgaagctgcatggcgaagacatttctctggatgcgctaaaacgtatcttgcgtccgtggttaag

SEQ ID NO: 445410 - DNA, 75 bp, synthetic construct
  source 1..75: mol_type = other DNA
cacgtcatcaggtctggcagattgaaatcttcgacgagaaaggtcgtttgtgctgttcgtcacgattgacgaccg

SEQ ID NO: 445411 - DNA, 75 bp, synthetic construct
  source 1..75: mol_type = other DNA
atgacgagtcccgcacagcgccacatgatgcgggtctcggcagcgatgattgagtatgaacccgaaaccagtgca

SEQ ID NO: 445412 - DNA, 75 bp, synthetic construct
  source 1..75: mol_type = other DNA
atatcgccagtggtacgagcgaaacgtttaatgcgatggcggatttggtatttgataacttacaggctttcttta

SEQ ID NO: 445413 - DNA, 75 bp, synthetic construct
  source 1..75: mol_type = other DNA
gcggcacgttgaaatcaaacggtgtgcaggttgatgaccacggtcacggtggcgtgcaacggggcgggagctgga

SEQ ID NO: 445414 - DNA, 75 bp, synthetic construct
  source 1..75: mol_type = other DNA
aagggaaatttacctcaaacggcgtgcaggtcgatgcccacgatcatggtggcgtggagccgggcggaaactgga

SEQ ID NO: 445415 - DNA, 75 bp, synthetic construct
  source 1..75: mol_type = other DNA
cgagccggtcgttcgcggacgtggtgggctccctcggtcggtgagcaggttctgctgctggcaatcggtggcgag

SEQ ID NO: 445416 - DNA, 75 bp, synthetic construct
  source 1..75: mol_type = other DNA
catatccgtttccctgacggggcggtgattgagtatgaacccgaaaccagtgcactcacggtaagcggaattaaa

SEQ ID NO: 445417 - DNA, 75 bp, synthetic construct
  source 1..75: mol_type = other DNA
gctcacgatgcggtgcataacgcggtggtgatggaagaagtggcgaaaatggcgtggattgcgcgcggcattaac

SEQ ID NO: 445418 - DNA, 75 bp, synthetic construct
  source 1..75: mol_type = other DNA
ctgggtgacgccgagccgctgcatacgccggggattgtggtgtatcagcacgggccgttcgcctgggggaaagat

SEQ ID NO: 445419 - DNA, 75 bp, synthetic construct
  source 1..75: mol_type = other DNA
cagcggcgttgcctacgaaaccatgaaagcagacgatatggtggtggtcgatatgagcggtaaggtggtggaagg

SEQ ID NO: 445420 - DNA, 75 bp, synthetic construct
  source 1..75: mol_type = other DNA
cttgatactgctttcgtgctgccggggattttctccgacgataaccccgccccatctgcctcggcggatgcatgg

SEQ ID NO: 445421 - DNA, 75 bp, synthetic construct
  source 1..75: mol_type = other DNA
ccattactgccaccgtgccgctggtactggttaaggcatccacccgcatcaccctcgatacacccgaggtggtgt

SEQ ID NO: 445422 - DNA, 75 bp, synthetic construct
  source 1..75: mol_type = other DNA
ttatcgagtatgagcctgaaagcgggtcactcacggtgagtggtattaaaaccgctgacgtcaccgcgtcagacg

SEQ ID NO: 445423 - DNA, 75 bp, synthetic construct
  source 1..75: mol_type = other DNA
atgcgcggcaacattgaacacaccggcggtgaactctcatcaaacggtaaggtactgcatacccataaacaccca

SEQ ID NO: 445424 - DNA, 75 bp, synthetic construct
  source 1..75: mol_type = other DNA
gggttattccgttatctgatgagttagcccgtgaaatttttgattacataagcaatagcagagaaaaaatgacaa

SEQ ID NO: 445425 - DNA, 75 bp, synthetic construct
  source 1..75: mol_type = other DNA
cttaaaaaatatctcagcgttgcagaaatagatgatctggtaagatatgcgaaacaaagattcgacagacaaaaa

SEQ ID NO: 445426 - DNA, 75 bp, synthetic construct
  source 1..75: mol_type = other DNA
gcaggagaacccttaagcatttcagcttatgagaaggtgatatcaacactgaaacgagcaagtccagagctatat

SEQ ID NO: 445427 - DNA, 75 bp, synthetic construct
  source 1..75: mol_type = other DNA
ttgtcgtcgaaaccgaccttaacgccggtcgctgccgtgtgcagaccggcggcatgtgcaccgactggcttcagt

SEQ ID NO: 445428 - DNA, 75 bp, synthetic construct
  source 1..75: mol_type = other DNA
acgatgcgcggcaacattgaacacaccggcggtgaactctcatcaaacggtaaggtactgcatacccataaacac

SEQ ID NO: 445429 - DNA, 75 bp, synthetic construct
  source 1..75: mol_type = other DNA
attaccggcacgctggaagtgcagaagggcgggacgatgcgcggcaacattgaacacaccggcggtgaactctca

SEQ ID NO: 445430 - DNA, 75 bp, synthetic construct
  source 1..75: mol_type = other DNA
aaggcagagatttgataagcaaaagattacaaatgtaagattaataaaagggtatcagattgcaagaagaacttt

SEQ ID NO: 445431 - DNA, 75 bp, synthetic construct
  source 1..75: mol_type = other DNA
acaagggtgaagtatttaccattgaacatgttgaagttatgcctgagtccctgccagccgtttttgctcaattgg

SEQ ID NO: 445432 - DNA, 75 bp, synthetic construct
  source 1..75: mol_type = other DNA
atgaaaggcaacatcgagcatacaggcgggtcactgtcatctaatgacaaggtgctccacacccataaacacccc

SEQ ID NO: 445433 - DNA, 75 bp, synthetic construct
  source 1..75: mol_type = other DNA
atgggatataaagtaaagaaattcatcatgagtagtggagagcgaggatgcctgatccttgataaaaaaagtaat

SEQ ID NO: 445434 - DNA, 75 bp, synthetic construct
  source 1..75: mol_type = other DNA
atggaaatagttgcaactaacttacttatttttagtaatttcttagatagtaggaaaattaatatagttgagaga

SEQ ID NO: 445435 - DNA, 75 bp, synthetic construct
  source 1..75: mol_type = other DNA
aggagagctattaaatctaaaagttaatgatttaaatcctagggattacacactaagtattttcagaagacatga

SEQ ID NO: 445436 - DNA, 75 bp, synthetic construct
  source 1..75: mol_type = other DNA
gcggtgaactctcatcaaacggtaaggtactgcatacccataaacaccccggcgacagtggcggcacaaccggga

SEQ ID NO: 445437 - DNA, 75 bp, synthetic construct
  source 1..75: mol_type = other DNA
cactgttggaagttctgattgcgatggtgattagcagcatattactgctgggagcagcgcgctttttgcctgcat

SEQ ID NO: 445438 - DNA, 75 bp, synthetic construct
  source 1..75: mol_type = other DNA
taagaatatggcatggcggcacaatccaaactaccgtaatggtgtgccctatcatgatcaggatatggcaaagcg

SEQ ID NO: 445439 - DNA, 75 bp, synthetic construct
  source 1..75: mol_type = other DNA
tccgcagttacgcttcctgcaacggtttccgcacctcccgtaacacccgccgtcgtcaaatctgcattcagcact

SEQ ID NO: 445440 - DNA, 75 bp, synthetic construct
  source 1..75: mol_type = other DNA
tacgcggtgcgacatcctgtgaaggtaagggctgggataaagtcactaatccggatgccatcattatcgacactt

SEQ ID NO: 445441 - DNA, 75 bp, synthetic construct
  source 1..75: mol_type = other DNA
ctctgctggaagtgttgattgctatggcgatcagtagcgtattgttgctgggggcggcacgctttctgcctgcgt

SEQ ID NO: 445442 - DNA, 75 bp, synthetic construct
  source 1..75: mol_type = other DNA
gaacagtaacggtatctgggatcgtgagccggtaaaagagtccgaccagattggatttcgtttgaaagagcatgt

SEQ ID NO: 445443 - DNA, 75 bp, synthetic construct
  source 1..75: mol_type = other DNA
atggatggcgaaccagatcacgtccatttgttaattaactatcctcccaaactggcgatatccagtctggtaaac

SEQ ID NO: 445444 - DNA, 75 bp, synthetic construct
  source 1..75: mol_type = other DNA
gagttaaaggaatgtgacggcgaggcagaccatgttcacatgctgattgaatacccaccgttggtgcaactcaca

SEQ ID NO: 445445 - DNA, 75 bp, synthetic construct
  source 1..75: mol_type = other DNA
gttatccgtcgcttggcggcattgtccatacccactccacgcatgccaccgcatgggcgcaggcggggctggcga

SEQ ID NO: 445446 - DNA, 75 bp, synthetic construct
  source 1..75: mol_type = other DNA
gcaccggataaattcgcctcacggcatcaacccattgaacagacgttttttacgcggcccggtcattaaagattc

SEQ ID NO: 445447 - DNA, 75 bp, synthetic construct
  source 1..75: mol_type = other DNA
gctcactggcgatgtcctggccgtttaaccaacggcgcagcatattcagtgccatcattgcgcacacttcctgac

SEQ ID NO: 445448 - DNA, 75 bp, synthetic construct
  source 1..75: mol_type = other DNA
cgctggttttacgtcgatgcttttatggaaaaaacagctcgtagcatgaagatgcatgttgaaattgcctctaat

SEQ ID NO: 445449 - DNA, 75 bp, synthetic construct
  source 1..75: mol_type = other DNA
aaagtaatagatatatcactaagacatgaaacacttttagttgaagggagtcatgatggttataaaaaattctca

SEQ ID NO: 445450 - DNA, 75 bp, synthetic construct
  source 1..75: mol_type = other DNA
atggtaaaactatcggtgatttttttatgcctcggcatcggttatgcggtaataagaagaacgatttttattgtg

SEQ ID NO: 445451 - DNA, 75 bp, synthetic construct
  source 1..75: mol_type = other DNA
tgtggatggttaatgtggtcttctccttcggccaccgcctgcttaattttcagtcggcacgggtaacttattttg

SEQ ID NO: 445452 - DNA, 75 bp, synthetic construct
  source 1..75: mol_type = other DNA
ctggctgatgttgttagggatcccttttcatatttctttaatctattcgagccatacatggcatgtgaatagcgc

SEQ ID NO: 445453 - DNA, 75 bp, synthetic construct
  source 1..75: mol_type = other DNA
agttacctacaatgaagcaaaggaactgctcattgcatgtgatgcggcaattaggactatagagataatgagaat

SEQ ID NO: 445454 - DNA, 75 bp, synthetic construct
  source 1..75: mol_type = other DNA
caatgttgcccgacgtattaacattgccgattgttatgttcgtgacggccgttggccaaacgaggggcgtttccc

SEQ ID NO: 445455 - DNA, 75 bp, synthetic construct
  source 1..75: mol_type = other DNA
tactcaaccagcgctatggcagtggcgatgcctggatgtacgaaaccgagtcggtgatcaccatggtcctcggtc

SEQ ID NO: 445456 - DNA, 75 bp, synthetic construct
  source 1..75: mol_type = other DNA
ttttacgctggctgcaacgcgaatttggtcatgcgccaacggctgccgtcggctattcgctcggcggtaatatgc

SEQ ID NO: 445457 - DNA, 75 bp, synthetic construct
  source 1..75: mol_type = other DNA
caatccgtatctggggcaccatcggctttatcatggcaatgtgggcagtgagcctgtctggtttcgaactgagcc

SEQ ID NO: 445458 - DNA, 75 bp, synthetic construct
  source 1..75: mol_type = other DNA
ttctctcttttctgcagttctgcctgtggggaagttggctgacgaccctcggctcctatatgtttgttaccctga

SEQ ID NO: 445459 - DNA, 75 bp, synthetic construct
  source 1..75: mol_type = other DNA
ctcgcacagttaaaatcggtacgtcgcatccgtgaatttgacgatctgatcaccgccagaattcacggctacgct

SEQ ID NO: 445460 - DNA, 75 bp, synthetic construct
  source 1..75: mol_type = other DNA
cacgccaaagacgatccgtttatggatcatcaggtgatcccgaaaccggaaagtctcccccgcaggtggagtatc

SEQ ID NO: 445461 - DNA, 75 bp, synthetic construct
  source 1..75: mol_type = other DNA
atctcgcgtggagtgaagatcccgcacaggcgcaatataaaccgcgtctggttgtgtttcacgggctggaaggca

SEQ ID NO: 445462 - DNA, 75 bp, synthetic construct
  source 1..75: mol_type = other DNA
agaagatcctcgctccgctatggttggctttatattgggaaccattcatcctgaactaacatctactggctggaa

SEQ ID NO: 445463 - DNA, 75 bp, synthetic construct
  source 1..75: mol_type = other DNA
gtgctatcttacttaatggcaattcactttgttttatttggaaactctactaatttaaaaaacttctggaaacat

SEQ ID NO: 445464 - DNA, 75 bp, synthetic construct
  source 1..75: mol_type = other DNA
ggagtggttgcgtggaaggataacggcgaccggaagtatgccgccgggtatgctcaggcgcaggcagaccagaaa

SEQ ID NO: 445465 - DNA, 75 bp, synthetic construct
  source 1..75: mol_type = other DNA
cgggagatgattactggctgttatctgccaacctggtgccagcttgatcttgatgacgggcgcacagtaaacgca

SEQ ID NO: 445466 - DNA, 75 bp, synthetic construct
  source 1..75: mol_type = other DNA
tacatcatactttatataactcaaaatttattagtaggtatcattactttttttgcattagtaattttaatgaaa

SEQ ID NO: 445467 - DNA, 75 bp, synthetic construct
  source 1..75: mol_type = other DNA
tgtatattaatggtaataaattacataagaaagcagccaaaaagttaaacagtaaaataattaacaaatttggtt

SEQ ID NO: 445468 - DNA, 75 bp, synthetic construct
  source 1..75: mol_type = other DNA
cggcgtgagcatttcgctcaaccatcagcagtcgaagtctgagacgaaatatcagcacgatatcgtctccggctc

SEQ ID NO: 445469 - DNA, 75 bp, synthetic construct
  source 1..75: mol_type = other DNA
acctgagtgaacaggaacgtcagcaaatcagcatgttggccaccattgcctcagggattgcgggcgggcttgcag

SEQ ID NO: 445470 - DNA, 75 bp, synthetic construct
  source 1..75: mol_type = other DNA
gatattgccgggctcagccgggacccggaaaacgccaacggcagcattgcaccgatatttgacagggagaaagag

SEQ ID NO: 445471 - DNA, 75 bp, synthetic construct
  source 1..75: mol_type = other DNA
ggcagggttgcctggaatgtacacggcagccaccagtacgatgccgggtatgcgcaggcaaaggcagatcagaaa

SEQ ID NO: 445472 - DNA, 75 bp, synthetic construct
  source 1..75: mol_type = other DNA
actggaaacagttacttatcgtggcgatgcttgctgctctggtaatcggcggcagggttgcctggaatgtacacg

SEQ ID NO: 445473 - DNA, 75 bp, synthetic construct
  source 1..75: mol_type = other DNA
ccagccagacaaaacaatcgtcctggcgtaaatcagataccacatggacgttaggcttgtttggtacggcaatcg

SEQ ID NO: 445474 - DNA, 75 bp, synthetic construct
  source 1..75: mol_type = other DNA
gacactcgcgctcaggtcatcgcgccgttgattgcggcggcgagcggtccgctgggaaccaacgcacaatacctg

SEQ ID NO: 445475 - DNA, 75 bp, synthetic construct
  source 1..75: mol_type = other DNA
aacagtcaggcttccaaagcgaatcgaaaaaaccgaattggtacaaaatccataaaataattagtgcaatgagaa

SEQ ID NO: 445476 - DNA, 75 bp, synthetic construct
  source 1..75: mol_type = other DNA
ctgagcgcgaagcccgtgagcaatcaccggctggctgcgtgatggtattcgctggccgtctgcctgtggaggtgc

SEQ ID NO: 445477 - DNA, 75 bp, synthetic construct
  source 1..75: mol_type = other DNA
cagaacgatgatcgtcgttatagcgaaagtggcagggtgatgctggtagatgcgttgacccgttcgatgaacgtg

SEQ ID NO: 445478 - DNA, 75 bp, synthetic construct
  source 1..75: mol_type = other DNA
cggagaaccgccgttatatcccggactttgacgaatcctggctgataattagtgatggcctgctgggcaggctga

SEQ ID NO: 445479 - DNA, 75 bp, synthetic construct
  source 1..75: mol_type = other DNA
ggacaccgaaccaccattcgttctggtttaccttcagctacctggcgtttgctgaactatggtgtacagccaagc

SEQ ID NO: 445480 - DNA, 75 bp, synthetic construct
  source 1..75: mol_type = other DNA
cccttcccgcttctggctgggacgcagggaaaaatgccgcacgctggcagctgagcagaaaagttatccagagcc

SEQ ID NO: 445481 - DNA, 75 bp, synthetic construct
  source 1..75: mol_type = other DNA
ttttgcattagcaatttctttaagattctatttacgcaagaaatttgcacacaaagtagttttcacacaccaaca

SEQ ID NO: 445482 - DNA, 75 bp, synthetic construct
  source 1..75: mol_type = other DNA
cgttctgcttcaaagagagccagtttggagttagcgtctgcactggctgtcattcaaccatcaaatatggagccg

SEQ ID NO: 445483 - DNA, 75 bp, synthetic construct
  source 1..75: mol_type = other DNA
caattgcccgcggcagtttatggccgaatggtcaaccttgagccagacatgaccatcagcaagaacgagatggtg

SEQ ID NO: 445484 - DNA, 75 bp, synthetic construct
  source 1..75: mol_type = other DNA
tggccttcatatggaagataagggccagcagacccttaaagatgccaatggtggccagtatgaaggctaccgcac

SEQ ID NO: 445485 - DNA, 75 bp, synthetic construct
  source 1..75: mol_type = other DNA
ctccagcccgttttattgcgttgatgaaattgaatatctctgtccgtggtgcattgcggacggttctgcggcaga

SEQ ID NO: 445486 - DNA, 75 bp, synthetic construct
  source 1..75: mol_type = other DNA
cagtaaaaaaaatgacctttggtgaaaacagagatctggaacgagtagtaacagcaccagtatcatctggaaaaa

SEQ ID NO: 445487 - DNA, 75 bp, synthetic construct
  source 1..75: mol_type = other DNA
cgcttttcgcgtaaagtttaacggtagtaacaactatctttatagtcttgttaccgcagaagaacaaagcggtag

SEQ ID NO: 445488 - DNA, 75 bp, synthetic construct
  source 1..75: mol_type = other DNA
ctcaaaaaatatggatattctgcacaaggccagagaagaatgtattgccatcattgtgagaaaacatttatcact

SEQ ID NO: 445489 - DNA, 75 bp, synthetic construct
  source 1..75: mol_type = other DNA
tggccgtgggtacggtgggcttggcgcgataacaacagggaaagatagtcaggggaaactcccgcctgccgttta

SEQ ID NO: 445490 - DNA, 75 bp, synthetic construct
  source 1..75: mol_type = other DNA
taaccgcattacagagaagagccgaactaagctcgcggataaagttgatggatttgcccctatatttccagacat

SEQ ID NO: 445491 - DNA, 75 bp, synthetic construct
  source 1..75: mol_type = other DNA
acaattactcgaaaaattaccggatggcgcgtatctcctcaacctggcgcgtggtgttcatgttgtggaagatga

SEQ ID NO: 445492 - DNA, 75 bp, synthetic construct
  source 1..75: mol_type = other DNA
tattcaatggctgtttgtaaccttacaggaaacaagaaagcaaatgaaatgcggtattcgacgttagcaagcgcg

SEQ ID NO: 445493 - DNA, 75 bp, synthetic construct
  source 1..75: mol_type = other DNA
agggcaaaggtgtcatatttacaactgtagtgaatggcggcggggcatatttaggaagctccattaaacatgagg

SEQ ID NO: 445494 - DNA, 75 bp, synthetic construct
  source 1..75: mol_type = other DNA
ttgtattttgaattcaaatatttttattctgaatacttgaattttaattcacgcttagaaagtcgctatagctat

SEQ ID NO: 445495 - DNA, 75 bp, synthetic construct
  source 1..75: mol_type = other DNA
gagaaattcaccaaagaaatgctatcgaagggatactcgccagtaacttctgatgttattggaactgtctctggg

SEQ ID NO: 445496 - DNA, 75 bp, synthetic construct
  source 1..75: mol_type = other DNA
gaagtttagttttatccgccctgaagtgagtggggtgacgggatggctattttcgcaacttgaactgtttgatct

SEQ ID NO: 445497 - DNA, 75 bp, synthetic construct
  source 1..75: mol_type = other DNA
gtgataactgaacgccggaacgtattgctacagggagctggctggttattgttgctggccccgtttttcttcttt

SEQ ID NO: 445498 - DNA, 75 bp, synthetic construct
  source 1..75: mol_type = other DNA
catattattctctgctggctactttggcgtcactttcgtcagcatctggctgtgaggtggcgtaaagtctgtggc

SEQ ID NO: 445499 - DNA, 75 bp, synthetic construct
  source 1..75: mol_type = other DNA
atgattgaaataacaaaagaagaactaacacaggcaacaaaggagtacgggaaaaagcacatcgcgcatcgtatg

SEQ ID NO: 445500 - DNA, 75 bp, synthetic construct
  source 1..75: mol_type = other DNA
atgaatatcgaagaatttatgagtgaagaaaactatatgtgcaatttaggcgaagatctttttggtaagattttc

SEQ ID NO: 445501 - DNA, 75 bp, synthetic construct
  source 1..75: mol_type = other DNA
gcaaattcatatttatgagatatggatttcaattattaaatcggctgatgagttaaggattttattcaaggcaat

SEQ ID NO: 445502 - DNA, 75 bp, synthetic construct
  source 1..75: mol_type = other DNA
caaacagatatatgtttacgagacttggttttcgctaattaaatgccctgatgaaatgaaactcttggcgaagcg

SEQ ID NO: 445503 - DNA, 75 bp, synthetic construct
  source 1..75: mol_type = other DNA
attatatcgatactattaatttgtcattttgtcattcctcatcggtgatagaattaagtagaataaaaaggaagt

SEQ ID NO: 445504 - DNA, 75 bp, synthetic construct
  source 1..75: mol_type = other DNA
tggcgaactgctgctgctattgcgcggcgtgccggaagccaatgctaaagcgcaccgtggcgtgtggaacaaact

SEQ ID NO: 445505 - DNA, 75 bp, synthetic construct
  source 1..75: mol_type = other DNA
ccgggaacatggcgttgataacaacctgatttttaaatggctacgcctctggcaaagagaaggacgtatttcccg

SEQ ID NO: 445506 - DNA, 75 bp, synthetic construct
  source 1..75: mol_type = other DNA
atcaccgccccgctacgcatgtcaggcgatctcagcggtactcctgggattcgtttgataagcccatttgcggag

SEQ ID NO: 445507 - DNA, 75 bp, synthetic construct
  source 1..75: mol_type = other DNA
gtttccagtcgtcatattcatctttcaacagcggattatttgcgtctttttcctgaacaaccgattagcgagaaa

SEQ ID NO: 445508 - DNA, 75 bp, synthetic construct
  source 1..75: mol_type = other DNA
ttagggatcaccgccccgctacgcatgtcaggcgatctcagcggcactccggggattcgtttgataagcccattt

SEQ ID NO: 445509 - DNA, 75 bp, synthetic construct
  source 1..75: mol_type = other DNA
attaccggcgttcgcccgcaaggcccatggggaaaactggttgatttgatgttcctgatcgccactgtcggcgca

SEQ ID NO: 445510 - DNA, 75 bp, synthetic construct
  source 1..75: mol_type = other DNA
aagccgttaatgcaaccgggccaattcgctgctgaacaggttgttacgctggagggaccaaaaggcaaattgcac

SEQ ID NO: 445511 - DNA, 75 bp, synthetic construct
  source 1..75: mol_type = other DNA
gtggagtactgatgctttttcgctgcgtgctgaaccgactcaggccaacggctaccagttgatgcaacagctgtt

SEQ ID NO: 445512 - DNA, 75 bp, synthetic construct
  source 1..75: mol_type = other DNA
aaaagcgcagaatgcctttttctattgtgagtcttacgccgatagcatggcgcgcgcagatgatgcatccgtcgt

SEQ ID NO: 445513 - DNA, 75 bp, synthetic construct
  source 1..75: mol_type = other DNA
cgtgcgaccgttgtttgccgatcgttgccaggccggttttccttctcctgccactgattatgctgagcatgaact

SEQ ID NO: 445514 - DNA, 75 bp, synthetic construct
  source 1..75: mol_type = other DNA
atccgggagaactggcgctggcggtgacgctggagtcggtcacgctgcctgccgatcttgtgggctggctggatg

SEQ ID NO: 445515 - DNA, 75 bp, synthetic construct
  source 1..75: mol_type = other DNA
gttatggaagcctgcgctggtgcgtattttatggcccggcgtatcagcgacatcggtcatgaagcaaaacttatc

SEQ ID NO: 445516 - DNA, 75 bp, synthetic construct
  source 1..75: mol_type = other DNA
tcgatctcggtaaacattcttttcatattcattgtcaggataaatctggcaatgcgcttttgcgtaagaagttta

SEQ ID NO: 445517 - DNA, 75 bp, synthetic construct
  source 1..75: mol_type = other DNA
cggcagtatagcactggaggaaaatcgactctgttgggtatcagtaagcgaggtgataaaaatttacgccggtta

SEQ ID NO: 445518 - DNA, 75 bp, synthetic construct
  source 1..75: mol_type = other DNA
tggcgaattcacggttaaacgcctgcagctgacaccccgtatcgccctgctgccgatgaacccggcctatcccac

SEQ ID NO: 445519 - DNA, 75 bp, synthetic construct
  source 1..75: mol_type = other DNA
gttacggttgttaccttcgcactgcccgcagctcgaacagcttggcgcaccaccggtattgccggaattactcaa

SEQ ID NO: 445520 - DNA, 75 bp, synthetic construct
  source 1..75: mol_type = other DNA
gttattcaaactgggcaacaagtggggatgttaacgtttcagcagagttatcagcagcgggtgaaagaagggcgc

SEQ ID NO: 445521 - DNA, 75 bp, synthetic construct
  source 1..75: mol_type = other DNA
acccaggagagctggcgctggcggtgacgctggagtcggtgacgctgccagccgatctggtgggatggctggacg

SEQ ID NO: 445522 - DNA, 75 bp, synthetic construct
  source 1..75: mol_type = other DNA
atgccattagtcattgttgctatcggtgtaatcttgttattactcctgatgatccgcttcaaaatgaacggcttc

SEQ ID NO: 445523 - DNA, 75 bp, synthetic construct
  source 1..75: mol_type = other DNA
tcactgcggggggtatcgcggcaccactgattgcaacgacgggtgttagcccagaactaatggttatcgccgtcg

SEQ ID NO: 445524 - DNA, 75 bp, synthetic construct
  source 1..75: mol_type = other DNA
ctgccgacaggtgatgctgtaataaaacggttgtctctcgtgttggccgaacacgaaatccccgaatatctgagc

SEQ ID NO: 445525 - DNA, 75 bp, synthetic construct
  source 1..75: mol_type = other DNA
atcgactgggatgacgacgatcatgaccaccatcaccacgacaacgatgattatcatcaccacgacggtggtcat

SEQ ID NO: 445526 - DNA, 75 bp, synthetic construct
  source 1..75: mol_type = other DNA
cgtcattacacgagatacccaacgtcaggcagcggcacagcggtttaatgaagctgaacactatgggagctatga

SEQ ID NO: 445527 - DNA, 75 bp, synthetic construct
  source 1..75: mol_type = other DNA
ggtcgccacttacctggcggatgaaatcgctaaactgggaccgtatgagttcatctgtacaggtcgcccggacga

SEQ ID NO: 445528 - DNA, 75 bp, synthetic construct
  source 1..75: mol_type = other DNA
cgacgccctactttcgcaggtgctgatggcatcaacctatccgacaaacgttgctcaagcagtgcaatggtcgca

SEQ ID NO: 445529 - DNA, 75 bp, synthetic construct
  source 1..75: mol_type = other DNA
ctaacccgcagaaccagcagcgaagagaagcggcacgtcagcgtattcagtccgcgtcgcctgagcagcgccagg

SEQ ID NO: 445530 - DNA, 75 bp, synthetic construct
  source 1..75: mol_type = other DNA
taccacgtacgcgctattcagcagcatcgactgggatgacgacgatcatgaccatcatcatcatgacgatgatga

SEQ ID NO: 445531 - DNA, 75 bp, synthetic construct
  source 1..75: mol_type = other DNA
atggataagaagcaagtaacggatttaaggtcggaactactcgattcacgttttggtgctaagtcaatttcaact

SEQ ID NO: 445532 - DNA, 75 bp, synthetic construct
  source 1..75: mol_type = other DNA
atggataagaagcaagtaacggatttaaggtcggaactactcgattcacgttttggagctaagtctatttcgact

SEQ ID NO: 445533 - DNA, 75 bp, synthetic construct
  source 1..75: mol_type = other DNA
aatcaacgctgatgataccgctcagcgcattatgacaattcctggtgttggtccgattactgccagcttactatc

SEQ ID NO: 445534 - DNA, 75 bp, synthetic construct
  source 1..75: mol_type = other DNA
atggataagaagcaagtaacggatttaaggtcggaactactcgattcacgttttggggctaagtctatttcaact

SEQ ID NO: 445535 - DNA, 75 bp, synthetic construct
  source 1..75: mol_type = other DNA
atggataagaagcaagtaacggatttaaggtcggaactactcgattcacgttttggtgctaagtcgatttcgact

SEQ ID NO: 445536 - DNA, 75 bp, synthetic construct
  source 1..75: mol_type = other DNA
atggataagaagcaagtaacggatttaaggtcggaactactcgattcacgttttggtgctaagtccatttccact

SEQ ID NO: 445537 - DNA, 75 bp, synthetic construct
  source 1..75: mol_type = other DNA
tggctggatgacgatcagcgggcaatattgctggagaatggtcagttggattttgctgtgtcgctggcggaaaac

SEQ ID NO: 445538 - DNA, 75 bp, synthetic construct
  source 1..75: mol_type = other DNA
cccgccctctacctgtacgcgagcgtattctggcggggccgttaggtcgtgcgctgctgttcaaaatggtcggca

SEQ ID NO: 445539 - DNA, 75 bp, synthetic construct
  source 1..75: mol_type = other DNA
cgcgtttgtactgacgatcctaaaacggtgctcggtttgcctgaagtacaacttggattgttacccggttcaggc

SEQ ID NO: 445540 - DNA, 75 bp, synthetic construct
  source 1..75: mol_type = other DNA
ttaatgttcgtctggacaacattgccgttatcaccatcgacgtaccgggtgagaaaatgaataccctgaaggcgg

SEQ ID NO: 445541 - DNA, 75 bp, synthetic construct
  source 1..75: mol_type = other DNA
gttttacgtcaatcgcattttagcgccttacattaatgaagctatccgcatgttgaccgaaggtgaacgggtaga

SEQ ID NO: 445542 - DNA, 75 bp, synthetic construct
  source 1..75: mol_type = other DNA
gcgctgctgttcaaaatggtcggcaagaaaacagaacacaaaactcagggtaactatccggcgacagaatgcatc

SEQ ID NO: 445543 - DNA, 75 bp, synthetic construct
  source 1..75: mol_type = other DNA
gagaaaatgaataccctgaaggcggaatttgcctcgcaggtacgcgccattattaagcaactccgtgaaaacaaa

SEQ ID NO: 445544 - DNA, 75 bp, synthetic construct
  source 1..75: mol_type = other DNA
aatgcttaagttaagtgggcgacagtggagtggctgggatgtatggatatgttgtctggcggcaattttgctgat

SEQ ID NO: 445545 - DNA, 75 bp, synthetic construct
  source 1..75: mol_type = other DNA
aatgcttaagttaagtggacgacaatggagtggctgggatgtatggatatgttgtctggcggcaattttgctgat

SEQ ID NO: 445546 - DNA, 75 bp, synthetic construct
  source 1..75: mol_type = other DNA
agatatacactctaaaggcattggttatctgcgtcatagatggttgtttgaatctaaatgtgcagttcatagtac

SEQ ID NO: 445547 - DNA, 75 bp, synthetic construct
  source 1..75: mol_type = other DNA
cagaaacggcgctggatgagctggaggccaaatggggccagcagtatccggtggtactccagtcgtggcgtcgca

SEQ ID NO: 445548 - DNA, 75 bp, synthetic construct
  source 1..75: mol_type = other DNA
atgttttcatctgagtcggtatccgtattaagtgacctgcaaaatcgtggtgttgaagacattctgattgcctgc

SEQ ID NO: 445549 - DNA, 75 bp, synthetic construct
  source 1..75: mol_type = other DNA
tattggcctgcatttcttcagtccggtggaaaaaatgccgctggtggagattattcctcatgcgggtacatcggc

SEQ ID NO: 445550 - DNA, 75 bp, synthetic construct
  source 1..75: mol_type = other DNA
ctgtttgaattactgattaacacacccgcggtggggaatttgattcgcgaagggaaaacccaccagttaccgcat

SEQ ID NO: 445551 - DNA, 75 bp, synthetic construct
  source 1..75: mol_type = other DNA
cggcactggagccggtttcagacagcccggagttccgcacactgtatccggaaaacatctgtatttttggtattg

SEQ ID NO: 445552 - DNA, 75 bp, synthetic construct
  source 1..75: mol_type = other DNA
atgaagctacagcttttcagcaccgggaaagaacacccgccacaggcccatccattgtttgccgatctagccagc

SEQ ID NO: 445553 - DNA, 75 bp, synthetic construct
  source 1..75: mol_type = other DNA
ttgagcgactggtggattcatttccggcgcaggaaaaagatcccgtacgtaatcaactggcaggtagtttacggg

SEQ ID NO: 445554 - DNA, 75 bp, synthetic construct
  source 1..75: mol_type = other DNA
cgggattgcgggccgcattgcgggaagatcctgatgtgattttgctcggagagctgcgtgacagcgagacaatcc

SEQ ID NO: 445555 - DNA, 75 bp, synthetic construct
  source 1..75: mol_type = other DNA
acgggggcgacggggagcggcaaatctaccacgctggcggcgatggttggctatctcaatcaacatgccgatgcg

SEQ ID NO: 445556 - DNA, 75 bp, synthetic construct
  source 1..75: mol_type = other DNA
gcatatcgataccgcgctagtgaaatttgggtttccggtaggcccaatccaacttttggatgaggtaggaatcga

SEQ ID NO: 445557 - DNA, 75 bp, synthetic construct
  source 1..75: mol_type = other DNA
gcgaaacaggcgttaaaatctggactggtggatgatgtcgttcctcattccattttactggaagccgcggtagag

SEQ ID NO: 445558 - DNA, 75 bp, synthetic construct
  source 1..75: mol_type = other DNA
tctttaccgattggcgatattgccgctcacgccacgcgaccagagcaagttatcggcctgcatttcttcagtccg

SEQ ID NO: 445559 - DNA, 75 bp, synthetic construct
  source 1..75: mol_type = other DNA
ccggtgtgccgtgggttaacgcactggataaacctgtctcactggcccttaaatccggcaatttcggtgacgaag

SEQ ID NO: 445560 - DNA, 75 bp, synthetic construct
  source 1..75: mol_type = other DNA
gctcacaaatgaccaattgccaggtggcacattaccgtcagatggcgccagcccgtgaagttgatgtggcacgtt

SEQ ID NO: 445561 - DNA, 75 bp, synthetic construct
  source 1..75: mol_type = other DNA
tgtggaatgcgacattattactcagcgaaaaaggtttttatggactggctttcttcttaagcttgtttggtgcag

SEQ ID NO: 445562 - DNA, 75 bp, synthetic construct
  source 1..75: mol_type = other DNA
tggttggcgcaggtgcggcagcgaagttagttacgctggaaaccgtgtcacgctgtatgccagccgggattttga

SEQ ID NO: 445563 - DNA, 75 bp, synthetic construct
  source 1..75: mol_type = other DNA
cccgccagtttctcgataaaggcaaactctggcatctgccggagcaacttactcaggtgcgctgggtctatctgg

SEQ ID NO: 445564 - DNA, 75 bp, synthetic construct
  source 1..75: mol_type = other DNA
tctgaaggccatccgaaaggcgtcgtccatagccataaaagcattctggcgaatgtcgagcagattaaaacgatt

SEQ ID NO: 445565 - DNA, 75 bp, synthetic construct
  source 1..75: mol_type = other DNA
tgatgaactacaccgccggggtaaaagggctgaccagcgccattacggcggctgaaatcaaaaccatcttcactt

SEQ ID NO: 445566 - DNA, 75 bp, synthetic construct
  source 1..75: mol_type = other DNA
tatgccttgttgatgctgattggcgtgatggggggcttttttgtcgttccgctcaatgcgttgctacaggagcgg

SEQ ID NO: 445567 - DNA, 75 bp, synthetic construct
  source 1..75: mol_type = other DNA
ttgtatcgcgttcgcgttacgggtgacacccaggcactgaagggcgagcgcgttctaattacgcctaatcacgtc

SEQ ID NO: 445568 - DNA, 75 bp, synthetic construct
  source 1..75: mol_type = other DNA
gcaaattgccaacgtgttgattggcagaatgcgcggtggcctgggtggggctaatattctggtcagtaccatgat

SEQ ID NO: 445569 - DNA, 75 bp, synthetic construct
  source 1..75: mol_type = other DNA
atttcggcacaaaaaaatttatatacaacgcactctggacctagccaggcatggattgaacatgcatatcctttg

SEQ ID NO: 445570 - DNA, 75 bp, synthetic construct
  source 1..75: mol_type = other DNA
ccgaaaatctctggcgtattttgcaggaacatatgccgggcgatttaattcagcagatatcaatggaaaaaccag

SEQ ID NO: 445571 - DNA, 75 bp, synthetic construct
  source 1..75: mol_type = other DNA
gtgattttccctgaaggacgcatcaccaccacaggctcgctgatgaaaatctacgatggcgcgggttttgtcgcg

SEQ ID NO: 445572 - DNA, 75 bp, synthetic construct
  source 1..75: mol_type = other DNA
gattgtatctaaagtttttcacatatatgtgtgctcacaaatcggaaaaaatcgctacagtgtccaataattcaa

SEQ ID NO: 445573 - DNA, 75 bp, synthetic construct
  source 1..75: mol_type = other DNA
tgaagatgaattatcacgcttttctactaataaacaaataaatactttgcagcacatgtttaaggaaatatgtaa

SEQ ID NO: 445574 - DNA, 75 bp, synthetic construct
  source 1..75: mol_type = other DNA
aggcgaacgcatcggcttaatgctgcccaatgcaggcatcagtgcggcagtgatttttggggccatcgcccgtcg

SEQ ID NO: 445575 - DNA, 75 bp, synthetic construct
  source 1..75: mol_type = other DNA
tcgtaagaatactagtaaacaatcagagaatgcagaggcgaaagctataaatcctattccttctgattggccaga

SEQ ID NO: 445576 - DNA, 75 bp, synthetic construct
  source 1..75: mol_type = other DNA
gttcaagcatataaacaaaatttgttataatcgcgtattgcatggtgaaaatacgtctataaaaaagttggatat

SEQ ID NO: 445577 - DNA, 75 bp, synthetic construct
  source 1..75: mol_type = other DNA
gtgatctgatccttcaactcagcaaaagttcgatttattcaacaaagcccaaagcaattagtctgaacgaggttg

SEQ ID NO: 445578 - DNA, 75 bp, synthetic construct
  source 1..75: mol_type = other DNA
gctccggcattaccggctaacgacggtaagcaaacccccatgcgcgggcatccggtttttatcgctcaacacgcc

SEQ ID NO: 445579 - DNA, 75 bp, synthetic construct
  source 1..75: mol_type = other DNA
aaaatggcttgagcgtgcaagttggtttgatgaagaattcacacactggggaggggaggataacgagtttggata

SEQ ID NO: 445580 - DNA, 75 bp, synthetic construct
  source 1..75: mol_type = other DNA
tgtgtcgtggtttttatattggtcaacttgactccgatgattacctagaacctgatgctgtggaactttgtttaa

SEQ ID NO: 445581 - DNA, 75 bp, synthetic construct
  source 1..75: mol_type = other DNA
tacttcccgtttttcccgatttggctacatgacatcaaccatatcagcaaaagtgatacgggtattatttttgcc

SEQ ID NO: 445582 - DNA, 75 bp, synthetic construct
  source 1..75: mol_type = other DNA
aagggccgaacataatgaacggctatctgcgggtggagaagcctggtgtactggaagtgcccaccgccgagaatg

SEQ ID NO: 445583 - DNA, 75 bp, synthetic construct
  source 1..75: mol_type = other DNA
atcgcaaattactcactaagacactgtttgttgggcgtatactcgaaaaatacactgctgaaggggaaagaatcg

SEQ ID NO: 445584 - DNA, 75 bp, synthetic construct
  source 1..75: mol_type = other DNA
ggccgtctggataacgtgtttgtcactgcgattggtctgctgaccattctgaacatcgtatacaaattgttttaa

SEQ ID NO: 445585 - DNA, 75 bp, synthetic construct
  source 1..75: mol_type = other DNA
caatattgatgtctgcattttcttttgcagggcaaaatgttaaatgcgaacttcaatactttggagatagcgata

SEQ ID NO: 445586 - DNA, 75 bp, synthetic construct
  source 1..75: mol_type = other DNA
tgacaaactcgggctgcgcaaatacctgctgtggattattaccggcatgttagtgatgtttgcgccgttcggtga

SEQ ID NO: 445587 - DNA, 75 bp, synthetic construct
  source 1..75: mol_type = other DNA
cgggcgcacgatatttatctcttcgatgagcgagttattaaagaatatggcgctcaacggatacggcattgcctg

SEQ ID NO: 445588 - DNA, 75 bp, synthetic construct
  source 1..75: mol_type = other DNA
ggactttgctgaactgttgctggaagactacaaagcctccctgaaatatctcagcgatcacccgaaactgcaggg

SEQ ID NO: 445589 - DNA, 75 bp, synthetic construct
  source 1..75: mol_type = other DNA
ctgcacgatgcgctggataaattccaggccgacactggtatcgacatcgacatgcacatcgacgctgccagcggt

SEQ ID NO: 445590 - DNA, 75 bp, synthetic construct
  source 1..75: mol_type = other DNA
ctatgcgccccggtcagttgtttatggacccgaaacgcatgattgaagcctgtgacgaaaacaccatcggcgtgg

SEQ ID NO: 445591 - DNA, 75 bp, synthetic construct
  source 1..75: mol_type = other DNA
atcggcgtggtgccgactttcggcgtgacctacaccggtaactatgagttcccgcagccgctgcacgatgcgctg

SEQ ID NO: 445592 - DNA, 75 bp, synthetic construct
  source 1..75: mol_type = other DNA
atggactttgctgaactgttgctggaagactacaaagcctccctgaaatatctcagcgaccacccgaaactgcag

SEQ ID NO: 445593 - DNA, 75 bp, synthetic construct
  source 1..75: mol_type = other DNA
tgccagcggtggcttcctggcaccgttcgtcgccccggatatcgtctgggacttccgcctgccgcgtgtgaaatc

SEQ ID NO: 445594 - DNA, 75 bp, synthetic construct
  source 1..75: mol_type = other DNA
cgaaacgcatgattgaagcctgtgacgaaaacaccatcggcgtggtgccgactttcggcgtgacctacaccggta

SEQ ID NO: 445595 - DNA, 75 bp, synthetic construct
  source 1..75: mol_type = other DNA
aagaagcgctgccgcaggaactggtgttcaacgttgactacctgggtggtcaaattggtacttttgccatcaact

SEQ ID NO: 445596 - DNA, 75 bp, synthetic construct
  source 1..75: mol_type = other DNA
aacaaaaactggatcgacaaagaagaatatccgcaatccgcagccatcgacctgcgttgcgtaaatatggttgcc

SEQ ID NO: 445597 - DNA, 75 bp, synthetic construct
  source 1..75: mol_type = other DNA
cacaaattgatggatttatccattaacaaaaactggatcgacaaagaagaatatccgcaatccgcagccattgac

SEQ ID NO: 445598 - DNA, 75 bp, synthetic construct
  source 1..75: mol_type = other DNA
cgacgcgaacatttggcactctgatgagcatggaaccggcgctggccgccatttccgggatgattttcctcggtg

SEQ ID NO: 445599 - DNA, 75 bp, synthetic construct
  source 1..75: mol_type = other DNA
acatcgtggtgatgcgcattatgtgtcgtcgcggcttcgaaatggactttgctgaactgttgctggaagactaca

SEQ ID NO: 445600 - DNA, 75 bp, synthetic construct
  source 1..75: mol_type = other DNA
tgttgctggaagactacaaagcctccctgaaatatctcagcgaccacccgaaactgcagggtattgcccagcaga

SEQ ID NO: 445601 - DNA, 75 bp, synthetic construct
  source 1..75: mol_type = other DNA
atcccgctgatcatcatggctatccttgcgttcccgatgacgttttttgctcaccgcggcctgactcgcttcgta

SEQ ID NO: 445602 - DNA, 75 bp, synthetic construct
  source 1..75: mol_type = other DNA
atggatttgtcgatcaataaaaactggatcgacaaagaagaatatccgcaatccgctgcaatcgatctgcgttgc

SEQ ID NO: 445603 - DNA, 75 bp, synthetic construct
  source 1..75: mol_type = other DNA
gtatttccaacttcacgatcccattgatggaaaaagcgattgctgctgttggcgctgaaaacatcgctactaacc

SEQ ID NO: 445604 - DNA, 75 bp, synthetic construct
  source 1..75: mol_type = other DNA
tcattcccagactcgcagcttattacagcagcttgaatgcaatttgggggagttaaacggccagagtttactcgg

SEQ ID NO: 445605 - DNA, 75 bp, synthetic construct
  source 1..75: mol_type = other DNA
aagccgtaaatacattacgagaagggaagagtgactttgttatttcatttcgagatgaggagtttatgcaatcgc

SEQ ID NO: 445606 - DNA, 75 bp, synthetic construct
  source 1..75: mol_type = other DNA
tcaccgcggcctgactcgcttcgtactgtctggtaaaaacccgggcgaagacatcaccgaggttgtagaagaaca

SEQ ID NO: 445607 - DNA, 75 bp, synthetic construct
  source 1..75: mol_type = other DNA
cttgaacttggttatcgcgcaattgataccgcacaaatctatgataacgaagccgcagtaggtcaggcgattgca

SEQ ID NO: 445608 - DNA, 75 bp, synthetic construct
  source 1..75: mol_type = other DNA
aagagagcctgcaaaaattgcgtaccgattatgttgatctgacgctaatccactggccgtcaccaaacgatgaag

SEQ ID NO: 445609 - DNA, 75 bp, synthetic construct
  source 1..75: mol_type = other DNA
gcgctgccgcaggaactggtgttcaacgttgactacctcggcggtcagattggtactttcgccatcaacttctcc

SEQ ID NO: 445610 - DNA, 75 bp, synthetic construct
  source 1..75: mol_type = other DNA
tgaaaatctcagcaaagacaaactgatcccgagtttgaaggatagtctgcaaaaattacgtaccgattatgtcga

SEQ ID NO: 445611 - DNA, 75 bp, synthetic construct
  source 1..75: mol_type = other DNA
aaaaacctggaaagtaatcttaaggcacaaaatttacagcttgatgccgaagataaaaagcgatcgccgcactgg

SEQ ID NO: 445612 - DNA, 75 bp, synthetic construct
  source 1..75: mol_type = other DNA
cgttgatggaaaaagcgattgctgctgttggtgctgaaaacatcgctactaaccagattgaactctctccttatc

SEQ ID NO: 445613 - DNA, 75 bp, synthetic construct
  source 1..75: mol_type = other DNA
tcgaacacggcaacaagaaaacctacgcccgcaccgcgagtgagtttggctatctgccgctggagcatacgctgg

SEQ ID NO: 445614 - DNA, 75 bp, synthetic construct
  source 1..75: mol_type = other DNA
ataatttaatggcaaaacatggcgtcagtgatgagcatatcgtgatgcgtgtgacgggctgcccgaacggctgtg

SEQ ID NO: 445615 - DNA, 75 bp, synthetic construct
  source 1..75: mol_type = other DNA
tgatgcgctggcgaccgctaacgacatgaaccgtaacgtactctgcacctcgaacccttacgagtcgcagctgca

SEQ ID NO: 445616 - DNA, 75 bp, synthetic construct
  source 1..75: mol_type = other DNA
ttagaatataaaggttcctttggctcaataaatgcaggttatgctgactggaatagtggcttcgttaacaccgtg

SEQ ID NO: 445617 - DNA, 75 bp, synthetic construct
  source 1..75: mol_type = other DNA
tgatcaaggcgcttcacttgcagatatccgtaaattattacttcttaatagcacagggcttaaccgtgagttgat

SEQ ID NO: 445618 - DNA, 75 bp, synthetic construct
  source 1..75: mol_type = other DNA
tttttgagtggtggcgtgagaaataatgtctggcgtgcattttccgcccgtgattattcaatggctgtttgtaac

SEQ ID NO: 445619 - DNA, 75 bp, synthetic construct
  source 1..75: mol_type = other DNA
tccgtccgtatgagttcaccggacgcggcgatcgcatcggctggattaaaggtattgacgacaaatggcacctga

SEQ ID NO: 445620 - DNA, 75 bp, synthetic construct
  source 1..75: mol_type = other DNA
cgtgcggggatcaagtttgaaccgatccgtccgtatgagttcaccggacgcggcgatcgcatcggctggattaaa

SEQ ID NO: 445621 - DNA, 75 bp, synthetic construct
  source 1..75: mol_type = other DNA
tttgtgggattcaccatcagcccggtcttgtaggcctgataagacgtgtgagcgttgcatcaggcaaggcaaaca

SEQ ID NO: 445622 - DNA, 75 bp, synthetic construct
  source 1..75: mol_type = other DNA
acacgctggaacgtgtgggtgttgagacgtttaaagcggaagtggaacgtcgcgcagggatcaagttcgaaccga

SEQ ID NO: 445623 - DNA, 75 bp, synthetic construct
  source 1..75: mol_type = other DNA
atgaaccgtaacgtgctgtgcacctcgaatccgtacgagtcacagttgcacgcggaagcctatgagtgggcgaag

SEQ ID NO: 445624 - DNA, 75 bp, synthetic construct
  source 1..75: mol_type = other DNA
accagatgctgcactcggtcggtcttgatgcgctggcgacagctaacgacatgaaccgtaacgtactctgcacct

SEQ ID NO: 445625 - DNA, 75 bp, synthetic construct
  source 1..75: mol_type = other DNA
atggctaagacgttatacgaaaaattattcgacgctcacgtagtgtacgaagccgaaaacgaaaccccgctgtta

SEQ ID NO: 445626 - DNA, 75 bp, synthetic construct
  source 1..75: mol_type = other DNA
tgatattcccagtcaggtattcggttgggaaacggcgatcccttttcttccctggactattgttccttactggag

SEQ ID NO: 445627 - DNA, 75 bp, synthetic construct
  source 1..75: mol_type = other DNA
gtggcggcatggttgttatgttacggacactgtaaaaccgttaatgaagcgattagctatattcgagccagacgc

SEQ ID NO: 445628 - DNA, 75 bp, synthetic construct
  source 1..75: mol_type = other DNA
gcatctggtcagcccggcaatggctgccgccgcggcagtgaccggtcattttgccgacattcgcaacattaaata

SEQ ID NO: 445629 - DNA, 75 bp, synthetic construct
  source 1..75: mol_type = other DNA
cagaatgcggttctggacgtcacctttgaattccctcgcggacgagcgacaaaagatcgactctatttctgtgta

SEQ ID NO: 445630 - DNA, 75 bp, synthetic construct
  source 1..75: mol_type = other DNA
actgaggcgacaatccgagccacggaaaaggcgaaggcagactttgatatccgcaactataaacaggatgatatc

SEQ ID NO: 445631 - DNA, 75 bp, synthetic construct
  source 1..75: mol_type = other DNA
gatggtttttactcatcgccatttcgacgctgacgacctggcagcatcattttattgatgtcatcacggggctgg

SEQ ID NO: 445632 - DNA, 75 bp, synthetic construct
  source 1..75: mol_type = other DNA
accatgaaaattgaagtccagggcaaagccgcgccgggcattaccgcaaaagatatcgtgctggcaattatcggt

SEQ ID NO: 445633 - DNA, 75 bp, synthetic construct
  source 1..75: mol_type = other DNA
gcatctggtcagcccggcaatggctgccgccgctgctgttactggtcattttgccgatatccgcaacattaaata

SEQ ID NO: 445634 - DNA, 75 bp, synthetic construct
  source 1..75: mol_type = other DNA
tgctggcgattatcggtaaaaccggcagcgcaggcggcaccgggcatgtggtggagttttgcggcgaagcaatcc

SEQ ID NO: 445635 - DNA, 75 bp, synthetic construct
  source 1..75: mol_type = other DNA
cgtattgaagatttacgtgcagcggcggaaatcgccaaagggcggaaagttgcgccaggcgttcaggcactggtc

SEQ ID NO: 445636 - DNA, 75 bp, synthetic construct
  source 1..75: mol_type = other DNA
cgcgccaggcgtgcaggcactggtggttcccggctctggcccggtaaaagcccaggcggaagcggaaggtctgga

SEQ ID NO: 445637 - DNA, 75 bp, synthetic construct
  source 1..75: mol_type = other DNA
ggcatgtggtggagttttgcggcgaagcaatccgtgatttaagcatggaaggtcgtatgaccctgtgcaatatgg

SEQ ID NO: 445638 - DNA, 75 bp, synthetic construct
  source 1..75: mol_type = other DNA
accagatgctgcactcggtcggtcttgatgcgctggcgaccgccaacgacatgaaccgtaacgtactctgtacct

SEQ ID NO: 445639 - DNA, 75 bp, synthetic construct
  source 1..75: mol_type = other DNA
tcatctatctctcacctcggctatctgctggtagcgctgattgcgctgcaaactggcgagatgtcgatggaagcg

SEQ ID NO: 445640 - DNA, 75 bp, synthetic construct
  source 1..75: mol_type = other DNA
gtcggtgtccaggcacacttgtggtggctggtgggcgcggtggttgtcggttcggcaatcggcctctactactac

SEQ ID NO: 445641 - DNA, 75 bp, synthetic construct
  source 1..75: mol_type = other DNA
tgtagtcagcctgatgtccagtccatatcgcggcccggatgctgattctctgtactcttaccgtggcctgttctg

SEQ ID NO: 445642 - DNA, 75 bp, synthetic construct
  source 1..75: mol_type = other DNA
ggtaacctgatggcgctgagccagaccaatatcaaacgtctgctcggttactcatctatctctcacctcggctat

SEQ ID NO: 445643 - DNA, 75 bp, synthetic construct
  source 1..75: mol_type = other DNA
gtggacgccagacgtataccagggcgcgcctgcgccggtttccactttcctggcgacggcgagcaaaatcgctat

SEQ ID NO: 445644 - DNA, 75 bp, synthetic construct
  source 1..75: mol_type = other DNA
ggctggtgggcgccgtggttgtcggttcggcaatcggcctctactactacctgcgcgtggcggtgagcctgtacc

SEQ ID NO: 445645 - DNA, 75 bp, synthetic construct
  source 1..75: mol_type = other DNA
ataaactaccgttaggcaacgccactcaggtgcaacatctttccgacctgctgaatatgagcgatgttgtaagcc

SEQ ID NO: 445646 - DNA, 75 bp, synthetic construct
  source 1..75: mol_type = other DNA
aagccgacgaagacgttgccgaaaaagcgctgcaggcaatgaaagctattccgggtaccattcgcgcccgtctgc

SEQ ID NO: 445647 - DNA, 75 bp, synthetic construct
  source 1..75: mol_type = other DNA
acaagattaagtttctgctggtagaaggcgtgcaccaaaaggcgctggaaagccttcgtgcagctggttacacca

SEQ ID NO: 445648 - DNA, 75 bp, synthetic construct
  source 1..75: mol_type = other DNA
ggctggtgggggccgtggttgtcggttcggcaattggcctctactactacctgcgcgtagcggtgagcttatacc

SEQ ID NO: 445649 - DNA, 75 bp, synthetic construct
  source 1..75: mol_type = other DNA
gcgcgggactgcgcaccagccgggacgaatgcttgcactgaaggagggcggacgcaccacaggcgtcgcctatcg

SEQ ID NO: 445650 - DNA, 75 bp, synthetic construct
  source 1..75: mol_type = other DNA
aacgatatcgatctgcatgccaacgacatgaacttcgtggcgatcgccgaaaacggcaagctggtgggcttcaac

SEQ ID NO: 445651 - DNA, 75 bp, synthetic construct
  source 1..75: mol_type = other DNA
gtctgtttggtgcacgctactcccactatccctgcgtgggcggcctctatgctgtgctccgtctgatcaaggatg

SEQ ID NO: 445652 - DNA, 75 bp, synthetic construct
  source 1..75: mol_type = other DNA
ggcatctgatgctgaccaccatccatgcgaacgacccgattaacatcctcgaacgccttgagatggagggtgttc

SEQ ID NO: 445653 - DNA, 75 bp, synthetic construct
  source 1..75: mol_type = other DNA
tgtggaggcccgtgtacatggggaactggaaatcctcgacattatccggaaagatgagggagtggagcttctggg

SEQ ID NO: 445654 - DNA, 75 bp, synthetic construct
  source 1..75: mol_type = other DNA
ggctacctattccggcatgacggatgtcatcaagggcacacaatttgatcccggggttccacaggacgcacgtct

SEQ ID NO: 445655 - DNA, 75 bp, synthetic construct
  source 1..75: mol_type = other DNA
gtaagcaaacccccatgcgcgggcatccggtgtttatcgctcagcacgccactgcaacctgctgtcgcggttgtc

SEQ ID NO: 445656 - DNA, 75 bp, synthetic construct
  source 1..75: mol_type = other DNA
actgggcggaatgacccgtaatcagcatctgctgggaaaaatcaacagcggacaggttgatccgctggcggccca

SEQ ID NO: 445657 - DNA, 75 bp, synthetic construct
  source 1..75: mol_type = other DNA
gaccaccatccatgcgaacgacccgattaacattctcgaacgtcttgagatggagggggtacaggcaaggatgat

SEQ ID NO: 445658 - DNA, 75 bp, synthetic construct
  source 1..75: mol_type = other DNA
atgagcgaaaaacatccagggcctttagtggtcgaaggaaaactggcagacgccgagcgcatgaagctggagagc

SEQ ID NO: 445659 - DNA, 75 bp, synthetic construct
  source 1..75: mol_type = other DNA
acctactgggaaaaatcaacagcggactggttgatccgctggcagcccattatatatcacccattgatgaggaca

SEQ ID NO: 445660 - DNA, 75 bp, synthetic construct
  source 1..75: mol_type = other DNA
tcgttattcacactatccctgtgtcggtggcctctatgccgtactgcgactaatcaaggatgacagtaaacatat

SEQ ID NO: 445661 - DNA, 75 bp, synthetic construct
  source 1..75: mol_type = other DNA
cggtggcggaagccgtcgtgacaactcagcgcgactggggtaaccgaaccgatcgtaaaaatgccaaaaccaaat

SEQ ID NO: 445662 - DNA, 75 bp, synthetic construct
  source 1..75: mol_type = other DNA
gagcggattgatgaatgccgtcacgccgcagcgcgaaaactcaatggcctgcgtgtcattcccgacttgcccgtt

SEQ ID NO: 445663 - DNA, 75 bp, synthetic construct
  source 1..75: mol_type = other DNA
ctgaaaaagaacgtcaaaccggtgcaccagatgctgcactcggtcggtcttgatgcgctggcgaccgccaacgac

SEQ ID NO: 445664 - DNA, 75 bp, synthetic construct
  source 1..75: mol_type = other DNA
agccgaagcgcgggcaatggctgacagagggttatcaacctacgaggccatatatcaacttaacaaactggaaga

SEQ ID NO: 445665 - DNA, 75 bp, synthetic construct
  source 1..75: mol_type = other DNA
aaaaagtatcaattcgctttaatttgtggtcaaggaaggctcgaatcattgacagctttaggagaagaattaaca

SEQ ID NO: 445666 - DNA, 75 bp, synthetic construct
  source 1..75: mol_type = other DNA
ggcgaggcgttcgcttatgcactgaaccagtgggatgccctgtgttactactgcgatgatggtctggcagagccg

SEQ ID NO: 445667 - DNA, 75 bp, synthetic construct
  source 1..75: mol_type = other DNA
aagctgccggtattgccgcctgtctgatggcgtacagccatcatgcctgccgtacggaatgttatgccatgacgg

SEQ ID NO: 445668 - DNA, 75 bp, synthetic construct
  source 1..75: mol_type = other DNA
gacatcccgtctttttccgttctgtaccggtaagtaccgctggcacggtagcgctgaggcgtataccggtcgtga

SEQ ID NO: 445669 - DNA, 75 bp, synthetic construct
  source 1..75: mol_type = other DNA
attaaccaccgaaatagccgccatcggggagataaaaacggaaactgaaacaaccagattctatgttgattatga

SEQ ID NO: 445670 - DNA, 75 bp, synthetic construct
  source 1..75: mol_type = other DNA
ttaagatatccgacataaaagtagtcatcccacgttcacgaaataaacttcgacattcggaaattactgaaagta

SEQ ID NO: 445671 - DNA, 75 bp, synthetic construct
  source 1..75: mol_type = other DNA
accgccagtcagaaatataccgtcgtcagggagtggagctgagccgtgccacactggggcgctggacaggtgctg

SEQ ID NO: 445672 - DNA, 75 bp, synthetic construct
  source 1..75: mol_type = other DNA
tacagtgatgacggtctggcggaggtggacaataacacagcggaaagagcgcttcgtgcagtctgtctcggaaag

SEQ ID NO: 445673 - DNA, 75 bp, synthetic construct
  source 1..75: mol_type = other DNA
gaaaaagaaaaaaatgactacagatgaattaaaaaaaatctatcaagataacatttctcagcacagaaagattaa

SEQ ID NO: 445674 - DNA, 75 bp, synthetic construct
  source 1..75: mol_type = other DNA
cattccacagtgggtgaccctagagccccgtatcttcggctggatggaccgtctgtgtgaagactactgcggtgg

SEQ ID NO: 445675 - DNA, 75 bp, synthetic construct
  source 1..75: mol_type = other DNA
tctgtactgtcgggctgggtggatgcgtgttgtcgtctgctggcaccgctggatgaagcccttcagcactatgtc

SEQ ID NO: 445676 - DNA, 75 bp, synthetic construct
  source 1..75: mol_type = other DNA
tgcatgaatggatggtggagaagaatggtacgctgtcgaaaaaatccagactgggcgaagcgttcagctatgtac

SEQ ID NO: 445677 - DNA, 75 bp, synthetic construct
  source 1..75: mol_type = other DNA
gtgaagtgcaggatattcccggtgtgctggctgtgtttgctgaacgccgtaaggacagttttggcccgtatgtcc

SEQ ID NO: 445678 - DNA, 75 bp, synthetic construct
  source 1..75: mol_type = other DNA
aactgtacgccatcgaggatgaaatacggggattaccagagtcagagcgtcttgcagtcagacagcagcgaagca

SEQ ID NO: 445679 - DNA, 75 bp, synthetic construct
  source 1..75: mol_type = other DNA
agagatgcgttccggtatatcagaaagcactgggttgcgttgtgcaacttctgtgatgatggtctggcggaggcg

SEQ ID NO: 445680 - DNA, 75 bp, synthetic construct
  source 1..75: mol_type = other DNA
aagagacggaggccttcctgcgctctgcactgacacgtgccgaagaaaagatcgaagaagatgaacgggaaatag

SEQ ID NO: 445681 - DNA, 75 bp, synthetic construct
  source 1..75: mol_type = other DNA
tacgtgatgaacacccgcaaggttcacactgacgacacgccagtaaaagtgctgtcaccgggcagaaaaaaggca

SEQ ID NO: 445682 - DNA, 75 bp, synthetic construct
  source 1..75: mol_type = other DNA
ttatctgggggaagtcagcgcagaacagctggaactggtgagcagtgccctgaaagtgatccgcactgttcgggt

SEQ ID NO: 445683 - DNA, 75 bp, synthetic construct
  source 1..75: mol_type = other DNA
ctactgcgatggtatctggaatctgtacaccctgaacaacggcggggcatttatggcccccgaaccggatgatga

SEQ ID NO: 445684 - DNA, 75 bp, synthetic construct
  source 1..75: mol_type = other DNA
ttcggctggatggaccgtctgtgcgaagactactgcggtggtatctggaatctgtacactctgaacaacggcggg

SEQ ID NO: 445685 - DNA, 75 bp, synthetic construct
  source 1..75: mol_type = other DNA
gtgttatgccatgacggtccactattaccggctgcgggattacgccctgcaacatccggaatgcagcgccattat

SEQ ID NO: 445686 - DNA, 75 bp, synthetic construct
  source 1..75: mol_type = other DNA
gtcagagtgaaatctttgcccgtcagggtgtcgaactgagccgtgcgttactctccaactgggttgacgcgtgct

SEQ ID NO: 445687 - DNA, 75 bp, synthetic construct
  source 1..75: mol_type = other DNA
atggcgttaacacaccgcgaactctgtcagattgcgtacaagttccttaagcgcaacggtttcaaggtttgtttt

SEQ ID NO: 445688 - DNA, 75 bp, synthetic construct
  source 1..75: mol_type = other DNA
atgaaaatcgtttctcagaacacaactgctctttcttcagccacagtaccagggaatgaccagccccaactggtt

SEQ ID NO: 445689 - DNA, 75 bp, synthetic construct
  source 1..75: mol_type = other DNA
tgatgacgaaacatgggttctgttcaatgccatgaacggcaaccgcgctgaaatgagcccggaagccgccggtat

SEQ ID NO: 445690 - DNA, 75 bp, synthetic construct
  source 1..75: mol_type = other DNA
cttaatggcgttcagtaacacggaaaaaagtgaagatgccaggctgagttctgctgtttctcaccgcggggatta

SEQ ID NO: 445691 - DNA, 75 bp, synthetic construct
  source 1..75: mol_type = other DNA
cggtggtatctggaatctgtataccctgaacaatggcggggcatttatggcacctgaaccggatgacgatgatga

SEQ ID NO: 445692 - DNA, 75 bp, synthetic construct
  source 1..75: mol_type = other DNA
tgatgacacaccggtaaggtactggcaccgggtcagaaaaaggcgaaaacagggcgtatctggacgtatgtccgg

SEQ ID NO: 445693 - DNA, 75 bp, synthetic construct
  source 1..75: mol_type = other DNA
ggtaaccgcgctgaaatgagcccggaagccgccggcattgcggcctgtctgatgacgtacagtcatcacgcctgt

SEQ ID NO: 445694 - DNA, 75 bp, synthetic construct
  source 1..75: mol_type = other DNA
gtatctggaatctgtacacactgaacaacggcggggcatttatggctcccgaaccggatgacgatgatgtcgaaa

SEQ ID NO: 445695 - DNA, 75 bp, synthetic construct
  source 1..75: mol_type = other DNA
aaaagtggctgcgttacgtcattgaacatatccaggactggccggcaaaccgggtacgcgatctgttgccctgga

SEQ ID NO: 445696 - DNA, 75 bp, synthetic construct
  source 1..75: mol_type = other DNA
atggccttccaaccgagttgatgaactcctgccatggaacgtagtactcaccaataaatatgaaccgccccgggt

SEQ ID NO: 445697 - DNA, 75 bp, synthetic construct
  source 1..75: mol_type = other DNA
ttgagaatgtgtcacttgttagctccaggcgtcgagtaaaaccaaataatgaaatacctatttacggcgtgttta

SEQ ID NO: 445698 - DNA, 75 bp, synthetic construct
  source 1..75: mol_type = other DNA
atgacaaccttttcgcatagctccaccacaccttctgtttccgcaactactgtatcagggaataaccagtctcaa

SEQ ID NO: 445699 - DNA, 75 bp, synthetic construct
  source 1..75: mol_type = other DNA
ggtatccatccacaaaatcacctggccggttacagcggtgtgcttcaggccgatgcttacggtggttaccgggtg

SEQ ID NO: 445700 - DNA, 75 bp, synthetic construct
  source 1..75: mol_type = other DNA
ttggttgccactcccgtccctgatgaacagcgaatcagcttctggccgcagcattttggcctcattccacagtgg

SEQ ID NO: 445701 - DNA, 75 bp, synthetic construct
  source 1..75: mol_type = other DNA
atgaaaatcattacccgtggtgaagccatgcgtattcaccaacagcatcctgcatcccgtctttttccgttctgc

SEQ ID NO: 445702 - DNA, 75 bp, synthetic construct
  source 1..75: mol_type = other DNA
aataccgctggcacggtagcacggatacgtataccggccgtgaagtgcaggatattcccggtgtgctggccgtgt

SEQ ID NO: 445703 - DNA, 75 bp, synthetic construct
  source 1..75: mol_type = other DNA
gtatctggaatctgtacactctgaacaacggcggggcatttatggcgcccgaaccggatgacgatgatgtcgaaa

SEQ ID NO: 445704 - DNA, 75 bp, synthetic construct
  source 1..75: mol_type = other DNA
ctggccgtgtttgccgaacgccgtaaggacagttttggcccgtatgtccggctgatgagcgtcacactgaactga

SEQ ID NO: 445705 - DNA, 75 bp, synthetic construct
  source 1..75: mol_type = other DNA
gcagaagtccggggatgttcagcaaaacagcgtctggcagcaagaaaagccagagctgcgccactgatgcagtca

SEQ ID NO: 445706 - DNA, 75 bp, synthetic construct
  source 1..75: mol_type = other DNA
tccggggatgttcagcagaacagcgtctggcggcaagaaaagccagagccgcgccactgatgcagtcactgtatg

SEQ ID NO: 445707 - DNA, 75 bp, synthetic construct
  source 1..75: mol_type = other DNA
ttgataaaatgcaaaagatttttttagcattgaatgaatttaaggaaagaacggaaataaattacagggattata

SEQ ID NO: 445708 - DNA, 75 bp, synthetic construct
  source 1..75: mol_type = other DNA
gatgtagttcaaaatatcagtcgttggctaaaagaaaatcaacttatggtggaagctattaagaaaactgatact

SEQ ID NO: 445709 - DNA, 75 bp, synthetic construct
  source 1..75: mol_type = other DNA
ctgacagaagttgcgtgctgggcccatgcccgcaggggcttcgccgacctgtataaaatcagtaaagatccacgg

SEQ ID NO: 445710 - DNA, 75 bp, synthetic construct
  source 1..75: mol_type = other DNA
atccgacatcccgtctttttccgttctgtaccggtaagtatcgctggcacggcagtgctgaagcgtatactggtc

SEQ ID NO: 445711 - DNA, 75 bp, synthetic construct
  source 1..75: mol_type = other DNA
gtatctggaatctgtacacgctgaacaacggcggggcatttatggcccccgaaccggatgacgatgatgccgaaa

SEQ ID NO: 445712 - DNA, 75 bp, synthetic construct
  source 1..75: mol_type = other DNA
gtatctggaatctgtacaccctgaacaacggcggggcatttatggcacccgaaccggatgacgatgatgacgaaa

SEQ ID NO: 445713 - DNA, 75 bp, synthetic construct
  source 1..75: mol_type = other DNA
atgagttcgccggaatattacggaatattacgtatgtgctgatgcccggtaaagtccatgccgatgatatccccg

SEQ ID NO: 445714 - DNA, 75 bp, synthetic construct
  source 1..75: mol_type = other DNA
tgctatttcaaacagcaaaacatttcacttccactttgattttaatgatttgcgaaatatttacaaagaatataa

SEQ ID NO: 445715 - DNA, 75 bp, synthetic construct
  source 1..75: mol_type = other DNA
ttttgtgacggaacctggtgataaagttgagatgtttaatagaattaaatctctcgccaatgaagatcaacaatg

SEQ ID NO: 445716 - DNA, 75 bp, synthetic construct
  source 1..75: mol_type = other DNA
tggaagaagcgcttcaggactatgtgctgactgacggtaagctccatgctgatgacacgcctgtcccggtgctgt

SEQ ID NO: 445717 - DNA, 75 bp, synthetic construct
  source 1..75: mol_type = other DNA
gtgtcagagcaactggagcttatcagcagcgcctttaaggttatcgaaatacaacgtccgaaactggcctgttgc

SEQ ID NO: 445718 - DNA, 75 bp, synthetic construct
  source 1..75: mol_type = other DNA
cacagcgggtggcggcttatgcttctgaaatcaaccggctgaaggcgctggttgcgaaactgcagcgtatgcagt

SEQ ID NO: 445719 - DNA, 75 bp, synthetic construct
  source 1..75: mol_type = other DNA
tcgtcatctcctccggcggtctggttcgcgtactcgccgaaccggcaggggaaacacccggagcaacacctccgc

SEQ ID NO: 445720 - DNA, 75 bp, synthetic construct
  source 1..75: mol_type = other DNA
cctagccggttacagcggtgtgcttcaggcagatgcttacggtggttaccgggcgttatacgaatccggcagaat

SEQ ID NO: 445721 - DNA, 75 bp, synthetic construct
  source 1..75: mol_type = other DNA
ttctgagcgtactgccggaatggccctccaaccgtgttgacgaactcctgccatggaacgtagttctcaccaata

SEQ ID NO: 445722 - DNA, 75 bp, synthetic construct
  source 1..75: mol_type = other DNA
tttccgttctgtaccggtaaataccgctggcacggcagtgctgaagcgtataccggtcgtgaagtgcaggatatt

SEQ ID NO: 445723 - DNA, 75 bp, synthetic construct
  source 1..75: mol_type = other DNA
agtctgtctcggaaggaaaactttatgtctttggcagcgatcacggcggcgagcgtggagcactgttgtacgggc

SEQ ID NO: 445724 - DNA, 75 bp, synthetic construct
  source 1..75: mol_type = other DNA
attaccggagtcagagcgtcttgccgtcaggcagcagcgaagcaaagtgttactgacgtcgctgcatgaatggat

SEQ ID NO: 445725 - DNA, 75 bp, synthetic construct
  source 1..75: mol_type = other DNA
tcagggaatgaccagcctcagttggttgccaccatagtccctgatgaacagcgcatcagcttctggccgcagcat

SEQ ID NO: 445726 - DNA, 75 bp, synthetic construct
  source 1..75: mol_type = other DNA
cattccacagtgggtgacctggagccccgtgtcttcggctggatggaccgtctgtgcgaaaactactgcggtggt

SEQ ID NO: 445727 - DNA, 75 bp, synthetic construct
  source 1..75: mol_type = other DNA
cctgcaggcggatgcgttcacaggttatgacaggctgttcagtgcagaacgtgaaggtagtgcgctgacagaagt

SEQ ID NO: 445728 - DNA, 75 bp, synthetic construct
  source 1..75: mol_type = other DNA
aaagaccagcaactgagtctggttgaggagacggaggccttcctgcgctctgcactggcacgtgccgaagaaaag

SEQ ID NO: 445729 - DNA, 75 bp, synthetic construct
  source 1..75: mol_type = other DNA
tgaagcaccggcaccgtcccgcccgatagagcgtggtattgcgggccccggattacttgcccgcgtgttaacggg

SEQ ID NO: 445730 - DNA, 75 bp, synthetic construct
  source 1..75: mol_type = other DNA
atgacgaaacatgggtgctgtttaacgtcatgaacggtaaccgcgctgaaatgagcccggaagccgccggcattg

SEQ ID NO: 445731 - DNA, 75 bp, synthetic construct
  source 1..75: mol_type = other DNA
agaccatctgccgttataccgccagtcagagatataccgccgtcagggtgtggagctgagccgtgccacgctggg

SEQ ID NO: 445732 - DNA, 75 bp, synthetic construct
  source 1..75: mol_type = other DNA
cgtctgtgcgctgattacagcggcggcgtctggagcttttacacactcagcaacggcggcgcatttatggctccg

SEQ ID NO: 445733 - DNA, 75 bp, synthetic construct
  source 1..75: mol_type = other DNA
tacaccctgaacaacggtggcgcatttatagcacctgaaccggatgacgatgatgacgaaaactgggtactgttc

SEQ ID NO: 445734 - DNA, 75 bp, synthetic construct
  source 1..75: mol_type = other DNA
tgctgcctgtctgatgacgtacagccatcatgcctgtcgtacggagtgttatgccatgacggtccattattaccg

SEQ ID NO: 445735 - DNA, 75 bp, synthetic construct
  source 1..75: mol_type = other DNA
cgatgaccatataccgtcagcatccggcctcccgcatttttcgctactgcaccggcagataccagtggcatggca

SEQ ID NO: 445736 - DNA, 75 bp, synthetic construct
  source 1..75: mol_type = other DNA
acaataacacagcggaaagagcgcttcgtgcagtctgtcttggaaagaaaaattacgtgttcttcggtagcgatc

SEQ ID NO: 445737 - DNA, 75 bp, synthetic construct
  source 1..75: mol_type = other DNA
aaagcctgtacaaaatgtgactgtattgttgaagcaccggcgccgtcccgcccgatagagcgtggtatcgtgggc

SEQ ID NO: 445738 - DNA, 75 bp, synthetic construct
  source 1..75: mol_type = other DNA
aaatgagcccggaagccgccggcattgccgcctgtctgatgacgtacagtcatcacgcctgtcgtacggagtgtt

SEQ ID NO: 445739 - DNA, 75 bp, synthetic construct
  source 1..75: mol_type = other DNA
accggctgaaggcgctggttgcaaaactgcagcgcatgcagttcggtaaaagctcagaaaaacttcgcgcaaaaa

SEQ ID NO: 445740 - DNA, 75 bp, synthetic construct
  source 1..75: mol_type = other DNA
atgtccgggatgaccggaatgccggttcgccagaacccccggcggtctggttcgcctactcaccggatcatcagg

SEQ ID NO: 445741 - DNA, 75 bp, synthetic construct
  source 1..75: mol_type = other DNA
atctggacgtatgtccgggatgaccggaatgcgggctcatcagagctaccggcggtctggttcgcctactcacca

SEQ ID NO: 445742 - DNA, 75 bp, synthetic construct
  source 1..75: mol_type = other DNA
gcagaagtccggggatgttcagcagaacagcgtctggcggcaagaaaagccagagctgcgccactgatgcagtca

SEQ ID NO: 445743 - DNA, 75 bp, synthetic construct
  source 1..75: mol_type = other DNA
gccatatcctgagcgtactgccggaatggccttccaaccgagttgatgaactcctgccatggaacttagtactca

SEQ ID NO: 445744 - DNA, 75 bp, synthetic construct
  source 1..75: mol_type = other DNA
cgattactgaccgcagacgcgtcaccctgcttgctgacgggcagcgttgtgagcgactggccccgtgccggttac

SEQ ID NO: 445745 - DNA, 75 bp, synthetic construct
  source 1..75: mol_type = other DNA
cagagctgcgccactgatgcagtcactgtatgactggatacagactcagatgaaaacactgtcgcgtcactcgat

SEQ ID NO: 445746 - DNA, 75 bp, synthetic construct
  source 1..75: mol_type = other DNA
tgctcattattagctccttctgatgccattctatttcaggaaggagtgtccgttaaactcaggctacctcaaaac

SEQ ID NO: 445747 - DNA, 75 bp, synthetic construct
  source 1..75: mol_type = other DNA
cggaccggaaaggtatccatccacaaaatcatctggccggttacagcggtgtgcttcaggccgatgcttacggtg

SEQ ID NO: 445748 - DNA, 75 bp, synthetic construct
  source 1..75: mol_type = other DNA
aactgtacgtcatcgagcacgaaatacgcgggttgccggtgtctgaacgcctggcggtcaggcaaatgcagagta

SEQ ID NO: 445749 - DNA, 75 bp, synthetic construct
  source 1..75: mol_type = other DNA
cggggtatcctgcaggcagatgcgtttaatggttacgatcggctgttcagtgccgaacgtgaaggcggcgcgttg

SEQ ID NO: 445750 - DNA, 75 bp, synthetic construct
  source 1..75: mol_type = other DNA
actgtatcgtcagagtgaaatctttgcccgacagggtgtcgaactgagccgtgcattactctccaactgggttga

SEQ ID NO: 445751 - DNA, 75 bp, synthetic construct
  source 1..75: mol_type = other DNA
gtgggatgccctctgttattacagtgatgacggtctagcggaggcggataataatgctgcggaaagagcgcttcg

SEQ ID NO: 445752 - DNA, 75 bp, synthetic construct
  source 1..75: mol_type = other DNA
aagcgttcagctatgtcctgaatcagtgggacgccctctgttattacagtgatgacggtctggcggaggcggaca

SEQ ID NO: 445753 - DNA, 75 bp, synthetic construct
  source 1..75: mol_type = other DNA
tgcagtctgtctcggaaagaaaaattctacgtgttcttcggtagcgatcacggcggcgagcgtggagcactgctg

SEQ ID NO: 445754 - DNA, 75 bp, synthetic construct
  source 1..75: mol_type = other DNA
ccatgcatattcaccgtcagcatcctgcatcccgtctttttccgttctgtaccggtaaataccgctggcacggta

SEQ ID NO: 445755 - DNA, 75 bp, synthetic construct
  source 1..75: mol_type = other DNA
aacagcgcatcagcttctggccgcagcattttggcctcattccacagtgggtcaccctggaaccccgtgtcttcg

SEQ ID NO: 445756 - DNA, 75 bp, synthetic construct
  source 1..75: mol_type = other DNA
tatggcaaaagcgttcgcatatctgctgaaacagtgggatagcctgagcgtgtactgcagtaatggctgggtgga

SEQ ID NO: 445757 - DNA, 75 bp, synthetic construct
  source 1..75: mol_type = other DNA
ccgtctgaacaatgtggagccagaaaagtggctgcgttacgtcattgaacatatccaggactggccggcaaaccg

SEQ ID NO: 445758 - DNA, 75 bp, synthetic construct
  source 1..75: mol_type = other DNA
gcatcagcttctggccgcagcattttggcctcattccacagtgggtgaccctggagccccgcgtcttcggctgga

SEQ ID NO: 445759 - DNA, 75 bp, synthetic construct
  source 1..75: mol_type = other DNA
atgccatgacggtccactattaccggttgcgggattacgccctgcagcatccggaatgcagcgccattatgcgca

SEQ ID NO: 445760 - DNA, 75 bp, synthetic construct
  source 1..75: mol_type = other DNA
aacggcggggcatttatggcccccgaaccggatgacgatgatggcgaaaactgggtactgttcaatgccatgaac

SEQ ID NO: 445761 - DNA, 75 bp, synthetic construct
  source 1..75: mol_type = other DNA
ccggtattgccgcctgtctgataacgtacagccatcatgcctgtcgtacggagaattatgccatgacggtccatt

SEQ ID NO: 445762 - DNA, 75 bp, synthetic construct
  source 1..75: mol_type = other DNA
ctgtatcgtcagagtgaaatctttgcccgacagggtgtcgaactgagccgtgcattactctccaactgggttgac

SEQ ID NO: 445763 - DNA, 75 bp, synthetic construct
  source 1..75: mol_type = other DNA
tggcctgcaacaactggttgccaccatagtccctgatgaacagcgcatcaggttctggccgcagcattttggcct

SEQ ID NO: 445764 - DNA, 75 bp, synthetic construct
  source 1..75: mol_type = other DNA
tcagcgttggcacctgcagtgtggttcgcttacagcctggacagaaaaggcatccatccgcagactcatcttgct

SEQ ID NO: 445765 - DNA, 75 bp, synthetic construct
  source 1..75: mol_type = other DNA
cctgagcgtactgccggaatggccttccaaccgagttgacgaactcctgccatggaacgtagtactcactaataa

SEQ ID NO: 445766 - DNA, 75 bp, synthetic construct
  source 1..75: mol_type = other DNA
ggcgagcgtggagcactgttgtacgggctgatcggcacctgccgtctgaacggtatcgatccggaagcgtatctg

SEQ ID NO: 445767 - DNA, 75 bp, synthetic construct
  source 1..75: mol_type = other DNA
gggtagcctggtgtttggcttgctgacgtacctgacaaacctttatttcaagattaaagaagacaggcgtaaggc

SEQ ID NO: 445768 - DNA, 75 bp, synthetic construct
  source 1..75: mol_type = other DNA
acctacctgaccaatctctatttcaaaatcaaagaagaccgtcgcaaagaggctcaactctatgaccagcaacag

SEQ ID NO: 445769 - DNA, 75 bp, synthetic construct
  source 1..75: mol_type = other DNA
ggggagtctgctgtttgggctgctgacatacctgacgaacctgtatttcaagattaaagaagaccggcgtaaggc

SEQ ID NO: 445770 - DNA, 75 bp, synthetic construct
  source 1..75: mol_type = other DNA
accacgtcagcggtgggaacgggctactggttcctgcagttgctggacagggtttccccgtctcagtgggcggca

SEQ ID NO: 445771 - DNA, 75 bp, synthetic construct
  source 1..75: mol_type = other DNA
cacagtgggctgcaatcggtgtgctgggtagcctggtatttggcctgctgacgtacctgacaaacctttatttca

SEQ ID NO: 445772 - DNA, 75 bp, synthetic construct
  source 1..75: mol_type = other DNA
gtggggacgggatactggttactgcagctgctggacaaagtctctccgtcccagtgggtggcaatcggtgtgctg

SEQ ID NO: 445773 - DNA, 75 bp, synthetic construct
  source 1..75: mol_type = other DNA
gggaagtctgcttctggggcttctgacttatctgacgaatctgtatttcaaaataagagaagacaagcgtaaggc

SEQ ID NO: 445774 - DNA, 75 bp, synthetic construct
  source 1..75: mol_type = other DNA
cgggcattgcctacggcacctccgccggcagtgccggctactggtttttgcagtggttggatcaggtcaggccat

SEQ ID NO: 445775 - DNA, 75 bp, synthetic construct
  source 1..75: mol_type = other DNA
aagtctctccgtcccagtgggtggcaataggtgtgctgggaagtctgctgtttggcctgctgacgtatctgacta

SEQ ID NO: 445776 - DNA, 75 bp, synthetic construct
  source 1..75: mol_type = other DNA
ttactttcattttctgtcggcggtgacggagacatacatcagatggaaaaaatcacaacgggtgtgtcatacacc

SEQ ID NO: 445777 - DNA, 75 bp, synthetic construct
  source 1..75: mol_type = other DNA
ggtatttggcttgctgacgtacctgacaaacctttatttcaagataaaagaagacaagcgtaaggctgcgagagg

SEQ ID NO: 445778 - DNA, 75 bp, synthetic construct
  source 1..75: mol_type = other DNA
tgctggggagtctgctgtttggcctgctgacgtatctgactaacctgtatttcaaaatcagagaggaccgtcgta

SEQ ID NO: 445779 - DNA, 75 bp, synthetic construct
  source 1..75: mol_type = other DNA
tcatacaccacgtcagcggtggggacgggatactggttactgcagctgctggacaaagtctctccgtcccagtgg

SEQ ID NO: 445780 - DNA, 75 bp, synthetic construct
  source 1..75: mol_type = other DNA
ggcatcccgtctttttccgttctgcacaggtaagtaccgctggcacggcagcactgaagcgtataccggtcatga

SEQ ID NO: 445781 - DNA, 75 bp, synthetic construct
  source 1..75: mol_type = other DNA
aggtagtgccggttactggtttttacagctgctcgataaagtcacgccctcacagtgggcggcaataggtgtgct

SEQ ID NO: 445782 - DNA, 75 bp, synthetic construct
  source 1..75: mol_type = other DNA
tggtttctgggcattgcagttactcgataaagtaactccgtcacagtgggctgcaatcggtgtgctgggtagcct

SEQ ID NO: 445783 - DNA, 75 bp, synthetic construct
  source 1..75: mol_type = other DNA
atccaggccacctgtgacctgaccttcaccgggctggaaggtggtctgggtaactacagctactctctgggctca

SEQ ID NO: 445784 - DNA, 75 bp, synthetic construct
  source 1..75: mol_type = other DNA
agatagatagtttcccatttaatcatttcttttgtgattcctgtattagttctaatgtcaccgaggatattttgg

SEQ ID NO: 445785 - DNA, 75 bp, synthetic construct
  source 1..75: mol_type = other DNA
gaccaatatgaatttagtttatatgatgcgaatttaccagatgagattcttttcctcaaggaagattttttttgt

SEQ ID NO: 445786 - DNA, 75 bp, synthetic construct
  source 1..75: mol_type = other DNA
actggggagtctgctgtttggcctgctgacgtatctgactaacctgtatttcaaaatcagggaggaccgccgtaa

SEQ ID NO: 445787 - DNA, 75 bp, synthetic construct
  source 1..75: mol_type = other DNA
atgaaatccatggacaaaatttcaacgggcattgcctatggcacctccgcaggcagtgctggctactggttttta

SEQ ID NO: 445788 - DNA, 75 bp, synthetic construct
  source 1..75: mol_type = other DNA
cgggatactggttactgcagctgctggacaaagtctctccgtcccagtgggtggcaataggtgtgctggggagtc

SEQ ID NO: 445789 - DNA, 75 bp, synthetic construct
  source 1..75: mol_type = other DNA
ttttacctttcagttatcgccgatgccccgtcttcacaggcattaacccatctggtgggcggcctttgctttaca

SEQ ID NO: 445790 - DNA, 75 bp, synthetic construct
  source 1..75: mol_type = other DNA
cagcttctgcctttagaagagcagctggaaaaactgatcgcgctgttttacggcgactggggatttaaagcctca

SEQ ID NO: 445791 - DNA, 75 bp, synthetic construct
  source 1..75: mol_type = other DNA
acgagtgagtttgtcgcctggctgaaagaaaagggggcatttgaccagccttactggatgatgaaggcatcactg

SEQ ID NO: 445792 - DNA, 75 bp, synthetic construct
  source 1..75: mol_type = other DNA
ctggggagtctgctgtttgggctgctgacatatctgacgaacctgtatttcaagattaaagaagaccggcgtaag

SEQ ID NO: 445793 - DNA, 75 bp, synthetic construct
  source 1..75: mol_type = other DNA
tggtcagggcggaatggggacaaaatcccacgatattttcacgctaccgttgtgccgggagcaccacaacgaact

SEQ ID NO: 445794 - DNA, 75 bp, synthetic construct
  source 1..75: mol_type = other DNA
gcccacgatattttcacgttaccgttgtgtcgtaaacatcataacgagcttcatgcagatccgttggcgttcgaa

SEQ ID NO: 445795 - DNA, 75 bp, synthetic construct
  source 1..75: mol_type = other DNA
cacgcgctgggtaaaaacgcagaaatgcatgacgtgcggtaatcaggcagatgatccgcatcacatcattggtca

SEQ ID NO: 445796 - DNA, 75 bp, synthetic construct
  source 1..75: mol_type = other DNA
ccgcaatgaggctgtgatccgtcgggcggggggcgtggaatgccttgagagctggttacttcgtgaaacaggctg

SEQ ID NO: 445797 - DNA, 75 bp, synthetic construct
  source 1..75: mol_type = other DNA
cagatatttcataatcctcgagtgctggtggaaccggaaccaaaaagcatgcgtaatctgccatccggagtcgtt

SEQ ID NO: 445798 - DNA, 75 bp, synthetic construct
  source 1..75: mol_type = other DNA
gtgcgggtattacttcgacctgttctggttccggaactcgggctggtggtccttaagcccggtcgtgaatccatg

SEQ ID NO: 445799 - DNA, 75 bp, synthetic construct
  source 1..75: mol_type = other DNA
agtctccggaatctttcatgaagctgcctaaacgtcgccgctgggttaaggagaaatacacacgttgggttaaga

SEQ ID NO: 445800 - DNA, 75 bp, synthetic construct
  source 1..75: mol_type = other DNA
cggggtaaaagattttgaagaaaaacacggcagccagctgttgttgctgattcgttttttaatgcacgcgagaaa

SEQ ID NO: 445801 - DNA, 75 bp, synthetic construct
  source 1..75: mol_type = other DNA
catcacagcgaaaccgtcattcaccgttatggtaccggcgcgatggtgttgtgctggcactgcgacaaccagctg

SEQ ID NO: 445802 - DNA, 75 bp, synthetic construct
  source 1..75: mol_type = other DNA
cctcacacccaccagcaacagaacccaccacaggaaaagacggtggtcagcattgccgttgatccggaatctccg

SEQ ID NO: 445803 - DNA, 75 bp, synthetic construct
  source 1..75: mol_type = other DNA
ggaatgggtacaaaagcgcatgacctctttgtgttgcctttgtgcagaaagcatcacgacgagctgcatgcagat

SEQ ID NO: 445804 - DNA, 75 bp, synthetic construct
  source 1..75: mol_type = other DNA
tcatgcggatccgctggcgttcgaagaaaagcatggttcccagattgatttaatttttcgttttcttgatcgcgc

SEQ ID NO: 445805 - DNA, 75 bp, synthetic construct
  source 1..75: mol_type = other DNA
gtggaaagccagccgatgatccgcatcatctgattggtcacggtcagggtggtatggggacaaaagcgcatgacc

SEQ ID NO: 445806 - DNA, 75 bp, synthetic construct
  source 1..75: mol_type = other DNA
tggcagcctggtgttcgggctgctgacgtatctgacaaacctgtatttcaaaatcaaagaggaccggcgcaaagc

SEQ ID NO: 445807 - DNA, 75 bp, synthetic construct
  source 1..75: mol_type = other DNA
aggcagtgctggctactggtttttacagtggcttgatcaggtcagtccgtcacagtgggcggcaattggtgtact

SEQ ID NO: 445808 - DNA, 75 bp, synthetic construct
  source 1..75: mol_type = other DNA
gggaagtctagttctgggctttttgacttatctgacaaatctgtacttcaaaatcagagaagacagaagaaaggc

SEQ ID NO: 445809 - DNA, 75 bp, synthetic construct
  source 1..75: mol_type = other DNA
attcccggggcggttcaggcagcaataggtgtgctgggtagcctggtatttggcctgctgacgtacctgacaaac

SEQ ID NO: 445810 - DNA, 75 bp, synthetic construct
  source 1..75: mol_type = other DNA
ggtttttggcctgctgacgtatctgacaaatctttatttcaagattaaagaagacaggcgtaaggctgcgagatg

SEQ ID NO: 445811 - DNA, 75 bp, synthetic construct
  source 1..75: mol_type = other DNA
atggataagttaacaacaggtgttgcctatggcacatcggcgggtaatgctggtttctgggcattgcagttactc

SEQ ID NO: 445812 - DNA, 75 bp, synthetic construct
  source 1..75: mol_type = other DNA
tactggtttttacagttgctcgatagagtaactccgtcacagtgggctgcaatcggtgtgctgggtagtctggta

SEQ ID NO: 445813 - DNA, 75 bp, synthetic construct
  source 1..75: mol_type = other DNA
ttgcgctgctatggcggcactcaaacgctgaagtcgcggagattactggccgcagcattaaagaagtcggagata

SEQ ID NO: 445814 - DNA, 75 bp, synthetic construct
  source 1..75: mol_type = other DNA
atgaaatcaatggacaaaatctctactggcattgcctacggaacatccgctggtagtgctggctactggttttta

SEQ ID NO: 445815 - DNA, 75 bp, synthetic construct
  source 1..75: mol_type = other DNA
atggacaaaatttcaacgggcattgcctacggcacctccgcaggcagtgctggctactggtttttacagtggctt

SEQ ID NO: 445816 - DNA, 75 bp, synthetic construct
  source 1..75: mol_type = other DNA
atcaccggtaggttcaccgggaaatttcacggggtatgccctttcagaaccgttgctgaagtcggtaatactgac

SEQ ID NO: 445817 - DNA, 75 bp, synthetic construct
  source 1..75: mol_type = other DNA
ggggagtctgctgtttgggctgctgacatatctgacgaacctgtatttcaaaatcaaagaggaccggcgtaaggc

SEQ ID NO: 445818 - DNA, 75 bp, synthetic construct
  source 1..75: mol_type = other DNA
ttatcggcacttgccttctgaacgacattgatccggaagcgtatctgcgccatatactgagcatactgccggaat

SEQ ID NO: 445819 - DNA, 75 bp, synthetic construct
  source 1..75: mol_type = other DNA
aacaacattgcagagaacaccttacggggagtggccgtaggccggaaaaactggctctcaatttgttcattgatt

SEQ ID NO: 445820 - DNA, 75 bp, synthetic construct
  source 1..75: mol_type = other DNA
gacggtctggcggaggcggataataatgctgcggaaagagcgcttcgtgcagtctgtctcggaaagaaaaacttt

SEQ ID NO: 445821 - DNA, 75 bp, synthetic construct
  source 1..75: mol_type = other DNA
ttatcggcacttgccttctgaacgacattgatccggaagcgtatctgcgccatatgctgagcgtactgccggaat

SEQ ID NO: 445822 - DNA, 75 bp, synthetic construct
  source 1..75: mol_type = other DNA
ttatcggcacttgccttctgaacgacattgatccggaagcgtatctgcgccatatcctgagcctactgccggaat

SEQ ID NO: 445823 - DNA, 75 bp, synthetic construct
  source 1..75: mol_type = other DNA
ttatcggcacttgccttctgaacgacattgatccggaagcgtatctgcgccatattctgagcttactgccggaat

SEQ ID NO: 445824 - DNA, 75 bp, synthetic construct
  source 1..75: mol_type = other DNA
aggccaccgtgtcgttcgggggcaaactggacagttcgtggcgtcgttcggcgacggatctgcgaaaaaatctgc

SEQ ID NO: 445825 - DNA, 75 bp, synthetic construct
  source 1..75: mol_type = other DNA
ttatgtgatgaacacccgcaaggttcacactgatgacacaccagtaaaagtactggcaccgggcaggaagaaggc

SEQ ID NO: 445826 - DNA, 75 bp, synthetic construct
  source 1..75: mol_type = other DNA
tatctgcgccatattctgagcgtactgccggaatggccttccaaccgagttgacgaactcctgccatggaacgta

SEQ ID NO: 445827 - DNA, 75 bp, synthetic construct
  source 1..75: mol_type = other DNA
ccgcaggttccccgccagctgcgacagtcacgccatcgtcgtccgttaccggagcatctgccccgcgaaataaac

SEQ ID NO: 445828 - DNA, 75 bp, synthetic construct
  source 1..75: mol_type = other DNA
cggctgtgggtctacgtccgtgatgaccggaatgctggttcgccagaacctccggcggtctggttcgcctactca

SEQ ID NO: 445829 - DNA, 75 bp, synthetic construct
  source 1..75: mol_type = other DNA
aagcactgaaactaatcggcgaactgtacgccattgagcacgaaatacgcgggttgccggtgtctgaacgcctgg

SEQ ID NO: 445830 - DNA, 75 bp, synthetic construct
  source 1..75: mol_type = other DNA
agcgtggagcactgttgtacgggctgatcggcacctgccgtctgaacggtatcgatccggaagcgtatctgcgcc

SEQ ID NO: 445831 - DNA, 75 bp, synthetic construct
  source 1..75: mol_type = other DNA
atatccccgttccggtccaggagccgggcagtggtaaaacaagaactgcccggctgtggtctatgtccgtgatga

SEQ ID NO: 445832 - DNA, 75 bp, synthetic construct
  source 1..75: mol_type = other DNA
gatttattctctagcattgaacaatatttacagacagtaattgagaagaacaatagctataataaggaaaattat

SEQ ID NO: 445833 - DNA, 75 bp, synthetic construct
  source 1..75: mol_type = other DNA
gatggcgtacagtcatcacgcctgtcgtacagagtgttatgccatgacggtccactattaccgtctgcgggatta

SEQ ID NO: 445834 - DNA, 75 bp, synthetic construct
  source 1..75: mol_type = other DNA
tttgatgagaaggcttttcaatcagggatgttgaaaatgcagttcccaaatgataatgaaaagcttagcgtatat

SEQ ID NO: 445835 - DNA, 75 bp, synthetic construct
  source 1..75: mol_type = other DNA
tcggtaaaagctcagaaaaacttcgcgcaaaaaacgaacggcagatacaggatgcacaggaacgaatcagcgcac

SEQ ID NO: 445836 - DNA, 75 bp, synthetic construct
  source 1..75: mol_type = other DNA
cttatcagcagcgcctttaaggttatcgaaacacaacatccgaaactggcctgttgccggtgcgaccatatcgtg

SEQ ID NO: 445837 - DNA, 75 bp, synthetic construct
  source 1..75: mol_type = other DNA
gctggatggaccgtctgtgcgaaaactactgcggtggtatctggaatctatacaccctgaacaacggcggggcat

SEQ ID NO: 445838 - DNA, 75 bp, synthetic construct
  source 1..75: mol_type = other DNA
gcctgtgcaccggagactgacctgcaaaaactggtagccactcccgtccctgatgaacggcgcatcagcttctgg

SEQ ID NO: 445839 - DNA, 75 bp, synthetic construct
  source 1..75: mol_type = other DNA
acgcccgcctgcgggcactgttgcaggcgcaacaggacaccatccgccagatggccgaatacaattgcctgctct

SEQ ID NO: 445840 - DNA, 75 bp, synthetic construct
  source 1..75: mol_type = other DNA
atgggtactgttcaatgccatgaacggcaaccgcgctgaaatgagcccggaagccgctggcattgctgcctgtct

SEQ ID NO: 445841 - DNA, 75 bp, synthetic construct
  source 1..75: mol_type = other DNA
catgaacggtaaccgcgctgaaatgagcccggaagccgccggcattgccgcctgtctgatgacgtacagccatca

SEQ ID NO: 445842 - DNA, 75 bp, synthetic construct
  source 1..75: mol_type = other DNA
gcccggcagtacgatatgaatgccgaaaatattggtgacctttttgaggagtatctgcacaaagcgggtgagtat

SEQ ID NO: 445843 - DNA, 75 bp, synthetic construct
  source 1..75: mol_type = other DNA
gcagcagaaatgaaacgggcggcgctggcagggaaacgttttaagtcgatggaggatgaatacgcccggctcacg

SEQ ID NO: 445844 - DNA, 75 bp, synthetic construct
  source 1..75: mol_type = other DNA
aattgatgagttagggattgaggataataactttggcccagctacgaatgagttatttgatgaaaagatggatat

SEQ ID NO: 445845 - DNA, 75 bp, synthetic construct
  source 1..75: mol_type = other DNA
atgacaaccgtcttgcataattccaccactccttctgtttccgtaaccgctgcatcagggaatgaccagtctcag

SEQ ID NO: 445846 - DNA, 75 bp, synthetic construct
  source 1..75: mol_type = other DNA
aaccgcgctgaaatgagtccggaagctgccggcattgctgcctgtctgatgacgtacagtcatcatgcctgtcgt

SEQ ID NO: 445847 - DNA, 75 bp, synthetic construct
  source 1..75: mol_type = other DNA
tggaccgtctgtgcgaagactactgcggaggcatctggaatctgtacaccctgaacaacggaggcgcatttatgg

SEQ ID NO: 445848 - DNA, 75 bp, synthetic construct
  source 1..75: mol_type = other DNA
tggaccgtctgtgcgaagactactgcggaggaatctggaatctgtacaccctgaacaacggcggggcatttatgg

SEQ ID NO: 445849 - DNA, 75 bp, synthetic construct
  source 1..75: mol_type = other DNA
aaaattggtcaattggatataaggagccaattgacttatggggggagaaaaaagcccgtaaaaaacatgaagctg

SEQ ID NO: 445850 - DNA, 75 bp, synthetic construct
  source 1..75: mol_type = other DNA
aacggcggggcatttatggcccctgaaccggatgactatgatgacgaaacatgggtactgttcaatgccatgaac

SEQ ID NO: 445851 - DNA, 75 bp, synthetic construct
  source 1..75: mol_type = other DNA
cgtccgaaacaggcctgttgccggtgcgaccatatcgtgcaggcaccagtaccttcaaaacccattgcacgcagt

SEQ ID NO: 445852 - DNA, 75 bp, synthetic construct
  source 1..75: mol_type = other DNA
ggggagtggtcgtaggccggaaaaactggctcttcgtgggttccgacagcggtggcgaacatgcggcggtgttgt

SEQ ID NO: 445853 - DNA, 75 bp, synthetic construct
  source 1..75: mol_type = other DNA
gtaaagtggaaaagctgcttacgctcagccagtccgtacaaaccaagcgcctgtatctgtttttcgccagtttct

SEQ ID NO: 445854 - DNA, 75 bp, synthetic construct
  source 1..75: mol_type = other DNA
tcgggcaaccgacaaatcgttgttaatggcaagctgaacacgcaataccagataactgtgcccgaaaattttact

SEQ ID NO: 445855 - DNA, 75 bp, synthetic construct
  source 1..75: mol_type = other DNA
gagtacagccctgactgcttcagtgcggaccggtacgctggtcggaaataacagtgtccggatgctggttgatgg

SEQ ID NO: 445856 - DNA, 75 bp, synthetic construct
  source 1..75: mol_type = other DNA
tggaccgtctgtgcgaagactactgcggagggatctggaatctgtacaccctgaacaacggcggagcatttatgg

SEQ ID NO: 445857 - DNA, 75 bp, synthetic construct
  source 1..75: mol_type = other DNA
tgacatcctgcgccagtatgtactgatgcccggtaaagtccatgccgatgatatccccgtcccggtccaggagcc

SEQ ID NO: 445858 - DNA, 75 bp, synthetic construct
  source 1..75: mol_type = other DNA
gtctggttcgcgtactcaccggaccggaaaggtatccatccacaaaatcatctggccggttacagcggtgtgctt

SEQ ID NO: 445859 - DNA, 75 bp, synthetic construct
  source 1..75: mol_type = other DNA
gtaaagtccatgccgatgatatccccgttccggtccaggagccgggcagtggtaaaacaaggactgcccggctgt

SEQ ID NO: 445860 - DNA, 75 bp, synthetic construct
  source 1..75: mol_type = other DNA
gtttgcgctggatgcattgtttggtggtgaagccagtaaactgctgatgctgatcaaacgctcaggaaaaagctt

SEQ ID NO: 445861 - DNA, 75 bp, synthetic construct
  source 1..75: mol_type = other DNA
atgactccgctgaatgatgccctgtaccgttacgtgatgaacacccgcaaggttcacactgacgacataccagta

SEQ ID NO: 445862 - DNA, 75 bp, synthetic construct
  source 1..75: mol_type = other DNA
acgacaacagacagatcacctgctgagtcggtcattttgaaagacgagagcacgggcggttactgggaaagcctg

SEQ ID NO: 445863 - DNA, 75 bp, synthetic construct
  source 1..75: mol_type = other DNA
cgaaacatgggtactgttcaatgccatgaacggcaaccgcgctgaaatgagcccggaagccgccggcattgctgc

SEQ ID NO: 445864 - DNA, 75 bp, synthetic construct
  source 1..75: mol_type = other DNA
gcatcagcttctggccgcagcagtttggcctcattccacagtgggtgaccctggacccccgtgtcttcggctgga

SEQ ID NO: 445865 - DNA, 75 bp, synthetic construct
  source 1..75: mol_type = other DNA
gcatcagcttctggccgcagcaatttggcctcattccacagtgggtaaccctggagccccgtgtcttcggctgga

SEQ ID NO: 445866 - DNA, 75 bp, synthetic construct
  source 1..75: mol_type = other DNA
actgaaaaagaattcaaccagccatactggcgaattaatgaagagtcatgttactggcgtgatgctttattccgt

SEQ ID NO: 445867 - DNA, 75 bp, synthetic construct
  source 1..75: mol_type = other DNA
ccacaccttctgtttccgtaaccactgcatcagtgaataacccgcctcagctggttgccacttccgtccctgatg

SEQ ID NO: 445868 - DNA, 75 bp, synthetic construct
  source 1..75: mol_type = other DNA
ccgacaattaccgccaaaattcaccatatcgccgcagaaactgagcaggaagcccgccgcattctggcgcgggat

SEQ ID NO: 445869 - DNA, 75 bp, synthetic construct
  source 1..75: mol_type = other DNA
cgcattgagcgacataatctgagacaacatctggcacggctgggacggaagtcgctgtcgttctcaaaatcggtg

SEQ ID NO: 445870 - DNA, 75 bp, synthetic construct
  source 1..75: mol_type = other DNA
cgcatacaaccgggcagtgatgtgattgtctgcgctgaaatggacgaacagtggggctacgtcggtgctaaatca

SEQ ID NO: 445871 - DNA, 75 bp, synthetic construct
  source 1..75: mol_type = other DNA
ttgtctgcgctgaaatggacgaacagtggggctacgtcggtgctaaatcacgtcagcgctggctgttttacgcgt

SEQ ID NO: 445872 - DNA, 75 bp, synthetic construct
  source 1..75: mol_type = other DNA
attgagcggcataacctgaatctgagacaacatctggcaaggctgggacggaagtcactgtcgttctcaaaatcg

SEQ ID NO: 445873 - DNA, 75 bp, synthetic construct
  source 1..75: mol_type = other DNA
gttttacgcgtatgacaggatacggaggacagttgtggcgcacgttttcggtgaacgcactctggccacactggc

SEQ ID NO: 445874 - DNA, 75 bp, synthetic construct
  source 1..75: mol_type = other DNA
cactctggccacactggagcgtcttctaagcctgctgtcggcctttgaggtcgtggtatggatgacggatggctg

SEQ ID NO: 445875 - DNA, 75 bp, synthetic construct
  source 1..75: mol_type = other DNA
ccacactggagcgtcttctgagcctgctgtcggcctttgaggtcgtggtatggatgacggatggctggccgctgt

SEQ ID NO: 445876 - DNA, 75 bp, synthetic construct
  source 1..75: mol_type = other DNA
cgcattgagcgacataatctgaatctgagacaacatccggcaaggctgggacggaagttactgtcgttctcaaaa

SEQ ID NO: 445877 - DNA, 75 bp, synthetic construct
  source 1..75: mol_type = other DNA
cgcgccagtgcacgcattatgggcgttggcctcaacacggttttacatcacttaaaaaactcaggccgcagtcgg

SEQ ID NO: 445878 - DNA, 75 bp, synthetic construct
  source 1..75: mol_type = other DNA
gagcgacataacctgaatctgagactacatctggcaaggctgggcaggaagtcactgtcgttctcaaaatcggtg

SEQ ID NO: 445879 - DNA, 75 bp, synthetic construct
  source 1..75: mol_type = other DNA
ggtgctaaatcacgtcagcgctggctgttttacgcgtatggcaggatacggaggactgttgtggcgcacgtcttc

SEQ ID NO: 445880 - DNA, 75 bp, synthetic construct
  source 1..75: mol_type = other DNA
cgttatcagcaagcattacactcagcgcattgagcgacataatctgaatctgagacaacatctggcaaggctggg

SEQ ID NO: 445881 - DNA, 75 bp, synthetic construct
  source 1..75: mol_type = other DNA
tgcacgttatcagcaagcgttacactcagcgcattgagcgacataatctgaatctgagacaacatctggcaaggc

SEQ ID NO: 445882 - DNA, 75 bp, synthetic construct
  source 1..75: mol_type = other DNA
cgctggctgttttacgcgtatgacaggatacggaggacggttgtggcgcacgtcttcggtgaacgcactctggcc

SEQ ID NO: 445883 - DNA, 75 bp, synthetic construct
  source 1..75: mol_type = other DNA
gtggcgcacgtcttcggtgaacgcactctggccacacaggagcgtcttctgagcctgctgtcggcctttgaggtc

SEQ ID NO: 445884 - DNA, 75 bp, synthetic construct
  source 1..75: mol_type = other DNA
ttcggtgaacgcactctggccacactggagtgtcttctgagcctgctgtcggcctttgaggtcgtggtatggatg

SEQ ID NO: 445885 - DNA, 75 bp, synthetic construct
  source 1..75: mol_type = other DNA
aaggctgggacggaagtcactgtcgttctcaaaatcggtggagttgcatgacaaggtcatcgggcattatctgaa

SEQ ID NO: 445886 - DNA, 75 bp, synthetic construct
  source 1..75: mol_type = other DNA
gtggtatggatgacggatgactggccgctgtatgaatcacgcctgaaggaaaagctgcacgttatcagcaagcgt

SEQ ID NO: 445887 - DNA, 75 bp, synthetic construct
  source 1..75: mol_type = other DNA
agcgacataatctgaatctgagacaacatctggcaaggctgggacggaagtcactgtcgttctcaaaatcgatgg

SEQ ID NO: 445888 - DNA, 75 bp, synthetic construct
  source 1..75: mol_type = other DNA
tcgacgattttaatcgtgaggcgctggctattgaggtggatttttctctgaccgccagtcgtgtggtgaggacgc

SEQ ID NO: 445889 - DNA, 75 bp, synthetic construct
  source 1..75: mol_type = other DNA
tgttgcgcgttttttagctggaacatcttataaaacaacatttgtgggagcattaaataataacgataaatcata

SEQ ID NO: 445890 - DNA, 75 bp, synthetic construct
  source 1..75: mol_type = other DNA
atcacctttgacattaaaaactgatgttcaaaaagttaataaagttggcatcaaacgctggtggtataaagctag

SEQ ID NO: 445891 - DNA, 75 bp, synthetic construct
  source 1..75: mol_type = other DNA
tcaccgtacaaaacgggaagaatacctagtgatgagtggagatgagttcatggaaaggttcataaggggttccgt

SEQ ID NO: 445892 - DNA, 75 bp, synthetic construct
  source 1..75: mol_type = other DNA
gacgtcactctgccgctcagtgaacgccccggccatacgctggtgctcggcaccacccgcgttggcaaaacccgg

SEQ ID NO: 445893 - DNA, 75 bp, synthetic construct
  source 1..75: mol_type = other DNA
gggcggcatcaacagcttcagcagcaatacccgcgagcaggtggtcacccgcaatgtaccgctgctggataccgc

SEQ ID NO: 445894 - DNA, 75 bp, synthetic construct
  source 1..75: mol_type = other DNA
gccttggtggcgctcggccagcgccctgactaccagctgatctcccgacacgtcgtcaatatcgacgccctgttt

SEQ ID NO: 445895 - DNA, 75 bp, synthetic construct
  source 1..75: mol_type = other DNA
cgtcagtcgaccattgtagcgttaaacgacacatcctatattgaaaaagcttatgatactctcgtagatatgaag

SEQ ID NO: 445896 - DNA, 75 bp, synthetic construct
  source 1..75: mol_type = other DNA
taaaagacccggttcagcgtcagatggcttacgaacggcgtaatgctgagattgcaaataccgcttataacaatc

SEQ ID NO: 445897 - DNA, 75 bp, synthetic construct
  source 1..75: mol_type = other DNA
acagcaggtgataatagcgctgcatcaacaaacgttaataacttgcttgataaatacaccagtgctgacactcag

SEQ ID NO: 445898 - DNA, 75 bp, synthetic construct
  source 1..75: mol_type = other DNA
accaaaccagtcactaatgcttaacagtgatacaagtaagattaataaagtaggattgaaatcctggacttatca

SEQ ID NO: 445899 - DNA, 75 bp, synthetic construct
  source 1..75: mol_type = other DNA
gactattttgtgttagtttaaatacctttgccggtggtaacaatggctggaatgctgatgctgttccacccaaac

SEQ ID NO: 445900 - DNA, 75 bp, synthetic construct
  source 1..75: mol_type = other DNA
cggttattctgttgcaaaaacaggggaactgacacctgttgccattacagcggtcaccttcccgttactgattga

SEQ ID NO: 445901 - DNA, 75 bp, synthetic construct
  source 1..75: mol_type = other DNA
ggggcggcgatcatcagcaatatggagcaggtttgcgccaaactttctgcctctgccagcgattatctgcgcgaa

SEQ ID NO: 445902 - DNA, 75 bp, synthetic construct
  source 1..75: mol_type = other DNA
aacatcggtgacgatggcgattggtctctccagcgattgaagaaaggcggtgcggacaagaagccagccccgacg

SEQ ID NO: 445903 - DNA, 75 bp, synthetic construct
  source 1..75: mol_type = other DNA
agacgctacgctcactgctctagcggcactagctaccgcagcagataaactcccttatttcacaggggttgatcg

SEQ ID NO: 445904 - DNA, 75 bp, synthetic construct
  source 1..75: mol_type = other DNA
gcagcgcctttaaggttatcgaaacacaacgtccgaaactggcctgttgccggtgcgaccatatcgtgcaggcac

SEQ ID NO: 445905 - DNA, 75 bp, synthetic construct
  source 1..75: mol_type = other DNA
ccggccttggtatggggggggccgagagacaagtttgtgacttggcaaatagtttctatgataagggaaacaacg

SEQ ID NO: 445906 - DNA, 75 bp, synthetic construct
  source 1..75: mol_type = other DNA
aaggtgaaattacgaagtcttaaggatattgatgcgtgtgagcgtctgattgataaacttgctgcagtggtcgta

SEQ ID NO: 445907 - DNA, 75 bp, synthetic construct
  source 1..75: mol_type = other DNA
ttgagaattacgagagtggtggaagcaaagcccagctgccgaatgtggatctgaaaaccatcaaccagacagtgg

SEQ ID NO: 445908 - DNA, 75 bp, synthetic construct
  source 1..75: mol_type = other DNA
atgtgacgctgactctgccgaaaggtgtgaccagcaagacggggaatacggtaacaaccgatgcggcaggtaaag

SEQ ID NO: 445909 - DNA, 75 bp, synthetic construct
  source 1..75: mol_type = other DNA
acagacgtataaagttacggtgactgatgccaataacaacctgttgaaagatagcgaagtgacgctgactgccag

SEQ ID NO: 445910 - DNA, 75 bp, synthetic construct
  source 1..75: mol_type = other DNA
ggcaaataaccccgttggcgggaatatgtgggtcgacattcagacgccggaaggggtgacggagaaggattatca

SEQ ID NO: 445911 - DNA, 75 bp, synthetic construct
  source 1..75: mol_type = other DNA
ccccaatggttttgcttaaagagtttgaaaaatttagcacccctttattccatcgctttagtaaaaatagaaaat

SEQ ID NO: 445912 - DNA, 75 bp, synthetic construct
  source 1..75: mol_type = other DNA
gaatgggaccatttggttccaatattaaagtatccacatttgttaatgctggtgtaccaattataagcggccaac

SEQ ID NO: 445913 - DNA, 75 bp, synthetic construct
  source 1..75: mol_type = other DNA
tgacgtggttgctgatggtcagcaagcctacacgctgacgctgactgcggtggatactgatggtaacccggtgac

SEQ ID NO: 445914 - DNA, 75 bp, synthetic construct
  source 1..75: mol_type = other DNA
accacagcgattcgtgcctcccgttctctgattgaggaataccgtcgcgccagttcggcgcgagcaactcttggc

SEQ ID NO: 445915 - DNA, 75 bp, synthetic construct
  source 1..75: mol_type = other DNA
tggcgcacgttttcggtgaacgcactctggccacactggcgcgtcttctgagcctgctgtcggcctttgaggtcg

SEQ ID NO: 445916 - DNA, 75 bp, synthetic construct
  source 1..75: mol_type = other DNA
tatgacgggatacggaggacagttgtggcgcacgttttcggtgaacgcactctggccacactggcgcgtcttctg

SEQ ID NO: 445917 - DNA, 75 bp, synthetic construct
  source 1..75: mol_type = other DNA
atgttgctctacaaatgtatctgccagatggttctacatcggtaactcccggtaccgaaacgtcgaatattcagt

SEQ ID NO: 445918 - DNA, 75 bp, synthetic construct
  source 1..75: mol_type = other DNA
tttgaggtcgtggtatggatgacagatggctggccgctttatgaatcacgcctgaagggagaactgcacgttatc

SEQ ID NO: 445919 - DNA, 75 bp, synthetic construct
  source 1..75: mol_type = other DNA
gcaaggctgggacggcagtcactgtcgttctcaaaatcggtggagctgtatgacaaggtcatcgggcattatctg

SEQ ID NO: 445920 - DNA, 75 bp, synthetic construct
  source 1..75: mol_type = other DNA
ggtaccgaaacgtcgaatattcagttagcggattcggtaatgactccaacttactgatagtgttttatgttcaga

SEQ ID NO: 445921 - DNA, 75 bp, synthetic construct
  source 1..75: mol_type = other DNA
gccagatgcaccagtgtttagcggtgccgccagcacggggagtgagcgtccttcagcaggaaactggacagagaa

SEQ ID NO: 445922 - DNA, 75 bp, synthetic construct
  source 1..75: mol_type = other DNA
gatgaaaaaggtgctttaggcggtaaaggtcagggttattttataagctccgccacgcaaggttttgaaaatctc

SEQ ID NO: 445923 - DNA, 75 bp, synthetic construct
  source 1..75: mol_type = other DNA
gagatactattgctgtgatagaggctccgggagcgtcaaatgcaagaataaatggtttgggtggtggtgagacta

SEQ ID NO: 445924 - DNA, 75 bp, synthetic construct
  source 1..75: mol_type = other DNA
ggcgacgtcctgccgatagaaaaacccgatcgcatcatcgcccatgttgacggcgtcccggtgctgaccagtcag

SEQ ID NO: 445925 - DNA, 75 bp, synthetic construct
  source 1..75: mol_type = other DNA
aaagctggtattagacggacgtgaaattgcatcagctgttaatgaatacaacggcgaacaatccgttcgcggctc

SEQ ID NO: 445926 - DNA, 75 bp, synthetic construct
  source 1..75: mol_type = other DNA
gggattgctgctgcaggggccgtattatcaacaccagtatctaaacagatggactatcgccagcgacttgcaatg

SEQ ID NO: 445927 - DNA, 75 bp, synthetic construct
  source 1..75: mol_type = other DNA
ggtgctaaatcacgtcagcgctggctgttttacgcgtgtgacaggatacggaggacggctgtggcgcacgtcttc

SEQ ID NO: 445928 - DNA, 75 bp, synthetic construct
  source 1..75: mol_type = other DNA
caacatttggcaaggctggtacggaagtcactgtcgttctcaaaatcggtggagctgcattcgggcattatctga

SEQ ID NO: 445929 - DNA, 75 bp, synthetic construct
  source 1..75: mol_type = other DNA
tattacagggaattattcctttattacttgcaaatcaacagcaagctgaagcctcaatgtgcctaaaaacggcta

SEQ ID NO: 445930 - DNA, 75 bp, synthetic construct
  source 1..75: mol_type = other DNA
gagaacccgcatcacctgcaccagccgtaccggctgccggggcagcagtatgataaggagtcggggctgtactag

SEQ ID NO: 445931 - DNA, 75 bp, synthetic construct
  source 1..75: mol_type = other DNA
gaggacggttgtggcgcacgtcttcggtgaacgcactctggccacattggagcgtcttctgagcctgctgtcggc

SEQ ID NO: 445932 - DNA, 75 bp, synthetic construct
  source 1..75: mol_type = other DNA
ccgaaggtggtgaagggcgtgagcttcctgcttcgcctgaccgtggcagcggatgacggcagtgagcggctggtc

SEQ ID NO: 445933 - DNA, 75 bp, synthetic construct
  source 1..75: mol_type = other DNA
tggtaagcatgagaatttcaacagtaataaccaacagtcatactggtattcaacctgccggttaagagtgacccg

SEQ ID NO: 445934 - DNA, 75 bp, synthetic construct
  source 1..75: mol_type = other DNA
gatgatcataactttgaccgccagattattattccgcccattatttttaacggtatagcgtatgacgatccgggg

SEQ ID NO: 445935 - DNA, 75 bp, synthetic construct
  source 1..75: mol_type = other DNA
aggacacgggcatgtcaccctgactttcaatgtctcttcatatggcgctaataactggacgccaacgagcagtat

SEQ ID NO: 445936 - DNA, 75 bp, synthetic construct
  source 1..75: mol_type = other DNA
ttaagattttccagaaaggcaatcagggggcaggcaatatcaccgactgtacggtgattgtgaccaaaaaagctg

SEQ ID NO: 445937 - DNA, 75 bp, synthetic construct
  source 1..75: mol_type = other DNA
aggtccagtccgtcaccgacggcgtgaaggtgaaagtgagccgggttcctgacggcgttgcagaatacagcgtgt

SEQ ID NO: 445938 - DNA, 75 bp, synthetic construct
  source 1..75: mol_type = other DNA
ccgctgcatcagggaatgaccagccccaactggttgccaccatagtccctgatgaacagcgcatcagcttctggc

SEQ ID NO: 445939 - DNA, 75 bp, synthetic construct
  source 1..75: mol_type = other DNA
gttcaatgccatgaacggtaaccgcgctgaaatgagcccggaagccgccggcattgccgcctgtctgatgacgta

SEQ ID NO: 445940 - DNA, 75 bp, synthetic construct
  source 1..75: mol_type = other DNA
tgccgtctgaacaatgttgaaccagaaaaatggctgcgttacgtcattgagcatatccaggactggccgacaaac

SEQ ID NO: 445941 - DNA, 75 bp, synthetic construct
  source 1..75: mol_type = other DNA
atggacacctcacttgctcatgagaatacccgcctgcgggcactgttgcagacgcaacaggacaccatccaccag

SEQ ID NO: 445942 - DNA, 75 bp, synthetic construct
  source 1..75: mol_type = other DNA
gccggaaaaactggatgttcgcgggttccgacagcggtggtgaacatgcggcggtgttgtactcgctgatcggca

SEQ ID NO: 445943 - DNA, 75 bp, synthetic construct
  source 1..75: mol_type = other DNA
gttgctgaactgctggagccgctgtatgacgtcctgcgccagtatgtgctgatgcccggtaaagtccatgctgat

SEQ ID NO: 445944 - DNA, 75 bp, synthetic construct
  source 1..75: mol_type = other DNA
aggcatccatccacagaatcatcttgctggttacagcggagtgcttcaggccgatgcttacggtggttaccgggc

SEQ ID NO: 445945 - DNA, 75 bp, synthetic construct
  source 1..75: mol_type = other DNA
aggttttccataaaggcaatcagtgggcaggtaatatcaccgactgtacggtgattgtgaccaaaaaagccgctt

SEQ ID NO: 445946 - DNA, 75 bp, synthetic construct
  source 1..75: mol_type = other DNA
gccttctgcctgctgaaaccagttgtccggcctgtggtggttctctgaaagaaatgggggaaacaatctcagagc

SEQ ID NO: 445947 - DNA, 75 bp, synthetic construct
  source 1..75: mol_type = other DNA
gtctgtctcggaaagaaaaattacgtgttcttcggtagcgatcacggcggcgagcgtggtgcactgctgtacggg

SEQ ID NO: 445948 - DNA, 75 bp, synthetic construct
  source 1..75: mol_type = other DNA
acaaccatcacaagacgttacagacggagcgcttaccaccatcccgtccgatagagcgcggcatcgcaggtcccg

SEQ ID NO: 445949 - DNA, 75 bp, synthetic construct
  source 1..75: mol_type = other DNA
agtgaagctgcagcagatgcaggacggacgcctttatattgcgggtatcggtgccggtattgagaacacccctga

SEQ ID NO: 445950 - DNA, 75 bp, synthetic construct
  source 1..75: mol_type = other DNA
gatgtgcatgcaagagcgccacctgacatcaccacggaagccctgcagcgtatcggtgaactgtatgccattgag

SEQ ID NO: 445951 - DNA, 75 bp, synthetic construct
  source 1..75: mol_type = other DNA
gtgaccctggagccccgtatcttcggctggatggaccgtctttgcgaagactactgcggtggtatctggaatctg

SEQ ID NO: 445952 - DNA, 75 bp, synthetic construct
  source 1..75: mol_type = other DNA
ttcgcgtacagcccggaccggaaaggtatccatccacagaatcacctagccggttacagcggtgtgcttcaggca

SEQ ID NO: 445953 - DNA, 75 bp, synthetic construct
  source 1..75: mol_type = other DNA
taatgccgcagaaagagcgcttcgtgcagtctgtctcgggaagaaaaattatgtgttcttcggcagcgatcacgg

SEQ ID NO: 445954 - DNA, 75 bp, synthetic construct
  source 1..75: mol_type = other DNA
ggtggcgaacatgcggcggtgttgtactcgctgatcggcacatgccgtctgaacaatgaggagccagaaaatggc

SEQ ID NO: 445955 - DNA, 75 bp, synthetic construct
  source 1..75: mol_type = other DNA
gtggagctgagccgtgccacactggggcgctggacaggtgctgttgctgaactgctggaaccgctgtatgacatc

SEQ ID NO: 445956 - DNA, 75 bp, synthetic construct
  source 1..75: mol_type = other DNA
tgcgttacgtcattgagcatatccaggactggccggcaaaccgggtacgcgatctgttgccctggaaagttgatc

SEQ ID NO: 445957 - DNA, 75 bp, synthetic construct
  source 1..75: mol_type = other DNA
ctactgcggtggtatctggaatctgtacagtctgaacaacggcggggcatttatagcgcccgaaccggatgacaa

SEQ ID NO: 445958 - DNA, 75 bp, synthetic construct
  source 1..75: mol_type = other DNA
cattccacagtgggtggccctggagccccgtatcttcggctggatggaccgtctgtgtgaagactactgcggtgg

SEQ ID NO: 445959 - DNA, 75 bp, synthetic construct
  source 1..75: mol_type = other DNA
ttgttgaagacaccggcgccgtcccgcccgatagagcgtggtatcgcgggccccggattacttgcccgcgtgtta

SEQ ID NO: 445960 - DNA, 75 bp, synthetic construct
  source 1..75: mol_type = other DNA
agatgaaaacactgtcgcgtcactcggatacggcaaaagcgttcgcatacctgctgaaacagtgggatgcactga

SEQ ID NO: 445961 - DNA, 75 bp, synthetic construct
  source 1..75: mol_type = other DNA
tgacgtcctgcgccagtatgtgctgatgcccggtaaagtccatgccgatgatatccccgtcccggtccaggagcc

SEQ ID NO: 445962 - DNA, 75 bp, synthetic construct
  source 1..75: mol_type = other DNA
tggcctcattccacagtgggtggccctggagccccgtgttttcggctggatggaccgtctgtgtgaagactactg

SEQ ID NO: 445963 - DNA, 75 bp, synthetic construct
  source 1..75: mol_type = other DNA
gccatgaacggtaaccgcgctgaaatgagtccggaagctgccggcattgctgcctgtctgatgacgtacagtcat

SEQ ID NO: 445964 - DNA, 75 bp, synthetic construct
  source 1..75: mol_type = other DNA
gcgctgaggcgtataccggtcgtgaggtacaggatattcccggtgtgctggccgtgtttgctgaacgccgtaagg

SEQ ID NO: 445965 - DNA, 75 bp, synthetic construct
  source 1..75: mol_type = other DNA
agtgcagaatattcccggtgtgctggccgtgtttgcagaacgccgtaaggacagttttggcccgtatgtccggct

SEQ ID NO: 445966 - DNA, 75 bp, synthetic construct
  source 1..75: mol_type = other DNA
tggcgccgggcaggaaaaagacgaaaaccgggcgtatctggacgtatgtccgggatgaccggaatgccggttcgt

SEQ ID NO: 445967 - DNA, 75 bp, synthetic construct
  source 1..75: mol_type = other DNA
cagcaactgagtctggttgaagagacggaagccttcctgcgctctgcactgacacgtgccgaagaaaagatctaa

SEQ ID NO: 445968 - DNA, 75 bp, synthetic construct
  source 1..75: mol_type = other DNA
tgagcccggaagccgccggtattgccgcctgtctgatgacgtacagtcatcatgcctgtcgtacggagaattatg

SEQ ID NO: 445969 - DNA, 75 bp, synthetic construct
  source 1..75: mol_type = other DNA
gcttctggccgcagcattttggcctcattccacagtgggttaccctggagccccgtgtcttcggctggatggacc

SEQ ID NO: 445970 - DNA, 75 bp, synthetic construct
  source 1..75: mol_type = other DNA
gcttctggccgcagcattttggcctcattccacagtgggtaaccctggatccccgtgtcttcggctggatggacc

SEQ ID NO: 445971 - DNA, 75 bp, synthetic construct
  source 1..75: mol_type = other DNA
gatgacgaaacatgggtactgttcaatgtcatgaacggtaaccgcgctgaaatgagcccggaagccgccggcatt

SEQ ID NO: 445972 - DNA, 75 bp, synthetic construct
  source 1..75: mol_type = other DNA
tgccatgaacggtaaccgcgctgaaatgagcccggaagccgccggcattgctgcctgtctgatgacgtacagtca

SEQ ID NO: 445973 - DNA, 75 bp, synthetic construct
  source 1..75: mol_type = other DNA
cattccacagtgggtcaccctggatccccgtgtcttcggctggatggaccgtctgtgcgaaaactactgcggtgg

SEQ ID NO: 445974 - DNA, 75 bp, synthetic construct
  source 1..75: mol_type = other DNA
cattccacagtgggttaccctggagccccgtgtcttcggctggatggaccgtctctgcgaaaactactgcggtgg

SEQ ID NO: 445975 - DNA, 75 bp, synthetic construct
  source 1..75: mol_type = other DNA
attgaacaatatgtactgggagtaattgaggattataataattatataaatgaagggtttacttataaaatgaaa

SEQ ID NO: 445976 - DNA, 75 bp, synthetic construct
  source 1..75: mol_type = other DNA
cggtatagatccggaagcgtatctgcgccatatcctgagtgtactgccggaatggccttccaaccgtgttaacga

SEQ ID NO: 445977 - DNA, 75 bp, synthetic construct
  source 1..75: mol_type = other DNA
gatatatctggacgtatgtccgggatgaccggaatgccggttcgccagaagctccggcggtctggttcgcctact

SEQ ID NO: 445978 - DNA, 75 bp, synthetic construct
  source 1..75: mol_type = other DNA
cggaaaaactggctcttcgtgggttccgacagcggtggcgaacatgcggcggtgttgtactcgctgataggcaca

SEQ ID NO: 445979 - DNA, 75 bp, synthetic construct
  source 1..75: mol_type = other DNA
tcaggatgtctggtttaatattcatggtttttacttttgctggaacgtaagcacgaagttttttcttgtgtgctg

SEQ ID NO: 445980 - DNA, 75 bp, synthetic construct
  source 1..75: mol_type = other DNA
atggtggagaagaatggcacgttgtcgaaaaaatccagactgggcgaagcgttcagctatgtcctgaatcagtgg

SEQ ID NO: 445981 - DNA, 75 bp, synthetic construct
  source 1..75: mol_type = other DNA
ataatgcagcagaaagagcgcttcgtgcagtctgtctcgggaagaaaaattatgtgttcttcggcagcgatcacg

SEQ ID NO: 445982 - DNA, 75 bp, synthetic construct
  source 1..75: mol_type = other DNA
ttattgcccgttccggtgatgccagctggctgaatactgacggctggcgttatatgtttgcctcggaatgttgct

SEQ ID NO: 445983 - DNA, 75 bp, synthetic construct
  source 1..75: mol_type = other DNA
ttatattaatgaaaatttcacttataaattttcaagatttagtcaacctttctggcacaagagatgctcagctag

SEQ ID NO: 445984 - DNA, 75 bp, synthetic construct
  source 1..75: mol_type = other DNA
ttgatactcataccactatcttaagtggtaatcttgctgcaaacactcaggttaaaattcctgtttatatgtacc

SEQ ID NO: 445985 - DNA, 75 bp, synthetic construct
  source 1..75: mol_type = other DNA
ggctggccgctgtatgaatcatgcctgaagggaaagctgcacgttatcagcaagcgttacactcagcgcattgag

SEQ ID NO: 445986 - DNA, 75 bp, synthetic construct
  source 1..75: mol_type = other DNA
gaaatactcaactcaaaataaagcttgatttggacggaaagaagattaatttaaatgataatgatataaaaggaa

SEQ ID NO: 445987 - DNA, 75 bp, synthetic construct
  source 1..75: mol_type = other DNA
gtggatcactattgcaccgttcgtgacactaaatcgcgccagcgctggctgttttacgcgtatgacagtctccgg

SEQ ID NO: 445988 - DNA, 75 bp, synthetic construct
  source 1..75: mol_type = other DNA
acattacgatgaaaatggaaatgaaaaaacatatcgtactgccaatccaaatggtaatagattttactttgattt

SEQ ID NO: 445989 - DNA, 75 bp, synthetic construct
  source 1..75: mol_type = other DNA
atggctatatcatcatataatacagttacagataatttttctacgctgactaaaatgacagatgaaaataataga

SEQ ID NO: 445990 - DNA, 75 bp, synthetic construct
  source 1..75: mol_type = other DNA
tgcatcagggaataacccacctcagctggttgccactcccgtccctgatgaacagcgcatcagcttctggcctca

SEQ ID NO: 445991 - DNA, 75 bp, synthetic construct
  source 1..75: mol_type = other DNA
tctatatcagcacccggacggccacagcagaggaggctctgaagcgcatcagtgagttatacgcgatagaagagg

SEQ ID NO: 445992 - DNA, 75 bp, synthetic construct
  source 1..75: mol_type = other DNA
tggatgcatgttgccggttaatggccccgctggatgaggccctttaccactacgtgatggactgccacaaactgc

SEQ ID NO: 445993 - DNA, 75 bp, synthetic construct
  source 1..75: mol_type = other DNA
gtccggaatgcggcagcggtatggcgtacctcagcgaagtcagcgtggagcagctggaactggtctccagcgccc

SEQ ID NO: 445994 - DNA, 75 bp, synthetic construct
  source 1..75: mol_type = other DNA
tccgctacgtccttgacgtcattgctgactggccggtaaaccgggtcagcgagttgctgccgtggcggatcactc

SEQ ID NO: 445995 - DNA, 75 bp, synthetic construct
  source 1..75: mol_type = other DNA
gtgcgcgaaaagcatgcctgtcgtcggtgcgatcgcatcgttcaggctccggcgccttcgcgccccatcgagcgg

SEQ ID NO: 445996 - DNA, 75 bp, synthetic construct
  source 1..75: mol_type = other DNA
ctgcgatgatggtctggcagagccggataataacgctgctgagcgcgcgctacgagcggtctgtctgggcaagaa

SEQ ID NO: 445997 - DNA, 75 bp, synthetic construct
  source 1..75: mol_type = other DNA
acatcaccacggaagccctgcagcgtatcggtgaactgtatgtcatcgaggcagaagtccggggatgttcagcag

SEQ ID NO: 445998 - DNA, 75 bp, synthetic construct
  source 1..75: mol_type = other DNA
ggcggtctggttcgcctactcaccggaccatcagggtaaacatccggagcaacaccttcgtcccttccggggtat

SEQ ID NO: 445999 - DNA, 75 bp, synthetic construct
  source 1..75: mol_type = other DNA
ccagtccggctctgctggcccgcataatcatggctaagttcgccgagcatctgccgctgtaccgtcagtcagaaa

SEQ ID NO: 446000 - DNA, 75 bp, synthetic construct
  source 1..75: mol_type = other DNA
atgacaaccttttcgcatagctccaccacgccttctgtttccgtaaccactgcatcagggaataacccacctcag

SEQ ID NO: 446001 - DNA, 75 bp, synthetic construct
  source 1..75: mol_type = other DNA
tggaccgtctgtgcgaagactactgcgggggtatctggaatctgtacactctgaacaacggcggggcatttatgg

SEQ ID NO: 446002 - DNA, 75 bp, synthetic construct
  source 1..75: mol_type = other DNA
agtgcaggatattcccggtgtgctggccgtgtttgcagaacgccgtaaggacagttttggcccgtatgtccagct

SEQ ID NO: 446003 - DNA, 75 bp, synthetic construct
  source 1..75: mol_type = other DNA
cgttctgaaaaactgcgtcgtgaggttgaacaggctgaagccctgctgaaacaacgcgagcaggaaagcgatcgc

SEQ ID NO: 446004 - DNA, 75 bp, synthetic construct
  source 1..75: mol_type = other DNA
gccagtcagaaatatacggccggcaaggtgtggagctgagccgttcactgctgtcgggctgggtggatgcatgct

SEQ ID NO: 446005 - DNA, 75 bp, synthetic construct
  source 1..75: mol_type = other DNA
aatgtcatgaacggcaaccgcgctgaaatgagcccggaagccgccggcattgctgcctgtctgatgacgtacagt

SEQ ID NO: 446006 - DNA, 75 bp, synthetic construct
  source 1..75: mol_type = other DNA
atgagtcagaaatacctcattcgcattgcagaactggaaagccagctccatcagaaagaccagcaactgagtctg

SEQ ID NO: 446007 - DNA, 75 bp, synthetic construct
  source 1..75: mol_type = other DNA
gaccgtctgtgcgaagactactgcgggggcatctggaatctgtacaccctgaacaacggtggcgcatttatggca

SEQ ID NO: 446008 - DNA, 75 bp, synthetic construct
  source 1..75: mol_type = other DNA
gtactgttcaatgccatgaacggcaaccgcgctgaaatgagcccggaagccgctggcattgctgcctgtctgatg

SEQ ID NO: 446009 - DNA, 75 bp, synthetic construct
  source 1..75: mol_type = other DNA
ccaccatagtccctgatgaacagcgcatcagcttctggccgcagcactttggcctcattccacagtgggtgaccc

SEQ ID NO: 446010 - DNA, 75 bp, synthetic construct
  source 1..75: mol_type = other DNA
aagaaaaattcttatgacctttgtcaaatattaagcccaaaaagacctacgcagctccgggagcttcgttatatc

SEQ ID NO: 446011 - DNA, 75 bp, synthetic construct
  source 1..75: mol_type = other DNA
gcgtatctgcgccatatcctgggtgtactgccggaatggccttccaaccgtgttgacgagctcctgccatggaac

SEQ ID NO: 446012 - DNA, 75 bp, synthetic construct
  source 1..75: mol_type = other DNA
gaacacctgccactgtatcgtcagagtgaaatctttgcccgccagggtgtcgaactgagccgtgccttactctcc

SEQ ID NO: 446013 - DNA, 75 bp, synthetic construct
  source 1..75: mol_type = other DNA
aggttccccgccagttgcgacagtcacgtcatcgtcgtccgttaccagcacatcttcgtaagcggctcgccagaa

SEQ ID NO: 446014 - DNA, 75 bp, synthetic construct
  source 1..75: mol_type = other DNA
tacagtgggcgggaagacgatcctcaggttccccgccagttgcgacatgaaccgccccgggaatcctggagacta

SEQ ID NO: 446015 - DNA, 75 bp, synthetic construct
  source 1..75: mol_type = other DNA
ttcgcgtactcgccgaaccggcaggggaaacacccggagcaacacctccgccccttccggggtatcctgcaggcg

SEQ ID NO: 446016 - DNA, 75 bp, synthetic construct
  source 1..75: mol_type = other DNA
aaccagagcgccaccatacagcagatacagcgcgtgcagaaggacacaaatgatgacctggctgcgctgtacatg

SEQ ID NO: 446017 - DNA, 75 bp, synthetic construct
  source 1..75: mol_type = other DNA
gcgatgtggtggtggatgataacggcgtggggtttcgctacagcttcagcgccctgaaggaccgccacacggcgg

SEQ ID NO: 446018 - DNA, 75 bp, synthetic construct
  source 1..75: mol_type = other DNA
gccgtcactgcgtcgtcgcctgttccgctgtgtctccatccgggaaaacacggacggcacctttgccatcacggc

SEQ ID NO: 446019 - DNA, 75 bp, synthetic construct
  source 1..75: mol_type = other DNA
cgtttcagcggcctgccgctcggggaatacaccctgacggtgcgggcgataaacagctatggccagcagggtgaa

SEQ ID NO: 446020 - DNA, 75 bp, synthetic construct
  source 1..75: mol_type = other DNA
tggtatcccacagcaagtatcagcgatttgctggttgtggtgatgaagaaagccactgcaggcatcacgattagc

SEQ ID NO: 446021 - DNA, 75 bp, synthetic construct
  source 1..75: mol_type = other DNA
ttaagagtgacccgcaatggtcaggagatttttaatcagtccacgacggatgctcagggcgtattttcctcagtt

SEQ ID NO: 446022 - DNA, 75 bp, synthetic construct
  source 1..75: mol_type = other DNA
aaatcaggacgtccattacggatgtcagcaatgaaatcacgcagaccgtcaataagaaactggaagaccagagtg

SEQ ID NO: 446023 - DNA, 75 bp, synthetic construct
  source 1..75: mol_type = other DNA
gtggccatcagggaccattaccgtcagggtttatgacgatcagccttttgaccggcaaattgtcattccggcggt

SEQ ID NO: 446024 - DNA, 75 bp, synthetic construct
  source 1..75: mol_type = other DNA
cctcgagaagtttttccattcaccagcaacaaatatcaaagaccatgacgactggttgccatggtttatcgagaa

SEQ ID NO: 446025 - DNA, 75 bp, synthetic construct
  source 1..75: mol_type = other DNA
ggtgtgtggggactctccctgccgtcactgcgtcgtcgcctgttccgctgtgtctccatccgggaaaacacggac

SEQ ID NO: 446026 - DNA, 75 bp, synthetic construct
  source 1..75: mol_type = other DNA
agaccggcacggccactgttaatctgattaacggcagcggtaagccggcgagcgtggccatcaccgcacaccccg

SEQ ID NO: 446027 - DNA, 75 bp, synthetic construct
  source 1..75: mol_type = other DNA
ccctatgttgccggtattggagcggggattgaggatactgatggctcagcccctgagcaacatactgctgctggc

SEQ ID NO: 446028 - DNA, 75 bp, synthetic construct
  source 1..75: mol_type = other DNA
cagcagattgccgatatcaggcaggttgaaaccaccgcccgctatcttggcacggcgctgtactggatagccgcc

SEQ ID NO: 446029 - DNA, 75 bp, synthetic construct
  source 1..75: mol_type = other DNA
ctgattaaaactgaactgctggagacgcagaccgtggatttcagcgttggcgcggaagggcttcgccatgtaccg

SEQ ID NO: 446030 - DNA, 75 bp, synthetic construct
  source 1..75: mol_type = other DNA
ctgattaaaactgaactgctggagacgcagaccgtggatttcagcgtaggtgccgaagggcttcgccatgtaccg

SEQ ID NO: 446031 - DNA, 75 bp, synthetic construct
  source 1..75: mol_type = other DNA
ggtgtcagcatggctggtaaataactggtatcccacagcaagtatcagcgatttgctggttgtggtgatgaagaa

SEQ ID NO: 446032 - DNA, 75 bp, synthetic construct
  source 1..75: mol_type = other DNA
aaaacgaaagacggcattccctatgtggccgggattggtgcagggattgaggatactgatggccagccactgagc

SEQ ID NO: 446033 - DNA, 75 bp, synthetic construct
  source 1..75: mol_type = other DNA
tgggcgctgtatgtcatcggccagtattgcgatcagtcagtgccggatggctttggtggcacggagccgcgcatc

SEQ ID NO: 446034 - DNA, 75 bp, synthetic construct
  source 1..75: mol_type = other DNA
ttttctgcttctgccggaggagtatggcccagcctttccagcaatcgtcgattgttataccagtccacccacgtg

SEQ ID NO: 446035 - DNA, 75 bp, synthetic construct
  source 1..75: mol_type = other DNA
acgatgtgttcctgaagcggctgtttgcggtgagtatcacctcgtccggcaatcccccgacgttttccctgacgc

SEQ ID NO: 446036 - DNA, 75 bp, synthetic construct
  source 1..75: mol_type = other DNA
ctatgccgggaccctgaccggcggacgtatcctgtccattgatgctgccacccgcaccctgacgctggaccgtga

SEQ ID NO: 446037 - DNA, 75 bp, synthetic construct
  source 1..75: mol_type = other DNA
tttgtgaatatgcacagaattcgctgaacgatgttgctagttttgcaaaattcgtcagctatgcggaagaatttg

SEQ ID NO: 446038 - DNA, 75 bp, synthetic construct
  source 1..75: mol_type = other DNA
gtcccgcggctttaatccgacagccgcgcccttttttcgccaatataaacctggttgaactcatacaaaaagctc

SEQ ID NO: 446039 - DNA, 75 bp, synthetic construct
  source 1..75: mol_type = other DNA
ctgtgggacatgctgacccacccgcgctacggcatgggaaaacgcctgggggccgcggatgtggacaagtgggca

SEQ ID NO: 446040 - DNA, 75 bp, synthetic construct
  source 1..75: mol_type = other DNA
agggcgaccgtaatccttcctctgtccggattctgattcagttacagcgtaatggccgctgggtgacggaaaagg

SEQ ID NO: 446041 - DNA, 75 bp, synthetic construct
  source 1..75: mol_type = other DNA
tgtcatcagagggaaactgtctgcaaaccagattgaaggcgacctggtgaagacggtggggaaagcctttccccg

SEQ ID NO: 446042 - DNA, 75 bp, synthetic construct
  source 1..75: mol_type = other DNA
tccggcaatcccccgacgttttccctgacgccggagggcaggctgaccgcaagaaatgctgatatcagcggagca

SEQ ID NO: 446043 - DNA, 75 bp, synthetic construct
  source 1..75: mol_type = other DNA
gagccggtggtgcgtctgaacgttgagtccagagcggatactgcgttaatgaatgcaaaaaccgaagagatttta

SEQ ID NO: 446044 - DNA, 75 bp, synthetic construct
  source 1..75: mol_type = other DNA
tctggagtttaaggttttccataaaggcaatcagcgggcaggtaatatcaccgactgtacggtgattgtgaccaa

SEQ ID NO: 446045 - DNA, 75 bp, synthetic construct
  source 1..75: mol_type = other DNA
tcctgaaatatctgacggctcccaccattaccagcggcggtaatcctccggcattttccctgacaccggacgggc

SEQ ID NO: 446046 - DNA, 75 bp, synthetic construct
  source 1..75: mol_type = other DNA
cgattgaaggtccggtggatggattaaaaagtgtgctgctgaacagtacgccagtgctggacagtgaggggaata

SEQ ID NO: 446047 - DNA, 75 bp, synthetic construct
  source 1..75: mol_type = other DNA
tccgggacgctcaacaacgtcacgattaatcagaactgtcggattctgggaaaactgtcagctaaccagattgaa

SEQ ID NO: 446048 - DNA, 75 bp, synthetic construct
  source 1..75: mol_type = other DNA
tcgggaaatattccgccggatacgtttgccagtgatgtacaggttcttgtgatgaaaaagggggcatcaggtatc

SEQ ID NO: 446049 - DNA, 75 bp, synthetic construct
  source 1..75: mol_type = other DNA
aacgcacctacagcggtatctgggacgggagtctgaaaccggcatacagcaataacccggcctggtgcctgtggg

SEQ ID NO: 446050 - DNA, 75 bp, synthetic construct
  source 1..75: mol_type = other DNA
gtgtatgatgatcacccgtttgaccgccagatagtggtacttccgctgacatttcgcggaagcaggcgtaccgac

SEQ ID NO: 446051 - DNA, 75 bp, synthetic construct
  source 1..75: mol_type = other DNA
cggcagtaccggtgctggcagtgtatgacccgacggtacagtatgaattctggttctcagaaaaacgcatcacgg

SEQ ID NO: 446052 - DNA, 75 bp, synthetic construct
  source 1..75: mol_type = other DNA
gtggtgaagggcgtgcgcttcagtctgcgcctgaccagtggcagtggtgagaacagtcgcctggtgaccagcgcc

SEQ ID NO: 446053 - DNA, 75 bp, synthetic construct
  source 1..75: mol_type = other DNA
caccctgacggtcagggcgataaacagctacggccagcagggcgaacctgccaccaccacattccggattaatgc

SEQ ID NO: 446054 - DNA, 75 bp, synthetic construct
  source 1..75: mol_type = other DNA
atgcagagtcaggtgctgctggcggcggacaggattgcgatggttaatcctgcgaatggcaacacaaagccgatg

SEQ ID NO: 446055 - DNA, 75 bp, synthetic construct
  source 1..75: mol_type = other DNA
actggacaccaacaaccagtatcagcgatctgctggttgtggtgatgaagaaagccaccgcaggcatcagtatca

SEQ ID NO: 446056 - DNA, 75 bp, synthetic construct
  source 1..75: mol_type = other DNA
ttgtggaggctgttggccagccgagtgatgatgcatccggctatctggattttttcaaaggcgagatagggaaaa

SEQ ID NO: 446057 - DNA, 75 bp, synthetic construct
  source 1..75: mol_type = other DNA
gcagattgataacggtcagcttgcgccggacctggctgaaatcaggacgtccattacgaatgtcagcaatgaaat

SEQ ID NO: 446058 - DNA, 75 bp, synthetic construct
  source 1..75: mol_type = other DNA
ccatcaggaaccattaccgtcagggtttatgacgatcagccgtttgaccggcaaattgttatcccggcggtggca

SEQ ID NO: 446059 - DNA, 75 bp, synthetic construct
  source 1..75: mol_type = other DNA
cagcatggctggtaaatgactggtatcccacagcaagtatcagcgatttgctggttgtggtgatgaagaaagcca

SEQ ID NO: 446060 - DNA, 75 bp, synthetic construct
  source 1..75: mol_type = other DNA
tggtacggcactgtactggatagccgccagtatcaatatcaaaccgggccatgattattatttttacgttcgcag

SEQ ID NO: 446061 - DNA, 75 bp, synthetic construct
  source 1..75: mol_type = other DNA
tgctggaaacgcagaccgtggacttcagcgtgggcgcagaagggcttcgccatgtgccgggcgatgtcattgaaa

SEQ ID NO: 446062 - DNA, 75 bp, synthetic construct
  source 1..75: mol_type = other DNA
ccggcagtgcagcacctgacggtggaggtgagcgcggctgacggtcagtatctggcacaggcgaaatgggacacg

SEQ ID NO: 446063 - DNA, 75 bp, synthetic construct
  source 1..75: mol_type = other DNA
ccggtgctggacagtgaagggaataccaacatttccggtgttacggcggtgttccgggcaggtgagcaggagcag

SEQ ID NO: 446064 - DNA, 75 bp, synthetic construct
  source 1..75: mol_type = other DNA
gaaatcatcgatgtgaaacagtgctacccgaacacggcgattgtggggctgcaggtggatgcggagcagtttggt

SEQ ID NO: 446065 - DNA, 75 bp, synthetic construct
  source 1..75: mol_type = other DNA
ggggctgaagttgccaacgttgcgccagcgcctgttccgctgtgtgagtatccgtgagaacgatgacggcacgta

SEQ ID NO: 446066 - DNA, 75 bp, synthetic construct
  source 1..75: mol_type = other DNA
ctgactttcaatgtttcttcatatggtgcaaataactggacgccaacgaccagtatcagcgaccttcttgttgtc

SEQ ID NO: 446067 - DNA, 75 bp, synthetic construct
  source 1..75: mol_type = other DNA
agcatggtgggtaaatggctggtatcccacagcaagtatcagcgatttgctggttgtcgtgatgaagaaagccac

SEQ ID NO: 446068 - DNA, 75 bp, synthetic construct
  source 1..75: mol_type = other DNA
attgttattccggcggtggcattcagtggcgctaagcatgagagagagcatactgatatttactcctcatgccgt

SEQ ID NO: 446069 - DNA, 75 bp, synthetic construct
  source 1..75: mol_type = other DNA
gccgccgggggaatacaccctgacggtcagggcaattaacagttatggccagcagggcgaaccggccaccaccac

SEQ ID NO: 446070 - DNA, 75 bp, synthetic construct
  source 1..75: mol_type = other DNA
tgtgggccgtgaaactgcagcagatgcaggacggacgcctttatattgcgggtatcggtgccggtattgagaata

SEQ ID NO: 446071 - DNA, 75 bp, synthetic construct
  source 1..75: mol_type = other DNA
gataaatccggagagcggcaacagcacgccgttatttgtggcgcaggggaatcagctgttcatgaacgacgtgtt

SEQ ID NO: 446072 - DNA, 75 bp, synthetic construct
  source 1..75: mol_type = other DNA
gttgtggacgcagattgataacggtcagcttgcgcctgacctggctgaaatcaggacgtccattacgggtgtcag

SEQ ID NO: 446073 - DNA, 75 bp, synthetic construct
  source 1..75: mol_type = other DNA
ttgacgctggaccgtgaggttaccctgccggagacaggtacatcggcggtgaacctgattaacggcagcggtaag

SEQ ID NO: 446074 - DNA, 75 bp, synthetic construct
  source 1..75: mol_type = other DNA
cggcaggctgacggcccgtaatgccgatatcagcgggaatatcagtgccagttccggtacgctgaataacgtgac

SEQ ID NO: 446075 - DNA, 75 bp, synthetic construct
  source 1..75: mol_type = other DNA
tgtggaagccagtggccgggccagcaatgatgcagaagggtatctggaatgtttcgggaaaaaatggaaaactgc

SEQ ID NO: 446076 - DNA, 75 bp, synthetic construct
  source 1..75: mol_type = other DNA
aatccacagcaggttatcagtatcagctgaattttataacccatatacgggcgccagaaatggcgccttttttat

SEQ ID NO: 446077 - DNA, 75 bp, synthetic construct
  source 1..75: mol_type = other DNA
cagattgaaggcgatattgtcaaaacggtcagcaagtctttcccccgcacgagcacttatgccagtggcaccatc

SEQ ID NO: 446078 - DNA, 75 bp, synthetic construct
  source 1..75: mol_type = other DNA
gcagcgatccagcagatacagaaggttcaggttgatacaaataataacctgaacagcatgtgggcagtgaagctg

SEQ ID NO: 446079 - DNA, 75 bp, synthetic construct
  source 1..75: mol_type = other DNA
taccacgctgataagcctggttgacggacagggtaatccggtcagcgtggaggtacagtccgtcaccgacggcgt

SEQ ID NO: 446080 - DNA, 75 bp, synthetic construct
  source 1..75: mol_type = other DNA
ctgattaaaactgaactgctggagacgcagaccgtggatttcagcgtgggagctgaagggcttcgccatgtaccg

SEQ ID NO: 446081 - DNA, 75 bp, synthetic construct
  source 1..75: mol_type = other DNA
ctgattaaaactgaactgctggagacgcagaccgtggatttcagcgttggggccgaagggcttcgccatgtaccg

SEQ ID NO: 446082 - DNA, 75 bp, synthetic construct
  source 1..75: mol_type = other DNA
agcttgcggatgagatggcggagatgaagaccagcatcacggaaacccgcaatgaaatcacacagacggtcagta

SEQ ID NO: 446083 - DNA, 75 bp, synthetic construct
  source 1..75: mol_type = other DNA
taccacgctgataagcctggttgacggccagggaattccggtcagcgtggaggtacagtccgtcaccgacggcgt

SEQ ID NO: 446084 - DNA, 75 bp, synthetic construct
  source 1..75: mol_type = other DNA
taccacgctgataagcctggttgacggtcagggaactccggtcagcgtggaggtacagtccgtcaccgacggcgt

SEQ ID NO: 446085 - DNA, 75 bp, synthetic construct
  source 1..75: mol_type = other DNA
atatgccagccggtcatggtcatatcaccctgagttttaccgtaagttcacggcgtcagaacgggagttttggca

SEQ ID NO: 446086 - DNA, 75 bp, synthetic construct
  source 1..75: mol_type = other DNA
cgcacaccccgcgccggaccggatacaggtcagtaccctgcctgatggtgtggagacatacggggtgtggggact

SEQ ID NO: 446087 - DNA, 75 bp, synthetic construct
  source 1..75: mol_type = other DNA
atatgagccggtatattctgatgttggcggaagtgcgtcaggctcatggggtattcctgccggacagggtgatgc

SEQ ID NO: 446088 - DNA, 75 bp, synthetic construct
  source 1..75: mol_type = other DNA
tggtggtggatgataacggcgtggggttccgctacagcttcagtgccctgaaggaccggcacacggcggtggagg

SEQ ID NO: 446089 - DNA, 75 bp, synthetic construct
  source 1..75: mol_type = other DNA
cgattgcggaagactgcaccattaatggaacgatgagcgctgaccgaatcattggtgatatcgtcaagggataca

SEQ ID NO: 446090 - DNA, 75 bp, synthetic construct
  source 1..75: mol_type = other DNA
ctgtgggacatgctgactcacccgcgctacggcatgggaaaacgtctgggggcggcggatgtggacaaatgggcg

SEQ ID NO: 446091 - DNA, 75 bp, synthetic construct
  source 1..75: mol_type = other DNA
ctggcagaggcgctgtgggcagagattgacaacagtcagctgaaggacgagatggcggaaatgcagaccaccatc

SEQ ID NO: 446092 - DNA, 75 bp, synthetic construct
  source 1..75: mol_type = other DNA
gccggttaagagtgacccgcaatggtcaggagatttttaatcagtccacgacggatgctcagggcgtattttcct

SEQ ID NO: 446093 - DNA, 75 bp, synthetic construct
  source 1..75: mol_type = other DNA
attaagccgggttatgattattacttttacatccgcagcgtgaataccgttggtaaatcggcatttgtggaggcc

SEQ ID NO: 446094 - DNA, 75 bp, synthetic construct
  source 1..75: mol_type = other DNA
agccaccgcaggcatcagtatcagctgaattttataacccatatacgggcgccagaaatggcgccttttttattg

SEQ ID NO: 446095 - DNA, 75 bp, synthetic construct
  source 1..75: mol_type = other DNA
cagacagacaccagtaataacctgaacagtatgtgggccgtgaaactgcagcagatgcaggatggtcgcctttac

SEQ ID NO: 446096 - DNA, 75 bp, synthetic construct
  source 1..75: mol_type = other DNA
cggctgacggcgaaaaatgccgatatcagcggtaacgtgaatgcgaactccgggacgctcaagaacgtcacgatt

SEQ ID NO: 446097 - DNA, 75 bp, synthetic construct
  source 1..75: mol_type = other DNA
cggctgacggcgaaaaatgccgatatcagcggtaacgtgaatgcgaactccgggacgctcaacaaggtcacgatt

SEQ ID NO: 446098 - DNA, 75 bp, synthetic construct
  source 1..75: mol_type = other DNA
tggatagccgccagtatcaatatcaggccgggccataattattatttttacgttcgcagtgtgaacaccgttggc

SEQ ID NO: 446099 - DNA, 75 bp, synthetic construct
  source 1..75: mol_type = other DNA
actcctcatgccgtctgatagtgcggaaaaacggtgctgaaatttataaccgtaccgcgctggataatacgctga

SEQ ID NO: 446100 - DNA, 75 bp, synthetic construct
  source 1..75: mol_type = other DNA
aaccagaactgtcggattctgggaaaactgtcagctaaccagattgaaggtgatattgtcaaaacggtgggaaaa

SEQ ID NO: 446101 - DNA, 75 bp, synthetic construct
  source 1..75: mol_type = other DNA
aagcatgaaaacttcaacagcaacaaccaacagtcatactggtattcaacctgtaagctgcaggtgctgaagaac

SEQ ID NO: 446102 - DNA, 75 bp, synthetic construct
  source 1..75: mol_type = other DNA
ttcccgcgggactcccgtgcaccggagcggtggccatcagggaccattaccgtcaggatttatgacgatcagccg

SEQ ID NO: 446103 - DNA, 75 bp, synthetic construct
  source 1..75: mol_type = other DNA
atctgctatttgccgcagccgaccgcgcgggctatgtcaatagtagcggcaaactgaaacgcaaagagttagctg

SEQ ID NO: 446104 - DNA, 75 bp, synthetic construct
  source 1..75: mol_type = other DNA
gcggtgtatgacccgacggtacagtatgaattctggttctcagaaaaacgcatcacggacacggcacaggtggaa

SEQ ID NO: 446105 - DNA, 75 bp, synthetic construct
  source 1..75: mol_type = other DNA
cacggaggaaggcaaactgagccagtttctggttgccgctaaccgtattgcgtttattgatccgtctaatggcaa

SEQ ID NO: 446106 - DNA, 75 bp, synthetic construct
  source 1..75: mol_type = other DNA
gaatgatgcacctcaggttttcgcccgaattgtggatatgcgtgcgggaggtggacacgtaaccctgacattcac

SEQ ID NO: 446107 - DNA, 75 bp, synthetic construct
  source 1..75: mol_type = other DNA
cctgacgccggagggcaggctgacggcccgcaatgcggatatcagcggacatatcagtgcgaactcgggcacgct

SEQ ID NO: 446108 - DNA, 75 bp, synthetic construct
  source 1..75: mol_type = other DNA
ggcccgctgggacacgccgaaggtggtgaagggcgtgagcttcctgcttcgcctgaccgtggcagcggatgacgg

SEQ ID NO: 446109 - DNA, 75 bp, synthetic construct
  source 1..75: mol_type = other DNA
gtgaaatcacgctgccatcctccggcaccacgctgataagcctggttgacggaaatggcaatccggtcagcgtgg

SEQ ID NO: 446110 - DNA, 75 bp, synthetic construct
  source 1..75: mol_type = other DNA
tcatgcttcgcctgaccgtggccgcggatgacggcagtgagcggctggtcagcacagcccggacggcggaaacca

SEQ ID NO: 446111 - DNA, 75 bp, synthetic construct
  source 1..75: mol_type = other DNA
cctgctggggcaggagctgaacgatcgtattaatgcctcggcattgcgcagtgaagttgagcaactggaggatga

SEQ ID NO: 446112 - DNA, 75 bp, synthetic construct
  source 1..75: mol_type = other DNA
cttcatatggtgctaataactggacgccaacgaccagtatcagcgaccttcttgttgttgtgatgaagaaatcta

SEQ ID NO: 446113 - DNA, 75 bp, synthetic construct
  source 1..75: mol_type = other DNA
cgctgtacatgctgaaggttcaaaaaacgaaagacggcattccctatgtggccgggattggtgcagggattgagg

SEQ ID NO: 446114 - DNA, 75 bp, synthetic construct
  source 1..75: mol_type = other DNA
agggaaactgtctgcaaaccagattgaaggcgacctggtgaagacggtggggaaagcctttccccggaataacag

SEQ ID NO: 446115 - DNA, 75 bp, synthetic construct
  source 1..75: mol_type = other DNA
cccccgacgttttccctgacgccggaagggaagctgacagccaggaacgcggatatcagcggagcaattaccgcg

SEQ ID NO: 446116 - DNA, 75 bp, synthetic construct
  source 1..75: mol_type = other DNA
atttgtggaggccgtcggtcgggcgagcgatgatgcggaaggttatctgaatttttataaagggttgatcaataa

SEQ ID NO: 446117 - DNA, 75 bp, synthetic construct
  source 1..75: mol_type = other DNA
agggtattttcagataacagcggtcccgaaactggctgtatatgacccgacggtgcagtttgagttctggttctc

SEQ ID NO: 446118 - DNA, 75 bp, synthetic construct
  source 1..75: mol_type = other DNA
tctgggacggcagcctgaaaccggcatacagcaacaaccctgcctggtgcctgtgggacatgctgactcacccgc

SEQ ID NO: 446119 - DNA, 75 bp, synthetic construct
  source 1..75: mol_type = other DNA
attccgcccattatttttaacggtatagcgtatgacgatccggggagcggaaataacccaggaggcacgcgatac

SEQ ID NO: 446120 - DNA, 75 bp, synthetic construct
  source 1..75: mol_type = other DNA
cagtcgtactggtactccacctgcaagctgcaggtgctgaaaaacggggctgagatcttccatgaaccggcaacg

SEQ ID NO: 446121 - DNA, 75 bp, synthetic construct
  source 1..75: mol_type = other DNA
gcagcggatgacggcagtgagcggctggtcagcacagcccggacggcggaaaccacataccgcttcacacaactg

SEQ ID NO: 446122 - DNA, 75 bp, synthetic construct
  source 1..75: mol_type = other DNA
acagcccgctatcttggcacggcgctgtactggatagctgccagtatcaatattaagccgggccatgattattat

SEQ ID NO: 446123 - DNA, 75 bp, synthetic construct
  source 1..75: mol_type = other DNA
ctgcagcagatgcaggacggacgcctttatattgcgggtatcggagccggtattgagaatacgccagcaggtatg

SEQ ID NO: 446124 - DNA, 75 bp, synthetic construct
  source 1..75: mol_type = other DNA
ccacggataaaaaactgggtgaccaggccgtgaccatacagcaaatccagcgggttcagtcagacacgcgcaatg

SEQ ID NO: 446125 - DNA, 75 bp, synthetic construct
  source 1..75: mol_type = other DNA
atccgtcagcggatggacacggatatcgcagaagtgacccggaaaatcggggaggcggaaaacagcctcacgcag

SEQ ID NO: 446126 - DNA, 75 bp, synthetic construct
  source 1..75: mol_type = other DNA
cctggattttttcaaaggagaaatcgggaaaacacatctggcccaggagctgtggacgcagattgataacggtca

SEQ ID NO: 446127 - DNA, 75 bp, synthetic construct
  source 1..75: mol_type = other DNA
ttttgaagggaaaataaacagcaccctgctggggcaggagctgaacgatcgtattaatgcctcggcattgcgcag

SEQ ID NO: 446128 - DNA, 75 bp, synthetic construct
  source 1..75: mol_type = other DNA
gaaggtgaaagtgagccgtgttcctgacggcgttgccgaatacagcgtgtgggggctgaagctgccgacgctgcg

SEQ ID NO: 446129 - DNA, 75 bp, synthetic construct
  source 1..75: mol_type = other DNA
acagcgtgtgggggctgaagctgccgacgctgcgccagcgcctgttccgctgtgtgagtatccgtgagaacgacg

SEQ ID NO: 446130 - DNA, 75 bp, synthetic construct
  source 1..75: mol_type = other DNA
tgtctgcaaaccagattgaaggcgatctcgttaaaacagtgggtaaggctttcccccgggactcccgtgcaccgg

SEQ ID NO: 446131 - DNA, 75 bp, synthetic construct
  source 1..75: mol_type = other DNA
cagccgtttaaccggcagattgttattccggcggtggctttcagcggtgccagacatgagcgggagaacagcgat

SEQ ID NO: 446132 - DNA, 75 bp, synthetic construct
  source 1..75: mol_type = other DNA
ccggtcctggatagcgaggggaagacaaacttttccggtgttacggtggtgttccgcgccggcgagcaggagcag

SEQ ID NO: 446133 - DNA, 75 bp, synthetic construct
  source 1..75: mol_type = other DNA
tccggcgtttgatgtgcgcagtgaacaggcagcgcaagtggcgattgcacggatgaaccgggccattgatgaggt

SEQ ID NO: 446134 - DNA, 75 bp, synthetic construct
  source 1..75: mol_type = other DNA
atcctgcgaatggcaacacaaagccgatgtttgttggtcagggcgatcagatattcatgaatgaagtgttcctga

SEQ ID NO: 446135 - DNA, 75 bp, synthetic construct
  source 1..75: mol_type = other DNA
acacaccgcgtgaggcgaaggataacctgaagtccacgcagatgatgagcgtgattgatgccattggtgaaggtc

SEQ ID NO: 446136 - DNA, 75 bp, synthetic construct
  source 1..75: mol_type = other DNA
ccggtgctggacaatgaggggaataccaacatctccggcgtcacggtggtgttccgggcaggtgagcaggagcag

SEQ ID NO: 446137 - DNA, 75 bp, synthetic construct
  source 1..75: mol_type = other DNA
aaacggattgcggatatcaggcgggttgaaaccagcgcgcgttatcttggtacggcactgtactggatagccgcc

SEQ ID NO: 446138 - DNA, 75 bp, synthetic construct
  source 1..75: mol_type = other DNA
gcgcctgttccgctgtgtgagtatccgtgataacgatgacggcacgtatgccatcactgccgtgcagcatgtacc

SEQ ID NO: 446139 - DNA, 75 bp, synthetic construct
  source 1..75: mol_type = other DNA
tattttcagataacggcggtcccgaaactggctgtatatgacccgacggtacagtttgagttctggttatcggaa

SEQ ID NO: 446140 - DNA, 75 bp, synthetic construct
  source 1..75: mol_type = other DNA
agtgatgatcagaaatttgaccggcaggtcatgataccgccagtgttattccgcggtggtaagcatgagaatttc

SEQ ID NO: 446141 - DNA, 75 bp, synthetic construct
  source 1..75: mol_type = other DNA
gggttatggttttgaagttcgcaaaaacggcgtattaatcgcatccagagaaactaaaggggccattcccggtag

SEQ ID NO: 446142 - DNA, 75 bp, synthetic construct
  source 1..75: mol_type = other DNA
ggaggcgacccaggtcagaggggatttcgttaaagctgtatcaaaagccttcccgaaaaaagtcggtacgtgggg

SEQ ID NO: 446143 - DNA, 75 bp, synthetic construct
  source 1..75: mol_type = other DNA
ttgaccgcctgcgggtgaccttcggggtgcagtcactggtggagaccacgtcaaagggtgaccgtaatccgtcct

SEQ ID NO: 446144 - DNA, 75 bp, synthetic construct
  source 1..75: mol_type = other DNA
atattcatgaacgaagtgttcctgaaatatctgacggctcccaccattaccagcggcggtaatcctccggcattt

SEQ ID NO: 446145 - DNA, 75 bp, synthetic construct
  source 1..75: mol_type = other DNA
gtacggcatcgcaccattcaaaggtaatcaatggatggcgctggacgtggattataaagcgcgtagcgacgaaat

SEQ ID NO: 446146 - DNA, 75 bp, synthetic construct
  source 1..75: mol_type = other DNA
tttccagaaaggcaatcagggggcaggcaatatcaccgactgtacggtgattgtgaccaaaaaagccgcttccgg

SEQ ID NO: 446147 - DNA, 75 bp, synthetic construct
  source 1..75: mol_type = other DNA
tcagattgaaggcgatattgtcaaaacggtggaaaatcctttccgagaaatggcagttatgccagcggtacaata

SEQ ID NO: 446148 - DNA, 75 bp, synthetic construct
  source 1..75: mol_type = other DNA
cccaccattaccagtggtggcagtcctccggtattttccctgacatcagacggaaagctgaccgctaaaaatgcg

SEQ ID NO: 446149 - DNA, 75 bp, synthetic construct
  source 1..75: mol_type = other DNA
ggacatgctgactcacccgcgctacggcatgggaaaacgtctgggggcggcggatgtggacaagtgggcgctgta

SEQ ID NO: 446150 - DNA, 75 bp, synthetic construct
  source 1..75: mol_type = other DNA
gcggagaagacagccgtctggtgaccactgccatcaccgcagacacggagcaccgtttcagcggcctgccgctcg

SEQ ID NO: 446151 - DNA, 75 bp, synthetic construct
  source 1..75: mol_type = other DNA
atgaaaactgtacgattaagggcatgctggaggcgactcaggtcagaggtgacttcgttaaagctgtatccaaat

SEQ ID NO: 446152 - DNA, 75 bp, synthetic construct
  source 1..75: mol_type = other DNA
gcggggaatatcaggtgctggcgcgctgggacacgccgaaggtggtgaagggcgtgagcttcctgctccgtctga

SEQ ID NO: 446153 - DNA, 75 bp, synthetic construct
  source 1..75: mol_type = other DNA
accggaaaaagaagccattgtggataacggggcgcactttgacggcgaccagagcggcaccctgaacagcgtcat

SEQ ID NO: 446154 - DNA, 75 bp, synthetic construct
  source 1..75: mol_type = other DNA
gtatcaaaagccttcccgaaaaaagtcggtacgtggggtaacacggaaacaccagacggtacggttacagtcacc

SEQ ID NO: 446155 - DNA, 75 bp, synthetic construct
  source 1..75: mol_type = other DNA
gaagcggagaagacagccgtctggtgaccaccgccatcactgccgatacggagcaccgtttcagtggcctgcctc

SEQ ID NO: 446156 - DNA, 75 bp, synthetic construct
  source 1..75: mol_type = other DNA
ggtaaggctttcccccgtgactcccgtgcaccggagaggtggccatcagggaccattaccgtcagggtttatgac

SEQ ID NO: 446157 - DNA, 75 bp, synthetic construct
  source 1..75: mol_type = other DNA
gaaaaacggtgctgaaatttataaccgtaccgcggtggataatacgctgctttacagtggtgttattgatatgcc

SEQ ID NO: 446158 - DNA, 75 bp, synthetic construct
  source 1..75: mol_type = other DNA
gaaaaacggtgctgaaatttataaccgtaccgcgctggataatacgctggtttacagtggtgttattgatatgcc

SEQ ID NO: 446159 - DNA, 75 bp, synthetic construct
  source 1..75: mol_type = other DNA
ttaatgcacctgcggtacccgccacgattgaactgacaccgggctattttcagataacagcggtcccgcgtcttg

SEQ ID NO: 446160 - DNA, 75 bp, synthetic construct
  source 1..75: mol_type = other DNA
caccgccagcaccgcagacacggagcaccgtttcagcggcctgccactgggggaatacaccctgacggtcagggc

SEQ ID NO: 446161 - DNA, 75 bp, synthetic construct
  source 1..75: mol_type = other DNA
ccggtcacggtcacatgacactggagttttcggtgtcagcatggctggtaaataactggtatcccacagcaagta

SEQ ID NO: 446162 - DNA, 75 bp, synthetic construct
  source 1..75: mol_type = other DNA
cggtgccggaactcgggctggtggtccttaagccgggccgtgaatctatgcaggtatttcataatccccgggtac

SEQ ID NO: 446163 - DNA, 75 bp, synthetic construct
  source 1..75: mol_type = other DNA
ttatcctggtgggcggtccgcaatcaggtggcggacgcgctaccggaagcggtattacgtcgttcgctggggttg

SEQ ID NO: 446164 - DNA, 75 bp, synthetic construct
  source 1..75: mol_type = other DNA
aacgccagcagactggatgagttttcgaaagagtggaaggacgctaacgataaatggaatgccatgtggggcgtc

SEQ ID NO: 446165 - DNA, 75 bp, synthetic construct
  source 1..75: mol_type = other DNA
ctcaacaatgtcacgattaacgagaactgtcgggttctgggaaaacgtaagcgtcgtctcagcaccgtctggcag

SEQ ID NO: 446166 - DNA, 75 bp, synthetic construct
  source 1..75: mol_type = other DNA
gcagtttgagttctggttttcggaaaagcggattgcggatatcaggcaggttgaaaccacagcccgctatcttgg

SEQ ID NO: 446167 - DNA, 75 bp, synthetic construct
  source 1..75: mol_type = other DNA
gagagcgacatcataccgggagaaccgacagccaccagcatactgaagcagcgcacaaaaaatattgcgctacca

SEQ ID NO: 446168 - DNA, 75 bp, synthetic construct
  source 1..75: mol_type = other DNA
gtgagagcattgttgactcctgaaattgctccgcgaatggggatcgtactgttcagaccaggttcagagctgatg

SEQ ID NO: 446169 - DNA, 75 bp, synthetic construct
  source 1..75: mol_type = other DNA
gctggtggagtggaatgtcttgaacgctggttacttcgtgaaaaaggttgccagtggcctcattccgactggcac

SEQ ID NO: 446170 - DNA, 75 bp, synthetic construct
  source 1..75: mol_type = other DNA
gtgagaaagttaagccgacttgaaaaatatcacatgaataaggtttcaatgcgtagtccgtcaaagattgtcgcc

SEQ ID NO: 446171 - DNA, 75 bp, synthetic construct
  source 1..75: mol_type = other DNA
agaaagaaaagtttatccatagtctggaattattcaatgaactcaaaacatgcgcaaaaaatccggatgagatgg

SEQ ID NO: 446172 - DNA, 75 bp, synthetic construct
  source 1..75: mol_type = other DNA
ccggcggtatcacaaccgctggcggatgatcctgccgttcggggcgtgttccgcaatgaggcagtgatccgtcgt

SEQ ID NO: 446173 - DNA, 75 bp, synthetic construct
  source 1..75: mol_type = other DNA
ctttgtgttgcctttgtgcagaaagcatcacgacgaactgcatgcggataccgtggcatttgaagagaagtatgg

SEQ ID NO: 446174 - DNA, 75 bp, synthetic construct
  source 1..75: mol_type = other DNA
cgtgaccagacctccgaatcacttgagcaacttgctcaccaaaacctgtcagcatggatgattgacgtcattcgt

SEQ ID NO: 446175 - DNA, 75 bp, synthetic construct
  source 1..75: mol_type = other DNA
ctggtgggcggtctgcaatcaggtggctgatgcgcttcctgagcctgtattgcgtcgttcgctgggattaccggt

SEQ ID NO: 446176 - DNA, 75 bp, synthetic construct
  source 1..75: mol_type = other DNA
ggcggaatggggacaaaatctcacgatattttcacgctaccgctgtgtcgggagcatcacaacgagcttcatgcg

SEQ ID NO: 446177 - DNA, 75 bp, synthetic construct
  source 1..75: mol_type = other DNA
cggagtctgtatcacgtcgctcgctgggattacccgtggaaaaaatccgctccgtataccgtgagagcgacatcg

SEQ ID NO: 446178 - DNA, 75 bp, synthetic construct
  source 1..75: mol_type = other DNA
caccacaggaaaagacggtggtcagcattgccgttgatcccgagactccggaatctttcatgaaacgacctaaac

SEQ ID NO: 446179 - DNA, 75 bp, synthetic construct
  source 1..75: mol_type = other DNA
caccacaggaaaagacggtggtcagcattgccgttgatccagagcctccggaatctttcatgaaacgacctaaac

SEQ ID NO: 446180 - DNA, 75 bp, synthetic construct
  source 1..75: mol_type = other DNA
catcagcgatgatcataactttgaccgtcaaatcattattccgcccattatctttaacggaatagcgtatagcga

SEQ ID NO: 446181 - DNA, 75 bp, synthetic construct
  source 1..75: mol_type = other DNA
tcacggccacatgacgctggagttttcggtgtcagcatggctggtaaatgactggtatcccacagcaagtatcag

SEQ ID NO: 446182 - DNA, 75 bp, synthetic construct
  source 1..75: mol_type = other DNA
ttataaagggttgatcaataaaacgcatctcggcaaggaactgctggaaaactttgagctgacggaggataacgc

SEQ ID NO: 446183 - DNA, 75 bp, synthetic construct
  source 1..75: mol_type = other DNA
cggtgccagacatgagcgggagaatagcgatacttattcgtcatgccgcctgatagtgaagaaaaacggggctga

SEQ ID NO: 446184 - DNA, 75 bp, synthetic construct
  source 1..75: mol_type = other DNA
aatcagggcgcaggaaacatcacagactgtacggtgattgtgaccaaaaaagctgcttccggtatcagtatccgt

SEQ ID NO: 446185 - DNA, 75 bp, synthetic construct
  source 1..75: mol_type = other DNA
gccgaagtcactgcagacagcggggagtatcaggtactggcccgctgggacacgccgaaggtggtgaagggcgtg

SEQ ID NO: 446186 - DNA, 75 bp, synthetic construct
  source 1..75: mol_type = other DNA
aagcggattgccgatatccggcaggttgaaaccagcgcgcgctatcttggcacggggatgtactggatagccgcc

SEQ ID NO: 446187 - DNA, 75 bp, synthetic construct
  source 1..75: mol_type = other DNA
atgcataaccatcaacataattatgatttattcctgcaagccataaatgagcgggtaaaatcggaatgcctctta

SEQ ID NO: 446188 - DNA, 75 bp, synthetic construct
  source 1..75: mol_type = other DNA
ggttaatgaaaagtacacgcgctgggttaagacacagccgtgtgcatgttgtggaaagccagctgatgatccgca

SEQ ID NO: 446189 - DNA, 75 bp, synthetic construct
  source 1..75: mol_type = other DNA
cagggcgatccggcgtcggtatcgttcaggattgccgcaccggcagcgccgtcacagattgagctgacgccgggc

SEQ ID NO: 446190 - DNA, 75 bp, synthetic construct
  source 1..75: mol_type = other DNA
gatgtttgttggtcagggcgatcagatattcatgaatgacgtgttcctgaaacgcctgacggcccccaccattac

SEQ ID NO: 446191 - DNA, 75 bp, synthetic construct
  source 1..75: mol_type = other DNA
atgggtaaaggcagcagtaagggacataccccgcgcgaagcgaaagataacctgaaatccacgcagctgctgagt

SEQ ID NO: 446192 - DNA, 75 bp, synthetic construct
  source 1..75: mol_type = other DNA
cattgctgttgatccggagtctccggaatctttcatgaagcgacctaaacgtcgccgttgggtaaatgagaaata

SEQ ID NO: 446193 - DNA, 75 bp, synthetic construct
  source 1..75: mol_type = other DNA
taatctgccgtccggggtcgttcctgccgttcgccagccgctgggggatgacaaaccatttctgccttttttcag

SEQ ID NO: 446194 - DNA, 75 bp, synthetic construct
  source 1..75: mol_type = other DNA
taatctgccgtccggggtcgttcctgccgttcgccagccgctgggggatgataaaacatttctgccctttttcag

SEQ ID NO: 446195 - DNA, 75 bp, synthetic construct
  source 1..75: mol_type = other DNA
cacgcaataaacggtacacaggagcgggagttatcgctggctgaattatcctggtgggcggtctgcaatcaggta

SEQ ID NO: 446196 - DNA, 75 bp, synthetic construct
  source 1..75: mol_type = other DNA
ctgtcagtggccccacaataattaccaccacagtgaaacagtcatccaccgctacggtgctggtgcaatggtgct

SEQ ID NO: 446197 - DNA, 75 bp, synthetic construct
  source 1..75: mol_type = other DNA
tggtggagccggaaccgaaaaacatgcgggcgctgccatccggagcggttcccactgttcgccagccgctggtgg

SEQ ID NO: 446198 - DNA, 75 bp, synthetic construct
  source 1..75: mol_type = other DNA
gaaaggccagttccgcattgcagccaggctttggttgctgtgcatggatgcagcagtcggtgaggttgaacgcgc

SEQ ID NO: 446199 - DNA, 75 bp, synthetic construct
  source 1..75: mol_type = other DNA
tacttcttctgatggcagataataacgaagcaacaagcagcattcttgcagacccttacggtaagatctcacata

SEQ ID NO: 446200 - DNA, 75 bp, synthetic construct
  source 1..75: mol_type = other DNA
ccgacggtagagtttgagttctggttttctgaaacgaagatttcagatgtctcacaggtggacaaatttgcccgc

SEQ ID NO: 446201 - DNA, 75 bp, synthetic construct
  source 1..75: mol_type = other DNA
taatctgccgtccggggtcgttcctgccgttcgccagccgctgggggatgaaaaatcatttctgccctttttcag

SEQ ID NO: 446202 - DNA, 75 bp, synthetic construct
  source 1..75: mol_type = other DNA
tagtaacgaacgggtgattcgtgctgctggcggtgttggcgcattgtctgactggctattacgtcatgttacatc

SEQ ID NO: 446203 - DNA, 75 bp, synthetic construct
  source 1..75: mol_type = other DNA
gcatggatgattgacgtcatacgccatgcaatgaatggctcgcaggaacgggaattatcgctggctgaattatcc

SEQ ID NO: 446204 - DNA, 75 bp, synthetic construct
  source 1..75: mol_type = other DNA
gaaagtgacatcgtaccgggagagcagagcgccaccagcatactgaagcagcgcacaaaaaatcttgcgccgttg

SEQ ID NO: 446205 - DNA, 75 bp, synthetic construct
  source 1..75: mol_type = other DNA
ggaaaaaatccgctctgtctaccgtgaaagcgacatcataccgggagagcagacagccaccagcatactgaagca

SEQ ID NO: 446206 - DNA, 75 bp, synthetic construct
  source 1..75: mol_type = other DNA
gctgcggtatgccagccgacgatccgcatcatctgattggtcacgggcagggcggaatgggaaccaaagcacatg

SEQ ID NO: 446207 - DNA, 75 bp, synthetic construct
  source 1..75: mol_type = other DNA
tgtgcatgttgtggaaagcctgctgatgatccccaccacctgataggccacggtcagggtggaatgggtacaaaa

SEQ ID NO: 446208 - DNA, 75 bp, synthetic construct
  source 1..75: mol_type = other DNA
cattgccgttgatccggagtcaccagaatcattcatgaagaggcctaaacgtcgccgctgggtgaatgagaaata

SEQ ID NO: 446209 - DNA, 75 bp, synthetic construct
  source 1..75: mol_type = other DNA
tgcctggatgattgacgtcatccgtcacgcaataagcggcacgcaggagagggagttatcgctggccgaattatc

SEQ ID NO: 446210 - DNA, 75 bp, synthetic construct
  source 1..75: mol_type = other DNA
tgtgcagaaagcatcacaacgagctgcatacggatacagtggcatttgaagagaagtatggctcccaactggagc

SEQ ID NO: 446211 - DNA, 75 bp, synthetic construct
  source 1..75: mol_type = other DNA
attcgtgctgctggtggcgctggcgcattgtctgattggttactgcgccatgttaaatcctgccagtggccacac

SEQ ID NO: 446212 - DNA, 75 bp, synthetic construct
  source 1..75: mol_type = other DNA
taagcatcaccgttgatccggagtctccggaatctttcatgaggcgacctaaacgtcgccgttgggtaaatgaga

SEQ ID NO: 446213 - DNA, 75 bp, synthetic construct
  source 1..75: mol_type = other DNA
cgataccggaactcgggctggtggtccttaaaccaggccgtgaatccatgcaggtatttcataactctcgagtgc

SEQ ID NO: 446214 - DNA, 75 bp, synthetic construct
  source 1..75: mol_type = other DNA
acaccatgacgaactgcatgcggataccgtggcatttgaagagaagtatggttcccaactggagctgatatttca

SEQ ID NO: 446215 - DNA, 75 bp, synthetic construct
  source 1..75: mol_type = other DNA
atctcacgatattttcacgctaccgctgtgtcgggagcatcacaacgagcttcatgcggatcctctggcgttcga

SEQ ID NO: 446216 - DNA, 75 bp, synthetic construct
  source 1..75: mol_type = other DNA
gtcgccgctgggtaaatgagaaatacacgcgctgggtaaagacacagccgtgtgcgtgttgtggtaagccagccg

SEQ ID NO: 446217 - DNA, 75 bp, synthetic construct
  source 1..75: mol_type = other DNA
gtgaattatctctggctgaattatcctggtgggcggcctgcaatcaggtggtggatgcactacctgaggcagtag

SEQ ID NO: 446218 - DNA, 75 bp, synthetic construct
  source 1..75: mol_type = other DNA
cctgccgttcgccagccgctggtggaagacaaaacattgctgccgtttttcagtaatgcacgggtaattcgtgct

SEQ ID NO: 446219 - DNA, 75 bp, synthetic construct
  source 1..75: mol_type = other DNA
gttacggtaccggcgcgatggtgttgtgctggcactgcgacaaccagctgcgggagcagacatctgattcactgg

SEQ ID NO: 446220 - DNA, 75 bp, synthetic construct
  source 1..75: mol_type = other DNA
actggctgttgcgccatattaaatcctgccagtggccacacggcgattatcatcacagtgaaaccgtcattcacc

SEQ ID NO: 446221 - DNA, 75 bp, synthetic construct
  source 1..75: mol_type = other DNA
cggtaccggaacttgggctggtggtgctaaaaccgggccgtgaatccatgcaggtatttcataaccctcgagttc

SEQ ID NO: 446222 - DNA, 75 bp, synthetic construct
  source 1..75: mol_type = other DNA
gtgcgggtattacttcgacctgttctggtaccggaactcggtctggttatcgttaagccaggccgtgaatccatg

SEQ ID NO: 446223 - DNA, 75 bp, synthetic construct
  source 1..75: mol_type = other DNA
tgtgcgtgctgtggtaagccagctgacgatccccatcaccttattggtcacggtcagggcggaatgggaacaaaa

SEQ ID NO: 446224 - DNA, 75 bp, synthetic construct
  source 1..75: mol_type = other DNA
gcgcacaaaaaatttgcgccgcgcctcacgcccaccagcaacagaacccaccacaggaaaagacggtggtcagca

SEQ ID NO: 446225 - DNA, 75 bp, synthetic construct
  source 1..75: mol_type = other DNA
cgggaattatctctggctgaattatcctggtgggcggtccgcaatcaggtggcggacgcgctaccggaagcggta

SEQ ID NO: 446226 - DNA, 75 bp, synthetic construct
  source 1..75: mol_type = other DNA
gtgcgggtattgcttcgacctgttcctgtaccggaacttgggctggtggttcttaagccgggccgtgaatccatg

SEQ ID NO: 446227 - DNA, 75 bp, synthetic construct
  source 1..75: mol_type = other DNA
atggtactggcgcaatggtgttgtgctggtactgcgacaaccagctgcgtgaccagacttctgaatcactcgggc

SEQ ID NO: 446228 - DNA, 75 bp, synthetic construct
  source 1..75: mol_type = other DNA
cgccacaggaaaagacggtggtcagcattgccgttgatccggagtctcctgaatctttcatgaggcgacctaaac

SEQ ID NO: 446229 - DNA, 75 bp, synthetic construct
  source 1..75: mol_type = other DNA
gtgcgtgttgtggtaagccagctgacgatccgcatcacctgattggtcatggtcaggggggaatgggaacaaaag

SEQ ID NO: 446230 - DNA, 75 bp, synthetic construct
  source 1..75: mol_type = other DNA
taatctgccgtccggggtcgttcctgccgttcgccagccgctggaggaagataaagcattgctgccctttttcag

SEQ ID NO: 446231 - DNA, 75 bp, synthetic construct
  source 1..75: mol_type = other DNA
caccacagtgaaaccgtcattcaccgttatggtaccggcgcaatggtgttgtgctggcactgcgacaaccagctg

SEQ ID NO: 446232 - DNA, 75 bp, synthetic construct
  source 1..75: mol_type = other DNA
gtgctggcactgcgacaaccaactgcgtgaccagacatccgaatcactcgagcaacttgctcatcaaaacctgtc

SEQ ID NO: 446233 - DNA, 75 bp, synthetic construct
  source 1..75: mol_type = other DNA
taatctgccgtccggggtcgttcctgccgttcgccagccgctggaggaggataaagcattactgccctttttcag

SEQ ID NO: 446234 - DNA, 75 bp, synthetic construct
  source 1..75: mol_type = other DNA
taatctgccgtccggggtcgttcctgccgttcgccagccgctggaggacgataaagcattcctgccatttttcag

SEQ ID NO: 446235 - DNA, 75 bp, synthetic construct
  source 1..75: mol_type = other DNA
taatctgccgtccggggtcgttcctgccgttcgccagccgctggaggatgataaagcatttctgccctttttcag

SEQ ID NO: 446236 - DNA, 75 bp, synthetic construct
  source 1..75: mol_type = other DNA
ccggagactgctcaggagcttcagaacgatccgttaatgcgtgctgtcttcgaaaatcagaaggtcatacatcgt

SEQ ID NO: 446237 - DNA, 75 bp, synthetic construct
  source 1..75: mol_type = other DNA
aattatcctggtgggcggtccgcaatcagctggcggacgcgctaccggaagcggtattacgtcgctcgctgggat

SEQ ID NO: 446238 - DNA, 75 bp, synthetic construct
  source 1..75: mol_type = other DNA
gagaagtatggctcccagctggagttgatatttcgttttatcgatcgtgcgctggcaactggcgtgctggcctga

SEQ ID NO: 446239 - DNA, 75 bp, synthetic construct
  source 1..75: mol_type = other DNA
tgctggagcctgagccggaacgttattcatctttcgccagtggtgccgttccggcggtatcacaaccgctggcgg

SEQ ID NO: 446240 - DNA, 75 bp, synthetic construct
  source 1..75: mol_type = other DNA
agacagccatcagcatactgaagcagcgcacaaaaaatattgcgctgccacttcacgtccaccagcaacagcccc

SEQ ID NO: 446241 - DNA, 75 bp, synthetic construct
  source 1..75: mol_type = other DNA
tgggtacaaaagcgcatgacctctttgtgttgcctttgtgcagaaagcatcacgacgagctgcatgcggataccg

SEQ ID NO: 446242 - DNA, 75 bp, synthetic construct
  source 1..75: mol_type = other DNA
catttgaagagaagtatggctcccaactggagctgatatttcgttttatcgatcgcgcgctggcaattggcgtac

SEQ ID NO: 446243 - DNA, 75 bp, synthetic construct
  source 1..75: mol_type = other DNA
gctgatgcgcttccggagtctgtattgtgtcgttcactgggattaccggtggaaaaaatccgctccgtataccgt

SEQ ID NO: 446244 - DNA, 75 bp, synthetic construct
  source 1..75: mol_type = other DNA
agaccgcaaccagcatattgaagcagcgcacaaaaaatcttgtgccgttgcctcacacccaccagcaacaaaccc

SEQ ID NO: 446245 - DNA, 75 bp, synthetic construct
  source 1..75: mol_type = other DNA
gtgcggatattacttcgccctgttcttgtaccggagctcggtctggttatcgttaagccaggccgggaatcaatg

SEQ ID NO: 446246 - DNA, 75 bp, synthetic construct
  source 1..75: mol_type = other DNA
atgaaagtatcagttccaggcatgccggctacacttttaaatatgagcaataacgatatttataagatggtgagc

SEQ ID NO: 446247 - DNA, 75 bp, synthetic construct
  source 1..75: mol_type = other DNA
gttacggtactggcgcgatggtattgtgctggcactgtgacaaccagctgcgcgaccagacatcagagtcactcg

SEQ ID NO: 446248 - DNA, 75 bp, synthetic construct
  source 1..75: mol_type = other DNA
cggtaccggaacttgggctggtggtgctaaagccggtccgtgaatccatgcaggtatttcataaccctcgagtgc

SEQ ID NO: 446249 - DNA, 75 bp, synthetic construct
  source 1..75: mol_type = other DNA
gtgaattatcactggctgaactgtactgctgggctgttgtaaataatgtggtggatgccatgaccgaaaatatgg

SEQ ID NO: 446250 - DNA, 75 bp, synthetic construct
  source 1..75: mol_type = other DNA
ggaaaagacgttagtaagcatcgccgttgatccggagtctccggctcagtacctccagcgccagaaaccacaacg

SEQ ID NO: 446251 - DNA, 75 bp, synthetic construct
  source 1..75: mol_type = other DNA
tggtgccggaactcgggctggtggtccttaagccaggtcgtgaatccatgcaggtatttcacaatcttcgagtgc

SEQ ID NO: 446252 - DNA, 75 bp, synthetic construct
  source 1..75: mol_type = other DNA
gatccgctggcatttgaagaaaagcatggttcccagattgatttaacttttcgttttcttgattacgcctttgca

SEQ ID NO: 446253 - DNA, 75 bp, synthetic construct
  source 1..75: mol_type = other DNA
atgattgacgtcatacgccatgcaatgaatggcacgcaggagcgggaattatcgctggctgaattatcctggtgg

SEQ ID NO: 446254 - DNA, 75 bp, synthetic construct
  source 1..75: mol_type = other DNA
cctgccgttcgccagccgctggcggaggataaatcattactgccatttttcagtgatgagagggtgattcgcgct

SEQ ID NO: 446255 - DNA, 75 bp, synthetic construct
  source 1..75: mol_type = other DNA
agcggcggaagtccggggcatggtggcggcagttacagacctgtctacagcacaatctggatcaaagtattcagg

SEQ ID NO: 446256 - DNA, 75 bp, synthetic construct
  source 1..75: mol_type = other DNA
cgcctttatattgcgggtatcggtgccggtattgagaatacgccagcaggaatgcagagtcaggtgctgctggcg

SEQ ID NO: 446257 - DNA, 75 bp, synthetic construct
  source 1..75: mol_type = other DNA
caggcaccctgaacagcgttattccaccggcagtgcagcacctgacggtggaggtgagcgcagctgacggtcagt

SEQ ID NO: 446258 - DNA, 75 bp, synthetic construct
  source 1..75: mol_type = other DNA
ccattaccgtcagggtttatgacgatcagccgtttaaccggcagattgttattccggcggtggctttcagcggtg

SEQ ID NO: 446259 - DNA, 75 bp, synthetic construct
  source 1..75: mol_type = other DNA
aattctggttctcagaaaaacgcatcacgaacacggcacaggtggaaaaatctgcccgttatctggggaccggca

SEQ ID NO: 446260 - DNA, 75 bp, synthetic construct
  source 1..75: mol_type = other DNA
agacggaagaaggaaaactgagcgagtttctggttgccgccaaccgtatcgcgtttattgatccggcaaacggta

SEQ ID NO: 446261 - DNA, 75 bp, synthetic construct
  source 1..75: mol_type = other DNA
gagaagtcatcctaccggagaagggcacatccacagtaaatctgataaatggcagtggtaagccggtgagtgtgg

SEQ ID NO: 446262 - DNA, 75 bp, synthetic construct
  source 1..75: mol_type = other DNA
gtattctgctgcaggcggaccgtatcgcgatgattaccccggagaatggcaacaccacgccgctgtttgtggcgc

SEQ ID NO: 446263 - DNA, 75 bp, synthetic construct
  source 1..75: mol_type = other DNA
agcgtggccatcaccgcacaccccgcgcctgaccggatacaggtcagcaccctgccggatggtgtggagacatac

SEQ ID NO: 446264 - DNA, 75 bp, synthetic construct
  source 1..75: mol_type = other DNA
ggtggggaaatctgcttttgtggaagccagtggccgggccagcaatgatgcagaagggtatctgggctgtttcgg

SEQ ID NO: 446265 - DNA, 75 bp, synthetic construct
  source 1..75: mol_type = other DNA
caccgccatcaccgcagacacggagcaccgtttcagcggcctgcctctcggggaatacaccctgacggtgcgggc

SEQ ID NO: 446266 - DNA, 75 bp, synthetic construct
  source 1..75: mol_type = other DNA
aaacctctgcccgttatctggggaccggcagtcagtggagtgtatccggtccgcacattaagcccggaaaggatt

SEQ ID NO: 446267 - DNA, 75 bp, synthetic construct
  source 1..75: mol_type = other DNA
gtcagcttgcgcctgacctggcggaaatcagaacgtccatcacggatgtcagtaatgaaatcacgcagaccgtca

SEQ ID NO: 446268 - DNA, 75 bp, synthetic construct
  source 1..75: mol_type = other DNA
agctttgagccgcagtcaggcaccctgaacagcgtcatccctccggcagtgcagcacctgacggtggaggtgagc

SEQ ID NO: 446269 - DNA, 75 bp, synthetic construct
  source 1..75: mol_type = other DNA
gtgataagtggaatgccatgtggggcgtcagaattgagcagaccaaagacggcaggcattatgtcgcgggtattg

SEQ ID NO: 446270 - DNA, 75 bp, synthetic construct
  source 1..75: mol_type = other DNA
gccagcaaactggagcagttttcgaaagagtggaaggatgctaacgataagtggaatgccatgtggggcgtcaaa

SEQ ID NO: 446271 - DNA, 75 bp, synthetic construct
  source 1..75: mol_type = other DNA
catgctgaaggttcaaaaaacgaaagacggcattccctatgtggccgggattggtgcagggattgaggatactga

SEQ ID NO: 446272 - DNA, 75 bp, synthetic construct
  source 1..75: mol_type = other DNA
tctccctgccgtcactgcgtcgtcgcctgttccgctgtgtctccatccgggaaaacacggacggcacctttgcca

SEQ ID NO: 446273 - DNA, 75 bp, synthetic construct
  source 1..75: mol_type = other DNA
aactgtgtcatcagagggaaactgtctgcaaaccagattgaaggcgatctcgttaaaacagtgggtaaggctttc

SEQ ID NO: 446274 - DNA, 75 bp, synthetic construct
  source 1..75: mol_type = other DNA
tggcggcagacaggattgcgatgattaatcctgcaaatggcaacacaaaaccgatgtttgttggtcagggtgatc

SEQ ID NO: 446275 - DNA, 75 bp, synthetic construct
  source 1..75: mol_type = other DNA
cagcagatacagaaagttcaggttgatacaaataataacctgaacagcatgtgggccgtgaaactgcagcagatg

SEQ ID NO: 446276 - DNA, 75 bp, synthetic construct
  source 1..75: mol_type = other DNA
ttgcggtgtatgacccgacggtacagtttgagttctggttttcggaggcaaaaatcgcagacacatctcaggtgg

SEQ ID NO: 446277 - DNA, 75 bp, synthetic construct
  source 1..75: mol_type = other DNA
gctacgggatgggaaaacgcctgggggccgcggatgtggacaagtgggcgctgtatgccatcgggcagtactgcg

SEQ ID NO: 446278 - DNA, 75 bp, synthetic construct
  source 1..75: mol_type = other DNA
agacggtggggaaagcctttccccggaataacagttatgccagcgggacggtaaccgtcacagtttacgatgacc

SEQ ID NO: 446279 - DNA, 75 bp, synthetic construct
  source 1..75: mol_type = other DNA
gacggtatgcagagtcaggtgctgctggcggcggacaggattgcgatgattaatcctgcgaatggcaacacaaag

SEQ ID NO: 446280 - DNA, 75 bp, synthetic construct
  source 1..75: mol_type = other DNA
ttcaacctgccggttaagagtgacccgcaatggtcaggagatttttaatcagtccacgacggatgctcagggcgt

SEQ ID NO: 446281 - DNA, 75 bp, synthetic construct
  source 1..75: mol_type = other DNA
acggaaacccgcaatgaaatcacacagacggtcaacaaaacactggagaaccagagcgccaccatacagcagata

SEQ ID NO: 446282 - DNA, 75 bp, synthetic construct
  source 1..75: mol_type = other DNA
ccaacatctccggcgtcacggtggtgttccgggcaggtgagcaggagcagacaccgccggaaggttttgaatcct

SEQ ID NO: 446283 - DNA, 75 bp, synthetic construct
  source 1..75: mol_type = other DNA
acggcgtggggtttcgctacagcttcagcgccctgaaggaccgccacacggcggtggaggtgaattacaccgacc

SEQ ID NO: 446284 - DNA, 75 bp, synthetic construct
  source 1..75: mol_type = other DNA
tgacccgacggtgcagtttgagttctggttttcggaaaaacgcatcacgaacacggcacaggtggaaaaatctgc

SEQ ID NO: 446285 - DNA, 75 bp, synthetic construct
  source 1..75: mol_type = other DNA
ccgggttctgggaaaactgtccgcgaaccagattgaaggcgatctcgttaaaacagtgggtaaagctttcccccg

SEQ ID NO: 446286 - DNA, 75 bp, synthetic construct
  source 1..75: mol_type = other DNA
ttccgcccattatttttaacggtatagcgtatgacgatccggggagcggaaataacccaggaggcacgcgataca

SEQ ID NO: 446287 - DNA, 75 bp, synthetic construct
  source 1..75: mol_type = other DNA
ggacgccaacgataagtggaatgccatgtggggcgtcaaaattgagcagaccgaggacggcaaacattatgtcgc

SEQ ID NO: 446288 - DNA, 75 bp, synthetic construct
  source 1..75: mol_type = other DNA
cgggactcccgggcaccggagcggtggccatcagggaccattaccgtcaggatttatgacgatcagccgtttgac

SEQ ID NO: 446289 - DNA, 75 bp, synthetic construct
  source 1..75: mol_type = other DNA
ccggtgctggacagtgaggggaataccaacatcgccggtgtcacggtggtgttccgggccggtgagcaggagcag

SEQ ID NO: 446290 - DNA, 75 bp, synthetic construct
  source 1..75: mol_type = other DNA
aagaatcagtgatgatcagaaatttgaccggcaggtcatgataccgccagtgttattccgcggtggtaagcatga

SEQ ID NO: 446291 - DNA, 75 bp, synthetic construct
  source 1..75: mol_type = other DNA
cgcctgacggctcccaccattaccagcggtggaaatccgccggcattttccctgacaccagacggaaagctgacc

SEQ ID NO: 446292 - DNA, 75 bp, synthetic construct
  source 1..75: mol_type = other DNA
gttaaagctgtatcaaaagccttcccgaaaaaagtcggtacgtggggtaacacggaaacaccaaacggtacggtt

SEQ ID NO: 446293 - DNA, 75 bp, synthetic construct
  source 1..75: mol_type = other DNA
gatgattaatcctgcgaatggcaacacaaagccgatgtttgttggtcagggcgatcagatattcatgaatgaagt

SEQ ID NO: 446294 - DNA, 75 bp, synthetic construct
  source 1..75: mol_type = other DNA
tgcaggacggacgcctttatattgcgggtatcggtgccggtattgagaacacccctgacggcatgcagagtcagg

SEQ ID NO: 446295 - DNA, 75 bp, synthetic construct
  source 1..75: mol_type = other DNA
acacgccggtagaggcaaaggacaatcttaagtccacgcagatgatgagcgtgattgatgcgattggtgaagggc

SEQ ID NO: 446296 - DNA, 75 bp, synthetic construct
  source 1..75: mol_type = other DNA
gcagagccagatactgctggcagcggaccgtgtggcattcattaatccggagaatggtgataccacacccgcact

SEQ ID NO: 446297 - DNA, 75 bp, synthetic construct
  source 1..75: mol_type = other DNA
tatgtgcgcagcgtcaacctggtgggtaaatctgcttttgtggaagccagtggacgggcgagcaatgatgctgcg

SEQ ID NO: 446298 - DNA, 75 bp, synthetic construct
  source 1..75: mol_type = other DNA
tttcggtgtcagcatggctggtaaataactggtatcccacagcaagtatcagcgatctgctggttgtggtgatga

SEQ ID NO: 446299 - DNA, 75 bp, synthetic construct
  source 1..75: mol_type = other DNA
aacgtcacgattaatgagaactgtcagattaaggggaaactgtcagccaaccagattgaaggcgatattgtcaaa

SEQ ID NO: 446300 - DNA, 75 bp, synthetic construct
  source 1..75: mol_type = other DNA
cattgatgcttcagcgctgcgtacggaggtcacgcaactggaagaagacatccgtcagcggatggacacggatat

SEQ ID NO: 446301 - DNA, 75 bp, synthetic construct
  source 1..75: mol_type = other DNA
ggccggtgcgaacaactggacgccgacaacgtacatcagtgatttactggttgtggtcatgaaaaaatccactgc

SEQ ID NO: 446302 - DNA, 75 bp, synthetic construct
  source 1..75: mol_type = other DNA
ttgaccgcctgcgggtcaccttcggggtgcagtcactggtgcagaccacctcaaagggcgaccgtaatccctctt

SEQ ID NO: 446303 - DNA, 75 bp, synthetic construct
  source 1..75: mol_type = other DNA
ctgcgggctatctggaaacttttccgggaaaagataggaaaaacgcatcaggcagaggcgctgtgggcagagatt

SEQ ID NO: 446304 - DNA, 75 bp, synthetic construct
  source 1..75: mol_type = other DNA
gtgattgatgccatcagcgaagggccgattgacggtccggtggatggattaaaagtaagcggctcgccagaaccg

SEQ ID NO: 446305 - DNA, 75 bp, synthetic construct
  source 1..75: mol_type = other DNA
ttattctgctttctttagctttgttttcatcatcaggatgcagcatcaatagaactgttaacaagactttatctc

SEQ ID NO: 446306 - DNA, 75 bp, synthetic construct
  source 1..75: mol_type = other DNA
aacgtggcatttgaagagaagtatggctcccagctggagctgatatttcgttttatcgaccgtgtgttggcaatt

SEQ ID NO: 446307 - DNA, 75 bp, synthetic construct
  source 1..75: mol_type = other DNA
tcgccgctgggttaatgaaaagtacacgcgctgggttaagacacagccgtgcgcatgttgtggaaagcctgctga

SEQ ID NO: 446308 - DNA, 75 bp, synthetic construct
  source 1..75: mol_type = other DNA
gggatcgtattgttcaggcccggttcagagctgatgcccctgtttatgcaggggcgtgtactgctggagcctgag

SEQ ID NO: 446309 - DNA, 75 bp, synthetic construct
  source 1..75: mol_type = other DNA
gcgggtaaaatcggaatgcctcttactcctcccgcaagaacacgaagcagtaaaggccattcaggctgaaccgta

SEQ ID NO: 446310 - DNA, 75 bp, synthetic construct
  source 1..75: mol_type = other DNA
gaattaaactaccttgaatgtgagtgggatcatcattacgccaaatcacaaaaagaacgcatcttccgtcgattg

SEQ ID NO: 446311 - DNA, 75 bp, synthetic construct
  source 1..75: mol_type = other DNA
tcagcggagcaattaccgcgaataccggcacgctcaataatgtcaccattaacgagaactgtgtcatcagaggga

SEQ ID NO: 446312 - DNA, 75 bp, synthetic construct
  source 1..75: mol_type = other DNA
acgggttatggttttgaagttcgcaaaaacggcgtattaatcgcatccagagaaactaaaggggccattcccggt

SEQ ID NO: 446313 - DNA, 75 bp, synthetic construct
  source 1..75: mol_type = other DNA
ctcagggacgctcaacaacgtcacgattaatgagaactgtcagattaaggggaaactgtcagccaaccagattga

SEQ ID NO: 446314 - DNA, 75 bp, synthetic construct
  source 1..75: mol_type = other DNA
caatgcgacacgcgccgggcgcaatccgtctgtgctggcactgcgataaccagctgcgcgatcagttcacggaac

SEQ ID NO: 446315 - DNA, 75 bp, synthetic construct
  source 1..75: mol_type = other DNA
acgaaacctttcccgcttgaggtcagatacatctcgtatgaatgtatgaaaaaaagaatcagtggatttgatggt

SEQ ID NO: 446316 - DNA, 75 bp, synthetic construct
  source 1..75: mol_type = other DNA
tgccggcagggcggggtcatgtcaccctgacgtttaatgtgtcgtcggccggtgcgaacaactggacgccgacaa

SEQ ID NO: 446317 - DNA, 75 bp, synthetic construct
  source 1..75: mol_type = other DNA
tctccgtccgggaaaacacggacggcacctttgccatcacggcggtgcagcacgtaccggaaaaagaagccatcg

SEQ ID NO: 446318 - DNA, 75 bp, synthetic construct
  source 1..75: mol_type = other DNA
acaccatatatcccgggtcatccactccgttcagctatttcatgaggatggcgtcagggggaggtgatgtcagga

SEQ ID NO: 446319 - DNA, 75 bp, synthetic construct
  source 1..75: mol_type = other DNA
aagtgatggtgacggtgcgacctcaatctgtacgctgacggtgagtgtgaatgatcgggtggtgttcagcaaaac

SEQ ID NO: 446320 - DNA, 75 bp, synthetic construct
  source 1..75: mol_type = other DNA
ccgggaaggatttctggttttacgtgcgcagcgtcaacctggtggggaaatctgcttttgtggaagccagtggcc

SEQ ID NO: 446321 - DNA, 75 bp, synthetic construct
  source 1..75: mol_type = other DNA
taatgaaaactgtcagattaagggaaaactgtcagccaatcagattgaaggcgatattgtcaaaacggtcagcaa

SEQ ID NO: 446322 - DNA, 75 bp, synthetic construct
  source 1..75: mol_type = other DNA
ggaaaaagaagccatcgtggataacggtgcccgctttgagccgcagtcaggcaccctgaacagcgtcatccctcc

SEQ ID NO: 446323 - DNA, 75 bp, synthetic construct
  source 1..75: mol_type = other DNA
caccacactgataagcctggtcgacgggacggggagtccggtcagcgtggaggttcagtccgtcaccgatggtgt

SEQ ID NO: 446324 - DNA, 75 bp, synthetic construct
  source 1..75: mol_type = other DNA
ggtggcattcagcggtgctaaacatgagagagagcatactgatatttactcctcatgccgcctgatagtgaagaa

SEQ ID NO: 446325 - DNA, 75 bp, synthetic construct
  source 1..75: mol_type = other DNA
ggacacggccatgtcaccctgactttcaatgtttcttcatatggtgctaataactggacgccaacgaccagtatc

SEQ ID NO: 446326 - DNA, 75 bp, synthetic construct
  source 1..75: mol_type = other DNA
gaccagagtgcagcgatccagcagatacagaaggttcaggttgatacaaataataacctgaacagcatgtgggct

SEQ ID NO: 446327 - DNA, 75 bp, synthetic construct
  source 1..75: mol_type = other DNA
cactctacatgctgaaagtacaaaaaaccaaaaacggcattccttatgtggccgggattggtgcagggattgagg

SEQ ID NO: 446328 - DNA, 75 bp, synthetic construct
  source 1..75: mol_type = other DNA
cggcaatcccccgacgttctccctgacgccggaaggcaggctgacggcccgtaatgcggatatcagcggaaatat

SEQ ID NO: 446329 - DNA, 75 bp, synthetic construct
  source 1..75: mol_type = other DNA
tacggacgcaatcttctgaagatggatgcgttcggctgtaccagccgtggtcaggctcaccgggcaggcctgtgg

SEQ ID NO: 446330 - DNA, 75 bp, synthetic construct
  source 1..75: mol_type = other DNA
ccggtgctggacagtgaggggaataccaatatattcggcgtcacggtggtgttccgggccggtgagcaggagcag

SEQ ID NO: 446331 - DNA, 75 bp, synthetic construct
  source 1..75: mol_type = other DNA
gttacctggattttttcaaaggagagatagggaaaacacatctggctcaggagctgtggacgcagattgataacg

SEQ ID NO: 446332 - DNA, 75 bp, synthetic construct
  source 1..75: mol_type = other DNA
cagatcgaccaccgatgtcacagccatttacacaggtatcatggatatgcctgccggttctggaggaataactct

SEQ ID NO: 446333 - DNA, 75 bp, synthetic construct
  source 1..75: mol_type = other DNA
aacaaaaccccgctgacggacacggacggtaatcctgtgatacacggtgtgaccgcggtctggcgcgccggggag

SEQ ID NO: 446334 - DNA, 75 bp, synthetic construct
  source 1..75: mol_type = other DNA
gtcggattctgggaaaactgtcagctaaccagattgaaggtgatattgtcaaagcggtgggaaaagcctttccga

SEQ ID NO: 446335 - DNA, 75 bp, synthetic construct
  source 1..75: mol_type = other DNA
tcagcaatgaaatcacgcagaccgtcaataagaaactggaagaccagagtgcagcgatccagcagatacagatgg

SEQ ID NO: 446336 - DNA, 75 bp, synthetic construct
  source 1..75: mol_type = other DNA
tcgggttctgggaaaactgtccgcgaaccagattgaaggcgatctcgttaaaacagtgggcaaagctttcccccg

SEQ ID NO: 446337 - DNA, 75 bp, synthetic construct
  source 1..75: mol_type = other DNA
cgaggttaaagcaacaaaatctttcaccgcgtacggtacggatgtttcaaacagaacatttgtttctcaaggatt

SEQ ID NO: 446338 - DNA, 75 bp, synthetic construct
  source 1..75: mol_type = other DNA
agctgttcaatgcggaaacggtgaagatgttcaccaccagctctaaggaagatgccacttttggcctcggctggc

SEQ ID NO: 446339 - DNA, 75 bp, synthetic construct
  source 1..75: mol_type = other DNA
atcatttgcggcaaaacaaagccattgaaaggaatctatttatagaatccctaagaaggttaaacaattatacaa

SEQ ID NO: 446340 - DNA, 75 bp, synthetic construct
  source 1..75: mol_type = other DNA
gctgggtgagcatatacctcatcaaggtgatggttttggaactgttgcctatattgaaatcaatggtcgcaagat

SEQ ID NO: 446341 - DNA, 75 bp, synthetic construct
  source 1..75: mol_type = other DNA
gtgcagcaggcgcagcaacgggagagctggcagccagagcgatcggaatgctgtatccgggcgtgaaacagtcag

SEQ ID NO: 446342 - DNA, 75 bp, synthetic construct
  source 1..75: mol_type = other DNA
aaacccgtcagtctgcatgtcagtgtgacgctgaaaaaaagtgactacctgccttcagatattacccgacaggta

SEQ ID NO: 446343 - DNA, 75 bp, synthetic construct
  source 1..75: mol_type = other DNA
gcggttccggggttttgtgctgaactagagcattatatgtcccttcagcctgatattgatgttcgggggttagac

SEQ ID NO: 446344 - DNA, 75 bp, synthetic construct
  source 1..75: mol_type = other DNA
tcggcagagcgtgaattaggttgcttttggcgtcactcatacatgatggggagtcaaatttctcaggcttttagt

SEQ ID NO: 446345 - DNA, 75 bp, synthetic construct
  source 1..75: mol_type = other DNA
ccgcaattgcaaaagtgctgggcggggcatggaaactcctgttatggacgctcaacctgttgcgtccgtccctgc

SEQ ID NO: 446346 - DNA, 75 bp, synthetic construct
  source 1..75: mol_type = other DNA
aactttttgacgtcctcaaaaatacctttgcgtctacctataactggattgttgagaagttaaacaagatccccg

SEQ ID NO: 446347 - DNA, 75 bp, synthetic construct
  source 1..75: mol_type = other DNA
gtgcggactttgaaaaccgccgacgtaattcagttgcccgtaatgcccggaatattctggaagccatccggggtg

SEQ ID NO: 446348 - DNA, 75 bp, synthetic construct
  source 1..75: mol_type = other DNA
tcctagcactcattggttatcaatctaatgtagtgcagacagcagaaacgcttaatggactttttctctgtgttt

SEQ ID NO: 446349 - DNA, 75 bp, synthetic construct
  source 1..75: mol_type = other DNA
gccacagtggattacgtgaatgacaaactgaaagaacatgaacagtcacgacgtcacccggacgcctcgctgacc

SEQ ID NO: 446350 - DNA, 75 bp, synthetic construct
  source 1..75: mol_type = other DNA
aatctcatagattcgcgggtttgggttttattgtgctggtggtgctattagtttataggctcctccggttaatta

SEQ ID NO: 446351 - DNA, 75 bp, synthetic construct
  source 1..75: mol_type = other DNA
ttattaaaagcagtcatttcaaattaactgttaaatttttcaatactgaaatttctgcttcagcagatagcgagg

SEQ ID NO: 446352 - DNA, 75 bp, synthetic construct
  source 1..75: mol_type = other DNA
atcaacaattcgcacaatatttttcgctgcaatttccgacaccagaagaaggcaatcgctggtacgggattctgg

SEQ ID NO: 446353 - DNA, 75 bp, synthetic construct
  source 1..75: mol_type = other DNA
gatttctgacgcgattgctcttggcatagaacaaaagcccgatttgatattactgggcggcgatggtgatgctgc

SEQ ID NO: 446354 - DNA, 75 bp, synthetic construct
  source 1..75: mol_type = other DNA
atacacacactgtcggtgggcgctatggtggtgactctgttggtggtaaacaacgcgtacaggtatcaggaacca

SEQ ID NO: 446355 - DNA, 75 bp, synthetic construct
  source 1..75: mol_type = other DNA
atcgcgcgaagcatcaatgaaccaacctgacagtgaggctctgaagcactctgtgccgaaagataaatcacaatc

SEQ ID NO: 446356 - DNA, 75 bp, synthetic construct
  source 1..75: mol_type = other DNA
cagtacagcgacgataagggttactttatggctgcgctgataatgatgctagtaggcctgccactgatgctaaac

SEQ ID NO: 446357 - DNA, 75 bp, synthetic construct
  source 1..75: mol_type = other DNA
ttcaccttcactgaggagaagcacgcagagatttgccggctcttggtagaacgaaatatgtctgcaaaaattctg

SEQ ID NO: 446358 - DNA, 75 bp, synthetic construct
  source 1..75: mol_type = other DNA
atgtcatgccgtccggctggaaagaaatctgcaggggatttgacccgcgcaaggtggcgcgtctgtgcgcagatc

SEQ ID NO: 446359 - DNA, 75 bp, synthetic construct
  source 1..75: mol_type = other DNA
cgagattgattgtaatgaggaggcggtgctggagattattctgcaggaactgaaccgccggtctgaaccatccca

SEQ ID NO: 446360 - DNA, 75 bp, synthetic construct
  source 1..75: mol_type = other DNA
cgagattgattgtaatgaggagacggtgctggagaatattctgcaggaactgaaccgccggtcaccctctccctg

SEQ ID NO: 446361 - DNA, 75 bp, synthetic construct
  source 1..75: mol_type = other DNA
ccattgatgcatatgaagatttaccaattataggtataattgacagtggattaaacaatcatccttttttagata

SEQ ID NO: 446362 - DNA, 75 bp, synthetic construct
  source 1..75: mol_type = other DNA
tggtgcttctgttccgtttgattttgatgttcacgccatgatttcctgtgatgatgcgcctgcgctggaaaaaac

SEQ ID NO: 446363 - DNA, 75 bp, synthetic construct
  source 1..75: mol_type = other DNA
agaagatattattacagtcgtcaaacgttgggaacgcaatgatgaaagagtaaaggctgcatttgagggaacggt

SEQ ID NO: 446364 - DNA, 75 bp, synthetic construct
  source 1..75: mol_type = other DNA
catctacaatcgacactggatgccgtgcaaataatgcctgatgaagaaaaccgatttaatgccctgaaagcggtt

SEQ ID NO: 446365 - DNA, 75 bp, synthetic construct
  source 1..75: mol_type = other DNA
taaccggttccggtattacgagccggaaaccgggatgtacctggtgagtgatccactggggttgcagggagggga

SEQ ID NO: 446366 - DNA, 75 bp, synthetic construct
  source 1..75: mol_type = other DNA
aaaactttagctttcgcgcttcaaatgaaacagcagtattaattactgctttttattcattacatggggatcact

SEQ ID NO: 446367 - DNA, 75 bp, synthetic construct
  source 1..75: mol_type = other DNA
caccacgggcaggtggaatatgtggctgacccggcggcgctgcagtatctgcagagtctggagtgcgcggaaaat

SEQ ID NO: 446368 - DNA, 75 bp, synthetic construct
  source 1..75: mol_type = other DNA
ttatcacgtagtcaaataaacaatattgctaaagaaatggagaagctaggaattaaagtaataaggaaagcagat

SEQ ID NO: 446369 - DNA, 75 bp, synthetic construct
  source 1..75: mol_type = other DNA
caaatccgtgtgggtgggttgatccgctgggattggctgcaagttctaaaatcagcagtttgatggactatattg

SEQ ID NO: 446370 - DNA, 75 bp, synthetic construct
  source 1..75: mol_type = other DNA
gcagaagccacatggggcgggctgctcccctcactggtacgggagtaccgttacgacagcgcgggtaatgtgtca

SEQ ID NO: 446371 - DNA, 75 bp, synthetic construct
  source 1..75: mol_type = other DNA
gttcaactatcactatcgcattagcgcccctcccggcgtgaacggtgtgcgactgacaccgcgaggctggtttga

SEQ ID NO: 446372 - DNA, 75 bp, synthetic construct
  source 1..75: mol_type = other DNA
cggcgtctgggcatagagtacgaccaccacaaccggccggaaacactcaccgacgtgatgggccgcgaacaccac

SEQ ID NO: 446373 - DNA, 75 bp, synthetic construct
  source 1..75: mol_type = other DNA
tcaccgcaggatgtgttaaattatgctttacatcggcaaggcttgtctgggcataactaccctataaaatttaaa

SEQ ID NO: 446374 - DNA, 75 bp, synthetic construct
  source 1..75: mol_type = other DNA
gccgggggatgagacgctgacgttcagccgtgatgaggcgggacgtgaagtgctccggcacagtaaccggggttt

SEQ ID NO: 446375 - DNA, 75 bp, synthetic construct
  source 1..75: mol_type = other DNA
ataacttcaagaacaccaaaggtaaaaaaaatatcagtattacacttgcctttgacccaccggttagacatacaa

SEQ ID NO: 446376 - DNA, 75 bp, synthetic construct
  source 1..75: mol_type = other DNA
ttttccagacgatgtagtaattcccaaattaatgtcgcaagcaattagacagcttcatcataactttaattgtag

SEQ ID NO: 446377 - DNA, 75 bp, synthetic construct
  source 1..75: mol_type = other DNA
tacagtattaccgcccagacacgacatgattctggtttaattgctgactacagtattaccgcccagacacgacat

SEQ ID NO: 446378 - DNA, 75 bp, synthetic construct
  source 1..75: mol_type = other DNA
gtgtaatatatccgcattaaaattagtattagaaataccagaagtctataccattgacttaccccccatgccaga

SEQ ID NO: 446379 - DNA, 75 bp, synthetic construct
  source 1..75: mol_type = other DNA
tgggattttggaggaagaatagaaagagaagcgaaaattgaaaccattaaaaaccttattgttaataatggtgga

SEQ ID NO: 446380 - DNA, 75 bp, synthetic construct
  source 1..75: mol_type = other DNA
aaattatattgtcgatattgaattatgggattttggaggaagaatagaaagagaagcgaaaattgaaaccattaa

SEQ ID NO: 446381 - DNA, 75 bp, synthetic construct
  source 1..75: mol_type = other DNA
tcactggtacgggagtaccgttacgacagcgcgggcaatgtgtcggctgtcaccagccgggaagattacggacgg

SEQ ID NO: 446382 - DNA, 75 bp, synthetic construct
  source 1..75: mol_type = other DNA
acgactcgcagacgcagctaaggctaatgggaaacaaggtgttcttgatgagttagatgctatcagggatgacct

SEQ ID NO: 446383 - DNA, 75 bp, synthetic construct
  source 1..75: mol_type = other DNA
gaccagctgaccgggtattgcagcgcacagggggagctgtgggaataccgccacgacgccagcggcagacgaaca

SEQ ID NO: 446384 - DNA, 75 bp, synthetic construct
  source 1..75: mol_type = other DNA
agaggatggaagtatcagctctcagaggataaaaaatttagcttagtatcaggagttatctttttttcatatggc

SEQ ID NO: 446385 - DNA, 75 bp, synthetic construct
  source 1..75: mol_type = other DNA
cgccgtacacattgccgaaaccagcgatttaggccagcacggacgaagcgcccagtatcaatatatcgctgacct

SEQ ID NO: 446386 - DNA, 75 bp, synthetic construct
  source 1..75: mol_type = other DNA
ggtggattgatccatacggtctgttgtgcagaagaggacaacttaaagcgttaggaattccggatagtccaggtg

SEQ ID NO: 446387 - DNA, 75 bp, synthetic construct
  source 1..75: mol_type = other DNA
ttcccaaagatttaaagattgatgctcccgacgaacatacagtgaggtttacccttagccagccattcgcaccgt

SEQ ID NO: 446388 - DNA, 75 bp, synthetic construct
  source 1..75: mol_type = other DNA
atgcacgggcggtgaatcaaacacagcagcgtgatgcttcccgatcccgcgcccagcaacgacttgtacgtcgtc

SEQ ID NO: 446389 - DNA, 75 bp, synthetic construct
  source 1..75: mol_type = other DNA
ggttatttgcaggctatgcaggacaatgcacgggcggtgaatcaaacacagcagcgtgatgcttcccgatcccgc

SEQ ID NO: 446390 - DNA, 75 bp, synthetic construct
  source 1..75: mol_type = other DNA
ttctggatgtggcgcataactttattaccgcgagtcaaattggcgatcaacaaggctggttacaccgtaaagggg

SEQ ID NO: 446391 - DNA, 75 bp, synthetic construct
  source 1..75: mol_type = other DNA
gtggctcgtgcgatttgttacggacaacgcggagagatcagaaagcgttatcgtgaagggcaggaagatcaactg

SEQ ID NO: 446392 - DNA, 75 bp, synthetic construct
  source 1..75: mol_type = other DNA
atgattggtggaccgattggtggcatgatttcagataaaatcctgaaatcgccgagtaaatatctatgctacacc

SEQ ID NO: 446393 - DNA, 75 bp, synthetic construct
  source 1..75: mol_type = other DNA
aaagtcataaagcaagcggtgttagtcacttatacggaatcttcagttatgcactttattgcagtaacaataatg

SEQ ID NO: 446394 - DNA, 75 bp, synthetic construct
  source 1..75: mol_type = other DNA
ttacaacaaccaccagtggacggatgtttgttatcagtatgcgatgagtttcgaacctaacactcctgttgagtt

SEQ ID NO: 446395 - DNA, 75 bp, synthetic construct
  source 1..75: mol_type = other DNA
ttacaatctgcttgcaaaatctgattataatgtacgtagcatttaaaaaaacgggtgtactttcactacccttaa

SEQ ID NO: 446396 - DNA, 75 bp, synthetic construct
  source 1..75: mol_type = other DNA
atggtaaatctccctcctgaactggggtcacctgatgtatgggctggtggaggtgtggggttggttgcaggccta

SEQ ID NO: 446397 - DNA, 75 bp, synthetic construct
  source 1..75: mol_type = other DNA
tccgggatattgcagaagggcgactgattatcaacgtacggcggacaaaaaaaccactgaagaaatcagaacttc

SEQ ID NO: 446398 - DNA, 75 bp, synthetic construct
  source 1..75: mol_type = other DNA
gcaactgaacattaatctgctccggcaaatggttgaggagccagatgtgttatctgacagtaagaacgaaagtaa

SEQ ID NO: 446399 - DNA, 75 bp, synthetic construct
  source 1..75: mol_type = other DNA
cgcagctcgcttggctctatcggtggcggtaaccacttcgcagaactgcaacaagttgatcaaatcatcaacgct

SEQ ID NO: 446400 - DNA, 75 bp, synthetic construct
  source 1..75: mol_type = other DNA
gcgtggcgaatatgcctgcgctggcaccggcgcagagtaataccaccacctggtttactgaaggtgacggacaaa

SEQ ID NO: 446401 - DNA, 75 bp, synthetic construct
  source 1..75: mol_type = other DNA
gaaatattaaatgatatgcgggaatggcaatatcaattaaacgctgcagcttttacacctgaggatgagcctaaa

SEQ ID NO: 446402 - DNA, 75 bp, synthetic construct
  source 1..75: mol_type = other DNA
ccccggtgaagcagcgggaacaatgtggagtgaaatcgacacggagaaaaaactctggaccattccggcagaacg

SEQ ID NO: 446403 - DNA, 75 bp, synthetic construct
  source 1..75: mol_type = other DNA
ttcatcatctggcattacaggaattgccgggccatgtgtcggaggattgcttcaccgcagagcgtgaactggtgc

SEQ ID NO: 446404 - DNA, 75 bp, synthetic construct
  source 1..75: mol_type = other DNA
atggcggaacaccatgtacagaagaaatattggatgtgtttgagagtttcgagtcctgcacccccccccgaagat

SEQ ID NO: 446405 - DNA, 75 bp, synthetic construct
  source 1..75: mol_type = other DNA
atggggttccctttgacgggacgcaggacataaacatcacttctggtataacacagcaggatgcggattcccgat

SEQ ID NO: 446406 - DNA, 75 bp, synthetic construct
  source 1..75: mol_type = other DNA
ttggcatccgtcaccatggccctggctgcgcgcgcagcctgcgaaaggcgctggagacgctacagcccgactgcc

SEQ ID NO: 446407 - DNA, 75 bp, synthetic construct
  source 1..75: mol_type = other DNA
ctggcactgagcacacaggcgcagcgggcggaagccttccgtaaacagcgcgtcacgtctttatcctcccctgcc

SEQ ID NO: 446408 - DNA, 75 bp, synthetic construct
  source 1..75: mol_type = other DNA
cggctgactgtattggctgccgtacttgtgaagtggcctgtgtggtcgctcacccttcagaacaggagttgaatg

SEQ ID NO: 446409 - DNA, 75 bp, synthetic construct
  source 1..75: mol_type = other DNA
gcaatacgccagcacgctgccggaactggcaaagcttatccaacaagtgctactggccgatttacaggccgcgat

SEQ ID NO: 446410 - DNA, 75 bp, synthetic construct
  source 1..75: mol_type = other DNA
gcagatgattcgccagaagttaattgtcggcgacgcgctgggaagcgtaccggatgatacgcccgtcgtgccgct

SEQ ID NO: 446411 - DNA, 75 bp, synthetic construct
  source 1..75: mol_type = other DNA
catgaacagatgcaaccgccggtcgcgctactgatttatgccccggacgactcacatcacgccgcgttttacccc

SEQ ID NO: 446412 - DNA, 75 bp, synthetic construct
  source 1..75: mol_type = other DNA
ttctctcccaaatcttcaatggaggtttgaataacattctctttcttattcttatagtcgtttttataccaaata

SEQ ID NO: 446413 - DNA, 75 bp, synthetic construct
  source 1..75: mol_type = other DNA
tacccgaatcaggtaagaaaagtttacccgaatcaggtaacgcctattacccgaatcaggtaaacacaaaagaca

SEQ ID NO: 446414 - DNA, 75 bp, synthetic construct
  source 1..75: mol_type = other DNA
atccacggtattgctcgtggtaccgcaatccctattggcggtggcagcgccaatgtttatgtaaaccttgcgcct

SEQ ID NO: 446415 - DNA, 75 bp, synthetic construct
  source 1..75: mol_type = other DNA
accagcgaaacacacaatgcttgcatattcgtaagcatagtttggctggtttttttgtccgactctttgttgcct

SEQ ID NO: 446416 - DNA, 75 bp, synthetic construct
  source 1..75: mol_type = other DNA
aggcctgtatgcagcgatgatgatgggttgctgattgatgccgtaatccggcattacctgaaaaacgtagatgag

SEQ ID NO: 446417 - DNA, 75 bp, synthetic construct
  source 1..75: mol_type = other DNA
caattattcttttagtattgacgaataaattaccgttgttgttatcaggcgttgtaggaggagcgtccttacaag

SEQ ID NO: 446418 - DNA, 75 bp, synthetic construct
  source 1..75: mol_type = other DNA
gaagccaggggtttgcttcatcattctcacgagctggccgcatggcttctcacatggcgagcggggtgtctaatg

SEQ ID NO: 446419 - DNA, 75 bp, synthetic construct
  source 1..75: mol_type = other DNA
gcgacctcgcgggttttcgctatttatgaaatttttccggggaaaatcatgtcggtacttctcgaacataactat

SEQ ID NO: 446420 - DNA, 75 bp, synthetic construct
  source 1..75: mol_type = other DNA
agttcagggaatggcgtaaaactacaaggggtacggcaagcgagtttgccacgatgctggcagaagacatcgcat

SEQ ID NO: 446421 - DNA, 75 bp, synthetic construct
  source 1..75: mol_type = other DNA
aatatgcagggggccacaggtctggagttatacgaggcgtataacaacggatatccaacaacgtatggaaatatc

SEQ ID NO: 446422 - DNA, 75 bp, synthetic construct
  source 1..75: mol_type = other DNA
acaggcagatacaacagtaccagcacctaagacaaaacagcttaagccgaacggtaataggatcttcgaagttgt

SEQ ID NO: 446423 - DNA, 75 bp, synthetic construct
  source 1..75: mol_type = other DNA
gccgagtacaagaagcagtaccccaaacaggccgacgagcaagacttcaaagagcttgttactaaagcctataag

SEQ ID NO: 446424 - DNA, 75 bp, synthetic construct
  source 1..75: mol_type = other DNA
atgaaatttttccggggaaaatcatgtcggtacttctcgaacataactatttgtttttttctaatatcgaatccg

SEQ ID NO: 446425 - DNA, 75 bp, synthetic construct
  source 1..75: mol_type = other DNA
cactcttctgtctgtaccaaccgctgcaaaatgcgtttaacgatcgcgatagtgtgaggaaaattgcaaaaaata

SEQ ID NO: 446426 - DNA, 75 bp, synthetic construct
  source 1..75: mol_type = other DNA
atgaaattactcatcacagcggcgctggtcgccagtctcagcattatctcagcgcccccggtcctcgctgaaaat

SEQ ID NO: 446427 - DNA, 75 bp, synthetic construct
  source 1..75: mol_type = other DNA
cagataggttttggcgggttgtgaatgcgctacatgatcacgctgggaagatcgtaaaactgcacgcagatattg

SEQ ID NO: 446428 - DNA, 75 bp, synthetic construct
  source 1..75: mol_type = other DNA
ttttgatcatggattgcctttctttattataataatgattcttttgtatcaaaatagatttaaatattgtgactt

SEQ ID NO: 446429 - DNA, 75 bp, synthetic construct
  source 1..75: mol_type = other DNA
tctggtgaacagcaaacgcgtaaaacagacaggctgggtgattgtagtgctggtcgtggcgctgaatatctggtt

SEQ ID NO: 446430 - DNA, 75 bp, synthetic construct
  source 1..75: mol_type = other DNA
tttcatatcccgctgtgggtgcgtcgtacagtcactatgttgccgtcatttattgtgattctgatgggattagat

SEQ ID NO: 446431 - DNA, 75 bp, synthetic construct
  source 1..75: mol_type = other DNA
ggctgatgggtatggtcaaaagggaccagcaaagccatccgaaggattatctcttccaggcagttaactttcagg

SEQ ID NO: 446432 - DNA, 75 bp, synthetic construct
  source 1..75: mol_type = other DNA
gcgatctctattaccgcctgaacgtattcccgattcacctgccgccactacgcgagcgtccggaagatattccgc

SEQ ID NO: 446433 - DNA, 75 bp, synthetic construct
  source 1..75: mol_type = other DNA
atggacattgagttttcgcagattcatgaaatggtctatatgcatgatatagttaattcggactcgaaaaagaaa

SEQ ID NO: 446434 - DNA, 75 bp, synthetic construct
  source 1..75: mol_type = other DNA
ccgctgaaaacctctggtcgggtggcctggacaatctcgggatcaccatgtgggccgttacatgggaacaggaat

SEQ ID NO: 446435 - DNA, 75 bp, synthetic construct
  source 1..75: mol_type = other DNA
ggtgttaatgcgagaccctatctttatatcttgtatggcttatatattttgcagatgtataaaattgggggggta

SEQ ID NO: 446436 - DNA, 75 bp, synthetic construct
  source 1..75: mol_type = other DNA
caagccataattattttattttattttattttatttttactgtatcaagtttttattaagcttttttttagttat

SEQ ID NO: 446437 - DNA, 75 bp, synthetic construct
  source 1..75: mol_type = other DNA
tatcggctggttatatgatggtgaaaaattcattaagccttccttaaaacaagacgacgttatacttactgaggg

SEQ ID NO: 446438 - DNA, 75 bp, synthetic construct
  source 1..75: mol_type = other DNA
aaaatatcctttttcagcgttttgggtatggcattttaagctcgatgttcggctacatgagttacggcctgaggt

SEQ ID NO: 446439 - DNA, 75 bp, synthetic construct
  source 1..75: mol_type = other DNA
acgtgcgtgagctggaaaacgtcatcgagcgcgcggtattgctaacacgcggcaacgtgctgcagctgtcattgc

SEQ ID NO: 446440 - DNA, 75 bp, synthetic construct
  source 1..75: mol_type = other DNA
tgagggaatgaccgacgtcaatggtcaggcaactctgcagttgacacagcctgaaggcgcaggtgttaaaacgca

SEQ ID NO: 446441 - DNA, 75 bp, synthetic construct
  source 1..75: mol_type = other DNA
gcgctctttgcacagctggcggaagtttgcccgccacaaacgctattgaccactaacacttcgtcaatctctata

SEQ ID NO: 446442 - DNA, 75 bp, synthetic construct
  source 1..75: mol_type = other DNA
tgtcaatgattatttccttatttcttttacttataaagataagtggtatgaatttgagacagaaagaaaaatatc

SEQ ID NO: 446443 - DNA, 75 bp, synthetic construct
  source 1..75: mol_type = other DNA
gataaaagacttcctgcactatatggccttgctgagatggatgctcagaaatttaaagacctgatgcgcggtaaa

SEQ ID NO: 446444 - DNA, 75 bp, synthetic construct
  source 1..75: mol_type = other DNA
gtggcaagcaaacggtatatggattagccactgaggcaaatattgaaagtggtgaacaaattgttgatggtgggt

SEQ ID NO: 446445 - DNA, 75 bp, synthetic construct
  source 1..75: mol_type = other DNA
acttctgataaagcaaatatcaaaggtggcaagcaaacggtatatggattagccactgaggcaaatattgaaagt

SEQ ID NO: 446446 - DNA, 75 bp, synthetic construct
  source 1..75: mol_type = other DNA
gtgcagttgtgtaccgttccggcgggcaacacctggcaaccacggatggaaaaatttcgcctcggacaaacgccc

SEQ ID NO: 446447 - DNA, 75 bp, synthetic construct
  source 1..75: mol_type = other DNA
tactacttctcgctgcatctcgatgacggcgttaaccgcaaaaatcaaaccgaccctgcgtgggaagcgcatccg

SEQ ID NO: 446448 - DNA, 75 bp, synthetic construct
  source 1..75: mol_type = other DNA
cttgtgactgtatctaaaagccgcgccttccaggcgtgcctggtgcaccctcactcaacggtttctaccgtcacc

SEQ ID NO: 446449 - DNA, 75 bp, synthetic construct
  source 1..75: mol_type = other DNA
gtgctggaaaataccggcgaactgacggtagtggctaaaacctcggcgaaaaatactaccgttgatgctggcggt

SEQ ID NO: 446450 - DNA, 75 bp, synthetic construct
  source 1..75: mol_type = other DNA
aattagaaagcacaaacatcaactgtaatattctctcgccagaaaataccacatggacaaatgtcacggtgattg

SEQ ID NO: 446451 - DNA, 75 bp, synthetic construct
  source 1..75: mol_type = other DNA
gtggatgagagtcatgggatatttgtttaacccatttcattttgccgtccttgatgatgggttgattactatacg

SEQ ID NO: 446452 - DNA, 75 bp, synthetic construct
  source 1..75: mol_type = other DNA
aaatcaatggtaagtttaggtatgaaataatggaggcatataactttttggcattctctggtattgaggttgtaa

SEQ ID NO: 446453 - DNA, 75 bp, synthetic construct
  source 1..75: mol_type = other DNA
atgcaactttcgccagatacgacggcgctctttgccgtgctttctgactttccattcgccttcaccaaagacctt

SEQ ID NO: 446454 - DNA, 75 bp, synthetic construct
  source 1..75: mol_type = other DNA
catggacatcaggttttactgtatgacatttctgctgaagcgctgacccgcgcaatcgacgggatacacgcgcgg

SEQ ID NO: 446455 - DNA, 75 bp, synthetic construct
  source 1..75: mol_type = other DNA
aggcattgctgaagttgccgccagtcatggacatcaggttttactgtatgacatttctgctgaagcgctgacccg

SEQ ID NO: 446456 - DNA, 75 bp, synthetic construct
  source 1..75: mol_type = other DNA
cccgtttgtctttatttagtggcgatacatctacagccagtaaattgataaaaaaagctaatgatttattgggtt

SEQ ID NO: 446457 - DNA, 75 bp, synthetic construct
  source 1..75: mol_type = other DNA
caccgcccacattgccgaaaccagcgatttaggccagcacggacgaagcgcgcaatatcaatatatcgccgacct

SEQ ID NO: 446458 - DNA, 75 bp, synthetic construct
  source 1..75: mol_type = other DNA
atatcagaaatgcaaacgggttactttttaaaagaattaaggatgtctcagagagaaacgttggcttttctttat

SEQ ID NO: 446459 - DNA, 75 bp, synthetic construct
  source 1..75: mol_type = other DNA
gattacctatttggttcatttaccagtaattcgtctcttattctttataaaccggaatttgagcgaaaatcttgt

SEQ ID NO: 446460 - DNA, 75 bp, synthetic construct
  source 1..75: mol_type = other DNA
ccgacaagccactgagctgatcgccgctgttccgtctgacactgaagaccgcgcctttttactggagcaggcaaa

SEQ ID NO: 446461 - DNA, 75 bp, synthetic construct
  source 1..75: mol_type = other DNA
atgccaccgcgcaaacgtaaactgacccccaggttagccgaagagatttgtttgctgatactggaggggaaatca

SEQ ID NO: 446462 - DNA, 75 bp, synthetic construct
  source 1..75: mol_type = other DNA
atggacgatgagctgctgaagaatccgcctgtcggttcttctgtcctcgaacgcatccgcgatattcgcgccagt

SEQ ID NO: 446463 - DNA, 75 bp, synthetic construct
  source 1..75: mol_type = other DNA
gtatggaatccccgagcaaagatgctaccccgggcaacgtatacgctcaggctgactacaagattgcttacgagt

SEQ ID NO: 446464 - DNA, 75 bp, synthetic construct
  source 1..75: mol_type = other DNA
ctttactgactctttcactatctgctggcgcagctccgcagatgtgctttgatcaggccgggaaagattaccaaa

SEQ ID NO: 446465 - DNA, 75 bp, synthetic construct
  source 1..75: mol_type = other DNA
ccgggcgctgctcgaggtcgccaatctccccgatgtgatcgcgcgctgtcagccgccgcatctggcggcgctgga

SEQ ID NO: 446466 - DNA, 75 bp, synthetic construct
  source 1..75: mol_type = other DNA
ccgcgccagcgctgcaggacaaggacgaaagcatttaccaggcgctgatgacggctatcgtcgaacatcagctgc

SEQ ID NO: 446467 - DNA, 75 bp, synthetic construct
  source 1..75: mol_type = other DNA
tcttgtattacctgccaatgtgaagggtgctcgttctgcaactgactggaaccaacatggtcagtttattagatt

SEQ ID NO: 446468 - DNA, 75 bp, synthetic construct
  source 1..75: mol_type = other DNA
catggtgtacgtggtggtaaagctgatgcagcaggaattaaccatatcgcagagatactcactccacaaaatgta

SEQ ID NO: 446469 - DNA, 75 bp, synthetic construct
  source 1..75: mol_type = other DNA
cttgacgagtaccaaaaagcgcgaagttcaactattgttctgtggtgttctgttgcgtgttgacggcaaaatttt

SEQ ID NO: 446470 - DNA, 75 bp, synthetic construct
  source 1..75: mol_type = other DNA
ccccattattgccaaaaaatatgtagtcgttcccggtggtagcacggtcagtccgtggtctggaaaagtcatcga

SEQ ID NO: 446471 - DNA, 75 bp, synthetic construct
  source 1..75: mol_type = other DNA
tttgctacctttggtaaagaaaggtttccctttgctttttatgggagtatcggctacattggttatgcagtttga

SEQ ID NO: 446472 - DNA, 75 bp, synthetic construct
  source 1..75: mol_type = other DNA
taaaacataatgacgtcagacattgcaatgaagaaacatcacaatgggaaaccacatttaaacatggttacatta

SEQ ID NO: 446473 - DNA, 75 bp, synthetic construct
  source 1..75: mol_type = other DNA
tgaaccgactaccggaaaatccggctgtcagatttgcggaaaatggcgataaaactgagttgatcctgagtcctc

SEQ ID NO: 446474 - DNA, 75 bp, synthetic construct
  source 1..75: mol_type = other DNA
cattctcttgctgcatggaggcgacagctcaggatgatgctcttgaattacttgaaacgttactccgggatctgt

SEQ ID NO: 446475 - DNA, 75 bp, synthetic construct
  source 1..75: mol_type = other DNA
tattacccggatattcgttgctcgaacgctatatagcccgattacgcaacagagttgaaaaccgtctctggcatt

SEQ ID NO: 446476 - DNA, 75 bp, synthetic construct
  source 1..75: mol_type = other DNA
acttcattgaagtatgacggactgcatcctagccaatcgaaagaaacatctaacgcccctgaatatgcattgcag

SEQ ID NO: 446477 - DNA, 75 bp, synthetic construct
  source 1..75: mol_type = other DNA
ggattctggcagttttaccggctgccggacgggggcggatatatggcgcctgacgtggatagcctgaccctgtgc

SEQ ID NO: 446478 - DNA, 75 bp, synthetic construct
  source 1..75: mol_type = other DNA
ctatttagacagcgttgtcttgatactgctagtgatggcagaggatttatcctgtcaatagacgatgaagatctt

SEQ ID NO: 446479 - DNA, 75 bp, synthetic construct
  source 1..75: mol_type = other DNA
acaagccttctgtaataagccaaacgttaaaacgacctgatgtattcgaggattataaacaatataaagaaaaaa

SEQ ID NO: 446480 - DNA, 75 bp, synthetic construct
  source 1..75: mol_type = other DNA
ttccaataacgtatttgctgatgaaggtcacggcattgttaaatttaaaggtgaagttatctctgctccatgttc

SEQ ID NO: 446481 - DNA, 75 bp, synthetic construct
  source 1..75: mol_type = other DNA
caaagctcgtatggaatccccgggcaaagatgctaccccgggcaacgtttacgctcaggctgactataagattgc

SEQ ID NO: 446482 - DNA, 75 bp, synthetic construct
  source 1..75: mol_type = other DNA
tcagattctaagtaaattacaaaacaaatacttcttgtatattactaagcgtcttagcacctataccttttatgc

SEQ ID NO: 446483 - DNA, 75 bp, synthetic construct
  source 1..75: mol_type = other DNA
gcaatatcaacaatcgatgatatagaaaaaggcaacataagccccgcacatatatcccacgtcattgacgaatta

SEQ ID NO: 446484 - DNA, 75 bp, synthetic construct
  source 1..75: mol_type = other DNA
tctggagagcaattaaaacgtattaaatatgatgttgatgaaaataacttaaaagtattcaacgtatactttgat

SEQ ID NO: 446485 - DNA, 75 bp, synthetic construct
  source 1..75: mol_type = other DNA
ttaatgaagctaaaaatgaattagaagagcttagggttgaagggataaaaagtgctgcctatctggagctaaaat

SEQ ID NO: 446486 - DNA, 75 bp, synthetic construct
  source 1..75: mol_type = other DNA
tgatttacgcaaataccagattttaggatttgaagactataaccactacgttggttatctcgccaccaatggcct

SEQ ID NO: 446487 - DNA, 75 bp, synthetic construct
  source 1..75: mol_type = other DNA
gcgtttgataaggctctttacagattgagaaaaagtacagatgaaccgtctcttgctgatgtggattctgtgtct

SEQ ID NO: 446488 - DNA, 75 bp, synthetic construct
  source 1..75: mol_type = other DNA
cattgagcgctattcgtttccgtgtaagcagattctggaagggatcctgctttcaccgctgttcattccgcactt

SEQ ID NO: 446489 - DNA, 75 bp, synthetic construct
  source 1..75: mol_type = other DNA
ccctcaccaatctccagagaaagaacaaacgttgatataaaaatgaaaaaacagcctcaagcgcttgaacgagtt

SEQ ID NO: 446490 - DNA, 75 bp, synthetic construct
  source 1..75: mol_type = other DNA
gaaggcttcaatgatttagctgatattattgggattgatacaatccacgtagaaaaaaccaatttatctccagtg

SEQ ID NO: 446491 - DNA, 75 bp, synthetic construct
  source 1..75: mol_type = other DNA
caccgtcatccgctgtatcctgccaccggaagatgaacacgacagacaccccggtgaatccctgctgaaaaccac

SEQ ID NO: 446492 - DNA, 75 bp, synthetic construct
  source 1..75: mol_type = other DNA
tcaaaaccattggcaatggtgttccatacctcgccgctaaaggacttgctgataccgtgtttgatttcttaaaga

SEQ ID NO: 446493 - DNA, 75 bp, synthetic construct
  source 1..75: mol_type = other DNA
gccgttacacggcggcagacggcgcggagtggctgtaccgctatgatgagcgcggcctgctcagcaacatcaccg

SEQ ID NO: 446494 - DNA, 75 bp, synthetic construct
  source 1..75: mol_type = other DNA
aaaaaatggtttctcaatccggtaacaaatgccattcacgtatatcaaatcatcacgccagcaatcagcgatgca

SEQ ID NO: 446495 - DNA, 75 bp, synthetic construct
  source 1..75: mol_type = other DNA
ttattttatttgcaagatcaaatgactaattacaagcagagtgtattgaagttgattaatcaatacatatgtgaa

SEQ ID NO: 446496 - DNA, 75 bp, synthetic construct
  source 1..75: mol_type = other DNA
cagcggcattcaatccaactgatgatatttgcgatctagtttggcagcagaaaaaatcgctgttatcacaagcga

SEQ ID NO: 446497 - DNA, 75 bp, synthetic construct
  source 1..75: mol_type = other DNA
cgaataataaactgaagtttttagtttgcacaacaaccctttttcaaggggttaatctgcctgcaaagaatgttt

SEQ ID NO: 446498 - DNA, 75 bp, synthetic construct
  source 1..75: mol_type = other DNA
cccgctttttgcatcagcaggtaaaagtgggcgtttgcgctaattccctcagccagaaagcatctgtttatcgcg

SEQ ID NO: 446499 - DNA, 75 bp, synthetic construct
  source 1..75: mol_type = other DNA
cctgcgtttaccggaggaagtcacatcattgtgcagatgagcgatggtgataaccagtacagcaatgcttattaa

SEQ ID NO: 446500 - DNA, 75 bp, synthetic construct
  source 1..75: mol_type = other DNA
ttcccggcggaagccacatggggcggactgctcccctcactggtacgggagtaccgttacgacagcgcgggtaat

SEQ ID NO: 446501 - DNA, 75 bp, synthetic construct
  source 1..75: mol_type = other DNA
gacttgttggtgcaggagctgccaaagcgtggagggtggcctgatgatgtgctcgattgtcgcatggttagagag

SEQ ID NO: 446502 - DNA, 75 bp, synthetic construct
  source 1..75: mol_type = other DNA
aattgttatctgcccaagttttgaaaacggcgattttacccatattgaacttcttccgctgttgagtgggtatcg

SEQ ID NO: 446503 - DNA, 75 bp, synthetic construct
  source 1..75: mol_type = other DNA
gtggagaagtttgaatacaacgccgcacacggtcagttaagccgttacacggcggcagacggcgcggagtggcag

SEQ ID NO: 446504 - DNA, 75 bp, synthetic construct
  source 1..75: mol_type = other DNA
cgtgacggacggcaagggcattcaccgttattactatgatcctgacggcaatattctgcgggaagcagcgccgga

SEQ ID NO: 446505 - DNA, 75 bp, synthetic construct
  source 1..75: mol_type = other DNA
acaacacgcgctataaagtccgttttggtggtcgcattcagcaggaaggtaaaaaacgcgctggattgaaaccga

SEQ ID NO: 446506 - DNA, 75 bp, synthetic construct
  source 1..75: mol_type = other DNA
cgagcggtgttacagcccgtgagcagcgtgctggcaagcaaaacaagaacgataaggcgttttcatctctgacct

SEQ ID NO: 446507 - DNA, 75 bp, synthetic construct
  source 1..75: mol_type = other DNA
gcagcaccataaactgagtggcattgaacgtgctggaaccggcgcggaaggattccgctatgaccgccacggcaa

SEQ ID NO: 446508 - DNA, 75 bp, synthetic construct
  source 1..75: mol_type = other DNA
aatcattgatagaatttatgattaaaattttttcacgttatgtgtctgtaggtgtcatcaacactctaattcact

SEQ ID NO: 446509 - DNA, 75 bp, synthetic construct
  source 1..75: mol_type = other DNA
ctataaccggttccggtattacgagccggaaacagggatgtacctggtgagtgatccgctggggttgctgggggg

SEQ ID NO: 446510 - DNA, 75 bp, synthetic construct
  source 1..75: mol_type = other DNA
tggaaggttcgccggacgtctttattggcggtgaacaggtgacctatctggatatccagccagagttcccgccgt

SEQ ID NO: 446511 - DNA, 75 bp, synthetic construct
  source 1..75: mol_type = other DNA
gagcggccttgaacgcactggcaccggcgcggaaggatttcgctatgaccgccacggcaacctgctggcgtacac

SEQ ID NO: 446512 - DNA, 75 bp, synthetic construct
  source 1..75: mol_type = other DNA
ccgggatgccgcaggccgcctggcagaaatcatcacgccggaaggcaaaacgcagtatgcgtatgacaaatccgg

SEQ ID NO: 446513 - DNA, 75 bp, synthetic construct
  source 1..75: mol_type = other DNA
atataaattttgcctcagggttacgttctgccgttgaagccattgccggggagcaatcctgtgtcgaatatatcg

SEQ ID NO: 446514 - DNA, 75 bp, synthetic construct
  source 1..75: mol_type = other DNA
gaaaaaattccactgaaagaattaaataatccagagcatgacagttacgcaatgagtgaaaagagtcacggcaga

SEQ ID NO: 446515 - DNA, 75 bp, synthetic construct
  source 1..75: mol_type = other DNA
aatagcaaagaaaattgtaagatacagactgtaaataaaaatatcttccctggtcaggaaagaaatcttgaaagc

SEQ ID NO: 446516 - DNA, 75 bp, synthetic construct
  source 1..75: mol_type = other DNA
tccctccatcgttacaaaatataaaatcattattctgtgatatagtttcattccttgaaagaataataacagaaa

SEQ ID NO: 446517 - DNA, 75 bp, synthetic construct
  source 1..75: mol_type = other DNA
ctgtttttattatatataattctataaggaacagattaaatttagctcttcattttacattggttactttaagat

SEQ ID NO: 446518 - DNA, 75 bp, synthetic construct
  source 1..75: mol_type = other DNA
tagctcattagatgagcaattttttttagttacagcacagatagtggataacaataaaattccaaatgaatatct

SEQ ID NO: 446519 - DNA, 75 bp, synthetic construct
  source 1..75: mol_type = other DNA
gtcgcctgaaaatggagcatctgagttatcacgttgaaagcctgctggaacaggcagttaaaaaagagttgaact

SEQ ID NO: 446520 - DNA, 75 bp, synthetic construct
  source 1..75: mol_type = other DNA
gcacattcactttcaggatgcaggctgcgggcgtgctgcgtcacgaacagaacggacaggcagtgtataagggag

SEQ ID NO: 446521 - DNA, 75 bp, synthetic construct
  source 1..75: mol_type = other DNA
ggttgaaggtgtgtacggcgcacagattgtggcaggcggtggtgaattacatctgaacggcgcgatgccggaacg

SEQ ID NO: 446522 - DNA, 75 bp, synthetic construct
  source 1..75: mol_type = other DNA
aaacatgtgataaatcatagcaataaaataactaaaacaacaaaatttatgtcattagcaaagtattttagaggt

SEQ ID NO: 446523 - DNA, 75 bp, synthetic construct
  source 1..75: mol_type = other DNA
catttaagtttagcgggtcgaaaaaataatatattttccacatttgctgaagctatatgggtttttgctggcgac

SEQ ID NO: 446524 - DNA, 75 bp, synthetic construct
  source 1..75: mol_type = other DNA
tgtttaaccagtacgccgctctatccggactggtcatttgccgcactacctgcagtgagtgacgagctggccgat

SEQ ID NO: 446525 - DNA, 75 bp, synthetic construct
  source 1..75: mol_type = other DNA
gaagggaagtcaaatttgaatatcaaacagtctccggtttcacgtagtggagagacggtggttcctgtttctttg

SEQ ID NO: 446526 - DNA, 75 bp, synthetic construct
  source 1..75: mol_type = other DNA
ttatgcccgtgcgctgggtaataaaaaattaactgtctggtcggtaaaacgccggctggtttcagcagtgaacag

SEQ ID NO: 446527 - DNA, 75 bp, synthetic construct
  source 1..75: mol_type = other DNA
ggatgtctgaaaacaataatgcacaggtagccctgttaaatacacagctaagcgagtttgccccaaccatgcccc

SEQ ID NO: 446528 - DNA, 75 bp, synthetic construct
  source 1..75: mol_type = other DNA
cttcgggcatggggtgatacgcggggtgattatgaactcctttccgcagcgactgagcctcactggcgtcacttc

SEQ ID NO: 446529 - DNA, 75 bp, synthetic construct
  source 1..75: mol_type = other DNA
gattctgttccgagggttgtataactggttcatctaatgacatgcaaaaattaaatgagctaatattttcagagc

SEQ ID NO: 446530 - DNA, 75 bp, synthetic construct
  source 1..75: mol_type = other DNA
taatttacccatgattgccaatgcctgtcttgaacgtgatggcacaaatcttaatgagcttacatcactcattct

SEQ ID NO: 446531 - DNA, 75 bp, synthetic construct
  source 1..75: mol_type = other DNA
tatgcctgctggtcgctgacagccggtgccaacccggcattcatagcaaaccagatgggacatgcagatgcgcaa

SEQ ID NO: 446532 - DNA, 75 bp, synthetic construct
  source 1..75: mol_type = other DNA
cttattaagccagcaatcgacgctctccggagtcagatgacattaacgagactgagcaaagagcatatcattgat

SEQ ID NO: 446533 - DNA, 75 bp, synthetic construct
  source 1..75: mol_type = other DNA
gctatacgctcaccagtgaggtaaaactggagtgggacgaacgccatcgtctggtggcggaagagcaggacggcc

SEQ ID NO: 446534 - DNA, 75 bp, synthetic construct
  source 1..75: mol_type = other DNA
ctttttattctgatgataattgtttgctttgtaataagaagaatgaagagttgtcaccaaccagagatgaaatta

SEQ ID NO: 446535 - DNA, 75 bp, synthetic construct
  source 1..75: mol_type = other DNA
gccgcaggggatgctgcgtattatcagcagctttggttttggacgacaggtggtggccccggcgttatcagcgct

SEQ ID NO: 446536 - DNA, 75 bp, synthetic construct
  source 1..75: mol_type = other DNA
aagaagattttgaagatattttgacatcgcttgagcctgatttttacaacaacactttaaaacatagatatcgtc

SEQ ID NO: 446537 - DNA, 75 bp, synthetic construct
  source 1..75: mol_type = other DNA
gcaaggtggtgaccattgctgcggcagcggtgaacccggactcagcgacccgcaaggccatttattacctgcaac

SEQ ID NO: 446538 - DNA, 75 bp, synthetic construct
  source 1..75: mol_type = other DNA
ctttacgcctctggcaggtactcttgcggcaaccaacctccaggtattcgccaaccagcaggtcaacggtgcaaa

SEQ ID NO: 446539 - DNA, 75 bp, synthetic construct
  source 1..75: mol_type = other DNA
aaaacagctatgtgtacgccgaatctggcctggtcaccaccgtcggggtgaaagatctggtagtggtgcagacca

SEQ ID NO: 446540 - DNA, 75 bp, synthetic construct
  source 1..75: mol_type = other DNA
tttctgtgaaaagcctgctaaagatcccatgcttctatattaatgactggaacaatactaggaagcacattaaga

SEQ ID NO: 446541 - DNA, 75 bp, synthetic construct
  source 1..75: mol_type = other DNA
gtcagctggcgaaagcgataccaggctttaagccgcgagaaccacagcgacagatggcggtagccgtcacccagg

SEQ ID NO: 446542 - DNA, 75 bp, synthetic construct
  source 1..75: mol_type = other DNA
acgggaagaatatacgtattgatacacgaaacggattatctgttagcactcaaacagatactggttccgcaggaa

SEQ ID NO: 446543 - DNA, 75 bp, synthetic construct
  source 1..75: mol_type = other DNA
tggtgcgcagaataggatgaatggggcaacctgctgaatgaagagaacccgcatcagctgcagcagcttatccgg

SEQ ID NO: 446544 - DNA, 75 bp, synthetic construct
  source 1..75: mol_type = other DNA
agcaggttgcaaaagcagaggctgataatctggatgataaaaagctgctcaaagttcttaaggaagatattgccg

SEQ ID NO: 446545 - DNA, 75 bp, synthetic construct
  source 1..75: mol_type = other DNA
gtgagctacctaacggcgtacatgcgcgtccggcaagccacgttgaaacgctgtgtaatactttttcatctcaaa

SEQ ID NO: 446546 - DNA, 75 bp, synthetic construct
  source 1..75: mol_type = other DNA
tcaatggattaacacaaatcaaagccttgtttccagaacttacagagaaacaatttagggttacgttaagttggg

SEQ ID NO: 446547 - DNA, 75 bp, synthetic construct
  source 1..75: mol_type = other DNA
aaaggggagatgaagccggcattacgcgatttcatcgccattgtgcaggaacgtttggcaagcgtaacggcataa

SEQ ID NO: 446548 - DNA, 75 bp, synthetic construct
  source 1..75: mol_type = other DNA
gccgctgcagcgtattgatgccggacagaaatcccaggtccgtatcacccaggttcgcgggctgacagacaagct

SEQ ID NO: 446549 - DNA, 75 bp, synthetic construct
  source 1..75: mol_type = other DNA
aaagcagtaacattcgtgaagtgtgcgcagtcacattgcaacgccgtggtgtaaaggctgattggatcagttggt

SEQ ID NO: 446550 - DNA, 75 bp, synthetic construct
  source 1..75: mol_type = other DNA
aaacgcagagcgcagtagtccaagcccagaaaaactggtatatcgacattttacttactgcataaccacgctatt

SEQ ID NO: 446551 - DNA, 75 bp, synthetic construct
  source 1..75: mol_type = other DNA
aatggagataatgccatatataccccaagaggtgtcgggcttaatcatctaaggccaaaaccaacatttagattt

SEQ ID NO: 446552 - DNA, 75 bp, synthetic construct
  source 1..75: mol_type = other DNA
cggacgttcagcagaagacgtgatcgccatgctgaaagcgctgcatcttgaaggacgcaaagcctggctggaagt

SEQ ID NO: 446553 - DNA, 75 bp, synthetic construct
  source 1..75: mol_type = other DNA
cttacacgctgacaatgcattaactgaacatgaactgatggcgctgtgggaaagtataacagggacaattaaata

SEQ ID NO: 446554 - DNA, 75 bp, synthetic construct
  source 1..75: mol_type = other DNA
tatgtcatgaagatggcctgactcaggctgaagttctgaccgcactgataaaaagtgaagcgcaaaaacgatgca

SEQ ID NO: 446555 - DNA, 75 bp, synthetic construct
  source 1..75: mol_type = other DNA
gatggcgtggtgcatgacgttgagcagaccctgcgccccggcagttgggtctcgcctggcacccgcatcgcaagc

SEQ ID NO: 446556 - DNA, 75 bp, synthetic construct
  source 1..75: mol_type = other DNA
atgacagattcaataaatgccaatgttgtggtaagcatgccatcgcaactcttcactatggcgcgttcttttaaa

SEQ ID NO: 446557 - DNA, 75 bp, synthetic construct
  source 1..75: mol_type = other DNA
ccaggtgatattaacctagattatattgtttttggcctgtgtggacttcctccttacagcgcaagattaacagca

SEQ ID NO: 446558 - DNA, 75 bp, synthetic construct
  source 1..75: mol_type = other DNA
aattccagagaaagtaaaaactcattaaaaataaaagtaaaaaattttaaaaatgctgtattgatataccctgat

SEQ ID NO: 446559 - DNA, 75 bp, synthetic construct
  source 1..75: mol_type = other DNA
gtgaaacggttattgtgtttgacaataccacatcaccaaaagacggctttgttttcgctgcaccaacaaaatatg

SEQ ID NO: 446560 - DNA, 75 bp, synthetic construct
  source 1..75: mol_type = other DNA
tgcttttgaaaaagcggttaaagcgaaagatggctttttgcaaccgtctatacaggcgtttaatcaatattggga

SEQ ID NO: 446561 - DNA, 75 bp, synthetic construct
  source 1..75: mol_type = other DNA
tatataaaggtcgtaagaaaattaatggtctggagatatctgaatggtgggttcgtaagcaaataatgttgaact

SEQ ID NO: 446562 - DNA, 75 bp, synthetic construct
  source 1..75: mol_type = other DNA
aacgtcggacaatgtgaagggtattaccgatgacgcacgtcggcgtatcacgaattcggcgcttgtgtcggttta

SEQ ID NO: 446563 - DNA, 75 bp, synthetic construct
  source 1..75: mol_type = other DNA
cagtccaccgtaacggaaaccacgcatatcgggacactgaatgtcaccacaacgtcggacaatgtgaagggtatt

SEQ ID NO: 446564 - DNA, 75 bp, synthetic construct
  source 1..75: mol_type = other DNA
ttcgccttcccgaagttctaaatcgaacaggttatggaaaagcctggatttatcatcttatcaatcaacatcttt

SEQ ID NO: 446565 - DNA, 75 bp, synthetic construct
  source 1..75: mol_type = other DNA
cgagggtagtaaagataatgcggattttattgttaccccccctctttttagactagatgcaaaaagagaaactga

SEQ ID NO: 446566 - DNA, 75 bp, synthetic construct
  source 1..75: mol_type = other DNA
gcctaacggccttgtaggccgcgataatacaggggcaatactttcgtgccaatccggtacgtggaagacttctgg

SEQ ID NO: 446567 - DNA, 75 bp, synthetic construct
  source 1..75: mol_type = other DNA
gatatgatcacagttactacttcatcgcctcttttatagaggatcacctgcgcttccatgcgcagtatttactga

SEQ ID NO: 446568 - DNA, 75 bp, synthetic construct
  source 1..75: mol_type = other DNA
cgaaattcttaaaaagcaaaaacgtagcgaacatatatcccatcgcgaagtcggtaatgactccaacttactgat

SEQ ID NO: 446569 - DNA, 75 bp, synthetic construct
  source 1..75: mol_type = other DNA
ttgaaagagtaaaaactaacgcttttgcatttttgaagtccaaacatgcaaaagtgcctttgtttattctcttgg

SEQ ID NO: 446570 - DNA, 75 bp, synthetic construct
  source 1..75: mol_type = other DNA
cagacgctccctgttgcccttattaccggcggtgttcatgggttcgaaacaagtggtgtttttggcgctctggaa

SEQ ID NO: 446571 - DNA, 75 bp, synthetic construct
  source 1..75: mol_type = other DNA
tccatttgtgtccggaaagaaaaatgccaaaacaagacaaattgaaataaaagcagaagcaaaaccatccttgaa

SEQ ID NO: 446572 - DNA, 75 bp, synthetic construct
  source 1..75: mol_type = other DNA
ttcttagtcatgttatggaaatctgatactgatagtacgggctctttattaggagctagtgaagacggtgaaatc

SEQ ID NO: 446573 - DNA, 75 bp, synthetic construct
  source 1..75: mol_type = other DNA
atgagtccagtgcttacgcaacatgtcagccagcccatgacgctggacgagcaaacgcaaaagatgaagcagcat

SEQ ID NO: 446574 - DNA, 75 bp, synthetic construct
  source 1..75: mol_type = other DNA
gatacagcacttcctgacgctttctgctcatgcgaccgttcgtcgtcttaacctgagcgtggatggcgaagcggg

SEQ ID NO: 446575 - DNA, 75 bp, synthetic construct
  source 1..75: mol_type = other DNA
caacactatcagcgccaaacgtgtaccggacttgtgcagaaatcctccagcctgcctgcttctgatatatattaa

SEQ ID NO: 446576 - DNA, 75 bp, synthetic construct
  source 1..75: mol_type = other DNA
ctggatgcagcaaaagcccatggactgaccgaacgcgatgtttatgaagcaactgactactataaaacaccacgc

SEQ ID NO: 446577 - DNA, 75 bp, synthetic construct
  source 1..75: mol_type = other DNA
tgtaattaactatgacagcaggaacaactacatttactctgaaggttcactgatcagcactgtaggagttaataa

SEQ ID NO: 446578 - DNA, 75 bp, synthetic construct
  source 1..75: mol_type = other DNA
gtggttctggtaccagattatggcctctttcacgtacactttatccgaaacaatttctgtctttaaatagtcgtt

SEQ ID NO: 446579 - DNA, 75 bp, synthetic construct
  source 1..75: mol_type = other DNA
tggagaaaacgaatgatgcggttgttatcccaatggatgctggctggagtgatgtggggtcatggtcatctttat

SEQ ID NO: 446580 - DNA, 75 bp, synthetic construct
  source 1..75: mol_type = other DNA
cgggggctaatatctcaaaacaagttcattaccaccgttctgaacattggattgtagtatccggtaccgcgaaag

SEQ ID NO: 446581 - DNA, 75 bp, synthetic construct
  source 1..75: mol_type = other DNA
aggaaaaacggtactaggtttcgtggatgtgaatcataaaaattatattaacatatcaaagtattcaccccatac

SEQ ID NO: 446582 - DNA, 75 bp, synthetic construct
  source 1..75: mol_type = other DNA
tctgtatttatcgatgaactgaaaaaattccgaccagatattttagccagttgccaaagctccctgtcttcttcg

SEQ ID NO: 446583 - DNA, 75 bp, synthetic construct
  source 1..75: mol_type = other DNA
ttcttgctgctgatcatgaaatccaggatgaggataatttcattgctgcagttctcgctgcaaagaattttgcag

SEQ ID NO: 446584 - DNA, 75 bp, synthetic construct
  source 1..75: mol_type = other DNA
gccgaatggctcattcagtgttaccgcaggcgcggatgcgaggttaaaaaagcccttagcctcgactaccgtcac

SEQ ID NO: 446585 - DNA, 75 bp, synthetic construct
  source 1..75: mol_type = other DNA
ggtgatgtgatcaattacaaaactaaaaatagttatgtgtattctgagtctagcttagtcaccacaatcggggtg

SEQ ID NO: 446586 - DNA, 75 bp, synthetic construct
  source 1..75: mol_type = other DNA
taataatggctggtggtactggcagtagattgtggccattgtcaagagaactctacccaaaacaatttctttcct

SEQ ID NO: 446587 - DNA, 75 bp, synthetic construct
  source 1..75: mol_type = other DNA
atactgtcctgatattgtgagtgtatgtcagaagtcttacgataattctgtctgtgacttggattttatccgtat

SEQ ID NO: 446588 - DNA, 75 bp, synthetic construct
  source 1..75: mol_type = other DNA
gtttctaaatttgtcgaaaagccagacgtaaatactgcaacgcaatttttaaatgattccaattactattggaat

SEQ ID NO: 446589 - DNA, 75 bp, synthetic construct
  source 1..75: mol_type = other DNA
aagtgaagagaattgaggttaagcctggtgaaggaatatcgttgcaacttcatcatcatcggtctgagcactggg

SEQ ID NO: 446590 - DNA, 75 bp, synthetic construct
  source 1..75: mol_type = other DNA
aggctaaaaatgcgcagcttctacgtaccgcgctacatgacccattaaccgggctggctaaccgcgcagcgtttc

SEQ ID NO: 446591 - DNA, 75 bp, synthetic construct
  source 1..75: mol_type = other DNA
tgctaccggaatttataattatgatgatgctgatgagcaaactgagttacttaaaaatgcattaagggactataa

SEQ ID NO: 446592 - DNA, 75 bp, synthetic construct
  source 1..75: mol_type = other DNA
agaacaagacgtgaatttggactattaggggagaatgttctttcagaatggctttggttagttgccagagaattg

SEQ ID NO: 446593 - DNA, 75 bp, synthetic construct
  source 1..75: mol_type = other DNA
accgaccagagcctggtcctgtgcgataccgtgcgttatctgccggagtcctttgagatcccctggaatccgaac

SEQ ID NO: 446594 - DNA, 75 bp, synthetic construct
  source 1..75: mol_type = other DNA
tcggtgaagccaaaaccgatgcccgtgatgcaaccatcattgccgaagctgcacgtactctgcctcatgctcttc

SEQ ID NO: 446595 - DNA, 75 bp, synthetic construct
  source 1..75: mol_type = other DNA
aaactcctcggatgtaagctcacactttgatactttcaaaaaatttggttggcctttgtttgacttaagaaacga

SEQ ID NO: 446596 - DNA, 75 bp, synthetic construct
  source 1..75: mol_type = other DNA
cctgcatgtctgggtataccagcatgagcgggataccgggagcggtgatggtgggttcactaccgttgaacggta

SEQ ID NO: 446597 - DNA, 75 bp, synthetic construct
  source 1..75: mol_type = other DNA
tgggcgtcaatttgttccattgccccaaagattggctgtacgctggaacccctgcatgtctgggtataccagcat

SEQ ID NO: 446598 - DNA, 75 bp, synthetic construct
  source 1..75: mol_type = other DNA
gcgaatgatgccgtgtttgggtctgaattggcattattagttaaaggtaataagaataatggcggctctttggtg

SEQ ID NO: 446599 - DNA, 75 bp, synthetic construct
  source 1..75: mol_type = other DNA
ccattattgattttctgccctgggtggaatacctggatgaagcgcagtgcctgctgctggatgacggggtgtcgg

SEQ ID NO: 446600 - DNA, 75 bp, synthetic construct
  source 1..75: mol_type = other DNA
tctgcaggtgcatggctggctgctcagactgttcaatccccggccggcgtgggtggacagggacacactgtaccg

SEQ ID NO: 446601 - DNA, 75 bp, synthetic construct
  source 1..75: mol_type = other DNA
gtcgacctgctgcctggcggaaccatcatgaacctgaccgtggtggtgtatccgcaggacaagctggagcaacac

SEQ ID NO: 446602 - DNA, 75 bp, synthetic construct
  source 1..75: mol_type = other DNA
aatcaacctgattacgttttacagttaagtaatattcagcaatcagccacgtcgttgaattttagtgcgcgatat

SEQ ID NO: 446603 - DNA, 75 bp, synthetic construct
  source 1..75: mol_type = other DNA
tcgggtctctgctcgccgaggatatgaacagcgagcaagcggcaaatatggcgcgtggatgggcctcttctcagg

SEQ ID NO: 446604 - DNA, 75 bp, synthetic construct
  source 1..75: mol_type = other DNA
ccagcgcgctgtcggttatctacaccgaggcgggcgagtttgaagagtatctgatctacccgaaaaacccggata

SEQ ID NO: 446605 - DNA, 75 bp, synthetic construct
  source 1..75: mol_type = other DNA
aaagcgattggctactaccagaagttgccggtggtggtgatcccgactatcgcgtctaccgatgcgccaaccagc

SEQ ID NO: 446606 - DNA, 75 bp, synthetic construct
  source 1..75: mol_type = other DNA
ttcgtaaaggtttaaaagattctcagcgcgtaatggcaattgcggtgaagcgattaaatgatggccgttacaagt

SEQ ID NO: 446607 - DNA, 75 bp, synthetic construct
  source 1..75: mol_type = other DNA
gtgaatacctcataagcagggggaaatcgttcgctactgcagcatgggtgaaagatgctctcaaacacacatacc

SEQ ID NO: 446608 - DNA, 75 bp, synthetic construct
  source 1..75: mol_type = other DNA
atgactctgccagttgacggaatcaaactccatcgaggcaacttcgcggccatcggccagcagattcagccattg

SEQ ID NO: 446609 - DNA, 75 bp, synthetic construct
  source 1..75: mol_type = other DNA
gaacatggataccgaagtgctcaacgaccgtaccaccaccgtaaaacacgatcaccgcgaaaccgtaaaaaatga

SEQ ID NO: 446610 - DNA, 75 bp, synthetic construct
  source 1..75: mol_type = other DNA
aatgcacagacctgccatgtcgacgtgaatggagcatcaggcagtccggtagttttattaccgacagtatcaaca

SEQ ID NO: 446611 - DNA, 75 bp, synthetic construct
  source 1..75: mol_type = other DNA
attttcacacggatgtgaacggtgcgccggaagagatgacggacagtgacgggaaaatcgtgtgggagacggggt

SEQ ID NO: 446612 - DNA, 75 bp, synthetic construct
  source 1..75: mol_type = other DNA
aaaccatccataatatgccgtttgcggtgaccccggagagcgtccatgccgctatcctcaccgccgatctgttag

SEQ ID NO: 446613 - DNA, 75 bp, synthetic construct
  source 1..75: mol_type = other DNA
aaattcgccgtggtgaactcgacgtcggcttaatgcgccatcctgtttatagcccggagattgattatctggagc

SEQ ID NO: 446614 - DNA, 75 bp, synthetic construct
  source 1..75: mol_type = other DNA
ataaagttacaagtcgtgaaacgttattgctgctggttattttgatagcagcctttgttccttctcttagtttcg

SEQ ID NO: 446615 - DNA, 75 bp, synthetic construct
  source 1..75: mol_type = other DNA
aaaaacggtgaatgcgctgatggacacctttccggagggaatggtgatgtgcatgaccatcgtggtgcagcccca

SEQ ID NO: 446616 - DNA, 75 bp, synthetic construct
  source 1..75: mol_type = other DNA
atcacttaaagatctgccggaaggcggcaaagtcatcatgcgtgatgcggtatctgaggaaggtcgtattctgtc

SEQ ID NO: 446617 - DNA, 75 bp, synthetic construct
  source 1..75: mol_type = other DNA
gcgcacgaaagcgaaaattgatgaaacgttcgctcactatttaccaggtaaatttatgggattgtagcgtaaaaa

SEQ ID NO: 446618 - DNA, 75 bp, synthetic construct
  source 1..75: mol_type = other DNA
ttatgctctgtatgaatactcaggcgctgacataattgatgagtatgatatttactcaaaccaggtctcgattga

SEQ ID NO: 446619 - DNA, 75 bp, synthetic construct
  source 1..75: mol_type = other DNA
tcacatcccagaaaattacaaatcttggtgttgatggaattaagattgatatggggcttatgcctgctaaagatg

SEQ ID NO: 446620 - DNA, 75 bp, synthetic construct
  source 1..75: mol_type = other DNA
ggcacatcggccggccatgaatgttggtctgcgatttatggcactggccgagccgggtagcggctccaggatccc

SEQ ID NO: 446621 - DNA, 75 bp, synthetic construct
  source 1..75: mol_type = other DNA
taaccgcgcgcattagcgatatcgtcgaaaacccgaaaaagctgaagttcctgccaaacgtggaagccgcgctgt

SEQ ID NO: 446622 - DNA, 75 bp, synthetic construct
  source 1..75: mol_type = other DNA
tgcttctatttatctttgttaatactcaggatgattggtataaggttataataataactgtattgtcgtcattac

SEQ ID NO: 446623 - DNA, 75 bp, synthetic construct
  source 1..75: mol_type = other DNA
gttttttatgagcggtatgatttttttaggctataaaaatattttaacacttgctgtagggttatcattatcatt

SEQ ID NO: 446624 - DNA, 75 bp, synthetic construct
  source 1..75: mol_type = other DNA
accgccagagcctggctcacagctgggtcaacagcgttatgctgatgcttatccagcaaactggctttggtaaag

SEQ ID NO: 446625 - DNA, 75 bp, synthetic construct
  source 1..75: mol_type = other DNA
aaccttagcctgtgggggaatgtcggtgtgcaactaggtgataaaggctatagcgatactcagggcatgctggga

SEQ ID NO: 446626 - DNA, 75 bp, synthetic construct
  source 1..75: mol_type = other DNA
gtttcaggaccggtgacggccagctaaatactcaggctaaccgctatgtattgcagctaggcggcgatttggcgc

SEQ ID NO: 446627 - DNA, 75 bp, synthetic construct
  source 1..75: mol_type = other DNA
ggcctctgttgagggtgggtatacctttgaagcgggaacatttagcggcagcgaagggacgctgaatacctggta

SEQ ID NO: 446628 - DNA, 75 bp, synthetic construct
  source 1..75: mol_type = other DNA
gcgtgaaagcagaaacgttattttccagcgatgcggcgggattactgacgctggcagcggtggcggtcatcggtt

SEQ ID NO: 446629 - DNA, 75 bp, synthetic construct
  source 1..75: mol_type = other DNA
tggtggcgcttggcaccctcatttccaccttctggatcctggcgtctaacagttggatgcaaacgccgcaggggt

SEQ ID NO: 446630 - DNA, 75 bp, synthetic construct
  source 1..75: mol_type = other DNA
cgcaaaatacagtgcaatagacaagaaaaaaagtcatcttaaccaggaaatcaaaaagcttattaaaaaaaaata

SEQ ID NO: 446631 - DNA, 75 bp, synthetic construct
  source 1..75: mol_type = other DNA
cctttctgagtatagggggcagtatgacacctaaagcagcaaatattgccggaattattcttgcattatcggcaa

SEQ ID NO: 446632 - DNA, 75 bp, synthetic construct
  source 1..75: mol_type = other DNA
tagttcgcagtgaattatcgcctgtgcttgatatccaatccggcattgttattaggcttattgctgaaccgggaa

SEQ ID NO: 446633 - DNA, 75 bp, synthetic construct
  source 1..75: mol_type = other DNA
ccgtggcggcggcgtggatcagtaataagacagttgatttgctcgaaagattctatttcaagcgtccgctgagca

SEQ ID NO: 446634 - DNA, 75 bp, synthetic construct
  source 1..75: mol_type = other DNA
gtcaaccatgggtcgtttatggcgtacagcgaacgaaagatgctgtttctgcacatggcgatttacatatgtcaa

SEQ ID NO: 446635 - DNA, 75 bp, synthetic construct
  source 1..75: mol_type = other DNA
atttagaggattaagaaaaggcataaaccaaacatgctacgatgatactgaatatagtttttacattgatattga

SEQ ID NO: 446636 - DNA, 75 bp, synthetic construct
  source 1..75: mol_type = other DNA
ttaccgccactatgacaaccgtggccggttaacctcggtgaaagacgcacagggccgtgaaacgcagtatgagta

SEQ ID NO: 446637 - DNA, 75 bp, synthetic construct
  source 1..75: mol_type = other DNA
attgattaaggttgtctttgctgccgaaggtattttgtatcaggctaccaatttaacaggaaggtttgtgcggct

SEQ ID NO: 446638 - DNA, 75 bp, synthetic construct
  source 1..75: mol_type = other DNA
tctccactgtaacgctatatattgctgataatggaaaaggctggccagtgcatctggctgatcgactattaacgc

SEQ ID NO: 446639 - DNA, 75 bp, synthetic construct
  source 1..75: mol_type = other DNA
tgcgatcgttagtcgagcgcatggataacatcgttaaaagattgcgcaacttcgcccgccgtcgagatagtgaac

SEQ ID NO: 446640 - DNA, 75 bp, synthetic construct
  source 1..75: mol_type = other DNA
gcatctaaatatggacacttaaataatggcggatatggagcgagacccaacaaaccgcctacgcccgatccaagt

SEQ ID NO: 446641 - DNA, 75 bp, synthetic construct
  source 1..75: mol_type = other DNA
atggcaagccctataatcagcggaacaatgatgtcaaatccctgcccttccacttttttggataaaaatataaat

SEQ ID NO: 446642 - DNA, 75 bp, synthetic construct
  source 1..75: mol_type = other DNA
atacatatgatttattaaacctgcgaattcaaaaagatgaggggcatttacctgttcaggaaaaaattgatatta

SEQ ID NO: 446643 - DNA, 75 bp, synthetic construct
  source 1..75: mol_type = other DNA
gtgctcgttattttactaccggtagggtcgacaaagaaaactccaaaatagataaagtcgcttttacattttccg

SEQ ID NO: 446644 - DNA, 75 bp, synthetic construct
  source 1..75: mol_type = other DNA
agcctttctattgttaggtgaccaccttaacacaagagcacttaaaaaagcaaagccccgcaagtgtcattacca

SEQ ID NO: 446645 - DNA, 75 bp, synthetic construct
  source 1..75: mol_type = other DNA
ttcttcctcaagtctggcgcaggcttctgactgcctttgccggatgatttcatcatcttgcgtttgcgtgtcttg

SEQ ID NO: 446646 - DNA, 75 bp, synthetic construct
  source 1..75: mol_type = other DNA
ccgcgttgctgtaattcttttcggagtactcgcttgatccaggtggctaaagaagtgtcaccgtctgctttcgct

SEQ ID NO: 446647 - DNA, 75 bp, synthetic construct
  source 1..75: mol_type = other DNA
atggcaagccctataaacagcggaataatgatgtcaaatctctgcccttccacctttttggataaaaatagaatt

SEQ ID NO: 446648 - DNA, 75 bp, synthetic construct
  source 1..75: mol_type = other DNA
tcaaaacacacttgaagaaatggttaaacagctttgctttgatgttaatgattgtgctgaggtaagagaattatt

SEQ ID NO: 446649 - DNA, 75 bp, synthetic construct
  source 1..75: mol_type = other DNA
gtttgctttaatgatgatgaatgtgctcgggtaagagaattattaaaacaatcaaatggtaatattacggatgat

SEQ ID NO: 446650 - DNA, 75 bp, synthetic construct
  source 1..75: mol_type = other DNA
ttaatgtttttcaggttggtgcaggtaaaaataatataaaagaaatattggggaatacatcatattctggagtgg

SEQ ID NO: 446651 - DNA, 75 bp, synthetic construct
  source 1..75: mol_type = other DNA
agttaagcttcagtgcgctcgttatattactaccggtagtgtcgacgagaaaaactccatcagcgataaaatcgc

SEQ ID NO: 446652 - DNA, 75 bp, synthetic construct
  source 1..75: mol_type = other DNA
atggcaagccctataaacagcggaacaatgatgtcaaatccctgcccttccacctttttggataaaaatagaatt

SEQ ID NO: 446653 - DNA, 75 bp, synthetic construct
  source 1..75: mol_type = other DNA
tggccaccagcgaacaggaagcccgtcggcaatcaccggctggctgcgtgatggtattcactgcccgtattcgtc

SEQ ID NO: 446654 - DNA, 75 bp, synthetic construct
  source 1..75: mol_type = other DNA
gtggtggatgccacattgcgtgatttgatccaccgtcaggccggggagctggagctggaacgttatgtccgacaa

SEQ ID NO: 446655 - DNA, 75 bp, synthetic construct
  source 1..75: mol_type = other DNA
gcgctctctcttggatacgacaatgcctcatcgttcgcgacgatgttccgccgcgttacggggcagacaccctca

SEQ ID NO: 446656 - DNA, 75 bp, synthetic construct
  source 1..75: mol_type = other DNA
cgctgggccagtacgctgtttatgagcgccagtacctttcgtcgacttttcttacggcaaaccggcatgtcattt

SEQ ID NO: 446657 - DNA, 75 bp, synthetic construct
  source 1..75: mol_type = other DNA
cctaaaaagaaaatcgtcaaaattagagattccggtttgacacggaaagtcatatcagcagcctgggtaatgact

SEQ ID NO: 446658 - DNA, 75 bp, synthetic construct
  source 1..75: mol_type = other DNA
tacgcgcttgccctgctcgcgcccggttggcgttttcactccattcagaacatcaaattccaggctccattgctg

SEQ ID NO: 446659 - DNA, 75 bp, synthetic construct
  source 1..75: mol_type = other DNA
ccctgtctgacagggagcaaatcatggaatacatcagtaaagataatccgcaagcggcaattgccctggataatc

SEQ ID NO: 446660 - DNA, 75 bp, synthetic construct
  source 1..75: mol_type = other DNA
gctgttatcaggctttggctgtaaacggtattcgtataccacaggatatgctgctggcgggttatgatgatcaga

SEQ ID NO: 446661 - DNA, 75 bp, synthetic construct
  source 1..75: mol_type = other DNA
gccatccgccatcttaaacagcaaaatgtacggtgctggggcatagcgcggcgacctggcaacaaactcgcgccg

SEQ ID NO: 446662 - DNA, 75 bp, synthetic construct
  source 1..75: mol_type = other DNA
ggctgctgactgaagagggatggctcgatgaccatcagttgcgtattgctgacggtgtcatcgcagcaatcgaac

SEQ ID NO: 446663 - DNA, 75 bp, synthetic construct
  source 1..75: mol_type = other DNA
tgctgttactggaactggcggaaatgccggttcgcgaattcgatattccgctgccacaacatccggctctgctgg

SEQ ID NO: 446664 - DNA, 75 bp, synthetic construct
  source 1..75: mol_type = other DNA
gcattatcccttggatacgacaatgcgtcctctttcgccaccatgttccgccgcgtgaccgggcagccgccgtcg

SEQ ID NO: 446665 - DNA, 75 bp, synthetic construct
  source 1..75: mol_type = other DNA
taccagaggataagttacaggaaattattcaatctgatgatattatcaaactggctcgaaaaaaacatatgaaca

SEQ ID NO: 446666 - DNA, 75 bp, synthetic construct
  source 1..75: mol_type = other DNA
ataaaagaacaaactaaaccaagtggtgctgcaaaaataacttgctgtggtgttgagttaagtaaagatattctt

SEQ ID NO: 446667 - DNA, 75 bp, synthetic construct
  source 1..75: mol_type = other DNA
ttacattacgagactcttgtgaaaacggggatggtacagtacctcttcgtgcaggacaaatcgtacacaagaaca

SEQ ID NO: 446668 - DNA, 75 bp, synthetic construct
  source 1..75: mol_type = other DNA
ttgatcggataaaggaaaaagacttcaatgatttatggcttggagagccagaaatagtagactgggaaaatcaaa

SEQ ID NO: 446669 - DNA, 75 bp, synthetic construct
  source 1..75: mol_type = other DNA
caacgatatcaaattcctgctctcactctattttagataaggaaataaatatagcagatgagcttcatattaaga

SEQ ID NO: 446670 - DNA, 75 bp, synthetic construct
  source 1..75: mol_type = other DNA
ggacgcagaaaatcggcatcgtcactccccaccgagcccagatggcatccatcagaaatctgctcgtggacgcag

SEQ ID NO: 446671 - DNA, 75 bp, synthetic construct
  source 1..75: mol_type = other DNA
gcgcatatttcagagcctggttgacgccagaaagaaacctcttttcatcgcttctgactcgcgcgaccgtctggc

SEQ ID NO: 446672 - DNA, 75 bp, synthetic construct
  source 1..75: mol_type = other DNA
gagaaaccgttgatgcacatgtatcccgcgtatttcaaagcctgattgacgccagaaagaaacctgcttttatcg

SEQ ID NO: 446673 - DNA, 75 bp, synthetic construct
  source 1..75: mol_type = other DNA
cgcagcctggcggagaagatacagcaggaagggagcgaagacggtcacggtgtggtgttcccggctgaactggtg

SEQ ID NO: 446674 - DNA, 75 bp, synthetic construct
  source 1..75: mol_type = other DNA
acaatctggaaagtttagatttaaaaaatcagcattcattggttaatctggaagcgcaaaataataatctaaaaa

SEQ ID NO: 446675 - DNA, 75 bp, synthetic construct
  source 1..75: mol_type = other DNA
agcttatcagccacggtgaagttgatgatcagatgctattaaatgccacagccctgatacgtttggaagactggg

SEQ ID NO: 446676 - DNA, 75 bp, synthetic construct
  source 1..75: mol_type = other DNA
agagttagtcagagtgaacagcttgttgtgagaggccgcactatgagacttcatcatatttcatttatggacagt

SEQ ID NO: 446677 - DNA, 75 bp, synthetic construct
  source 1..75: mol_type = other DNA
gcccggtggggcaggtggttatcagcagtactgtaatggagttccggaagcataaccgtgtggtggatgcagtgc

SEQ ID NO: 446678 - DNA, 75 bp, synthetic construct
  source 1..75: mol_type = other DNA
ggtacgcagatgcgccactttacttacgatgataaataccggggccggatggtagcgcaccgttatgcaggcagg

SEQ ID NO: 446679 - DNA, 75 bp, synthetic construct
  source 1..75: mol_type = other DNA
gaacttcccgctgctgctgacctgctggaaactcggcccggcgctggcggcggggaacagcgttgtcctgaaacc

SEQ ID NO: 446680 - DNA, 75 bp, synthetic construct
  source 1..75: mol_type = other DNA
acctgcgtccaatggggaatggagatctggtggtgacagttgaggatgaaagcggtaacaagatcgagcagatct

SEQ ID NO: 446681 - DNA, 75 bp, synthetic construct
  source 1..75: mol_type = other DNA
tatctgcgctgactctggcactgttttctcagtgcacaatggcctcagaggccgtgtccggtgcagaagataccg

SEQ ID NO: 446682 - DNA, 75 bp, synthetic construct
  source 1..75: mol_type = other DNA
aagctgaaagaaccttttgcagacggtgagtcaggaatgttctggatggggagtctgggatatggttttgatacg

SEQ ID NO: 446683 - DNA, 75 bp, synthetic construct
  source 1..75: mol_type = other DNA
tcagcggcagtgtggttgtcactgcggaaagtggattgttctttacccgtgaccaaagcaacaccatggctgtgg

SEQ ID NO: 446684 - DNA, 75 bp, synthetic construct
  source 1..75: mol_type = other DNA
tatctgcgttaagtttgtttatgttttcggttttatcctatgccagttctgatgttgttggcagtggtgatgctg

SEQ ID NO: 446685 - DNA, 75 bp, synthetic construct
  source 1..75: mol_type = other DNA
aaacttatttgtcatattaaattatctttcagttgttggtactggtattcctggggttaataagcttaactatta

SEQ ID NO: 446686 - DNA, 75 bp, synthetic construct
  source 1..75: mol_type = other DNA
ctccaacagtaacatgacgccaggggaataccgtggatatgccccactgattagtggggtggcaaccacgacctc

SEQ ID NO: 446687 - DNA, 75 bp, synthetic construct
  source 1..75: mol_type = other DNA
gcggtaaccacttcgtagaactgcaacagattgatcaaattatcgacgcggaactgtttgcactggctggtctgg

SEQ ID NO: 446688 - DNA, 75 bp, synthetic construct
  source 1..75: mol_type = other DNA
attgcgcgcggtaaaagcgccgatatcgaccgcgcggtgagcgcggcacgcaacgtatttgaacgcggcgactgg

SEQ ID NO: 446689 - DNA, 75 bp, synthetic construct
  source 1..75: mol_type = other DNA
gaacaacagcaacgagctggacaaggcgtttgattccgatactgggctgttctggcttgggagtctggattatgg

SEQ ID NO: 446690 - DNA, 75 bp, synthetic construct
  source 1..75: mol_type = other DNA
gccaaaaactttacagacagaacagacctgcagtttctgacatatcgttatcaggacaaagggtatgtggattat

SEQ ID NO: 446691 - DNA, 75 bp, synthetic construct
  source 1..75: mol_type = other DNA
cccaggcttatctgctcagcaaaagtgctccatcacgatgggattatggtgttaccggagggcggctgaagtatt

SEQ ID NO: 446692 - DNA, 75 bp, synthetic construct
  source 1..75: mol_type = other DNA
caccggccgcatgctcgatggtaacccgttcaactactggtattcggtggcgtggacggcgatcaaccttgagct

SEQ ID NO: 446693 - DNA, 75 bp, synthetic construct
  source 1..75: mol_type = other DNA
tgtatacgccagacaatgtagatgtgaagtaccgcgtctggaaggcggaagagaaaattgacaacgcggtagttc

SEQ ID NO: 446694 - DNA, 75 bp, synthetic construct
  source 1..75: mol_type = other DNA
gtttgggacagtaatgccgaaatttgctatttcgtactgccgcaacgcccggctgggacggaagtcgctgtcgct

SEQ ID NO: 446695 - DNA, 75 bp, synthetic construct
  source 1..75: mol_type = other DNA
cagcgattaagttctcttatgtataaaaacatgtttcattgttttcatgtttttttattaaaactatgctcaatt

SEQ ID NO: 446696 - DNA, 75 bp, synthetic construct
  source 1..75: mol_type = other DNA
tactgccagtgactgttacgctggacatcattactgcaccgctgcaatttctggttgtatatgcagtaaaccaat

SEQ ID NO: 446697 - DNA, 75 bp, synthetic construct
  source 1..75: mol_type = other DNA
ctcgcaccggcgaaaaccatctcgacgctcgcctgggatactggcgtggtaaccgtcacgctggctgccgctcac

SEQ ID NO: 446698 - DNA, 75 bp, synthetic construct
  source 1..75: mol_type = other DNA
aggatcacactttctggttttttaaagagaaaaacccgattgaggtctacaaagttaacgggctattaagtagca

SEQ ID NO: 446699 - DNA, 75 bp, synthetic construct
  source 1..75: mol_type = other DNA
tcagcgtagcgattctggctattaccaccggttcagctctggctgcggatgcaaccattaccgtgaaaggtcttt

SEQ ID NO: 446700 - DNA, 75 bp, synthetic construct
  source 1..75: mol_type = other DNA
tgcgggagagtgagttgggggagattcccgaaggatggtatcagacgctgttgtcagagttgactgggtttttaa

SEQ ID NO: 446701 - DNA, 75 bp, synthetic construct
  source 1..75: mol_type = other DNA
cggaagcggtactccacggattacgcccaattggtatggcttttggagggggtatgtttcgcgcccccccgggcg

SEQ ID NO: 446702 - DNA, 75 bp, synthetic construct
  source 1..75: mol_type = other DNA
attgaatttggtgcctgtagtgcggaaatggcaccagaagcggtactccacggattacgcccaattggtatggct

SEQ ID NO: 446703 - DNA, 75 bp, synthetic construct
  source 1..75: mol_type = other DNA
aagccggtgcactgagaattagattttggccaaaagtgaatattggctcaaaagtgaaaaatattgtttttagta

SEQ ID NO: 446704 - DNA, 75 bp, synthetic construct
  source 1..75: mol_type = other DNA
aaacgtaatatcatcttcacacttaatacaatatctgatagagatataaaattaaaaggtgtcaaggatatatta

SEQ ID NO: 446705 - DNA, 75 bp, synthetic construct
  source 1..75: mol_type = other DNA
ttgaatcttacggaatggatcgcttcattgccgacattgaaatcagccgccagttctggcgcgacggcgaacacg

SEQ ID NO: 446706 - DNA, 75 bp, synthetic construct
  source 1..75: mol_type = other DNA
ccagtgtcacacctggtcggcaatcgcggaaaagatgattgagacgtttgccgcgccgaaatcactgcgcggctt

SEQ ID NO: 446707 - DNA, 75 bp, synthetic construct
  source 1..75: mol_type = other DNA
tgcaggtaatgatcttatagaaattataacgaaatataatgcaggacttgtcaatgtaaatggtgaagatgatgt

SEQ ID NO: 446708 - DNA, 75 bp, synthetic construct
  source 1..75: mol_type = other DNA
gctgcgcgactcgctggcccgtctcgataccagcggctgcaccggcgagttgccgattagcgccggtaacagcgt

SEQ ID NO: 446709 - DNA, 75 bp, synthetic construct
  source 1..75: mol_type = other DNA
ccggtagccgcaagggataagctgagggaaccgcgcagcggcgattttgttcgccagagcctgggggtgcagggg

SEQ ID NO: 446710 - DNA, 75 bp, synthetic construct
  source 1..75: mol_type = other DNA
ccgcgcagcggcgattttgttcgccagagcctgggggtgcagggtgcggcggcgattggccgccccctgcgcgct

SEQ ID NO: 446711 - DNA, 75 bp, synthetic construct
  source 1..75: mol_type = other DNA
tattcgcaagaatggcggtaacggctggcagttcttcagcccggcgatgaacgaaatggtaaaagagcgtttggt

SEQ ID NO: 446712 - DNA, 75 bp, synthetic construct
  source 1..75: mol_type = other DNA
agtgtccccattgtggcgggcagaaatgcaatcactgcgatatgggcgatgacacggcttgcatgaattgtgaag

SEQ ID NO: 446713 - DNA, 75 bp, synthetic construct
  source 1..75: mol_type = other DNA
tggcatggcgtccgggcgacagcggacagaaaaaactggttgagttgttttattccggcgaggtttgtgcgtttc

SEQ ID NO: 446714 - DNA, 75 bp, synthetic construct
  source 1..75: mol_type = other DNA
gtcaaattattgtgcgtaagtatttgcttttttttaatgagcggatggtatggtgaaaaattatattcgtttggt

SEQ ID NO: 446715 - DNA, 75 bp, synthetic construct
  source 1..75: mol_type = other DNA
agttttttatataattactaagttagctaccatcaataaaatattgacgttagcaggtaacatcaacttaatata

SEQ ID NO: 446716 - DNA, 75 bp, synthetic construct
  source 1..75: mol_type = other DNA
aaattaaaggcttcctcgctgagttggggtacgccatacctgatgccttgcttacgccgatcctctgcgtggtga

SEQ ID NO: 446717 - DNA, 75 bp, synthetic construct
  source 1..75: mol_type = other DNA
acccttctgcccaaactactctccggtgaaattaccctgccggaagccgagcaggcggtaagcgaggtggaaaat

SEQ ID NO: 446718 - DNA, 75 bp, synthetic construct
  source 1..75: mol_type = other DNA
gttcctgtctgctggttctggtgctctacaccctgctggcgctggtgatttccggcctgatgcccttcgacaaac

SEQ ID NO: 446719 - DNA, 75 bp, synthetic construct
  source 1..75: mol_type = other DNA
tttctcaccataatcttttttccggtgttttttccggaacagacagctggtggcgcgtttttgatttttccgttc

SEQ ID NO: 446720 - DNA, 75 bp, synthetic construct
  source 1..75: mol_type = other DNA
ccggggagctggcgacagaaaaagtgggcattaaagggtatctggctttttttctcaccataatcttttttccgg

SEQ ID NO: 446721 - DNA, 75 bp, synthetic construct
  source 1..75: mol_type = other DNA
ttaaaaaccccggaaaaaccatgccacgagcgctgattggttcctgtctgctggttctggtgctctacaccctgc

SEQ ID NO: 446722 - DNA, 75 bp, synthetic construct
  source 1..75: mol_type = other DNA
caaatgcttcgggcatgtgcatccgaaatacaacacgccagatgtttccatcatcctgcaaggggcgcttgggat

SEQ ID NO: 446723 - DNA, 75 bp, synthetic construct
  source 1..75: mol_type = other DNA
gactggtgaaatcaaaaaccccggcaaaaccatgccgcgagcgctgattggctcctgcctgctggttttagtgct

SEQ ID NO: 446724 - DNA, 75 bp, synthetic construct
  source 1..75: mol_type = other DNA
ttcatcagcaacgaaatccagtgattgattatgtctggaattcagtacggcgtaaattcgggggcgcttacatgc

SEQ ID NO: 446725 - DNA, 75 bp, synthetic construct
  source 1..75: mol_type = other DNA
cgttgggtgggcagattgagcaaaaaagctcgtcgcagggcgacgattaatttatcgctttgtttcccagaaaag

SEQ ID NO: 446726 - DNA, 75 bp, synthetic construct
  source 1..75: mol_type = other DNA
tgccggtccttctctccggttgtagcgcctttaatcaactggttgtagactggccccctgaatctccagacaacc

SEQ ID NO: 446727 - DNA, 75 bp, synthetic construct
  source 1..75: mol_type = other DNA
actctaacgaagagatttataagctggtgggatgtgggcgggctacgtttttccgcatcaaaaaggaactagctg

SEQ ID NO: 446728 - DNA, 75 bp, synthetic construct
  source 1..75: mol_type = other DNA
tcacatggtgtttgatgattcgcccaccagcaaatttatgatcacaatgctcggagccgtcggtgaactggagcg

SEQ ID NO: 446729 - DNA, 75 bp, synthetic construct
  source 1..75: mol_type = other DNA
aaagttcgccctggcgacacagttcgagttaaaagcgttgaccgtttggcgcgtaatacccgcgatctgctggaa

SEQ ID NO: 446730 - DNA, 75 bp, synthetic construct
  source 1..75: mol_type = other DNA
ctacaccctgctggcgctggtaatttccggcctgatgcccttcgacaaactcgccaattctgaaacgccgatttc

SEQ ID NO: 446731 - DNA, 75 bp, synthetic construct
  source 1..75: mol_type = other DNA
agcttgagcgcattttcggtcgttgctggctatttctcgctcatgaaagccagatccctaaacccggtgattttt

SEQ ID NO: 446732 - DNA, 75 bp, synthetic construct
  source 1..75: mol_type = other DNA
gcaccgaaattgtcggcggcgtacaaaagtgggtgatcaactgcaactggaaattcccggcagagcagttcgcca

SEQ ID NO: 446733 - DNA, 75 bp, synthetic construct
  source 1..75: mol_type = other DNA
caggcattactaactatatcttctcagaaacggccgctcgtggaatgtaccaacgctgggccgatcttctgagta

SEQ ID NO: 446734 - DNA, 75 bp, synthetic construct
  source 1..75: mol_type = other DNA
gttaagatcggttcagtcaaaccaggttttgttgatttgaaaaactgcagctatatagatggtattggcattaaa

SEQ ID NO: 446735 - DNA, 75 bp, synthetic construct
  source 1..75: mol_type = other DNA
ctgcgcagtctgctcggcatgatcggcccggccatcgtgtttgcggccacggtctggctgctcggcaactggtgg

SEQ ID NO: 446736 - DNA, 75 bp, synthetic construct
  source 1..75: mol_type = other DNA
gatctcctgagtagcgaaagctggcaggaagtgctcgataaaaccgccgcttaccagcaggaggtgatgaaatga

SEQ ID NO: 446737 - DNA, 75 bp, synthetic construct
  source 1..75: mol_type = other DNA
attcaacttattggcgataatgtaaaaattatagcatggctttatgcttatccattgatcgcatatggtattgct

SEQ ID NO: 446738 - DNA, 75 bp, synthetic construct
  source 1..75: mol_type = other DNA
acgcgggtcttcctgacggcgtgcttaacgtggtaaccggtttgggtcatgaagcgggccaggcgctgtcgcgtc

SEQ ID NO: 446739 - DNA, 75 bp, synthetic construct
  source 1..75: mol_type = other DNA
gttcctgtctgctggttctggtgctctacaccctgctggcgctgggtgatttccggcctgatgcccttcgacaaa

SEQ ID NO: 446740 - DNA, 75 bp, synthetic construct
  source 1..75: mol_type = other DNA
ccggatggtgtgttgaacgtggtgacgggttttggtcatgaagcggggcaggcgctgtcgcgtcataacgatatc

SEQ ID NO: 446741 - DNA, 75 bp, synthetic construct
  source 1..75: mol_type = other DNA
aaagggcaactgctgctggatggtcgtaacgctgagctggctgccgccatcggcccgaccatctttgtggatgta

SEQ ID NO: 446742 - DNA, 75 bp, synthetic construct
  source 1..75: mol_type = other DNA
gcagagtggtaacggccgcgataaatccctgcatgcccttgaaaaattcaccgaactgaaaactatctggataag

SEQ ID NO: 446743 - DNA, 75 bp, synthetic construct
  source 1..75: mol_type = other DNA
taattcgtcgtttacgccataaactcagtgcggatttactggtgacacaacatggcgaaggttatttcttagccg

SEQ ID NO: 446744 - DNA, 75 bp, synthetic construct
  source 1..75: mol_type = other DNA
atgaacaggccgctgtgatccgtgctttcgtaaaatccgtagatggcaagctgcctatcattgccggtatcaccg

SEQ ID NO: 446745 - DNA, 75 bp, synthetic construct
  source 1..75: mol_type = other DNA
tttatccctaaaattgaaattcctatatttaatgctggcaggaataaagccaatctgaagctggctgaaattcgc

SEQ ID NO: 446746 - DNA, 75 bp, synthetic construct
  source 1..75: mol_type = other DNA
attatgggtactggggatagctatctttgcttttttgatgttgatagatttaaattcgtaaatgataattttggg

SEQ ID NO: 446747 - DNA, 75 bp, synthetic construct
  source 1..75: mol_type = other DNA
gaatgggactccccggttagtattatgggcagtttctcctggatgaaaggggatggtaatcaggaatatcattca

SEQ ID NO: 446748 - DNA, 75 bp, synthetic construct
  source 1..75: mol_type = other DNA
aaaaagatattaacaaccctaataaatgtatatccaagaaagggattatagcgattggagctcatcctgatgata

SEQ ID NO: 446749 - DNA, 75 bp, synthetic construct
  source 1..75: mol_type = other DNA
cctgtggcggttgaaacgctgctgaacgttgatgcggtgatcctgacgcacacgcatactgaccactgggacgaa

SEQ ID NO: 446750 - DNA, 75 bp, synthetic construct
  source 1..75: mol_type = other DNA
tgctgctaaatggtgaggaatcttttaacgatctcggcgagccagagtggttattttcgcgcgcgttgggtgtcg

SEQ ID NO: 446751 - DNA, 75 bp, synthetic construct
  source 1..75: mol_type = other DNA
tgggcaactcttcgggttagatggtataaaagcagataatccaataaaagcaaagcaagggagttcagatgcttc

SEQ ID NO: 446752 - DNA, 75 bp, synthetic construct
  source 1..75: mol_type = other DNA
cctccccgatgaaggccaaaggtgtcggtgagctgggcctgtgcggcgtgagcgcggctatcgccaacgcggtgt

SEQ ID NO: 446753 - DNA, 75 bp, synthetic construct
  source 1..75: mol_type = other DNA
agcgccttccggttgaccgggttgctgcgagagttgttggtaagggcgttgattggacgccaaataaagttattc

SEQ ID NO: 446754 - DNA, 75 bp, synthetic construct
  source 1..75: mol_type = other DNA
atgcatgtattgaaaaatataacactgggcaactcttcgggttagatggtataaaagcagataatccaataaaag

SEQ ID NO: 446755 - DNA, 75 bp, synthetic construct
  source 1..75: mol_type = other DNA
taaaatgaacggttttaattttcgcatttatcgatttggaggggatgagtttgcaataatatattctggcgagtt

SEQ ID NO: 446756 - DNA, 75 bp, synthetic construct
  source 1..75: mol_type = other DNA
ccctcaggagtgcagggaaatctgaaatttcagaccgttaatgattatggttcagtaactccggtcagagaagtg

SEQ ID NO: 446757 - DNA, 75 bp, synthetic construct
  source 1..75: mol_type = other DNA
gacctcagcgccttctgttgcgccagaatattactatgtgatcgcgcttgctggtcagtccaatggtatgtcata

SEQ ID NO: 446758 - DNA, 75 bp, synthetic construct
  source 1..75: mol_type = other DNA
atccgggagatgtacgcggagcctatccagtcatacctccagacacacaccgaggaagagctgaagcgtggcctg

SEQ ID NO: 446759 - DNA, 75 bp, synthetic construct
  source 1..75: mol_type = other DNA
cactttccatttctttcctgtcaaaaatctattcagaaaaagatgagttcctcgcaaaggataaaacttcaggat

SEQ ID NO: 446760 - DNA, 75 bp, synthetic construct
  source 1..75: mol_type = other DNA
tataaagacccaagttatgatgatgactttggtattgagacgccctcggcgttagataacttcactcaggccatc

SEQ ID NO: 446761 - DNA, 75 bp, synthetic construct
  source 1..75: mol_type = other DNA
atgactgggaatatgactgataattttaaatataaaatatctgccggttttaaaccaggtctgatgatgagtggt

SEQ ID NO: 446762 - DNA, 75 bp, synthetic construct
  source 1..75: mol_type = other DNA
tttggtagtaaaaatgatataaagttaaatggtgaactgataaacattggtcgtattgacgatattattaatgat

SEQ ID NO: 446763 - DNA, 75 bp, synthetic construct
  source 1..75: mol_type = other DNA
aaatcacggaaagaagcgcgccgcgccgggcggaaacagaaacgatgggagggtgcatgtaaggcgttgcaagaa

SEQ ID NO: 446764 - DNA, 75 bp, synthetic construct
  source 1..75: mol_type = other DNA
gtgctcacagaattgaacaaattaggaaaagcatcagccgaaagtatttctaaaggtctcaatattgatttgaat

SEQ ID NO: 446765 - DNA, 75 bp, synthetic construct
  source 1..75: mol_type = other DNA
atccatttcgtaccgttcatgacggatgagaatggggtgaatgtgccgacgaacaaaccggaagaagacccggac

SEQ ID NO: 446766 - DNA, 75 bp, synthetic construct
  source 1..75: mol_type = other DNA
ttccggcggaccattgtctgcatgatgtgcaggacatgagccgccttaaccatccgaaagcggacctgtcaaagg

SEQ ID NO: 446767 - DNA, 75 bp, synthetic construct
  source 1..75: mol_type = other DNA
aggtcaaattccacacggcacattaggtgcccccattcatgccagtattgatggcatggtcagcgatgtgacaga

SEQ ID NO: 446768 - DNA, 75 bp, synthetic construct
  source 1..75: mol_type = other DNA
atttcataccccttttatttaaagagagatctgcctaatgaaaaagatataaattatggggtggaaatagaaata

SEQ ID NO: 446769 - DNA, 75 bp, synthetic construct
  source 1..75: mol_type = other DNA
gcagcaaaaaacatgattgaaaatcttgtccagggccaggagaccgtggttaaaactgcacgctccctgttcccg

SEQ ID NO: 446770 - DNA, 75 bp, synthetic construct
  source 1..75: mol_type = other DNA
tttagagggaactgttggctccgggaaaagtactttgctgaaacagctaattaaaaaaataaaagaagaatattc

SEQ ID NO: 446771 - DNA, 75 bp, synthetic construct
  source 1..75: mol_type = other DNA
tgcagactttgaagaaaccgactggatcgaactggcgttaaagaaaactcgcgagaacaagcaactgattactct

SEQ ID NO: 446772 - DNA, 75 bp, synthetic construct
  source 1..75: mol_type = other DNA
tttcattgatgataaagttttgcctgtttgaagaagattgttttcctgttctgaagaaccattttggcaatgact

SEQ ID NO: 446773 - DNA, 75 bp, synthetic construct
  source 1..75: mol_type = other DNA
atgagcgtcaacggcgacaaagtgacagaagatggccgtattttaacggacagagggcagcgaattcgtgatgtt

SEQ ID NO: 446774 - DNA, 75 bp, synthetic construct
  source 1..75: mol_type = other DNA
gttgtaaagcaatttttggacacacggagtcgaacacatattgcgattggtcaccgtcgcgatttactgctggca

SEQ ID NO: 446775 - DNA, 75 bp, synthetic construct
  source 1..75: mol_type = other DNA
tgaacagcgtttaaataaactaaatccaccgaaaaatttacgtatagcaatagaaaaatttgggtggaataataa

SEQ ID NO: 446776 - DNA, 75 bp, synthetic construct
  source 1..75: mol_type = other DNA
atgcgcagcatctgcaactgctggtccatagcggctcgcgtggtttagggcagtctattttacagcggcatattg

SEQ ID NO: 446777 - DNA, 75 bp, synthetic construct
  source 1..75: mol_type = other DNA
gtagtgaaatgtcaggttcacgctggtggccgcggtaaagcgggcggtgtgaaagtggtaaacagcaaagaagac

SEQ ID NO: 446778 - DNA, 75 bp, synthetic construct
  source 1..75: mol_type = other DNA
cttcctcaacggcgatccggaccagccgattattatggggcgtacctaccaccaggaaaaccgcacacccggcag

SEQ ID NO: 446779 - DNA, 75 bp, synthetic construct
  source 1..75: mol_type = other DNA
accgaaaggttttatgattgcagccaccaacttagataaaagcattgatccagctgtatggagacgttttgatga

SEQ ID NO: 446780 - DNA, 75 bp, synthetic construct
  source 1..75: mol_type = other DNA
atccgggggcgaatattgacgccattccggtaccggcgggcagcgaatatgagcatgtcgttttgtttgataccg

SEQ ID NO: 446781 - DNA, 75 bp, synthetic construct
  source 1..75: mol_type = other DNA
ttccagagcgatgcacgaaagttttgttcaacagcttttcattcaatatgccaaacttgctgaagcattaatcga

SEQ ID NO: 446782 - DNA, 75 bp, synthetic construct
  source 1..75: mol_type = other DNA
gtactcactataacagcacactattcggtgggtatcagtttagtaaaaattattttaacttatctactggtatag

SEQ ID NO: 446783 - DNA, 75 bp, synthetic construct
  source 1..75: mol_type = other DNA
catcgcggcctgccgctggcgcttgtcagcacggaaggggcaacagaatggtgcgcagaatacgatgaatggggc

SEQ ID NO: 446784 - DNA, 75 bp, synthetic construct
  source 1..75: mol_type = other DNA
gtggccgaatcgacccaggcgcgcatcgatcaggctatccgcgacatcgtgatgggcgtgttcgagcgcgcctac

SEQ ID NO: 446785 - DNA, 75 bp, synthetic construct
  source 1..75: mol_type = other DNA
aactattaatgacaactctttacgcgcgaaagcggaaattgcttcgagaataattgatttcttagaggcaaaggt

SEQ ID NO: 446786 - DNA, 75 bp, synthetic construct
  source 1..75: mol_type = other DNA
aaccaatctttcatacaatgacatattaaaatatcagcaagaattccaaaaacaatgttataagcaagttaaagc

SEQ ID NO: 446787 - DNA, 75 bp, synthetic construct
  source 1..75: mol_type = other DNA
aaggcaggtattagtaatatcagctttgagtttagctcccttcgtttgtttattgctgtaccaaaaaatcttctg

SEQ ID NO: 446788 - DNA, 75 bp, synthetic construct
  source 1..75: mol_type = other DNA
ggatgcctgaccatattcaccgttacggtaatgagtattacgtctgcaatcctgaagataacggcgagaattttg

SEQ ID NO: 446789 - DNA, 75 bp, synthetic construct
  source 1..75: mol_type = other DNA
ggccagcgtatcgcagtatggaagattagcgcacaggaggcttaatcaccctcactggtcactgcatgacatccg

SEQ ID NO: 446790 - DNA, 75 bp, synthetic construct
  source 1..75: mol_type = other DNA
ccgctatgacaaccgtggccggttaacctcggtgaaagacgcacagggccgtgaaacgcggtatgaatacaacgc

SEQ ID NO: 446791 - DNA, 75 bp, synthetic construct
  source 1..75: mol_type = other DNA
tggaaatgacagcctgttattgttaggaggtaattctcttgctgcgctcaaatcatcaaccttggatttaggtgc

SEQ ID NO: 446792 - DNA, 75 bp, synthetic construct
  source 1..75: mol_type = other DNA
acggacccggcgggcaaccggctgccggacccggagctgcacccggacagtacactcacagtgtggccggataac

SEQ ID NO: 446793 - DNA, 75 bp, synthetic construct
  source 1..75: mol_type = other DNA
gataacattgccgattcgccgctggcggacaaaatcgccgccgctaacagcaggcgctggagcgcattatccagt

SEQ ID NO: 446794 - DNA, 75 bp, synthetic construct
  source 1..75: mol_type = other DNA
accggtcaagcaacacaaccaatttcattaagtcaggtgacgcaggtacgacatcaaatgtgaaggtcactaata

SEQ ID NO: 446795 - DNA, 75 bp, synthetic construct
  source 1..75: mol_type = other DNA
atgaccctgaccaattaagacaagagctagcgggtccaaatggatatcttctaatcccatcgatggatcagcata

SEQ ID NO: 446796 - DNA, 75 bp, synthetic construct
  source 1..75: mol_type = other DNA
aacggacagattgccaaattcgtaactgtacaaggccattctatggctgtttatgatgcgtatggttcccagcag

SEQ ID NO: 446797 - DNA, 75 bp, synthetic construct
  source 1..75: mol_type = other DNA
cggggtgattacggtgaatctgacctctccgggcagtgatatcgttcctgcgatggggcaggcaccgtggtgccg

SEQ ID NO: 446798 - DNA, 75 bp, synthetic construct
  source 1..75: mol_type = other DNA
tgccgatgtggttttatcgcgatcttatttatgtgccgaagtatggaagaaccgcattgtcggcggtaacagcct

SEQ ID NO: 446799 - DNA, 75 bp, synthetic construct
  source 1..75: mol_type = other DNA
accgtctattacagtgatgatgatatgttttatggtcattctatcgacgtctcgggcaatattgcatatggtgca

SEQ ID NO: 446800 - DNA, 75 bp, synthetic construct
  source 1..75: mol_type = other DNA
tctgtatctaatgtcgaaacgcatgatgaaatattgcttccagccactgcagcgaggttgttagcgttgtttata

SEQ ID NO: 446801 - DNA, 75 bp, synthetic construct
  source 1..75: mol_type = other DNA
ggttgctgctggcgggataccaatgattatgcaatttaggggcggctataattataccgagttcggtataccgac

SEQ ID NO: 446802 - DNA, 75 bp, synthetic construct
  source 1..75: mol_type = other DNA
atcgattcagatgccattttgcaccttcagaatttgagcctgctacagttgttcctgataaggatctggataaat

SEQ ID NO: 446803 - DNA, 75 bp, synthetic construct
  source 1..75: mol_type = other DNA
ccgcaatgcccccgcgccgacactgacgatcaccaaccccgacaacggacacgcgcacctgctgtacgcgctgaa

SEQ ID NO: 446804 - DNA, 75 bp, synthetic construct
  source 1..75: mol_type = other DNA
tcgcaacgcgcccgcgcccacgctgaccatcaccaacccggaaaacggacacgcgcacctgctgtacgcgctgga

SEQ ID NO: 446805 - DNA, 75 bp, synthetic construct
  source 1..75: mol_type = other DNA
cgccacgtggagcgcagcgatctgccgctgctggtcgatttctgggcgccatggtgcgggccgtgcaagatgatg

SEQ ID NO: 446806 - DNA, 75 bp, synthetic construct
  source 1..75: mol_type = other DNA
caggaagccaaagcacgcctggagaaaaaaattgcgctctatatcgatgacggctgtgatgccgccgttcttaac

SEQ ID NO: 446807 - DNA, 75 bp, synthetic construct
  source 1..75: mol_type = other DNA
tgatctctatggggcaagactaggtgtctttttgagaagcaatgaagtttcgttattaatcgatggggatgaact

SEQ ID NO: 446808 - DNA, 75 bp, synthetic construct
  source 1..75: mol_type = other DNA
cttcgtggtcggcaagatcacagccaccttttcagcaccggcttttccaaaatatgtcctgctcacgccaatgga

SEQ ID NO: 446809 - DNA, 75 bp, synthetic construct
  source 1..75: mol_type = other DNA
cataagctcacggggatgctggctgtttatgaccagtatgactacatccccgagcagcaggacgcagcagaatta

SEQ ID NO: 446810 - DNA, 75 bp, synthetic construct
  source 1..75: mol_type = other DNA
accttgcttgttggggccgtattgtgctgccattttcatccgttcagaacgtgaatatttttttagaaactcatc

SEQ ID NO: 446811 - DNA, 75 bp, synthetic construct
  source 1..75: mol_type = other DNA
gttacatggtaattaccattgtacttaccgttatacaaaaaacaacgccccgcagtggtggctcacatatggggc

SEQ ID NO: 446812 - DNA, 75 bp, synthetic construct
  source 1..75: mol_type = other DNA
agcccgatgtatacaggatagaagttttggatcttagcgttagcgcaggacctgggacctatatgctttcagact

SEQ ID NO: 446813 - DNA, 75 bp, synthetic construct
  source 1..75: mol_type = other DNA
ggaaagtatgaggtagaggtttctaaaaaagaagataactggtatgaggtttatggtacagacaatatgataaaa

SEQ ID NO: 446814 - DNA, 75 bp, synthetic construct
  source 1..75: mol_type = other DNA
ggattactgattcgtatgtcgtggatgttttagacatcagatacagttgcggacctggtagttataactctgatt

SEQ ID NO: 446815 - DNA, 75 bp, synthetic construct
  source 1..75: mol_type = other DNA
gtgcataaaattggcattgctctttcttcatcacgaaataccaaataccactctttctacggtgctgcaccgatc

SEQ ID NO: 446816 - DNA, 75 bp, synthetic construct
  source 1..75: mol_type = other DNA
cttgcccctgttttttctccgctggcgcatgaatttactcacactttccgacgacgaagcccgttcgctgggact

SEQ ID NO: 446817 - DNA, 75 bp, synthetic construct
  source 1..75: mol_type = other DNA
accctgaacgtgcgccccgagtggctatcgtacggtgttggtcctatgaccccagaagaaagcacatcctgcaat

SEQ ID NO: 446818 - DNA, 75 bp, synthetic construct
  source 1..75: mol_type = other DNA
ctggactgtcagtgcgttccttccgacatctaacacaccagcgcgcccggacagccgctggcgaaaccggatgtg

SEQ ID NO: 446819 - DNA, 75 bp, synthetic construct
  source 1..75: mol_type = other DNA
tgagcctgtaaacagttttcagaaaaaccagaagacgctggcgagacttcagcgacagttaagccgcagggtcaa

SEQ ID NO: 446820 - DNA, 75 bp, synthetic construct
  source 1..75: mol_type = other DNA
atgattaccagttatgaagccactgttgtaactaccgatgacattgttcacgaggttaatctggaaggaaagcgt

SEQ ID NO: 446821 - DNA, 75 bp, synthetic construct
  source 1..75: mol_type = other DNA
caccctttccctggtgcagttcattctggtgcaggtcctggtcagaacaaatgacggtggcagacaggccgtccg

SEQ ID NO: 446822 - DNA, 75 bp, synthetic construct
  source 1..75: mol_type = other DNA
tttctggggcatgtcgataactatgtccgggaaatcatggggatgctccagtatgaggatgatttattcccgctc

SEQ ID NO: 446823 - DNA, 75 bp, synthetic construct
  source 1..75: mol_type = other DNA
gatgaaccggcttacgatgtttatcgcgggctcagttttgcggaggatcaggaacggcttgctgccgaccagtat

SEQ ID NO: 446824 - DNA, 75 bp, synthetic construct
  source 1..75: mol_type = other DNA
attttggcaacgagtcaccgacattccagatggaattaaccgaacaatatccgtcaaaggcgttattattaattg

SEQ ID NO: 446825 - DNA, 75 bp, synthetic construct
  source 1..75: mol_type = other DNA
cgcatcaccgtgctgactaacgagaacggcagccagtccacgttccggtatgacccggtggacaggctgacggag

SEQ ID NO: 446826 - DNA, 75 bp, synthetic construct
  source 1..75: mol_type = other DNA
cgtctggaacaccggttgatggctgggctgttgataatgtcattaagcatgatgccggtgggcatggtcagcggc

SEQ ID NO: 446827 - DNA, 75 bp, synthetic construct
  source 1..75: mol_type = other DNA
tggtatttcatggtggtgttgctcattgtgatgttcctgcattgcttgcttgtgctgatgcgggggttgctccct

SEQ ID NO: 446828 - DNA, 75 bp, synthetic construct
  source 1..75: mol_type = other DNA
cgatgatgatgatgaatggacgcccaaccgcctgagcgtcttcctcgcccataaacagcaactggtcacacacgc

SEQ ID NO: 446829 - DNA, 75 bp, synthetic construct
  source 1..75: mol_type = other DNA
acccggcgaggttgcttatgtgatgaatgctaacggtaagaccatttcccgttacgaatgccccgcgcagttatg

SEQ ID NO: 446830 - DNA, 75 bp, synthetic construct
  source 1..75: mol_type = other DNA
gacctgaccagaaaactcacacagagtgaagacgaggggcttatcaccctctggcactacgatgcgtcggaccgc

SEQ ID NO: 446831 - DNA, 75 bp, synthetic construct
  source 1..75: mol_type = other DNA
gacagaatatctgtttcaagttaaaaccgcaatgcgtgcgataccatccaaaacatacctagagttatttgcaca

SEQ ID NO: 446832 - DNA, 75 bp, synthetic construct
  source 1..75: mol_type = other DNA
ggagcattctggtctgggcggtattggcgtgatgattattatggcgctggtcattgccatttgtgccattgtgat

SEQ ID NO: 446833 - DNA, 75 bp, synthetic construct
  source 1..75: mol_type = other DNA
gcattttgcgtatacttatgtagtggatgttgataatccagaatcatcgacagaatctgttggtatcggtgcagg

SEQ ID NO: 446834 - DNA, 75 bp, synthetic construct
  source 1..75: mol_type = other DNA
atggtcgctaaattaaaaccagatgtttttgttaatactaatccttttttagaagcaatgtataaggagaggctt

SEQ ID NO: 446835 - DNA, 75 bp, synthetic construct
  source 1..75: mol_type = other DNA
atccagttctcacttatcctacgcgatatagcagaaaagctgtgtttcaatggattgaaaatggtgggattagtg

SEQ ID NO: 446836 - DNA, 75 bp, synthetic construct
  source 1..75: mol_type = other DNA
taatacgttaattacctttagcaatgaagaaataattaaatgtcaaattgcaatccaatccataattagtaaaaa

SEQ ID NO: 446837 - DNA, 75 bp, synthetic construct
  source 1..75: mol_type = other DNA
cattgggctggcggggggatggaacctgtataattacccactgaatccgataataaggatggatcctttgggttt

SEQ ID NO: 446838 - DNA, 75 bp, synthetic construct
  source 1..75: mol_type = other DNA
acgtatactgaagctaagttgaataaacagacttcagttgatcctttgggtaacgaaaatgaacaagagttcatt

SEQ ID NO: 446839 - DNA, 75 bp, synthetic construct
  source 1..75: mol_type = other DNA
gagaagtaaaattgatgatgactttgagccaaaactgatccataccgttcgcggtgccggatatgtcctggagat

SEQ ID NO: 446840 - DNA, 75 bp, synthetic construct
  source 1..75: mol_type = other DNA
aatccaggggaaaaccagcaaaacagccggcctggatagccagtaccagaaagacattgctgacatccagcttta

SEQ ID NO: 446841 - DNA, 75 bp, synthetic construct
  source 1..75: mol_type = other DNA
aatcatactcagattcgtttcctgatataattatagaaaacgaacaagctgtcgagaaaataaagttttttttca

SEQ ID NO: 446842 - DNA, 75 bp, synthetic construct
  source 1..75: mol_type = other DNA
accgggcgctgcgcctgatggggtatgacacgaaaactgaaatctgcgggcatggactcagggcaatggcctgta

SEQ ID NO: 446843 - DNA, 75 bp, synthetic construct
  source 1..75: mol_type = other DNA
gtctcctgggctttcactgatttttccgacagtaaccagcgtcatgaagtctcacttgagggtcaggaacgcatc

SEQ ID NO: 446844 - DNA, 75 bp, synthetic construct
  source 1..75: mol_type = other DNA
catgccccttcacaaattgcggcggcggtaaaaaaatatgccggggagcagggatatcaggtgctgatatcgatg

SEQ ID NO: 446845 - DNA, 75 bp, synthetic construct
  source 1..75: mol_type = other DNA
attgccgttcaacaaattttacagccggacgatgcacaagctatgctccgctcttcaaccatccttcccagccgt

SEQ ID NO: 446846 - DNA, 75 bp, synthetic construct
  source 1..75: mol_type = other DNA
tatgtgctgctttcggtgtgcatctcaacggttgttaacctgcttactatcagcccgttgcgtaacagtgattct

SEQ ID NO: 446847 - DNA, 75 bp, synthetic construct
  source 1..75: mol_type = other DNA
ctctacgaactggggcaccgggaaatcgcgttgctggcggggccagcgtcttctgtctcggcgcagctcaggctg

SEQ ID NO: 446848 - DNA, 75 bp, synthetic construct
  source 1..75: mol_type = other DNA
ccaccaccacaaaagccagtgacaggtcgttctggctggaagtcaaggggcattcaatgaccgcgccacagggtg

SEQ ID NO: 446849 - DNA, 75 bp, synthetic construct
  source 1..75: mol_type = other DNA
atgaagtctaaaagcgctactctggaagacgttgcccgtcatgcgggcgtctcttaccagaccgtgtccagggta

SEQ ID NO: 446850 - DNA, 75 bp, synthetic construct
  source 1..75: mol_type = other DNA
ctgtcgacgcttgggacaaaaatacccccctacctgacgatgaggtggaagtaccgtttctgaaggatatcgagt

SEQ ID NO: 446851 - DNA, 75 bp, synthetic construct
  source 1..75: mol_type = other DNA
gatgatgagaaagccatcactcgggctatagaatcccttaaaagtcagcttagggaagagcacaagcgttctggc

SEQ ID NO: 446852 - DNA, 75 bp, synthetic construct
  source 1..75: mol_type = other DNA
tctggaaaactataatcggatattcgcattacgcgctgacctgaggtttgctcagtcccatgtgccaggagagcc

SEQ ID NO: 446853 - DNA, 75 bp, synthetic construct
  source 1..75: mol_type = other DNA
cagtgaaaatgcgttgtcgaccttttttgccaagccgctttggcttcggttattcatattgctggttattgaaat

SEQ ID NO: 446854 - DNA, 75 bp, synthetic construct
  source 1..75: mol_type = other DNA
attctgataggcttttattggaagaatgcagggtttacttttccatcagaggatattggtgtcgttagtgggatt

SEQ ID NO: 446855 - DNA, 75 bp, synthetic construct
  source 1..75: mol_type = other DNA
ctgaggttctccaaggcaacgctcagaagggtgggtgcaaatagtgatggttctggagtgctttgctttcccgct

SEQ ID NO: 446856 - DNA, 75 bp, synthetic construct
  source 1..75: mol_type = other DNA
aaggcggcacggtgcgcttttatggttgtcctggcgaagaaggcggctcgggtaaaacgttcatggttcgcgagg

SEQ ID NO: 446857 - DNA, 75 bp, synthetic construct
  source 1..75: mol_type = other DNA
caaaaaatacgtaaaacatttccggtagcagaacgtattggtaatttatggagggagataactcagggagacggt

SEQ ID NO: 446858 - DNA, 75 bp, synthetic construct
  source 1..75: mol_type = other DNA
gtgcgtcaggcactggcgaaagatccgcagaaaatttttaactatatccagcttacgcctgtgcgtaaggaggga

SEQ ID NO: 446859 - DNA, 75 bp, synthetic construct
  source 1..75: mol_type = other DNA
ggacttgatcgagaaggtgcgacagacgtttacagcggaatatgccgttctgttggtgcgaaacaagtcagctaa

SEQ ID NO: 446860 - DNA, 75 bp, synthetic construct
  source 1..75: mol_type = other DNA
aacttcgcgcaaaaaccgaacggcggatacaggaagcacaggagcgaatcagcgcacttcaggaggaaatggcgg

SEQ ID NO: 446861 - DNA, 75 bp, synthetic construct
  source 1..75: mol_type = other DNA
atggactggtttttacatagcctgataaatcaccacctgaatagtgtcattgaacgctattcaaaggtgatcggt

SEQ ID NO: 446862 - DNA, 75 bp, synthetic construct
  source 1..75: mol_type = other DNA
gaagtatgacatgaatatctacgggagtagtgaagtgccaccaccaagtggattaggccgcccaaggaacttata

SEQ ID NO: 446863 - DNA, 75 bp, synthetic construct
  source 1..75: mol_type = other DNA
gtgggaaaacaactggttaagcacatggctgcataatcatgtcgttcgggatattcgtcttggcagcattgaata

SEQ ID NO: 446864 - DNA, 75 bp, synthetic construct
  source 1..75: mol_type = other DNA
cgttttgcaattaacagtagtaccggcatgtggattcatatgcgtgaccagaatgttattttgggacgcaatgcg

SEQ ID NO: 446865 - DNA, 75 bp, synthetic construct
  source 1..75: mol_type = other DNA
cgttatctctgctggcctgtatgacttccagcgcactggcaaaggatttgaatcttccggttgttagtaaaggtt

SEQ ID NO: 446866 - DNA, 75 bp, synthetic construct
  source 1..75: mol_type = other DNA
gattattgagttacgacgctgccagtcagaaaattgccagcaagaattgaaagcgataaatacaggtgatgctgc

SEQ ID NO: 446867 - DNA, 75 bp, synthetic construct
  source 1..75: mol_type = other DNA
accgtcctgacatggtgccgaagggcgaaacgtttgagagctggaatgatctgtggaaaccagagctaaaaggca

SEQ ID NO: 446868 - DNA, 75 bp, synthetic construct
  source 1..75: mol_type = other DNA
cgttgttgaccacgagcgtgctgtgcgcaggtaatgcaatggccgctgacaagctgatcgtcagcacctggggcg

SEQ ID NO: 446869 - DNA, 75 bp, synthetic construct
  source 1..75: mol_type = other DNA
gaaatgcatactctgacggactggctgcacttttgttgaccagcgatgatgttgcgcaaaaatataacctgccgc

SEQ ID NO: 446870 - DNA, 75 bp, synthetic construct
  source 1..75: mol_type = other DNA
aatcaaacttattacagtgccacattagtattagcgcagttgtctgcaagggctctatctataaataatgataaa

SEQ ID NO: 446871 - DNA, 75 bp, synthetic construct
  source 1..75: mol_type = other DNA
atatgaaaaatatccttgcgcagctggttgaggcggagaaatccgcgcaggccaatgtgattcgccgacgtgaag

SEQ ID NO: 446872 - DNA, 75 bp, synthetic construct
  source 1..75: mol_type = other DNA
agaggtctcttcaggatagcgcccattacagattatatgattcgagcattgaaaatgttagtgaagctaatctgt

SEQ ID NO: 446873 - DNA, 75 bp, synthetic construct
  source 1..75: mol_type = other DNA
ggcggcggtgatgtcaagttattaactattctttcattagctattgatgaacatgaactgaccaattttctcgtc

SEQ ID NO: 446874 - DNA, 75 bp, synthetic construct
  source 1..75: mol_type = other DNA
ttatcattacatttaagagcggcgcaacatttcaggtcgaagtcccgggcagtcaacatatagactcccaaaaaa

SEQ ID NO: 446875 - DNA, 75 bp, synthetic construct
  source 1..75: mol_type = other DNA
cctttgacacttacgatcagatatatcaatggttaaataacacacttcagaatgttgagcgaaaatcccccacaa

SEQ ID NO: 446876 - DNA, 75 bp, synthetic construct
  source 1..75: mol_type = other DNA
gcagcggttatcttgcggggatgaagctgggcggaacgccgctggtcgagtacacgcgggaccggctgcaccgcg

SEQ ID NO: 446877 - DNA, 75 bp, synthetic construct
  source 1..75: mol_type = other DNA
atgtcaccactgataatacgcgaacacgataaaaaattaatctggcctgaagatctcaatgaagcaggccagtcc

SEQ ID NO: 446878 - DNA, 75 bp, synthetic construct
  source 1..75: mol_type = other DNA
ttctgtatttcagagattttacgcaaataagattttcatttagttgtgtgatggcattaaattccatttactata

SEQ ID NO: 446879 - DNA, 75 bp, synthetic construct
  source 1..75: mol_type = other DNA
caaaattaaaaatagatgtcattatttccttgcttggaaagcatcgcagtcttatggataggtatagattaataa

SEQ ID NO: 446880 - DNA, 75 bp, synthetic construct
  source 1..75: mol_type = other DNA
gcctcccgctccagaccgggcaggtgctgaaactcctcttgttcttactgatatgactggaggagtgactattta

SEQ ID NO: 446881 - DNA, 75 bp, synthetic construct
  source 1..75: mol_type = other DNA
cggacagcacgctcacggcgtggccggataaccgcatcgcggaagatgcgcactatgtctaccgccacgatgaat

SEQ ID NO: 446882 - DNA, 75 bp, synthetic construct
  source 1..75: mol_type = other DNA
cgtaacgccaccggatacacccgaccccatcaataatccccctgttgtggatccggaaggcccatcagtttatcg

SEQ ID NO: 446883 - DNA, 75 bp, synthetic construct
  source 1..75: mol_type = other DNA
tttgaaacgcctcacaatgatcgagaaagacctacacatgcagttaaacagtatcgaggcagacgtaggcgaggg

SEQ ID NO: 446884 - DNA, 75 bp, synthetic construct
  source 1..75: mol_type = other DNA
gtgttcatatcaaggtggaatatgaggaaaatgatggccttccgtcagatatcaacgcgcagatcagaacggtcg

SEQ ID NO: 446885 - DNA, 75 bp, synthetic construct
  source 1..75: mol_type = other DNA
cggccgtgaccttttccaccactggccttgatgttccggatgagggagacattcttgccgggcgtatagcagata

SEQ ID NO: 446886 - DNA, 75 bp, synthetic construct
  source 1..75: mol_type = other DNA
agcaacatatctgggcggcacataatattgtccctgacgggaaagtctcaagcgagttatttgactctcaggtaa

SEQ ID NO: 446887 - DNA, 75 bp, synthetic construct
  source 1..75: mol_type = other DNA
gagtcgatagaaaacgtccgtaataaactggagatcaaaacccagtttgaaaaagaaaaactggctcaggatcgc

SEQ ID NO: 446888 - DNA, 75 bp, synthetic construct
  source 1..75: mol_type = other DNA
ccggcagaactcagcacgttaactccgcggcctacgctggcgattgtctctggcctgtatgagctttttcccgaa

SEQ ID NO: 446889 - DNA, 75 bp, synthetic construct
  source 1..75: mol_type = other DNA
gacatgaagggggatacgttaatgaccccaatgatcgtggtggtgagacaaatatgggaattacgattgcgacct

SEQ ID NO: 446890 - DNA, 75 bp, synthetic construct
  source 1..75: mol_type = other DNA
acatcatcagctcgcgaattactaagtgcttattactcaaatgcacaagttgaaagattgctgaccgcaataggg

SEQ ID NO: 446891 - DNA, 75 bp, synthetic construct
  source 1..75: mol_type = other DNA
aaacagcctgatggcgtttggtcttggcgctatctggggcgtgttgatccttacttgcctgttgccagtaaacca

SEQ ID NO: 446892 - DNA, 75 bp, synthetic construct
  source 1..75: mol_type = other DNA
caagaaatgtttctgactctgttcttgatgttgttgctgaagaattttcgaataaatttgaagtttgtaacatta

SEQ ID NO: 446893 - DNA, 75 bp, synthetic construct
  source 1..75: mol_type = other DNA
ataaccaacggtgagcctaatgcacagattaaattcctcaatggctggataaatagagttgatgattgtttgaag

SEQ ID NO: 446894 - DNA, 75 bp, synthetic construct
  source 1..75: mol_type = other DNA
tgggcttttatcagctaccggaagaaaacggtaaacgatcgcgctaccaggtacatatagagtgcctgagtatgg

SEQ ID NO: 446895 - DNA, 75 bp, synthetic construct
  source 1..75: mol_type = other DNA
aaacccacgtatcagatacgggcggaattcaacattacccagaaacctggcgaggatgccggacaacttgcagac

SEQ ID NO: 446896 - DNA, 75 bp, synthetic construct
  source 1..75: mol_type = other DNA
cctggaatcatgacgataaaaagtttgatgcatttctcgaccctttgctgggaccgaaggaagaacctgatttta

SEQ ID NO: 446897 - DNA, 75 bp, synthetic construct
  source 1..75: mol_type = other DNA
aagcgaaaaattcaggctggcgtactggcagggcaggatattaccgatctgcgaaagcagtatgaaaagctgaaa

SEQ ID NO: 446898 - DNA, 75 bp, synthetic construct
  source 1..75: mol_type = other DNA
ggtcgcaatttgaacggataatagagggtgatcgcgttggtcaggctttaatatctttctatgaaaaacttccag

SEQ ID NO: 446899 - DNA, 75 bp, synthetic construct
  source 1..75: mol_type = other DNA
aggcgataaaagagaaatcccgcacctatattgacggacttcctgcagcagttcaggggcagggtaattcggatc

SEQ ID NO: 446900 - DNA, 75 bp, synthetic construct
  source 1..75: mol_type = other DNA
aaggagggtggccttgagaagattcaggcatttatccttgatgatgccctgccggcgttgatcgatttgtccgag

SEQ ID NO: 446901 - DNA, 75 bp, synthetic construct
  source 1..75: mol_type = other DNA
ttagcccggcgctggtggtgctggccgtgctatcgcaatacgtacgccagccagtattgaaagctaaggccgacg

SEQ ID NO: 446902 - DNA, 75 bp, synthetic construct
  source 1..75: mol_type = other DNA
tcagcaggcagaccgtatcgaatgtctggaaaagcaaaacaacgatctgggcaaagctattggagccgcaccgcc

SEQ ID NO: 446903 - DNA, 75 bp, synthetic construct
  source 1..75: mol_type = other DNA
tccagcagatacgtgacgatatctgcaaacgtaaagcaatgccgccatttggccccgataccagtattaatcgtc

SEQ ID NO: 446904 - DNA, 75 bp, synthetic construct
  source 1..75: mol_type = other DNA
ccggtaatggcctttgttcgaactgacagagcaggcgtcaccgctcgcgtgtggcggtacaacgacacgcagtta

SEQ ID NO: 446905 - DNA, 75 bp, synthetic construct
  source 1..75: mol_type = other DNA
cggacgactggcatgagcaacttagccgtttcgacgccatctattttggtgccgtcggctggccggataccgttc

SEQ ID NO: 446906 - DNA, 75 bp, synthetic construct
  source 1..75: mol_type = other DNA
attaatggaagtaaatgggaagattttctatgagcctgatgctattgtccatcatgaagaaagtgcaactttggc

SEQ ID NO: 446907 - DNA, 75 bp, synthetic construct
  source 1..75: mol_type = other DNA
aagtcttgcggaaacaacaaggattcttttttgttttttaagaagtgggagtctgagttatctaaagctccttca

SEQ ID NO: 446908 - DNA, 75 bp, synthetic construct
  source 1..75: mol_type = other DNA
atcaggctgtgttcaacatcaaggcaatgtgccatgtgctccaggaaggccgcagtgactggtatatgtggtgtc

SEQ ID NO: 446909 - DNA, 75 bp, synthetic construct
  source 1..75: mol_type = other DNA
tgccgcgtgctccgggtggcccgcagcggctggtatacgtgttgccaacggcggacaaggataagccctcgtcag

SEQ ID NO: 446910 - DNA, 75 bp, synthetic construct
  source 1..75: mol_type = other DNA
tacttactaattacttatctgtttatggtgatgttgttctgtctgtagaagatccaccagaacttccagttcaag

SEQ ID NO: 446911 - DNA, 75 bp, synthetic construct
  source 1..75: mol_type = other DNA
cggtaccccgctgaaagtgtatttctccagcgcgaataatatttccactgacggtaaatacctgctgaataacag

SEQ ID NO: 446912 - DNA, 75 bp, synthetic construct
  source 1..75: mol_type = other DNA
agctgacgtgataggtaaaaatcatgaggcggcaggggatagacaaggtcagccagctaaagaaagaatcatgga

SEQ ID NO: 446913 - DNA, 75 bp, synthetic construct
  source 1..75: mol_type = other DNA
atggaacatcaacgcctgcggtcaggaagatgcgcatcgacagcaagacatcatggctatcagcttgtcgtcgtg

SEQ ID NO: 446914 - DNA, 75 bp, synthetic construct
  source 1..75: mol_type = other DNA
cctcttatgcccgtgtatggatttgcccctatatttccagacatctgttatcacttaacccattacaagcccgct

SEQ ID NO: 446915 - DNA, 75 bp, synthetic construct
  source 1..75: mol_type = other DNA
catccagacgatttatcagccggggagcttcacgccactcatcagagttgaaaccgccaccggtgagctggcgaa

SEQ ID NO: 446916 - DNA, 75 bp, synthetic construct
  source 1..75: mol_type = other DNA
ggatgatgaacaagcagcccaaacctatgcttcatcaattacccaacgcatcattgctcaaaagtttagtgactt

SEQ ID NO: 446917 - DNA, 75 bp, synthetic construct
  source 1..75: mol_type = other DNA
tttcagatctacttatcagtgacaatggatactttttgcgctatttagaaggggagtcagagccagttattaagc

SEQ ID NO: 446918 - DNA, 75 bp, synthetic construct
  source 1..75: mol_type = other DNA
ctccatacggtcttccaatcagggtaataaacaaattgttcattcttatcccattttacatcatccaggatttta

SEQ ID NO: 446919 - DNA, 75 bp, synthetic construct
  source 1..75: mol_type = other DNA
aaattcaaaatatggctcttatgtatcatcaggatttaataaagaaactcaaatagggtcagggattggcatctt

SEQ ID NO: 446920 - DNA, 75 bp, synthetic construct
  source 1..75: mol_type = other DNA
gttggatgcgacgctcaagcgtcgcatcaggcataaagcagattacttttttttttcaaacggcggttttccccc

SEQ ID NO: 446921 - DNA, 75 bp, synthetic construct
  source 1..75: mol_type = other DNA
tcctgtaccgacgggaagtgaacacgagcatgttattttgtttgataccggaacggaaatccgttacgaccgtaa

SEQ ID NO: 446922 - DNA, 75 bp, synthetic construct
  source 1..75: mol_type = other DNA
agtgagtgggttttcccggccaggaggatcagcaagctggctcgaacaccccatgtctgcgaaaacactctgaat

SEQ ID NO: 446923 - DNA, 75 bp, synthetic construct
  source 1..75: mol_type = other DNA
gtggcacggccccggcacggtcgggctggcatggctttatgatgaccgtgaagacattatccccacacgggacga

SEQ ID NO: 446924 - DNA, 75 bp, synthetic construct
  source 1..75: mol_type = other DNA
ttcctgcgtggtcgccacggggcagtgttgacgatggttggcaggcagttgtttgctaaagcttatgagttgctg

SEQ ID NO: 446925 - DNA, 75 bp, synthetic construct
  source 1..75: mol_type = other DNA
aacaaaggaatctttaaatattcctagagcagtcggtggacttgttattcttaatgaatcgataatgccttatga

SEQ ID NO: 446926 - DNA, 75 bp, synthetic construct
  source 1..75: mol_type = other DNA
gggttcatattgaggaattgattcgaaagcaccctgagtcagatgctttcagaaaaaagataatggattattctt

SEQ ID NO: 446927 - DNA, 75 bp, synthetic construct
  source 1..75: mol_type = other DNA
aaacatttatatatgaccttttaagaagaactgacgctgaaaaattcatggacagttttggaactgtattcgaaa

SEQ ID NO: 446928 - DNA, 75 bp, synthetic construct
  source 1..75: mol_type = other DNA
catcaggcattctgaagagcgggacatcaacacgctgtttacctacctgaataacctccactctacggctgataa

SEQ ID NO: 446929 - DNA, 75 bp, synthetic construct
  source 1..75: mol_type = other DNA
gaactatctaataaaacgatacaaattaatgaaaaaatccataatggtatccatacagaatacatcacagatcaa

SEQ ID NO: 446930 - DNA, 75 bp, synthetic construct
  source 1..75: mol_type = other DNA
caacacctaccatgggttgtgaatttatgcattaaatggtccgccagtgcgctgggtaaaaaacggaaatttaaa

SEQ ID NO: 446931 - DNA, 75 bp, synthetic construct
  source 1..75: mol_type = other DNA
catcccgtgagaaaaatgaatgtagatacatttactatattatttgacatcattcctagaaataccattgagaaa

SEQ ID NO: 446932 - DNA, 75 bp, synthetic construct
  source 1..75: mol_type = other DNA
ttggtggtggtaatcccgggcatattgaaatcaccagaataatggccgcagtacaagtacattctgttttttgtt

SEQ ID NO: 446933 - DNA, 75 bp, synthetic construct
  source 1..75: mol_type = other DNA
gccaatctctgcgacgaatgatattcattccctgctagcattgatagccggagggaatggtctcgcgctgctacc

SEQ ID NO: 446934 - DNA, 75 bp, synthetic construct
  source 1..75: mol_type = other DNA
tggttatggaacgccatgcaggtccggtgtgtgggaaccccgctgaatccccttaccccggagcagaaatactgg

SEQ ID NO: 446935 - DNA, 75 bp, synthetic construct
  source 1..75: mol_type = other DNA
tggtcaccgccagcatcaacaacagcagccagagtcagaacgtgacgtttgtcgcggatgtcaggacggcgaaga

SEQ ID NO: 446936 - DNA, 75 bp, synthetic construct
  source 1..75: mol_type = other DNA
agctctcgaaaaccttggtttgggagaatcgacattcggcgctcagaattgtgttgtatttgataaagctggcgt

SEQ ID NO: 446937 - DNA, 75 bp, synthetic construct
  source 1..75: mol_type = other DNA
aattatttcaaacgtgctcttggggaacataaggatgtatcagggtttgagtcatttgttaaaacatggatttta

SEQ ID NO: 446938 - DNA, 75 bp, synthetic construct
  source 1..75: mol_type = other DNA
gcgatataccaagaagcgcataaatctgcatgtcctcgaagcaatgcgcgatttgaaagcaatttgccccaccag

SEQ ID NO: 446939 - DNA, 75 bp, synthetic construct
  source 1..75: mol_type = other DNA
gacctgttttacagtttcctgactcgtgaatatgtcaatctgcgcaacagtaacgtgccgcccgcagaaacgctg

SEQ ID NO: 446940 - DNA, 75 bp, synthetic construct
  source 1..75: mol_type = other DNA
catcaatgattatttcgaaagataaatgctgctttgacactacaaaaaataactttatttctatacaaccccaga

SEQ ID NO: 446941 - DNA, 75 bp, synthetic construct
  source 1..75: mol_type = other DNA
ctggggggcaaagaatgtcattttaaagctcggtagcaaaggtgctatttttagctctaaatatgtggattacca

SEQ ID NO: 446942 - DNA, 75 bp, synthetic construct
  source 1..75: mol_type = other DNA
aacctcttgttgagttttctcagcattatcatcctgacaagacagataataatattttctttcagcaaggttttg

SEQ ID NO: 446943 - DNA, 75 bp, synthetic construct
  source 1..75: mol_type = other DNA
gcaaaaggtcctggcggtggtggcgctgggttggcaacgaaaaagactggcggagttactggtgctggtcatagc

SEQ ID NO: 446944 - DNA, 75 bp, synthetic construct
  source 1..75: mol_type = other DNA
ttcggcggggaatgttggcagtaatgcaaaaggtcctggcggtggtggcgctgggttggcaacgaaaaagactgg

SEQ ID NO: 446945 - DNA, 75 bp, synthetic construct
  source 1..75: mol_type = other DNA
tgccgttacagtgatatcggaggcgggcgatctgcgtaacggtcgggtgtatccgggggccaatattgacgccat

SEQ ID NO: 446946 - DNA, 75 bp, synthetic construct
  source 1..75: mol_type = other DNA
taatttacgttctgttaattttaattcagttcctgaaattccaaatacacctaaattatcttcaacttggcgtat

SEQ ID NO: 446947 - DNA, 75 bp, synthetic construct
  source 1..75: mol_type = other DNA
gtataaataacaatccaatatattacgaccctgatcatacaacacctttcagcccttattttgcagtaaaagtta

SEQ ID NO: 446948 - DNA, 75 bp, synthetic construct
  source 1..75: mol_type = other DNA
cattatttttcctcacactaaaatcactcagggaaaatgatctctttacttgtttaggtgctgagacttataaag

SEQ ID NO: 446949 - DNA, 75 bp, synthetic construct
  source 1..75: mol_type = other DNA
ctgccgattatgccgaagcattaaaacagctggttgatgccccctccccgctaaagtgttacccgaaaactggtg

SEQ ID NO: 446950 - DNA, 75 bp, synthetic construct
  source 1..75: mol_type = other DNA
gagatggaaaagaacttactgttgatagtcgagccagtattttaggtaaaaaaagtttgtattttgtcgttgttg

SEQ ID NO: 446951 - DNA, 75 bp, synthetic construct
  source 1..75: mol_type = other DNA
ttcctgaggatactctttgccaatatggtgatttgattgttgttgatgagtcttggcgtatttgggatagtgata

SEQ ID NO: 446952 - DNA, 75 bp, synthetic construct
  source 1..75: mol_type = other DNA
taaaccggcttgagcgtgaagcatgggacgcggtgggatcattaacggatgtcgcctcccgcgtcatgctgtcgt

SEQ ID NO: 446953 - DNA, 75 bp, synthetic construct
  source 1..75: mol_type = other DNA
acgctggttcagatggtggataaaaatcctgcgccgcatctgctggtttccgggacgggggatgtgatggggtat

SEQ ID NO: 446954 - DNA, 75 bp, synthetic construct
  source 1..75: mol_type = other DNA
aagcgcaccatggaatggcgatgggatgagcagcagttaatcggaaaaaaggatctgctgcagtataccggtaag

SEQ ID NO: 446955 - DNA, 75 bp, synthetic construct
  source 1..75: mol_type = other DNA
aatgtgggaaactcaaatcagtcaggatgaatttgaaaatgcatactgtctgatgatttgggcagatcccattgg

SEQ ID NO: 446956 - DNA, 75 bp, synthetic construct
  source 1..75: mol_type = other DNA
ctcgtgactggatcatgagtcgcttaaaagaaggatattcagaagctttatttgagatattattgtcagaagccc

SEQ ID NO: 446957 - DNA, 75 bp, synthetic construct
  source 1..75: mol_type = other DNA
ttgcctgcaatgtctgagagtgcagtactttcttatctacgtagaacagttcaagaaggctggcttacaactggt

SEQ ID NO: 446958 - DNA, 75 bp, synthetic construct
  source 1..75: mol_type = other DNA
tgacggatattggcgcggcgaaacttgccagcgccgccgcgcttggtgtgccgctaaaaattacccatatggcgg

SEQ ID NO: 446959 - DNA, 75 bp, synthetic construct
  source 1..75: mol_type = other DNA
ggtgaaggtgtggaagttgacgatgaacaggcctttaaatggtgtcaaaaatcggcagaacaagggtacgctgaa

SEQ ID NO: 446960 - DNA, 75 bp, synthetic construct
  source 1..75: mol_type = other DNA
caggctgccacaccaaaagccgtgaaggctgtatatgaccttgccaatggaaaacaacctgccgacgccacactg

SEQ ID NO: 446961 - DNA, 75 bp, synthetic construct
  source 1..75: mol_type = other DNA
ctaacgttggacggaatattctggctaaagcaagcacacaggcggttattcaatatcttggtctgagcgatgcaa

SEQ ID NO: 446962 - DNA, 75 bp, synthetic construct
  source 1..75: mol_type = other DNA
aagccgggcaacatcgcccactttgcagacctgatcactttcgtcaccgaccgtccgggacacgaccagcgctat

SEQ ID NO: 446963 - DNA, 75 bp, synthetic construct
  source 1..75: mol_type = other DNA
ttggttggggagaaatcgtgataaaattttagaaatctggaatgcactacaagctggcgcactgaaccgccccgg

SEQ ID NO: 446964 - DNA, 75 bp, synthetic construct
  source 1..75: mol_type = other DNA
atttattaatgcaatggattagtcgtagaaataaatcaaacattgtcggaattgcatacagatcgacaagaatga

SEQ ID NO: 446965 - DNA, 75 bp, synthetic construct
  source 1..75: mol_type = other DNA
ttgacgggcatgggttcacgatgcaggactggagaaattatttgagctacgtaggcgaaaattgccgatggatgt

SEQ ID NO: 446966 - DNA, 75 bp, synthetic construct
  source 1..75: mol_type = other DNA
gatatgatgttgctcactctgatggtaaattgagctatactctgatctcgctttttccttttcttttattatttt

SEQ ID NO: 446967 - DNA, 75 bp, synthetic construct
  source 1..75: mol_type = other DNA
cgatgcaggttatagcggaaccagtatgacgggcgggaaaggtgctgatggggtttgtattatcgaggagtttgc

SEQ ID NO: 446968 - DNA, 75 bp, synthetic construct
  source 1..75: mol_type = other DNA
ggtgcctgcgggatgttccgtactgatgtattgcgtaagttcggtttctctgatcgtactaaagtcgaagacctt

SEQ ID NO: 446969 - DNA, 75 bp, synthetic construct
  source 1..75: mol_type = other DNA
actgggtttcacacggtaaattctcagttttctcggtagagaaatatgacgattatcagtcaagttttgtaccag

SEQ ID NO: 446970 - DNA, 75 bp, synthetic construct
  source 1..75: mol_type = other DNA
cgatggtgatgaccccgcagtattcagaccaatacaaaaatacatcaatggaacatggtataacgtcgcacaggt

SEQ ID NO: 446971 - DNA, 75 bp, synthetic construct
  source 1..75: mol_type = other DNA
tgctgattatcgtcctgctgttattgctgttaacgctggtgctggcgggcctggtacggatggcagcgcgggtgt

SEQ ID NO: 446972 - DNA, 75 bp, synthetic construct
  source 1..75: mol_type = other DNA
ggagttgaaaacagaagctataaggcgaatgaaaaacaggaaggtcgtcggggaaaaagtccaggatattgccga

SEQ ID NO: 446973 - DNA, 75 bp, synthetic construct
  source 1..75: mol_type = other DNA
atgcttatcccgctggcaaatgttcttggttgcgatccgatgtggctgttaaccggtaaaccaacagctggagat

SEQ ID NO: 446974 - DNA, 75 bp, synthetic construct
  source 1..75: mol_type = other DNA
atggaggccatgaagcacatcaatgactggcttggggaagaggtgatccgctttaacccttacgcactgttagac

SEQ ID NO: 446975 - DNA, 75 bp, synthetic construct
  source 1..75: mol_type = other DNA
cttcgagtaaaaaaactgcaagagtatcctgttttagttccgcggcttcctgccacgtggaattctgttaccggt

SEQ ID NO: 446976 - DNA, 75 bp, synthetic construct
  source 1..75: mol_type = other DNA
atcctattttagttccgcggcttcctgctacgtggaattctgttaccggtgaaaagcttcaccagaatttctcac

SEQ ID NO: 446977 - DNA, 75 bp, synthetic construct
  source 1..75: mol_type = other DNA
tggaggacgaaaaccgccgcctcaagaagatgtacgccgaggagcgcctcaaggcagagatcatcaccgaggcca

SEQ ID NO: 446978 - DNA, 75 bp, synthetic construct
  source 1..75: mol_type = other DNA
tggggaaggttgcatggctatgggcctgttctcctctgcataaaaaatggccattatctgtttttgctattaatg

SEQ ID NO: 446979 - DNA, 75 bp, synthetic construct
  source 1..75: mol_type = other DNA
aagaaattatcatccagtgggagagcggagagtacgaaccaaccatcagcatgcttatcccactggcaaatattc

SEQ ID NO: 446980 - DNA, 75 bp, synthetic construct
  source 1..75: mol_type = other DNA
cggtgacgaagttgccgttgattcagtcggtgctggcgtcggtgagttggtactcctcagcagcggttccagcgc

SEQ ID NO: 446981 - DNA, 75 bp, synthetic construct
  source 1..75: mol_type = other DNA
agttccgtcagcagcagctggagcggttctttcaccgcaacccaatatggtgcagcgtttcatcgccgcagctcc

SEQ ID NO: 446982 - DNA, 75 bp, synthetic construct
  source 1..75: mol_type = other DNA
ggacaccacaccttgtacctttgtcgcggcaggccctaagtattttggaaaagatcaaaagcatgagcggaaatt

SEQ ID NO: 446983 - DNA, 75 bp, synthetic construct
  source 1..75: mol_type = other DNA
gataaagtcatttatgaaggattcagcgatcggtcagatcagttaggaataataattgtgcataacatgaattat

SEQ ID NO: 446984 - DNA, 75 bp, synthetic construct
  source 1..75: mol_type = other DNA
ctatttggttattgtcagaaaaaatagtaaggctaatagttaattttatctcagttgtttatttggctaacttgt

SEQ ID NO: 446985 - DNA, 75 bp, synthetic construct
  source 1..75: mol_type = other DNA
gatttctattaataagaaaaatgagaatgtattagaaatactcgaatatgcaaaattaattaagaataaatatcc

SEQ ID NO: 446986 - DNA, 75 bp, synthetic construct
  source 1..75: mol_type = other DNA
aaatgcagaagtgtttgccaatattgagaaacaattgcgcatgattcaatgtttgcgtactgttgcgctggaact

SEQ ID NO: 446987 - DNA, 75 bp, synthetic construct
  source 1..75: mol_type = other DNA
aaagttagctttaaattgctcgcagcggacacagcaaaagataaccgtaaggataatgaattagatcgctgcttt

SEQ ID NO: 446988 - DNA, 75 bp, synthetic construct
  source 1..75: mol_type = other DNA
atagttgtgtggagaactgtttaaaagggaagtttaaagaggtaaggccgcgttattctgtattgcctgatatat

SEQ ID NO: 446989 - DNA, 75 bp, synthetic construct
  source 1..75: mol_type = other DNA
ggcggggcagaccggggaaatcagggtggacgtggagcgccgccgtgccagccgggaggcggggaacgtggagca

SEQ ID NO: 446990 - DNA, 75 bp, synthetic construct
  source 1..75: mol_type = other DNA
agagctaatggggcaaaaatggttaagaatgctaatcgctccggggggatcattaggggggggcacgtccgaaaa

SEQ ID NO: 446991 - DNA, 75 bp, synthetic construct
  source 1..75: mol_type = other DNA
caaatcaacacgatgttcttgagaatattcaactcttagtaggggctggagcactactgtatagcagcaataacc

SEQ ID NO: 446992 - DNA, 75 bp, synthetic construct
  source 1..75: mol_type = other DNA
cgagcgtacccttattctgtggcgcgattgcgacaagatcggctatgaagaattgaataaatatgccaacagatt

SEQ ID NO: 446993 - DNA, 75 bp, synthetic construct
  source 1..75: mol_type = other DNA
gtacgatgatgagattttgccgattgaagaaatcacaaacaaagacaccaatggcaacgaaaccaaagagctgat

SEQ ID NO: 446994 - DNA, 75 bp, synthetic construct
  source 1..75: mol_type = other DNA
gataatgattgcgaagggattgaggcatatgaaaaaatccgcaaactcgcattgcctcacaatattagctgcatt

SEQ ID NO: 446995 - DNA, 75 bp, synthetic construct
  source 1..75: mol_type = other DNA
cgctgggcaatatcaaaggtatggataaggctgtcgaaatggcgcaggccatggctgatccatgggaacaggccg

SEQ ID NO: 446996 - DNA, 75 bp, synthetic construct
  source 1..75: mol_type = other DNA
ggccaccatgagtggcagcgaggccgggacaaagtacaaggcatttcttgccgcagtaggcagcgcccagaaaaa

SEQ ID NO: 446997 - DNA, 75 bp, synthetic construct
  source 1..75: mol_type = other DNA
ttaccatttcactatctgccagcgccgcgccggaaatgtgttttaaccaggccgggcgtgattttggtattgatc

SEQ ID NO: 446998 - DNA, 75 bp, synthetic construct
  source 1..75: mol_type = other DNA
cttcacgcctgctgctctccattacaagtccaagtacaatgatgaccgggaatgtcacacaactcacaattgaca

SEQ ID NO: 446999 - DNA, 75 bp, synthetic construct
  source 1..75: mol_type = other DNA
ggagcaggcagcttgcacggcaaccgtgattggaatagacggaaatgtatccggggaaactatttacatgctcca

SEQ ID NO: 447000 - DNA, 75 bp, synthetic construct
  source 1..75: mol_type = other DNA
gaccaccatcgacaactcccgtcgtgtggttaacatcaatgtgcaggatccatcccctgcccgtcttaacgagtg

SEQ ID NO: 447001 - DNA, 75 bp, synthetic construct
  source 1..75: mol_type = other DNA
ggccacagcctttattgccgctgaattaaagcgcgtttctgaaaaatatggaaatgaagcaatctattttaatta

SEQ ID NO: 447002 - DNA, 75 bp, synthetic construct
  source 1..75: mol_type = other DNA
aaggcgcggataaactgaaaactggtattaaactgttcttcaaccaggccgggaatgcacttctgaatcaacatg

SEQ ID NO: 447003 - DNA, 75 bp, synthetic construct
  source 1..75: mol_type = other DNA
aacagtttctgctcaaccttcaggatacgatttgtcagcagctgaccgccgtcgatggcgcagaatttgtcgaag

SEQ ID NO: 447004 - DNA, 75 bp, synthetic construct
  source 1..75: mol_type = other DNA
aaagacacttgattatcaaagtcatttcataatgtcaaatgaacaaagcactgcaattaattacctgaaaaaaaa

SEQ ID NO: 447005 - DNA, 75 bp, synthetic construct
  source 1..75: mol_type = other DNA
tccgctacagatgagcggttttcacaccaaaggtcacacgcactcaacatatgccagtgtgctgatgctgcatga

SEQ ID NO: 447006 - DNA, 75 bp, synthetic construct
  source 1..75: mol_type = other DNA
atgatccggttgccagtccactgacgacaccttccgggaagattgagatttactcgcacactctggcggaactgg

SEQ ID NO: 447007 - DNA, 75 bp, synthetic construct
  source 1..75: mol_type = other DNA
ttctccgtgctaattccagttataatgatagttgccgtaatttataaagaggtaagttatgtcctgataatgaga

SEQ ID NO: 447008 - DNA, 75 bp, synthetic construct
  source 1..75: mol_type = other DNA
ttccccgatgtctcggatcgtttacgcgatattccagtcgaagcgctgatcccgcgcggtttgcatcacttgaca

SEQ ID NO: 447009 - DNA, 75 bp, synthetic construct
  source 1..75: mol_type = other DNA
atctgacgggaatgatgaaatggcatttttcaccagaaactggtgcgccgttctggttggaaatgcgccaatcga

SEQ ID NO: 447010 - DNA, 75 bp, synthetic construct
  source 1..75: mol_type = other DNA
ccaatatcattatagtcatgaatgagagcgatgaaagaatcgcaagaaaatattttgttaaaaataaaaaatcaa

SEQ ID NO: 447011 - DNA, 75 bp, synthetic construct
  source 1..75: mol_type = other DNA
tcaagtaagaaaggtgttgatgtcaaagtggcgaataacacctcccgaagtggagagaaggttattccggtagat

SEQ ID NO: 447012 - DNA, 75 bp, synthetic construct
  source 1..75: mol_type = other DNA
gtatcagggtctgggctgggaaatgctggactggccggtaaatcctgacatcatcgttaacggcagtgacaataa

SEQ ID NO: 447013 - DNA, 75 bp, synthetic construct
  source 1..75: mol_type = other DNA
ttcatcaacaagccttgatgaagagaaatgcacctttacattctcgggtaagctaaaccataaagggcaggtcac

SEQ ID NO: 447014 - DNA, 75 bp, synthetic construct
  source 1..75: mol_type = other DNA
gagccaaaattaacttacgaagagtttttttattccgtctggaacactcacattcgacaccggaacgaggttgtc

SEQ ID NO: 447015 - DNA, 75 bp, synthetic construct
  source 1..75: mol_type = other DNA
atgaaaaaacgcatcactttcagcgcaaacaaaaaatctactattgatgcaattgatgactatagccgtgcaaaa

SEQ ID NO: 447016 - DNA, 75 bp, synthetic construct
  source 1..75: mol_type = other DNA
atacctggccgatagcccgtagcgatggacaattacatgaggtgaagtacggtttgtcatccaatagtggggaaa

SEQ ID NO: 447017 - DNA, 75 bp, synthetic construct
  source 1..75: mol_type = other DNA
tatggttggacgattatgtgaccaaaaaaatccattgctattaattgaggcaataaaggatttggaatccaatat

SEQ ID NO: 447018 - DNA, 75 bp, synthetic construct
  source 1..75: mol_type = other DNA
ccgcttcagcccccggaaagtccacagcggggaaacaggccgcaggggtggcggcgaaagggcagacaactgcgc

SEQ ID NO: 447019 - DNA, 75 bp, synthetic construct
  source 1..75: mol_type = other DNA
gggcagttgtccgggggcagacgcaaaagtttttgacgcctgcggcaaaaagttttgtggctggtacatctctcc

SEQ ID NO: 447020 - DNA, 75 bp, synthetic construct
  source 1..75: mol_type = other DNA
ctgtaataatgatattttaccccaaagtcatttctgcttataatgaactaaatatagaggaatataataaaacat

SEQ ID NO: 447021 - DNA, 75 bp, synthetic construct
  source 1..75: mol_type = other DNA
gaggctgaagcggaagcgatgctgcgtcagcaaccaccttccacgcgtattgacctcacgctggctgactgggcg

SEQ ID NO: 447022 - DNA, 75 bp, synthetic construct
  source 1..75: mol_type = other DNA
ctgacctgatcacttttgtcaccgaccgtccgggacatgacctgcgttatgccattgatgccacgaaaattcagc

SEQ ID NO: 447023 - DNA, 75 bp, synthetic construct
  source 1..75: mol_type = other DNA
caaactgctccaacaactacggtccgtatcacttcccggaaaaactgatcccgctgactatccttaatgccctgg

SEQ ID NO: 447024 - DNA, 75 bp, synthetic construct
  source 1..75: mol_type = other DNA
attttacggtgatattagtaatagagataacctcattaaaatatcatatttaactttatggcctctgataattgc

SEQ ID NO: 447025 - DNA, 75 bp, synthetic construct
  source 1..75: mol_type = other DNA
cgtcggttggtgctcccgggggagcaacctctttcggcaataccataattgccaaaggtggtcttggtgggaatg

SEQ ID NO: 447026 - DNA, 75 bp, synthetic construct
  source 1..75: mol_type = other DNA
aaatgggcacaggaacaacttttaaagaaatttctggtagttctgcgaaaacattaccatttgttcttgtatcgt

SEQ ID NO: 447027 - DNA, 75 bp, synthetic construct
  source 1..75: mol_type = other DNA
atcgtgatgcacctggcggcagaaagtcatgtggatcgctccattgatggcccggccgccttcatccagaccaac

SEQ ID NO: 447028 - DNA, 75 bp, synthetic construct
  source 1..75: mol_type = other DNA
tcgatgtggtgcgcaccatctgcgccattctcgacaaggtggtggcgcagaagccgggtaacatcactcatttcg

SEQ ID NO: 447029 - DNA, 75 bp, synthetic construct
  source 1..75: mol_type = other DNA
cccggccgcctttatccagaccaacgtgatcggcaccttcactctgctggaggcggcccgtcactactggtccgg

SEQ ID NO: 447030 - DNA, 75 bp, synthetic construct
  source 1..75: mol_type = other DNA
ttccgcttccatcatatctccaccgatgaggtgtacggcgatctccacggcaccgatgacctgttcaccgaagag

SEQ ID NO: 447031 - DNA, 75 bp, synthetic construct
  source 1..75: mol_type = other DNA
ctttacgtcgaagatcacgcccgcgccctgtataaagtggcgaccgaaggtgagagcggagaaacctacaatatc

SEQ ID NO: 447032 - DNA, 75 bp, synthetic construct
  source 1..75: mol_type = other DNA
cctggcgccggtggccgggagcgaatgctactcgttttcccagactgatatcactgatgctgctgccgtggcggc

SEQ ID NO: 447033 - DNA, 75 bp, synthetic construct
  source 1..75: mol_type = other DNA
agcccgatttaatgacgatggcgaaaagcctcgcgggtgggatgccactttcgggcgtggtcggtaatgccaaca

SEQ ID NO: 447034 - DNA, 75 bp, synthetic construct
  source 1..75: mol_type = other DNA
tcagcggaaatgctgtacttgcaaaaaacgttggggctacaaggtttaccgctgattgccgaaaatggcgcagtg

SEQ ID NO: 447035 - DNA, 75 bp, synthetic construct
  source 1..75: mol_type = other DNA
gctccgcccgcaaaagctcgctaaaaggccttttaaaggcctttaagggtaagggagagctgctagcgctggtgc

SEQ ID NO: 447036 - DNA, 75 bp, synthetic construct
  source 1..75: mol_type = other DNA
tatcatggttaacgaaacttgagcgtataggcgagaaatcagcagccaacaaacataagatgttcagtaatctgg

SEQ ID NO: 447037 - DNA, 75 bp, synthetic construct
  source 1..75: mol_type = other DNA
attttgagtgtagctgtaccagtaatatgtttatttttgaataaatcagaatttattaattctattattatgttt

SEQ ID NO: 447038 - DNA, 75 bp, synthetic construct
  source 1..75: mol_type = other DNA
ggccggagggaacaggcagcctgtatatctacagcgacccggggagttatgaaccgctggcgcgggtggataagg

SEQ ID NO: 447039 - DNA, 75 bp, synthetic construct
  source 1..75: mol_type = other DNA
gacataccggtatgtgtacgatgcgctggggaggcggacggaaaaacagcacatcagccctgacggtaaaccgta

SEQ ID NO: 447040 - DNA, 75 bp, synthetic construct
  source 1..75: mol_type = other DNA
aaaagagttggtttctgcgattcgtcgcctttgcgacgagcacggcatcgtgatgattgccgatgaagtgcaaag

SEQ ID NO: 447041 - DNA, 75 bp, synthetic construct
  source 1..75: mol_type = other DNA
gcccgttccccggttcggtatatcacgtaccttatccgtcagatttacatggcgtttcaacgcaggactccctcg

SEQ ID NO: 447042 - DNA, 75 bp, synthetic construct
  source 1..75: mol_type = other DNA
gcccagtcggcagaaaacgctacgctgaaggacgtagagggcaacgaatacatcgatttcgccgcaggcattgcg

SEQ ID NO: 447043 - DNA, 75 bp, synthetic construct
  source 1..75: mol_type = other DNA
tcgccccggcgtcatggtggggtgattggttcggcctggacctcagtgctgaggacatcgcagaactacaggagg

SEQ ID NO: 447044 - DNA, 75 bp, synthetic construct
  source 1..75: mol_type = other DNA
ccgctggcggtcgctgccgcgcacgcggtgctcaacattatcgataaagaatcactctgcgaccgcgcgaatcaa

SEQ ID NO: 447045 - DNA, 75 bp, synthetic construct
  source 1..75: mol_type = other DNA
ctgggccagcgcctgacaaacacgttgattgatgccaaagaaagcgttccggccatcgcggcggtacgcggtctg

SEQ ID NO: 447046 - DNA, 75 bp, synthetic construct
  source 1..75: mol_type = other DNA
tctgcacaacttacacgcatagcgttcccatttgaatacagttgcagcccgcgatttattttgtcttccggagcc

SEQ ID NO: 447047 - DNA, 75 bp, synthetic construct
  source 1..75: mol_type = other DNA
ggggaaactacactattctcagcaaaaaacatcctgacagcaatactcactctgcacaacttacacgcatagcgt

SEQ ID NO: 447048 - DNA, 75 bp, synthetic construct
  source 1..75: mol_type = other DNA
ggagctgtgggcactgaactcctctcctaaagacagcgccctgcgacgtgcgctgacgcaggaggtggggtcact

SEQ ID NO: 447049 - DNA, 75 bp, synthetic construct
  source 1..75: mol_type = other DNA
tcaacgacgtttgatgatcagggggttgcctcaaataatacgggattatcaggaaccgttggaagccgggatcag

SEQ ID NO: 447050 - DNA, 75 bp, synthetic construct
  source 1..75: mol_type = other DNA
tagtgaaaagagtcacggcagagaagaaacccgtcttcatattgtttgcgatgtccctgatgagcttattgattt

SEQ ID NO: 447051 - DNA, 75 bp, synthetic construct
  source 1..75: mol_type = other DNA
ttgacgcgccattgccacaacagatcgagctgcctgcagctcaatgcacatacgctgatggcgcaggccattatc

SEQ ID NO: 447052 - DNA, 75 bp, synthetic construct
  source 1..75: mol_type = other DNA
ttacatacagaagacggttccgcatttgaggttggtctggcgtcatcccaacaaaataaacatacagaactggca

SEQ ID NO: 447053 - DNA, 75 bp, synthetic construct
  source 1..75: mol_type = other DNA
ttccatttggtatttcgcagctaggaagtcaattactgaatattgtaggtcaaaaggtagatgaattgattttag

SEQ ID NO: 447054 - DNA, 75 bp, synthetic construct
  source 1..75: mol_type = other DNA
ccgttgtcacatgccatctcgcttttcccgcttaacagggcaggctctgtctggcgaggtaaagggaatcttatg

SEQ ID NO: 447055 - DNA, 75 bp, synthetic construct
  source 1..75: mol_type = other DNA
gtgaacgtccgatcgacattcacaaagaccctgtggcactgaacaaatacattactgaatacctgactacaaagg

SEQ ID NO: 447056 - DNA, 75 bp, synthetic construct
  source 1..75: mol_type = other DNA
gtggcactgaacaaatacattactgaatacctgactacaaagggcgtgtttgagaatgaagaaacagacctgggc

SEQ ID NO: 447057 - DNA, 75 bp, synthetic construct
  source 1..75: mol_type = other DNA
ctcgcacgattattgcgcattgcggatacttcggttttgcaggtacataacgtgctgtcacccgaaaaaggcttg

SEQ ID NO: 447058 - DNA, 75 bp, synthetic construct
  source 1..75: mol_type = other DNA
agcggtatgatgcgaaactggaaggagctacgcaaaacgcatctgaaaaaaaagcacgcttcgtacaatgtgtac

SEQ ID NO: 447059 - DNA, 75 bp, synthetic construct
  source 1..75: mol_type = other DNA
ccttgcaaccccggatcacgcaattggttcagcaacgccacttgcatctatcgcttccgcgcgacatgaaaccca

SEQ ID NO: 447060 - DNA, 75 bp, synthetic construct
  source 1..75: mol_type = other DNA
gattgttatcgctgttttctttggcaacacatgccagtgactggcaggaaattaaaaatgaggccaaagggcaaa

SEQ ID NO: 447061 - DNA, 75 bp, synthetic construct
  source 1..75: mol_type = other DNA
actggtttaccggtgaccaccgcctgcggtggctatgacggctggattggtgactttatcgaaagcgtcgtctta

SEQ ID NO: 447062 - DNA, 75 bp, synthetic construct
  source 1..75: mol_type = other DNA
agcctaattccgcatggcgattagatacaatgctgccgggaaatattttttcttcatatgtattgggggagtgta

SEQ ID NO: 447063 - DNA, 75 bp, synthetic construct
  source 1..75: mol_type = other DNA
gtctgcattgttacctgaatgtagcaacttttgggtaaactctctgcatggacaaggggcgaaggtcgttagccc

SEQ ID NO: 447064 - DNA, 75 bp, synthetic construct
  source 1..75: mol_type = other DNA
gcacgctgttgcaggtcaaaaccagagtcaataaaacccagttaggcggaattcgctcctgggatttcgattacc

SEQ ID NO: 447065 - DNA, 75 bp, synthetic construct
  source 1..75: mol_type = other DNA
gctatacccagatcctgaccacaggagcgatgtctggcacgctgacgctgatgccacagctgaatggtgtggatg

SEQ ID NO: 447066 - DNA, 75 bp, synthetic construct
  source 1..75: mol_type = other DNA
ggtggtaagagctttgttatatcagagacatatactgataatgagggaaatacaaggacaagagaaaagatcgat

SEQ ID NO: 447067 - DNA, 75 bp, synthetic construct
  source 1..75: mol_type = other DNA
tttctttggctatgaacaagtgtatgttgcccttaaaatggcagttataggatttttttttggggatatgtctat

SEQ ID NO: 447068 - DNA, 75 bp, synthetic construct
  source 1..75: mol_type = other DNA
ttaagagaggcagttaaagaccgtcttaattttttaatcgtaggtgggactggctccggtaagacaactatagca

SEQ ID NO: 447069 - DNA, 75 bp, synthetic construct
  source 1..75: mol_type = other DNA
atacatcacaaccacgagataacagtaaaaccgcaagacgatatctggatatgacgggtatccagtctgttctta

SEQ ID NO: 447070 - DNA, 75 bp, synthetic construct
  source 1..75: mol_type = other DNA
ttctttaatagaacatggtttttgggatgaattcgctagccctgcctcgaatgcacaaactgattgtgagggatt

SEQ ID NO: 447071 - DNA, 75 bp, synthetic construct
  source 1..75: mol_type = other DNA
cattaatgttagtagctaaatcgatgggatatgattcttgtccgatggatgggtttgattttcctgaagtcgaga

SEQ ID NO: 447072 - DNA, 75 bp, synthetic construct
  source 1..75: mol_type = other DNA
atgtcaattgactttaccccagttataataaatacatatcacggtgatatttataaccgcacaacaaataccgac

SEQ ID NO: 447073 - DNA, 75 bp, synthetic construct
  source 1..75: mol_type = other DNA
taaaaaatgggcacaaatgtctgaatatcaattcgaaatatttcaacacgatacgtttcatcctaaaaaaatgtc

SEQ ID NO: 447074 - DNA, 75 bp, synthetic construct
  source 1..75: mol_type = other DNA
gtgtccaaaccatgttttcagatactaattttattgctgaacaacgagctgacttaccgactaatataaaagata

SEQ ID NO: 447075 - DNA, 75 bp, synthetic construct
  source 1..75: mol_type = other DNA
caggataatgctcaagaaaccaaagaactggcgggaggccaggaagaaaacgcgcaggcagacgcccacgaggat

SEQ ID NO: 447076 - DNA, 75 bp, synthetic construct
  source 1..75: mol_type = other DNA
ttttcacataaagaacaccctactccaaaattatataaagacgaacaatatcttgacaaacaaatcgaaggttta

SEQ ID NO: 447077 - DNA, 75 bp, synthetic construct
  source 1..75: mol_type = other DNA
tatggggtggaaatagaaataccatctggtaaaagaattcgcttatcaaatcattatcagaatataataccataa

SEQ ID NO: 447078 - DNA, 75 bp, synthetic construct
  source 1..75: mol_type = other DNA
tttggagggttattagcagtttcaattcaatatggagtaattggttttacttctttactattatgcttaaggttt

SEQ ID NO: 447079 - DNA, 75 bp, synthetic construct
  source 1..75: mol_type = other DNA
gcccaaaaagctgttagcgacaatgatgtcattatcatatccggattcatgcaggaacgaccagaacttgtatat

SEQ ID NO: 447080 - DNA, 75 bp, synthetic construct
  source 1..75: mol_type = other DNA
tataggcgtcacattagttgctcatggggcgaataatttttatgaaagcttatcacctttattttttaacgagta

SEQ ID NO: 447081 - DNA, 75 bp, synthetic construct
  source 1..75: mol_type = other DNA
acataaagaacaccctacccccaaattatataaagatggacaatatcttgacaaacaaatcgaaggtttattttc

SEQ ID NO: 447082 - DNA, 75 bp, synthetic construct
  source 1..75: mol_type = other DNA
ataagttcgacaccacttacgcaacagacacaatcaatacttaatcagattaataacattagatatgaaaaaaac

SEQ ID NO: 447083 - DNA, 75 bp, synthetic construct
  source 1..75: mol_type = other DNA
acctggcgaggtcgcctacgtgatgaaccagaacgggaagacggtatctcgttacgagcataatgaccgccagta

SEQ ID NO: 447084 - DNA, 75 bp, synthetic construct
  source 1..75: mol_type = other DNA
tctgaccggacatcagcagagcgcacgccaccatttgctgccctgaccggcatacgctgcagtaccgcacatatc

SEQ ID NO: 447085 - DNA, 75 bp, synthetic construct
  source 1..75: mol_type = other DNA
ctgacgctgctggatgtaaaacagcaggagcttcagaaacagacggcactcaacgagctgaagaaaaaaacaatt

SEQ ID NO: 447086 - DNA, 75 bp, synthetic construct
  source 1..75: mol_type = other DNA
acagccaaccggtggtggatttaccggaaaccaaagcctgggctgaaaaactgaccgctatgctggctgcacgta

SEQ ID NO: 447087 - DNA, 75 bp, synthetic construct
  source 1..75: mol_type = other DNA
aaaaaatatagatgatattggaatatttgcattggcaatgtgtaatggagaatcaattaacgagaataaagaata

SEQ ID NO: 447088 - DNA, 75 bp, synthetic construct
  source 1..75: mol_type = other DNA
tcagcgtgacctatatggggtcattcctctttatggccgtgctggcttcgctggggttacttctgctgtcgcgtt

SEQ ID NO: 447089 - DNA, 75 bp, synthetic construct
  source 1..75: mol_type = other DNA
atgtgtatctaccttaacttaatgattttgataaaaatcattaggggattcatcaggacagagccgcatgtagca

SEQ ID NO: 447090 - DNA, 75 bp, synthetic construct
  source 1..75: mol_type = other DNA
tgcggcaggcactgctgagcagatgcttacagcggcatttaacagtgcaggtaatgcactggcaacgttctgtac

SEQ ID NO: 447091 - DNA, 75 bp, synthetic construct
  source 1..75: mol_type = other DNA
ggatgaaatcgggccaaacgatagtaatacgtttgattatgttgatggctggaacgcctgccgcgctgccatgct

SEQ ID NO: 447092 - DNA, 75 bp, synthetic construct
  source 1..75: mol_type = other DNA
ggaatgaaagagcaaatcgttgacttggcaatgaataatgccggtattcgtgacaccgcaagggcgttacatatc

SEQ ID NO: 447093 - DNA, 75 bp, synthetic construct
  source 1..75: mol_type = other DNA
tttcatgtgtttactgctttgtttaaatcatactggtgggaaactcctgctgcgtatttattaattttaattact

SEQ ID NO: 447094 - DNA, 75 bp, synthetic construct
  source 1..75: mol_type = other DNA
tgctgcttatctcctctgatctggaagagatcgaactgatggcagatcgtgtgtatgtgatgcatcagggcgaaa

SEQ ID NO: 447095 - DNA, 75 bp, synthetic construct
  source 1..75: mol_type = other DNA
gtatagaatcagttgacttatcttacaaaccaacaaattttttaaaaaaaaataatgtttgccttcatattaatg

SEQ ID NO: 447096 - DNA, 75 bp, synthetic construct
  source 1..75: mol_type = other DNA
gatcttgatcaaattatcaaacatgaggggacggccgtaattatcattgataactgctctaatcatccgggtttg

SEQ ID NO: 447097 - DNA, 75 bp, synthetic construct
  source 1..75: mol_type = other DNA
ataaaaatactgacgacattatcgaacagaagaacattcttagagctcaacaagatcaaattaacgatacgcaaa

SEQ ID NO: 447098 - DNA, 75 bp, synthetic construct
  source 1..75: mol_type = other DNA
aacagacccaggcagaccgcgatgcggcacaagataccgccatccagaatgcgcaaaccaccgctaacacagcag

SEQ ID NO: 447099 - DNA, 75 bp, synthetic construct
  source 1..75: mol_type = other DNA
caaagatgtactgcatcaaaccgccagcctgaccgggctggtggaggtgttaaaacgccagggaaaaacggtcac

SEQ ID NO: 447100 - DNA, 75 bp, synthetic construct
  source 1..75: mol_type = other DNA
gcataaagtcggggattatcctgttgctgaggactactactcccgggccctcagtataccgatgtattctgcttt

SEQ ID NO: 447101 - DNA, 75 bp, synthetic construct
  source 1..75: mol_type = other DNA
tgataacgatattattcaactttctcactttatagccgagtccgatgtattcattgtacagatggaaaataatct

SEQ ID NO: 447102 - DNA, 75 bp, synthetic construct
  source 1..75: mol_type = other DNA
aactggctgcggaaaatgaagccagcacgcgcgcttctgcggagcaagggaaaaaaattgacgctctttcttcta

SEQ ID NO: 447103 - DNA, 75 bp, synthetic construct
  source 1..75: mol_type = other DNA
acggtcgaagcactagccatcctgagggatggcactattgccatctaggctctgccgcggcgaatcaaataagtg

SEQ ID NO: 447104 - DNA, 75 bp, synthetic construct
  source 1..75: mol_type = other DNA
aattaaaagtcattttttcctgcccagtaatttccaatcctgatgtgtttttcaaaacatttaatataccgaata

SEQ ID NO: 447105 - DNA, 75 bp, synthetic construct
  source 1..75: mol_type = other DNA
tgctcaccggacgcgcctccgttgtggagcgcctgacggaagtgatccagcgcgtggatcacgcgggtaatcgca

SEQ ID NO: 447106 - DNA, 75 bp, synthetic construct
  source 1..75: mol_type = other DNA
gtcaggcagatggaaagctggatgatcaccacccggccccgccggcgggagccgttatggccgggcacggatgag

SEQ ID NO: 447107 - DNA, 75 bp, synthetic construct
  source 1..75: mol_type = other DNA
ctgaccaatgcgctcaaaggcgatggcttgatgcgagtgcagctgtcatcctccgacaagatgtttggctttacc

SEQ ID NO: 447108 - DNA, 75 bp, synthetic construct
  source 1..75: mol_type = other DNA
aataatggcggatatggagcgagacccaacaaaccgcctacgcccgatccaagtaaatttccagacatagcgaaa

SEQ ID NO: 447109 - DNA, 75 bp, synthetic construct
  source 1..75: mol_type = other DNA
ggccgcgtaagcctgcgttatttaatgtacaaaaccgatcaggtccgtgaatccctcggtcattccaacttccgc

SEQ ID NO: 447110 - DNA, 75 bp, synthetic construct
  source 1..75: mol_type = other DNA
ttaggcagaaatacactcaggctgaaataggtcgttatatgggggtcgcccaacagaccgtttggcaatggttta

SEQ ID NO: 447111 - DNA, 75 bp, synthetic construct
  source 1..75: mol_type = other DNA
ttggctgcgatccgatgtggctgttaactggcgaggttactcctccggagcaaccaaaaagtgaggagcagcaac

SEQ ID NO: 447112 - DNA, 75 bp, synthetic construct
  source 1..75: mol_type = other DNA
ctgggaaacaaggcactgattggaaaggctgggcaaaaatggtgcttaaagcaaatcctgactcaccaaataagg

SEQ ID NO: 447113 - DNA, 75 bp, synthetic construct
  source 1..75: mol_type = other DNA
gctgttgatgatgtagcagatgaatatgatgcttgcgagcaggttttagaaatgcttaaagctgacagaaacgat

SEQ ID NO: 447114 - DNA, 75 bp, synthetic construct
  source 1..75: mol_type = other DNA
ttaaatatgacaacgttgattatatcaaagattatttagatagctctattgattgtttaggaactgacggttttt

SEQ ID NO: 447115 - DNA, 75 bp, synthetic construct
  source 1..75: mol_type = other DNA
gcccagacatttaccctaacccaactgacggtttacctgttggatgtaaggctaacacaccaaatgcaccggaga

SEQ ID NO: 447116 - DNA, 75 bp, synthetic construct
  source 1..75: mol_type = other DNA
attccggtataactcagaaacattttgctgaaattgttggggtaacccaggggatggtaagccatgtcattaccg

SEQ ID NO: 447117 - DNA, 75 bp, synthetic construct
  source 1..75: mol_type = other DNA
tgggtttttaccccatcgagatgaaagaagaataccttaccaatggttcattaccatctgatgttatagaggttt

SEQ ID NO: 447118 - DNA, 75 bp, synthetic construct
  source 1..75: mol_type = other DNA
catgatctcaagctaagtgtgtttatggatgatgtgatcatctcgtcaaacgatttggcccaattacaagcggct

SEQ ID NO: 447119 - DNA, 75 bp, synthetic construct
  source 1..75: mol_type = other DNA
tttaaataccataatcgatcgaaaaaataatattttatctatgaaagattatttcgatgtggaaataataagaca

SEQ ID NO: 447120 - DNA, 75 bp, synthetic construct
  source 1..75: mol_type = other DNA
tgtactacgaatccggcgcaatgctggcaaaaatctgtgctgaccttcaactgcctctattcaccgtggtgacgc

SEQ ID NO: 447121 - DNA, 75 bp, synthetic construct
  source 1..75: mol_type = other DNA
tacgacggcacgcgctggcaggagagctggtcgtcagtacaggcgatccctgtggcggtacgcatgaccctgcat

SEQ ID NO: 447122 - DNA, 75 bp, synthetic construct
  source 1..75: mol_type = other DNA
tcaatacattacaggggcaactggacgtcaaggttgaagaagaggacgggcaagtcacgcaatggcaagttgcat

SEQ ID NO: 447123 - DNA, 75 bp, synthetic construct
  source 1..75: mol_type = other DNA
aggataacaagatttcgcatactgcttcgtggtatgactcttccgatcgaaataattcctggagcgtttctgctt

SEQ ID NO: 447124 - DNA, 75 bp, synthetic construct
  source 1..75: mol_type = other DNA
ctaaccattacacgaattatcagaatgaaaaagagagttatattgtcacgtttaaccagtatcttgaatcattaa

SEQ ID NO: 447125 - DNA, 75 bp, synthetic construct
  source 1..75: mol_type = other DNA
gcagatattcccaaacgaggacatcaacggagccagtaatatcggaatagtcattttttcggttaatgacagtaa

SEQ ID NO: 447126 - DNA, 75 bp, synthetic construct
  source 1..75: mol_type = other DNA
aactctctgcatggacaaggggcgaaggtcgttagcccacggttgcgtgttgaagctcgctcgccggatggctta

SEQ ID NO: 447127 - DNA, 75 bp, synthetic construct
  source 1..75: mol_type = other DNA
tcagtattaacgaaccgtgattatcaatccctggctgccggagttggttttaaccttaactcgttgggctcatta

SEQ ID NO: 447128 - DNA, 75 bp, synthetic construct
  source 1..75: mol_type = other DNA
atcggaaagtttgatatacgattccaatataaatcagcagaaagttggctgaaattaaatcctgcaacgccatca

SEQ ID NO: 447129 - DNA, 75 bp, synthetic construct
  source 1..75: mol_type = other DNA
gaattgccttttggcgaacagtcgcagaccattacggccatgtgcgcacaccatgctggaaaagcggttagcccg

SEQ ID NO: 447130 - DNA, 75 bp, synthetic construct
  source 1..75: mol_type = other DNA
agataccggttttatcggcttcaaaaatatggagcaaattgctgaacatccgttggaagagaatctggccgccct

SEQ ID NO: 447131 - DNA, 75 bp, synthetic construct
  source 1..75: mol_type = other DNA
atgttgccgcctgatctacgtggttacgcaccgcaaatcacgggtgttgcacaaacgaatgcaaaggtcactgtc

SEQ ID NO: 447132 - DNA, 75 bp, synthetic construct
  source 1..75: mol_type = other DNA
ggatgggtgaggtgtacacctccaccaatgccgacgtgatcaaccgttcggccttagcgcgtaagctggggatcg

SEQ ID NO: 447133 - DNA, 75 bp, synthetic construct
  source 1..75: mol_type = other DNA
gcctgaagaaattgtttcggaaataaacgttcaaattgaacgtctgagagcaatggctgaggcaattttgaaaca

SEQ ID NO: 447134 - DNA, 75 bp, synthetic construct
  source 1..75: mol_type = other DNA
ttcaggttgaagaggggggattactgtctgcgttgttacctgaatgtagcaacttttgggtaaactctctgcatg

SEQ ID NO: 447135 - DNA, 75 bp, synthetic construct
  source 1..75: mol_type = other DNA
gctgggggagtgtccatcacacagaccgtatgttgttagcacagtatcgcgcgtcgttgaaaagcgccattcagc

SEQ ID NO: 447136 - DNA, 75 bp, synthetic construct
  source 1..75: mol_type = other DNA
atgaaaaatgtacagctaactgggttatttttaatgaccagggacaagccaatctcacccttgactttatgtata

SEQ ID NO: 447137 - DNA, 75 bp, synthetic construct
  source 1..75: mol_type = other DNA
ggtcaacatactgaatttaaccgcctgttagggctgggcaatcaactccttatggttcgccaggggcttgctaat

SEQ ID NO: 447138 - DNA, 75 bp, synthetic construct
  source 1..75: mol_type = other DNA
actaagaagtgtatcgcacataaaagagctttgcgttaggatcaataatcaaagtaagtttataaataacgcggc

SEQ ID NO: 447139 - DNA, 75 bp, synthetic construct
  source 1..75: mol_type = other DNA
ttagttggtaggttgaaattatataacactcttaactcaattagcttttcagcattatcaaaaaaagtatcagat

SEQ ID NO: 447140 - DNA, 75 bp, synthetic construct
  source 1..75: mol_type = other DNA
actgtttggctccaattatggcgatgtaatcgcgtcatacggagatacgctatcccctgaagcaattcaggagaa

SEQ ID NO: 447141 - DNA, 75 bp, synthetic construct
  source 1..75: mol_type = other DNA
atggcaactttacgtgagttaataatcaaaatttccgctaactcgcaatcattccagacggaaatttcccgcgct

SEQ ID NO: 447142 - DNA, 75 bp, synthetic construct
  source 1..75: mol_type = other DNA
gtcagttgacggaaattcgcggttctgctgtcggaatggctggcgcatttgccggtgcctttgccaccggacacc

SEQ ID NO: 447143 - DNA, 75 bp, synthetic construct
  source 1..75: mol_type = other DNA
gacaaagagcggctttccaaaatggaaatccacttaaccgtaatgggtggcaaccataagaatgtagcccagacc

SEQ ID NO: 447144 - DNA, 75 bp, synthetic construct
  source 1..75: mol_type = other DNA
ttggtctcatcggcggaataccgggtttggtcatgttgggtgctggtgcctggtatgcggtctatcaaaatcagg

SEQ ID NO: 447145 - DNA, 75 bp, synthetic construct
  source 1..75: mol_type = other DNA
agtctgctgttgcagcttcaagggcagaagtttatcgagcccagcaagctgttcaaagatcgcgaagtgcagatg

SEQ ID NO: 447146 - DNA, 75 bp, synthetic construct
  source 1..75: mol_type = other DNA
agttgggctcattacagggtgagtttgccagcatgccgcaaacagtttccggatccctgcaaaaagtcacaaact

SEQ ID NO: 447147 - DNA, 75 bp, synthetic construct
  source 1..75: mol_type = other DNA
aaacgctggaagcaccttctgaaacccctgagacgagatctggctttactgctggatcattatgaaggcactgct

SEQ ID NO: 447148 - DNA, 75 bp, synthetic construct
  source 1..75: mol_type = other DNA
agctaatgaaaccattgaaagcggatttaaatcagcttgtagattattatctgaccactggaacgcgtaatcgtt

SEQ ID NO: 447149 - DNA, 75 bp, synthetic construct
  source 1..75: mol_type = other DNA
cgaatacttcttcgctggcgaacattgttggaaccgcttaaatatgatcttaatgaattaatcgattattatttg

SEQ ID NO: 447150 - DNA, 75 bp, synthetic construct
  source 1..75: mol_type = other DNA
gcactgttgctggtgctgctggtcgatagcctggtggccccgcatttctggcaggtgtactgcacccattttgtt

SEQ ID NO: 447151 - DNA, 75 bp, synthetic construct
  source 1..75: mol_type = other DNA
ttgccttgccgcagggtaatgcggcttcggcaactgcagacatgaaaataaagctagatttgttaatgtcatttg

SEQ ID NO: 447152 - DNA, 75 bp, synthetic construct
  source 1..75: mol_type = other DNA
taccattatctgacggatattttcaccaagcgtaaaagttactcatttgatgaactgattggggttgcgatcgac

SEQ ID NO: 447153 - DNA, 75 bp, synthetic construct
  source 1..75: mol_type = other DNA
agttattggtaatcaggttggtgtcaaagcgaaaggaattgtcgagatgattgaaggcatcctgaaagcacaagg

SEQ ID NO: 447154 - DNA, 75 bp, synthetic construct
  source 1..75: mol_type = other DNA
gttgagggtaaaaacgtttctccatctgctgcatatggcgaacgtaatgatctgaacgtagatcagattgttgag

SEQ ID NO: 447155 - DNA, 75 bp, synthetic construct
  source 1..75: mol_type = other DNA
tagaaccgcaattttccggttattcgggaatgctgtgcggcgttcagttcgagaacggggtgtccgtagcggagt

SEQ ID NO: 447156 - DNA, 75 bp, synthetic construct
  source 1..75: mol_type = other DNA
atggaactaaaaaatataacccgttattatcctgaaaatatgccatatggtaataatgttcagtatttccagagt

SEQ ID NO: 447157 - DNA, 75 bp, synthetic construct
  source 1..75: mol_type = other DNA
tggagcctcaatttttggggtacacggggattctctgcggtatcaagtttgtagacggtatctcagttgctgaac

SEQ ID NO: 447158 - DNA, 75 bp, synthetic construct
  source 1..75: mol_type = other DNA
tgccttttatcgatcagcagaggatttgtgcttcaatgcgagcgtcaacagtagagggcaaaaatgtttctccgt

SEQ ID NO: 447159 - DNA, 75 bp, synthetic construct
  source 1..75: mol_type = other DNA
ttaaccgtgcagctcccgttgcgttactggcgattggtatgacgctggtgatcgccaccggtgggattgatctct

SEQ ID NO: 447160 - DNA, 75 bp, synthetic construct
  source 1..75: mol_type = other DNA
gttattccgaccaacgaagaaaaaatgattgccttagatgcgattcatttaggcaaagtaaacgcccccgcagaa

SEQ ID NO: 447161 - DNA, 75 bp, synthetic construct
  source 1..75: mol_type = other DNA
caaaccaatcagagcctgggcgatctggaacgcgtagtgaataaagagtcgggattattaggtatttccggtctg

SEQ ID NO: 447162 - DNA, 75 bp, synthetic construct
  source 1..75: mol_type = other DNA
cagctaaggaagacggtcgggttgttactcgtggcaaaggccgccatgtgttggaagtaaaagatagtgtgagaa

SEQ ID NO: 447163 - DNA, 75 bp, synthetic construct
  source 1..75: mol_type = other DNA
attttataatgctgctcccgttactactgttggtcgggtggttagttttggtgataattctcatgtttcgggatg

SEQ ID NO: 447164 - DNA, 75 bp, synthetic construct
  source 1..75: mol_type = other DNA
gttattccgactaatgaagaaaaaatgattgccttagatgcaattcatttaggcaaagttaacgctcccgcagaa

SEQ ID NO: 447165 - DNA, 75 bp, synthetic construct
  source 1..75: mol_type = other DNA
tttaattatataggtgaagatcaactataccgtgcctttaaaagagagataaatgatggtgtttatggattaact

SEQ ID NO: 447166 - DNA, 75 bp, synthetic construct
  source 1..75: mol_type = other DNA
atggccttcagtatgaagcagaatacttccgtgaagaggatatggtcacagtctttggggttagaggagggcatt

SEQ ID NO: 447167 - DNA, 75 bp, synthetic construct
  source 1..75: mol_type = other DNA
atggtcttctgtatgaggccgagtatttctatgaggatggtatggttacagtttttggaataagaggtgggcaat

SEQ ID NO: 447168 - DNA, 75 bp, synthetic construct
  source 1..75: mol_type = other DNA
ttaaaacagacaaagcctttaaatattttcgaaatctaattgatgtacataatggatggggtgacattgataatg

SEQ ID NO: 447169 - DNA, 75 bp, synthetic construct
  source 1..75: mol_type = other DNA
tgttaaaaatttattttatacaaataaaaaagcctcccagcgtaagctcataatgtatatttttgaacgttttga

SEQ ID NO: 447170 - DNA, 75 bp, synthetic construct
  source 1..75: mol_type = other DNA
gataatttctccagatattgatgattggcctcaacaggatcagcgagatatttacaattcacttaaagcatttga

SEQ ID NO: 447171 - DNA, 75 bp, synthetic construct
  source 1..75: mol_type = other DNA
tcttcgtggttcgaacattacacgcaatccggcgtatttcgcctttatcgccaggtcacaccagttcattttgaa

SEQ ID NO: 447172 - DNA, 75 bp, synthetic construct
  source 1..75: mol_type = other DNA
agccagccaagggtcagcaacatgctaaaaggcaagctggacaagttttccaccgattccctgctggaaataatg

SEQ ID NO: 447173 - DNA, 75 bp, synthetic construct
  source 1..75: mol_type = other DNA
gtggaaaatcgtggagtttccttggtttcaatgtgccgccttttgttaccccaaacagtgaaattaaagcattga

SEQ ID NO: 447174 - DNA, 75 bp, synthetic construct
  source 1..75: mol_type = other DNA
aaagaaatccgccaggcattcgcagaagaagcagcaaacgccgtcagtgaagaactgcgcgggcaggatggcatc

SEQ ID NO: 447175 - DNA, 75 bp, synthetic construct
  source 1..75: mol_type = other DNA
cgtatctgggatcgcgcctgcgccgtatcaccgacatcaaaactgaacgcctcgccgccctcaccgctgcacagg

SEQ ID NO: 447176 - DNA, 75 bp, synthetic construct
  source 1..75: mol_type = other DNA
ttataaaaaaatgggtagagaatcccggtaaacgagatgaaatgctgccggaggtaaaaccagaaacagcatccg

SEQ ID NO: 447177 - DNA, 75 bp, synthetic construct
  source 1..75: mol_type = other DNA
gagtacatgcatattgctggattgaataatctggtacatgcaattttggcaagttgcgatacccaagaacaaaac

SEQ ID NO: 447178 - DNA, 75 bp, synthetic construct
  source 1..75: mol_type = other DNA
cagccatttctattttaattactgaatcctttgtggcgttggcaatgtatttgtttttgcgaataaagaatatat

SEQ ID NO: 447179 - DNA, 75 bp, synthetic construct
  source 1..75: mol_type = other DNA
ccaggggcggtagcgtggataattttatttatggtgaagctttggcttttaatacaaatcttaataaaaatatag

SEQ ID NO: 447180 - DNA, 75 bp, synthetic construct
  source 1..75: mol_type = other DNA
catttttaccatttgttattgtgttaagcaatatatttggtgttcaaacaatgttgacgcataattataagaggc

SEQ ID NO: 447181 - DNA, 75 bp, synthetic construct
  source 1..75: mol_type = other DNA
taatgagctgattgcccgtaacctgcgtgatttacgcgagcagacaaaagccatgatggccgaactgggggacaa

SEQ ID NO: 447182 - DNA, 75 bp, synthetic construct
  source 1..75: mol_type = other DNA
tttttaaggccatgatgcggcaaatcgaaaccccggaatctgacgtggatattgacctgctgaaaaatgccatgc

SEQ ID NO: 447183 - DNA, 75 bp, synthetic construct
  source 1..75: mol_type = other DNA
aacaattaatcgaagaagccaaattaaaaatagcgattacgaaatgccacccccattcagggatggcgcgagtag

SEQ ID NO: 447184 - DNA, 75 bp, synthetic construct
  source 1..75: mol_type = other DNA
cgcgctggttgagcggatccatgccgaagagcacaagcggcagaatgcaatctcagctatcgaaacggagttaaa

SEQ ID NO: 447185 - DNA, 75 bp, synthetic construct
  source 1..75: mol_type = other DNA
agatgacaaacatgatctcatatcagggacttgttcgcaccttccctaaaggtagtagtacttatctgctgatgc

SEQ ID NO: 447186 - DNA, 75 bp, synthetic construct
  source 1..75: mol_type = other DNA
ttctggtatagaagttgtttctttagacggtttaagcgatctgctactggttgaaaaactgacgccattatttaa

SEQ ID NO: 447187 - DNA, 75 bp, synthetic construct
  source 1..75: mol_type = other DNA
attatggttatcggcttcgataagatacctgatgccagtttgtttgaaggaacaaatattgtggttcttgaatgt

SEQ ID NO: 447188 - DNA, 75 bp, synthetic construct
  source 1..75: mol_type = other DNA
gagtattagataaggaattacgaagggcttctgtatcattaaaaactttgaagagtaaagcggtgagttcacttg

SEQ ID NO: 447189 - DNA, 75 bp, synthetic construct
  source 1..75: mol_type = other DNA
tatctattttatgaatggcattgtttttaaacactatcctttaatgaaagtaatatccgcccagcaggcgataag

SEQ ID NO: 447190 - DNA, 75 bp, synthetic construct
  source 1..75: mol_type = other DNA
aaagcatgatcagcgctctacaagagcgcaatccgctgttacagtcatggagcaaagtagtcggcaagcgcacac

SEQ ID NO: 447191 - DNA, 75 bp, synthetic construct
  source 1..75: mol_type = other DNA
tgaacagcttcggtcaaaattagatgatctagggttaaataatataaaaattagacgttccatatgtacctgcaa

SEQ ID NO: 447192 - DNA, 75 bp, synthetic construct
  source 1..75: mol_type = other DNA
cggctattgctatctgaatggcgcccgctactcgaccggcaccgtactttacgggcggatttgccagaatcagtc

SEQ ID NO: 447193 - DNA, 75 bp, synthetic construct
  source 1..75: mol_type = other DNA
ggcgtgttgaaaaatcccggaacttaattcttcgggtcgccgacagcacgatgacagagggaaagacttcaccgg

SEQ ID NO: 447194 - DNA, 75 bp, synthetic construct
  source 1..75: mol_type = other DNA
tcagctactgtgatgttctggacgaaatggatattgattttatgaaatgtgattcgctggcagaattgcttacca

SEQ ID NO: 447195 - DNA, 75 bp, synthetic construct
  source 1..75: mol_type = other DNA
ttaacgaaaaatatactaaggctgttaatattttaaaggataaccttaaagaacactatcatgttttttattgtg

SEQ ID NO: 447196 - DNA, 75 bp, synthetic construct
  source 1..75: mol_type = other DNA
tgcaagtcttatcagactatgttcattatataagagagagagttttgaatgtgaaaatgaggtccgaggacttat

SEQ ID NO: 447197 - DNA, 75 bp, synthetic construct
  source 1..75: mol_type = other DNA
ttagggcaatgggctggcttttttgcgatgagtgaacgcaatcttgcgcgactgatagtaaaagagacggggttg

SEQ ID NO: 447198 - DNA, 75 bp, synthetic construct
  source 1..75: mol_type = other DNA
tccgcacgatggtggagatgatggcgaaagggcctgtcgagtgggggcattggggcaatgggctggcttttttgc

SEQ ID NO: 447199 - DNA, 75 bp, synthetic construct
  source 1..75: mol_type = other DNA
ccgtaattcctctgcttgaatctccacgaggagaaataagccgggataccattgagaaatgcgcgacatactcac

SEQ ID NO: 447200 - DNA, 75 bp, synthetic construct
  source 1..75: mol_type = other DNA
acgttacagccccccgatgcagccactggtggtggacggtgccgggatgcctggcaatggtgttactgaacgcag

SEQ ID NO: 447201 - DNA, 75 bp, synthetic construct
  source 1..75: mol_type = other DNA
atgaccacaacgcaaaaaacgactgacgttacggccccccgacgcagccactggtggtggacggtgccgggatgt

SEQ ID NO: 447202 - DNA, 75 bp, synthetic construct
  source 1..75: mol_type = other DNA
ggatggtgccgccacaatatgcagtatggattcccggtggtgtggagcatagtaatcaggtaacagcgaatgccg

SEQ ID NO: 447203 - DNA, 75 bp, synthetic construct
  source 1..75: mol_type = other DNA
atctgaatgatacgtatatctcaacccgtgacgtgcagtttcagatgagtcaggacgggaagcaacttgccccct

SEQ ID NO: 447204 - DNA, 75 bp, synthetic construct
  source 1..75: mol_type = other DNA
gaacgcacggatgataaccgcggcgaaaagcaggttgatatggattcgctgcaacaagtcggcggtcgcgttcgt

SEQ ID NO: 447205 - DNA, 75 bp, synthetic construct
  source 1..75: mol_type = other DNA
tgtatctgacggcactgatgatgaatatgattctcctgatgatatcaataatgattttgtgcgggtggatggtgg

SEQ ID NO: 447206 - DNA, 75 bp, synthetic construct
  source 1..75: mol_type = other DNA
gctctcagtgccggagagtttcgcagtggcggacatcagcaggataatccccgttttgctgaaggaacgctgaag

SEQ ID NO: 447207 - DNA, 75 bp, synthetic construct
  source 1..75: mol_type = other DNA
atgaggggagcagtaaaacaggatatgcctctctgaattacagagggggatacggtaatgccagtgcaggataca

SEQ ID NO: 447208 - DNA, 75 bp, synthetic construct
  source 1..75: mol_type = other DNA
tgcccgttacagtcagaccctggaggctcacggacaggctgccagtacagcagggctgtatggcacattgctggg

SEQ ID NO: 447209 - DNA, 75 bp, synthetic construct
  source 1..75: mol_type = other DNA
gtggtacagggagcaccggatatcacccgggaaatccagcaggatattgcccggcgaatgagggcggaaccatga

SEQ ID NO: 447210 - DNA, 75 bp, synthetic construct
  source 1..75: mol_type = other DNA
cagcaggcgctcagaatcagcacctgccgctggcctccctgactggctctggtaaacatccggctgccgcacgcc

SEQ ID NO: 447211 - DNA, 75 bp, synthetic construct
  source 1..75: mol_type = other DNA
ctggcaggcagaaaaaacagcccaggaagaagcagcaagaaaagccgtcgcggaacagtcccctcccccctggct

SEQ ID NO: 447212 - DNA, 75 bp, synthetic construct
  source 1..75: mol_type = other DNA
aactcacctgtgcgtttgtatcggtgattaatggcattctggttaacgacgttaccggtaccccgactgaaatca

SEQ ID NO: 447213 - DNA, 75 bp, synthetic construct
  source 1..75: mol_type = other DNA
taattactgtgttaactattactcaagttcaaatagtggtagttatctataccctacatctgtttatactaagct

SEQ ID NO: 447214 - DNA, 75 bp, synthetic construct
  source 1..75: mol_type = other DNA
aacagtgactgacttcatccggcgcatcagtgatatgacgggcacccgaccatttattgtgatgccggaaggaaa

SEQ ID NO: 447215 - DNA, 75 bp, synthetic construct
  source 1..75: mol_type = other DNA
tcgctggctcagtcaatgcaactgaaactggactggcaggaagttaataacagcatcactgatgagaacggacag

SEQ ID NO: 447216 - DNA, 75 bp, synthetic construct
  source 1..75: mol_type = other DNA
ggattgctgttcagcctcaaagaccccttctggggcgtctctgcaataagcgggggcctggcagtctttctgcct

SEQ ID NO: 447217 - DNA, 75 bp, synthetic construct
  source 1..75: mol_type = other DNA
ctggtggtggaccgtgccgggatgcctggcaatggtgttactgaacgcagccgtcagttacggcattgtcagact

SEQ ID NO: 447218 - DNA, 75 bp, synthetic construct
  source 1..75: mol_type = other DNA
ccatcagttatggcattgtcagactgaacgcaccggtgactgccgccttcaacatgaaacagaccgtggatgcgt

SEQ ID NO: 447219 - DNA, 75 bp, synthetic construct
  source 1..75: mol_type = other DNA
cgagccaggaggatacgctatcgttgaactgtcacaggcaaacgatacagaactttatggttttgtttctgctgt

SEQ ID NO: 447220 - DNA, 75 bp, synthetic construct
  source 1..75: mol_type = other DNA
atgaccacaacgcaaaaaacgactgatgtgacagcccgtcgacgcagccactggtggtgggcggtgccgggatgc

SEQ ID NO: 447221 - DNA, 75 bp, synthetic construct
  source 1..75: mol_type = other DNA
tcgtgagtcgaaacgttgctcggaagcttctgctcgttcagttactggtggtgatagcaagtggattgctgttca

SEQ ID NO: 447222 - DNA, 75 bp, synthetic construct
  source 1..75: mol_type = other DNA
gcatcttgataaaaacggcagtttgcttaccgttgaaggtgagtacaccagttacaacaatgaattatttccact

SEQ ID NO: 447223 - DNA, 75 bp, synthetic construct
  source 1..75: mol_type = other DNA
gattaagctatatgccccattccgctaatgaacgcgtatctcacctgaatccgggagataaactgttcctgtgcc

SEQ ID NO: 447224 - DNA, 75 bp, synthetic construct
  source 1..75: mol_type = other DNA
cgagctagagcgctggctcacattggcggtggcactgttgcaaatagtcggtggtgataaacttatcatcccctt

SEQ ID NO: 447225 - DNA, 75 bp, synthetic construct
  source 1..75: mol_type = other DNA
ggaggtgataccagtccgatacattcaagataaaataacttttgtctcaaataaagacaaaggtgagcattttga

SEQ ID NO: 447226 - DNA, 75 bp, synthetic construct
  source 1..75: mol_type = other DNA
cccacgccaaattactcaacgcaacgtcaaacatcggcggtttgctgctgtttattctcggcggcaaagtgattt

SEQ ID NO: 447227 - DNA, 75 bp, synthetic construct
  source 1..75: mol_type = other DNA
ttgaagtcgatgtcatcacccagtgtaacacttttgccagagcttccgtaccttccggagccagtaccggttcgc

SEQ ID NO: 447228 - DNA, 75 bp, synthetic construct
  source 1..75: mol_type = other DNA
ggcatgagtgatgttcgtgaaacttatgtatcggaagaattgtttcctctttttaaaaatcgccttttatcaccg

SEQ ID NO: 447229 - DNA, 75 bp, synthetic construct
  source 1..75: mol_type = other DNA
tcgtggtggtgtttgtggttggttttcgggttctgacgtcaggcacccgatgggcgattcgccgtttaagcgaac

SEQ ID NO: 447230 - DNA, 75 bp, synthetic construct
  source 1..75: mol_type = other DNA
cgtcttgagtccaacccggaaagacacgacaaaacgccactggcagcagccattggtaagagggtgtacaagaga

SEQ ID NO: 447231 - DNA, 75 bp, synthetic construct
  source 1..75: mol_type = other DNA
aagatggtgatcgtgaagaagtgataaggaaatttgcatatgattttaacagaggttttttacgaggtggagaag

SEQ ID NO: 447232 - DNA, 75 bp, synthetic construct
  source 1..75: mol_type = other DNA
aaattattaaaacttcttggtgataatgtacttgatagtgttgttcaagatgaaaaactaactcatgcagttatt

SEQ ID NO: 447233 - DNA, 75 bp, synthetic construct
  source 1..75: mol_type = other DNA
tggcggtggtgtttgtggttggttttcgggtgctgacatccggggccagaaaagcgattcgccgcctgagcgatc

SEQ ID NO: 447234 - DNA, 75 bp, synthetic construct
  source 1..75: mol_type = other DNA
ttgtcgccatgctggcgggatttatcgactcgattgccggtggcgggatttatcgactcgattgccggtggcggt

SEQ ID NO: 447235 - DNA, 75 bp, synthetic construct
  source 1..75: mol_type = other DNA
cacatcctgaaatgttgctcagacgacgaaacaggcccgttattgggcgaatgctggtttactccttcgggcaaa

SEQ ID NO: 447236 - DNA, 75 bp, synthetic construct
  source 1..75: mol_type = other DNA
tatccacggcggcaaatatccatcacgattgccagcagatccagacctacgcaatcgcattctggcgcggtgtta

SEQ ID NO: 447237 - DNA, 75 bp, synthetic construct
  source 1..75: mol_type = other DNA
ccagacgctaaagcattttctgaaattaggaatgccatggagcatagatcacttaaaatagtagatgattttggt

SEQ ID NO: 447238 - DNA, 75 bp, synthetic construct
  source 1..75: mol_type = other DNA
ttgcggttgtggttgatggaagacgttacgagttcaatccatgctttgctgcaatggctaagatcggcagtgaca

SEQ ID NO: 447239 - DNA, 75 bp, synthetic construct
  source 1..75: mol_type = other DNA
ggtagaaaaaacgctgtcagttattcatttgcccgacccgcaacaagaattacaggaaggtgttaatatcgtcgg

SEQ ID NO: 447240 - DNA, 75 bp, synthetic construct
  source 1..75: mol_type = other DNA
aattttccagatattcatctgccgcaggtgaagttcaaacaattgcgccgcgtagctaatggcactgatgatgaa

SEQ ID NO: 447241 - DNA, 75 bp, synthetic construct
  source 1..75: mol_type = other DNA
aatttcaatttgcaaaagtttgttcaattgaaatagcttcttcattaatatccttcttaattggaatagtctgtg

SEQ ID NO: 447242 - DNA, 75 bp, synthetic construct
  source 1..75: mol_type = other DNA
atttaattaatagctttattgctatgtattttgtaatgaaatgtataaatggaagcttgatgatcttaattaaaa

SEQ ID NO: 447243 - DNA, 75 bp, synthetic construct
  source 1..75: mol_type = other DNA
tcggcggtgatgagtgcaaaattactttacgatagccacggacaggagatcctccattggttggggatgaactaa

SEQ ID NO: 447244 - DNA, 75 bp, synthetic construct
  source 1..75: mol_type = other DNA
gagccattcttggtatagaagggccaccaataccggatgcacgcaccacccggcttgaaatactctgcagcctga

SEQ ID NO: 447245 - DNA, 75 bp, synthetic construct
  source 1..75: mol_type = other DNA
ggagcagaaaccgctcaggctacggtcagagtctggatgagattccgacgcgatgtgacggcagcttcacgtctg

SEQ ID NO: 447246 - DNA, 75 bp, synthetic construct
  source 1..75: mol_type = other DNA
gcggattctgcagccagggggacggagcctgttttgaagggcgctggcactggcagccagcgacaccccggaaaa

SEQ ID NO: 447247 - DNA, 75 bp, synthetic construct
  source 1..75: mol_type = other DNA
tgatgcctgtttatcagttccggcgtgatttttctcttgtgcaggcagtaccgcgtaacgtgcccaccagcaggg

SEQ ID NO: 447248 - DNA, 75 bp, synthetic construct
  source 1..75: mol_type = other DNA
acaggcagcgccccgcagtaaaccaaccagcagggagaaagcacgcgccaatattcaggaaataagaaagatgtt

SEQ ID NO: 447249 - DNA, 75 bp, synthetic construct
  source 1..75: mol_type = other DNA
actttgccgccggagctgaaaaacggcggtattaaaatttcacgtcaggcgctaaaagagtgggtgcaacgccag

SEQ ID NO: 447250 - DNA, 75 bp, synthetic construct
  source 1..75: mol_type = other DNA
ttgcccttcctgttcctggtcctgttaaccttccgtgccgccgcagcggacacgttattgattctgggtgatagc

SEQ ID NO: 447251 - DNA, 75 bp, synthetic construct
  source 1..75: mol_type = other DNA
gataagtacggcggcacggtaatgattaagggcgtggaggaacggcgcgtaacctaccgtcgtgaaggctacgaa

SEQ ID NO: 447252 - DNA, 75 bp, synthetic construct
  source 1..75: mol_type = other DNA
tatgattgcgtgatgcctgtttatcagttcgaccgtgatttttctcttgtgcaggccgtaccgcgtaacgtgccc

SEQ ID NO: 447253 - DNA, 75 bp, synthetic construct
  source 1..75: mol_type = other DNA
gagggcagcggcgtgatgttgcgggcgtggaatacgccgcaaacgctgctcgcctggctggcgttactgcaatgc

SEQ ID NO: 447254 - DNA, 75 bp, synthetic construct
  source 1..75: mol_type = other DNA
tacgactgtgtaacgtctgtatatcagttccggcgtgatttctccctgatgaaggccacgccccgcagtaaacct

SEQ ID NO: 447255 - DNA, 75 bp, synthetic construct
  source 1..75: mol_type = other DNA
tttaaataacgatgaatattttcatcgggcagaaattattagagaaaaagggacgaatagagcatctttttttag

SEQ ID NO: 447256 - DNA, 75 bp, synthetic construct
  source 1..75: mol_type = other DNA
acggcctggcagacgttggttcgccgctgccgggtcgggaagtgaaaatcgttaataatgaagtgtggctgcggg

SEQ ID NO: 447257 - DNA, 75 bp, synthetic construct
  source 1..75: mol_type = other DNA
accgcagttccgtttccctgaaagcggtgttacttggcggcgcggctatcccggtcgagttgacggaacaggcgc

SEQ ID NO: 447258 - DNA, 75 bp, synthetic construct
  source 1..75: mol_type = other DNA
gatgactggttgctctctttaccgctgtttcacgtctccggtcagggaattatgtggcgctggttatacgctggt

SEQ ID NO: 447259 - DNA, 75 bp, synthetic construct
  source 1..75: mol_type = other DNA
gaatgataagtggcagagtaaaacgtcggtagttaatgccagcatcagcggcgacacctcgcaacaaggactggc

SEQ ID NO: 447260 - DNA, 75 bp, synthetic construct
  source 1..75: mol_type = other DNA
ggagacaaagaatggatcgcggcgggttattcctatagctaaagatcttgaatctctgattaaagtcaaagcgac

SEQ ID NO: 447261 - DNA, 75 bp, synthetic construct
  source 1..75: mol_type = other DNA
gcatgggcaaatgatggcgtcgctttgaagctcgctgtgcaggtgtgcatggataacgtcattcagccgtcagac

SEQ ID NO: 447262 - DNA, 75 bp, synthetic construct
  source 1..75: mol_type = other DNA
aaagcttcaggagctgctggaaatgctggatgtgcggttacttgatcactttatcgtggcaggaactgaaacggt

SEQ ID NO: 447263 - DNA, 75 bp, synthetic construct
  source 1..75: mol_type = other DNA
actctgaccggcgacgatcgacgtgtagcactgctatgcctcagcactggcgcacgctggggtgaagggagcacg

SEQ ID NO: 447264 - DNA, 75 bp, synthetic construct
  source 1..75: mol_type = other DNA
gttgggagatccagcagttaaccggcttgataagcgcaccatcgcccggcaccgtagccaacgactggatgacgg

SEQ ID NO: 447265 - DNA, 75 bp, synthetic construct
  source 1..75: mol_type = other DNA
ctgtgcggcctgatttaccagtcggtcagtctgtgcatgttttacggcacacattcgcaactcatttcatgataa

SEQ ID NO: 447266 - DNA, 75 bp, synthetic construct
  source 1..75: mol_type = other DNA
agatgaagaatgagctacgttatcttcgcgcagaaaatgcatatctgaaagccatgcaggagcatctcctggaaa

SEQ ID NO: 447267 - DNA, 75 bp, synthetic construct
  source 1..75: mol_type = other DNA
taccgccgtgaaggttacgaatatgattgcgtgatgcctgtttatcagttccggcgtgatttttctctggtacag

SEQ ID NO: 447268 - DNA, 75 bp, synthetic construct
  source 1..75: mol_type = other DNA
gataactacggcggcacggtaacgattaaaagcgtggcgggacggtgcgttacttaccgccgtgatgggtacggc

SEQ ID NO: 447269 - DNA, 75 bp, synthetic construct
  source 1..75: mol_type = other DNA
cacgtcagcatttgcaggaggcagttagctatcgtgcgattgaccgtttgctcatccatctgcaaaaactactga

SEQ ID NO: 447270 - DNA, 75 bp, synthetic construct
  source 1..75: mol_type = other DNA
ctgatggaagatacagcaaacttttgaccaggctgaataatagcgagctgctgcttctggatgactgggggctgg

SEQ ID NO: 447271 - DNA, 75 bp, synthetic construct
  source 1..75: mol_type = other DNA
gcaaaactatttcaactttctcacaccagcctctcacactggattaatctttttcttcttcacggtcctctggca

SEQ ID NO: 447272 - DNA, 75 bp, synthetic construct
  source 1..75: mol_type = other DNA
gaaatacggatttaagaaagctttgttgaccacttcttgtacagatgccctggagatggctgctatccttttaga

SEQ ID NO: 447273 - DNA, 75 bp, synthetic construct
  source 1..75: mol_type = other DNA
aatcagtcttgaaacagcccggacaagtaataacacgaagtcagccggtcttgtctggctggaaagtgccgcaga

SEQ ID NO: 447274 - DNA, 75 bp, synthetic construct
  source 1..75: mol_type = other DNA
atggcctctactgacacgccggggcgtggctcctttcgtggcgtaccgttcctggtttatcaggagcagcgggaa

SEQ ID NO: 447275 - DNA, 75 bp, synthetic construct
  source 1..75: mol_type = other DNA
agcgaacaggatgatccacagcgcctgattggcctgacgcctgcggcacagaacaatatccgtctgctgcggagc

SEQ ID NO: 447276 - DNA, 75 bp, synthetic construct
  source 1..75: mol_type = other DNA
gtgcgccccttatggcgttaccgttcgctgggagctgtcagacaaggaaagcgcagcgtcgtttccgtcttttac

SEQ ID NO: 447277 - DNA, 75 bp, synthetic construct
  source 1..75: mol_type = other DNA
caaaaaaaccagcaaatcgcctcagtaaaaatgcagtacgttaatgaacaaaaaacattggcggtaatgagtatc

SEQ ID NO: 447278 - DNA, 75 bp, synthetic construct
  source 1..75: mol_type = other DNA
cttcagtggtggtcggcgtggatggtacagtgatggtgaccgcaacatgttccgtcagtggtgcagtggcggcgc

SEQ ID NO: 447279 - DNA, 75 bp, synthetic construct
  source 1..75: mol_type = other DNA
atgcgaattaaaccagacgataactggcgttggtattacgatcaagagcacgatcgaatgatgctcgatttagcc

SEQ ID NO: 447280 - DNA, 75 bp, synthetic construct
  source 1..75: mol_type = other DNA
gctatgcaactgggtgatgccatcaaaattatgaatgacagactaagaccgcatatgagttatgacagtctcagc

SEQ ID NO: 447281 - DNA, 75 bp, synthetic construct
  source 1..75: mol_type = other DNA
aatggtatgctatttcgctcacgttttgcgcgcaagatgttgactccagatgccttttctcccgcaggcttttgc

SEQ ID NO: 447282 - DNA, 75 bp, synthetic construct
  source 1..75: mol_type = other DNA
cgggggcggagttttatatatcttcagggaaatcatcacatgtttttggagaaggagggtgtcactactatttca

SEQ ID NO: 447283 - DNA, 75 bp, synthetic construct
  source 1..75: mol_type = other DNA
tgacaggtactgccgggacgtccattacaaacggtactgtgaaggacacgaataacgtgatctggcgacttcctg

SEQ ID NO: 447284 - DNA, 75 bp, synthetic construct
  source 1..75: mol_type = other DNA
gtaaccaacccggctgcggctactgtcggttcaccagccgaaaccgacgccgaactgcgcattcggcaggggcaa

SEQ ID NO: 447285 - DNA, 75 bp, synthetic construct
  source 1..75: mol_type = other DNA
gtgcgctccttatggcgttaccgttcgccaggagctgacagacaaggaaagcaccgcgccgtttccgtcttttac

SEQ ID NO: 447286 - DNA, 75 bp, synthetic construct
  source 1..75: mol_type = other DNA
ttcggctcaggacttggcttcacctctgtgatttacgcctactcgctgggccgagatccggaagaagctgagaag

SEQ ID NO: 447287 - DNA, 75 bp, synthetic construct
  source 1..75: mol_type = other DNA
tctgtggcacttccgccggatgcgtccgtggaagacgtgcaggacgtgaaagcggcttatgcggttctggcggcc

SEQ ID NO: 447288 - DNA, 75 bp, synthetic construct
  source 1..75: mol_type = other DNA
gggcgactggtcggggatgtgcgcacccgcttacaggcagccattacgctgttccgtgaacgctatgaaggcgaa

SEQ ID NO: 447289 - DNA, 75 bp, synthetic construct
  source 1..75: mol_type = other DNA
ctgccaatgtattatgaactggagtgtaaacaagttaactatatttctgaaaaaatagctcatttctttaaataa

SEQ ID NO: 447290 - DNA, 75 bp, synthetic construct
  source 1..75: mol_type = other DNA
ttatgcgcaattggaaagtgtagatgttatacaaaataagcgaaaggaattgtggaaagagtattataataatct

SEQ ID NO: 447291 - DNA, 75 bp, synthetic construct
  source 1..75: mol_type = other DNA
atcaaccgctacacctttccagaacaaatggctggctttgctaatgccattcagtctcacggcgcggctgtgaac

SEQ ID NO: 447292 - DNA, 75 bp, synthetic construct
  source 1..75: mol_type = other DNA
gcaggatgtgaaagcagtttacgcaacacaggccgcatctgaactggccagtgttgcaatggcgatactggttga

SEQ ID NO: 447293 - DNA, 75 bp, synthetic construct
  source 1..75: mol_type = other DNA
gatgaaggcggcgatggtgaactgattcatccggtttatggctctgtgccgtcggtgattgtgaccggctacagc

SEQ ID NO: 447294 - DNA, 75 bp, synthetic construct
  source 1..75: mol_type = other DNA
caatggtcggtgacctgaaatatggccgtaccgtgcactctctgacccaggcgctggcaaaattcgacggcaacc

SEQ ID NO: 447295 - DNA, 75 bp, synthetic construct
  source 1..75: mol_type = other DNA
caaagcattcgagtatcacatcgactgcctgcccgctgaagcgcagaaagttttacgtaagcgcctgactcatca

SEQ ID NO: 447296 - DNA, 75 bp, synthetic construct
  source 1..75: mol_type = other DNA
tgttactggcgtggcagtggtacggtgattacagtcgtgcggcagagctgcaacgtctgaacccgcagttacgtg

SEQ ID NO: 447297 - DNA, 75 bp, synthetic construct
  source 1..75: mol_type = other DNA
atgggctgggctgaaaacctgcaaaacgcttcctttcgcggtgtgcagtttgatgtgcttaacacggacgaacaa

SEQ ID NO: 447298 - DNA, 75 bp, synthetic construct
  source 1..75: mol_type = other DNA
atatcgcaaaacatgtcattcaggttcacttcatcaatgagaatacgggggaagtggtagataagcagattcgcc

SEQ ID NO: 447299 - DNA, 75 bp, synthetic construct
  source 1..75: mol_type = other DNA
cctgtagacggttgctggatattcctggcgttggtccacttattgcaacggcagcgttggccatcatggggaaag

SEQ ID NO: 447300 - DNA, 75 bp, synthetic construct
  source 1..75: mol_type = other DNA
aacctgcaacaccagaacaactgacagagattttacaggaaactccctgtgcagcagaagcatttcaggagacac

SEQ ID NO: 447301 - DNA, 75 bp, synthetic construct
  source 1..75: mol_type = other DNA
aaaggtgaaaacctgagtaacacacttatcgaaaaagaaatttacgcacccgccggacgtgaaatgtggcaacgg

SEQ ID NO: 447302 - DNA, 75 bp, synthetic construct
  source 1..75: mol_type = other DNA
gttcgcggcttatgttggtctggtgcccaaacagactggctcaggagggaaaatccgcctgctggggataagcaa

SEQ ID NO: 447303 - DNA, 75 bp, synthetic construct
  source 1..75: mol_type = other DNA
tcgccatggcaaacaagctggcacgaacagtatgggcgatagctgcccatgaccgtaagtatgacaggaaccatg

SEQ ID NO: 447304 - DNA, 75 bp, synthetic construct
  source 1..75: mol_type = other DNA
gatggaccggttaataaactggactgtgccggagtcatcgttgatgtgccagtggctcagtatgaggagtatatc

SEQ ID NO: 447305 - DNA, 75 bp, synthetic construct
  source 1..75: mol_type = other DNA
ttgttgcttttatcacgcctgttgttttcacaagcctgtcattctcgatagatggaccggttaataaactggact

SEQ ID NO: 447306 - DNA, 75 bp, synthetic construct
  source 1..75: mol_type = other DNA
agagattttacaggaaactccctgtgcagcagaagcatttcaggagacacttaattatcagtctgaacctttaac

SEQ ID NO: 447307 - DNA, 75 bp, synthetic construct
  source 1..75: mol_type = other DNA
tggcagaggcgcgacgggtaagagaaaatgaacgcaataaaatacgcgaaaaacaactacaggcattaagtgatg

SEQ ID NO: 447308 - DNA, 75 bp, synthetic construct
  source 1..75: mol_type = other DNA
tggggctatgtttatatgtggtcttctttacaatgattatcttgagcaacaacctgtaacaccagaacaactgac

SEQ ID NO: 447309 - DNA, 75 bp, synthetic construct
  source 1..75: mol_type = other DNA
atgaagtcgatatatttaaaatattttctgtcttttgtatcagttggtgttggggctatgtttatatgtggtctt

SEQ ID NO: 447310 - DNA, 75 bp, synthetic construct
  source 1..75: mol_type = other DNA
tggcaaagtgcaattaagaacattgttggttggggttatcaagccagaaagcccggcgacagcagcggcaattct

SEQ ID NO: 447311 - DNA, 75 bp, synthetic construct
  source 1..75: mol_type = other DNA
cgccagtggttgccaaacgtgttgaaacgcctgcggttgtcgcaccgcgcgtaagcgagccagcgcgtaatccgt

SEQ ID NO: 447312 - DNA, 75 bp, synthetic construct
  source 1..75: mol_type = other DNA
ctccgccgccagtgattgctaaacgtgttgaaacgccagccgttgtcgcaccgcgcgtcagcgaaccggcgcgca

SEQ ID NO: 447313 - DNA, 75 bp, synthetic construct
  source 1..75: mol_type = other DNA
aagcggtgaagcggcagaatggcagcaattacaccgtcgtctttacgattaatgccgatgcgccaccaccgcctc

SEQ ID NO: 447314 - DNA, 75 bp, synthetic construct
  source 1..75: mol_type = other DNA
aaagtaaaagaaaactggcgaatttgctttgtgttagtcttgatgatttatactctttgagaaaagatgaaggaa

SEQ ID NO: 447315 - DNA, 75 bp, synthetic construct
  source 1..75: mol_type = other DNA
aaactgccgagctgcggtttctctgcccaggcagtccaggcgcttgccgcatgtggcgaacgttttgcctatgtt

SEQ ID NO: 447316 - DNA, 75 bp, synthetic construct
  source 1..75: mol_type = other DNA
tgatccctacctccggacattgtttatccacggagcaagggcggcagcattactgaccagagaaccaggcccgtg

SEQ ID NO: 447317 - DNA, 75 bp, synthetic construct
  source 1..75: mol_type = other DNA
aaccgcagtgcgactggcgcttccgtatgggtgctctctaaccgtcgcgccaacagcgaaatggccagctggctg

SEQ ID NO: 447318 - DNA, 75 bp, synthetic construct
  source 1..75: mol_type = other DNA
tggcgctggatattaaacaaaccggtgtaattcaggggctaccgttgttgttcagtggcaataatttggtaaaag

SEQ ID NO: 447319 - DNA, 75 bp, synthetic construct
  source 1..75: mol_type = other DNA
cgccggctgacgcggcgcggcataaacgctgcctgtggtcagtgtcccgcgtccggcgggcacgggacgggcgct

SEQ ID NO: 447320 - DNA, 75 bp, synthetic construct
  source 1..75: mol_type = other DNA
gatctcaccgaaaacggtaaaaccgaagcggtgaagcggcagaatggcagcaattacactgttgtctttacgatt

SEQ ID NO: 447321 - DNA, 75 bp, synthetic construct
  source 1..75: mol_type = other DNA
tgcgcatccgatgcagtctgcgccgcagggcgcaactgcgcagacagccagtactgccacgacgtcagatcgcac

SEQ ID NO: 447322 - DNA, 75 bp, synthetic construct
  source 1..75: mol_type = other DNA
cagtgaaatggcaagctggctggaacagcacgagaaacagtcagagttgctgggcggtgctggtgatgtgctggc

SEQ ID NO: 447323 - DNA, 75 bp, synthetic construct
  source 1..75: mol_type = other DNA
gcactatacgctggcgctgaccggcaaggtgaatccgtactctgcgggcatgggcctgatgccagggcatgttta

SEQ ID NO: 447324 - DNA, 75 bp, synthetic construct
  source 1..75: mol_type = other DNA
gtacacgatgcaacttttgactttaacgcctctggtgactttaccgcaggtcgtaacggtagctttaacgatgtt

SEQ ID NO: 447325 - DNA, 75 bp, synthetic construct
  source 1..75: mol_type = other DNA
cggtaatgctatggtgcgtatgcacgtacacgatgcaacttttgactttaacgcctctggtgactttaccgcagg

SEQ ID NO: 447326 - DNA, 75 bp, synthetic construct
  source 1..75: mol_type = other DNA
tgagccttaataacgtaccagacaacaataaaaaatatatgcgtaaattccgcagtcgtgcggcggaaacaatat

SEQ ID NO: 447327 - DNA, 75 bp, synthetic construct
  source 1..75: mol_type = other DNA
tcgctctgactcccgtttgaagattaacaaggaagaattacaggacggcgcattagagaaagtaaactccctgaa

SEQ ID NO: 447328 - DNA, 75 bp, synthetic construct
  source 1..75: mol_type = other DNA
caggcggtaatatcactctgaacggtgctgatattgagtttaagcgcactggcaataagcatttgtggtttagag

SEQ ID NO: 447329 - DNA, 75 bp, synthetic construct
  source 1..75: mol_type = other DNA
gcaggaaatgaccgctaagtttgatgctatggctaaagaacttgccgaaactaaagctgaattagccgaactgaa

SEQ ID NO: 447330 - DNA, 75 bp, synthetic construct
  source 1..75: mol_type = other DNA
aaagttaatcgcttgactgtgtacacctacgataaggttaagtctttgacggaccgcactgttatcgctcatgaa

SEQ ID NO: 447331 - DNA, 75 bp, synthetic construct
  source 1..75: mol_type = other DNA
acacaaaacagctatgacattgttcatctaagcaatgatagaggtactggacggaaatatattcgtaaattccgt

SEQ ID NO: 447332 - DNA, 75 bp, synthetic construct
  source 1..75: mol_type = other DNA
atggtttatgctcacctcgcccccgattacctgcaacacgcggtgacattaaacccacttggcggcgggctggcg

SEQ ID NO: 447333 - DNA, 75 bp, synthetic construct
  source 1..75: mol_type = other DNA
ctgactctcgtctgaaaattaacaaggaagaattacaggacggtgcattagagaaagtaaactccttgaaagtct

SEQ ID NO: 447334 - DNA, 75 bp, synthetic construct
  source 1..75: mol_type = other DNA
acaaaccgaagtctggaaattcggcggtaagatgattcaacttgaaacgggtactgtttccggtggcggtaatgg

SEQ ID NO: 447335 - DNA, 75 bp, synthetic construct
  source 1..75: mol_type = other DNA
aatacttccggtgataactatgatatctacgtgaaatatcagcgttataccgataacgttattgtcgaatatggg

SEQ ID NO: 447336 - DNA, 75 bp, synthetic construct
  source 1..75: mol_type = other DNA
tcgactcgccacgggtagtacagatgctcaggagattctaaccgttgaatctagtagctctattgctgggactca

SEQ ID NO: 447337 - DNA, 75 bp, synthetic construct
  source 1..75: mol_type = other DNA
agggcgaaggcggtttctacgccgcaacgccagcctttatgcagcgtttacgcgcgctgtgtgacgaacacggga

SEQ ID NO: 447338 - DNA, 75 bp, synthetic construct
  source 1..75: mol_type = other DNA
catcgcagccacaactggcagaagaggtgatgcagtggttaagtactcaagccagggcagtgctgaatagttatt

SEQ ID NO: 447339 - DNA, 75 bp, synthetic construct
  source 1..75: mol_type = other DNA
gcgtaagcatctgtcgctggcagaggaaagttgctggcagcgttgtgccgataaactcattgccgcactgccagg

SEQ ID NO: 447340 - DNA, 75 bp, synthetic construct
  source 1..75: mol_type = other DNA
cgcgcgctgtgtgacgagcacgggatcatgcttattgccgatgaagtgcagagcggcgcggggcgtaccggcacg

SEQ ID NO: 447341 - DNA, 75 bp, synthetic construct
  source 1..75: mol_type = other DNA
agcgccgcagtcaggcgattccccgtggcgttgggcaaattcaccccattttcgctgaccgcgcggaaaactgcc

SEQ ID NO: 447342 - DNA, 75 bp, synthetic construct
  source 1..75: mol_type = other DNA
aacccgattgcctgcgtggcggcgctggaagtgttgaaggtgttcgagcaggaaaatctgctgcaaaaagccaac

SEQ ID NO: 447343 - DNA, 75 bp, synthetic construct
  source 1..75: mol_type = other DNA
acttcggtgcattccgtaccaatggtcaagatggactcatggatctaacccttaacgttcctcactcttccggta

SEQ ID NO: 447344 - DNA, 75 bp, synthetic construct
  source 1..75: mol_type = other DNA
ttggctattaaccttgctgatcacgttctgtataccaaagataaaaataacgcagtagttcaaatctctgtttct

SEQ ID NO: 447345 - DNA, 75 bp, synthetic construct
  source 1..75: mol_type = other DNA
tatagtgatgtaggtggtacttctattcgtcaccacatcgacggacagatcgaacttgcaaccggtaacacaaaa

SEQ ID NO: 447346 - DNA, 75 bp, synthetic construct
  source 1..75: mol_type = other DNA
ccttgaatgttcgcaaactcattttcgctcaaaagagtggttaaaagttgttgctgatgaccctaaggcggtgaa

SEQ ID NO: 447347 - DNA, 75 bp, synthetic construct
  source 1..75: mol_type = other DNA
gatgaatactggcgtacgctgttacaaacgctgatagcatcgcagccacaactagcagaaagggtgatgccgtga

SEQ ID NO: 447348 - DNA, 75 bp, synthetic construct
  source 1..75: mol_type = other DNA
tttaaccattggggtgatagcaataacgctcgcgacaacattctatatctcgaagacagcaaaggacgccatttc

SEQ ID NO: 447349 - DNA, 75 bp, synthetic construct
  source 1..75: mol_type = other DNA
ctggctatccgtgcggaaattgaccaggtgaaagccggagtctggccgctggaagataacccgttggtaaacgcg

SEQ ID NO: 447350 - DNA, 75 bp, synthetic construct
  source 1..75: mol_type = other DNA
aaacatcgccagcctgtatgccgtttatcacggcccggttggcctgaaacgtatcgctaaccgcattcaccgtct

SEQ ID NO: 447351 - DNA, 75 bp, synthetic construct
  source 1..75: mol_type = other DNA
agtattcccggcaggtgtggcagacaaatactggccgaccgtgaaacgtctggatgatgtttacggcgaccgtaa

SEQ ID NO: 447352 - DNA, 75 bp, synthetic construct
  source 1..75: mol_type = other DNA
ctggcaacaccgctctgcgcatggcgatgcagactcgcgagcaacatattcgtcgtgagaaagcgaactccaaca

SEQ ID NO: 447353 - DNA, 75 bp, synthetic construct
  source 1..75: mol_type = other DNA
gtgaaagcgcatctggcaccgtttgtgccaggtcatagcgtggtgcaaatcgaaggcatgttaacccgtcagggc

SEQ ID NO: 447354 - DNA, 75 bp, synthetic construct
  source 1..75: mol_type = other DNA
ccgtgaagtgtgtgaagtcgtgcatcagttcggcggtcaggtttaccttgatggcgcgaacatgaacgcccaggt

SEQ ID NO: 447355 - DNA, 75 bp, synthetic construct
  source 1..75: mol_type = other DNA
attcacgactacactgcgcttattagcgaactgaaatcacgcaaaattgtggtcagcgttgccgccgatattatg

SEQ ID NO: 447356 - DNA, 75 bp, synthetic construct
  source 1..75: mol_type = other DNA
agggcatcgcgatatctgcctgatccctgcctctgcgcacggcactaacccggcttctgcacatatggcaggaat

SEQ ID NO: 447357 - DNA, 75 bp, synthetic construct
  source 1..75: mol_type = other DNA
tttacggcagaacgtagtgaggaaaccggccatgcggatgtgtttttcgctattgcccatgcgctcagtaatgag

SEQ ID NO: 447358 - DNA, 75 bp, synthetic construct
  source 1..75: mol_type = other DNA
ggcctctgcttctttgttggatgaagccaccgctgccgccgaagcaatggcgatggcaaaacgcgtcagtaaact

SEQ ID NO: 447359 - DNA, 75 bp, synthetic construct
  source 1..75: mol_type = other DNA
ataccgcgtataccccgtatcagcctgaagtctcccagggccgcctcgaagccctgctcaacttccagcaggtaa

SEQ ID NO: 447360 - DNA, 75 bp, synthetic construct
  source 1..75: mol_type = other DNA
acagccgctctattcagcctgcgatgctgcgcgacgacgaaatcctcacccatccggtgtttaatcgctaccaca

SEQ ID NO: 447361 - DNA, 75 bp, synthetic construct
  source 1..75: mol_type = other DNA
ctggctatccgcgcagaaatcgaccaggtgaaagccggtgtctggacgctggaagataacccgctggtgaacgcg

SEQ ID NO: 447362 - DNA, 75 bp, synthetic construct
  source 1..75: mol_type = other DNA
acctgatgacgagggcgatctggaggaaaggctgcttcgggccagagctgaactgacagaagaacaggctgttac

SEQ ID NO: 447363 - DNA, 75 bp, synthetic construct
  source 1..75: mol_type = other DNA
ctcagttggataaatgccgacagatgatcgaagcgaacttacgcttatataattttcacccgcagcataaaaaaa

SEQ ID NO: 447364 - DNA, 75 bp, synthetic construct
  source 1..75: mol_type = other DNA
tgtcgacactgcacatcggctggcggaagatatcctgcgcttcgcccgctgccgccagggtggtgcattgacctg

SEQ ID NO: 447365 - DNA, 75 bp, synthetic construct
  source 1..75: mol_type = other DNA
gtacaggaaatatttgtcgttcgccgatagcagaaaggcttttaagaaaccatttgccattaaaaaaaattgact

SEQ ID NO: 447366 - DNA, 75 bp, synthetic construct
  source 1..75: mol_type = other DNA
aatgcaattaaccaacttacaaacgacaaaggcgagattgatgatgatgaacttttacgcgtaagaatcagatta

SEQ ID NO: 447367 - DNA, 75 bp, synthetic construct
  source 1..75: mol_type = other DNA
ctgacagcacaggcagaggcgcaggaacttaaaaacgatcgcggtgacgtgattgatactgagttttgcctgtac

SEQ ID NO: 447368 - DNA, 75 bp, synthetic construct
  source 1..75: mol_type = other DNA
gtatcgctaaccgtattcatcgtctgaccgatattctggctgcggggctgcaacaaaaaggtctgaagctgcgcc

SEQ ID NO: 447369 - DNA, 75 bp, synthetic construct
  source 1..75: mol_type = other DNA
cgatggcgaaacgcgtcagcaaactgaaaaatgccaaccgcttcttcgtggcttctgacgtgcatccgcaaacgc

SEQ ID NO: 447370 - DNA, 75 bp, synthetic construct
  source 1..75: mol_type = other DNA
caacaaaaaggtctgaagctgcgccatgcgcactatttcgatactttgtgtgtggaagtggccgacaaagcgggc

SEQ ID NO: 447371 - DNA, 75 bp, synthetic construct
  source 1..75: mol_type = other DNA
acctttgtcgccacacgatcagttgaaaccggtcacgcagacgatttctgggccatatctcatgcaatgattaat

SEQ ID NO: 447372 - DNA, 75 bp, synthetic construct
  source 1..75: mol_type = other DNA
ccgcacattcagaacgaactggtcgccgagtgggcacacccgtacagccgtgaagttgcggtattcccggcaggc

SEQ ID NO: 447373 - DNA, 75 bp, synthetic construct
  source 1..75: mol_type = other DNA
ccgagtgggcgcatccgtacagtcgtgaagttgcagtattcccggcaggtgtggcagacaaatactggccgaccg

SEQ ID NO: 447374 - DNA, 75 bp, synthetic construct
  source 1..75: mol_type = other DNA
acgctgatgtgtttttcgctatttctcacgcactcagtaacgaaccgctgaactggaaaaataaacgtaaatcaa

SEQ ID NO: 447375 - DNA, 75 bp, synthetic construct
  source 1..75: mol_type = other DNA
cgccgcgcacctggttttggcgtcaatggcgagtcattgctagtcgataaggatggcaatgtgattatgcgctgg

SEQ ID NO: 447376 - DNA, 75 bp, synthetic construct
  source 1..75: mol_type = other DNA
aacaactgatcgctgaatacaagaatggtaaaacttacaagcaaatagccgaagaatatggaatggcaaaacgca

SEQ ID NO: 447377 - DNA, 75 bp, synthetic construct
  source 1..75: mol_type = other DNA
gcggcggtttacgctcattgcgggcactggcatcatcaacggctgattgaatcatcgttaggcgttgttgagtat

SEQ ID NO: 447378 - DNA, 75 bp, synthetic construct
  source 1..75: mol_type = other DNA
tgtccgctccgtccgccagggatactggggatattatcttccggatcaggatcatggtccggaatttagtgagtt

SEQ ID NO: 447379 - DNA, 75 bp, synthetic construct
  source 1..75: mol_type = other DNA
atgtcgcaaagaaaaatcagcgatgagcaattgatcgctgaatacaacaacggtttaacgtacaaacagattgct

SEQ ID NO: 447380 - DNA, 75 bp, synthetic construct
  source 1..75: mol_type = other DNA
atcctttacagtcctgattatggcgaaattggtcgctttgtatataggcctgaaatggtggggtgtcatgatgtg

SEQ ID NO: 447381 - DNA, 75 bp, synthetic construct
  source 1..75: mol_type = other DNA
tagtcgtgatgactcatcgctgatagcgtcatatataaacatcatcaagaaaactcaaattatgggatgcgctag

SEQ ID NO: 447382 - DNA, 75 bp, synthetic construct
  source 1..75: mol_type = other DNA
attcgcggcacacagagacttgcggaaaaaagcgttccacacggaatcttaactgggaagggaaactatttttaa

SEQ ID NO: 447383 - DNA, 75 bp, synthetic construct
  source 1..75: mol_type = other DNA
gcacgccaggaaccatcgttactaagccctctgattaacataattcgcggaacccaaacactggcacaaaaacgg

SEQ ID NO: 447384 - DNA, 75 bp, synthetic construct
  source 1..75: mol_type = other DNA
atttaaccgtgcttttgtgccgattcgttacgctttgcaggcgttgcgcggtgaattacgaaacacaatgcgtat

SEQ ID NO: 447385 - DNA, 75 bp, synthetic construct
  source 1..75: mol_type = other DNA
tcaggcaatggttggcaggagtaatacgcaacgtgaaccctcgctgatagaatcattcatcaatattattaatgc

SEQ ID NO: 447386 - DNA, 75 bp, synthetic construct
  source 1..75: mol_type = other DNA
atgagccatttgtaaatatgataaaagcattttatcggatggagctcactaaagttcctcaagggaaggtgcgaa

SEQ ID NO: 447387 - DNA, 75 bp, synthetic construct
  source 1..75: mol_type = other DNA
ccagcgcgtaaaactatcgggaagaaatcttgtggctggttactaagtgaccttttctggtggattcagaccaga

SEQ ID NO: 447388 - DNA, 75 bp, synthetic construct
  source 1..75: mol_type = other DNA
aatgctcgacacctgggcgcgggaacatctcttcgagtaccagctgcactgccgcgaacataaaggcgaagactg

SEQ ID NO: 447389 - DNA, 75 bp, synthetic construct
  source 1..75: mol_type = other DNA
gcagagtaataaacacaaagagaaaatggccagcggtcagagttccgggcaagcagctgcgcgggacaacaatga

SEQ ID NO: 447390 - DNA, 75 bp, synthetic construct
  source 1..75: mol_type = other DNA
caacgccatcggccaaaacgcaccaggcttacccgttctggacgggtgaggaatggaaacagggcagcaaaaaac

SEQ ID NO: 447391 - DNA, 75 bp, synthetic construct
  source 1..75: mol_type = other DNA
gaatggcgaaagccctttatttaaaaggactcaccccgaaagagattgccagccagcttaatttgccatccgcgc

SEQ ID NO: 447392 - DNA, 75 bp, synthetic construct
  source 1..75: mol_type = other DNA
acctggtatttctcaatagaagcctttgagaatgcggtcatgacaggcgatccgcaaatcttcctgtccgcatca

SEQ ID NO: 447393 - DNA, 75 bp, synthetic construct
  source 1..75: mol_type = other DNA
cgccagggcattctctgcccggaccagatctggcgctacatcatcacgatggaagacgctatcgaaggtggcctc

SEQ ID NO: 447394 - DNA, 75 bp, synthetic construct
  source 1..75: mol_type = other DNA
tacgctggaagatgccattgccggcggctttaaccttgctgacatcaacgagctgcgcgagcgatacaacgaaac

SEQ ID NO: 447395 - DNA, 75 bp, synthetic construct
  source 1..75: mol_type = other DNA
tgcaatctattattgaaaaacaagatgaagctatcaggattctttcatatcgcactgatatgatactaaatatgc

SEQ ID NO: 447396 - DNA, 75 bp, synthetic construct
  source 1..75: mol_type = other DNA
cgcactgatatgatactaaatatgctttctgcattaacggctgcgcttggtggtacaaaaacaaacgtataccgc

SEQ ID NO: 447397 - DNA, 75 bp, synthetic construct
  source 1..75: mol_type = other DNA
gcggacgtattttttgccatatcgcacgcggtctgtaatgaaccgctcgactatgaatatgaccgcccctcggtg

SEQ ID NO: 447398 - DNA, 75 bp, synthetic construct
  source 1..75: mol_type = other DNA
aacattacctatatcggcatagatatcactggtatcgggaaaggggtgtttgatatcgtcagtcgctttgcgcca

SEQ ID NO: 447399 - DNA, 75 bp, synthetic construct
  source 1..75: mol_type = other DNA
ggcgcgccgtgctgttgagtttccgaaagaaagcgcgatgcgtgtgggctgtgaatgccctgacgggatctggcg

SEQ ID NO: 447400 - DNA, 75 bp, synthetic construct
  source 1..75: mol_type = other DNA
cataaagtgagtaacgttaaaaatcaaacgcatgaacatcttgaatttttaactacttatgttatgcctcttgta

SEQ ID NO: 447401 - DNA, 75 bp, synthetic construct
  source 1..75: mol_type = other DNA
cgcacatccttgattacggcgatgaaggtaaagtggaattctttgaaggtaactttactgaatacgaagactgga

SEQ ID NO: 447402 - DNA, 75 bp, synthetic construct
  source 1..75: mol_type = other DNA
gctcaccggcaacctgagtgctgcacagcgtgctcttgctcagtttggtacgcctgaactgaaagaatatctgga

SEQ ID NO: 447403 - DNA, 75 bp, synthetic construct
  source 1..75: mol_type = other DNA
ggccgagctaaacatctcgccgaaacgccacgtaacgtacgcgcgggaatactttggctggggcgtattcgcgct

SEQ ID NO: 447404 - DNA, 75 bp, synthetic construct
  source 1..75: mol_type = other DNA
tacgacgtggtggaaatggtactggcggaccaggaaggctgggaccggtatgaagccgcgaaatggctgaccatg

SEQ ID NO: 447405 - DNA, 75 bp, synthetic construct
  source 1..75: mol_type = other DNA
atgccggattgaatatcgactatgtccagcaggatatccgcgcatactggccggataaatcgttcgatttcatca

SEQ ID NO: 447406 - DNA, 75 bp, synthetic construct
  source 1..75: mol_type = other DNA
tgtccatcgcggcatggagaaactggcagaaacgcggatgggctacaacgaagtgaccttcttatcggaccgcgt

SEQ ID NO: 447407 - DNA, 75 bp, synthetic construct
  source 1..75: mol_type = other DNA
cctttatcgatctgaaaaatggccgtattgatggcgtatttggtgacaccgcagtggtaaacgaatggctgaaaa

SEQ ID NO: 447408 - DNA, 75 bp, synthetic construct
  source 1..75: mol_type = other DNA
accctgttgggtgatgtcgagttcacaagccactggaataacgatggcgtattcttctattcaaccggccatgac

SEQ ID NO: 447409 - DNA, 75 bp, synthetic construct
  source 1..75: mol_type = other DNA
ccacagccaggcgctgaaggtgacaaacatcaggaagaaaagcctgctgatggtgataagccagaagaggaaaag

SEQ ID NO: 447410 - DNA, 75 bp, synthetic construct
  source 1..75: mol_type = other DNA
ctggccaaacagcctgatgccatgacacacccggacggtatgcaaatcaaaattactcgccaggaaatcggtcag

SEQ ID NO: 447411 - DNA, 75 bp, synthetic construct
  source 1..75: mol_type = other DNA
tcattgccacattcataagtacccatccaagagcacgcttattcaccagggtgaaaaagcggaaacgctgtacta

SEQ ID NO: 447412 - DNA, 75 bp, synthetic construct
  source 1..75: mol_type = other DNA
ctcagatggacctggatgttgtgcctcatacatgctccgtttttacagcagcaaaagattttaatgagaatgttc

SEQ ID NO: 447413 - DNA, 75 bp, synthetic construct
  source 1..75: mol_type = other DNA
gaatggtcaggatgtgaatgacctctatgagctggtactggctgaagttgaacagcccctgttggacatggtgat

SEQ ID NO: 447414 - DNA, 75 bp, synthetic construct
  source 1..75: mol_type = other DNA
acccgtgctgcgctgatgatgggcatcaaccgtggtacactgcgtaaaaaactgaaaaagtacggcatgaactaa

SEQ ID NO: 447415 - DNA, 75 bp, synthetic construct
  source 1..75: mol_type = other DNA
aaccagacccgtgctgcgctgatgatgggcatcaaccgtggtacgctgcgtaaaaaattgaaaaatacggcatga

SEQ ID NO: 447416 - DNA, 75 bp, synthetic construct
  source 1..75: mol_type = other DNA
ggcaggatattgtccggtcctttgtgatcaatgagccgggcgattacaacatcaaggtgactgtccgtgatgctc

SEQ ID NO: 447417 - DNA, 75 bp, synthetic construct
  source 1..75: mol_type = other DNA
cgtagtagcacaaatgattggtttttcacattttctgctgagaatctgtcagagggcacatataccggcatatct

SEQ ID NO: 447418 - DNA, 75 bp, synthetic construct
  source 1..75: mol_type = other DNA
atattggtctcgaccggaagggaagcctgaacttccgtctgatcggattggggcaacgttctgctatgaccttaa

SEQ ID NO: 447419 - DNA, 75 bp, synthetic construct
  source 1..75: mol_type = other DNA
ccaggaagctgtcacgctgaaactggtcagcaaggactggaattttgacatcgtcccctgctttattaccagcga

SEQ ID NO: 447420 - DNA, 75 bp, synthetic construct
  source 1..75: mol_type = other DNA
tcggcgtctccagcggactctccatcagcaaactgtttatggcgggcatcgcaccgggcatcatgatgggcgtca

SEQ ID NO: 447421 - DNA, 75 bp, synthetic construct
  source 1..75: mol_type = other DNA
tccatcacaacaggaaggtgataagccacaacctgttgctgatggcgataaacctgctgatgacaaaaagcctga

SEQ ID NO: 447422 - DNA, 75 bp, synthetic construct
  source 1..75: mol_type = other DNA
gaaacaggcacaaatacagctacgggcgccaggcaaaccgaacgctgaagaatttacttgtaccgtcattagatt

SEQ ID NO: 447423 - DNA, 75 bp, synthetic construct
  source 1..75: mol_type = other DNA
ccgtcctctggacgatatcgatctgatgttcggcttatccgcgcagagtgccacctataacgttctgagtgaccg

SEQ ID NO: 447424 - DNA, 75 bp, synthetic construct
  source 1..75: mol_type = other DNA
tatgcccacagtctggaacacattattcctggtttcgctgactccgcccccgtagaacgcctgatcacccatgaa

SEQ ID NO: 447425 - DNA, 75 bp, synthetic construct
  source 1..75: mol_type = other DNA
aggagatgcctgatgtttgcaaaactgaagcactatttgagcttgagcgtgaatattacccacggctaaaagaac

SEQ ID NO: 447426 - DNA, 75 bp, synthetic construct
  source 1..75: mol_type = other DNA
accatctttgtagctcctgagccccaagaaatgcctgatatctgcaaaactcaagcattacttgagcttgagcgt

SEQ ID NO: 447427 - DNA, 75 bp, synthetic construct
  source 1..75: mol_type = other DNA
acctttgtgtctcctgagcctcaagagatgcctgatgtatgcaagagtgaagcattgcttgagcttgaaaagaaa

SEQ ID NO: 447428 - DNA, 75 bp, synthetic construct
  source 1..75: mol_type = other DNA
ttaacgccaattattaacttgttgccttttacaaacgaatttaacatcggctctcgttcagcatcctgccccgtt

SEQ ID NO: 447429 - DNA, 75 bp, synthetic construct
  source 1..75: mol_type = other DNA
gcgctggagcaggaacatctgcagccgttaccggatacggacttcgataccagttacttcgacatccgccatatg

SEQ ID NO: 447430 - DNA, 75 bp, synthetic construct
  source 1..75: mol_type = other DNA
atgattatcaataacgtcaaattggtgctggaaaacgaagtggtacacggttcactggaggtgcaggacggcgaa

SEQ ID NO: 447431 - DNA, 75 bp, synthetic construct
  source 1..75: mol_type = other DNA
gttgccgacaaccttccgcagatactggctgattacttgaaagaaactaccggaaacgtaccggaaaagttgcta

SEQ ID NO: 447432 - DNA, 75 bp, synthetic construct
  source 1..75: mol_type = other DNA
gctaactttgatgcaaactttaaaattgctcaagcatcacgccgcgctgagtttaaagaagaatttagcgttgat

SEQ ID NO: 447433 - DNA, 75 bp, synthetic construct
  source 1..75: mol_type = other DNA
cagtgtaatagataatcgggttaacaatgcaatcagccagattacaaacgaaacgggcgatattgatgacgatga

SEQ ID NO: 447434 - DNA, 75 bp, synthetic construct
  source 1..75: mol_type = other DNA
cggcaagcaatataaacctgcgggagcatggtgcatatccagaaatctccagtcagccaggcggcgaatggcagt

SEQ ID NO: 447435 - DNA, 75 bp, synthetic construct
  source 1..75: mol_type = other DNA
cctgagggtgaatggcaatgggccattcctgtgggcgccgaactggccccggccgcgttagtgtggctggcgcac

SEQ ID NO: 447436 - DNA, 75 bp, synthetic construct
  source 1..75: mol_type = other DNA
cctgctgcgcccgggcgtcggcatcgtgggggcaaggctcttctacggcgatggccgggtccagcatgcgggcga

SEQ ID NO: 447437 - DNA, 75 bp, synthetic construct
  source 1..75: mol_type = other DNA
aaagatttccgataatttatatgaagtaacgtacagtggtcaaagtggtgaaagtaagacgataaccgttaattt

SEQ ID NO: 447438 - DNA, 75 bp, synthetic construct
  source 1..75: mol_type = other DNA
caacgtttttagcaagcacaaccatgcttggtgctctttccatgcagattactgatcttattaatgggagaaatc

SEQ ID NO: 447439 - DNA, 75 bp, synthetic construct
  source 1..75: mol_type = other DNA
ggttaaattctggataaatgcatttttaaaaggtggtggggcagggttgtacggtgattttcttttctctgacca

SEQ ID NO: 447440 - DNA, 75 bp, synthetic construct
  source 1..75: mol_type = other DNA
tgctgttatttacctgttttgcgcgcgctcaggtcgtagacacctggcaattcgccaacccgcaacaacagcaac

SEQ ID NO: 447441 - DNA, 75 bp, synthetic construct
  source 1..75: mol_type = other DNA
ttataggtaagctggatcgcaaatattatatccgagccgatggacaactgatgaacgatgccgagttgtctgcat

SEQ ID NO: 447442 - DNA, 75 bp, synthetic construct
  source 1..75: mol_type = other DNA
gtatttttcaccaggctatttgcgtaaaatggagcaacgttcgaagaaagagtttaaccagacatactggtggcg

SEQ ID NO: 447443 - DNA, 75 bp, synthetic construct
  source 1..75: mol_type = other DNA
gtggaaacatatggcccaaaccccgatcatgttttccgctcccttcttgatcaggtgaaggcagaaacggcaaca

SEQ ID NO: 447444 - DNA, 75 bp, synthetic construct
  source 1..75: mol_type = other DNA
ttgacgatgccgcacgcttgatggaacagatcaccacttccgatgagttaattgatttcctgaccctgccaggct

SEQ ID NO: 447445 - DNA, 75 bp, synthetic construct
  source 1..75: mol_type = other DNA
tggtgataatccaactgaaattgccagaaattatcttaatgactataactcgcgtacttatactgaaacactaac

SEQ ID NO: 447446 - DNA, 75 bp, synthetic construct
  source 1..75: mol_type = other DNA
cgcgtacttatactgaaacactaacgaattttgaacgcactgcgacgaataaagttgtcaacagtaatggagatg

SEQ ID NO: 447447 - DNA, 75 bp, synthetic construct
  source 1..75: mol_type = other DNA
cagacactggtgttatgggcgctgccagtggtgttgttgctgatggtggcgctgatcctctggcaggtgaggaag

SEQ ID NO: 447448 - DNA, 75 bp, synthetic construct
  source 1..75: mol_type = other DNA
cagactctggtgttgtgggcgctgccagtggtgttgttactgctgatgatactgatcctctggcgagtgagggcg

SEQ ID NO: 447449 - DNA, 75 bp, synthetic construct
  source 1..75: mol_type = other DNA
aagttctattatgcattttattcattaagtattttgcttgatatgcaacggaaggtaaagatacttgacagtatt

SEQ ID NO: 447450 - DNA, 75 bp, synthetic construct
  source 1..75: mol_type = other DNA
agaggcctgttcagcgatgcagatgcgtaccctctggaccaggcctttcccctgctgatgaaacaactgcaactc

SEQ ID NO: 447451 - DNA, 75 bp, synthetic construct
  source 1..75: mol_type = other DNA
agaggcctgttcagcgatgcagatgcgtaccctctggaccaggcttttcccctgctgatgaaacaactgtaactc

SEQ ID NO: 447452 - DNA, 75 bp, synthetic construct
  source 1..75: mol_type = other DNA
agaggcctgttcagcgatgcagatgcgtaccctctggaccaggcatttcccctgctgatgaaacaactgaaactc

SEQ ID NO: 447453 - DNA, 75 bp, synthetic construct
  source 1..75: mol_type = other DNA
cccgccatcagtataccgtcacgctgtatgctaaaggactgacctgcgaagcagacaccctcggcagttgtggtt

SEQ ID NO: 447454 - DNA, 75 bp, synthetic construct
  source 1..75: mol_type = other DNA
agaggcctgttcagcgatgcagatgcgtaccctctggaccaggcgtttccgctgctgatgaaacaactgcaactc

SEQ ID NO: 447455 - DNA, 75 bp, synthetic construct
  source 1..75: mol_type = other DNA
agaggcctgttcagcgatgcagatgcgtaccctctggaccaggcgtttcccctgctgatgaaacaactggaactc

SEQ ID NO: 447456 - DNA, 75 bp, synthetic construct
  source 1..75: mol_type = other DNA
atggcctggcgcgcgcgaccggggaagtcggcgtcgtgctggtaacgtcgggtccaggggcgaccaatgcgatta

SEQ ID NO: 447457 - DNA, 75 bp, synthetic construct
  source 1..75: mol_type = other DNA
tatgacgatgcataacgcggatgtgattttcgccgtcggggtacgatttgatgaccgaacgacgaacaatctggc

SEQ ID NO: 447458 - DNA, 75 bp, synthetic construct
  source 1..75: mol_type = other DNA
gagcacgtctacccgatgcagattcgcgggggcggaatggatgaaatgtggttaagcaaaacggaaagaacctga

SEQ ID NO: 447459 - DNA, 75 bp, synthetic construct
  source 1..75: mol_type = other DNA
agaggcctgttcagcgatgcagatgcgtaccctctggaccaggcatttccactgctgatgaaacaactgcaactc

SEQ ID NO: 447460 - DNA, 75 bp, synthetic construct
  source 1..75: mol_type = other DNA
gtgccgaaacctctgaccgcagcagcaatccgatgctgcaggatgtggcggtcggctggctgcagaaataccgca

SEQ ID NO: 447461 - DNA, 75 bp, synthetic construct
  source 1..75: mol_type = other DNA
aaagtactgcccaaatgccacggttctgcatatcgatattgatcctacttccatttctaaaaccgtgactgctga

SEQ ID NO: 447462 - DNA, 75 bp, synthetic construct
  source 1..75: mol_type = other DNA
tggtgcaggagggtaaccggttgcattaccttgccaaccgtgccggtatcagaggccggttcagagatgcagatg

SEQ ID NO: 447463 - DNA, 75 bp, synthetic construct
  source 1..75: mol_type = other DNA
tttgtaagcctggtttcgaaacaaaagaacacttgctgaatagccacgatatttgcgaactgattccgatcgcgg

SEQ ID NO: 447464 - DNA, 75 bp, synthetic construct
  source 1..75: mol_type = other DNA
ctgtgtttaccactcccgacacccgctggcggtgcgttcagatattgagaagcgactggatcgcgcttttactcg

SEQ ID NO: 447465 - DNA, 75 bp, synthetic construct
  source 1..75: mol_type = other DNA
cgtcaatatatgctgcgcctggtttgatgaaaaagatgctgatgccacgcaaatttacgacggacctgggtttcg

SEQ ID NO: 447466 - DNA, 75 bp, synthetic construct
  source 1..75: mol_type = other DNA
tgcgtggcgggaaacagcttccggcgatgttgcgtctgttaacctgcgatttagtgctcgacgaacccgacgact

SEQ ID NO: 447467 - DNA, 75 bp, synthetic construct
  source 1..75: mol_type = other DNA
tgactttgcaaaccggcgatgctctgcgtagtcgacttggactcggtgaggatgagctggcggtattgattggtt

SEQ ID NO: 447468 - DNA, 75 bp, synthetic construct
  source 1..75: mol_type = other DNA
tggatttcgctgcggctttttcaggcttttgttggtgaacagccagacgaagtgtggctggaaaaacttgggaaa

SEQ ID NO: 447469 - DNA, 75 bp, synthetic construct
  source 1..75: mol_type = other DNA
gccgacactctcggctcctgtggttacgtttatctggctgtttatccgacaccggcacccgcaatcacctcataa

SEQ ID NO: 447470 - DNA, 75 bp, synthetic construct
  source 1..75: mol_type = other DNA
cccgccatcagcataccgtgacactgtatgcgaaggggctgacctgtgaagccgacatcctcggctcctgtggtt

SEQ ID NO: 447471 - DNA, 75 bp, synthetic construct
  source 1..75: mol_type = other DNA
gtatcagaggccggttcagagatgcggatgcgtaccatctggaccaggcctttccgctgctgatgaaacaactgg

SEQ ID NO: 447472 - DNA, 75 bp, synthetic construct
  source 1..75: mol_type = other DNA
tatcgctgggctatttcatgattttggtaaatcaggacgcagctttcagcaaagcctgactcaaaagaatacccg

SEQ ID NO: 447473 - DNA, 75 bp, synthetic construct
  source 1..75: mol_type = other DNA
gaagtgagagtgccggccagtgaagaagatgcggtcaatgactggcgttatcacccctggttaggtgtgtaccgc

SEQ ID NO: 447474 - DNA, 75 bp, synthetic construct
  source 1..75: mol_type = other DNA
cccgaaatcagcataccgtcacgctgtatgcaaaagggctgacctgcgaagccgacaccctcggctcctgtggtt

SEQ ID NO: 447475 - DNA, 75 bp, synthetic construct
  source 1..75: mol_type = other DNA
aaatggcactgccgggagaaaccgtggtctgcgtcactggcgatggcagtattcagatgaacattcaggaactgt

SEQ ID NO: 447476 - DNA, 75 bp, synthetic construct
  source 1..75: mol_type = other DNA
tgctgatcacccgtctggataacttgtccatctactggcaggaagactcccgccgccgttcagttatcgacaacc

SEQ ID NO: 447477 - DNA, 75 bp, synthetic construct
  source 1..75: mol_type = other DNA
tacgtggtggaggactacgctgccggttgtctggtggaaaaaattaaggtcggtgatttctccacacaggccagg

SEQ ID NO: 447478 - DNA, 75 bp, synthetic construct
  source 1..75: mol_type = other DNA
agcacaaccaggatccaatggcagtagataaactggcggaaggtatccgtaagtttgctattgaccaggaaaaac

SEQ ID NO: 447479 - DNA, 75 bp, synthetic construct
  source 1..75: mol_type = other DNA
ccggtcagttgatcgcatcgcgtaagacgatcggcaacctgccttcgtttatcgcgcctttcttccctgacggca

SEQ ID NO: 447480 - DNA, 75 bp, synthetic construct
  source 1..75: mol_type = other DNA
acctcgacgcactggtgatggacggtaccaacaccctgattgacgagatttatcaggatgacccgaaactcgttg

SEQ ID NO: 447481 - DNA, 75 bp, synthetic construct
  source 1..75: mol_type = other DNA
tatgtggtcgaggcttacgccgccggttgcctgattgaaaacatcaacctcggtgacttcactgcacctgccgca

SEQ ID NO: 447482 - DNA, 75 bp, synthetic construct
  source 1..75: mol_type = other DNA
gcgccgtttttcccgccgaatgcgctgctgatcacccgtctggacaacctgtccatctactggcaggaagacacc

SEQ ID NO: 447483 - DNA, 75 bp, synthetic construct
  source 1..75: mol_type = other DNA
gaggtaagaacttcgctggcgtagtgttttatgcattgaggccagcttcgcatcataaaactcccccatcagtaa

SEQ ID NO: 447484 - DNA, 75 bp, synthetic construct
  source 1..75: mol_type = other DNA
atttcagatgatggcggcggaaaccctattcttatgaatacagatggtaagatatttgtttttctgcatgattct

SEQ ID NO: 447485 - DNA, 75 bp, synthetic construct
  source 1..75: mol_type = other DNA
gaaagagtacgctccggcagaagatccgggtgtggtttctgtatctgaaatctaccagtactacaaagagcacgg

SEQ ID NO: 447486 - DNA, 75 bp, synthetic construct
  source 1..75: mol_type = other DNA
ctgttgattgccggaacctacacgccgtttttgctggtggggctggattctccgttagcgcgcgggttgatgatt

SEQ ID NO: 447487 - DNA, 75 bp, synthetic construct
  source 1..75: mol_type = other DNA
tggcagtgaagctcgcggcgggcagcgttaccttactggcggtaggcggcgtggtttactcgcttggcgtaattt

SEQ ID NO: 447488 - DNA, 75 bp, synthetic construct
  source 1..75: mol_type = other DNA
tgacgtcatcatcagccagaaacgcatcggtaacctgccggcggtacgcgtcccgtacttcccggcggatgcgat

SEQ ID NO: 447489 - DNA, 75 bp, synthetic construct
  source 1..75: mol_type = other DNA
cttcatgaatgccggataccaggaaaatctgctaaatgatgtgaatgctgacctgattaacttttacaagactct

SEQ ID NO: 447490 - DNA, 75 bp, synthetic construct
  source 1..75: mol_type = other DNA
agaatgcgccgtcttacccctgtcgaatgtgaaaggctgcaaggttttcctgatggacatacattgatccctacg

SEQ ID NO: 447491 - DNA, 75 bp, synthetic construct
  source 1..75: mol_type = other DNA
tttgcagtggaattgaagccgcgagtattgcctgggaaccgttgggtatgcgtccggtgtggtttgctgaaatcg

SEQ ID NO: 447492 - DNA, 75 bp, synthetic construct
  source 1..75: mol_type = other DNA
atgttttcgaactttttcatggcttcctcagctgacttatatgttctgctatatagcgagtctcagaagtgtttt

SEQ ID NO: 447493 - DNA, 75 bp, synthetic construct
  source 1..75: mol_type = other DNA
tgaaaggctgcaaggttttcctgatgggcatacgttgatcccgacggaaaagcgtaaaaaagttaattcagatga

SEQ ID NO: 447494 - DNA, 75 bp, synthetic construct
  source 1..75: mol_type = other DNA
gtaaaggcaagagattttaaagatgccactgaccttgccgtttttagcagcacaggagcaggtttttggtcagaa

SEQ ID NO: 447495 - DNA, 75 bp, synthetic construct
  source 1..75: mol_type = other DNA
tgattgtggggcgtcagctactggcggacaagtatttccccatcgtcaacaaggagcaggacaacagcgaaatgc

SEQ ID NO: 447496 - DNA, 75 bp, synthetic construct
  source 1..75: mol_type = other DNA
tgattgtggggcgtcagctactggcggacaagtatttccctatcgtcaacagggagcaggataacagcgagatgc

SEQ ID NO: 447497 - DNA, 75 bp, synthetic construct
  source 1..75: mol_type = other DNA
ttcctgacgctgattaatgtcaccccggtgactgaacagtccggtcaactgctggggctgggtgttggcagcacc

SEQ ID NO: 447498 - DNA, 75 bp, synthetic construct
  source 1..75: mol_type = other DNA
tcctttgtatcaggtgactttgctggcgtcatcgaggcggctggtgaaggcgatgtgattttttgcgatccgccg

SEQ ID NO: 447499 - DNA, 75 bp, synthetic construct
  source 1..75: mol_type = other DNA
ggtataagaacaaccaatgaccatcccttcctggctgttcggtggaaagcccaaaacacccggaaaaatggcaca

SEQ ID NO: 447500 - DNA, 75 bp, synthetic construct
  source 1..75: mol_type = other DNA
cactggtgatggatgcgaccaacaacctgattgaaccgtggtatcaggaagaccctgaccttgtggtgattgtgg

SEQ ID NO: 447501 - DNA, 75 bp, synthetic construct
  source 1..75: mol_type = other DNA
actcatgctcaccagcggtgaactgaatccccgccatcagcataccgttactctgtatgcgaacggactgacctg

SEQ ID NO: 447502 - DNA, 75 bp, synthetic construct
  source 1..75: mol_type = other DNA
actcatgctcaccagcggtgaactgaatccccgccatcagcataccgtaacactgtatgcgaaaggactgacctg

SEQ ID NO: 447503 - DNA, 75 bp, synthetic construct
  source 1..75: mol_type = other DNA
ttaaactatcattcaccgattttctgtgaggattttatcgtgtcagacacactttccgggacaacgcatcccgat

SEQ ID NO: 447504 - DNA, 75 bp, synthetic construct
  source 1..75: mol_type = other DNA
gtatgcgaaagggctgacctgcgaagccgacaccctcggctcctgtggttacgtttatctggctgtttatccgac

SEQ ID NO: 447505 - DNA, 75 bp, synthetic construct
  source 1..75: mol_type = other DNA
acgctgtatgcaaaagggctgacctgcaaagccgataccctcagcagttgtgattacgtttatctggctgtttat

SEQ ID NO: 447506 - DNA, 75 bp, synthetic construct
  source 1..75: mol_type = other DNA
actcatgctcaccagcggtgaactgaatccccgccatcagcataccgttaccctgtatgcgaatggactgacctg

SEQ ID NO: 447507 - DNA, 75 bp, synthetic construct
  source 1..75: mol_type = other DNA
gtgtcagacacacttcccgacgacaatcacgaccgcccctggtgggggctgccctgcaccgtgacgccctgtttc

SEQ ID NO: 447508 - DNA, 75 bp, synthetic construct
  source 1..75: mol_type = other DNA
gccgacaccctcggcagttgtggttacgtgtatatcgccatttatccgacaccggcaacacccggaaccaccgca

SEQ ID NO: 447509 - DNA, 75 bp, synthetic construct
  source 1..75: mol_type = other DNA
atgtcagacacactcaccgggacaacgcatcccgacgacaacagcgaccgcccctggtgggggctgccctgcacc

SEQ ID NO: 447510 - DNA, 75 bp, synthetic construct
  source 1..75: mol_type = other DNA
agagggcggttcagcgacgcggattcgtaccacctggaccaggcctttccgctgctgatgaaacaactggaactc

SEQ ID NO: 447511 - DNA, 75 bp, synthetic construct
  source 1..75: mol_type = other DNA
cgcttcccgacaacaacaaagaccgcccctggtgggggctgccctgcaccgtgacgccctgtttcggggcccgtc

SEQ ID NO: 447512 - DNA, 75 bp, synthetic construct
  source 1..75: mol_type = other DNA
cccgccatcagcataccgtgacactgtatgcgaaagggctgacctgcgaagccgacaccctcggctcctgtggtt

SEQ ID NO: 447513 - DNA, 75 bp, synthetic construct
  source 1..75: mol_type = other DNA
atggaaacactcatcaccatcagccgttggttggcaaaacaacatgttgtcacctggtgtgtgcagcaggaaggg

SEQ ID NO: 447514 - DNA, 75 bp, synthetic construct
  source 1..75: mol_type = other DNA
tcagcataccgtcacgctgtatgcgaaagggctgacctgcgatgccgacaccctcggctcctgtggttacgttta

SEQ ID NO: 447515 - DNA, 75 bp, synthetic construct
  source 1..75: mol_type = other DNA
acactgtatgcgaaagggctgacctgcgaagccgacaccctcggcagctgtggttacgtttatctggctgtttat

SEQ ID NO: 447516 - DNA, 75 bp, synthetic construct
  source 1..75: mol_type = other DNA
tcgaccaggcatttccactgctgctcaaacagcttgaactgatgctcaccagcggtgaactcactccccgccatc

SEQ ID NO: 447517 - DNA, 75 bp, synthetic construct
  source 1..75: mol_type = other DNA
gccctctgattaacataattcgcggaacccaaacactggcgcaaaaacaagtaccacaaggggaattgacaggta

SEQ ID NO: 447518 - DNA, 75 bp, synthetic construct
  source 1..75: mol_type = other DNA
tgacctgcgatgccgacaccctcgggtcctgtggttacgtttatctggctgtttatcctgcgaccgaaacggaaa

SEQ ID NO: 447519 - DNA, 75 bp, synthetic construct
  source 1..75: mol_type = other DNA
gctgctgatgaaacaactggaattaatgctcaccagcggtgaattgaatccccgccatcagcataccgtcacgct

SEQ ID NO: 447520 - DNA, 75 bp, synthetic construct
  source 1..75: mol_type = other DNA
ttaccttgccgaccgtgccggtaacagaggccggttcagagatgcggatgcgtaccctctggaccaggcctttcc

SEQ ID NO: 447521 - DNA, 75 bp, synthetic construct
  source 1..75: mol_type = other DNA
tggtgcaagagggtaaccgcctgtattaccttgccgaccgcgccggtatcagaggccgcttcagcgacgcagatg

SEQ ID NO: 447522 - DNA, 75 bp, synthetic construct
  source 1..75: mol_type = other DNA
cccctggtgggggctaccctgcaccgtgacgccctgttttggggcacgtctggtgcaggagggtaaccggttgca

SEQ ID NO: 447523 - DNA, 75 bp, synthetic construct
  source 1..75: mol_type = other DNA
ttaccttgccgaccgcgccggtatcagaggccaattcagcgaagcagatgcataccaactggaccaggcctttcc

SEQ ID NO: 447524 - DNA, 75 bp, synthetic construct
  source 1..75: mol_type = other DNA
cgcatcccgatgacaatgacgaccatccctggtggagactaccctgcacagtgacgccctgtttcggcgcccgtc

SEQ ID NO: 447525 - DNA, 75 bp, synthetic construct
  source 1..75: mol_type = other DNA
aaaggtctgacctgcaaagctgacactctcggtagcggtggttacgtttatctggctgtttatccgacgcccgaa

SEQ ID NO: 447526 - DNA, 75 bp, synthetic construct
  source 1..75: mol_type = other DNA
cgcatcccgacaacaacaacgaccgcccctggtgggggctcccctgcaccgtgacgccctgttttggcgcccgtc

SEQ ID NO: 447527 - DNA, 75 bp, synthetic construct
  source 1..75: mol_type = other DNA
tcacgctgtatgcaaaagggctgacctatcgggtggcgcaggggaacctcccccctacgctcccacagaaccgta

SEQ ID NO: 447528 - DNA, 75 bp, synthetic construct
  source 1..75: mol_type = other DNA
cggtatcagaggccggttcagagatgcggatgcgtaccacccggaccaggcctttccgctgctgatgaaacaact

SEQ ID NO: 447529 - DNA, 75 bp, synthetic construct
  source 1..75: mol_type = other DNA
cgaaaaattattaactggcggcatctggtgcattattaccgtgcagtatttctttgaggaaggtcagaagacatc

SEQ ID NO: 447530 - DNA, 75 bp, synthetic construct
  source 1..75: mol_type = other DNA
gtcactgccagcggagacagctctctgaaaagcgactcagccctggagttcagccagggagataccggcaaagcg

SEQ ID NO: 447531 - DNA, 75 bp, synthetic construct
  source 1..75: mol_type = other DNA
aagctggttcggattttgcgaaacaggtgcagggcaatggtctgaactcactgaaaaatttcagtggtgagcaaa

SEQ ID NO: 447532 - DNA, 75 bp, synthetic construct
  source 1..75: mol_type = other DNA
ctttatctggctggcatcccccgcctgtgctgacagtggaagcgactataaagctggttcggattttgcgaaaca

SEQ ID NO: 447533 - DNA, 75 bp, synthetic construct
  source 1..75: mol_type = other DNA
atgctcaccagcggtgaactgaattcccgccatcagcataccgtcacgctgtatgcaaaagggctgacctgcgaa

SEQ ID NO: 447534 - DNA, 75 bp, synthetic construct
  source 1..75: mol_type = other DNA
tgcgaaaggactgacctgcgaagccgacaccttcggctcctgtggttacgtttatctggctgtttatccgacgcc

SEQ ID NO: 447535 - DNA, 75 bp, synthetic construct
  source 1..75: mol_type = other DNA
gtgtcagacacactccatgagacaaattatcccaacgacaatcacaaccgcccctggtggggactgccctgcaca

SEQ ID NO: 447536 - DNA, 75 bp, synthetic construct
  source 1..75: mol_type = other DNA
caaaaaacttggcggcctcgagttctttgatgtgaacttcagttatatcgataacgacagtctggaagagttttt

SEQ ID NO: 447537 - DNA, 75 bp, synthetic construct
  source 1..75: mol_type = other DNA
gtcatgatatttgcgatcattttgcattggctgccgggcggtggctggaatggtggggcgcttaaattcatgata

SEQ ID NO: 447538 - DNA, 75 bp, synthetic construct
  source 1..75: mol_type = other DNA
gtatgcaaaagggctgacctgcgaagccgataccctcggcagctgtggttgcgtttatctggctgtttatccgac

SEQ ID NO: 447539 - DNA, 75 bp, synthetic construct
  source 1..75: mol_type = other DNA
cagtcctgactgtcggggcattaccgtcgcggaactccaggggattgattttaacaagctggatttcaccaactt

SEQ ID NO: 447540 - DNA, 75 bp, synthetic construct
  source 1..75: mol_type = other DNA
cccgccatcagcataccatcacgctgtatgcaaaagggctgacctgtgaagctgatactctcggcagttgtagtt

SEQ ID NO: 447541 - DNA, 75 bp, synthetic construct
  source 1..75: mol_type = other DNA
gacctgcaaagccgataccctcggcagttgtggttacgtttatctggctgtttatccgacgcccgaaacgaaaaa

SEQ ID NO: 447542 - DNA, 75 bp, synthetic construct
  source 1..75: mol_type = other DNA
ccgtcacgctgtatgcgaaagggctgacctgcgaagccgacaccctcggctcctgtggttacgtttatctggctg

SEQ ID NO: 447543 - DNA, 75 bp, synthetic construct
  source 1..75: mol_type = other DNA
gggatgacctgcgaagtcgacaccctcggcagctgtggttacgtttatctggctgtttatccgacgcccgaaacg

SEQ ID NO: 447544 - DNA, 75 bp, synthetic construct
  source 1..75: mol_type = other DNA
cgcataccgatgacaatcacgaccgtccctggtggggactaccctgcactgtgacgccctgttttggcgcccgtc

SEQ ID NO: 447545 - DNA, 75 bp, synthetic construct
  source 1..75: mol_type = other DNA
tcacgctgtatgcgaaaggactgacctgcgaagccgataccctgggctcctgtggttacgtttatctggctgttt

SEQ ID NO: 447546 - DNA, 75 bp, synthetic construct
  source 1..75: mol_type = other DNA
gtatgcaaaagggctgacctgcgaagccgacaccctcggctcctgtggttacgtttatctggctgtttatccggc

SEQ ID NO: 447547 - DNA, 75 bp, synthetic construct
  source 1..75: mol_type = other DNA
gccgataccctcggctcctgtggttacgtttatctggctgtttatcctgcgaccgaaacggaaaatgtagtggtc

SEQ ID NO: 447548 - DNA, 75 bp, synthetic construct
  source 1..75: mol_type = other DNA
tggattgaagaatgcgattccgaagggaaggtgcgggatagctgcaagagtgcagtcagtgaaagcctgaccctc

SEQ ID NO: 447549 - DNA, 75 bp, synthetic construct
  source 1..75: mol_type = other DNA
acctgcgaagccgataccctgggctcctgtggttacgtttatctggctgtttatccgacgcccgaaatgaaaaat

SEQ ID NO: 447550 - DNA, 75 bp, synthetic construct
  source 1..75: mol_type = other DNA
gccctgttttggcgcccgtctggtgcaggagggtaaccgcctgcattaccttgccgaccgcgccggtatcagagg

SEQ ID NO: 447551 - DNA, 75 bp, synthetic construct
  source 1..75: mol_type = other DNA
agagacactcgttaaaaccagccatttgctggcgccgtttccggctgcgatgattgataccgcctttttcgaccg

SEQ ID NO: 447552 - DNA, 75 bp, synthetic construct
  source 1..75: mol_type = other DNA
gaaagtggacattaagttgctgatggtttcagttgacggaaacctgacggtgaaaaaagaggacggcggtaacgt

SEQ ID NO: 447553 - DNA, 75 bp, synthetic construct
  source 1..75: mol_type = other DNA
atttttaaaggtgatgacttttcacggttgattgaagatattgtttttgaagatgccgggattattgatattggt

SEQ ID NO: 447554 - DNA, 75 bp, synthetic construct
  source 1..75: mol_type = other DNA
aatcccacgccttattttattaccttcagtactgtcagtgtcggacagggagctcagaaagtcagcagtactcag

SEQ ID NO: 447555 - DNA, 75 bp, synthetic construct
  source 1..75: mol_type = other DNA
acaagtacgcgataagatagctgacgcaactggtaaagaaatagacaatgaacttcggacaaaaatggcatcatt

SEQ ID NO: 447556 - DNA, 75 bp, synthetic construct
  source 1..75: mol_type = other DNA
acaagtacgggataagatagctgacgcaactggtaaagaaatagacaatgagcttcggacaaaaatggcctcatt

SEQ ID NO: 447557 - DNA, 75 bp, synthetic construct
  source 1..75: mol_type = other DNA
tcttcttcagaaaataaagctattctggaggcagaagagtttggttctaatactggtgcattgcatgagtttatg

SEQ ID NO: 447558 - DNA, 75 bp, synthetic construct
  source 1..75: mol_type = other DNA
gcgcgagtcgacagacttcaggctgacctgatgacggcgacgcataatataaagacactgcgcgcgcagctcact

SEQ ID NO: 447559 - DNA, 75 bp, synthetic construct
  source 1..75: mol_type = other DNA
agcaggcgcagatccagagccagctcgacagtatggttaacggcgagcagtcgcagattgtgagcttaagagcgc

SEQ ID NO: 447560 - DNA, 75 bp, synthetic construct
  source 1..75: mol_type = other DNA
ttattcagaagggcgaggtgctttttaagctcgacccggttcgttaccaggcgcgagttgacagacttcaggctg

SEQ ID NO: 447561 - DNA, 75 bp, synthetic construct
  source 1..75: mol_type = other DNA
accagcaggtggtgctgttccataaactggaaaacctgcgcgatcgtttgatcgatcacggtgatgatgccatcg

SEQ ID NO: 447562 - DNA, 75 bp, synthetic construct
  source 1..75: mol_type = other DNA
atcagcaggtggtgctgttccataaactggaaaacctgcgcgatcgtctgatcgaccagggtgatgacgccatcg

SEQ ID NO: 447563 - DNA, 75 bp, synthetic construct
  source 1..75: mol_type = other DNA
atgcaagttgatattattagccctgtaactgatccatatgcttgtgcacatcaggctcttctggcactaatcaac

SEQ ID NO: 447564 - DNA, 75 bp, synthetic construct
  source 1..75: mol_type = other DNA
ttagacactgaacaaggggcattttggccttatgatggcacgaaagtgatctacgatggcggttgcattccggaa

SEQ ID NO: 447565 - DNA, 75 bp, synthetic construct
  source 1..75: mol_type = other DNA
catcattctccgcctccgccggcaactgggctgtcaaaaacggctggtgtcagaccatgacggaagatggtcagg

SEQ ID NO: 447566 - DNA, 75 bp, synthetic construct
  source 1..75: mol_type = other DNA
aagtaaaaggcaataaggttgagtttgaaggtaagcgtcgtctcagcaccgtctggcagatcctgaaattcctga

SEQ ID NO: 447567 - DNA, 75 bp, synthetic construct
  source 1..75: mol_type = other DNA
ccgtatcagtattaacggtaacctgatccccacatcacaaatgtgtaatcagcagacgggattcagggctgttga

SEQ ID NO: 447568 - DNA, 75 bp, synthetic construct
  source 1..75: mol_type = other DNA
ccactcaagtggtgttttagaacaataccagagcgtatttcaattgaagaaatcgatgaaataaaatttatctag

SEQ ID NO: 447569 - DNA, 75 bp, synthetic construct
  source 1..75: mol_type = other DNA
agagactcattctgatgacgagttaaaccgtttgctggaagctgttaatcagaattgcccagccagaattgtgtt

SEQ ID NO: 447570 - DNA, 75 bp, synthetic construct
  source 1..75: mol_type = other DNA
atgagcgaaatccgattggtaacaccatcataccgacttgtaactctggcatccgacattaacaatattaaagaa

SEQ ID NO: 447571 - DNA, 75 bp, synthetic construct
  source 1..75: mol_type = other DNA
gctgaaaaatggcacgattggtattaccggcctgatgcagggatgcccgaatggcgtacagacgctcctgggcag

SEQ ID NO: 447572 - DNA, 75 bp, synthetic construct
  source 1..75: mol_type = other DNA
gaaactatcggatatattacactaccctcagctttttcaaaatatggaaactcattaattgaagatgctttcgat

SEQ ID NO: 447573 - DNA, 75 bp, synthetic construct
  source 1..75: mol_type = other DNA
gtgcaattggtgatgttgtttttccgatgcaagtagcagctgttatcaccacagaaaccaatggtgatgtgtggg

SEQ ID NO: 447574 - DNA, 75 bp, synthetic construct
  source 1..75: mol_type = other DNA
tgcttttcacagtggcatccttctccgcctccgccggtaactgggctgtcaaaaatggctggtgtcagaccatga

SEQ ID NO: 447575 - DNA, 75 bp, synthetic construct
  source 1..75: mol_type = other DNA
tcacgtcgcttgccggtttttccccgaaacagacgtccgtcataaataaagactccgtactgcaggccgcccggc

SEQ ID NO: 447576 - DNA, 75 bp, synthetic construct
  source 1..75: mol_type = other DNA
ttcagcgacaaaagatctttcagtaagtaatgataaattacttactttagcacacgcctcaaatataactaaatt

SEQ ID NO: 447577 - DNA, 75 bp, synthetic construct
  source 1..75: mol_type = other DNA
tatcaggttcgtcatgtgacagggatggccgtaaactaccggaaatatgagctcacccgtcataaccttgattta

SEQ ID NO: 447578 - DNA, 75 bp, synthetic construct
  source 1..75: mol_type = other DNA
gggatccgtaaaacggtggaatggtatttaaacaatactaattggtgtcgtcgtgttcaggacggtagttataga

SEQ ID NO: 447579 - DNA, 75 bp, synthetic construct
  source 1..75: mol_type = other DNA
cccggctaacccgatcgccagcaacagcaccgcagaaggcaaagcccaaaaccgtcgcgtagaaattacgttaag

SEQ ID NO: 447580 - DNA, 75 bp, synthetic construct
  source 1..75: mol_type = other DNA
cagcagcagcgctaccctgaaacctgcgggcgctaacacgctgaccggtgttgcgatggtgctgaaagagtaccc

SEQ ID NO: 447581 - DNA, 75 bp, synthetic construct
  source 1..75: mol_type = other DNA
tatcatttcccggaaaaattgattccattggttattctgaatgctctggaaggtaaaggattacctatttatggt

SEQ ID NO: 447582 - DNA, 75 bp, synthetic construct
  source 1..75: mol_type = other DNA
cagcttacgcgccaagtagcccatattctgcttcgaaagcatcaagcgatcatttagtccgcgcttggaaacgta

SEQ ID NO: 447583 - DNA, 75 bp, synthetic construct
  source 1..75: mol_type = other DNA
gatttttgctcagcatcagccggatgcagtgatgcacctggctgctgaaagccatgtggatcgttcaattacagg

SEQ ID NO: 447584 - DNA, 75 bp, synthetic construct
  source 1..75: mol_type = other DNA
ctgaaagcacagctcgcggaagcaaaatataaccttgagcagacgatagtgcgtgcgccgagcgatggttatgtg

SEQ ID NO: 447585 - DNA, 75 bp, synthetic construct
  source 1..75: mol_type = other DNA
gatgccctgtaccgctatgtgatgaatacccgcaaggttcacactgacgacacacaggtaaaagtgctggctccg

SEQ ID NO: 447586 - DNA, 75 bp, synthetic construct
  source 1..75: mol_type = other DNA
aaggagcatgcggacgggagcatcacccgcagcgagtatgatgaggcggggaggctgaaggcgcagacggatgcg

SEQ ID NO: 447587 - DNA, 75 bp, synthetic construct
  source 1..75: mol_type = other DNA
ttgcgacggaggcaatccgctggcctgaaagtgtggatgaacacaaaaaggccaacgcctttgctggcacagccc

SEQ ID NO: 447588 - DNA, 75 bp, synthetic construct
  source 1..75: mol_type = other DNA
agcgtgcggaagtacgtatttttgctggtaatgatccggctcataccgccacaggcagcagcgggatttcttctg

SEQ ID NO: 447589 - DNA, 75 bp, synthetic construct
  source 1..75: mol_type = other DNA
atgaagtcagtgctgaccatcaacaggaggtttttacaatatggtaacgaaaacatcactgaacagcgtgcggaa

SEQ ID NO: 447590 - DNA, 75 bp, synthetic construct
  source 1..75: mol_type = other DNA
gaaaccacaggaaacgtttgagagcgggattcggaagacagtggaatggtacctgtccaatacaaaatgggttga

SEQ ID NO: 447591 - DNA, 75 bp, synthetic construct
  source 1..75: mol_type = other DNA
cccgctggctccgctgccggaatcactcagtcatcgcgtaccagacatcctgtatccccgaaaacggagaaaaaa

SEQ ID NO: 447592 - DNA, 75 bp, synthetic construct
  source 1..75: mol_type = other DNA
tttgcgacggaggcaatccgctggcctgaaagtgtggatgaacacaaaaaggcaaatgcctttgccggcagtgcc

SEQ ID NO: 447593 - DNA, 75 bp, synthetic construct
  source 1..75: mol_type = other DNA
tgaaaaccaaatcgttgagacgccgttagagaagcattatccacccgatactgctgctgccattttctggcttaa

SEQ ID NO: 447594 - DNA, 75 bp, synthetic construct
  source 1..75: mol_type = other DNA
ttcacccggcgttttttaattgcaggaatgctatcgcaaatcacgactgatatatggtggttccgtacaacagaa

SEQ ID NO: 447595 - DNA, 75 bp, synthetic construct
  source 1..75: mol_type = other DNA
acgccgtcgttgacgacctgctggcagaagtgagccagccgaagcgcgatttcagcgaagaagagattatcgccc

SEQ ID NO: 447596 - DNA, 75 bp, synthetic construct
  source 1..75: mol_type = other DNA
accttacggcgcgtcagacgtcgttctttcagcatcatcgataaccggaacaggaaaggttatatcaccaggcga

SEQ ID NO: 447597 - DNA, 75 bp, synthetic construct
  source 1..75: mol_type = other DNA
taacatacgccggaaacctggaatcgctcgctgaaatttctgattctgaacgttattcatttgagcatgcagata

SEQ ID NO: 447598 - DNA, 75 bp, synthetic construct
  source 1..75: mol_type = other DNA
gctatataccgtagttactgaaggtaaagcgggtgaaacctataacattggcggacacaacgaaaagaaaaacat

SEQ ID NO: 447599 - DNA, 75 bp, synthetic construct
  source 1..75: mol_type = other DNA
actggatagtgcgcgaaaggcgacattccgcttccatcacatctctactgatgaagtttatggggatttaccgca

SEQ ID NO: 447600 - DNA, 75 bp, synthetic construct
  source 1..75: mol_type = other DNA
gttatataccgtcgtaaccgaaggtaaagcaggtgaaacttataacattggtggacacaacgaaaagaagaatct

SEQ ID NO: 447601 - DNA, 75 bp, synthetic construct
  source 1..75: mol_type = other DNA
ataacgaagcgttaccgctatttacggaaacgacagcctacgcgccaagtagcccgtattctgcttctaaagctt

SEQ ID NO: 447602 - DNA, 75 bp, synthetic construct
  source 1..75: mol_type = other DNA
tatcatttcccggaaaaacttattccattggttattctgaatgctctggaaggtaaggcattacctatttatggt

SEQ ID NO: 447603 - DNA, 75 bp, synthetic construct
  source 1..75: mol_type = other DNA
acgcagttgcgtaatctggaaacgcgtctgagctacctgctcgagctggaagagagacgtcaggcgatcctcaag

SEQ ID NO: 447604 - DNA, 75 bp, synthetic construct
  source 1..75: mol_type = other DNA
gagaacggtcagttccagaaccgtcagcaactgttaaaagtgagccgcctggggccaaaagccttcgagcagtgc

SEQ ID NO: 447605 - DNA, 75 bp, synthetic construct
  source 1..75: mol_type = other DNA
tctgctgatggcggcccctgccggactgcgtgcaacgatgggcctcgatccgggtctgcgtactggggtaaaagt

SEQ ID NO: 447606 - DNA, 75 bp, synthetic construct
  source 1..75: mol_type = other DNA
tactgatattaccgaagtggcgaaaaatagcgcgctgactgatgatgatttttctgcgggaaagtcttcgacggc

SEQ ID NO: 447607 - DNA, 75 bp, synthetic construct
  source 1..75: mol_type = other DNA
ctgcgtgcaacgatgggcctcgatccgggtctgcgtaccggggtaaaagtagcggtagtcgatgcaactggcaaa

SEQ ID NO: 447608 - DNA, 75 bp, synthetic construct
  source 1..75: mol_type = other DNA
agcaggcgcatccgtttactcagcttccgaactggcagcgcaggagttcccggatctcgatgtttcgctgcgtgg

SEQ ID NO: 447609 - DNA, 75 bp, synthetic construct
  source 1..75: mol_type = other DNA
cggaagatgtggtgttgcgtctgtccgggatgagcggggctgttcatgcggatactgacagcaccgaagtggcga

SEQ ID NO: 447610 - DNA, 75 bp, synthetic construct
  source 1..75: mol_type = other DNA
atgtttctgaaaaccgaacaatttgaatataacggtgtgtccgtcacgctttccgagctgtctgcgctgcagcgt

SEQ ID NO: 447611 - DNA, 75 bp, synthetic construct
  source 1..75: mol_type = other DNA
cagaacaatttgaatataacggcgtgtccgtcacccttttccgaactgtctgcgctgcagcgtattgagcatctt

SEQ ID NO: 447612 - DNA, 75 bp, synthetic construct
  source 1..75: mol_type = other DNA
cagcattcagttgcgtcactttatttttgccaactttctgcctgctactggcgatgttattcagcggtatatcga

SEQ ID NO: 447613 - DNA, 75 bp, synthetic construct
  source 1..75: mol_type = other DNA
gaaattactgtcactctcggggaataccgcaaactaaaacaagcagctgaacaagaagaagacgacgaaccatga

SEQ ID NO: 447614 - DNA, 75 bp, synthetic construct
  source 1..75: mol_type = other DNA
ggcctggctaaaactactctggcaacgcattgatgaggacaacatgacaaccctggcaggtaaccttgcctatgt

SEQ ID NO: 447615 - DNA, 75 bp, synthetic construct
  source 1..75: mol_type = other DNA
atgaaaaggatatgcaaaggtctaatcgtaatttttactgtgtccttgtttacagcgccaacgtatgcggctgat

SEQ ID NO: 447616 - DNA, 75 bp, synthetic construct
  source 1..75: mol_type = other DNA
aaagacttttttaatattctgaaaaagaaaaaagggagtattcgctggagtaaaacatttgatgccaggaaagat

SEQ ID NO: 447617 - DNA, 75 bp, synthetic construct
  source 1..75: mol_type = other DNA
gccatctggcgcagtaaacgggtgcgtcccaaaatttactcgtttgccgtgtactggatgattttgacgttaggg

SEQ ID NO: 447618 - DNA, 75 bp, synthetic construct
  source 1..75: mol_type = other DNA
ctggggcggcggttacggtaacatcttccaggatgagcgcgacgtgaaatttatggtaatcgcaccattcaccat

SEQ ID NO: 447619 - DNA, 75 bp, synthetic construct
  source 1..75: mol_type = other DNA
tttaaccaacgtgaacaagaagatgcagacccgctaataaatgatgcgttgatttatataagagatgagtttatt

SEQ ID NO: 447620 - DNA, 75 bp, synthetic construct
  source 1..75: mol_type = other DNA
aaggcaccagatattccctccattctggtcgaaacggcgtttatcagtaacgttgaggaagagcgtaaactgaaa

SEQ ID NO: 447621 - DNA, 75 bp, synthetic construct
  source 1..75: mol_type = other DNA
gcctgctgatgccattgcccgggcggaagacgtggtgttgcgtctgtccgggatgagcggggctgttcatgtgga

SEQ ID NO: 447622 - DNA, 75 bp, synthetic construct
  source 1..75: mol_type = other DNA
cggtccggtgtgggcgagggcaggttacattcagccaactggtcaaacgctgttagcgccgcactggagttttat

SEQ ID NO: 447623 - DNA, 75 bp, synthetic construct
  source 1..75: mol_type = other DNA
gccaacggcgaaaaagcggtcttcttcggcgcgatgtatgacctgaaaaactggaatcttccaggttttgccatc

SEQ ID NO: 447624 - DNA, 75 bp, synthetic construct
  source 1..75: mol_type = other DNA
gttacattggtgattataaagaaatcttatccatacttgatttcatcagtgaaattcatgatattcacttctata

SEQ ID NO: 447625 - DNA, 75 bp, synthetic construct
  source 1..75: mol_type = other DNA
aatggtcgagagacaggaacataacgttctctgtttcgcttgatggtgaggaagttgttcacaacagtaatcgaa

SEQ ID NO: 447626 - DNA, 75 bp, synthetic construct
  source 1..75: mol_type = other DNA
tctgtcttgaatgaggatatgcttgaatggtcgagagacaggaacataacgttctctgtttcgcttgatggtgag

SEQ ID NO: 447627 - DNA, 75 bp, synthetic construct
  source 1..75: mol_type = other DNA
cagcggctacagatcgccaatgcttccattcactgcgcggtcacttcatcacctgcttagatagggctggcgtac

SEQ ID NO: 447628 - DNA, 75 bp, synthetic construct
  source 1..75: mol_type = other DNA
agtctgcccgtgctgtcgaggcgtttacgaaatccataaaaagaccagcgattacaattggcagtattggtcgcc

SEQ ID NO: 447629 - DNA, 75 bp, synthetic construct
  source 1..75: mol_type = other DNA
gctcgtaggtttcgtgatcagtacctgatggagttcagaaggctacaggcgcaattcaacccaaatgcttatctc

SEQ ID NO: 447630 - DNA, 75 bp, synthetic construct
  source 1..75: mol_type = other DNA
tatgacggtcgagtatatggtagcgatgagagccgtatgttgcagaaggtgaatcctgaaacggagttcagtgcg

SEQ ID NO: 447631 - DNA, 75 bp, synthetic construct
  source 1..75: mol_type = other DNA
attcatctattgatacaagggtttctgatgtatcaatctttcatgctagcttaataagggagctcatgaaaatgc

SEQ ID NO: 447632 - DNA, 75 bp, synthetic construct
  source 1..75: mol_type = other DNA
atgatggtattgaacgcgatccgcagcaattttttaaacgtgccaacagcaaatcaccggaacggggaggagcca

SEQ ID NO: 447633 - DNA, 75 bp, synthetic construct
  source 1..75: mol_type = other DNA
aaattaccggagagaggaggcgcaaaaaaggcacgctttggtgaaacacaacaagagcgaaaatctgcccttgtt

SEQ ID NO: 447634 - DNA, 75 bp, synthetic construct
  source 1..75: mol_type = other DNA
atccatatgtcgaaaacgccgctgtcgcctgaagtactctatcgtaacctctgcgcattggctggagaactctct

SEQ ID NO: 447635 - DNA, 75 bp, synthetic construct
  source 1..75: mol_type = other DNA
ggagcgaagggcagtttttgctgccgcagatgtttcagcagcaggaacgctatctggagcacgtcattcattacc

SEQ ID NO: 447636 - DNA, 75 bp, synthetic construct
  source 1..75: mol_type = other DNA
ggaacatatcgcccgctatggtggtatggcaatgcataccgccggagagtttccagggctggagctgtggggagt

SEQ ID NO: 447637 - DNA, 75 bp, synthetic construct
  source 1..75: mol_type = other DNA
accgcgctgggaaggtattacccgcccatacagcgcggaggacgtggtgaaattacgcggctcggtcaatccgga

SEQ ID NO: 447638 - DNA, 75 bp, synthetic construct
  source 1..75: mol_type = other DNA
cgttctacaacctcgataatcacccggaccgtctgagtcttgaaccactgctggggatttacgagcaccacgcgg

SEQ ID NO: 447639 - DNA, 75 bp, synthetic construct
  source 1..75: mol_type = other DNA
tcctctataaagccgatttcggaatctgaattgacagaggaaatatcagatcttttcagattatctcagaatgag

SEQ ID NO: 447640 - DNA, 75 bp, synthetic construct
  source 1..75: mol_type = other DNA
gcataaggacattcgccggctgactgaagatgactgctacaagctggccgtgtttgttgccgtgcagcgcgcacg

SEQ ID NO: 447641 - DNA, 75 bp, synthetic construct
  source 1..75: mol_type = other DNA
ctaatggctacacatgcatttttgaacattacaggaatgctgaaggattgacagaattaattaatgctggttgtg

SEQ ID NO: 447642 - DNA, 75 bp, synthetic construct
  source 1..75: mol_type = other DNA
tgacattaatgctgttaacagtaacggcaacaatgccatttttgcctgcagaaccctggaagccatggattgcct

SEQ ID NO: 447643 - DNA, 75 bp, synthetic construct
  source 1..75: mol_type = other DNA
taaagagcaggccatggaaaccctgggcctgtcgtccgggggcgataccaaggatatttttctgcggcagctcgt

SEQ ID NO: 447644 - DNA, 75 bp, synthetic construct
  source 1..75: mol_type = other DNA
aacaccttccgtcgtgccgatcagatccaatggtccgcaggcattgagccgggcgatccgcgctatgtcgattac

SEQ ID NO: 447645 - DNA, 75 bp, synthetic construct
  source 1..75: mol_type = other DNA
accctggcgggtatccacagcatgtggttcaacatgttcgacctggcaaacgcctatgcgcagggcgaggggatg

SEQ ID NO: 447646 - DNA, 75 bp, synthetic construct
  source 1..75: mol_type = other DNA
gaatttattaccggcgagcgtaccagtgaaggcttcttccgtactcatgcgggcattgagcaagcgatcagccgt

SEQ ID NO: 447647 - DNA, 75 bp, synthetic construct
  source 1..75: mol_type = other DNA
aggcgctggtgttaatcgttatatctatcgccatcaatatgatcggcgggcaactggccagcatggtcaaattac

SEQ ID NO: 447648 - DNA, 75 bp, synthetic construct
  source 1..75: mol_type = other DNA
tactgaccaatttactctgggggttactgactgacccgatcgccgccgcttttgcccccgtggcgatggtcatcg

SEQ ID NO: 447649 - DNA, 75 bp, synthetic construct
  source 1..75: mol_type = other DNA
atgaaaacccgtacacaacaaattgaagaattacagaaagagtggactcaatcgcgttgggaaggcattactcgc

SEQ ID NO: 447650 - DNA, 75 bp, synthetic construct
  source 1..75: mol_type = other DNA
gctgctcgtggtggctctgtattcgttccggctgctgctatgcgtgctgctgctgatggcaacaccaaagctaat

SEQ ID NO: 447651 - DNA, 75 bp, synthetic construct
  source 1..75: mol_type = other DNA
ctgatgattcggtcggtttaaatcgctctctaaatactatcacagttaatttggaggctaaacgcgatatgacta

SEQ ID NO: 447652 - DNA, 75 bp, synthetic construct
  source 1..75: mol_type = other DNA
cgcgatcgtgcctcgtgtatggctggatttggactacgttgtagcacagccggaagctctgaaagttctccagat

SEQ ID NO: 447653 - DNA, 75 bp, synthetic construct
  source 1..75: mol_type = other DNA
cccccgagtcacatgcggaattttcgaacgtgaaaatggctccgaaaacttttgctggtggcaacccgatcagcc

SEQ ID NO: 447654 - DNA, 75 bp, synthetic construct
  source 1..75: mol_type = other DNA
cggcagaccacatcgttctgggtgacttctccggtattactatcggtgagtggggcggtctggaactggatatgg

SEQ ID NO: 447655 - DNA, 75 bp, synthetic construct
  source 1..75: mol_type = other DNA
aatattccgctatggctgctactgcaactatgcagcgtggtcgtgctgctcgtggtggctctgtattcgttccgg

SEQ ID NO: 447656 - DNA, 75 bp, synthetic construct
  source 1..75: mol_type = other DNA
tcttttactacgcgcactacgccaggccgggcttaagtttaccgatatacaacccacttacctgacacccgctga

SEQ ID NO: 447657 - DNA, 75 bp, synthetic construct
  source 1..75: mol_type = other DNA
atgcacaacagaaagccgctgaaatttctgccagggctgctgatctgtctgatagtgttaaccagctgcgtgccg

SEQ ID NO: 447658 - DNA, 75 bp, synthetic construct
  source 1..75: mol_type = other DNA
tggtgttcttatggctgcgtatcattggtggcgaaaggtagttaacaatctgcctgactgggatagtctggagta

SEQ ID NO: 447659 - DNA, 75 bp, synthetic construct
  source 1..75: mol_type = other DNA
caaactggctggttacgaagtagttacttctggcgttattccggcagaccacatcgttctgggtgacttctccgg

SEQ ID NO: 447660 - DNA, 75 bp, synthetic construct
  source 1..75: mol_type = other DNA
ctggaatctaccccgaaatctgatcgtggtgacgctcaaggcttcattatggaaaacggcaaaattgctggttat

SEQ ID NO: 447661 - DNA, 75 bp, synthetic construct
  source 1..75: mol_type = other DNA
ggctgccggggctgatttggtgtacgtgggcgtcgagccgccgaagcccaaagccgaagtgattctggtgccaga

SEQ ID NO: 447662 - DNA, 75 bp, synthetic construct
  source 1..75: mol_type = other DNA
tgcacgcgcggttctgcgtgccgtccgtgactcggtggtctctgttgcccgcgctgtatggaactggattttctt

SEQ ID NO: 447663 - DNA, 75 bp, synthetic construct
  source 1..75: mol_type = other DNA
ttgtcccggaagggcgtcgtgtcttctcacgaatgacggtggaagagaacctggcaatgggcggcttctttgccg

SEQ ID NO: 447664 - DNA, 75 bp, synthetic construct
  source 1..75: mol_type = other DNA
actggcaccgattatcatccaacaaatcttcgacaccatcgagcagttgcgcgagcagggaatgaccatcttcct

SEQ ID NO: 447665 - DNA, 75 bp, synthetic construct
  source 1..75: mol_type = other DNA
ttgcactgctgcggcccacgctgggcgaaccgatcccgccgcacctgatcgaccgctttagtgtggatgttcttc

SEQ ID NO: 447666 - DNA, 75 bp, synthetic construct
  source 1..75: mol_type = other DNA
ccacctcacccgtggagaactccttaatcaccaaccctcaggagggtgaaatgtcgactgaaaatgatgaaatca

SEQ ID NO: 447667 - DNA, 75 bp, synthetic construct
  source 1..75: mol_type = other DNA
tacgaaagaatctcgttgattatatcgactcgcttcagccgggcactttcaaccctgagagcttcaatcatgaga

SEQ ID NO: 447668 - DNA, 75 bp, synthetic construct
  source 1..75: mol_type = other DNA
aggttcgtaccgcatcgctggcacaagagggggcaaccagttctgccgtcggttttaacattcagctgaatgact

SEQ ID NO: 447669 - DNA, 75 bp, synthetic construct
  source 1..75: mol_type = other DNA
ctctgttgcacgcacggttctgcgcgccgtccgtgactcggtggtctctgttgcccgcgccgtatggaactggat

SEQ ID NO: 447670 - DNA, 75 bp, synthetic construct
  source 1..75: mol_type = other DNA
ctctgttgcacgcacggttctgcgcgccgtccgtgactccgtggtctctgttgcccgcgcggtatggaactggat

SEQ ID NO: 447671 - DNA, 75 bp, synthetic construct
  source 1..75: mol_type = other DNA
ctctgttgcacgcacggttctgcatgccgtccgtgccaccgtggtctctgttgcccgcgcggtatggaactggat

SEQ ID NO: 447672 - DNA, 75 bp, synthetic construct
  source 1..75: mol_type = other DNA
gcaatttacttgcagttcccttcagcgccgctaccgactttaccgatctggtggattactgcgaccgttgcgctg

SEQ ID NO: 447673 - DNA, 75 bp, synthetic construct
  source 1..75: mol_type = other DNA
ccagaggcgttacgtataggctatcaaaaaggcagtattggtatggtgctggcaaaaagccaccagttactggaa

SEQ ID NO: 447674 - DNA, 75 bp, synthetic construct
  source 1..75: mol_type = other DNA
ctctgttgcacgcacggttctgcgggccgtccgtgactccgtggtctctgttgcccgcgccgtatggaactggat

SEQ ID NO: 447675 - DNA, 75 bp, synthetic construct
  source 1..75: mol_type = other DNA
gttgatccctcacgttcaggtcatcgccaacgaacccgatctggttagctttctgaccaaacttgactggggcgt

SEQ ID NO: 447676 - DNA, 75 bp, synthetic construct
  source 1..75: mol_type = other DNA
aggcgcgttattatgcaacgggtgttgccacccctggtgcagctaacgcggatgcaaccttcaaggttcagtatc

SEQ ID NO: 447677 - DNA, 75 bp, synthetic construct
  source 1..75: mol_type = other DNA
ctgctttggcgctggatggggcgacattcagtacaccaacgaccctgaataacggtaccaacaccattccgttcc

SEQ ID NO: 447678 - DNA, 75 bp, synthetic construct
  source 1..75: mol_type = other DNA
ttgttctgtcggctctgtctttgagttctatagcggctttggccgagacaactcccacgacggtaaatggaggga

SEQ ID NO: 447679 - DNA, 75 bp, synthetic construct
  source 1..75: mol_type = other DNA
gctctgtccctcagttccgcagcggctctggccgatactacgacggtaaatggtgggaccgttcactttaaaggg

SEQ ID NO: 447680 - DNA, 75 bp, synthetic construct
  source 1..75: mol_type = other DNA
tgctattgccttccttggtaccgcaattgatggaactcatcctaacgtattagctttgcagagttcagctgcggg

SEQ ID NO: 447681 - DNA, 75 bp, synthetic construct
  source 1..75: mol_type = other DNA
acgattgtgacactactgttgcagacaaagctgctattgccttccttggtaccgcaattgatggaactcatccta

SEQ ID NO: 447682 - DNA, 75 bp, synthetic construct
  source 1..75: mol_type = other DNA
accttgctgctggcagtggcagcggtggcggtagcgatgaatcattactgtcgcagtcgctacgatctggtggcg

SEQ ID NO: 447683 - DNA, 75 bp, synthetic construct
  source 1..75: mol_type = other DNA
cggtcagtggttgatggtgctgacgctttcagccgttaccggtggggcgataggcctgttgttcgaaaacgtgtt

SEQ ID NO: 447684 - DNA, 75 bp, synthetic construct
  source 1..75: mol_type = other DNA
gtattgctggccccacgcctgatggcactgcttaacctgaaaacgggcgacaccattgacgtgggcgatgccacc

SEQ ID NO: 447685 - DNA, 75 bp, synthetic construct
  source 1..75: mol_type = other DNA
tagcgcaacaaatgttggtgtgcagattctggacagaacaggtgttgcgctgacgctggacggtgcgacatttag

SEQ ID NO: 447686 - DNA, 75 bp, synthetic construct
  source 1..75: mol_type = other DNA
agctgttgcctttttaggtacggcgattgatgcggctcataccacagttctggctctgcagagttcggctgcggg

SEQ ID NO: 447687 - DNA, 75 bp, synthetic construct
  source 1..75: mol_type = other DNA
cggctgacggcgattaacgataagccgacagaaggcaatgaagatgaggcgcttaaccgcgaactcaatcttacc

SEQ ID NO: 447688 - DNA, 75 bp, synthetic construct
  source 1..75: mol_type = other DNA
tggctctgcagagttctgctgcgggtagcgcaacaaacgttggtgtgcagatcctggacagaacgggtgctgcgc

SEQ ID NO: 447689 - DNA, 75 bp, synthetic construct
  source 1..75: mol_type = other DNA
ttgaagatgctgcccgtaacggcctgcattatgttgaactgcgtttttcgccgggttacatggcgatggcgcatc

SEQ ID NO: 447690 - DNA, 75 bp, synthetic construct
  source 1..75: mol_type = other DNA
gccaacgaacccgatctggtgagctttctgaccaaacttgactggggcgttaaagttctcgcctctcttgatgcc

SEQ ID NO: 447691 - DNA, 75 bp, synthetic construct
  source 1..75: mol_type = other DNA
actccattgccattatggaaagcaagaagatgtggcgttgtaattatgcccctcccttgctacgcctcgcatgga

SEQ ID NO: 447692 - DNA, 75 bp, synthetic construct
  source 1..75: mol_type = other DNA
cccgcgagcaaatccgccaggcacagattaatggtctggaaatggctttcctcagcgctgaggaaaaacgcgcac

SEQ ID NO: 447693 - DNA, 75 bp, synthetic construct
  source 1..75: mol_type = other DNA
cgaatcttatcggcattatgagtcgaacctttggcgaagccgcctgccagcaagaactggaggcatttttagccc

SEQ ID NO: 447694 - DNA, 75 bp, synthetic construct
  source 1..75: mol_type = other DNA
gccaacgaacccgatctggtcagcttcctgagcaaacttgactggggcgttaaagttctcgcttctcttgatgcc

SEQ ID NO: 447695 - DNA, 75 bp, synthetic construct
  source 1..75: mol_type = other DNA
atccgcagcgtgccgtccatcgaagccggaaatgccgcctcgcacgccatcggcctggggcagatgaatttacac

SEQ ID NO: 447696 - DNA, 75 bp, synthetic construct
  source 1..75: mol_type = other DNA
tttcgccttatgacgttgagcgggtttatggcaagccgtttgctgatatcgccatcagtgaacactatgccgaac

SEQ ID NO: 447697 - DNA, 75 bp, synthetic construct
  source 1..75: mol_type = other DNA
ttgtcattacgctgtttgcccacgcgcacgccagcggttttcgtttccagacattcctcggggcatggaagtttt

SEQ ID NO: 447698 - DNA, 75 bp, synthetic construct
  source 1..75: mol_type = other DNA
cgggcgcgtttactaccctgccccgtttatgactaatgagaatctggcgctgtatcaggacgcttacgaaattgg

SEQ ID NO: 447699 - DNA, 75 bp, synthetic construct
  source 1..75: mol_type = other DNA
tttcgccttatgacgttgagcgggtttacggcaagccgtttgccgatattgccatcagcgaacactatgacgaac

SEQ ID NO: 447700 - DNA, 75 bp, synthetic construct
  source 1..75: mol_type = other DNA
ttcctatgccaaccaactcggcgctcgtcagggggctggtgcagtctatttacatgctcatcatcccgatattct

SEQ ID NO: 447701 - DNA, 75 bp, synthetic construct
  source 1..75: mol_type = other DNA
ctatgatacctgaatatccactgatagataaaagcgagatacttaaggccttgagggctgagagcaaagtacttg

SEQ ID NO: 447702 - DNA, 75 bp, synthetic construct
  source 1..75: mol_type = other DNA
atcagcctggcggatgcacgccagctggccattgatatccagacagcccgcgaacacactctgcgcgagctgggt

SEQ ID NO: 447703 - DNA, 75 bp, synthetic construct
  source 1..75: mol_type = other DNA
tggtggatttactgcaacagacctggcaggtgataagcgcaggcggacaatgccgggtggaaggatgttttcggg

SEQ ID NO: 447704 - DNA, 75 bp, synthetic construct
  source 1..75: mol_type = other DNA
cgcaaagtttacgttgcctgcagttactggaacaacattgggttcgtgcggtaagaggcaatcatgaacagatgg

SEQ ID NO: 447705 - DNA, 75 bp, synthetic construct
  source 1..75: mol_type = other DNA
actggaacaacattgggttcgtgcggtaagaggcaatcatgaacagatggcgatggatgcgctggcatcccagca

SEQ ID NO: 447706 - DNA, 75 bp, synthetic construct
  source 1..75: mol_type = other DNA
taaaacggttgtattaagcggagatatagaatctaaaacgttcgttgatgcatctgttaatggacgtgatcagac

SEQ ID NO: 447707 - DNA, 75 bp, synthetic construct
  source 1..75: mol_type = other DNA
taataacgacctggtgcgcattctggcgctgggcaatgtcgaaactactgccgaacagattgccatctggttgcg

SEQ ID NO: 447708 - DNA, 75 bp, synthetic construct
  source 1..75: mol_type = other DNA
ttctgacgcgccgttatggactggataaagagatggtaatggatttctttcgtgagaataattcctgttctacgt

SEQ ID NO: 447709 - DNA, 75 bp, synthetic construct
  source 1..75: mol_type = other DNA
accttagtaatgtcgctgactctttttccaaagctggactccatgatgcgaagctattggtgaaaatgaaagcat

SEQ ID NO: 447710 - DNA, 75 bp, synthetic construct
  source 1..75: mol_type = other DNA
atcgaattgatatttcaatattaaaacggatcataattttttctttaatgacagtcacttcagctatattagtgc

SEQ ID NO: 447711 - DNA, 75 bp, synthetic construct
  source 1..75: mol_type = other DNA
cggaacagatcgccgtctggctacgcaaagaagacgaagaagggtttcagcgttgtccggacattgttctgtctt

SEQ ID NO: 447712 - DNA, 75 bp, synthetic construct
  source 1..75: mol_type = other DNA
gaatggcaaaaggacgtcgatttgcatcaggtcttgtggagccgctcacgattacgtgaaggccaaaaagggcag

SEQ ID NO: 447713 - DNA, 75 bp, synthetic construct
  source 1..75: mol_type = other DNA
aaacgctatccgcaaaccaaaatttcatggatagaattccctgctggcccgcagatgctggaggcgctgaatgtc

SEQ ID NO: 447714 - DNA, 75 bp, synthetic construct
  source 1..75: mol_type = other DNA
gatgcgttaacccgcagccagcgcgagcaaagcatcgctttactggcaaaaacgatgggcttaccggcaccggtg

SEQ ID NO: 447715 - DNA, 75 bp, synthetic construct
  source 1..75: mol_type = other DNA
aacgtagatgcctgggccatctgggatccttactactctgctgcattattacagggtggtgtgcgggtattaaaa

SEQ ID NO: 447716 - DNA, 75 bp, synthetic construct
  source 1..75: mol_type = other DNA
cagaagagacctcgcgcaacggtaacattacgcgctggttttatgatttttcccgcagtggcctgccctgtgcgg

SEQ ID NO: 447717 - DNA, 75 bp, synthetic construct
  source 1..75: mol_type = other DNA
cacttgtctaaaacggaaatttccagtgttgagttacgtaatatcctcaatagcttaaatggcgaagcctcacgt

SEQ ID NO: 447718 - DNA, 75 bp, synthetic construct
  source 1..75: mol_type = other DNA
tcggacttggggggagttatttagcagaatcgtttttagcatttggtctgattggatgtttcattataccctttt

SEQ ID NO: 447719 - DNA, 75 bp, synthetic construct
  source 1..75: mol_type = other DNA
aagaatgacccgcagcgcgcatctgaagcaggtaaaaaaggtggcaagagcagtcacggtaaaagcgacaactag

SEQ ID NO: 447720 - DNA, 75 bp, synthetic construct
  source 1..75: mol_type = other DNA
ggtttggtcatacaccgtgcgacatcgcgtggatattggcaacctgcattatattgataccggtgctgtctttgg

SEQ ID NO: 447721 - DNA, 75 bp, synthetic construct
  source 1..75: mol_type = other DNA
cattatggttttttactgaagcctttataaaatggattaaaatagaaaaccactcaccacaagaaaatgctgtag

SEQ ID NO: 447722 - DNA, 75 bp, synthetic construct
  source 1..75: mol_type = other DNA
ctactttgggaaatctaactttgcttaaccttagcgtaaaccgttctgttcagaatgctgtatttctgaaaaaac

SEQ ID NO: 447723 - DNA, 75 bp, synthetic construct
  source 1..75: mol_type = other DNA
cggaaagtcgctatgccgcgcgattaattggtaatgaacgcggtcattttttagatatcagtgaagatgcacccg

SEQ ID NO: 447724 - DNA, 75 bp, synthetic construct
  source 1..75: mol_type = other DNA
gatgtataaaaagaccggtgaccgccagctcagcgcctgggaagcgggtattctgacgcgccgttatggactgga

SEQ ID NO: 447725 - DNA, 75 bp, synthetic construct
  source 1..75: mol_type = other DNA
atcttgataaccaggagtgggtccagaatgttatgagcggtgcctatcaggactggattaacaaaaattacgggc

SEQ ID NO: 447726 - DNA, 75 bp, synthetic construct
  source 1..75: mol_type = other DNA
gatcgccgatatgctattgatgcttgcaagatgagcgctgcgttggattggcagccagaggagacttttgagtca

SEQ ID NO: 447727 - DNA, 75 bp, synthetic construct
  source 1..75: mol_type = other DNA
gccatgtggatcgctccattaccggcccggctgattttatcgaaaccaatgtcgttggcacttacacgctgctgg

SEQ ID NO: 447728 - DNA, 75 bp, synthetic construct
  source 1..75: mol_type = other DNA
gtcggttacgaacaatttatcccgatgatggcggatagctcgccgctgctgttagaacttaacgaaaacgatccg

SEQ ID NO: 447729 - DNA, 75 bp, synthetic construct
  source 1..75: mol_type = other DNA
gcggttataatgagaaaaagaatattgaagtggtagagactatttgcgatatccttgacgaaataaagccgaaaa

SEQ ID NO: 447730 - DNA, 75 bp, synthetic construct
  source 1..75: mol_type = other DNA
catttggttcgcgcgtggcatcgtacttataatctcccaactattgtgactaactgttcaaacaattatggtcct

SEQ ID NO: 447731 - DNA, 75 bp, synthetic construct
  source 1..75: mol_type = other DNA
caaagcaccaaagatatcagtagttacgaaaaacgattgaaaacctattcaaagtggttgcctgagtatgttgga

SEQ ID NO: 447732 - DNA, 75 bp, synthetic construct
  source 1..75: mol_type = other DNA
cgggacgattatcaaggcgcgtttaccaaaagcgcgtattggcgccttttacaagatagaacccagtcaacgttt

SEQ ID NO: 447733 - DNA, 75 bp, synthetic construct
  source 1..75: mol_type = other DNA
gaaaggtcagtggctggaagccgccggttttgccactggcacggcgatagatgtcaaagtgatggaaggctgtat

SEQ ID NO: 447734 - DNA, 75 bp, synthetic construct
  source 1..75: mol_type = other DNA
tcagtggttaagttatcagggggaagagttcaagattcgtgttggggacgaactcctcgggcgactggttgatgg

SEQ ID NO: 447735 - DNA, 75 bp, synthetic construct
  source 1..75: mol_type = other DNA
agcatgtttcaggcatgtattgcggtcagtggttaagttatcagggggaagagttcaagattcgtgttggggacg

SEQ ID NO: 447736 - DNA, 75 bp, synthetic construct
  source 1..75: mol_type = other DNA
gagaacttgcagaggaaaaccatttccctgcaattgatattggtttaagcgccagtcgtgttatgcataacgttg

SEQ ID NO: 447737 - DNA, 75 bp, synthetic construct
  source 1..75: mol_type = other DNA
gccaaaatccatgaaggggagagcggtcgtcgactgtgggcggagtgtgttgagttgggcattgaagcgcgcaag

SEQ ID NO: 447738 - DNA, 75 bp, synthetic construct
  source 1..75: mol_type = other DNA
ctttctatactcatctggatatattaaaaagttgggttcaaaaaaatgctaaagaattatgccaactttttgaaa

SEQ ID NO: 447739 - DNA, 75 bp, synthetic construct
  source 1..75: mol_type = other DNA
ataaagtgacgaccattattcagggcggcacgtcttcagtcaccgcgctgaccggctccaccgaagaatcgcagt

SEQ ID NO: 447740 - DNA, 75 bp, synthetic construct
  source 1..75: mol_type = other DNA
tggctataccttcgtatctcaccagcaggaagtgggtacaggttacttcgataaagtgacgaccattattcaggg

SEQ ID NO: 447741 - DNA, 75 bp, synthetic construct
  source 1..75: mol_type = other DNA
taaagagatggtaatggatttctttcgtgagaataattcctgttctacgttgcgcttttttatggccggttatcg

SEQ ID NO: 447742 - DNA, 75 bp, synthetic construct
  source 1..75: mol_type = other DNA
gcgctataaaaaatgcgaagaaatttaaaggtgttttatttgttaatataatatcttatctgctgctaacaattg

SEQ ID NO: 447743 - DNA, 75 bp, synthetic construct
  source 1..75: mol_type = other DNA
ttcctatgttgcattccatacttgcatctgaaggccttagagaaggatatctgacgttgtatgatggaaccattt

SEQ ID NO: 447744 - DNA, 75 bp, synthetic construct
  source 1..75: mol_type = other DNA
gccagctgattttatcgagactaatattgtcggtacctatgttcttctggaagcggctcgaaaatattggtcgga

SEQ ID NO: 447745 - DNA, 75 bp, synthetic construct
  source 1..75: mol_type = other DNA
ctggacgccatttttacgatttcttcggtgagaacgtctttcgcgccgatatgtgtaatgccgatgtgaaactgg

SEQ ID NO: 447746 - DNA, 75 bp, synthetic construct
  source 1..75: mol_type = other DNA
ggagatactgattttacggacgtcgcggcagtcgtcattaccgctgcggatagccgcagtggcattcttgcgttg

SEQ ID NO: 447747 - DNA, 75 bp, synthetic construct
  source 1..75: mol_type = other DNA
atcttcagcgcaaacgtatcgccctgactatgcgtctggacgagcagcctggcgaaaccaacgcccgtcgcggcg

SEQ ID NO: 447748 - DNA, 75 bp, synthetic construct
  source 1..75: mol_type = other DNA
ctggttttattgggtcagctgttattagatacatcattaatcatactaatgacagtgtcgtaaatgtcgataaat

SEQ ID NO: 447749 - DNA, 75 bp, synthetic construct
  source 1..75: mol_type = other DNA
aaaggggatcaaattcgtgactggctgtatgttgaagatcatgcgcgtgcgttatataccgtcgtaaccgaaggt

SEQ ID NO: 447750 - DNA, 75 bp, synthetic construct
  source 1..75: mol_type = other DNA
ggcgataaaagcggtataagcctgtataaagcagcggccaaatttaaatacggtccggtgtgggcgagggcaggt

SEQ ID NO: 447751 - DNA, 75 bp, synthetic construct
  source 1..75: mol_type = other DNA
ctggggcggtggttacggcaacattttccaggatgagcgcgacgtgaaattcatggtaatcgcaccattcaccat

SEQ ID NO: 447752 - DNA, 75 bp, synthetic construct
  source 1..75: mol_type = other DNA
catgtggaccaacgaatacaaagcaccgtggcatctggaaatggatgagttttatcagaacgataaaaccaccaa

SEQ ID NO: 447753 - DNA, 75 bp, synthetic construct
  source 1..75: mol_type = other DNA
ggtgctgaatgccgaagcaacggcttatgccaccgcccgtgcgcttggcctgcgcgccaaaattgacgagcagac

SEQ ID NO: 447754 - DNA, 75 bp, synthetic construct
  source 1..75: mol_type = other DNA
actcccaatcctgattatagccccagattctctcattccgcttcaccagaaaataaagagttctgtcccctaagc

SEQ ID NO: 447755 - DNA, 75 bp, synthetic construct
  source 1..75: mol_type = other DNA
tctctctggcgggcagatatacacgcatcatccagccgccgggtaagccgatgcagaacgttttcattggtatcg

SEQ ID NO: 447756 - DNA, 75 bp, synthetic construct
  source 1..75: mol_type = other DNA
atgagcaagacatttgcccgcagcagcctgtgtgcgctcaccatgacaataatgaccgctcacgccgccgaaccg

SEQ ID NO: 447757 - DNA, 75 bp, synthetic construct
  source 1..75: mol_type = other DNA
attgccttctggaaaacgcctattgcggaagggggaaaatttgttccctacagtcgctggacacaggattacatt

SEQ ID NO: 447758 - DNA, 75 bp, synthetic construct
  source 1..75: mol_type = other DNA
gaactgcctgccacgctcacgcccggacaacaggtgatggtttcctggtcgcgtgatgtgatggtgccgctggtt

SEQ ID NO: 447759 - DNA, 75 bp, synthetic construct
  source 1..75: mol_type = other DNA
cttcgtactggaagcggcatttggtcaggcggaagggtatatcgatcaatattttgccaaagccagctacaaatt

SEQ ID NO: 447760 - DNA, 75 bp, synthetic construct
  source 1..75: mol_type = other DNA
acgataaccactccgatatcccgagctggggcggcggttacggcaacatcttccaggatgagcgtgacgtgaagt

SEQ ID NO: 447761 - DNA, 75 bp, synthetic construct
  source 1..75: mol_type = other DNA
tttatcagaacgataaaaccaccaaagtcgactatctgcactcccttggcgcgaagtacgacttcaaaaataatt

SEQ ID NO: 447762 - DNA, 75 bp, synthetic construct
  source 1..75: mol_type = other DNA
gccacgacaccaaggcggtagctactgagttgctaagcgtggcgcaaagcctgcgtggatttgcttacctgtcag

SEQ ID NO: 447763 - DNA, 75 bp, synthetic construct
  source 1..75: mol_type = other DNA
ccgtcgattacgagacgttgatgaaggtaatggatacgctgcatcaggcgggttacctgaagataggtctggtcg

SEQ ID NO: 447764 - DNA, 75 bp, synthetic construct
  source 1..75: mol_type = other DNA
cgggcaatataacaaaagtcagtccatcaccttaagtccacagggcagcgaaaatagtctctatgccgggcactg

SEQ ID NO: 447765 - DNA, 75 bp, synthetic construct
  source 1..75: mol_type = other DNA
tcgagtcgtgtgcgggctgtgccgtgcctccatcttagccgggctggcgttgatgcaaggggcaacgccgtttcg

SEQ ID NO: 447766 - DNA, 75 bp, synthetic construct
  source 1..75: mol_type = other DNA
atggctcaggattaccatcacggggtacgcgttgttgaagtcaacgaaggctcccgatccattaccacggtgagc

SEQ ID NO: 447767 - DNA, 75 bp, synthetic construct
  source 1..75: mol_type = other DNA
aaagacggttttcgcttctggggttcccgctgcctgagtgatgacccgctctttgccttcgaaaactacacccgc

SEQ ID NO: 447768 - DNA, 75 bp, synthetic construct
  source 1..75: mol_type = other DNA
tcgattacgagacgttgatgaaggtaatggatacgctgcatcaggcgggttacctgaagataggtctggtcggcg

SEQ ID NO: 447769 - DNA, 75 bp, synthetic construct
  source 1..75: mol_type = other DNA
ggcctgactttactggctgggacacggtgctgaatgccgaagcaacggcttatgccaccgcccgtgcgcttggtc

SEQ ID NO: 447770 - DNA, 75 bp, synthetic construct
  source 1..75: mol_type = other DNA
gtttatggcagcgcagcccgacaatttgctactggcgaccgcgccgcgctactgccagtattacaatcaactcca

SEQ ID NO: 447771 - DNA, 75 bp, synthetic construct
  source 1..75: mol_type = other DNA
acggatctaccaacgttacccgcaggcgaccatcaaattacgtaactgggattacgattccttagatgccattac

SEQ ID NO: 447772 - DNA, 75 bp, synthetic construct
  source 1..75: mol_type = other DNA
atcactgatgtgctgactgcgagcggtaaagcgggtgagtccggcacactggcccgctcgttggatgccatcgct

SEQ ID NO: 447773 - DNA, 75 bp, synthetic construct
  source 1..75: mol_type = other DNA
gtttcctcttaataaacctgtgctgatcactgatgtgctgactgcgagcggtaaagcgggtgagtccggcacact

SEQ ID NO: 447774 - DNA, 75 bp, synthetic construct
  source 1..75: mol_type = other DNA
agggtggcacaaaagcctgtccaacgtgggcgttaacggtgtcaccggaatttctgctgatgtgttctgggatct

SEQ ID NO: 447775 - DNA, 75 bp, synthetic construct
  source 1..75: mol_type = other DNA
agagcaataaaggccgcgttcaggcttatgatggccctatctatattgcggacgctgcgttgttcgttaaagcca

SEQ ID NO: 447776 - DNA, 75 bp, synthetic construct
  source 1..75: mol_type = other DNA
tacatagtgtcagtcattaatcctgcgctgggtaaagctttcgctcagagtgaaggactgcgtaacaagactgat

SEQ ID NO: 447777 - DNA, 75 bp, synthetic construct
  source 1..75: mol_type = other DNA
atttgcaaggttggtttcactatggaacatgaacttcattatatcggtatcgacaccgctaaagagaaactggat

SEQ ID NO: 447778 - DNA, 75 bp, synthetic construct
  source 1..75: mol_type = other DNA
ccggagatcggcgacgtacgcgggctgggggcgatgatcgccatcgagctgtttgaagatggcgatcacagcaaa

SEQ ID NO: 447779 - DNA, 75 bp, synthetic construct
  source 1..75: mol_type = other DNA
actggtagatgggatggatgagactttttcggaggaaaaggaagaacaaatcagatcgtatcttatgggatggaa

SEQ ID NO: 447780 - DNA, 75 bp, synthetic construct
  source 1..75: mol_type = other DNA
ccgatgccgcaggcagcgtgaagccgacaatgcaaaagttgattccggccgattcgctccgtttgcagttctacg

SEQ ID NO: 447781 - DNA, 75 bp, synthetic construct
  source 1..75: mol_type = other DNA
ctaccgccgagcacgaagccgtgccagatggcatggttgtatggaatgcgtttgcagacgtagaaaatcaccccg

SEQ ID NO: 447782 - DNA, 75 bp, synthetic construct
  source 1..75: mol_type = other DNA
ttgcaccggatctcaccacctttgcgaaatcgatcgcgggcggcttcccgctggcgggcgtcaccggacgtgccg

SEQ ID NO: 447783 - DNA, 75 bp, synthetic construct
  source 1..75: mol_type = other DNA
accaaacgcagcggcaccatcgcctttagcggcgcttatcacgggcgcacgcactacacgctggcgctgaccggc

SEQ ID NO: 447784 - DNA, 75 bp, synthetic construct
  source 1..75: mol_type = other DNA
ttgtcaaaaaaccaactaagtactttcggattacaaccatagctaactatctggaatggctgtgcaaaatacatc

SEQ ID NO: 447785 - DNA, 75 bp, synthetic construct
  source 1..75: mol_type = other DNA
ttgcgccggatcttaccacctttgcgaaatcgatcgcgggcggcttcccgctggcgggcgtcaccgggcgcgcgg

SEQ ID NO: 447786 - DNA, 75 bp, synthetic construct
  source 1..75: mol_type = other DNA
gaccggttccgaagcggtggaaaatgcggtgaaaatcgcccgcgccgccaccaaacgtagcggtactatcgcctt

SEQ ID NO: 447787 - DNA, 75 bp, synthetic construct
  source 1..75: mol_type = other DNA
tggcgttgggcaaattcacccgattttcgctgaccgcgcggaaaactgccgggtgtgggacgttgaaggccgtga

SEQ ID NO: 447788 - DNA, 75 bp, synthetic construct
  source 1..75: mol_type = other DNA
gttgactctggcgatcgcggtgttaaatacactcgtgccgctttggctcgcccaggaacacatgtccacatggca

SEQ ID NO: 447789 - DNA, 75 bp, synthetic construct
  source 1..75: mol_type = other DNA
tacaacacgaaaaccttcccgacgccgccggatagctggcaagtggtttttgttgcgcagaatctgccggacggt

SEQ ID NO: 447790 - DNA, 75 bp, synthetic construct
  source 1..75: mol_type = other DNA
agcaaatgaccacaggcgcagcatataacctggcctatccacgttccaccctaaaacaagctgagacggccacca

SEQ ID NO: 447791 - DNA, 75 bp, synthetic construct
  source 1..75: mol_type = other DNA
tccctcgcctgtttcggtgtttaacaactttacagaagatgagaggaaaatagtctatttgtatttttttaagag

SEQ ID NO: 447792 - DNA, 75 bp, synthetic construct
  source 1..75: mol_type = other DNA
cgatttcaaaaacgagggtgtggttgcttccagtgcatggccctatcaggccaacgccctgaaagccgaaggcca

SEQ ID NO: 447793 - DNA, 75 bp, synthetic construct
  source 1..75: mol_type = other DNA
cgatgccgcgttgttcgtcaaagctacgcagccgcagttgggcatcagcgatccgtaccaacttaccgaagaaca

SEQ ID NO: 447794 - DNA, 75 bp, synthetic construct
  source 1..75: mol_type = other DNA
tattaggcgaaaaaggttgtgaaaccaacggttttaactatttcgacaaaatcgccttctggaaaacgcctatag

SEQ ID NO: 447795 - DNA, 75 bp, synthetic construct
  source 1..75: mol_type = other DNA
gtctgcttggcccgtcatttaccgctatgctaatgcagaatttctccgataatttattgtttatcatgatcgcca

SEQ ID NO: 447796 - DNA, 75 bp, synthetic construct
  source 1..75: mol_type = other DNA
aatctgctgtttatcatgatcgccagtgtgtcgtttatttatttactcatgctgcttcgcaacgccggtcataca

SEQ ID NO: 447797 - DNA, 75 bp, synthetic construct
  source 1..75: mol_type = other DNA
tggattctggagctggttggcttggcgttttgtcgcgggcgtcggctgtgccatgatttgggtggttgttgagag

SEQ ID NO: 447798 - DNA, 75 bp, synthetic construct
  source 1..75: mol_type = other DNA
ctgatttgcgacagagatgattacttctcatattgctttcttatggagaaacgcccagtcatatgtttatacctt

SEQ ID NO: 447799 - DNA, 75 bp, synthetic construct
  source 1..75: mol_type = other DNA
caatttaatgacccgttattcattcgctcagggaaaggtatcgcgccgactacaacagggttaaacctgcatcac

SEQ ID NO: 447800 - DNA, 75 bp, synthetic construct
  source 1..75: mol_type = other DNA
gcggataaatttggtcgtctgctggtactgcgtgttcaggtatttgtcgtcattctcggtagtatcgcgatgtta

SEQ ID NO: 447801 - DNA, 75 bp, synthetic construct
  source 1..75: mol_type = other DNA
ctcaacgctcgctactgttaatggccgccatcccgaaggtgaatttagcgttgatcagggctacgcctgcggttt

SEQ ID NO: 447802 - DNA, 75 bp, synthetic construct
  source 1..75: mol_type = other DNA
tcgccaaatgcacacagtacggtaacaatggcacgctatcggtcagcgacggtgccattgccacagatattgttc

SEQ ID NO: 447803 - DNA, 75 bp, synthetic construct
  source 1..75: mol_type = other DNA
cagtgatacgttgcttgctggtggcaccatgaataatctcggtggtgaagactctgacactattgttgagaatgg

SEQ ID NO: 447804 - DNA, 75 bp, synthetic construct
  source 1..75: mol_type = other DNA
gttaacgctcctgcaggtgcaacatctggaaaatattaccctgttgttgttatgcgttctgctggctcagtaagc

SEQ ID NO: 447805 - DNA, 75 bp, synthetic construct
  source 1..75: mol_type = other DNA
gacggatggccttcagctttatagttccggtaagacgcaaaacttggccgttaatgctggtggtcgggctgaagt

SEQ ID NO: 447806 - DNA, 75 bp, synthetic construct
  source 1..75: mol_type = other DNA
gacagacggtctacagctctatagctccggtaagacgaaggatttggcggttaatgccggaggccgtgctgaagt

SEQ ID NO: 447807 - DNA, 75 bp, synthetic construct
  source 1..75: mol_type = other DNA
atgtttggaatcttcaaaaagaaaacccgcagagcggcaacggaaattaaaaagtttgaaaaacgcgatctggca

SEQ ID NO: 447808 - DNA, 75 bp, synthetic construct
  source 1..75: mol_type = other DNA
cccgcagagcgtctgcggaaattaaaaagtttgaaaaacgcgatctggcacaggcagtgattaacgctgcatacc

SEQ ID NO: 447809 - DNA, 75 bp, synthetic construct
  source 1..75: mol_type = other DNA
agatgatgatctcgatacagcgcaggagttccagaacgagtacggtgcaagccgtgctgaagttatcagggcggc

SEQ ID NO: 447810 - DNA, 75 bp, synthetic construct
  source 1..75: mol_type = other DNA
gaggatgtgaaacacgatacgcgtgaagcggaagatgtgctggatgtggcggtggccattgcggaggcagacggc

SEQ ID NO: 447811 - DNA, 75 bp, synthetic construct
  source 1..75: mol_type = other DNA
taatgccatcagtgccacgatcacaggtcagcttgacaccaactttaaaattggtcgtcgagcggcgttgcgtga

SEQ ID NO: 447812 - DNA, 75 bp, synthetic construct
  source 1..75: mol_type = other DNA
gagcaggtcttgcgtaaccagcctgcgttgtccgcgtttacgtcagaaattaatgcgattagcgcaaccattatc

SEQ ID NO: 447813 - DNA, 75 bp, synthetic construct
  source 1..75: mol_type = other DNA
tgttgagtttgatggttccaaagatattactttaaccgccgcgcatgtggctgcttttgccagaagggcaacgga

SEQ ID NO: 447814 - DNA, 75 bp, synthetic construct
  source 1..75: mol_type = other DNA
ttattccccggcaaaccttggcgtggtaagcggaggcagtgctcgctattacgacattcaggagctgctcatcgg

SEQ ID NO: 447815 - DNA, 75 bp, synthetic construct
  source 1..75: mol_type = other DNA
ggctatcggcaacggtaaccgcccaggggattagtgcgcctgattaccagacaatcctagatacactgaccagct

SEQ ID NO: 447816 - DNA, 75 bp, synthetic construct
  source 1..75: mol_type = other DNA
ttgatgtgaatattcctgggtcaggtacggtcacagttaccgctacatgtagaacggctggtcctgtcgcggcaa

SEQ ID NO: 447817 - DNA, 75 bp, synthetic construct
  source 1..75: mol_type = other DNA
caccccgacacgtggctgggtatcagtaactaaccctcaagcggctaccgttggcgttgctgccgaaacaaatgc

SEQ ID NO: 447818 - DNA, 75 bp, synthetic construct
  source 1..75: mol_type = other DNA
ataccactgatgtaaatggccttcctccgcactcaatcgcggctattgtcgaaggtggtgatgcgacggtcattg

SEQ ID NO: 447819 - DNA, 75 bp, synthetic construct
  source 1..75: mol_type = other DNA
atgcattaaccagtaacgtcaaaattaacggcatcactcgccgtgctgcgacaaactctacggtcgatgagctga

SEQ ID NO: 447820 - DNA, 75 bp, synthetic construct
  source 1..75: mol_type = other DNA
gattcgtaacgacatgagcaacaagcgtaaagcagaagcacgccaaaaagcagaacgtgcggaaaacattaagaa

SEQ ID NO: 447821 - DNA, 75 bp, synthetic construct
  source 1..75: mol_type = other DNA
gtggcgcttgaggatgcaagtacgacgaaaaaggggatagtacagctcagcagtgcgaccaacagtacgtctgaa

SEQ ID NO: 447822 - DNA, 75 bp, synthetic construct
  source 1..75: mol_type = other DNA
gatcacctgattattctaaatacagtgttaacacttcttctgcaggcgctcatacgcactctgtatcgggtactg

SEQ ID NO: 447823 - DNA, 75 bp, synthetic construct
  source 1..75: mol_type = other DNA
caacggaattacccgcaagattgcgacgaactcaaccgctgatgtaattatctccggcgatattggaacgccaat

SEQ ID NO: 447824 - DNA, 75 bp, synthetic construct
  source 1..75: mol_type = other DNA
ggcgacactacccacatcgttgtcggttctgtagagatcctctatctggtctttaacggcacgctgcactggagc

SEQ ID NO: 447825 - DNA, 75 bp, synthetic construct
  source 1..75: mol_type = other DNA
atagaaatagatgaagaccggctcccctccagagcgatggctattcacgaacatatccgtcaggacggcgaaaaa

SEQ ID NO: 447826 - DNA, 75 bp, synthetic construct
  source 1..75: mol_type = other DNA
atgaagactccgagaggcattcgtaataataaccccggtaatcttgataaaggatcaccgtggcaaggtctggtt

SEQ ID NO: 447827 - DNA, 75 bp, synthetic construct
  source 1..75: mol_type = other DNA
ttccgcagcctcaagcgaggcgagcgcaagcgcggcaagctggacgtggtgtatgactacggcgacggtaagcgc

SEQ ID NO: 447828 - DNA, 75 bp, synthetic construct
  source 1..75: mol_type = other DNA
ctgaaaattcgcggcatgggcaagcagcaaattgccgagcgcgttaaagaagcggcgcgcattctggaactggac

SEQ ID NO: 447829 - DNA, 75 bp, synthetic construct
  source 1..75: mol_type = other DNA
gccggtggaagtctacgaaaagcccgccagcctgtttgtggcgagttttatcggcagcccggcgatgaacctgct

SEQ ID NO: 447830 - DNA, 75 bp, synthetic construct
  source 1..75: mol_type = other DNA
agacatttttatcttttatattcaatggcttattttcctgctaattggtaataccatgaaaaataccatgctcag

SEQ ID NO: 447831 - DNA, 75 bp, synthetic construct
  source 1..75: mol_type = other DNA
acccggcccaaggcggcaggctgcccccccccactctattgtaaacaagacatttttatcttttatattcaatga

SEQ ID NO: 447832 - DNA, 75 bp, synthetic construct
  source 1..75: mol_type = other DNA
gcaaggacttgtggcaatggctgggccgggtggccttgtgctgtcgcctgagccgcagaccgaggccgggcagca

SEQ ID NO: 447833 - DNA, 75 bp, synthetic construct
  source 1..75: mol_type = other DNA
agcctggtgaatcaggggtatctcattggggcggattgctggctggatgagtccgtaaacgataaagactccctg

SEQ ID NO: 447834 - DNA, 75 bp, synthetic construct
  source 1..75: mol_type = other DNA
cgaagcggaaaccacctcaaacattatcggcggcgtgagtgctgacggtaaaaaaacaggtatgaaagcgctgct

SEQ ID NO: 447835 - DNA, 75 bp, synthetic construct
  source 1..75: mol_type = other DNA
atctgctcagacacagctcggcgttaaaccgcgcattctcggcgtgccaggtcatgataacaaagccgttgctac

SEQ ID NO: 447836 - DNA, 75 bp, synthetic construct
  source 1..75: mol_type = other DNA
ggctcgttcgctggatgctattgccgaccagtcaaaacccgtgacggttgttgtgcgcgtggcgcagggcgaaac

SEQ ID NO: 447837 - DNA, 75 bp, synthetic construct
  source 1..75: mol_type = other DNA
cgcttgtgcgcaaggacggtttccgcttctggggttcccgctgtctgagcgatgatccgctctttgccttcgaaa

SEQ ID NO: 447838 - DNA, 75 bp, synthetic construct
  source 1..75: mol_type = other DNA
cccttatccgcaaagacggttttcgcttctggggttcccgctgcctgagtgatgacccgctctttgccttcgaaa

SEQ ID NO: 447839 - DNA, 75 bp, synthetic construct
  source 1..75: mol_type = other DNA
aacaggtgatggtgaatacccgggtactgagtgataatgaatcaaaggtattcttcgagaaggtaaaaggtcagt

SEQ ID NO: 447840 - DNA, 75 bp, synthetic construct
  source 1..75: mol_type = other DNA
ttgttgcatatcattaaaagcctgaaaagtaccggcaaaggcgcggtgatcctgccccacggcgtactgtttcgc

SEQ ID NO: 447841 - DNA, 75 bp, synthetic construct
  source 1..75: mol_type = other DNA
tcacatggttgaacgcaaggcaggtaaagttattaatatttgctcgatgcaaagcgaactgggacgtgacaccat

SEQ ID NO: 447842 - DNA, 75 bp, synthetic construct
  source 1..75: mol_type = other DNA
ttttcttatatgggaggcaagtcaacgcatatgctccatattgagagtataggtagattttgcgctatagccgga

SEQ ID NO: 447843 - DNA, 75 bp, synthetic construct
  source 1..75: mol_type = other DNA
ttgcgcgcaaaatgttgactccagatgccttttctcccgcaggtttttgcgttgatgacgccgcgctctatttct

SEQ ID NO: 447844 - DNA, 75 bp, synthetic construct
  source 1..75: mol_type = other DNA
gtcttgaagattgtatggacgctattattgattacaggggtaaaaccccaaaaaaagttgataacggcatcccct

SEQ ID NO: 447845 - DNA, 75 bp, synthetic construct
  source 1..75: mol_type = other DNA
gcgatgcagttgggggacgccatcaaaatcatgaatgacaggctgaaaccgcaggttaatgttgacagtttcagc

SEQ ID NO: 447846 - DNA, 75 bp, synthetic construct
  source 1..75: mol_type = other DNA
tcggtgaatatttaacaccatccataattagcatggatgaaaataatcatattttagtcggaaaaccggctgggt

SEQ ID NO: 447847 - DNA, 75 bp, synthetic construct
  source 1..75: mol_type = other DNA
gaggcgatacaggtccggctggtccacagggtatacctggacctccggggccaacaggtagcgtcggtcctaagg

SEQ ID NO: 447848 - DNA, 75 bp, synthetic construct
  source 1..75: mol_type = other DNA
agaggaccacaaggggaaaaaggggataaaggtgaccccggcccggcaggccctgccggtgagcgggggccgaaa

SEQ ID NO: 447849 - DNA, 75 bp, synthetic construct
  source 1..75: mol_type = other DNA
ccaggacgaagctaaaagactactttatgagcagcaaaaatcagaagaagcactgttgataaagcgcgaaggtga

SEQ ID NO: 447850 - DNA, 75 bp, synthetic construct
  source 1..75: mol_type = other DNA
agccggaaaactggcgcgactacctgcaacggatccgcgaacaggcagagagtggggaagtttcagcgatgaaat

SEQ ID NO: 447851 - DNA, 75 bp, synthetic construct
  source 1..75: mol_type = other DNA
cagcgaccgtagtggggggatctcgcgtcgacgagtaatatttaatttctctgaggttgtaccagagaacgaacg

SEQ ID NO: 447852 - DNA, 75 bp, synthetic construct
  source 1..75: mol_type = other DNA
atgcgtcatttgttgtctgtcgcaccggtccttctctggctggttacgcccctcacgttcgcgcaactgcctggt

SEQ ID NO: 447853 - DNA, 75 bp, synthetic construct
  source 1..75: mol_type = other DNA
tgctctgccctttaaactgatgctgtttgtactggtggatggctggcaattgctggtcggttcgctggcgcagag

SEQ ID NO: 447854 - DNA, 75 bp, synthetic construct
  source 1..75: mol_type = other DNA
ctgactttcattccggcgattttactgatgatgaccagcttcacccgcatcatcatcgtttttggcttattacgt

SEQ ID NO: 447855 - DNA, 75 bp, synthetic construct
  source 1..75: mol_type = other DNA
ggaaaccttctgggcgcatggattcggcaaagtcaccgataaatttggtgtgccatggatgattaatgtcgtcaa

SEQ ID NO: 447856 - DNA, 75 bp, synthetic construct
  source 1..75: mol_type = other DNA
atgcgtcgtctgttatctgtcgctcctgctcttctctggctggtcagccccctcgcctttgcgcaactgcctggc

SEQ ID NO: 447857 - DNA, 75 bp, synthetic construct
  source 1..75: mol_type = other DNA
tgcagggacctgaagccgtgccgatgcgcattttgctcccggcctacgtgaccagcgagttaaaaccgcatttca

SEQ ID NO: 447858 - DNA, 75 bp, synthetic construct
  source 1..75: mol_type = other DNA
ccacctgactggtcgcaggttactaaggcgggctggaatatgttggactctatatctgagaaggttcccagagca

SEQ ID NO: 447859 - DNA, 75 bp, synthetic construct
  source 1..75: mol_type = other DNA
gctttttagagacgtacttagttcagggccatttagtcaacatgggcaagtattatctacaggtctaaaggaagc

SEQ ID NO: 447860 - DNA, 75 bp, synthetic construct
  source 1..75: mol_type = other DNA
cggaactggcaaaggcttatccgacaaataaattgcctgatttacgtggtgagtttattcgtggttgggatgacg

SEQ ID NO: 447861 - DNA, 75 bp, synthetic construct
  source 1..75: mol_type = other DNA
ttatggtggaaaatgctaaatacaaagactttgccgaaaggctaaacaggtctctccaagagcaatctattggag

SEQ ID NO: 447862 - DNA, 75 bp, synthetic construct
  source 1..75: mol_type = other DNA
tttaggttatgcaacaccattatcaagaaagcaaaaagaattcatcatgaatttgatggatgtaaaaattaaaat

SEQ ID NO: 447863 - DNA, 75 bp, synthetic construct
  source 1..75: mol_type = other DNA
caatgtttaaaggcgttttaacccgtgacggggattactttatttcggtgatggggcgcagcgatgtggcacgta

SEQ ID NO: 447864 - DNA, 75 bp, synthetic construct
  source 1..75: mol_type = other DNA
atatttgctcatcgacacgaaatatcttgagccagcgaagtgggatctaaaggtcacattgactaacggtaattg

SEQ ID NO: 447865 - DNA, 75 bp, synthetic construct
  source 1..75: mol_type = other DNA
catgtgcacttttacttgatgaagatactggtgatgatttgctgcgaaagaccatattcagcagtgtacctgtcg

SEQ ID NO: 447866 - DNA, 75 bp, synthetic construct
  source 1..75: mol_type = other DNA
acgtcttcaggatgcactgcgtcgtcgtgatatctggctggaaaacagcgaccgctggggcgatccgcgccggaa

SEQ ID NO: 447867 - DNA, 75 bp, synthetic construct
  source 1..75: mol_type = other DNA
gtcccgttatgcacagagagagaacacgcgctgggagcatcacgcgctcatcaggcagcattatgggtatcatga

SEQ ID NO: 447868 - DNA, 75 bp, synthetic construct
  source 1..75: mol_type = other DNA
gcagtcacggggcgttgctggccagggtcatcattccaccccagaccatccgtgatggtctgctgaccctgacac

SEQ ID NO: 447869 - DNA, 75 bp, synthetic construct
  source 1..75: mol_type = other DNA
ttcccgactgaacttttccggtctgcctgccattcaactgcgtaatctggctcgttatgctggcatggcgtcggt

SEQ ID NO: 447870 - DNA, 75 bp, synthetic construct
  source 1..75: mol_type = other DNA
gatacaaactttcaggatgaaatggtggagcagtacggacgggtaaggcgttttttgcccgcactactgcgcgat

SEQ ID NO: 447871 - DNA, 75 bp, synthetic construct
  source 1..75: mol_type = other DNA
caaaatgatcagtgatctgctccctccggtggatttaacggagttgctgctcgaaattaacgcccataccggatt

SEQ ID NO: 447872 - DNA, 75 bp, synthetic construct
  source 1..75: mol_type = other DNA
aagcatccctcactgacgattagcagtctggataaactggatgagccaccggcactgatacaattgaatcgtcgg

SEQ ID NO: 447873 - DNA, 75 bp, synthetic construct
  source 1..75: mol_type = other DNA
aacagacagaaaactacggtcgctatgtggcagaaccaaatgaggttcagctggctcggtattttcatctggatg

SEQ ID NO: 447874 - DNA, 75 bp, synthetic construct
  source 1..75: mol_type = other DNA
ttcgtctaaataatcggatcaaacagctactcccaccggtagatttaacggaactgttacttgagatagatgccc

SEQ ID NO: 447875 - DNA, 75 bp, synthetic construct
  source 1..75: mol_type = other DNA
ggaaacgcctcgtatacgatgcggagggacggatacagcgtgcaggttattcactatgtttgctggaacgccttc

SEQ ID NO: 447876 - DNA, 75 bp, synthetic construct
  source 1..75: mol_type = other DNA
gactcaggacactgaaagatcttgatcaggccgcattgttactggcgcgggcatgtgcattgttgctggatgata

SEQ ID NO: 447877 - DNA, 75 bp, synthetic construct
  source 1..75: mol_type = other DNA
cgacaaataaattgcctgatttacgcggtgaatttattcgtggatgggatgatgggcgcggggtggattcctctc

SEQ ID NO: 447878 - DNA, 75 bp, synthetic construct
  source 1..75: mol_type = other DNA
cagagcatgaaaacctgcgtggtcctggctactaccactgacagaaggaacaaccgtatgagtgataatctgtta

SEQ ID NO: 447879 - DNA, 75 bp, synthetic construct
  source 1..75: mol_type = other DNA
tggcagttggctgaaatatctgaaacagttgcaaaaaatacaggttctaatcctggacgatctggggctggaaca

SEQ ID NO: 447880 - DNA, 75 bp, synthetic construct
  source 1..75: mol_type = other DNA
agcaacggctacgttactcaggtactgatccgcccaggcacttacgcggcagctttaccgctgcgtccggtaatg

SEQ ID NO: 447881 - DNA, 75 bp, synthetic construct
  source 1..75: mol_type = other DNA
gttatcttcacggcgggcatcacgctgtttccgtttgtcatgccttcgagcatcagtccgatctccagcctgacg

SEQ ID NO: 447882 - DNA, 75 bp, synthetic construct
  source 1..75: mol_type = other DNA
cccggtgcctggatgaataattttgttgaatcgccgattttgtggatcttcccgctgctgggttttttctgccca

SEQ ID NO: 447883 - DNA, 75 bp, synthetic construct
  source 1..75: mol_type = other DNA
gctcggcgtaccatttgtcttcacaccgcaattacgcgtggagtatctcggcagcttctggcaattgctgacgcc

SEQ ID NO: 447884 - DNA, 75 bp, synthetic construct
  source 1..75: mol_type = other DNA
cccttgtgctggtcatggccgttactggcaccgcacacgcttccgaggatttcactgatgattcaaactgggata

SEQ ID NO: 447885 - DNA, 75 bp, synthetic construct
  source 1..75: mol_type = other DNA
tttatggtaaagctgtcggtagaagtggagggggggggtgcagtagtgctgaaaaggatttttttaacaaaattg

SEQ ID NO: 447886 - DNA, 75 bp, synthetic construct
  source 1..75: mol_type = other DNA
tcgtaatttttactgtgtcctggctgacagcgccagcgtatgccgctgatccctgtaaatctgttttttgtcttt

SEQ ID NO: 447887 - DNA, 75 bp, synthetic construct
  source 1..75: mol_type = other DNA
gtcttcattccagagcaaaaacggcaaatcgtcgcccagttccggcaaaactcgctgttacgtctgaaacccggt

SEQ ID NO: 447888 - DNA, 75 bp, synthetic construct
  source 1..75: mol_type = other DNA
cacttcggcggcaacgcgtgtgcaattgaaagtgaaacgcctgcgcggaaaaggaacggtttgcctgcaaaccag

SEQ ID NO: 447889 - DNA, 75 bp, synthetic construct
  source 1..75: mol_type = other DNA
tgagcgatgggaaagtacacattgttcatgctggcgaagttattagtgcgactcaacttaccgatggcgagttga

SEQ ID NO: 447890 - DNA, 75 bp, synthetic construct
  source 1..75: mol_type = other DNA
gctattaaaaaaataagtggtgagtatgaacttattttccccggagatagtaacccttacaaaccaatgagtgag

SEQ ID NO: 447891 - DNA, 75 bp, synthetic construct
  source 1..75: mol_type = other DNA
tctggctcagcatcaggattaacatcattagaaagtggtgggaatgaatctcgtcctcgcaacgtcgcatttaac

SEQ ID NO: 447892 - DNA, 75 bp, synthetic construct
  source 1..75: mol_type = other DNA
ttacgcggtgagtttatccgtggttgggatgatgggcgaggtgtggatgcgggaagggtcatcttaagcatacag

SEQ ID NO: 447893 - DNA, 75 bp, synthetic construct
  source 1..75: mol_type = other DNA
ctgttggtgtccctgttccgtggccttcagccactccgccaacaggctggctgaaatgcaatggtgcggcttttt

SEQ ID NO: 447894 - DNA, 75 bp, synthetic construct
  source 1..75: mol_type = other DNA
tgctgaatcagtgagttcacctgatgcctcctctttaattaaagaaaccagaccacggaacctagcatttgcgta

SEQ ID NO: 447895 - DNA, 75 bp, synthetic construct
  source 1..75: mol_type = other DNA
ggttcgtcatcagggctgacatcgatgccaagcggtggtgatgaatctcgcccgcgcaacattgcatttaactac

SEQ ID NO: 447896 - DNA, 75 bp, synthetic construct
  source 1..75: mol_type = other DNA
attacacatcgggtgaaggatttatgaaccgtccagccaatggatggactggttcgtcatcagggctgacatcga

SEQ ID NO: 447897 - DNA, 75 bp, synthetic construct
  source 1..75: mol_type = other DNA
gctcggcgtgccgtttgccttcacaccgcaattacgcgtggagtatctcggcagcttctggcaactgctgacgcc

SEQ ID NO: 447898 - DNA, 75 bp, synthetic construct
  source 1..75: mol_type = other DNA
tcgagtcgcccgttttgtggatcttcccgctgctggggttcttctgcccattgctgacggtgatggcgatttatc

SEQ ID NO: 447899 - DNA, 75 bp, synthetic construct
  source 1..75: mol_type = other DNA
caagctacgctggctttgggcgttttcccagacgtttcgctggcacttgcccgtaagcgtagagatgaagcaagg

SEQ ID NO: 447900 - DNA, 75 bp, synthetic construct
  source 1..75: mol_type = other DNA
cttaagcatgcaggggtggttaacaggaagtcattatcataatattcggtcatgggatgcgtgggataacacggt

SEQ ID NO: 447901 - DNA, 75 bp, synthetic construct
  source 1..75: mol_type = other DNA
gaaacaccaccaacgggctggctaaaatgcaatggtgcagcattttcttctgaaatgtatcccaaactggcaaag

SEQ ID NO: 447902 - DNA, 75 bp, synthetic construct
  source 1..75: mol_type = other DNA
aaggatgaatgggagttggccacaattttcaaaaaaacatattcacaaggccggggacttgatgctgcaaataca

SEQ ID NO: 447903 - DNA, 75 bp, synthetic construct
  source 1..75: mol_type = other DNA
atgctgccaaaaatgccacgccggtggtgttatctgaaatgtcacaggtacagttgcgtgactctgatattgcca

SEQ ID NO: 447904 - DNA, 75 bp, synthetic construct
  source 1..75: mol_type = other DNA
atgctaccgggaatggatggttatcaggtactggaaggcgtccgggccagaaaacagacccccgtgctgatgctg

SEQ ID NO: 447905 - DNA, 75 bp, synthetic construct
  source 1..75: mol_type = other DNA
tcttttgaagaattactgaattctcctgatccgtataccctgatttttgctaacccgagtccactgcgtggcgtg

SEQ ID NO: 447906 - DNA, 75 bp, synthetic construct
  source 1..75: mol_type = other DNA
aaacaatgggcaacgggccatatgcgccagttatttctattggggcggtattctttgacccgaataccggagaaa

SEQ ID NO: 447907 - DNA, 75 bp, synthetic construct
  source 1..75: mol_type = other DNA
cttcaacgattttatggtggctggaacagagtgaagaagccagaaaatcgctaaccagcaacactcaagagcttt

SEQ ID NO: 447908 - DNA, 75 bp, synthetic construct
  source 1..75: mol_type = other DNA
atacagcactttttgacagaatttttactcttgagttacaggtcggttttcttctcccaaagataatcaaagcaa

SEQ ID NO: 447909 - DNA, 75 bp, synthetic construct
  source 1..75: mol_type = other DNA
cggggacaccgccagtctggtcaatatggctaacacatcatcccttgaaaagcagcggctggcacaggccacaat

SEQ ID NO: 447910 - DNA, 75 bp, synthetic construct
  source 1..75: mol_type = other DNA
taaatgggctacaggactcactgctgaagggggggctaaaattagtgctggagcgaatgcatcaagtggctctac

SEQ ID NO: 447911 - DNA, 75 bp, synthetic construct
  source 1..75: mol_type = other DNA
ggggcaccaggcgcttcgcacacttccgctgatgcagaccgttatcatggggataatgattgggatgttcccgat

SEQ ID NO: 447912 - DNA, 75 bp, synthetic construct
  source 1..75: mol_type = other DNA
gatggatcgatggtctgggacagtggtggtgcaatgtcaaaactgccggtggatatcaacgtcggtcgtcagata

SEQ ID NO: 447913 - DNA, 75 bp, synthetic construct
  source 1..75: mol_type = other DNA
taaggaagcatccgattacttcaccagccgcaaaaccaccacatcgggtaatatcaccgataataatgccagctc

SEQ ID NO: 447914 - DNA, 75 bp, synthetic construct
  source 1..75: mol_type = other DNA
ccagcagccaggcggcgaaagactttaaggaagcatccgattacttcaccagccgcaaaaccaccacatcgggta

SEQ ID NO: 447915 - DNA, 75 bp, synthetic construct
  source 1..75: mol_type = other DNA
ttgtcgcaaaactcatttcgtcatggatggaaggttgacgggttagggattcgccagacatttaactatgaactg

SEQ ID NO: 447916 - DNA, 75 bp, synthetic construct
  source 1..75: mol_type = other DNA
ttatgcaggacggctatccgcatccctgcatgcgaccgatgtacaactttctgggaaaattcaaacccgaacccc

SEQ ID NO: 447917 - DNA, 75 bp, synthetic construct
  source 1..75: mol_type = other DNA
aagtcaatcagcgatacaaagacgatcatggtgcgcttgtcaccctgaccagtgttgaggaaacccgggtggtgt

SEQ ID NO: 447918 - DNA, 75 bp, synthetic construct
  source 1..75: mol_type = other DNA
ctactactggcgaccgcgccgcgctactgtcagtactacaatcaactccatcaactgccgttagttgctcttcct

SEQ ID NO: 447919 - DNA, 75 bp, synthetic construct
  source 1..75: mol_type = other DNA
gtgagaaggactcgcgctggttttacgttactggaaatgctggtggcaatcgccatttttgcctcgctggcactg

SEQ ID NO: 447920 - DNA, 75 bp, synthetic construct
  source 1..75: mol_type = other DNA
cgttactggaaatgctggtggcaattgccatttttgcctcgctggcactgatggcgcagcaggtgacaaacggcg

SEQ ID NO: 447921 - DNA, 75 bp, synthetic construct
  source 1..75: mol_type = other DNA
gtaggttttgagttttatacgtattcaacgagagaaataattaactcgcaaaaaaataggcttttttttatacta

SEQ ID NO: 447922 - DNA, 75 bp, synthetic construct
  source 1..75: mol_type = other DNA
gctggacaatgtgttacaggagctggggcgcgaacgcacgattgctatgagcctgccggaatttgagcagtcact

SEQ ID NO: 447923 - DNA, 75 bp, synthetic construct
  source 1..75: mol_type = other DNA
gctgtggcataaacggaacagccataatccgaagatcgtctggttacgggaaaccattaaaaacctttacgcgtc

SEQ ID NO: 447924 - DNA, 75 bp, synthetic construct
  source 1..75: mol_type = other DNA
atacaacaattagtagagagtaataattttgaagagctcaacctagaaaaaaagggaatattaccaaatattcca

SEQ ID NO: 447925 - DNA, 75 bp, synthetic construct
  source 1..75: mol_type = other DNA
tgtcagaaatatgtcgataatccggcctgtacgctggcctcacgtcagtgcgcgttttattccgatgagggaacc

SEQ ID NO: 447926 - DNA, 75 bp, synthetic construct
  source 1..75: mol_type = other DNA
gcactgagtgttcagagccgggtggtacgaaaaccggagtgatggaaggtaaaccctggaacatcacacaggcat

SEQ ID NO: 447927 - DNA, 75 bp, synthetic construct
  source 1..75: mol_type = other DNA
tgccgcagagctggccttcaacacccgcatgagtgtgaaacaggccagagccgtgatgaaagcggcggtggcagg

SEQ ID NO: 447928 - DNA, 75 bp, synthetic construct
  source 1..75: mol_type = other DNA
tttttctttgtttacgggggtggtgcgaagttgcattctgcaacctgataataaatcccttttcagagagggttg

SEQ ID NO: 447929 - DNA, 75 bp, synthetic construct
  source 1..75: mol_type = other DNA
tcatgatttcggtgatttcccgtggtcgttcagactgaagcgattgctgtatacccgtgcatggctcagtaatga

SEQ ID NO: 447930 - DNA, 75 bp, synthetic construct
  source 1..75: mol_type = other DNA
taaatcggcaaattacggtgcactagacgaactggctcgtggttgtgccgatctgtcgaaagccgagtatcagtg

SEQ ID NO: 447931 - DNA, 75 bp, synthetic construct
  source 1..75: mol_type = other DNA
cacactggagcttgctggccgctggggtggcggcgaagtggcttcagctgacggcatgcgctttgtcacgccggt

SEQ ID NO: 447932 - DNA, 75 bp, synthetic construct
  source 1..75: mol_type = other DNA
gattatcgccgccgtattctgacgcaactgaaccggggagaaggccgtcatgctgtggccagagccatctgttac

SEQ ID NO: 447933 - DNA, 75 bp, synthetic construct
  source 1..75: mol_type = other DNA
ctgtcataacggtaagtatccttccctgactgtcagcagcctggaaaaactcgatgagccgcctgcgctgacaca

SEQ ID NO: 447934 - DNA, 75 bp, synthetic construct
  source 1..75: mol_type = other DNA
aagccccggttgacaatttctcccctcgccagtcttgatgagccggacagtctgaaacgactgagcaaaatgatc

SEQ ID NO: 447935 - DNA, 75 bp, synthetic construct
  source 1..75: mol_type = other DNA
gggccaactgattgcagccgcctgtctttactggaatcactgaaaaagggccctgtgaccatcagtggtccggcg

SEQ ID NO: 447936 - DNA, 75 bp, synthetic construct
  source 1..75: mol_type = other DNA
aacgggtctcccgggcggttcgtcaggtgctcgggctctccctgttactgccggtggcggcttctgctgtcacgc

SEQ ID NO: 447937 - DNA, 75 bp, synthetic construct
  source 1..75: mol_type = other DNA
taaaggcgtgcaacagttggcggtccagctagatgaaacctggaaaaccgtcgcatcccgctttgaaggaaatgc

SEQ ID NO: 447938 - DNA, 75 bp, synthetic construct
  source 1..75: mol_type = other DNA
tgatgaactcgcaatggcgtcccgatcgctgtgcagtcattgccggggcgctgcgttatcctcgttatcgttggt

SEQ ID NO: 447939 - DNA, 75 bp, synthetic construct
  source 1..75: mol_type = other DNA
tttactccgtaaacctggtggcgcgtaaaccggagaaacgtactccacagaccaacagctacgcgcggaagtttc

SEQ ID NO: 447940 - DNA, 75 bp, synthetic construct
  source 1..75: mol_type = other DNA
caagggacggacaaacgcgcgagatcgcctcctacctggcttcggaactgaaagaactggggatccaggcggatg

SEQ ID NO: 447941 - DNA, 75 bp, synthetic construct
  source 1..75: mol_type = other DNA
ctactccctccggtggatttaacggagttgctgctcgaaattaacgcccataccggatttgctgatgagtttttc

SEQ ID NO: 447942 - DNA, 75 bp, synthetic construct
  source 1..75: mol_type = other DNA
cgcggtgggctggctgcagaaataccgcaatgaagctgccgcgcgtgtgatgtcgaaagtcactgatgatgacgg

SEQ ID NO: 447943 - DNA, 75 bp, synthetic construct
  source 1..75: mol_type = other DNA
accatcctcgccattggtgaatttgttgtaatttgcattcttggtttcgcaatagcctcccttgctccattaaaa

SEQ ID NO: 447944 - DNA, 75 bp, synthetic construct
  source 1..75: mol_type = other DNA
gtgttaaagtcttagcttctaaaaatacccttacaattcaggttggtgccaatgatggtgagacaatagatatta

SEQ ID NO: 447945 - DNA, 75 bp, synthetic construct
  source 1..75: mol_type = other DNA
ggggggttgatgtggagcgtaaagggcatcgactgaacattgatgatgcacggctaatgacgcttattgtcacgc

SEQ ID NO: 447946 - DNA, 75 bp, synthetic construct
  source 1..75: mol_type = other DNA
ccgaacatcccaccaaagccatataacgaaacggcagttataaagatcattgccgataccatccgacagggattt

SEQ ID NO: 447947 - DNA, 75 bp, synthetic construct
  source 1..75: mol_type = other DNA
tacgaatgcgcgcaaatcaacttcgatttccacatccgttacaaacagctcgacctgtgggcgcgattccaggac

SEQ ID NO: 447948 - DNA, 75 bp, synthetic construct
  source 1..75: mol_type = other DNA
cactgcagcaacagccacagggaacaaggttgttgttgaattatctacagcaactccgactgcacagttctcagg

SEQ ID NO: 447949 - DNA, 75 bp, synthetic construct
  source 1..75: mol_type = other DNA
tcgacgaaagcgaatatttctacgacagcagtaacgggggcggcaacgaccacttatgctgatagcgccgttgca

SEQ ID NO: 447950 - DNA, 75 bp, synthetic construct
  source 1..75: mol_type = other DNA
aaattccgctcctccctcggtgcggtgcaaaaccgtctggattccgcagtcaccaacctgaacaacaccactacc

SEQ ID NO: 447951 - DNA, 75 bp, synthetic construct
  source 1..75: mol_type = other DNA
acatgtcgaaagcgcagattatccagcaggcaggtaactccgtgctgtccaaagctaaccaggtaccgcagcagg

SEQ ID NO: 447952 - DNA, 75 bp, synthetic construct
  source 1..75: mol_type = other DNA
agagttcactggtgcttcaaccaacgatccactgactctgctggacaaagctatcgcatctgttgataaattccg

SEQ ID NO: 447953 - DNA, 75 bp, synthetic construct
  source 1..75: mol_type = other DNA
atcaagtttgatgattcagtaaaaactgatttaaaactgaccgatgcttcagggttaagtctgcataacctcaaa

SEQ ID NO: 447954 - DNA, 75 bp, synthetic construct
  source 1..75: mol_type = other DNA
ggggcctggctgaaatggagcgcgaactgatagttgaacgtaccagggcggggcttgctgcagctcgcgccaaag

SEQ ID NO: 447955 - DNA, 75 bp, synthetic construct
  source 1..75: mol_type = other DNA
aacagctgggaacagggcggaggaaatgaggggcaactgagcgttaatttaacctgtgatctcttcgtggtggtg

SEQ ID NO: 447956 - DNA, 75 bp, synthetic construct
  source 1..75: mol_type = other DNA
cggctttggtaacctggcgataccgcgtgtgggtcaggaggtcattgtggacttcctcaacggcgatccggacca

SEQ ID NO: 447957 - DNA, 75 bp, synthetic construct
  source 1..75: mol_type = other DNA
gtggcttcgacattacagtgggcagacatacccaactggagggtgcggtgattgcctccactgccacaccggata

SEQ ID NO: 447958 - DNA, 75 bp, synthetic construct
  source 1..75: mol_type = other DNA
atagcgagactgattaaaaacggtcatgacaggaaacaactggcgatcatttacgacatcggcatatcgacgatt

SEQ ID NO: 447959 - DNA, 75 bp, synthetic construct
  source 1..75: mol_type = other DNA
cgccgttacatttcagccaccccgttggcagcgtggctgagggccatggaacgggcacaccaacgggcagcgcag

SEQ ID NO: 447960 - DNA, 75 bp, synthetic construct
  source 1..75: mol_type = other DNA
acatttacgtactgcgtaacgacgagcagtcaacgcgctttaaactcacggagttcggcggcgtgcgcgggttta

SEQ ID NO: 447961 - DNA, 75 bp, synthetic construct
  source 1..75: mol_type = other DNA
ttttgatgtgggcatatcgacactatataaaaaattcccggcaacaaatcccgttgtgtcagacaccgccgaacc

SEQ ID NO: 447962 - DNA, 75 bp, synthetic construct
  source 1..75: mol_type = other DNA
atcaatgaaggctgggatgttctcaacctctacgatattgttcgcatcagcgaacaggcgagcagtagtaagaca

SEQ ID NO: 447963 - DNA, 75 bp, synthetic construct
  source 1..75: mol_type = other DNA
ttttgatattggcctgtccacgctctataaaaaattccccgcctccgtgacaaaaaataaattgtgtcatccctt

SEQ ID NO: 447964 - DNA, 75 bp, synthetic construct
  source 1..75: mol_type = other DNA
gcattaattttcgcagcctgacggatgccattgataccagcacgccgatgggacgttttttctttcatgtgatgg

SEQ ID NO: 447965 - DNA, 75 bp, synthetic construct
  source 1..75: mol_type = other DNA
gtggaagagattgagagaagcagccgaaactgggaaacctactcgctggaaacacgctttgaaatacagtatcag

SEQ ID NO: 447966 - DNA, 75 bp, synthetic construct
  source 1..75: mol_type = other DNA
gggcgctttttctttcatgtgatgggggccctggctgaaatggaacgtgaactgattgttgaacgaacaaaagca

SEQ ID NO: 447967 - DNA, 75 bp, synthetic construct
  source 1..75: mol_type = other DNA
aacgcagggcgataaagccggatatttttatccgttcggcggcagccgcgttgtcgcactggctcgacgggcaga

SEQ ID NO: 447968 - DNA, 75 bp, synthetic construct
  source 1..75: mol_type = other DNA
aagcgcaggatgtgagctaatttttgaggataaggcgagcggcaaaaaggctgaacgccctgggttaaaaaaggt

SEQ ID NO: 447969 - DNA, 75 bp, synthetic construct
  source 1..75: mol_type = other DNA
ataccaggaagaaacatggcagcaaatgcggcgattgctggagaagggcatcccccgtaagcaggttgcaatcat

SEQ ID NO: 447970 - DNA, 75 bp, synthetic construct
  source 1..75: mol_type = other DNA
agcgtggtgtgaatttcagaagcctgactgacagtattgataccagtaccccaatgggccgtttcttttttcatg

SEQ ID NO: 447971 - DNA, 75 bp, synthetic construct
  source 1..75: mol_type = other DNA
accttatcgaagggggatacgctggttgtctggaagcttgatcgtctcgggcggagcatgcgccacttggtgacc

SEQ ID NO: 447972 - DNA, 75 bp, synthetic construct
  source 1..75: mol_type = other DNA
ctcctcgccagaaggtggcgattatctatgatgttggtgtgtcaactttgtataagaggtttccggtcggagata

SEQ ID NO: 447973 - DNA, 75 bp, synthetic construct
  source 1..75: mol_type = other DNA
gaatgtcgcagtacctgatggtgcaaattctgtttcagtcagagtgggcgatttaggtgaagatggatggggata

SEQ ID NO: 447974 - DNA, 75 bp, synthetic construct
  source 1..75: mol_type = other DNA
ccgttccgactgaaaagggagccacccggaaatttctgactggcacaacacgcgtcgatgttggtgcaacagggg

SEQ ID NO: 447975 - DNA, 75 bp, synthetic construct
  source 1..75: mol_type = other DNA
gggcgctggcagaaatggaacgtgagcttatcgttgaacgtacacgcgctggacttgatgcagctcgcgcagaag

SEQ ID NO: 447976 - DNA, 75 bp, synthetic construct
  source 1..75: mol_type = other DNA
cgcgaacaaggtgttaattttagtagttatgttattacaggtgggggatttctcccccttatgcagattttctag

SEQ ID NO: 447977 - DNA, 75 bp, synthetic construct
  source 1..75: mol_type = other DNA
caacaaatgaccagaacacagatctacaacgtaatgcgctgaactgtgcaggatgcgagctgttttttgaagaca

SEQ ID NO: 447978 - DNA, 75 bp, synthetic construct
  source 1..75: mol_type = other DNA
ccgtcctaagttgaccaccgaacagtgggcacagattgggcgtttactcgaggccggagaatcaagacagcgtat

SEQ ID NO: 447979 - DNA, 75 bp, synthetic construct
  source 1..75: mol_type = other DNA
actggatcctgaatccgaagaactggggatctgtctacgagcaggccatcaacgagcaccgtgagcgcaagggag

SEQ ID NO: 447980 - DNA, 75 bp, synthetic construct
  source 1..75: mol_type = other DNA
gctgcacactctctttccctcgggctgttaccgtccattatcagccagatgccgccgctctttacctgggcaatt

SEQ ID NO: 447981 - DNA, 75 bp, synthetic construct
  source 1..75: mol_type = other DNA
gctggataagctgcgtgagcagtacggggtcggaccgctatgcagcgaactgcatattgccccgtcaacgtatta

SEQ ID NO: 447982 - DNA, 75 bp, synthetic construct
  source 1..75: mol_type = other DNA
ggtaatacaccgtaagagctggaaaaaccggacagaagtggaactggccacactaacgtgggtggactggtataa

SEQ ID NO: 447983 - DNA, 75 bp, synthetic construct
  source 1..75: mol_type = other DNA
aagaaaggcgttcgttacttattcgaatgtaaagatcctgaaagcaaagcccctaaatatatacaatttagcgat

SEQ ID NO: 447984 - DNA, 75 bp, synthetic construct
  source 1..75: mol_type = other DNA
ttggcgattcgtcttcataaaatggctattgctttaggtgtatttattgttagcggtcctgccttttcgcatggt

SEQ ID NO: 447985 - DNA, 75 bp, synthetic construct
  source 1..75: mol_type = other DNA
ttcgtgctggatgcactggagcaggcgttatgggcccgtcgaccgtccggcacagtccatcacagtgataaaggt

SEQ ID NO: 447986 - DNA, 75 bp, synthetic construct
  source 1..75: mol_type = other DNA
ttacagctggacaatgccgacgccacacggcagctactacaaacagttgagtgaattgcttgacgatcaggcgca

SEQ ID NO: 447987 - DNA, 75 bp, synthetic construct
  source 1..75: mol_type = other DNA
gaacgtcctgaccagttgtgggtggctgattttacttacgtcagcacatggcagggggtcgtctatgtggcgttc

SEQ ID NO: 447988 - DNA, 75 bp, synthetic construct
  source 1..75: mol_type = other DNA
gtataacaatcgacgattgctggaaaggctgggccatactcctccggcagaatcctggagactaaacttcctgag

SEQ ID NO: 447989 - DNA, 75 bp, synthetic construct
  source 1..75: mol_type = other DNA
gcgtaaagtctggcgtcagttgttacgggaaggtatcagagtggccaggtgcactgtggcacgtctcatggcggt

SEQ ID NO: 447990 - DNA, 75 bp, synthetic construct
  source 1..75: mol_type = other DNA
gcgtaaagtctggcatcagttgttacgggaaggtatcagagtggccagatgcactgtggcacgtctcatggcggt

SEQ ID NO: 447991 - DNA, 75 bp, synthetic construct
  source 1..75: mol_type = other DNA
gatcccttgcacggacaggggctggtgatgttgccggttagagaaatttttgccgaaagcggcctattatttgat

SEQ ID NO: 447992 - DNA, 75 bp, synthetic construct
  source 1..75: mol_type = other DNA
ccggatacatcgtggggtggtgggtctcatcgtctatggaaacgacattcgtgctggatgcgctggagcaggcgt

SEQ ID NO: 447993 - DNA, 75 bp, synthetic construct
  source 1..75: mol_type = other DNA
actcacgtgggtggactggtataacaatcgacgattgctggaaaggctgggccatactcctccggcagaagcaga

SEQ ID NO: 447994 - DNA, 75 bp, synthetic construct
  source 1..75: mol_type = other DNA
tggcgggtctcatcgtccatggaaacgacattcgtgctggatgcactggagcaggcgttatgggcccgtcgaccg

SEQ ID NO: 447995 - DNA, 75 bp, synthetic construct
  source 1..75: mol_type = other DNA
gtggcgttcatcattgatgtgtttgccggatacatcgtggggtggtgggtctcatcgtctatggaaacgacattc

SEQ ID NO: 447996 - DNA, 75 bp, synthetic construct
  source 1..75: mol_type = other DNA
gggctggctgcagctcgtgataaaggcagagtaggtggacgccgtcctaagttgaccaccgaacagtgggcacag

SEQ ID NO: 447997 - DNA, 75 bp, synthetic construct
  source 1..75: mol_type = other DNA
acgaagagatcatcaagctctggaatgaaaaattcccttcgaaggctgtgtcgctgcatgagtggaaccgccgcc

SEQ ID NO: 447998 - DNA, 75 bp, synthetic construct
  source 1..75: mol_type = other DNA
ccgtaagagttggaaaaaccggacagaagtggaactggccacactaacgtgggtggactggtataacaatcgacg

SEQ ID NO: 447999 - DNA, 75 bp, synthetic construct
  source 1..75: mol_type = other DNA
ctcatcgtctatggaaacgacatttgtgctggatgctctggagcaggcgttatgggcccgtcgaccgtccggcac

SEQ ID NO: 448000 - DNA, 75 bp, synthetic construct
  source 1..75: mol_type = other DNA
cgtaaagtctggcgccagttgttacgcgaaggtatcagggtggccagatgtacagtggcgcgtctcatggcggtt

SEQ ID NO: 448001 - DNA, 75 bp, synthetic construct
  source 1..75: mol_type = other DNA
ctcatcgtccatggaaacgacattcgtgctggatgctctggagcaggcgttatgggcccgtcgaccgtccggcac

SEQ ID NO: 448002 - DNA, 75 bp, synthetic construct
  source 1..75: mol_type = other DNA
gttatgggacttgccggtgttctccggggtaaaaaggtccgcactaccgtcagccggaaagccgttgccgcatgc

SEQ ID NO: 448003 - DNA, 75 bp, synthetic construct
  source 1..75: mol_type = other DNA
gctgattcaactgttaactaacggcggcccggatcgtcttggcacgaccacgccagccggttataccgacctgct

SEQ ID NO: 448004 - DNA, 75 bp, synthetic construct
  source 1..75: mol_type = other DNA
gaagcctcagcgatggatggcgcaggtcccttgcagaacttctttaagattacactgccgctgctgattaagccg

SEQ ID NO: 448005 - DNA, 75 bp, synthetic construct
  source 1..75: mol_type = other DNA
gtcgaataggaggccgtcggcctaaataccaagaagaaacatggcagcaaatgcgtcgattgctggagaatggca

SEQ ID NO: 448006 - DNA, 75 bp, synthetic construct
  source 1..75: mol_type = other DNA
acattatcggaaggtgacactctggttgtctggaagctggatcgcctcggtcgcagcatgcggcatcttgtcgtg

SEQ ID NO: 448007 - DNA, 75 bp, synthetic construct
  source 1..75: mol_type = other DNA
ccctattacattatgtgaacctgaggatggggttttttatgaagaattctctacattcaaatgtatgtgcattgt

SEQ ID NO: 448008 - DNA, 75 bp, synthetic construct
  source 1..75: mol_type = other DNA
aaactcgtcagagggtggccctaatttatgacgtcggaatctcaactctgtacaaacgattcccagcatctgaca

SEQ ID NO: 448009 - DNA, 75 bp, synthetic construct
  source 1..75: mol_type = other DNA
agacagtattgataccagcactgccatggggcgtttctttttccacgtgatgtctgcactggcggagatggaacg

SEQ ID NO: 448010 - DNA, 75 bp, synthetic construct
  source 1..75: mol_type = other DNA
ggatttggttttccccgttgcccacattccgttttgccgcttctcccaaaccaacgtttatgaaaatgcagagat

SEQ ID NO: 448011 - DNA, 75 bp, synthetic construct
  source 1..75: mol_type = other DNA
agcacagtctgatctttgccagtgtgatcggcattatcacgctgttgcaggcgtatgtgtttaccgggatgttag

SEQ ID NO: 448012 - DNA, 75 bp, synthetic construct
  source 1..75: mol_type = other DNA
ggtgattaatttccagatccctcatttgcatcaacaagtgttgaaagcggcccccattgtcgcccagccgacgcc

SEQ ID NO: 448013 - DNA, 75 bp, synthetic construct
  source 1..75: mol_type = other DNA
ccgttcttctcgccgttccttggttggctgggggtatttcttaccggctctgacacatcctcgaacgccctgttt

SEQ ID NO: 448014 - DNA, 75 bp, synthetic construct
  source 1..75: mol_type = other DNA
ggcggatcggcggtcgcaggcccaaattaacggatgagcaatgggcgcaggcagggagattgatctcagcagggg

SEQ ID NO: 448015 - DNA, 75 bp, synthetic construct
  source 1..75: mol_type = other DNA
ggcggatcggtggccggaggccaaaattaacgaatgagcagtgggctcaggcaggtagattgatcgctgcggggg

SEQ ID NO: 448016 - DNA, 75 bp, synthetic construct
  source 1..75: mol_type = other DNA
tcgctgtcactcagttctttacctctaattatattggtccggaactgccggatattacttcggcgctggtgagta

SEQ ID NO: 448017 - DNA, 75 bp, synthetic construct
  source 1..75: mol_type = other DNA
ggatgtgagcgaatttttgaggacaaaatcagtggcactaagtccgacagaccgggactgaaaaaactactcagg

SEQ ID NO: 448018 - DNA, 75 bp, synthetic construct
  source 1..75: mol_type = other DNA
gacgcacaggcggacgtcgaccgaagctgacaaaagaacagcatgagcaaatagcaaggctaatcaaaaacgggc

SEQ ID NO: 448019 - DNA, 75 bp, synthetic construct
  source 1..75: mol_type = other DNA
gtgttgcggcctggcgatacggttgttgtctggaaactggaccgaatgggacgttctctgattcatcttgttgag

SEQ ID NO: 448020 - DNA, 75 bp, synthetic construct
  source 1..75: mol_type = other DNA
ttttgatattggtctgtccacgctctataaaaatttccctcatcagcgacaaagaataaattgtgtcatccctta

SEQ ID NO: 448021 - DNA, 75 bp, synthetic construct
  source 1..75: mol_type = other DNA
tgaagttaacatgttgcgtgagattgaaataaatgcgaatacttctttacttcctaatgtgcggttaccgcgaat

SEQ ID NO: 448022 - DNA, 75 bp, synthetic construct
  source 1..75: mol_type = other DNA
ggactggaagtggccagagccaaagggcgtattggtggcagacgtccgaagctcaccgggagtgagtgggagcag

SEQ ID NO: 448023 - DNA, 75 bp, synthetic construct
  source 1..75: mol_type = other DNA
caacaaatgaccagaatacggaattgcagcgtaacgcgctggagtgtgcaggatgtgagctgatttttgaggaca

SEQ ID NO: 448024 - DNA, 75 bp, synthetic construct
  source 1..75: mol_type = other DNA
gttaaccgcagaagagtgggctcaggctggaaggttgattgctgcaggtgagtctagaaaacgtgtggctataat

SEQ ID NO: 448025 - DNA, 75 bp, synthetic construct
  source 1..75: mol_type = other DNA
ggatgcgagcggatttttgaggataaaatcagcggcacgaagtccgacagaccgggactgaaaaaactgctcaga

SEQ ID NO: 448026 - DNA, 75 bp, synthetic construct
  source 1..75: mol_type = other DNA
ggccgtttcttttttcatgtcatgggggccctggctgaaatggagcgcgaactaatagttgaacgtaccagggcg

SEQ ID NO: 448027 - DNA, 75 bp, synthetic construct
  source 1..75: mol_type = other DNA
gcgtgaatttccgaagcctgactgacagtattgataccagcaccccaatgggccgtttcttttttcatgccatgg

SEQ ID NO: 448028 - DNA, 75 bp, synthetic construct
  source 1..75: mol_type = other DNA
gtgtggatcactattgcaccgttcgtgacatgtgcaggatgcgagctgatttttgaagacaagataagcggtaca

SEQ ID NO: 448029 - DNA, 75 bp, synthetic construct
  source 1..75: mol_type = other DNA
atgcttattggctatgtacgcgtgtcaacaaatgaccagaacacggaattgcagagtaatgcgctggagtgtgca

SEQ ID NO: 448030 - DNA, 75 bp, synthetic construct
  source 1..75: mol_type = other DNA
aaatgccgattgatatggcatttgctgctgcgggctatggctttatttatggattatggcctattgcgtggatta

SEQ ID NO: 448031 - DNA, 75 bp, synthetic construct
  source 1..75: mol_type = other DNA
agagagcgaagacgttgcgcgcgaattaatcaaattaggatgtgttcaggctcaagggtatctgtaccagaaacc

SEQ ID NO: 448032 - DNA, 75 bp, synthetic construct
  source 1..75: mol_type = other DNA
gaagccgtggaagcggtgtttggtgttgatgaacgcaataaaatcgtcaggaaattgtgtcagcgaattgccgaa

SEQ ID NO: 448033 - DNA, 75 bp, synthetic construct
  source 1..75: mol_type = other DNA
cagcagttttggctaccgcaatctgcgcatccataagtctgctatttgtgaacctttgcagggggaaaacgcctg

SEQ ID NO: 448034 - DNA, 75 bp, synthetic construct
  source 1..75: mol_type = other DNA
gggattgctgcagctcgcgacaaaggcagagtaggtggacgccgccctaagttgaccaccgaacagtgggcacag

SEQ ID NO: 448035 - DNA, 75 bp, synthetic construct
  source 1..75: mol_type = other DNA
gacgcattggcggacgtcgcccgaagttgacaaaagaacaacacgagcaaatagcgaggctgattaaaaacggtc

SEQ ID NO: 448036 - DNA, 75 bp, synthetic construct
  source 1..75: mol_type = other DNA
cggggcgcgttattttttccgattttaacccgtcgcaacgtccgtggtctgtatcctcggatggctctgacagta

SEQ ID NO: 448037 - DNA, 75 bp, synthetic construct
  source 1..75: mol_type = other DNA
aaatcagtggcactaagtccgacaggccggggctgaaaaaactactcaggacactatcggcaggagacacgctgg

SEQ ID NO: 448038 - DNA, 75 bp, synthetic construct
  source 1..75: mol_type = other DNA
tggcgtggatctcaaaacagccagcggccgctataactttcgtaacatcctttccgcagcacaatatgaatctga

SEQ ID NO: 448039 - DNA, 75 bp, synthetic construct
  source 1..75: mol_type = other DNA
cagtattgataccagtaccccaatgggctgtttcttttttcatgtcatgggggccctggctgaaatggagcgcga

SEQ ID NO: 448040 - DNA, 75 bp, synthetic construct
  source 1..75: mol_type = other DNA
gaaatctatttttattatcctggcggtaatttattgaacgcatcagataaacttttttatctgccgtttgcgttc

SEQ ID NO: 448041 - DNA, 75 bp, synthetic construct
  source 1..75: mol_type = other DNA
ctgatagaagagttgcgccagcgtggcgtgaatttccgaagcctgactgatagtattgataccagtaccccaatg

SEQ ID NO: 448042 - DNA, 75 bp, synthetic construct
  source 1..75: mol_type = other DNA
tttcctcgctgtggatggctgggatgcgaaaagtaatgcagacggacagatgacggtggtgttgtctgccgcgct

SEQ ID NO: 448043 - DNA, 75 bp, synthetic construct
  source 1..75: mol_type = other DNA
gcgtagtatgcggcatcttgtcgtgttggtggaggagttgcgcgaacgaggcatcaactttcgtagtctgacgga

SEQ ID NO: 448044 - DNA, 75 bp, synthetic construct
  source 1..75: mol_type = other DNA
aacggtgctggtcaccatctggaccatgaagccgtttaaagcgttatttgctccgggcggcgcgttttattcact

SEQ ID NO: 448045 - DNA, 75 bp, synthetic construct
  source 1..75: mol_type = other DNA
ttcgccgtgggtgaatgttcctctgttggtctgcacggtgcaaaccgtctgggctccaactccctggcggaactg

SEQ ID NO: 448046 - DNA, 75 bp, synthetic construct
  source 1..75: mol_type = other DNA
atggcacgactcgcctggagtacagcgacgtgaagattactacgctgccgccagctaaacgcgtttacggtggcg

SEQ ID NO: 448047 - DNA, 75 bp, synthetic construct
  source 1..75: mol_type = other DNA
gctggtggcagcaaacaccagcggtggtgtgacgggtaagatgatctccccgcaatctatcgccgtggcttgtgc

SEQ ID NO: 448048 - DNA, 75 bp, synthetic construct
  source 1..75: mol_type = other DNA
caatccgcaggtgcgatggtggtgaataaaccatcttctggcggtcccgtgccttcagaatatagtctggggcaa

SEQ ID NO: 448049 - DNA, 75 bp, synthetic construct
  source 1..75: mol_type = other DNA
agcaaatcaacgtctctgacactctgctggtggcagcaaataccagcggcggcgtaactggcaagatgatctccc

SEQ ID NO: 448050 - DNA, 75 bp, synthetic construct
  source 1..75: mol_type = other DNA
caacaaatgaccagaacaccgatctacaacgtaatgcgttgaactgtgcaggatgtgagctgatgtttgaagaca

SEQ ID NO: 448051 - DNA, 75 bp, synthetic construct
  source 1..75: mol_type = other DNA
ggagaatcaagacagcgtattgcactgatttttgatgtaggcgtttctaccatttatcgaaaatttccggcaaat

SEQ ID NO: 448052 - DNA, 75 bp, synthetic construct
  source 1..75: mol_type = other DNA
ttggtggaggagttgcgcgaacgaggcatcaactttcgtagtctgacggattcaattgataccagcacaccaatg

SEQ ID NO: 448053 - DNA, 75 bp, synthetic construct
  source 1..75: mol_type = other DNA
ccaggatggcggcgaaaactgggcgaagatccgcgacgaaatgggtcagtccatggaagaaggttgcggtatcta

SEQ ID NO: 448054 - DNA, 75 bp, synthetic construct
  source 1..75: mol_type = other DNA
accgggattaaaacgcgctttaaagcgccttcaaaaaggtgacacgctggttgtctggaaactggatcgcctcgg

SEQ ID NO: 448055 - DNA, 75 bp, synthetic construct
  source 1..75: mol_type = other DNA
accttgtcagagggcgatacgcttgtggtctggaaactggatcgcctcgggtatctcaacgcaatacaaaaaatt

SEQ ID NO: 448056 - DNA, 75 bp, synthetic construct
  source 1..75: mol_type = other DNA
gtgatgattgacgcctcgcatttgccttatacgcagaacattgcacgagtcaaagaagtggtggatttttgccat

SEQ ID NO: 448057 - DNA, 75 bp, synthetic construct
  source 1..75: mol_type = other DNA
aaatcaacgttgcaacggagctgaaaaatgccttctcgcaggcgttaaaaaattacctgaccgagcaccctgaag

SEQ ID NO: 448058 - DNA, 75 bp, synthetic construct
  source 1..75: mol_type = other DNA
cgctttgatgtcagcgtcgaagcggagctggggcaacttggcggccaggaagatgatgtgcaagtcaatgaagcc

SEQ ID NO: 448059 - DNA, 75 bp, synthetic construct
  source 1..75: mol_type = other DNA
catcggcacggctcatgggatgtatgccagcgcaccggcgcttgattttcccgactggagaacattcgccagtgg

SEQ ID NO: 448060 - DNA, 75 bp, synthetic construct
  source 1..75: mol_type = other DNA
cgcgtgaatttgccgaggcaaccgggattgattccctggcggtcgccatcggcacggctcacggtatgtatgcca

SEQ ID NO: 448061 - DNA, 75 bp, synthetic construct
  source 1..75: mol_type = other DNA
atgattgacgcctcgcatttgccttttgcgcaaaatatttcacgggtcaaagaggtggtggatttttgccatcgc

SEQ ID NO: 448062 - DNA, 75 bp, synthetic construct
  source 1..75: mol_type = other DNA
aggatgtggtagacgcggtactggcggcgaaagcgcgtggaaatcgggtgattgcggttggcaccacctctgttc

SEQ ID NO: 448063 - DNA, 75 bp, synthetic construct
  source 1..75: mol_type = other DNA
agtttatagtgaaaaaccgggcgcggtagcggccccgactgccgggctgcattttgacgaacctttgctggaaaa

SEQ ID NO: 448064 - DNA, 75 bp, synthetic construct
  source 1..75: mol_type = other DNA
ctgcatattgccccgtcaacgtattaccactgtcagcaacagcgacattatccggataaacgcagtgcccgtgcg

SEQ ID NO: 448065 - DNA, 75 bp, synthetic construct
  source 1..75: mol_type = other DNA
aggcgcgtgaatttgccgaggcaaccggaattgattccctggcggtcgccatcggcacggctcacggtatgtatg

SEQ ID NO: 448066 - DNA, 75 bp, synthetic construct
  source 1..75: mol_type = other DNA
catttactcatgctggtacagaaaatctgttggcgctggtcagcgcgatggcgaagcaatatcaccatccactgg

SEQ ID NO: 448067 - DNA, 75 bp, synthetic construct
  source 1..75: mol_type = other DNA
cgggcccgtcttaacctgaaatcccctgtgttctcacagaaccagacggtgaggcgtgccatggagcagctacgg

SEQ ID NO: 448068 - DNA, 75 bp, synthetic construct
  source 1..75: mol_type = other DNA
cccgaagcgaccgatccccgggattatttacagtcggcaaaattcgcaatgcgcgatgtggtgcgcaaagtgatt

SEQ ID NO: 448069 - DNA, 75 bp, synthetic construct
  source 1..75: mol_type = other DNA
acaatactgatattgaattccttgcttcaatgtatgcatcagctaaattatcggcaaacacaagccccataatgc

SEQ ID NO: 448070 - DNA, 75 bp, synthetic construct
  source 1..75: mol_type = other DNA
atataatagtaagcattccaagagataagaaaaaacatttttataatcgagttaaacattatctcaacttatatt

SEQ ID NO: 448071 - DNA, 75 bp, synthetic construct
  source 1..75: mol_type = other DNA
caaaactttgtggtataccttcaagccagtcatcacgcaggcttcgtgatcgcatcagtccttccctgaagcgta

SEQ ID NO: 448072 - DNA, 75 bp, synthetic construct
  source 1..75: mol_type = other DNA
attctgtccacacttacgtgggtggactggtataacaatcgacgattgctggaaaggctgggccatatcccaccg

SEQ ID NO: 448073 - DNA, 75 bp, synthetic construct
  source 1..75: mol_type = other DNA
cagcgataaaggctctcagtatgtgtcactggcctatacggagcgactaaaagaagcaaaactgctggcatcaac

SEQ ID NO: 448074 - DNA, 75 bp, synthetic construct
  source 1..75: mol_type = other DNA
aacgcgatggcggagagcatcaatggcctttacaaagcggaggtaatacaccgtaagcgctggaaaaaccggaca

SEQ ID NO: 448075 - DNA, 75 bp, synthetic construct
  source 1..75: mol_type = other DNA
gcgagaagcagacaaagaagcccgcgatcacgtccgcaaagatgagcaagtgatcgggatttttcatccggacta

SEQ ID NO: 448076 - DNA, 75 bp, synthetic construct
  source 1..75: mol_type = other DNA
acggaagaactgacacgtctttccctggcccgtgcagagggattcgataaggttgagatcaccggcccccggctg

SEQ ID NO: 448077 - DNA, 75 bp, synthetic construct
  source 1..75: mol_type = other DNA
gttgaactgccttttgtcgaatttgcaaaactgtgcggtataccttcaagccagtcatcgcgcaggcttcgtgaa

SEQ ID NO: 448078 - DNA, 75 bp, synthetic construct
  source 1..75: mol_type = other DNA
cggctgtttgagctctaccaatttgaccggaaagtgctgctgcagctcaaggccatcaatgccctgaagcgccgg

SEQ ID NO: 448079 - DNA, 75 bp, synthetic construct
  source 1..75: mol_type = other DNA
gcgtgaagccgataaagaagcccgcgatcacgttcgcaaagatgagcaagtgattgggatttttcatccggacta

SEQ ID NO: 448080 - DNA, 75 bp, synthetic construct
  source 1..75: mol_type = other DNA
gcgagaagcagacaaagaagtccgcgatcacgttcgcaaagatgagcaagtgatcgggatttttcatccggacta

SEQ ID NO: 448081 - DNA, 75 bp, synthetic construct
  source 1..75: mol_type = other DNA
cgttgttgaaatccctggaaagctggttgcgtgaaaagatgaagaccctgtcgcgacacttagagttggcgaagg

SEQ ID NO: 448082 - DNA, 75 bp, synthetic construct
  source 1..75: mol_type = other DNA
tcgttggcagcatagagaccaatattaaaacagtgattctcctaccatcggaatgcgttgacgggctgcgggtgc

SEQ ID NO: 448083 - DNA, 75 bp, synthetic construct
  source 1..75: mol_type = other DNA
agaaccgtcgagatactgcaatacaccttacgcaaaggcaccggtgccgcttttcacgccatcatgcaggaaatc

SEQ ID NO: 448084 - DNA, 75 bp, synthetic construct
  source 1..75: mol_type = other DNA
aagaacttggagtaaacgttaacgagctgaggcggttatcgagtgttgcgcctaaaaaatataaagtctacacaa

SEQ ID NO: 448085 - DNA, 75 bp, synthetic construct
  source 1..75: mol_type = other DNA
atgagttcaccggaagccctgttaacggcctgcgccgccagccaggaggaaaggctgagcctcatttcccgcgca

SEQ ID NO: 448086 - DNA, 75 bp, synthetic construct
  source 1..75: mol_type = other DNA
tcattggcagcatagaaaccagcattaaaacagtgatgaatctaccgccggaaagcgtggaaggtctgcgggtgc

SEQ ID NO: 448087 - DNA, 75 bp, synthetic construct
  source 1..75: mol_type = other DNA
tggcgcagcggcccgcgcgaagacatcattggcagcatagagaccagcacgaaaacagtgatgaatctaccacct

SEQ ID NO: 448088 - DNA, 75 bp, synthetic construct
  source 1..75: mol_type = other DNA
tgataagataggccttggcgcgctaatcggcctttccgacaactggcgcgttgactgctacatggttgccgagca

SEQ ID NO: 448089 - DNA, 75 bp, synthetic construct
  source 1..75: mol_type = other DNA
cgccgagttaaagcaacttggtctggatggcgtgatggtttatcaggagacatatcacgaggcgacttatgcccg

SEQ ID NO: 448090 - DNA, 75 bp, synthetic construct
  source 1..75: mol_type = other DNA
atgagatgggcgcaaaatctttccgtattacttctgtaaccggtccgaatatccatggaacagcagtaatttata

SEQ ID NO: 448091 - DNA, 75 bp, synthetic construct
  source 1..75: mol_type = other DNA
atgaacgagcctcgttgtattgctcagttattgcgtaacgaaagccccagggcgattgacttcaccatcacccac

SEQ ID NO: 448092 - DNA, 75 bp, synthetic construct
  source 1..75: mol_type = other DNA
tcccgcgcctgcgcccgtgtactggcgggattgagccagcgtcgattatggatgaacgccagttagtgcaaacta

SEQ ID NO: 448093 - DNA, 75 bp, synthetic construct
  source 1..75: mol_type = other DNA
gctgccgcgttaaccgctcagggtttgcagccggtatggaaagactgggacagctatctgggacgcccatcgcaa

SEQ ID NO: 448094 - DNA, 75 bp, synthetic construct
  source 1..75: mol_type = other DNA
actggctgcatccatttacctccggatctgaaaccggggacgatcctgcatacgatgataattttcagctgatgc

SEQ ID NO: 448095 - DNA, 75 bp, synthetic construct
  source 1..75: mol_type = other DNA
ggcattaccggataaaaagttatcagtctgccctggcagacaaagggttagtgcagagcatgtcacgcaagggca

SEQ ID NO: 448096 - DNA, 75 bp, synthetic construct
  source 1..75: mol_type = other DNA
atgcaacagctcggcctgaagtctcctgtgcgagctccctgtgagaaatgggtgacagatatcaccgaattcagg

SEQ ID NO: 448097 - DNA, 75 bp, synthetic construct
  source 1..75: mol_type = other DNA
gtttgaagtaaaagcccggcaactgaaactgctgcgtctgcgggcgcaccgctatgcggataaagccctgctgaa

SEQ ID NO: 448098 - DNA, 75 bp, synthetic construct
  source 1..75: mol_type = other DNA
cccgcttttggcgaagatccgttacgtgtactgcgcgtggcgcgttttgctgcacgttatgcccacctcggtttt

SEQ ID NO: 448099 - DNA, 75 bp, synthetic construct
  source 1..75: mol_type = other DNA
aaggtgtggagattcgcgaagagctgacccgccgccgaattgcagcggtagccaactggaaggaacaacgctgcc

SEQ ID NO: 448100 - DNA, 75 bp, synthetic construct
  source 1..75: mol_type = other DNA
ccctcaccacccgcaatccccaggtgttcttccaggtactgcgcgattgcggcgcactgcgcgttttattcccgg

SEQ ID NO: 448101 - DNA, 75 bp, synthetic construct
  source 1..75: mol_type = other DNA
accgcatagcacgatggtgtttatcgggattcagttgccggaggatgagattcgggcggcgtttgcgggactcaa

SEQ ID NO: 448102 - DNA, 75 bp, synthetic construct
  source 1..75: mol_type = other DNA
cacgagaatagaggccgatacggataccgtagggtaacgctgtctcttcatcgagaagggaaacagattaaccat

SEQ ID NO: 448103 - DNA, 75 bp, synthetic construct
  source 1..75: mol_type = other DNA
atgaatgccgaaaaatcgccggtaaaccataacgtagaccacgaagagatcgcgaaatttgaagccgttgcttcc

SEQ ID NO: 448104 - DNA, 75 bp, synthetic construct
  source 1..75: mol_type = other DNA
agggctggcggacaaaaactgtacctgtctccgatacttgatttgtttaacggagaaatcgtggcgtgggaaacg

SEQ ID NO: 448105 - DNA, 75 bp, synthetic construct
  source 1..75: mol_type = other DNA
gaaggagaaaaaccgctgctccacagtgatcaagggtggcattaccggataaaaagttatcagtctgccctggca

SEQ ID NO: 448106 - DNA, 75 bp, synthetic construct
  source 1..75: mol_type = other DNA
gctggagtggctggcgggggaaaagatgctcgacagtcttgcccgctacccggaagtggcaaaagaggattttgc

SEQ ID NO: 448107 - DNA, 75 bp, synthetic construct
  source 1..75: mol_type = other DNA
agggagtactggtgactcgtatgacaacgcgatggcggagagcatcaatggcctttacaaagcggaggtaataca

SEQ ID NO: 448108 - DNA, 75 bp, synthetic construct
  source 1..75: mol_type = other DNA
ccgcgtaaaccgtcagttcgtggcagaacgccctgaccagctgtgggtggctgattttacttacgtcagcacatg

SEQ ID NO: 448109 - DNA, 75 bp, synthetic construct
  source 1..75: mol_type = other DNA
aaaggttctcagtatgtatcgctggcctacacacagcggcttaaggaagccggattactggcatcaacaggaagt

SEQ ID NO: 448110 - DNA, 75 bp, synthetic construct
  source 1..75: mol_type = other DNA
ccgtacatcgaccgcccagacgaagatgccgaccgcgaactttatcaaacggtttatagcgaaaaacctggcgcg

SEQ ID NO: 448111 - DNA, 75 bp, synthetic construct
  source 1..75: mol_type = other DNA
aggatgtggtagacgcggtgctggcagcgaaagcgcgcggaaatcgggtaattgcggttggcaccacctctgtgc

SEQ ID NO: 448112 - DNA, 75 bp, synthetic construct
  source 1..75: mol_type = other DNA
aagctgcgtaagctgtacggggtcggaccggtatgcagtgaactacatattgccccgtcaacgtattaccactgt

SEQ ID NO: 448113 - DNA, 75 bp, synthetic construct
  source 1..75: mol_type = other DNA
tcgtgctggatgcactggagcaggcgttatgggcccgtcgaccgtccggcacggtccatcacagtgataaaggtt

SEQ ID NO: 448114 - DNA, 75 bp, synthetic construct
  source 1..75: mol_type = other DNA
gaagtggaactggccacactcacgtgggtggactggtataacaatcgacgattgctgggaaggctgggtcatatc

SEQ ID NO: 448115 - DNA, 75 bp, synthetic construct
  source 1..75: mol_type = other DNA
gtatgtatcgctggcctacacacagcggcttaaggaagccggattactggcatcaacaggaagtacaggcgactc

SEQ ID NO: 448116 - DNA, 75 bp, synthetic construct
  source 1..75: mol_type = other DNA
gcgctggagcaggcgtgtgggcccgtcgtccgtctggcaccatccatcacagcgataaaggctctcagtatgtgt

SEQ ID NO: 448117 - DNA, 75 bp, synthetic construct
  source 1..75: mol_type = other DNA
agcagtacggggtcggaccggtatgcagtgaactgcatattgccccgtcaacgtattaccattgtcagcagcagc

SEQ ID NO: 448118 - DNA, 75 bp, synthetic construct
  source 1..75: mol_type = other DNA
cacactcacgtgggtggactggtataataatcgacgattgctggaaaggctgggccacatccctccggcagaagc

SEQ ID NO: 448119 - DNA, 75 bp, synthetic construct
  source 1..75: mol_type = other DNA
tgggcgatgacgaaagcattaaagcaacaatgacagcccgccacggcgcattgtttgaagtcgaatttaatgatg

SEQ ID NO: 448120 - DNA, 75 bp, synthetic construct
  source 1..75: mol_type = other DNA
actcctggcatcaacagggagtactggcgactcgtatgacaacgcgatggcggagagcatcaatggcctttacaa

SEQ ID NO: 448121 - DNA, 75 bp, synthetic construct
  source 1..75: mol_type = other DNA
acttctggcatcaacaggcagtacgggcgactcgtatgacaacgcgatggcggagagcatcaatggcctttacaa

SEQ ID NO: 448122 - DNA, 75 bp, synthetic construct
  source 1..75: mol_type = other DNA
ctcatcgtctatggaaacgacattcgtgctggatgcgctggagcaggcgttttgggcccggcgaccgtccggcac

SEQ ID NO: 448123 - DNA, 75 bp, synthetic construct
  source 1..75: mol_type = other DNA
cactcacgtgggtggactggtataacaatcgacgattgctgggaaggctgggccatactcctccggcagaagcag

SEQ ID NO: 448124 - DNA, 75 bp, synthetic construct
  source 1..75: mol_type = other DNA
ccgcgtaaaccgtcagttcgtggcagaacgccctgaccagttgtgggtggctgattttacttacgtcagtacatg

SEQ ID NO: 448125 - DNA, 75 bp, synthetic construct
  source 1..75: mol_type = other DNA
cactggactggatacttaacccgaagaattggggctctgtatacgagcaggcaatcaacgagcacaagcagcgta

SEQ ID NO: 448126 - DNA, 75 bp, synthetic construct
  source 1..75: mol_type = other DNA
gaacgacctgaccagctgtgggtggctgattttacttacgtcagcacatggcagggcttcgtctatgtggcgttt

SEQ ID NO: 448127 - DNA, 75 bp, synthetic construct
  source 1..75: mol_type = other DNA
ccggatatatcgtgggatggcgggtctcatcgtccatggaaacgacattcgtgctggatgcgctggagcagtcgt

SEQ ID NO: 448128 - DNA, 75 bp, synthetic construct
  source 1..75: mol_type = other DNA
agccattaccgcaggcgaccgcgtaaaccgtcagttcggggcagaacgtcctgaccagttgtgggtggctgattt

SEQ ID NO: 448129 - DNA, 75 bp, synthetic construct
  source 1..75: mol_type = other DNA
ctcatcgtctatggaaacgacattcgtgctggatgcgctggagcaggcgttttgggcccgacggccgtccggcac

SEQ ID NO: 448130 - DNA, 75 bp, synthetic construct
  source 1..75: mol_type = other DNA
ctcatcgtctatggaaacgacattcgtgctggatgctctggagcaggcgttttgggcccgtcggccgtccggcac

SEQ ID NO: 448131 - DNA, 75 bp, synthetic construct
  source 1..75: mol_type = other DNA
ctcatcgtctatggaaacgacattcgtgctggatgcactggagcaggcgttttgggcccggcggccgtccggcac

SEQ ID NO: 448132 - DNA, 75 bp, synthetic construct
  source 1..75: mol_type = other DNA
gaacgacctgaccagttgtgggtggctgattttacttacggtgtgcccggagttcagggcgggcatggatgctta

SEQ ID NO: 448133 - DNA, 75 bp, synthetic construct
  source 1..75: mol_type = other DNA
cagaagtggaactggccacactcacgtgggtggactggtataacaatcgatgattgctggaaaggccgggccata

SEQ ID NO: 448134 - DNA, 75 bp, synthetic construct
  source 1..75: mol_type = other DNA
cagaagtggaactggccacactcacgtgggtggactggtataacaatcgaagattgctggtaaggcagggccata

SEQ ID NO: 448135 - DNA, 75 bp, synthetic construct
  source 1..75: mol_type = other DNA
gcactgtggcacgtctcatggcggttatgggacttgccggtgttctccgggtaaaaaggtccgtacgaccatcag

SEQ ID NO: 448136 - DNA, 75 bp, synthetic construct
  source 1..75: mol_type = other DNA
aacaatcgacgattgctgggaaggctgaggcatactcctccggcagaagcagaaaaagcgtattatgcttctatc

SEQ ID NO: 448137 - DNA, 75 bp, synthetic construct
  source 1..75: mol_type = other DNA
tttaagtttaataatttaaataccaataggcagccagaaatgattaagccattttctgatataatattgagagag

SEQ ID NO: 448138 - DNA, 75 bp, synthetic construct
  source 1..75: mol_type = other DNA
cagaagtggaactggccacactcacgtgggtggactggtataacaatcgacgattgctggaaaggctgggccata

SEQ ID NO: 448139 - DNA, 75 bp, synthetic construct
  source 1..75: mol_type = other DNA
gcagggcttcgtctatgtggcgtttatcattgatgtgtttgctggatacatcgtggggtggcgggtctcatcgtc

SEQ ID NO: 448140 - DNA, 75 bp, synthetic construct
  source 1..75: mol_type = other DNA
aggaagccggattactggcatcaacaggaagtacaggcgattcgtatgacaacgcgatggcggagagcatcaatg

SEQ ID NO: 448141 - DNA, 75 bp, synthetic construct
  source 1..75: mol_type = other DNA
tggaagggatttatccaaatcccgttaaacccacaacttgatgttgtggcaatgactatacttaattcggctact

SEQ ID NO: 448142 - DNA, 75 bp, synthetic construct
  source 1..75: mol_type = other DNA
atgcgtgtgttaatgctaatgtatgcatacattagcattaacatagagcagattctggcgcgttgcgcccgtagt

SEQ ID NO: 448143 - DNA, 75 bp, synthetic construct
  source 1..75: mol_type = other DNA
acgtattaccactgtcagcaacagcgacatcatcctgataaacgcagtgcacatgcccagcgcgatgactggctg

SEQ ID NO: 448144 - DNA, 75 bp, synthetic construct
  source 1..75: mol_type = other DNA
acgtattaccactgtcagcaacagcgacatcatcctgataaacgcagtccacatgcgcagcgcgatgactggctg

SEQ ID NO: 448145 - DNA, 75 bp, synthetic construct
  source 1..75: mol_type = other DNA
ggactggtataacaatcgacgtttactggaaaggctgtggcacatccctccggctgaagcagaaaagcttattat

SEQ ID NO: 448146 - DNA, 75 bp, synthetic construct
  source 1..75: mol_type = other DNA
cgattgctgggaaggctgggtcatatccctccggcagaagcagaaaaagcttattatgcttccatcggaaataat

SEQ ID NO: 448147 - DNA, 75 bp, synthetic construct
  source 1..75: mol_type = other DNA
acaacgcgatggcggagagcatcaatggtctttacaaagcggaggtaatacaccgtaagagctggaaaaaccgtg

SEQ ID NO: 448148 - DNA, 75 bp, synthetic construct
  source 1..75: mol_type = other DNA
cagtgcgcagcacgacgactggctgaagagagagatacagcgcgtatacgatgaaaatcaatcaggtgtacggtg

SEQ ID NO: 448149 - DNA, 75 bp, synthetic construct
  source 1..75: mol_type = other DNA
ttaccattgtcagcagcagcggcatcatcctgataaacgcagtgcccgtgcgcagcgcgatgactggctgaagag

SEQ ID NO: 448150 - DNA, 75 bp, synthetic construct
  source 1..75: mol_type = other DNA
atgaaaatcatcaggtgtacggtgtgcgtaaagtctggcgccagttgttacgggaaggtatcagggtggccagat

SEQ ID NO: 448151 - DNA, 75 bp, synthetic construct
  source 1..75: mol_type = other DNA
gttctccggggtaaaaaggtccgtacgaccatcagccggaaagctgttgccgcaggcgaccgcgtaaaccgtcag

SEQ ID NO: 448152 - DNA, 75 bp, synthetic construct
  source 1..75: mol_type = other DNA
gacatcatccggataaacgcagttcccgtgcgcagcgcgatgactggctgaagaaagagatacagcgcgtatacg

SEQ ID NO: 448153 - DNA, 75 bp, synthetic construct
  source 1..75: mol_type = other DNA
atgccactgctggataagctgcgtaagctgtacggggtcggaccgctatgcagcgaactgcatattgccccgtca

SEQ ID NO: 448154 - DNA, 75 bp, synthetic construct
  source 1..75: mol_type = other DNA
aagaagcaaaactgctagcatcaacagggagtacaggcgactcgtatggcagcgcgatggcggagagcatcaatg

SEQ ID NO: 448155 - DNA, 75 bp, synthetic construct
  source 1..75: mol_type = other DNA
gacgattgctgggaaggctgggtcatatccctccggcagaagcagaaaaagcttattatgcttccatcagaaacg

SEQ ID NO: 448156 - DNA, 75 bp, synthetic construct
  source 1..75: mol_type = other DNA
acgatgaaaatcatcaggtatacggtgagcataaagtctggcatcagttgttacgggaagaaatcagggtagcca

SEQ ID NO: 448157 - DNA, 75 bp, synthetic construct
  source 1..75: mol_type = other DNA
agctgtacggggtcggaccggtatgcagtgaactccatattgccccgtcaacgtattaccactgtcagcagcagc

SEQ ID NO: 448158 - DNA, 75 bp, synthetic construct
  source 1..75: mol_type = other DNA
tgaaaacttcaacagcaacaaccaacagtcatactggtattcaacctgtaagctgcaggtactgaagaacggaca

SEQ ID NO: 448159 - DNA, 75 bp, synthetic construct
  source 1..75: mol_type = other DNA
ctttaagtgatgagttcgaggcaaaagagttttgtcaaaaggaatattattttaaaatgcttgataatattatga

SEQ ID NO: 448160 - DNA, 75 bp, synthetic construct
  source 1..75: mol_type = other DNA
ttacaggggcaactggacgtcaaggttgaagaagaggacgggcgcgtcacgcaatggcaagttgcatctaatagc

SEQ ID NO: 448161 - DNA, 75 bp, synthetic construct
  source 1..75: mol_type = other DNA
tctgtatcagcatggtgggtaaatggttggtatcccacagcaagtatcagcgatttgctggttgttgtgatgaag

SEQ ID NO: 448162 - DNA, 75 bp, synthetic construct
  source 1..75: mol_type = other DNA
cactgattatttaaataataacaatcattttgagcttgtttctggttggggatacggaaaagcaggttttttata

SEQ ID NO: 448163 - DNA, 75 bp, synthetic construct
  source 1..75: mol_type = other DNA
atgactatgcggggatcagcatcggcgggcgcgtgctggcggtgaacaaccagacgcggacactgacgctcgacc

SEQ ID NO: 448164 - DNA, 75 bp, synthetic construct
  source 1..75: mol_type = other DNA
gcaacgaataactattgaatttagtgaagagtttaagcaaatcgcaataacagatataccatcaaggatctatcc

SEQ ID NO: 448165 - DNA, 75 bp, synthetic construct
  source 1..75: mol_type = other DNA
gatagtgcggaaaaacggtgctgaaatttataaccgtaccgcgctggataatacgctgatttataccggtgtgat

SEQ ID NO: 448166 - DNA, 75 bp, synthetic construct
  source 1..75: mol_type = other DNA
gtcgcggattgagctgacgtcgggctattttcagataaccgcaacgccgcatcttgccgtttatgatccgacggt

SEQ ID NO: 448167 - DNA, 75 bp, synthetic construct
  source 1..75: mol_type = other DNA
atgcgttcggttgcaccagtcgcggtcaggcccaccgtgccgggctgtgggtgataaagaccggactgctggaaa

SEQ ID NO: 448168 - DNA, 75 bp, synthetic construct
  source 1..75: mol_type = other DNA
tgtttgcggtgagtatcacctcgtccggcaatcccccggcgttttccctgacgccggagggcaggctgaccgcaa

SEQ ID NO: 448169 - DNA, 75 bp, synthetic construct
  source 1..75: mol_type = other DNA
atcacgaacacggcacaggtggaaacctctgcccgttatctggggactggcagtcagtggactgtctccggcccg

SEQ ID NO: 448170 - DNA, 75 bp, synthetic construct
  source 1..75: mol_type = other DNA
atgagaatttcaacagtaataaccaacagtcatactggtattcaacctgccggttaagagtgacccgcaatggtc

SEQ ID NO: 448171 - DNA, 75 bp, synthetic construct
  source 1..75: mol_type = other DNA
atctggcacaggcgaaatgggacacgccgcgggtggtgaagggtgtgcgcttcagtctgcgcctgaccagcggaa

SEQ ID NO: 448172 - DNA, 75 bp, synthetic construct
  source 1..75: mol_type = other DNA
tcaaagggggacaggaatccatcggaagtccgcctgctggttcagattcaacgtaacggtggctgggtgacggaa

SEQ ID NO: 448173 - DNA, 75 bp, synthetic construct
  source 1..75: mol_type = other DNA
ataacggtcagcttgcgcctgatctggctgaaatcaggacgtccattacgaatgtcagcaatgaaatcacgcaga

SEQ ID NO: 448174 - DNA, 75 bp, synthetic construct
  source 1..75: mol_type = other DNA
atgatgcatccggctatctggattttttcaaaggcgagatagggaaaagccatctggctcaggagctgtggacgc

SEQ ID NO: 448175 - DNA, 75 bp, synthetic construct
  source 1..75: mol_type = other DNA
cggtcagacgctgacgttcgttcaggaccgcccgtcggatgtggtgtggccgtacaccaacagcgatgtggtggt

SEQ ID NO: 448176 - DNA, 75 bp, synthetic construct
  source 1..75: mol_type = other DNA
cgaatggcaacacaaagccgatgtttgttggtcagggcgatcagatattcatgaacgaagtgttcctgaaatacc

SEQ ID NO: 448177 - DNA, 75 bp, synthetic construct
  source 1..75: mol_type = other DNA
ttgaagaatcagacaccagttcttgatgcttccttggaggctgttaaaaggctgaaaactaagcttgataaaact

SEQ ID NO: 448178 - DNA, 75 bp, synthetic construct
  source 1..75: mol_type = other DNA
aatacaccctgacggtcagggcgataaacagctacggccagcagggcgaacctgccaccaccacgttccggatta

SEQ ID NO: 448179 - DNA, 75 bp, synthetic construct
  source 1..75: mol_type = other DNA
cctgcgctacgggcgcaacctgctgaagatggatgcgttcggctgtaccagccgcggtcaggcccaccgtgccgg

SEQ ID NO: 448180 - DNA, 75 bp, synthetic construct
  source 1..75: mol_type = other DNA
atgcgttcggctgtaccagccgtggtcaggctcaccgggcaggcctgtgggtgataaagaccgaactgctggaaa

SEQ ID NO: 448181 - DNA, 75 bp, synthetic construct
  source 1..75: mol_type = other DNA
gtgataaagaccggactgctggaaacgcagacggtggatttcacgctcgggtcacaggggctgcgtcacaccccc

SEQ ID NO: 448182 - DNA, 75 bp, synthetic construct
  source 1..75: mol_type = other DNA
agctgcaggtattaaataacggtcgggtgatttttcatgagcctgcgacggacactgcgagggttttttcatcgg

SEQ ID NO: 448183 - DNA, 75 bp, synthetic construct
  source 1..75: mol_type = other DNA
caccgctttgaccggcagattataatcccgccgataatctatgtcgggtcaaaacaggaatcccgcaccagtaat

SEQ ID NO: 448184 - DNA, 75 bp, synthetic construct
  source 1..75: mol_type = other DNA
ccacctcgcagtacctgacgtcggtgattctgaataatctccctgagcgcccctttaacatccgggtggtcaggg

SEQ ID NO: 448185 - DNA, 75 bp, synthetic construct
  source 1..75: mol_type = other DNA
taccagcggcggtaatcctccggcattttccctgacaccggacggaaaactgaccgctaaaaatgcagatatcag

SEQ ID NO: 448186 - DNA, 75 bp, synthetic construct
  source 1..75: mol_type = other DNA
acacagaccgtcagccagagcacggaggaaaacgccaggcagatagcgcaggtccgccagtacgtggatgacaaa

SEQ ID NO: 448187 - DNA, 75 bp, synthetic construct
  source 1..75: mol_type = other DNA
accagccggttccggatggctttggtggtacagaaccccgtatgacctttaatgcgtacctgtcacaacagcgta

SEQ ID NO: 448188 - DNA, 75 bp, synthetic construct
  source 1..75: mol_type = other DNA
accagacggtcccggatggtttcgggggcacagagccgcggatgactttcaatgcgtacctgtcacagcagcgta

SEQ ID NO: 448189 - DNA, 75 bp, synthetic construct
  source 1..75: mol_type = other DNA
acgcggattaccgatatcaggcaggttgaaaccagcgcgcgctatcttggcacggcgctgtactggatagccgcc

SEQ ID NO: 448190 - DNA, 75 bp, synthetic construct
  source 1..75: mol_type = other DNA
ggagaacggcaacaccacgccgctgtttgtggcgcaggggaatcagctgttcatgaacgacgtgttcctgaagcg

SEQ ID NO: 448191 - DNA, 75 bp, synthetic construct
  source 1..75: mol_type = other DNA
aggcactggccatcgcgcaggtgaaccagaaagtggaccgggtgagcagtgaaatctcacagactgtcagccagg

SEQ ID NO: 448192 - DNA, 75 bp, synthetic construct
  source 1..75: mol_type = other DNA
gtagtgataaagatggtggtgcagagggcgggcaaggcaatggcggggtcggtggtggcgatggaaatgattctg

SEQ ID NO: 448193 - DNA, 75 bp, synthetic construct
  source 1..75: mol_type = other DNA
aaacgcatcacgaacacagcacaggtggaaaaatctgcccgttatctggggacaggcagtcagtggactgtccag

SEQ ID NO: 448194 - DNA, 75 bp, synthetic construct
  source 1..75: mol_type = other DNA
gattgaaggcgatattgtcaaaacggtcagcaagtctttcccccgcacgagcacttatgccagcggcaccattac

SEQ ID NO: 448195 - DNA, 75 bp, synthetic construct
  source 1..75: mol_type = other DNA
ggtcgtaatgtcacgaagatggatgcctttggttgtaccagtcgggggcaggcacaccgagccgggctgtggctg

SEQ ID NO: 448196 - DNA, 75 bp, synthetic construct
  source 1..75: mol_type = other DNA
ttgtggaagccagcgggcagcccagcaatgatggtgaagggtatctggaaattttccgggggctgatagatgaga

SEQ ID NO: 448197 - DNA, 75 bp, synthetic construct
  source 1..75: mol_type = other DNA
ccgtccgcctgctgattcagttacagcgtaacggtaactgggtgacggaaaaggatgtcaccattaatggcaaga

SEQ ID NO: 448198 - DNA, 75 bp, synthetic construct
  source 1..75: mol_type = other DNA
accgcttcggccagatgacggcggtccaccgcgaggaaggcatcagcctttaccgccgctatgacaaccgtggcc

SEQ ID NO: 448199 - DNA, 75 bp, synthetic construct
  source 1..75: mol_type = other DNA
gtgccggtattgagaacacccccgacggcatgcagagtcaggtgctgctggcggcagacaggattgcgatgatta

SEQ ID NO: 448200 - DNA, 75 bp, synthetic construct
  source 1..75: mol_type = other DNA
tcaggagctgtggacgcagattgataacggtcagcttgcgcctgacctggctgaaatcaggacgtccattacgga

SEQ ID NO: 448201 - DNA, 75 bp, synthetic construct
  source 1..75: mol_type = other DNA
agcacctcaaaaacaccatcatacactaaatcagtaagttggcagcatcaccaaaattgccaacatgcggtacaa

SEQ ID NO: 448202 - DNA, 75 bp, synthetic construct
  source 1..75: mol_type = other DNA
cattcaggtaccgtcaaactatgacccggaaaaacgcacgtacagcggtatctgggacggcagtctgaaaccggc

SEQ ID NO: 448203 - DNA, 75 bp, synthetic construct
  source 1..75: mol_type = other DNA
tcagcttgagcgtggtggtaaatggatgacggaaaaggatgtcaccattaacggcaagaccacctcgcagttcct

SEQ ID NO: 448204 - DNA, 75 bp, synthetic construct
  source 1..75: mol_type = other DNA
cgcggtcaggcccaccgtgccgggctgtgggtgataaagaccggactgctggaaacgcagacggtggatttcacg

SEQ ID NO: 448205 - DNA, 75 bp, synthetic construct
  source 1..75: mol_type = other DNA
cacccgcgctacgggatgggaaaacgcctgggggcagcggatgtggacaagtgggcactgtatgccatcgggcag

SEQ ID NO: 448206 - DNA, 75 bp, synthetic construct
  source 1..75: mol_type = other DNA
acagcccgaatcagcagtcgtactggtattccacctgtaagctgcaggtgctgaagaacggggttgagattttcc

SEQ ID NO: 448207 - DNA, 75 bp, synthetic construct
  source 1..75: mol_type = other DNA
agcagatacagcgcgtgcagaaggacacaaatgatgacctggctgcgctgtacatgctgaaggttcaaaaaacga

SEQ ID NO: 448208 - DNA, 75 bp, synthetic construct
  source 1..75: mol_type = other DNA
tcaaagggtgaccgtaatccctcttctgtccggctgctgattcagcttgagcgtaacggtaactgggggacggag

SEQ ID NO: 448209 - DNA, 75 bp, synthetic construct
  source 1..75: mol_type = other DNA
ttcggtgtcagcatggctggtaaatgactggtatcccacagcaagtatcagcgatttgctggttgtggtgatgaa

SEQ ID NO: 448210 - DNA, 75 bp, synthetic construct
  source 1..75: mol_type = other DNA
atcagatatacatgaatgaagtgttcctgaaatatctgacggctcccaccattaccagcggcggtaatcctccgg

SEQ ID NO: 448211 - DNA, 75 bp, synthetic construct
  source 1..75: mol_type = other DNA
ggtgaacctgattaacggcagcggtaagccggtgagtgtggacatcaccgcacaccccgcgccggaccggataca

SEQ ID NO: 448212 - DNA, 75 bp, synthetic construct
  source 1..75: mol_type = other DNA
tggttttcggaaacgcggattaccgatatcaggcaggttgaaaccacagcccgctaccttggcacggggctgtac

SEQ ID NO: 448213 - DNA, 75 bp, synthetic construct
  source 1..75: mol_type = other DNA
tggacgcagattgataacggtcagcttgcgccggacctggctgaaatcaggacgtccattacgaatgtcagcaat

SEQ ID NO: 448214 - DNA, 75 bp, synthetic construct
  source 1..75: mol_type = other DNA
tgcgcctgaccagtggtaagggaacggatgccagactggtgaccaccgccatcaccgcagacacggagcaccgtt

SEQ ID NO: 448215 - DNA, 75 bp, synthetic construct
  source 1..75: mol_type = other DNA
aaaacacggacggcacctttgccatcacggcggtgcagcacgtaccggaaaaagaagccatcgtggataacggtg

SEQ ID NO: 448216 - DNA, 75 bp, synthetic construct
  source 1..75: mol_type = other DNA
tcagcttgcgcctgacctggcggaaatcagaacgtccatcacggatgtcagtaatgaaatcacgcagaccgtcaa

SEQ ID NO: 448217 - DNA, 75 bp, synthetic construct
  source 1..75: mol_type = other DNA
ccggaaaaacgcacgtacagtggtatctgggacggcagtctgaaaccggcatacagcaacaacccggcctggtgc

SEQ ID NO: 448218 - DNA, 75 bp, synthetic construct
  source 1..75: mol_type = other DNA
acagtatgtgggccgtgaaactgcagcagatgcaggatggtcgcctttatattgcgggtatcggtgccggtattg

SEQ ID NO: 448219 - DNA, 75 bp, synthetic construct
  source 1..75: mol_type = other DNA
gaatgcgaactccgggacgctcaacaacgtcacgattaacgagaactgtcgggttctgggaaaattgtccgcgaa

SEQ ID NO: 448220 - DNA, 75 bp, synthetic construct
  source 1..75: mol_type = other DNA
atgaacgatgtgttcctgaagcggttgtttgcagtgagcatcacctcgtccggcaatcccccgacgttctccctg

SEQ ID NO: 448221 - DNA, 75 bp, synthetic construct
  source 1..75: mol_type = other DNA
ggttttacgtgcgcagcgtcaacctggtggggaaatctgcttttgtggaggccagtggacgggccagcaatgatg

SEQ ID NO: 448222 - DNA, 75 bp, synthetic construct
  source 1..75: mol_type = other DNA
cggcggtggaggtgaattacaccgacccgcagaacggctggcagacctccacggaactggtggaagacccggaag

SEQ ID NO: 448223 - DNA, 75 bp, synthetic construct
  source 1..75: mol_type = other DNA
acggaaaaacggtgctgaaatttataaccgtaccgcgctggataatacgctgatttacagtggtgttattgatat

SEQ ID NO: 448224 - DNA, 75 bp, synthetic construct
  source 1..75: mol_type = other DNA
taaatggttggtatcccacagcaagtatcagcgatttgctggttgttgtgatgaagaaagccactgcaggcatca

SEQ ID NO: 448225 - DNA, 75 bp, synthetic construct
  source 1..75: mol_type = other DNA
gcatggctggtaaatggctggtatcccacagcaagtatcagcgatttgctggttgttgtgatgaagaaagccact

SEQ ID NO: 448226 - DNA, 75 bp, synthetic construct
  source 1..75: mol_type = other DNA
cattttcttattccggtggccagttgccggtgtccggctctctggtggtgacggcagggatcaccccgccgtcag

SEQ ID NO: 448227 - DNA, 75 bp, synthetic construct
  source 1..75: mol_type = other DNA
ccgtttgatatccgggtgtgccgggtgacgccggacagcaccactgatcagctgcagaataaaaccttctggtca

SEQ ID NO: 448228 - DNA, 75 bp, synthetic construct
  source 1..75: mol_type = other DNA
ccgctgacggacacggacggtaatcccgtgatacacggtgtgactgcggtctggcgcgccggggagcaggagcag

SEQ ID NO: 448229 - DNA, 75 bp, synthetic construct
  source 1..75: mol_type = other DNA
ttaaggttttccataaaggcaatcagtgggcaggtaatatcaccgactgtacggtgattgtgaccaaaaaagccg

SEQ ID NO: 448230 - DNA, 75 bp, synthetic construct
  source 1..75: mol_type = other DNA
gcaccccccgcgaggccagagataatcttaaatcttcccagttgctgagtgtgattgatgccatcagcgaagggc

SEQ ID NO: 448231 - DNA, 75 bp, synthetic construct
  source 1..75: mol_type = other DNA
atgccgatatcagcggtaacgtgaatgcgaactccgggacgctcaacaacgtcacgattaacgagaactgccggg

SEQ ID NO: 448232 - DNA, 75 bp, synthetic construct
  source 1..75: mol_type = other DNA
ggagttgtggacgcagattgataacggtcagcttgcgcctgacctggctgaaatcaggacatccattacggatgt

SEQ ID NO: 448233 - DNA, 75 bp, synthetic construct
  source 1..75: mol_type = other DNA
tacgttcgcagtgtgaacaccgtcggcaaatcgacattcgtggaggctgtcggtcagccgagtgatgacgcatcc

SEQ ID NO: 448234 - DNA, 75 bp, synthetic construct
  source 1..75: mol_type = other DNA
aggcacgcgatacacgggttatggttttgaagttcgcaaaaacggcatattaatcgcatccagagaaactaaagg

SEQ ID NO: 448235 - DNA, 75 bp, synthetic construct
  source 1..75: mol_type = other DNA
gcgatacggttatccggccacatgctgagggtgctgtccgggtgcagctccgggtcgggcaggcggttgcctgcc

SEQ ID NO: 448236 - DNA, 75 bp, synthetic construct
  source 1..75: mol_type = other DNA
tgaacgacgtgttcctgaaacgactgtttgcggtgagcatcacgtcatccggcaatcctccggcattttccctga

SEQ ID NO: 448237 - DNA, 75 bp, synthetic construct
  source 1..75: mol_type = other DNA
tgcttcgcctgaccgtgacagcggacgatggcagtgagcggctggtcagcacagcccggacgacggaaaccacat

SEQ ID NO: 448238 - DNA, 75 bp, synthetic construct
  source 1..75: mol_type = other DNA
accatcagcgatgatcataactttgaccgccagattattattccgcccattatttttaacggtatagcgtatgac

SEQ ID NO: 448239 - DNA, 75 bp, synthetic construct
  source 1..75: mol_type = other DNA
acactggaccgtgaggtgacactgccggagacaggtacaacaacggtgaacctgattaacggcagcggtaagccg

SEQ ID NO: 448240 - DNA, 75 bp, synthetic construct
  source 1..75: mol_type = other DNA
aatacgctgatttacacgggtgttattgatatgcctgcaggcagtggcgtaatgacactggagttttctgtatca

SEQ ID NO: 448241 - DNA, 75 bp, synthetic construct
  source 1..75: mol_type = other DNA
ttgttattccagcggtggctttcagcggtgccagacatgaacgggagaatagcgatacttattcgtcatgccgcc

SEQ ID NO: 448242 - DNA, 75 bp, synthetic construct
  source 1..75: mol_type = other DNA
tgccaaccagattgaaggtgatattgtcaaaacggtgggaaaagcctttccgagaaatggcagttatgccagcgg

SEQ ID NO: 448243 - DNA, 75 bp, synthetic construct
  source 1..75: mol_type = other DNA
caaccgggaagccgtcgaattttataataatgtcattgatgatttaatcgaaaatggcattgaaccgattttcgg

SEQ ID NO: 448244 - DNA, 75 bp, synthetic construct
  source 1..75: mol_type = other DNA
caacaacgttacgataaatgagaactgtcagattaaagggaaactgtcagccaaccagattgaaggcgatattgt

SEQ ID NO: 448245 - DNA, 75 bp, synthetic construct
  source 1..75: mol_type = other DNA
ggtgctgctggcggcggacaggattgcgatggttaatcctgcgaatggcaacacaaaaccgatgtttgttggtca

SEQ ID NO: 448246 - DNA, 75 bp, synthetic construct
  source 1..75: mol_type = other DNA
tatttacgatatcttaatcaacctacgcgataactatggaaatatcccttgctatatttctgaaaatggcatggg

SEQ ID NO: 448247 - DNA, 75 bp, synthetic construct
  source 1..75: mol_type = other DNA
acaggatccgggcggcggtcctccgtaaacagaatgaaatgcagcaacgctacggcatacaacaggaaagttatc

SEQ ID NO: 448248 - DNA, 75 bp, synthetic construct
  source 1..75: mol_type = other DNA
gaatcagttgttcatgaacgatgtgttcctgaagcggctgtttgcggtgagtatcacgtcatccggcaatcctcc

SEQ ID NO: 448249 - DNA, 75 bp, synthetic construct
  source 1..75: mol_type = other DNA
ctgttcatgaacgacgtgttcctgaaacgactgtttgcggtgagcatcacctcgtccggcaatcccccagcattt

SEQ ID NO: 448250 - DNA, 75 bp, synthetic construct
  source 1..75: mol_type = other DNA
catagtgcttaatctgacgccttcataccctcggtctaataatgaagaggacttgaaagcatcgtttattgctga

SEQ ID NO: 448251 - DNA, 75 bp, synthetic construct
  source 1..75: mol_type = other DNA
ccggatacaggtcagcaccctgcctgatggtgtggagacatacggtgtatggggactctccctgccgtcactgcg

SEQ ID NO: 448252 - DNA, 75 bp, synthetic construct
  source 1..75: mol_type = other DNA
tggcaatgcatgtgccacagagtggatcagtagcgaggaccttatcacctctgactttcatcttatgacggcaga

SEQ ID NO: 448253 - DNA, 75 bp, synthetic construct
  source 1..75: mol_type = other DNA
ctctggcaaaagaagatgtgcacaatttacgcgaaggtacgcgttatctgacatcgaaggaagtgattagttatc

SEQ ID NO: 448254 - DNA, 75 bp, synthetic construct
  source 1..75: mol_type = other DNA
ttaatcgcacaacaagctgtgatgttgagtaaagataaatcactcaaagttcgtgaagcattagcccggacgctt

SEQ ID NO: 448255 - DNA, 75 bp, synthetic construct
  source 1..75: mol_type = other DNA
ctgattaaaacggaactgctggaaacgcagaccgtggacttcagcgtgggtgcggaagggcttcgccatgtaccg

SEQ ID NO: 448256 - DNA, 75 bp, synthetic construct
  source 1..75: mol_type = other DNA
cgatcgccaggcaggtaccggaggcgggctctgaaggactgagtagggtgatcgcgtcaggccgcgaagtactga

SEQ ID NO: 448257 - DNA, 75 bp, synthetic construct
  source 1..75: mol_type = other DNA
tctgggacggcagtctgaaaccggcatacagcaacaatccggcctggtgtctgtgggacatgctgactcacccgc

SEQ ID NO: 448258 - DNA, 75 bp, synthetic construct
  source 1..75: mol_type = other DNA
cgatggttgatttattctgttgcgccggggcgaccgccaggctggtatcggaggcgggttctgaagaactgaggt

SEQ ID NO: 448259 - DNA, 75 bp, synthetic construct
  source 1..75: mol_type = other DNA
agggaacggatgccagactggtgaccaccgctatcaccgcagacacggagcaccgtttcagcggcctgccgctcg

SEQ ID NO: 448260 - DNA, 75 bp, synthetic construct
  source 1..75: mol_type = other DNA
tgggatgagaatattcaaaaatcctattcactggtgaatcccgacttttacgatcatactgaaatcgaaaccgat

SEQ ID NO: 448261 - DNA, 75 bp, synthetic construct
  source 1..75: mol_type = other DNA
taataacctgaacagcatgtgggccgtgaaactgcagcagatgcaggacggacgcctttatattgcgggtatcgg

SEQ ID NO: 448262 - DNA, 75 bp, synthetic construct
  source 1..75: mol_type = other DNA
tgagtagagagactataacagcatccatgattataggaaaagatgagtgttattttgtgccagacagagagagct

SEQ ID NO: 448263 - DNA, 75 bp, synthetic construct
  source 1..75: mol_type = other DNA
tgagcagggagtcaatcgcagtttcaatgattgtaggaagagataattgtgcttttgaccctgacagaggtaact

SEQ ID NO: 448264 - DNA, 75 bp, synthetic construct
  source 1..75: mol_type = other DNA
attgatatgaaagctccccatcctctgagtagagagactataacagcatccatgattataggaaaagatgagtgt

SEQ ID NO: 448265 - DNA, 75 bp, synthetic construct
  source 1..75: mol_type = other DNA
atgttaatcgccctgatcgtcatctgtttaatcgtcatagtgacggcactggtaacgaggaaagacctctgcgag

SEQ ID NO: 448266 - DNA, 75 bp, synthetic construct
  source 1..75: mol_type = other DNA
acctgaggagttagagaccaggcgagggagaaatccctcgccacctctgatgagtcaggcatcctcaatgcaccc

SEQ ID NO: 448267 - DNA, 75 bp, synthetic construct
  source 1..75: mol_type = other DNA
cttacgtgccggaaggcaaggagaagcaggctatgaagcagcaaaaggcgatgttaatcgccctgatcgtcatct

SEQ ID NO: 448268 - DNA, 75 bp, synthetic construct
  source 1..75: mol_type = other DNA
gtttaaccgtcatagtgacggcactggtaacgagggaagacctctgcgaggtacgaatccgaaccggccagacgg

SEQ ID NO: 448269 - DNA, 75 bp, synthetic construct
  source 1..75: mol_type = other DNA
cttacgcgccgaaaggcaaggagaagcaggttatgaagcagcaaaaggcgatgttagtcgccctgatcgtcatct

SEQ ID NO: 448270 - DNA, 75 bp, synthetic construct
  source 1..75: mol_type = other DNA
gacctctgcgaggtacgaatccgtaccggccagacggaggttgctgtcttcacagcttacgaatctgaggagtaa

SEQ ID NO: 448271 - DNA, 75 bp, synthetic construct
  source 1..75: mol_type = other DNA
gtgctgaaatttataaccgtaccgcgctggataatacgctgatttacagtggtgttattgatatgcctgccggtc

SEQ ID NO: 448272 - DNA, 75 bp, synthetic construct
  source 1..75: mol_type = other DNA
acagagtgcttcctgcatgttgatcagaatggacgccggatttattcaggcaggtcagtgacagagccgggaatt

SEQ ID NO: 448273 - DNA, 75 bp, synthetic construct
  source 1..75: mol_type = other DNA
gatgataacggcgtggggttccgctacagcttcagtgccctgaaggaccggcacacggcggtggaggtgaattac

SEQ ID NO: 448274 - DNA, 75 bp, synthetic construct
  source 1..75: mol_type = other DNA
tctgggacggcagtctgaaaccggcatacagcaataacccggcctggtgcctgtgggacatgctgacccacccgc

SEQ ID NO: 448275 - DNA, 75 bp, synthetic construct
  source 1..75: mol_type = other DNA
cggatgatgtggcggggcatgtttctgaaggtgaatgcatatgccctgaatgaacgaacaggaatgtcaaccgtg

SEQ ID NO: 448276 - DNA, 75 bp, synthetic construct
  source 1..75: mol_type = other DNA
cagccagctgctgacccgccaggcagagagcgaaccttaccgtcaggtgacagtatcacggggcgaggtcgtctc

SEQ ID NO: 448277 - DNA, 75 bp, synthetic construct
  source 1..75: mol_type = other DNA
aatagctttaaacgtcgatacgggttctggcgcctggatttggaaaccggagaacggcaaataaaacgcaatgcc

SEQ ID NO: 448278 - DNA, 75 bp, synthetic construct
  source 1..75: mol_type = other DNA
ctgacgacggtgaataacgcgcaacgcgaggcttacggttatcaggttcaggctgccaactataaagcagaagcc

SEQ ID NO: 448279 - DNA, 75 bp, synthetic construct
  source 1..75: mol_type = other DNA
tgaattctggttctcagaaaaacgcatcacggacatggcacaggtggaaacctctgcccgttatctggggacagg

SEQ ID NO: 448280 - DNA, 75 bp, synthetic construct
  source 1..75: mol_type = other DNA
atgaaaaatgaactccacatcgtctgcccacattgccagtccatcaacagcgtgccggccgccaagctcgcggat

SEQ ID NO: 448281 - DNA, 75 bp, synthetic construct
  source 1..75: mol_type = other DNA
gccgcgggtggtgaagggtgtgcgcttcagtctgcgcctgaccagtggtaagggagcggatgccagactggtgac

SEQ ID NO: 448282 - DNA, 75 bp, synthetic construct
  source 1..75: mol_type = other DNA
ctggcgccagtgtcgctttaagtggcgtttcagcatacaaccagtaccagcaaggtaagtattcgtctgctgttg

SEQ ID NO: 448283 - DNA, 75 bp, synthetic construct
  source 1..75: mol_type = other DNA
tggataacggggccttctttgagccgctttccggttcactgaacagcgtcatcccgccggctgtgcagcacctca

SEQ ID NO: 448284 - DNA, 75 bp, synthetic construct
  source 1..75: mol_type = other DNA
cgccagtacgtggacaaaaagcaaagtgaaatcaagcagacagtcagccagggccagtcagaaaacgcccggcag

SEQ ID NO: 448285 - DNA, 75 bp, synthetic construct
  source 1..75: mol_type = other DNA
aacagcctcacgcagctggttgcgaaaaagaatgaggaccagacactggccatcgcgcaggtgagtcagaaagtg

SEQ ID NO: 448286 - DNA, 75 bp, synthetic construct
  source 1..75: mol_type = other DNA
ccggaaaaacgcacgtacagtggtatctgggacggcagcctgaaaccggcatacagcaacaacccggcctggtgt

SEQ ID NO: 448287 - DNA, 75 bp, synthetic construct
  source 1..75: mol_type = other DNA
tttatgacgatcagccgtttaaccggcagattgttattccggcggtggctttcagcggtgccagacatgagcggg

SEQ ID NO: 448288 - DNA, 75 bp, synthetic construct
  source 1..75: mol_type = other DNA
accggcagattgttattccggcggtggcattcagtggcgctaagcatgagagagagcatactgatatttactcct

SEQ ID NO: 448289 - DNA, 75 bp, synthetic construct
  source 1..75: mol_type = other DNA
atgacagacattacagccaatgtgatcgtatcgatgccttcgcaactcttcactatggctcgttcttttaaagcg

SEQ ID NO: 448290 - DNA, 75 bp, synthetic construct
  source 1..75: mol_type = other DNA
aacacaaacgacgctgttatctctggattgccttttaactctgtaccgtttgtttctcaatttgcaggagcggca

SEQ ID NO: 448291 - DNA, 75 bp, synthetic construct
  source 1..75: mol_type = other DNA
aggatactgatggccagccactgagcaacatactgctgctggctgaccgtatcgcgatgataaatccggagagcg

SEQ ID NO: 448292 - DNA, 75 bp, synthetic construct
  source 1..75: mol_type = other DNA
cgatggttaatcctgcgaatggcaacacaaagccgatgtttgttggtcagggcgatcagatattcatgaacgaag

SEQ ID NO: 448293 - DNA, 75 bp, synthetic construct
  source 1..75: mol_type = other DNA
gctgaaatttataaccgtaccgcgatggataatacgctggtttacagtggtgttattgatatgcctgctggtcgc

SEQ ID NO: 448294 - DNA, 75 bp, synthetic construct
  source 1..75: mol_type = other DNA
caacgcttccgggaaactgctggcgttagatagccagttaaccaatgatttttcagaaaaaaaacagctatttcc

SEQ ID NO: 448295 - DNA, 75 bp, synthetic construct
  source 1..75: mol_type = other DNA
acagtttgagttctggttttctgaaacgaagatttcagatatctcacaggtggacaaatctgccagctatcttgg

SEQ ID NO: 448296 - DNA, 75 bp, synthetic construct
  source 1..75: mol_type = other DNA
atgcaaagcatcgactcgttcttatcaccactttgtgaagcgataagaaatgaaaaactaaaatcaaaacaagct

SEQ ID NO: 448297 - DNA, 75 bp, synthetic construct
  source 1..75: mol_type = other DNA
acggttacagtcaccatcagcgatgatcataactttgaccgccagattattattccgcccattatttttaacggt

SEQ ID NO: 448298 - DNA, 75 bp, synthetic construct
  source 1..75: mol_type = other DNA
acgccaacgaccagtatcagcgaccttcttgttgtcgtgatgaagaaatcaacagccggtatcagtatcagttga

SEQ ID NO: 448299 - DNA, 75 bp, synthetic construct
  source 1..75: mol_type = other DNA
gatgtaagttgccataactgcggaaaaatcactggtggatatggtgatcaacttggtgctggaataatatgtggc

SEQ ID NO: 448300 - DNA, 75 bp, synthetic construct
  source 1..75: mol_type = other DNA
actgtgtcatcagagggaaactgtctgcaaaccagattgaaggcgatctcgttaaaacagtgggtaaggctttcc

SEQ ID NO: 448301 - DNA, 75 bp, synthetic construct
  source 1..75: mol_type = other DNA
tgagctgaatgccatgtatatgctgaaggtgcagaaaacaaaaaacggtattccctatgtggccgggattggtgc

SEQ ID NO: 448302 - DNA, 75 bp, synthetic construct
  source 1..75: mol_type = other DNA
ttagatagccagttaaccaatgatttttcagaaaaaagcagctatttccagtcacaggtagataaaatcaggaag

SEQ ID NO: 448303 - DNA, 75 bp, synthetic construct
  source 1..75: mol_type = other DNA
gccgtagccaatggtaaaatttatattggtaaaattgacactgacccggtaaatccagaaaaccagattcaggtt

SEQ ID NO: 448304 - DNA, 75 bp, synthetic construct
  source 1..75: mol_type = other DNA
ggtcagaggtgattttgttaaaacagtatccaaatcattcccgaaaaaggctggtacgtggggtaatacggaaac

SEQ ID NO: 448305 - DNA, 75 bp, synthetic construct
  source 1..75: mol_type = other DNA
gctacggcatgggaaaacgcctgggggcggcggatgtggacaagtgggcgctgtatgccatcgggcagtactgcg

SEQ ID NO: 448306 - DNA, 75 bp, synthetic construct
  source 1..75: mol_type = other DNA
gtgggtaaagggggcggcaaggggcacacaccgcgtgaggcgaaggataatctcaaatccacgcagatgatgagt

SEQ ID NO: 448307 - DNA, 75 bp, synthetic construct
  source 1..75: mol_type = other DNA
ggagcagttctcgaaagagtggaaggacgcgaacgataaatggaatgccatgtggggcgtcagaattgagcagac

SEQ ID NO: 448308 - DNA, 75 bp, synthetic construct
  source 1..75: mol_type = other DNA
ttcatgatacgagtcaaattcggatcccggacccggttctgttttacctgaaatcctatacagacgattttgata

SEQ ID NO: 448309 - DNA, 75 bp, synthetic construct
  source 1..75: mol_type = other DNA
attgatgatcagtcgtttgaccggaatattgttatcccgccggttttttattccggtattatctacaaaggaagt

SEQ ID NO: 448310 - DNA, 75 bp, synthetic construct
  source 1..75: mol_type = other DNA
ccatcaaaggtactctgagagcggaaaatatcattggcgatgtggtgaaaacgcacaatgtcagtcttcctgatc

SEQ ID NO: 448311 - DNA, 75 bp, synthetic construct
  source 1..75: mol_type = other DNA
cagatacagcgggtgcagacagacacaaataacgacctggctgcgctgtacatgctgaaggtgcagaaaacaaaa

SEQ ID NO: 448312 - DNA, 75 bp, synthetic construct
  source 1..75: mol_type = other DNA
ctaagtacggattcaccgcggcaatacccgacattcaactcaatatctggaacggagacactgtacagctcccgt

SEQ ID NO: 448313 - DNA, 75 bp, synthetic construct
  source 1..75: mol_type = other DNA
gatggtgtggagacatacggggtgtggggactctccctgccgtcactgcgccgtcgtctgttccgctgtgtctcc

SEQ ID NO: 448314 - DNA, 75 bp, synthetic construct
  source 1..75: mol_type = other DNA
gatggtgtggagacatacggtgtgtggggactgaaaatacccggtcttcgccgtcgcctgttccgctgtgtgtcc

SEQ ID NO: 448315 - DNA, 75 bp, synthetic construct
  source 1..75: mol_type = other DNA
ccctttaacatccggatggtcagggagacggcggacagcaccacggaccagctgcaaaacaggacgctgtggtcg

SEQ ID NO: 448316 - DNA, 75 bp, synthetic construct
  source 1..75: mol_type = other DNA
tgcgttctttcccagacctgattcaggaatcactgtttgagtacatcagcactggcgtgcgagacggtggcaaga

SEQ ID NO: 448317 - DNA, 75 bp, synthetic construct
  source 1..75: mol_type = other DNA
accggcagtacagcacctgacggtggaggtgagcgcagctgacagccagtatctggcgctggcgaaatgggacac

SEQ ID NO: 448318 - DNA, 75 bp, synthetic construct
  source 1..75: mol_type = other DNA
aaaggagagagttaccggttaaaagagaaacgtaaagctggagtgctgaccaaaaacacgacgccgatcagtgat

SEQ ID NO: 448319 - DNA, 75 bp, synthetic construct
  source 1..75: mol_type = other DNA
aaagcccctaaatatatacaatttagcgatcatataattgcaccacgaaaatcatctcattttcacatttttatg

SEQ ID NO: 448320 - DNA, 75 bp, synthetic construct
  source 1..75: mol_type = other DNA
gtgaattacaccgacccgcagaacggctggcagacctccacggaactggtggaagaccctgaagccatactgcgc

SEQ ID NO: 448321 - DNA, 75 bp, synthetic construct
  source 1..75: mol_type = other DNA
gtgatagacgccatcagcgaagggccggttgaaggtccggtggacggattaaaaagtgtgctgctgaacagtacg

SEQ ID NO: 448322 - DNA, 75 bp, synthetic construct
  source 1..75: mol_type = other DNA
cgtacatcaactaccgtgttctgaacggcgttatcgtcgagcaggaagcggagaacccgaataagatcgaaattg

SEQ ID NO: 448323 - DNA, 75 bp, synthetic construct
  source 1..75: mol_type = other DNA
gtaactttcaccgcgatctgctgatcgtccgcaacggcgtaaagctgggcgaagatgatgagctggcgtttgagc

SEQ ID NO: 448324 - DNA, 75 bp, synthetic construct
  source 1..75: mol_type = other DNA
tgccggcggtcagatagcggtgaaaatcgttaaacaggcggaatttgactatttcatgggcctggtattgccgca

SEQ ID NO: 448325 - DNA, 75 bp, synthetic construct
  source 1..75: mol_type = other DNA
gatggtgatggtgcaacttcaatctgtacgctgacggtaagtgtgaatgatcgggtagtgttcagcaaaagctca

SEQ ID NO: 448326 - DNA, 75 bp, synthetic construct
  source 1..75: mol_type = other DNA
gatattaccaaaaatgcagcgtatggcgttgagatagaaagtctggtgctggagataaatgcaccggcagcataa

SEQ ID NO: 448327 - DNA, 75 bp, synthetic construct
  source 1..75: mol_type = other DNA
cgggactggtaacccgttcctgatgtcgttcttcacccagaccacaggcggcaaactgaatctgatgcatcacaa

SEQ ID NO: 448328 - DNA, 75 bp, synthetic construct
  source 1..75: mol_type = other DNA
ttgctgcgccatgatccggagggagggaagacgattgcggtttcaacggcaaacgcaccgtttacgccgcgggac

SEQ ID NO: 448329 - DNA, 75 bp, synthetic construct
  source 1..75: mol_type = other DNA
acggatgttacaaaaaatgcagcgtatggcgttgagatagaaagtctggtgctggagataaatgcaccggcatca

SEQ ID NO: 448330 - DNA, 75 bp, synthetic construct
  source 1..75: mol_type = other DNA
taatccgttcctgatgtcgtacttcacccagaccacagacggcaagctgaacctgatgcatcacaggaaagccgg

SEQ ID NO: 448331 - DNA, 75 bp, synthetic construct
  source 1..75: mol_type = other DNA
tgccttcatcacgggtaaggcaccggaaatcaaaccctcgcccggcggcgacacgccatcgggtccgtctgtaga

SEQ ID NO: 448332 - DNA, 75 bp, synthetic construct
  source 1..75: mol_type = other DNA
attatggcgggcattgataaagacatcgaaggtgaagcgcgtccacaaccagatatcaagattggctatctgccg

SEQ ID NO: 448333 - DNA, 75 bp, synthetic construct
  source 1..75: mol_type = other DNA
cgttggttcctcgaccgtatcgccacgcacatcctggattaccaggatgaaggtaaagttgagttcttcgaaggt

SEQ ID NO: 448334 - DNA, 75 bp, synthetic construct
  source 1..75: mol_type = other DNA
gcggcgacactccatcggggccgtctgatggtgacacatccgttcgtacagtctccctgctgccgacagccggag

SEQ ID NO: 448335 - DNA, 75 bp, synthetic construct
  source 1..75: mol_type = other DNA
ctgacggatattaccaaaaatgcagcgtatggcgttgagatagaaagtctggtgctggagataaatgcaccggca

SEQ ID NO: 448336 - DNA, 75 bp, synthetic construct
  source 1..75: mol_type = other DNA
tgctgctcgacgaaccgaccaaccacctggatgccgaatccgtagcgtggctggaacgcttcctgcacgacttcg

SEQ ID NO: 448337 - DNA, 75 bp, synthetic construct
  source 1..75: mol_type = other DNA
atcccggttccgtctgatgttcgcgtagcaaccgagttctctgaaactgcaccggctaccctgaaatctgttaac

SEQ ID NO: 448338 - DNA, 75 bp, synthetic construct
  source 1..75: mol_type = other DNA
gtctgcaaggtccggatatcgacgctgaactgattatgctcaccgcccgctggtggcgcgcgctgggtatttccg

SEQ ID NO: 448339 - DNA, 75 bp, synthetic construct
  source 1..75: mol_type = other DNA
cttggctcccagggtacggtatgtgctggcggtcgctatgacggtctggtagagcagctcggcggtcgcgcaacg

SEQ ID NO: 448340 - DNA, 75 bp, synthetic construct
  source 1..75: mol_type = other DNA
actgcttgagagcgcaggtattgcctataccgtaaaccagcgtctggtgcgtggtctggattactacaatcgtac

SEQ ID NO: 448341 - DNA, 75 bp, synthetic construct
  source 1..75: mol_type = other DNA
catcagttgggctgcgaagttttcggtctgcaaggtccggatatcgacgctgaactgattatgctcactgcccgc

SEQ ID NO: 448342 - DNA, 75 bp, synthetic construct
  source 1..75: mol_type = other DNA
gtttgtggtatatgggaccgatgttccgccacgagcgcccgcaaaaaggtcgttatcgtcagttccaccaaatcg

SEQ ID NO: 448343 - DNA, 75 bp, synthetic construct
  source 1..75: mol_type = other DNA
gtgagcattttgccggtctgtgcaaactgcttgagagcgcggggatcgcttacaccgtaaaccagcgtctggtgc

SEQ ID NO: 448344 - DNA, 75 bp, synthetic construct
  source 1..75: mol_type = other DNA
gcgtttattttgtacccttcatgacagacggtaacggcgtcaataccgccactaacgcgccggcagaagatccgg

SEQ ID NO: 448345 - DNA, 75 bp, synthetic construct
  source 1..75: mol_type = other DNA
agagttgtacgtataacgacatcatcccggctgaccactgcctgcatgatgtgcaggatatgagtacgctgaatc

SEQ ID NO: 448346 - DNA, 75 bp, synthetic construct
  source 1..75: mol_type = other DNA
atcccggttccgtctgatgttcgcgtagcgactgagttctctgaaaccgctccggctactctgaaatctgttaac

SEQ ID NO: 448347 - DNA, 75 bp, synthetic construct
  source 1..75: mol_type = other DNA
ccacgcacagcaacctgcgctgtttacagccatgctggcacagtttcgtgctgacctctccgtgtttaacgcgca

SEQ ID NO: 448348 - DNA, 75 bp, synthetic construct
  source 1..75: mol_type = other DNA
tggatatcggcgacgcttctgcgcaagaactggctgaaatcctgaagaatgcgaaaaccattctttggaacggcc

SEQ ID NO: 448349 - DNA, 75 bp, synthetic construct
  source 1..75: mol_type = other DNA
tcagggcggcgtcgccatcagatcttgcggaaaagctgacacataaactgaaagagggctggcagccgtttggta

SEQ ID NO: 448350 - DNA, 75 bp, synthetic construct
  source 1..75: mol_type = other DNA
ttttgacaagctggccgctgaacaaggccgtctggaagagatcattcaggctcacgacggtcataacctgaacgt

SEQ ID NO: 448351 - DNA, 75 bp, synthetic construct
  source 1..75: mol_type = other DNA
tgcttaccataatggtgagcgctcctccgttcgcaagaaacgtccgcgccttggccgtttactcctgtcgcttat

SEQ ID NO: 448352 - DNA, 75 bp, synthetic construct
  source 1..75: mol_type = other DNA
aagattgaagagaataagtggggctcaaataattcctcttttctcagtttacaatagcaaaacacatcaactaaa

SEQ ID NO: 448353 - DNA, 75 bp, synthetic construct
  source 1..75: mol_type = other DNA
agtggagaattgcgtttacaataatattgaacaatatacttggatactcaagttattgaaaacacgaaaaccagg

SEQ ID NO: 448354 - DNA, 75 bp, synthetic construct
  source 1..75: mol_type = other DNA
tgtagtgcacgcgatatgctgttgatctcggcgatttgcggcgtagtgcgctggggcattatgggagcaactacg

SEQ ID NO: 448355 - DNA, 75 bp, synthetic construct
  source 1..75: mol_type = other DNA
gtggcagttcaatcttggacgctgcatcttctgtggacgctgcgaagaggtctgcccgacggcggcgattaagct

SEQ ID NO: 448356 - DNA, 75 bp, synthetic construct
  source 1..75: mol_type = other DNA
gtatggcgacatagtcatgcaggtattacgtgcgccttaccctctgctcaatgccaatattgaccgggagtgggt

SEQ ID NO: 448357 - DNA, 75 bp, synthetic construct
  source 1..75: mol_type = other DNA
aaggttttcattatgcaaatatggaataccaaaagattatggagaaaaaatcattccacttactattgtttcgag

SEQ ID NO: 448358 - DNA, 75 bp, synthetic construct
  source 1..75: mol_type = other DNA
attgactcaatatccgttgcgttccctgtcaaaagtatgcgtagtgctgaacatttcgtgatgaatgccaccgag

SEQ ID NO: 448359 - DNA, 75 bp, synthetic construct
  source 1..75: mol_type = other DNA
gaatgcctgatattgactcaatatccgttgcgttccctgtcaaaagtatgcgtggtgctgaacatttcgtgatga

SEQ ID NO: 448360 - DNA, 75 bp, synthetic construct
  source 1..75: mol_type = other DNA
tatcggtatcctcgcggcaggcgtgatcctcgccatcatgatcattccgtacattgcggcggtcatgcgcgatgt

SEQ ID NO: 448361 - DNA, 75 bp, synthetic construct
  source 1..75: mol_type = other DNA
atcctcgccatcatgattattccgtacattgcggcggtaatgcgcgatgtattcgaacaaaccccggtgatgatg

SEQ ID NO: 448362 - DNA, 75 bp, synthetic construct
  source 1..75: mol_type = other DNA
ccaaagagtgggatgcgccgaacgatatctacggggcgctggtgccgatctacggtacgctggtgacctcgttta

SEQ ID NO: 448363 - DNA, 75 bp, synthetic construct
  source 1..75: mol_type = other DNA
caacgaagtgaccgtcgtgttccaggatggattccagctgaaaacgattgaagaactggaagcggaaaagaacgg

SEQ ID NO: 448364 - DNA, 75 bp, synthetic construct
  source 1..75: mol_type = other DNA
gatgacgggtaccggtaatccgttcctgatgtcgtacttcactcagaccactgacggcagagtgaatctgatgca

SEQ ID NO: 448365 - DNA, 75 bp, synthetic construct
  source 1..75: mol_type = other DNA
ggttcacagtactgcgcatacgattaccgggtcatacaggagcagtctggtctgaaaacatcaatgtcgcgtaaa

SEQ ID NO: 448366 - DNA, 75 bp, synthetic construct
  source 1..75: mol_type = other DNA
ccaacaatcagttcggtctgggaatttatctgtataccgatgtagcgttacctgacgtcgtggcgatgaccggga

SEQ ID NO: 448367 - DNA, 75 bp, synthetic construct
  source 1..75: mol_type = other DNA
ttgggcgagttcgggaattacagtaacgactggcagacgctggagctggtgttcaccgccggcagtgccacggtt

SEQ ID NO: 448368 - DNA, 75 bp, synthetic construct
  source 1..75: mol_type = other DNA
gtgatactacgtcatcgtactggcccggcattccaggccataaaagacagtctggcagtgggactaaatgcactg

SEQ ID NO: 448369 - DNA, 75 bp, synthetic construct
  source 1..75: mol_type = other DNA
ttgccattgaggatgcagcggcggcattcgaacgcgcgcagcaaaatgactccataaaggtcatgctgcaatttg

SEQ ID NO: 448370 - DNA, 75 bp, synthetic construct
  source 1..75: mol_type = other DNA
gattgaaattgacttggaagaagccagcagtgacgatctcgcagaacatctgaaagtactgattgctctatggca

SEQ ID NO: 448371 - DNA, 75 bp, synthetic construct
  source 1..75: mol_type = other DNA
aatatgttgaaggattggggtatcgttgatgtgataacacttaacgataaatcctcggataaaaacaaaaagtaa

SEQ ID NO: 448372 - DNA, 75 bp, synthetic construct
  source 1..75: mol_type = other DNA
ctgttccgaaaccaccgatccctgcaccgggaccggagggtgagccgcaaccggcgaatttcccgccgcaacctg

SEQ ID NO: 448373 - DNA, 75 bp, synthetic construct
  source 1..75: mol_type = other DNA
ccgtcaaacgccttaacggttgaaaccgacctcgccactggtgagctggcgtggcagttcaatcttggtcgttgc

SEQ ID NO: 448374 - DNA, 75 bp, synthetic construct
  source 1..75: mol_type = other DNA
ccgacctcgccacaggagagcttgcgtgggagttcaatcttggacgctgcatcttctgtggacgctgcgaagaag

SEQ ID NO: 448375 - DNA, 75 bp, synthetic construct
  source 1..75: mol_type = other DNA
ggttgcacgcctggtggcagaagggctgcaaaaagagttgaaagtgaatgtcaacgtggtgaatcgcacgggagg

SEQ ID NO: 448376 - DNA, 75 bp, synthetic construct
  source 1..75: mol_type = other DNA
cctgatgcaggcgattacagcagaaggtgatgtggtggtcagtggtgcaactgagccggattggtactacgtcat

SEQ ID NO: 448377 - DNA, 75 bp, synthetic construct
  source 1..75: mol_type = other DNA
ggcattattcccgatcgtatggcaaccgctattctgaacgtagccggtcgcaccttagccttcatcagtggtaag

SEQ ID NO: 448378 - DNA, 75 bp, synthetic construct
  source 1..75: mol_type = other DNA
acgctgacggatgttacaaaaaatgcagcgtatggcgttgagatagaaagtctggtgctggagataaatgcaccg

SEQ ID NO: 448379 - DNA, 75 bp, synthetic construct
  source 1..75: mol_type = other DNA
aggggacattcagcgagtccacgggggccagtcaggattcggcacgctggggggtggcaagccgttatatcagga

SEQ ID NO: 448380 - DNA, 75 bp, synthetic construct
  source 1..75: mol_type = other DNA
acctgattgcgcgcactaaagctgcattacagaagaacccgaaaatgtgttgctggcggtgtgctggatgcaggg

SEQ ID NO: 448381 - DNA, 75 bp, synthetic construct
  source 1..75: mol_type = other DNA
acctgattgcgcgcactaaagctgcattacagaagaacccgaaaaatagtgttgctggcggtgtgctggatgcag

SEQ ID NO: 448382 - DNA, 75 bp, synthetic construct
  source 1..75: mol_type = other DNA
ctccctgctgccgacagccggagaggctgctgcgcagggctggagcattaagaatggcggaattcagttgtcaga

SEQ ID NO: 448383 - DNA, 75 bp, synthetic construct
  source 1..75: mol_type = other DNA
agagtgaatctgatgcatcacaggaaagccggaaacacgaagctgggggagttcggcgattacggtaacgactgg

SEQ ID NO: 448384 - DNA, 75 bp, synthetic construct
  source 1..75: mol_type = other DNA
cctcactgtgtttaacgcgcagtgtcatggtggcagtgctgtaaatgtgccgtggatttgtggtgacacgacgta

SEQ ID NO: 448385 - DNA, 75 bp, synthetic construct
  source 1..75: mol_type = other DNA
accattgtctgcatgatgtgcaggacatgagccgccttaaccatccgaaagcggacctgtcaaggggcagtacgg

SEQ ID NO: 448386 - DNA, 75 bp, synthetic construct
  source 1..75: mol_type = other DNA
gcgcactgaccaacaatcagttcgggctggggatttatctgtatacggatgctcccgttcctgatggtgtggcga

SEQ ID NO: 448387 - DNA, 75 bp, synthetic construct
  source 1..75: mol_type = other DNA
tgatatcactaaaaatgccgcgtacggcgtcgatatcggcagcctggtgctggaaatcaataatcccgcagcata

SEQ ID NO: 448388 - DNA, 75 bp, synthetic construct
  source 1..75: mol_type = other DNA
ctttatggagctatttttgccttttctggctggcgtttctcggttatacccatctggccgaaccccgttaccctc

SEQ ID NO: 448389 - DNA, 75 bp, synthetic construct
  source 1..75: mol_type = other DNA
ataaaacgccaaatgtagcgccgcgtgtttttgataccggcggtcatcaaaccggagcggggatcgtaatggggt

SEQ ID NO: 448390 - DNA, 75 bp, synthetic construct
  source 1..75: mol_type = other DNA
tatggtcaatacttttctcatcctgtaaatttaaactctagttctatcgaagctgaacgtctttttattgcagaa

SEQ ID NO: 448391 - DNA, 75 bp, synthetic construct
  source 1..75: mol_type = other DNA
acaccctgatcgataacctgaacaccctgatttgcgaggacagcctgctcacgcgccaggagcgtgaaaccctgg

SEQ ID NO: 448392 - DNA, 75 bp, synthetic construct
  source 1..75: mol_type = other DNA
tactaaacgagtagtttctaacggtgaggctactaaaaccattgaaacggaatggacgggcgtaaaaacgcggac

SEQ ID NO: 448393 - DNA, 75 bp, synthetic construct
  source 1..75: mol_type = other DNA
cacgatttgaacgtgatggcctgcttattgaggggcaaagaacaaactacatgctcaattcggaaagccctgcca

SEQ ID NO: 448394 - DNA, 75 bp, synthetic construct
  source 1..75: mol_type = other DNA
ggtctgttaaggatgatgcaactggctggatattttttgaggctacattaaaagcagatacaacagaaaatacgg

SEQ ID NO: 448395 - DNA, 75 bp, synthetic construct
  source 1..75: mol_type = other DNA
atgaaagacaaaaaagaagatgtggtaatgcaggacatgcattttctgcttgaagattttatctgtgctcatatt

SEQ ID NO: 448396 - DNA, 75 bp, synthetic construct
  source 1..75: mol_type = other DNA
gaccggatagcgaagaatccgcaagcttacacgcttgatgtgaatcataccggcattcagccctttgacgctgtt

SEQ ID NO: 448397 - DNA, 75 bp, synthetic construct
  source 1..75: mol_type = other DNA
agaattaggacaacattatgaagttctcccgatgtctcttattaaaacaaatgaagagttaaaaaaaagagttga

SEQ ID NO: 448398 - DNA, 75 bp, synthetic construct
  source 1..75: mol_type = other DNA
cgatggcgtcccgaatgatgatattggtaagcatcttttctggctttccgagaaactggggagaacgccgttcag

SEQ ID NO: 448399 - DNA, 75 bp, synthetic construct
  source 1..75: mol_type = other DNA
cctgatttgtgaagatgatctgctcacccgccaggagcgtgaaaccctggtgcgggccgtggcggccatcggcgc

SEQ ID NO: 448400 - DNA, 75 bp, synthetic construct
  source 1..75: mol_type = other DNA
cgtgttccggacagacttcgtcagcgcatggataagttaagattacagagggtcaggaaagacaggacaggctga

SEQ ID NO: 448401 - DNA, 75 bp, synthetic construct
  source 1..75: mol_type = other DNA
gtctggtgctgccggatgactggccggatgaactctacccgctgcgtaaagacagcatggattaccgtcagcgtc

SEQ ID NO: 448402 - DNA, 75 bp, synthetic construct
  source 1..75: mol_type = other DNA
tatgcccacacacttgaagcaatcattccaggctttgcagtatcagcgccggtagaacgcaaggtcacacgcgag

SEQ ID NO: 448403 - DNA, 75 bp, synthetic construct
  source 1..75: mol_type = other DNA
cccggcgctgatggaaaacccgcgcctgtttagccaatacccacgaatggtagccgacatcatgaacgagatgtt

SEQ ID NO: 448404 - DNA, 75 bp, synthetic construct
  source 1..75: mol_type = other DNA
ggtaccggtaatccgttcctgatgtcgtacttcactcagaccactgacggcagagtgaatctgatgcatcacagg

SEQ ID NO: 448405 - DNA, 75 bp, synthetic construct
  source 1..75: mol_type = other DNA
gtctggacccgtggttgatggaacaagccgagcaggcgggcgcgcagtttatcccgggcgttcgcgtcgatgcgc

SEQ ID NO: 448406 - DNA, 75 bp, synthetic construct
  source 1..75: mol_type = other DNA
ggatttagccattgcatcggctcaggctgccgccacaacggtgatcgccgccaaagaacgcgcggatttctccgc

SEQ ID NO: 448407 - DNA, 75 bp, synthetic construct
  source 1..75: mol_type = other DNA
accagaacagatcaacgatcgctttaatattacgggcgaggaaggtgccgcctggctgtttgccggttccccttc

SEQ ID NO: 448408 - DNA, 75 bp, synthetic construct
  source 1..75: mol_type = other DNA
gacctgattgcgcgcactaaagctgcattacagaagaacccgaaaaatgtgttgctggcggtgtgctggatgcag

SEQ ID NO: 448409 - DNA, 75 bp, synthetic construct
  source 1..75: mol_type = other DNA
tgtttttttatctcgtcaaggaaacggcttgccgtaccgtggtagagaaactgtggcggtgttttttcggcaaag

SEQ ID NO: 448410 - DNA, 75 bp, synthetic construct
  source 1..75: mol_type = other DNA
gtggccataaccccttatactctgatgcaggcgattacagcagaaggtgatgtggtggtcagtggtgcaactgag

SEQ ID NO: 448411 - DNA, 75 bp, synthetic construct
  source 1..75: mol_type = other DNA
ggccagccaggattcggcacgctggggtgtgggtaaaccgttatatcaggacctgattgcgcgcaccaaagctgc

SEQ ID NO: 448412 - DNA, 75 bp, synthetic construct
  source 1..75: mol_type = other DNA
cccggtggatgacgcagtctccctgctgacacggggtggcagactgagctgtaagtttcgactgtcaggcgcact

SEQ ID NO: 448413 - DNA, 75 bp, synthetic construct
  source 1..75: mol_type = other DNA
ggccagtcaggattcggctcgctggggtgtgggtaatccgttatatcaggatctgatttttcgcactaaagctgc

SEQ ID NO: 448414 - DNA, 75 bp, synthetic construct
  source 1..75: mol_type = other DNA
cgttggggctggtttgtggattgggtgatatcgcccatgcgcaaaaaagcgtgccgcaaatgctggaagatttta

SEQ ID NO: 448415 - DNA, 75 bp, synthetic construct
  source 1..75: mol_type = other DNA
atctgctcaacctcggcctggcctgtcactttaccggcttcgactccggctttatgcagtttttccgcgtgcgtg

SEQ ID NO: 448416 - DNA, 75 bp, synthetic construct
  source 1..75: mol_type = other DNA
gcctacaccacgtcggtggaaaacgcgatgggtattcaggtaccagaacgtgcgcagatgatccgcgccattctg

SEQ ID NO: 448417 - DNA, 75 bp, synthetic construct
  source 1..75: mol_type = other DNA
ctggataacctgccgggcggtccgctgatggtggaaggctttacctacattccgcaccgtttcgcgctgggcttt

SEQ ID NO: 448418 - DNA, 75 bp, synthetic construct
  source 1..75: mol_type = other DNA
gaacatggaacagcgcaccgtcggcattggtcgtctggacccggaaatcgctcgcgacttcagtaacgttggccc

SEQ ID NO: 448419 - DNA, 75 bp, synthetic construct
  source 1..75: mol_type = other DNA
aaacctccatgaaaatggcagagatcctcaccggtgcgcgtaaaacctacggtctgaacctgatcggcgggattc

SEQ ID NO: 448420 - DNA, 75 bp, synthetic construct
  source 1..75: mol_type = other DNA
gatccagacccgtcaactggcgcagcaaatgcgtcgtgaagtacaggagctggtggatgtgctgctgagtacgcc

SEQ ID NO: 448421 - DNA, 75 bp, synthetic construct
  source 1..75: mol_type = other DNA
cagatacgtccgttcgcacaatctccctgctgccggcagccggagaggctgctgccggcagccggagaggctgct

SEQ ID NO: 448422 - DNA, 75 bp, synthetic construct
  source 1..75: mol_type = other DNA
ctctataccaacaaggattccatatcgttggggctggtttgtggattgggtgatatcgcccatgcgcaaaaaagc

SEQ ID NO: 448423 - DNA, 75 bp, synthetic construct
  source 1..75: mol_type = other DNA
cctggctgtttgccggttccccttctgacggcctgatgggcggcggatttctctataccaacaaggattccgtat

SEQ ID NO: 448424 - DNA, 75 bp, synthetic construct
  source 1..75: mol_type = other DNA
atgattcacctggttacagtttggctttgcatttttagcgttcgtctccttgctggcggcgtgattaaagagagt

SEQ ID NO: 448425 - DNA, 75 bp, synthetic construct
  source 1..75: mol_type = other DNA
gatggtccgtgccagcggtcacgctcgcgatacccgcgccgatcacccgtttgttggttatggcctgctgccaat

SEQ ID NO: 448426 - DNA, 75 bp, synthetic construct
  source 1..75: mol_type = other DNA
tcagccttcatcagtggtaaggcaccggaaatcaaaccctcgcccggcggcaacacgccatcgggtccgtctgca

SEQ ID NO: 448427 - DNA, 75 bp, synthetic construct
  source 1..75: mol_type = other DNA
ggccaaccaggatgcaaagaaccagatcacactggagtcacagggagcccaagcagatatcaaagtggctgttgc

SEQ ID NO: 448428 - DNA, 75 bp, synthetic construct
  source 1..75: mol_type = other DNA
atgaagctgagatataagctggttattgttgccttctttgttaccgtcatcggttcttttatctggtctgccgag

SEQ ID NO: 448429 - DNA, 75 bp, synthetic construct
  source 1..75: mol_type = other DNA
attacccgtaacgttctgcaatcactgcaaatcatcaatacagttatagaggctaaccagcatgcaaaagagcag

SEQ ID NO: 448430 - DNA, 75 bp, synthetic construct
  source 1..75: mol_type = other DNA
agggtcggcaaagtatttttaaagtattcacgttggatgagcgtccagaagtcttatcagaacctacccttgatg

SEQ ID NO: 448431 - DNA, 75 bp, synthetic construct
  source 1..75: mol_type = other DNA
cagcctgatcccaagcctgaaattccgtcgcgtagaagcagtgatggcgggcatggatatcactccggagcgtga

SEQ ID NO: 448432 - DNA, 75 bp, synthetic construct
  source 1..75: mol_type = other DNA
cataatataacttgtgcagatgagcatgcttttgctatttttgcacgaacaaaatattctaacccgaatgatatt

SEQ ID NO: 448433 - DNA, 75 bp, synthetic construct
  source 1..75: mol_type = other DNA
accgaacaaacgaaacagcaatgagaccgttgcgaaaagcgacaatagacaaattccctgaatatatcgacccgc

SEQ ID NO: 448434 - DNA, 75 bp, synthetic construct
  source 1..75: mol_type = other DNA
ttgctctgccaccagaaacaaaagcagaacggaagtaccgacgcgatatacaactcgcagaaaaacaggaaaaag

SEQ ID NO: 448435 - DNA, 75 bp, synthetic construct
  source 1..75: mol_type = other DNA
ctgccattaccgcaatgctggagccacagagtatgcctgggagactgaccggtcactgatgcaactggtcaccgc

SEQ ID NO: 448436 - DNA, 75 bp, synthetic construct
  source 1..75: mol_type = other DNA
tctctgctttcttctttactgtcattggctctttcatctggtcagcgaatcactactacagcaaatatcagcatg

SEQ ID NO: 448437 - DNA, 75 bp, synthetic construct
  source 1..75: mol_type = other DNA
agaacgatatcaaggctgctgttgcggatgatgattgtgctgttcgttttgtgccttctggcgcagttaagcggc

SEQ ID NO: 448438 - DNA, 75 bp, synthetic construct
  source 1..75: mol_type = other DNA
ttttacttgctgaggatgaccgccttttgggataccggatcgaacctgtcaaatgggacaaatgggaggttaaca

SEQ ID NO: 448439 - DNA, 75 bp, synthetic construct
  source 1..75: mol_type = other DNA
ttctttggatgaattaaatgattttctctctatgaatgaatctgaccttgatagtgaagctactaaagaggcttc

SEQ ID NO: 448440 - DNA, 75 bp, synthetic construct
  source 1..75: mol_type = other DNA
gcagccttttgtcttattcaaaggccttacatttcaaaaactctgcttaccaggcgcatttcgcccaggggatca

SEQ ID NO: 448441 - DNA, 75 bp, synthetic construct
  source 1..75: mol_type = other DNA
tgtggaacacggtgtacctggaacggcactgttgcaaagttagcgatgaggcagccttttgtcttattcaaaggc

SEQ ID NO: 448442 - DNA, 75 bp, synthetic construct
  source 1..75: mol_type = other DNA
ggcaatgcgcgagtcgtgaacaccaatgcgatgtcttttctaatgcaaaaaggaacgccgcataatattgtgttt

SEQ ID NO: 448443 - DNA, 75 bp, synthetic construct
  source 1..75: mol_type = other DNA
ctgcgacactgacaccatcgttggggaaaacggccatatcgggcacggagcgatcctgcatggttgtgtgattgg

SEQ ID NO: 448444 - DNA, 75 bp, synthetic construct
  source 1..75: mol_type = other DNA
gtttgtccatcccagtgccgtcttgattggcgatgtgattgtgggagccggtgtctacatcggcccactcgcctc

SEQ ID NO: 448445 - DNA, 75 bp, synthetic construct
  source 1..75: mol_type = other DNA
ctcgctggccagggcggtgttcttcaaccgccttggggaaatcagggatcggagcttcgagcagcagcgctaccg

SEQ ID NO: 448446 - DNA, 75 bp, synthetic construct
  source 1..75: mol_type = other DNA
cgtatcgccacctcttatcctcacctgctcaagcgttatctcgaccagaaaggtatctcttttaaatcctgctta

SEQ ID NO: 448447 - DNA, 75 bp, synthetic construct
  source 1..75: mol_type = other DNA
gaaacgatggaaaaactgaaagcgctgggtgccagttcgattctggtcctgccgattgagaagatgatggagtga

SEQ ID NO: 448448 - DNA, 75 bp, synthetic construct
  source 1..75: mol_type = other DNA
cggacggccagaacttccgcaccggcagcaaggccgagagcaccggccacatcaacccgaaatacgggagcagcc

SEQ ID NO: 448449 - DNA, 75 bp, synthetic construct
  source 1..75: mol_type = other DNA
tccggcaaactggtcgttatatcgcgaaaaagtggcgggtcaggttgcttatcgcctgtatcaacgtgaaacaca

SEQ ID NO: 448450 - DNA, 75 bp, synthetic construct
  source 1..75: mol_type = other DNA
atcgcgtggtttctcagcagttaattaagaatctggcgacactaaaagcaggcaatgcacgcgtggtgaacagca

SEQ ID NO: 448451 - DNA, 75 bp, synthetic construct
  source 1..75: mol_type = other DNA
tccggcgaactggtcattacatcgggaaaaagtggcaggtcaggtggcttaccgcctgtatcaacgcgaagcaca

SEQ ID NO: 448452 - DNA, 75 bp, synthetic construct
  source 1..75: mol_type = other DNA
actggtcaccgcattctgggcaacgctggcactgatgtatatgtcgtttgcggcaggcaccgggaaatatccgat

SEQ ID NO: 448453 - DNA, 75 bp, synthetic construct
  source 1..75: mol_type = other DNA
ggcaacgtttcacaaaccgcgaaatccccggcagagcgcaagagagcgcagcgcgagagggaaaaattacgaaaa

SEQ ID NO: 448454 - DNA, 75 bp, synthetic construct
  source 1..75: mol_type = other DNA
aggcagcggaacctgattaccaggaaagcctgagcgaacccatcgggaagtttccgatggccggtggctggcatc

SEQ ID NO: 448455 - DNA, 75 bp, synthetic construct
  source 1..75: mol_type = other DNA
gtgattaaaaagataatggttgtttttggtacaagaccagaagcaatcaaaatggctcctcttgtgcatgaaata

SEQ ID NO: 448456 - DNA, 75 bp, synthetic construct
  source 1..75: mol_type = other DNA
gccagacaaagaggcaatcctctacgacgcgctgcgctatcttagccaacagatagatgtctggcgtcgtcagtt

SEQ ID NO: 448457 - DNA, 75 bp, synthetic construct
  source 1..75: mol_type = other DNA
caaccgctatccgggctgcctgtttatcgctgcctgtacgttttatcccgatccagagcaccctattcatcaact

SEQ ID NO: 448458 - DNA, 75 bp, synthetic construct
  source 1..75: mol_type = other DNA
ccgcatcgcgggcagttcaggaaattcgggcagcacgtgagcagtgggaacgtgaaaacggatttatcagcgacg

SEQ ID NO: 448459 - DNA, 75 bp, synthetic construct
  source 1..75: mol_type = other DNA
gatcatcgaaaccaagccgctgacgctcagtgatggtgctgtcgtgacaggttcatacgacgtgtttgcgaccct

SEQ ID NO: 448460 - DNA, 75 bp, synthetic construct
  source 1..75: mol_type = other DNA
cgatcagtgatggagcaccaatccagtctttggatgatgttgtaatcaccttgactgatactgccgacccgagtc

SEQ ID NO: 448461 - DNA, 75 bp, synthetic construct
  source 1..75: mol_type = other DNA
ctcccaatatgctatgagcatagataattcagcgccgacactaaccgtatcgatcagtgatggagcaccaatcca

SEQ ID NO: 448462 - DNA, 75 bp, synthetic construct
  source 1..75: mol_type = other DNA
acacttgtatctctgactagtattatcttagacaagcttaatgagatctttatagcagataaacccgatatgatt

SEQ ID NO: 448463 - DNA, 75 bp, synthetic construct
  source 1..75: mol_type = other DNA
accgtattttaggtggtgtcgaaaacatcattttaattgagccgcaagaatacatgccatttatatatttgatga

SEQ ID NO: 448464 - DNA, 75 bp, synthetic construct
  source 1..75: mol_type = other DNA
ggcctccaacggcaatcatccactgggatggcgggtaagcattttcacccgtaatggtacacgggtgacgttgaa

SEQ ID NO: 448465 - DNA, 75 bp, synthetic construct
  source 1..75: mol_type = other DNA
acaaacagcacctgccggacagttcccggtcagtgaatgctggttttcttcctctgattcttcaggcagatcaga

SEQ ID NO: 448466 - DNA, 75 bp, synthetic construct
  source 1..75: mol_type = other DNA
ttccctgccggaaaaaatcaggaaataccctgtttattttcctgatgacagaacaaacagaaacaacggagataa

SEQ ID NO: 448467 - DNA, 75 bp, synthetic construct
  source 1..75: mol_type = other DNA
tcaccagaaaagattcggagaacagtgaaaaaaaatatattcgtgttgcaaccgcagatgaacgtctgaaagaca

SEQ ID NO: 448468 - DNA, 75 bp, synthetic construct
  source 1..75: mol_type = other DNA
aaatgaaatgtgtccgtgtggcaacagcagatgagcgtctgaaggaagttcttgcagaagacacttccctgccgg

SEQ ID NO: 448469 - DNA, 75 bp, synthetic construct
  source 1..75: mol_type = other DNA
tgcgacccggaaaaatgaaatgtgtccgggtgggaaccgcagatgaacatctgaaggaagtttatacggaagata

SEQ ID NO: 448470 - DNA, 75 bp, synthetic construct
  source 1..75: mol_type = other DNA
agaaatatggtgattttgataatggcattccggtcgatgacaccattgcacgcgttgtgagtaacattgacagtt

SEQ ID NO: 448471 - DNA, 75 bp, synthetic construct
  source 1..75: mol_type = other DNA
ttgccgaagatgcttcctgtatatcagaaaaaattacgaaacatcatatttattttcctgactacaggataaata

SEQ ID NO: 448472 - DNA, 75 bp, synthetic construct
  source 1..75: mol_type = other DNA
gcactgatgtttatgtcgtttgcagcaggcaccgggaaatatccgatgtggcccggaaaaatgaaatgtgtccgg

SEQ ID NO: 448473 - DNA, 75 bp, synthetic construct
  source 1..75: mol_type = other DNA
ccagagttgcttaacctactgtatttaaagaaaaatttgataaccattgatgctatgggctgtcagaaagatatc

SEQ ID NO: 448474 - DNA, 75 bp, synthetic construct
  source 1..75: mol_type = other DNA
ctaccttgaaagtctgcgtaatgcccccattaaggtctatgccctgaacgaagaccttattgcccgcggtttgac

SEQ ID NO: 448475 - DNA, 75 bp, synthetic construct
  source 1..75: mol_type = other DNA
aggaagtttatacggaagattcttctctgtcggaaaaaatcaggaaatgccgtgtttatttccctgatgacagga

SEQ ID NO: 448476 - DNA, 75 bp, synthetic construct
  source 1..75: mol_type = other DNA
ctgaaggaagtttatacggaagatacttctctgtcggaaaaaatcaggaaatgccatgtttatttccctgatgac

SEQ ID NO: 448477 - DNA, 75 bp, synthetic construct
  source 1..75: mol_type = other DNA
cctgccgggaaaaatcaggaaatgccatgcttatttccctgataacagaacaaacagaaacaacggagataaaaa

SEQ ID NO: 448478 - DNA, 75 bp, synthetic construct
  source 1..75: mol_type = other DNA
gcctcgtttgccgatgaagcgcagcagcatcgttccattgccgagcaactggcgcaccaggcgaatttagttaac

SEQ ID NO: 448479 - DNA, 75 bp, synthetic construct
  source 1..75: mol_type = other DNA
atgaaaggcattatttccggaacgggtatagcccgactggcgggctgtctgcctctgttgctgacgctgtctgcc

SEQ ID NO: 448480 - DNA, 75 bp, synthetic construct
  source 1..75: mol_type = other DNA
ttgtgcaggcaacacctgatgctattgcacagaaaagcgttcagcccggagagtatgagtcagtagcgcattttg

SEQ ID NO: 448481 - DNA, 75 bp, synthetic construct
  source 1..75: mol_type = other DNA
attaatgatttcaggttgtatcgtgaaattagtgacggaaaaagcatcacgtacatgatcgccgggttaaacaaa

SEQ ID NO: 448482 - DNA, 75 bp, synthetic construct
  source 1..75: mol_type = other DNA
attcgaacgctggaaagctatcgacaccagggataagcggaaaaaattcacggcgctgattccggcaattatgga

SEQ ID NO: 448483 - DNA, 75 bp, synthetic construct
  source 1..75: mol_type = other DNA
cgcgggctgaaggtgtgctcgcatttaattgtcggtctgccaggcgaagggctggctgaatgtctgcaaacgctg

SEQ ID NO: 448484 - DNA, 75 bp, synthetic construct
  source 1..75: mol_type = other DNA
aggatcataatcattctaatggtacgcctttaatagatggtagtatgaattttgatttttttgcatttacccaag

SEQ ID NO: 448485 - DNA, 75 bp, synthetic construct
  source 1..75: mol_type = other DNA
tgtttgcagcactggcgttacgtgcaggtatgtggcaattgaatggaacattaagcagcactttatcttcagcaa

SEQ ID NO: 448486 - DNA, 75 bp, synthetic construct
  source 1..75: mol_type = other DNA
gacagggtgttaatcttggtgccaaaaaacttcgtcaggccgctattgagagagcaaaaaaaatatacggtggtt

SEQ ID NO: 448487 - DNA, 75 bp, synthetic construct
  source 1..75: mol_type = other DNA
atgtacaggccacgccggatgcacttgcacagaaaagcgtaacacccgggacatattattcaacagcaaatttcg

SEQ ID NO: 448488 - DNA, 75 bp, synthetic construct
  source 1..75: mol_type = other DNA
atgtcgcctgtcttacaggctgcctgtctttattgctaacgctgtctgtcggagcggtaaatgtctcttttaatg

SEQ ID NO: 448489 - DNA, 75 bp, synthetic construct
  source 1..75: mol_type = other DNA
caacgcctgatgccatttcgaataaaagtgtacaaccgggagagtacaaatccttggccaagtttgagcttacgt

SEQ ID NO: 448490 - DNA, 75 bp, synthetic construct
  source 1..75: mol_type = other DNA
ggctaatgcccgtattgatttacgctcaaaatactatgttaaacctaaagctgaccatccctggcttacgcgccg

SEQ ID NO: 448491 - DNA, 75 bp, synthetic construct
  source 1..75: mol_type = other DNA
catcaagggtatccgaatctgaaacgcttgctgcaacagcaaaagcggcagcgatgaattatgcggatatacagg

SEQ ID NO: 448492 - DNA, 75 bp, synthetic construct
  source 1..75: mol_type = other DNA
gtgttgctgcatcatcacttgctgcatcacaaaactactcagatatgaaagggttgtttggtcaatgcggaatga

SEQ ID NO: 448493 - DNA, 75 bp, synthetic construct
  source 1..75: mol_type = other DNA
acaaacttgcggggcttatcggggcattgtcaccagagtcgcggcgtaagctggctgcagaaatagctaaggaac

SEQ ID NO: 448494 - DNA, 75 bp, synthetic construct
  source 1..75: mol_type = other DNA
gaaaatatgtagtgctgtcagtgagcactaatattcagtcgccagccgtcattgtcactgtaaagctgagcgata

SEQ ID NO: 448495 - DNA, 75 bp, synthetic construct
  source 1..75: mol_type = other DNA
tggaaatatattttatgattatgactttacccgtggacatcgccgtttaggtttaggcgccgaagctggacggat

SEQ ID NO: 448496 - DNA, 75 bp, synthetic construct
  source 1..75: mol_type = other DNA
gtgttacagacggcattggctttacgcttaccggcactgatggggtatataccattcagttctgccagttacggc

SEQ ID NO: 448497 - DNA, 75 bp, synthetic construct
  source 1..75: mol_type = other DNA
taagcgtgaaaagttcacggcgctagtgcctgcaattatggaggctatccggattaatgatttcaggttgtatcg

SEQ ID NO: 448498 - DNA, 75 bp, synthetic construct
  source 1..75: mol_type = other DNA
gtggagtccgggctgctttttgcggatccagttgttgtggaacgtgagactgacgagcttatagaaaaagctatt

SEQ ID NO: 448499 - DNA, 75 bp, synthetic construct
  source 1..75: mol_type = other DNA
gttaaataaagaatatggcgatgtggtggaatccggactgctttttgcagatcctgccgttgtagatcgtgaaac

SEQ ID NO: 448500 - DNA, 75 bp, synthetic construct
  source 1..75: mol_type = other DNA
acaccctacgcgccacgccagcagcagagcgccagaaaaaagaccggtcgcgttaagcgaaaaatgtttgcgaaa

SEQ ID NO: 448501 - DNA, 75 bp, synthetic construct
  source 1..75: mol_type = other DNA
atgaatgagtttaagcgttttgaagaccggctgaccggactgattgagtcgctgtcaccgtcagggcgtcggcgg

SEQ ID NO: 448502 - DNA, 75 bp, synthetic construct
  source 1..75: mol_type = other DNA
atgaatgagtttaagcgttttgaagaccgactgaccggactgattgaatcgctgtcaccgtcagggcgtcgacga

SEQ ID NO: 448503 - DNA, 75 bp, synthetic construct
  source 1..75: mol_type = other DNA
tatgggtaaaaatgcagggattggcgcatggaaaggcgttcgccgtcaggatggagggttcaaccagtctcctgg

SEQ ID NO: 448504 - DNA, 75 bp, synthetic construct
  source 1..75: mol_type = other DNA
atcgtttaaaagaaatttcatgtgagctaggaaagcaggggccggggagttctaaaaccgcatttgccaggagaa

SEQ ID NO: 448505 - DNA, 75 bp, synthetic construct
  source 1..75: mol_type = other DNA
ggatgattacgggagcgtggtacagcgccctgagactggagagagacgatcacccaagtctggtccattttcctg

SEQ ID NO: 448506 - DNA, 75 bp, synthetic construct
  source 1..75: mol_type = other DNA
gacgttgcgcccgctgatcggcggcaccctgaacatcaagcacgtgcgtgcccactgggacgacatcctgcgcct

SEQ ID NO: 448507 - DNA, 75 bp, synthetic construct
  source 1..75: mol_type = other DNA
tgaatgggctacgcttccagcccgcaagccggtccgtttcagtcgtaccggtgccattttaacccatgaaaatca

SEQ ID NO: 448508 - DNA, 75 bp, synthetic construct
  source 1..75: mol_type = other DNA
cacgtcatcaaaccgacttcattgtcattacgtctgcgtaaagcaacagttgccgataccgcagttatcgaaatt

SEQ ID NO: 448509 - DNA, 75 bp, synthetic construct
  source 1..75: mol_type = other DNA
tcggtgcacatcaggcagaagtcgaactgccgatgatcctcaaaacgtccattcagctacgtgaacaccagcgta

SEQ ID NO: 448510 - DNA, 75 bp, synthetic construct
  source 1..75: mol_type = other DNA
cttgccaccgtcaaccgcatggcggcagccaacgacctgccggatgccatcatcaccgagtcgggcttgaagatc

SEQ ID NO: 448511 - DNA, 75 bp, synthetic construct
  source 1..75: mol_type = other DNA
atcgtgcaagcgggggccaatattcaggatggttgcatcatgcacggctactgcgataccgacaccattgtgggg

SEQ ID NO: 448512 - DNA, 75 bp, synthetic construct
  source 1..75: mol_type = other DNA
tcgcgatgcattggtcgggatgaacagcgtgattatggatggcgcggtcattggcgaagagagcattgttgccgc

SEQ ID NO: 448513 - DNA, 75 bp, synthetic construct
  source 1..75: mol_type = other DNA
ggggcacatcaacccaaaatatggcagcagcccaggacggactttctacacccacatctccgaccaatacgcgcc

SEQ ID NO: 448514 - DNA, 75 bp, synthetic construct
  source 1..75: mol_type = other DNA
tcgacagcgttggctgaactggtcaacgctcagtttcggcatccctttgccgggcactggggcgatggcaccaca

SEQ ID NO: 448515 - DNA, 75 bp, synthetic construct
  source 1..75: mol_type = other DNA
tgttgaccacgatcctggccgacgcgatcaacctgggcctgaccaagatggccgagtcctgccccggcacgacct

SEQ ID NO: 448516 - DNA, 75 bp, synthetic construct
  source 1..75: mol_type = other DNA
cgcatcccaggagagaatggcgaactcagtcacgtcatcatccctcccgaagtgaaagaagtcctgaattcaata

SEQ ID NO: 448517 - DNA, 75 bp, synthetic construct
  source 1..75: mol_type = other DNA
accgatggtttacctgttggattcaaggttaacacatcaaatgcaccggagttgattcatgaaaatcaagcatga

SEQ ID NO: 448518 - DNA, 75 bp, synthetic construct
  source 1..75: mol_type = other DNA
tgggaagttaccccgcatgaaattcgccctgatatttatcctaacccaaccgatggtttacctgttggattcaag

SEQ ID NO: 448519 - DNA, 75 bp, synthetic construct
  source 1..75: mol_type = other DNA
ggctggatagtaactccgcacgagattgatagcagtacttatcccaacccaaccgacggcttacctgtcgagttt

SEQ ID NO: 448520 - DNA, 75 bp, synthetic construct
  source 1..75: mol_type = other DNA
gagctgggatgacttttttaaatggcatcctgacaatatctatagcaaatgcagatgagctaaatctaatctcaa

SEQ ID NO: 448521 - DNA, 75 bp, synthetic construct
  source 1..75: mol_type = other DNA
ggatggatcagttatgggtgaaggttatacaagttgcaactcttatttttgataaagatacatctactgtgcctg

SEQ ID NO: 448522 - DNA, 75 bp, synthetic construct
  source 1..75: mol_type = other DNA
tcctgtcgataatgagccaatcagaattagggcgtcgtcttggtaaaactccacaaaccataagtgggtggttta

SEQ ID NO: 448523 - DNA, 75 bp, synthetic construct
  source 1..75: mol_type = other DNA
agagaataactcaggcagaagccgctgatgaaacgcatatcaccgcaccatggaatgacagccaattaccgttgg

SEQ ID NO: 448524 - DNA, 75 bp, synthetic construct
  source 1..75: mol_type = other DNA
atttagcgatgtgctggatattgcgaagtatggcgatcgcgtgattggcattggtgaatttgaaaaaatctcctc

SEQ ID NO: 448525 - DNA, 75 bp, synthetic construct
  source 1..75: mol_type = other DNA
ctgcagcgtcgacgtgcattggccagagatatgctctgcgctactcccgatttgagtggtgcggattttgaggcc

SEQ ID NO: 448526 - DNA, 75 bp, synthetic construct
  source 1..75: mol_type = other DNA
gaccgatggtttacctgttggatgtaaggctaacacacaaaatacacaggagttgattcatgaaaatcaggcatg

SEQ ID NO: 448527 - DNA, 75 bp, synthetic construct
  source 1..75: mol_type = other DNA
agcattgttaaatataaatagaacaatcgctaaagaaattgttaaagcacgagttcgtgaaggcaagcttgatct

SEQ ID NO: 448528 - DNA, 75 bp, synthetic construct
  source 1..75: mol_type = other DNA
tgcattaatacttaatctcatcatgttttgtgagatgtttttatcatcattatcatccttggttgtggtcaatga

SEQ ID NO: 448529 - DNA, 75 bp, synthetic construct
  source 1..75: mol_type = other DNA
cccacttaagcaaatgttgctggcgtgagatttatgaacgcctgggctatcgggacatgattcaactgcgccagg

SEQ ID NO: 448530 - DNA, 75 bp, synthetic construct
  source 1..75: mol_type = other DNA
ggcattgtccagttactcaggaagtgcattggttgttatggcggctcgtctactgattatcaccggtttgcggac

SEQ ID NO: 448531 - DNA, 75 bp, synthetic construct
  source 1..75: mol_type = other DNA
atggccaaagaaagggcattaacgctggaagcactgcgtgttatggacgcgatcgatcgccgtggcagttttgcg

SEQ ID NO: 448532 - DNA, 75 bp, synthetic construct
  source 1..75: mol_type = other DNA
ggttgcggcttcatgctgtatcaagacgataagtttgtttgcccgcgatgcggtggtcgtggtgagatagaaatc

SEQ ID NO: 448533 - DNA, 75 bp, synthetic construct
  source 1..75: mol_type = other DNA
atgaaactggcagtcgtcactggacaaattgtttgtaccgtacgccatcacggactggcgcatgacaaattgctg

SEQ ID NO: 448534 - DNA, 75 bp, synthetic construct
  source 1..75: mol_type = other DNA
agcgcgggttggagcattgtaaaagaatgcgtcttcagatcaacccagcctacagcgatgcgggggactggtggg

SEQ ID NO: 448535 - DNA, 75 bp, synthetic construct
  source 1..75: mol_type = other DNA
aagaacaggagaactaagagcaggtgagtggcgtgaggtggattttgataatgcggtgtgggagattcctaaaga

SEQ ID NO: 448536 - DNA, 75 bp, synthetic construct
  source 1..75: mol_type = other DNA
tgagcgaagccagtatcaatcaggtgtttaagcgaattggctataccggccgcgttacggggcatggattccgtc

SEQ ID NO: 448537 - DNA, 75 bp, synthetic construct
  source 1..75: mol_type = other DNA
tccaatcatttcccgttcttaaaagctgatgagatacccgaatttctgcgtgccttagagagttacaccgggagt

SEQ ID NO: 448538 - DNA, 75 bp, synthetic construct
  source 1..75: mol_type = other DNA
agtaccattgaagataaacgccaggcgttactggcggggctgggtgtcgcaactatgccatatccgatggtggaa

SEQ ID NO: 448539 - DNA, 75 bp, synthetic construct
  source 1..75: mol_type = other DNA
gatgaaatcgatctcaacaaggctatctgggagatacctgcttcacggatgaaaatgcgtcgccctcatgtagtg

SEQ ID NO: 448540 - DNA, 75 bp, synthetic construct
  source 1..75: mol_type = other DNA
caccagtgccatgcaggggcatgaatctacacattacccgttcctgacaaccgaagagcttcctgccttctttaa

SEQ ID NO: 448541 - DNA, 75 bp, synthetic construct
  source 1..75: mol_type = other DNA
taaaagaggagcttttgcaacgcatcagagaggagctggagcgatctgggccagactatcaacttcccctggagc

SEQ ID NO: 448542 - DNA, 75 bp, synthetic construct
  source 1..75: mol_type = other DNA
gtttggcggtggaagtgatggtaaaggtgaaacaagaagttatctgaactcttcatactcaggggataaaatcta

SEQ ID NO: 448543 - DNA, 75 bp, synthetic construct
  source 1..75: mol_type = other DNA
cactattccgtaaaagtggtattgcggtcgcagtgactgctgcgatgagctgtttatcggttaatgcaactgaaa

SEQ ID NO: 448544 - DNA, 75 bp, synthetic construct
  source 1..75: mol_type = other DNA
atgattaacgcggtggatgcgccgggggatatcactctggggcagtgccggatacctgcaacaaaactgcgggat

SEQ ID NO: 448545 - DNA, 75 bp, synthetic construct
  source 1..75: mol_type = other DNA
aattccttgaaaaggatttcatctgccagagtattacagttaagaggggggcaagacgctgttagattggcaatt

SEQ ID NO: 448546 - DNA, 75 bp, synthetic construct
  source 1..75: mol_type = other DNA
cctgacatgtctgaagccgctcgtgaatgcttccggtgcgcagtttggctttgaaatgacctcctttgacagcat

SEQ ID NO: 448547 - DNA, 75 bp, synthetic construct
  source 1..75: mol_type = other DNA
cagtcttgaagctggtattcctgacgaacaaagcgatatagatggaggaattttatctgcctcatatgggtatgg

SEQ ID NO: 448548 - DNA, 75 bp, synthetic construct
  source 1..75: mol_type = other DNA
tggaatacggtgacgattgatgcgggcacgctgccgctgagcaccgaactgacgaacaccagtcagaaggtggtg

SEQ ID NO: 448549 - DNA, 75 bp, synthetic construct
  source 1..75: mol_type = other DNA
cactgaacggtaattatgcgccggggcgttatctggttgacctgtccctgaacgggaaggagagcggaaagcaga

SEQ ID NO: 448550 - DNA, 75 bp, synthetic construct
  source 1..75: mol_type = other DNA
gaaagccaatatcgggcgctgggtggtgagctcttcggccacggccagcacgggtgacagtggtggaaactccgc

SEQ ID NO: 448551 - DNA, 75 bp, synthetic construct
  source 1..75: mol_type = other DNA
tccgccaccgcaagtacgggtgacagtggtgataataatgcatcgataaatatgtttactgccacccgggcgatt

SEQ ID NO: 448552 - DNA, 75 bp, synthetic construct
  source 1..75: mol_type = other DNA
gggagggactcttaacaactcatcgaatagtggtacaaatggttctgtttcattaagtggttctgtactggcagt

SEQ ID NO: 448553 - DNA, 75 bp, synthetic construct
  source 1..75: mol_type = other DNA
tcgccgtgctgcactggcgcttgccacatcggcggtgtttgccagtgttgcgacagttgccggtgaaaaactgga

SEQ ID NO: 448554 - DNA, 75 bp, synthetic construct
  source 1..75: mol_type = other DNA
tttgggaaattcctgctgaaaggatgaaaatgcgcaggccacaccttgtgccattatcgactcaagcgttagatt

SEQ ID NO: 448555 - DNA, 75 bp, synthetic construct
  source 1..75: mol_type = other DNA
tggaagagatctacgccctgtgcagcgcctattccacaacctacaacatgccactggcgctgcatctcgaccacc

SEQ ID NO: 448556 - DNA, 75 bp, synthetic construct
  source 1..75: mol_type = other DNA
caggatgaggacaaaatgctgatgcagaaagcggcaggacttgccggaggcgtccggttcggtggggacggaggg

SEQ ID NO: 448557 - DNA, 75 bp, synthetic construct
  source 1..75: mol_type = other DNA
gcggtggcttctacactgtggttcttcttaacctggttcccgaactatttaacccaggaaaaaggaatcacggcg

SEQ ID NO: 448558 - DNA, 75 bp, synthetic construct
  source 1..75: mol_type = other DNA
aaaggattacatgattatccggtattggggcaaagcctttttagtaaagttaaggtaagtacttgtacttttcgg

SEQ ID NO: 448559 - DNA, 75 bp, synthetic construct
  source 1..75: mol_type = other DNA
tcaaaataaagaaattattgataaaatgagattaagtggtgtcggcgcagaaatgactgatggagaaattgcttg

SEQ ID NO: 448560 - DNA, 75 bp, synthetic construct
  source 1..75: mol_type = other DNA
ccggcaacaagaagcgtgtacgacgcggtgttaacgtggatatttcgggtactcatcctgctttctcctctctct

SEQ ID NO: 448561 - DNA, 75 bp, synthetic construct
  source 1..75: mol_type = other DNA
atgtattttcggccttcgcctggctttatttatacgctatgccagatccccggcggttggtttttagatcgcgta

SEQ ID NO: 448562 - DNA, 75 bp, synthetic construct
  source 1..75: mol_type = other DNA
cgctgggctttgcgcgtaaaacaccaataatctgcggcttgttgatctccacctgcattatgggtgctaactata

SEQ ID NO: 448563 - DNA, 75 bp, synthetic construct
  source 1..75: mol_type = other DNA
atataaagaaggatatcttatgaaggaagtcaataaaagtaaattttccttagaacaagatattttattctttaa

SEQ ID NO: 448564 - DNA, 75 bp, synthetic construct
  source 1..75: mol_type = other DNA
agaactcaattcgtggcacgtacaatcatgcgcaatatctggacgggcggcgcgagatgctccagtggtacgccg

SEQ ID NO: 448565 - DNA, 75 bp, synthetic construct
  source 1..75: mol_type = other DNA
ttgtcgttgggcgtgtaccctgatgtgtctctgtctgatgccagagcggcaagggatgaggctaaaaggcttctt

SEQ ID NO: 448566 - DNA, 75 bp, synthetic construct
  source 1..75: mol_type = other DNA
tattcgtcgtattggctatgcagggcgcgttactggtcatgggttccggcataccatgagtacgattttgcatga

SEQ ID NO: 448567 - DNA, 75 bp, synthetic construct
  source 1..75: mol_type = other DNA
tcgcttcaatggaaaagagaagcgtatggcctttggtgtctatccggcagtgtcccttgcacaagcgagggcact

SEQ ID NO: 448568 - DNA, 75 bp, synthetic construct
  source 1..75: mol_type = other DNA
acacgatgagtacgattttgcatgaggaagggttcaatacggcgtggattgaaacccagctggctcacgttgata

SEQ ID NO: 448569 - DNA, 75 bp, synthetic construct
  source 1..75: mol_type = other DNA
gtgctgcgtcgaatggaaagccgtggcgcgacagagaaggccaagaaggttcgccagcgttgcagtgaagtcttt

SEQ ID NO: 448570 - DNA, 75 bp, synthetic construct
  source 1..75: mol_type = other DNA
ttctgccggtgacagcgtgttactgtccgccggtaatgacctgaacatgaacgcgatacaggccggcgaacgtcg

SEQ ID NO: 448571 - DNA, 75 bp, synthetic construct
  source 1..75: mol_type = other DNA
tgtgagctggggaactggtccgtaaccccccatgagctgcgtcctgatatttatccaaatccaaatgatggatta

SEQ ID NO: 448572 - DNA, 75 bp, synthetic construct
  source 1..75: mol_type = other DNA
atggattttgcaactatcacaagtagcgttgtgttgagtgcgtgtgttgctggcgtggtttcgctggttaatggt

SEQ ID NO: 448573 - DNA, 75 bp, synthetic construct
  source 1..75: mol_type = other DNA
tatgggaaatttctgctgaacgcatgaaaatgcgtcgtcctcatatcatcccgctatctacccaagcgttagcca

SEQ ID NO: 448574 - DNA, 75 bp, synthetic construct
  source 1..75: mol_type = other DNA
tgagcgaagccagtatcaatcaggtatttaagcgaattggctatacaggccgggttacgggtcacggcttccgtc

SEQ ID NO: 448575 - DNA, 75 bp, synthetic construct
  source 1..75: mol_type = other DNA
acacagccaagccaaaagagaaggcttacaagctgaccgatggtggcggtttgtatctcttggtaaaacctaatg

SEQ ID NO: 448576 - DNA, 75 bp, synthetic construct
  source 1..75: mol_type = other DNA
agtgaattcagcactaagcgccgtcagacccgaaaagagattttcctctcccgcatggagcagattctgccatgg

SEQ ID NO: 448577 - DNA, 75 bp, synthetic construct
  source 1..75: mol_type = other DNA
acgacgagtcacgcacatgtcacgacgagtcacgcacatgtcacgatgtgtcacgacatgtcacgacagataaag

SEQ ID NO: 448578 - DNA, 75 bp, synthetic construct
  source 1..75: mol_type = other DNA
ttttcgatgactactgtctggcagccgtcgtcggattttcgacaacgggcagcagtgtggggtatggctctgcct

SEQ ID NO: 448579 - DNA, 75 bp, synthetic construct
  source 1..75: mol_type = other DNA
gatacagataaagatacagatacagaattaaaccccacacataacgcgcgcgagagtattccgaccagtgagtcg

SEQ ID NO: 448580 - DNA, 75 bp, synthetic construct
  source 1..75: mol_type = other DNA
tggcacctggcgattgtatgatagcggaaataatgcaaggcctttaaatgtgggtcaatccggaacggggacgct

SEQ ID NO: 448581 - DNA, 75 bp, synthetic construct
  source 1..75: mol_type = other DNA
atgtggtatcaaaaaacgctcacgcttagcgccaaatctcgtggattccatctggtaacggatgaaattctgaat

SEQ ID NO: 448582 - DNA, 75 bp, synthetic construct
  source 1..75: mol_type = other DNA
gtatacctcggcaaacctgagtgcgtacagcaacagtattgtggatacgcccacgtactttgcgtttgcaaaagg

SEQ ID NO: 448583 - DNA, 75 bp, synthetic construct
  source 1..75: mol_type = other DNA
ggtacattaacctgcctgcgctgggaagataaacagtattttgtccagccgtcgaaccggcataaagatatgggt

SEQ ID NO: 448584 - DNA, 75 bp, synthetic construct
  source 1..75: mol_type = other DNA
agaaatcgaccgtttgctggggctggagattggcgccgatgactacatctgcaaaccgtacagcccacgggaagt

SEQ ID NO: 448585 - DNA, 75 bp, synthetic construct
  source 1..75: mol_type = other DNA
ctggcgcaaaaagcggatgagatgggcgcaaaatctttccgtattacttctgtaaccggtccgaataccctccat

SEQ ID NO: 448586 - DNA, 75 bp, synthetic construct
  source 1..75: mol_type = other DNA
acccctgggaaagataccctctggctgacgggcgatctggtcgcgcgcggcccgggttcgctggatgtcctgcgc

SEQ ID NO: 448587 - DNA, 75 bp, synthetic construct
  source 1..75: mol_type = other DNA
cgctgggaagataagcagtattttgtccagccgtcgaaccggcataaggatttgggcgaagcggcggcgtcttaa

SEQ ID NO: 448588 - DNA, 75 bp, synthetic construct
  source 1..75: mol_type = other DNA
tcgcctccatgcggctgtttgcccgtttatccctggatagcgccctgccggatcgcaccaccatcatgaatttcc

SEQ ID NO: 448589 - DNA, 75 bp, synthetic construct
  source 1..75: mol_type = other DNA
tcgcctccatgcggctgtttgcccgattatccctggatagcgccctgccggaacgcaccaccatcatgaatttcc

SEQ ID NO: 448590 - DNA, 75 bp, synthetic construct
  source 1..75: mol_type = other DNA
gaagagcagtcatttatccgtgccgtttacggtgtcggttaccgctgggaagctgacgcctgtcgtatcgtttaa

SEQ ID NO: 448591 - DNA, 75 bp, synthetic construct
  source 1..75: mol_type = other DNA
catccgtcgccggattttcgacggcgggctgcactgtggggagtgactctgccggagtcggaatttacgcctgct

SEQ ID NO: 448592 - DNA, 75 bp, synthetic construct
  source 1..75: mol_type = other DNA
gacgaacaccagtcagaaggtggtaccgacggacaaggcggtagtgtggatgccgtttgatgctctgaaggtcag

SEQ ID NO: 448593 - DNA, 75 bp, synthetic construct
  source 1..75: mol_type = other DNA
gaatgaccgtttcagctatggtctgggcggtgggcgtgacagcggtggtggtgtgagcagttatctgaatgcgtc

SEQ ID NO: 448594 - DNA, 75 bp, synthetic construct
  source 1..75: mol_type = other DNA
cctcagcctttggctcagcggacctgaaagccaatatcgggcactgggtggtgagctcttcggccacggccagca

SEQ ID NO: 448595 - DNA, 75 bp, synthetic construct
  source 1..75: mol_type = other DNA
ttttgtatactcgaaggaggtaatcgtgaacggtggcagcataaccatgcatctttgcccaaaatgttttggaca

SEQ ID NO: 448596 - DNA, 75 bp, synthetic construct
  source 1..75: mol_type = other DNA
atggccagatgtacagtggtgcgcctcatggcggttatgggacttgccggtgttctccggggtaaaaaggtccgc

SEQ ID NO: 448597 - DNA, 75 bp, synthetic construct
  source 1..75: mol_type = other DNA
attttgatgtttccacccagagtctggcgctgtccattccccaaaaggggctggtgaagatgccggagaacgtgg

SEQ ID NO: 448598 - DNA, 75 bp, synthetic construct
  source 1..75: mol_type = other DNA
atgtggggtcatatgcccgatacgctgaaggcccttgattacacctttagccgaccaaaactggcggcggaagtc

SEQ ID NO: 448599 - DNA, 75 bp, synthetic construct
  source 1..75: mol_type = other DNA
gggcggaatacggcacgctacctgggtcgttatctgaagaagccaccaatagcggcttcccggctggcgcattac

SEQ ID NO: 448600 - DNA, 75 bp, synthetic construct
  source 1..75: mol_type = other DNA
attcccggggcggttcagttttttaagatggtgaggtacttcgggttccttgccaaccgggtgtgtggagagaag

SEQ ID NO: 448601 - DNA, 75 bp, synthetic construct
  source 1..75: mol_type = other DNA
gaggaatatgaggacatgtcctcctttgacccgacagagttgtggtcgcagtcaaatcatggtcgccggacgaag

SEQ ID NO: 448602 - DNA, 75 bp, synthetic construct
  source 1..75: mol_type = other DNA
tggctgacgaaggccggtgtttatgtcagtgcagattactttcgtgaggggtatgacgccacacggcagtgctat

SEQ ID NO: 448603 - DNA, 75 bp, synthetic construct
  source 1..75: mol_type = other DNA
atctgcacgtgcattttatgcctggcgataaagtgttgctggggtggagtaaagattctttttctccgtatgaag

SEQ ID NO: 448604 - DNA, 75 bp, synthetic construct
  source 1..75: mol_type = other DNA
ctgcgattcgaaccggtgacgagctgctgggcatgctggcgaaagccacggcggaaggtaaggcggcagctgccg

SEQ ID NO: 448605 - DNA, 75 bp, synthetic construct
  source 1..75: mol_type = other DNA
cgagatcttcacggtaacgcccgtgccgatctcaaatcccgcttctctcagccatttggcgctgattttgatcac

SEQ ID NO: 448606 - DNA, 75 bp, synthetic construct
  source 1..75: mol_type = other DNA
cgccacagcccgttgttacagctccgtcgacaacgcctgcaacctcgcctgcaatggtgacaccgcaagccgcct

SEQ ID NO: 448607 - DNA, 75 bp, synthetic construct
  source 1..75: mol_type = other DNA
tgtctggcccgcagggtgacattcttccggtcagtaattcgacgctaaaaagcgaagatccgaccggcgcgccgg

SEQ ID NO: 448608 - DNA, 75 bp, synthetic construct
  source 1..75: mol_type = other DNA
tcgcctccatgcgcctgtttgcccgcttatccctggatagcgccatgccggaacgcaccaccatcatgaatttcc

SEQ ID NO: 448609 - DNA, 75 bp, synthetic construct
  source 1..75: mol_type = other DNA
gggaccgcccgtggggcgatgaaaaaccgcatagtacgatggtgtttatcgggattcagttgccggaggaagaga

SEQ ID NO: 448610 - DNA, 75 bp, synthetic construct
  source 1..75: mol_type = other DNA
gcaaccttccgagatcttcacggtaacgcccgtgccgatctcaaatcccgcttctctcagccatttggcgctgat

SEQ ID NO: 448611 - DNA, 75 bp, synthetic construct
  source 1..75: mol_type = other DNA
gggttaagcgctgcggaaattgtggaactggtacgagaagaagctatggctatttgtagcaaaggcggtgcggca

SEQ ID NO: 448612 - DNA, 75 bp, synthetic construct
  source 1..75: mol_type = other DNA
ctgaagaggacaggcacaaattggttatagagtataaagacgctctgcaacctgccgatttttatcaaaatttca

SEQ ID NO: 448613 - DNA, 75 bp, synthetic construct
  source 1..75: mol_type = other DNA
tggctaatgcgccggaaggcgattttgaccgctcattctctgatggcgttctcgaagatatcgccgaacagcttc

SEQ ID NO: 448614 - DNA, 75 bp, synthetic construct
  source 1..75: mol_type = other DNA
tgcggggctgaataaatttatcgtacagagttgctacgtgtttgatggcgagcaggatgaactatctgatgcgta

SEQ ID NO: 448615 - DNA, 75 bp, synthetic construct
  source 1..75: mol_type = other DNA
atctggccaccccacaagtagaaaatgggccttgtgtatcatcttttattatatcaggaacgacggcggcgaccc

SEQ ID NO: 448616 - DNA, 75 bp, synthetic construct
  source 1..75: mol_type = other DNA
ccggaggcattgcgtcgttttgaggcaatggtggaagaagtggcacgcaacgccgaagccgcctctcagagcgca

SEQ ID NO: 448617 - DNA, 75 bp, synthetic construct
  source 1..75: mol_type = other DNA
atgacgggtccgcatatttttatctggcagatgcatatcttaatataacagatatgtccattagaaaaacgggag

SEQ ID NO: 448618 - DNA, 75 bp, synthetic construct
  source 1..75: mol_type = other DNA
tatagcaggaacgacaacagggcgaaatatatgcacagttgctggtaacaaaggcatagatgtgactggcgatga

SEQ ID NO: 448619 - DNA, 75 bp, synthetic construct
  source 1..75: mol_type = other DNA
gagccgcgatttgaacgtgatggcctgcttattgaggggcaaagaactaatcttctgcttaattcaacaaatcca

SEQ ID NO: 448620 - DNA, 75 bp, synthetic construct
  source 1..75: mol_type = other DNA
atcggcaaactccgcgacagcagccaaaaaatcagaaaccaacgcgaaaaatagcgagacagccgcaaagacgag

SEQ ID NO: 448621 - DNA, 75 bp, synthetic construct
  source 1..75: mol_type = other DNA
ttggtgatgatgaaataacgatgcctggcgataaggttgtaaagtttaaacgcgcatcgaaagcaacctatatta

SEQ ID NO: 448622 - DNA, 75 bp, synthetic construct
  source 1..75: mol_type = other DNA
tttacattaaaaccagaaatggtagggcaaatttcagcgattaacatagtaaccgtttccggcagtaaaggtttt

SEQ ID NO: 448623 - DNA, 75 bp, synthetic construct
  source 1..75: mol_type = other DNA
acggtaatattggtgctaaggtagtttctccttataaaaaacacaaatatacaggaggcttcattaatattggtg

SEQ ID NO: 448624 - DNA, 75 bp, synthetic construct
  source 1..75: mol_type = other DNA
atcaacaccagcatcaacaacgtggaagagtgttagtggtgctacaggtataaggattggaggccagactacagc

SEQ ID NO: 448625 - DNA, 75 bp, synthetic construct
  source 1..75: mol_type = other DNA
tgaaataacgatgcctggcgataaggttgtaaagtttaaacgcgcatcaactgccacatatatcaataaatcagg

SEQ ID NO: 448626 - DNA, 75 bp, synthetic construct
  source 1..75: mol_type = other DNA
gcagggaggggcaaccgtatctggtgactatatttatctggccaccccacaagtagaagatgggccttgtgtatc

SEQ ID NO: 448627 - DNA, 75 bp, synthetic construct
  source 1..75: mol_type = other DNA
tggtggaggatgtggcacgcaacgctgaagccgcctctcagagcgcagcggcagcaaagaaatcagaaacagcag

SEQ ID NO: 448628 - DNA, 75 bp, synthetic construct
  source 1..75: mol_type = other DNA
gatggcctgcttattgagggacaaagaacgaacttcttccagaacagtacagacccttcgaagtggaataagtca

SEQ ID NO: 448629 - DNA, 75 bp, synthetic construct
  source 1..75: mol_type = other DNA
catgctcaattcggaaagtccagccagctgggggaagtcatcaaacatggatgtgcccgaaaccgggacggatag

SEQ ID NO: 448630 - DNA, 75 bp, synthetic construct
  source 1..75: mol_type = other DNA
tacatgcagtgcatcccgggggattgatgttagtggcgataataagtattgcactgtttcatgcagggttaaagc

SEQ ID NO: 448631 - DNA, 75 bp, synthetic construct
  source 1..75: mol_type = other DNA
ttccttttacggttctttgtgaggtacataagaactggtataaaacgccaaatgcagcaccgcgtgttttttata

SEQ ID NO: 448632 - DNA, 75 bp, synthetic construct
  source 1..75: mol_type = other DNA
gcagctggttctgcaagtgcggcggcttcttctgccactgcatcagccaacagtcaaaaagctgcaaaaaccagc

SEQ ID NO: 448633 - DNA, 75 bp, synthetic construct
  source 1..75: mol_type = other DNA
gattcttttaattttacttatgggagatttactgtaaaagatactcttattgatcagacaagtgcgattaatatc

SEQ ID NO: 448634 - DNA, 75 bp, synthetic construct
  source 1..75: mol_type = other DNA
cagccagacggcagcgaagaccagcgaaacgaatgctaaagccagtgaaactgcggcaaaaaacagccaggttgc

SEQ ID NO: 448635 - DNA, 75 bp, synthetic construct
  source 1..75: mol_type = other DNA
cagcgaagaccagcgaaacgaatgccaaagccagcgaaactgcggcgaaaaacagccaggttgcagcagcccaaa

SEQ ID NO: 448636 - DNA, 75 bp, synthetic construct
  source 1..75: mol_type = other DNA
gatgaagccgggcgttacagtatggacgttgagtatggtcagtacagcgtcaccctgctggttgaaggttttcca

SEQ ID NO: 448637 - DNA, 75 bp, synthetic construct
  source 1..75: mol_type = other DNA
accggcggtcatcaaaccggagcggctattattcttggcttcagtcgtgcaacggatcatgacggattcccttat

SEQ ID NO: 448638 - DNA, 75 bp, synthetic construct
  source 1..75: mol_type = other DNA
tctgcaagcgcggcggctgcttctgctactgcatcagctaacagtcaaaaagcagcaaaaaccagtgaaaccaac

SEQ ID NO: 448639 - DNA, 75 bp, synthetic construct
  source 1..75: mol_type = other DNA
acgcgcaatcattacaaatggtaaaggcactaaaatagaatataaaagcgttatagaacgaccagagagaaaaag

SEQ ID NO: 448640 - DNA, 75 bp, synthetic construct
  source 1..75: mol_type = other DNA
agccaggctgcggagccgtataaatatgtcttacagccgctgcctgatgtgtggataccatttaacgattcgctg

SEQ ID NO: 448641 - DNA, 75 bp, synthetic construct
  source 1..75: mol_type = other DNA
aggcaatggtggaagaagtggcacgcaacgccgaagccgcctctcagagcgcagcggcggcaaagaaatccgaaa

SEQ ID NO: 448642 - DNA, 75 bp, synthetic construct
  source 1..75: mol_type = other DNA
cgggcacgctgaatgattttctcggggccatgacggaagaagatgtcatgccggaggcattgcgtcgttttgagg

SEQ ID NO: 448643 - DNA, 75 bp, synthetic construct
  source 1..75: mol_type = other DNA
cgccgaagccgcctctcagagcgcagcggcggcaaagaaatccgaaactgcagcggcatcatcgaagaacgcggc

SEQ ID NO: 448644 - DNA, 75 bp, synthetic construct
  source 1..75: mol_type = other DNA
aagtggaataagtcaacttcactggacgttacagaaacaggcacagatagtttcgggtttaattatggtcggttt

SEQ ID NO: 448645 - DNA, 75 bp, synthetic construct
  source 1..75: mol_type = other DNA
atgcaagtttcacaggcagaaaaaatctttgagtgtaaaggtaatgaagttggaagcatcattattgaagacgaa

SEQ ID NO: 448646 - DNA, 75 bp, synthetic construct
  source 1..75: mol_type = other DNA
attgtaaagtttaaacgcgcatcaaaagcaacttacattaataaatctggtgtgctgacagaggctgcaatcgat

SEQ ID NO: 448647 - DNA, 75 bp, synthetic construct
  source 1..75: mol_type = other DNA
ttacctcaatttatcaacacttgtaattgataagactggtggtgcagcaaatcgtattattgcaaaggctgtaaa

SEQ ID NO: 448648 - DNA, 75 bp, synthetic construct
  source 1..75: mol_type = other DNA
gcagcagcccaaagcgagagcgcggcagccggttctgcgacttcagcagctggatcagcaactgctgcggctaac

SEQ ID NO: 448649 - DNA, 75 bp, synthetic construct
  source 1..75: mol_type = other DNA
ccggcacgctgaatgattttctcggagccatgacggaagaggatgtcatgccggaggcattgcgtcgttttgagg

SEQ ID NO: 448650 - DNA, 75 bp, synthetic construct
  source 1..75: mol_type = other DNA
caggcacgctgaatgattttctcggcgccatgacggaagaggatgtcatgccggaggcattgcgtcgttttgagg

SEQ ID NO: 448651 - DNA, 75 bp, synthetic construct
  source 1..75: mol_type = other DNA
tacgatttgaaaactatgatggttctacctacacattcttaggtgacgcttacttaaatacgacagatttatcta

SEQ ID NO: 448652 - DNA, 75 bp, synthetic construct
  source 1..75: mol_type = other DNA
aaaatatggtttgctgatagagaatcagcgaacaaacatgttcgtaaatagttttaatcctgatgcgtggaataa

SEQ ID NO: 448653 - DNA, 75 bp, synthetic construct
  source 1..75: mol_type = other DNA
gaaccacgatttgaaaaaaatggtttattgattgaaggtcaacgaactaactattttgttaaatctaacaccccc

SEQ ID NO: 448654 - DNA, 75 bp, synthetic construct
  source 1..75: mol_type = other DNA
cgtgcatcagatttatgtaaatttccgctgatgaaaaatatgtataccatgccttttacgttcatggtggaagtc

SEQ ID NO: 448655 - DNA, 75 bp, synthetic construct
  source 1..75: mol_type = other DNA
cggcagctaatagccaaaaagctgcaaaaaccagtgaaactaacgcaaagacgagtgaaacaaaagcagcagcca

SEQ ID NO: 448656 - DNA, 75 bp, synthetic construct
  source 1..75: mol_type = other DNA
tttccggcagtaaaggttttgatgtaacaggcggagaaaagtatgtaaccatatcatgcagggtgcaaagtggca

SEQ ID NO: 448657 - DNA, 75 bp, synthetic construct
  source 1..75: mol_type = other DNA
gaaaggacgaagctaccggatggatttttgcagaggcaacaattcaggcaattgatggggagttaaaaataggct

SEQ ID NO: 448658 - DNA, 75 bp, synthetic construct
  source 1..75: mol_type = other DNA
tcagtaagtaacgggcatatatccagcgaaacaaaaaccacatggtcctgtattcagaacaccgcaattatccgt

SEQ ID NO: 448659 - DNA, 75 bp, synthetic construct
  source 1..75: mol_type = other DNA
tggtatgcggtttttttataaccaatcctgaagatggtggtttttcttctgattcgtcattaacaatgactacgc

SEQ ID NO: 448660 - DNA, 75 bp, synthetic construct
  source 1..75: mol_type = other DNA
acagaggtcggtgccacgagagcaagtgaccaggtaatcatacctatacctttcaattgggcaactccaccagtt

SEQ ID NO: 448661 - DNA, 75 bp, synthetic construct
  source 1..75: mol_type = other DNA
acctattatgctaaaagaatgtgatcctccgggatttctggtaggtaaactgtatgcagattttagagatgaaga

SEQ ID NO: 448662 - DNA, 75 bp, synthetic construct
  source 1..75: mol_type = other DNA
tgctgaaagatggtgcgggtaaaccaatacagaactgcactattcaactgaaggcaaagcgtaacagcaccacgg

SEQ ID NO: 448663 - DNA, 75 bp, synthetic construct
  source 1..75: mol_type = other DNA
aaccgacgaataaatgaaaatgccgggctgaaaaaaatgcttattggtatgcgggtaaagtccgaacggtccaca

SEQ ID NO: 448664 - DNA, 75 bp, synthetic construct
  source 1..75: mol_type = other DNA
atggatgttgagtatggccagtacagcgtcgccctgctggttgaaggttttccgccttcacatgccgggaccatc

SEQ ID NO: 448665 - DNA, 75 bp, synthetic construct
  source 1..75: mol_type = other DNA
cactgccctgcagttgatgctgccatccatatgcacagaacaggataccgccgggatcaataactggcaggaatg

SEQ ID NO: 448666 - DNA, 75 bp, synthetic construct
  source 1..75: mol_type = other DNA
tgggccgtcgatattcctgccatgctgatggcctcgcaagggcagaaaatggcagcgatgttccataatcagggc

SEQ ID NO: 448667 - DNA, 75 bp, synthetic construct
  source 1..75: mol_type = other DNA
acgattgcgcggcggatgaatgaagaagtcgagatttttgttggtccgcgaccagaacaatacacctggatatta

SEQ ID NO: 448668 - DNA, 75 bp, synthetic construct
  source 1..75: mol_type = other DNA
ggagataaacctttattgcaaccttccggaaaaggcagtaccagtatgctggactgcatacgtagttatcttaaa

SEQ ID NO: 448669 - DNA, 75 bp, synthetic construct
  source 1..75: mol_type = other DNA
ttactgcctgtgaactagcacgcggttatttagagggcgatagtaatgcgcacgattaccgcgaactaatagaaa

SEQ ID NO: 448670 - DNA, 75 bp, synthetic construct
  source 1..75: mol_type = other DNA
cgatgctatcccagtgctgctcgagtggctggataactatcaaaccaactcttcctggcagtctgtccggttggc

SEQ ID NO: 448671 - DNA, 75 bp, synthetic construct
  source 1..75: mol_type = other DNA
tcgagcttgagacatttatggcggcgttccaccaaatgatgtcagaggctgaaccacgcggcacacgctggtatc

SEQ ID NO: 448672 - DNA, 75 bp, synthetic construct
  source 1..75: mol_type = other DNA
atgaatactgtaaccatcaacaacaaacagtttccggtaatcgaatatcgcggtcagcgtgttgtgacgctggcg

SEQ ID NO: 448673 - DNA, 75 bp, synthetic construct
  source 1..75: mol_type = other DNA
atttcatcagatgatgtcagaggcagagccacgtggtacccgctggtatcacccgaagatggggctgtttcaggt

SEQ ID NO: 448674 - DNA, 75 bp, synthetic construct
  source 1..75: mol_type = other DNA
agaggcggatgatcatacgattgcgcggcggatgaatgaagaagtcgagatttttgttggtccgcgaccagaaca

SEQ ID NO: 448675 - DNA, 75 bp, synthetic construct
  source 1..75: mol_type = other DNA
tcatatgtacagcagggtatctaaccatctggaaaacggtgtcttttatgctgcggagagtgaacaaaacaagag

SEQ ID NO: 448676 - DNA, 75 bp, synthetic construct
  source 1..75: mol_type = other DNA
acaggcgcaggtgaccacgacagcactttcagcatgaagacggttcatgattcggtccggcagcagggaacagac

SEQ ID NO: 448677 - DNA, 75 bp, synthetic construct
  source 1..75: mol_type = other DNA
ataatacgacgcaaagagcgtatccccggaagcagctgtgaatggaaagatgtgacattagcaccaaaatccaga

SEQ ID NO: 448678 - DNA, 75 bp, synthetic construct
  source 1..75: mol_type = other DNA
gcacatttcagcctgctttctccttccggtatcgtcatcagcgatgacgagccggatgatgatgcgctgatggcc

SEQ ID NO: 448679 - DNA, 75 bp, synthetic construct
  source 1..75: mol_type = other DNA
ggcgataaacccggtgaagtgatgcgcgccattgaagttatcggctcgatctcctgcgttctgttaggggcgtat

SEQ ID NO: 448680 - DNA, 75 bp, synthetic construct
  source 1..75: mol_type = other DNA
taggcttcgccgctgccaacatgaacgccatgattttcccgatgattgtcggcaaattgatcggcggcgtaacgg

SEQ ID NO: 448681 - DNA, 75 bp, synthetic construct
  source 1..75: mol_type = other DNA
gcctggcgatggttggtatgaccgcgctggcacctgttctggcccacgtactcggaccggtgattatcccggttt

SEQ ID NO: 448682 - DNA, 75 bp, synthetic construct
  source 1..75: mol_type = other DNA
gcccggactggcgtgccatgcttgctggcatgtcctcaacggagtacggcgactggaaaatcttctatcaggaca

SEQ ID NO: 448683 - DNA, 75 bp, synthetic construct
  source 1..75: mol_type = other DNA
ggcaagctgatcggcggtgttacggcgattggcgtggcgatgatgctggtgccaaaagaagatgcgaccacggct

SEQ ID NO: 448684 - DNA, 75 bp, synthetic construct
  source 1..75: mol_type = other DNA
gccattcaatgacgcccttgcctggcaggttcagcgcgaactggttaacagctacttccgcactcgcacaccgct

SEQ ID NO: 448685 - DNA, 75 bp, synthetic construct
  source 1..75: mol_type = other DNA
ccaaagcgagagcgcggcagccggttctgcgacttcagcagctggatcagcaactgctgcggctaacagccagaa

SEQ ID NO: 448686 - DNA, 75 bp, synthetic construct
  source 1..75: mol_type = other DNA
gttattggtcgggtgattgtcagtgaagcgttgcgtggcgaaaaagtggggcagcagctgatgagtaaaacactc

SEQ ID NO: 448687 - DNA, 75 bp, synthetic construct
  source 1..75: mol_type = other DNA
cttatcaggatatcgatggtgatgatttgacgggggataatcgccatattctcggttggaaaaatgatgaactgg

SEQ ID NO: 448688 - DNA, 75 bp, synthetic construct
  source 1..75: mol_type = other DNA
aaacacactttattatagtaatacaccatccttatggaattatctgaaatctgcattatcggtgactagtgaaac

SEQ ID NO: 448689 - DNA, 75 bp, synthetic construct
  source 1..75: mol_type = other DNA
cggcagcgaagaccagcgaaacaaatgccaaagccagcgaaactgcggcgaaaagcagtcaggatgcagcagccg

SEQ ID NO: 448690 - DNA, 75 bp, synthetic construct
  source 1..75: mol_type = other DNA
ttatttggtcatgtaaggaatttcagaatatggcacaaggcattgactgatgctcaggtgggggagtcaatctaa

SEQ ID NO: 448691 - DNA, 75 bp, synthetic construct
  source 1..75: mol_type = other DNA
actgcgttactatcagggcaaagaatcagaaatagcggacgcagttgaattttttagcgacaacaaagatgtgat

SEQ ID NO: 448692 - DNA, 75 bp, synthetic construct
  source 1..75: mol_type = other DNA
ccattatcggactgtattcgagtaccggaggggttgatacttcaggggacgaaaagcatgtaactatatcctgtc

SEQ ID NO: 448693 - DNA, 75 bp, synthetic construct
  source 1..75: mol_type = other DNA
atataggtggttcagaccgacgaataaatgaaaatgccgggctggaaaaaatgcttattggtatgcgggtaaagt

SEQ ID NO: 448694 - DNA, 75 bp, synthetic construct
  source 1..75: mol_type = other DNA
tgtctgttgagtcgttcgacagtgataatgggtttaactatggaaggataactgttattaatgaaaatccgacag

SEQ ID NO: 448695 - DNA, 75 bp, synthetic construct
  source 1..75: mol_type = other DNA
ggaatggttggtacgcagttgcaaattgcagccgacagagctgtggggtcttttgcaacaggtgactggatagaa

SEQ ID NO: 448696 - DNA, 75 bp, synthetic construct
  source 1..75: mol_type = other DNA
acaaggttgttaagtttaaacgcgcatcaactgccacatatatcaataaatcaggcgtatttagtgttgctaaaa

SEQ ID NO: 448697 - DNA, 75 bp, synthetic construct
  source 1..75: mol_type = other DNA
agcagctgaaagcgagagtgcggcggctaactcagcgaaagcatcggcagcaagccagacggcagctaaagcaag

SEQ ID NO: 448698 - DNA, 75 bp, synthetic construct
  source 1..75: mol_type = other DNA
ccggttttgactcaaagttggatcgataatggggatataaatactaagccagaggctatatctgtaccattttta

SEQ ID NO: 448699 - DNA, 75 bp, synthetic construct
  source 1..75: mol_type = other DNA
tttatacatttttaggagatgcttatttaactttcggaactctgataatagaaaaaactggcggggcagccaata

SEQ ID NO: 448700 - DNA, 75 bp, synthetic construct
  source 1..75: mol_type = other DNA
aaatccggatgaagccggacgttacagcatggatgttgagtatggccagtacagcgtcaccctgctggttgaagg

SEQ ID NO: 448701 - DNA, 75 bp, synthetic construct
  source 1..75: mol_type = other DNA
ccgtttatggctgctttttatcgggttatggaggaagcagaaccgcgagggactcgctggtattacccgaaaatg

SEQ ID NO: 448702 - DNA, 75 bp, synthetic construct
  source 1..75: mol_type = other DNA
gatagtgttaagagaactattgaaacactggctaaaaagggaatcatccaatttccacagactgtggaaattgag

SEQ ID NO: 448703 - DNA, 75 bp, synthetic construct
  source 1..75: mol_type = other DNA
gaacaggagcctctcaaattgctgagtatgaagaggaaataagattattaaaggaaaaacaatatacgaacaaac

SEQ ID NO: 448704 - DNA, 75 bp, synthetic construct
  source 1..75: mol_type = other DNA
tgcaacaaagtcagttgatgtctcaggcgataataaacacgtgacaacctcatgtcgttttaaaacagaactgca

SEQ ID NO: 448705 - DNA, 75 bp, synthetic construct
  source 1..75: mol_type = other DNA
aaattaagaaatctggtgtgctgacagaggctgccattgacgagccacgatttgaacgtgatggcctgcttattg

SEQ ID NO: 448706 - DNA, 75 bp, synthetic construct
  source 1..75: mol_type = other DNA
cgtccggaggcactgcgccgttttgagctgatggtgaatgaagtggcacgtcatgccggagcgtcatcacagagt

SEQ ID NO: 448707 - DNA, 75 bp, synthetic construct
  source 1..75: mol_type = other DNA
caccaacatctacaggtggaaaagttttactgggaatagatatcgttacaaacgatggcaaccccgttgctctta

SEQ ID NO: 448708 - DNA, 75 bp, synthetic construct
  source 1..75: mol_type = other DNA
caacgtggtggatgtggtcggcggcatcagttacagcgatgatatcgggccgcttggttacaccgttaacgccca

SEQ ID NO: 448709 - DNA, 75 bp, synthetic construct
  source 1..75: mol_type = other DNA
tatagtggtgaatgggaaacaccttttcacttccttctctgtcatttatttagcgtcgctacagattgggcagaa

SEQ ID NO: 448710 - DNA, 75 bp, synthetic construct
  source 1..75: mol_type = other DNA
agccggatatggaggtgaactcgcagccgtcggtgcgtgaagtgcgctttggtgacgggtatttgcagcggacgg

SEQ ID NO: 448711 - DNA, 75 bp, synthetic construct
  source 1..75: mol_type = other DNA
tcccgtgatgatgccagacggctggaagattttctggcagagcacgggggctggaaggcgtttctgtggacgccg

SEQ ID NO: 448712 - DNA, 75 bp, synthetic construct
  source 1..75: mol_type = other DNA
tcccgcgaggaggccagggcgctggagtcgtttctggctgagcacgggggctggaaggcctttctgtggacgccg

SEQ ID NO: 448713 - DNA, 75 bp, synthetic construct
  source 1..75: mol_type = other DNA
gatttaagccttttaccgggggtcgaaattcgcccaaatacggcacaaggtatgcttcacattaacatgccacaa

SEQ ID NO: 448714 - DNA, 75 bp, synthetic construct
  source 1..75: mol_type = other DNA
tttggaaatgatatatttttcttgtttttcagttcagaatataaagcctcttatgatttattcttaatccatatt

SEQ ID NO: 448715 - DNA, 75 bp, synthetic construct
  source 1..75: mol_type = other DNA
aagtctctttactcagctagatatagtaatgatcggaactatgcttggagataaagctgcaggtgagtattatgc

SEQ ID NO: 448716 - DNA, 75 bp, synthetic construct
  source 1..75: mol_type = other DNA
agaggttatcgttttggggtcggtacgatcaaaaaagttatgaaatataatcttataccgatgtttgatctcatg

SEQ ID NO: 448717 - DNA, 75 bp, synthetic construct
  source 1..75: mol_type = other DNA
tggtcagtgacacattaaaaatcgatttaagtgaaaaacaaaagagaaaactaccaatttttataaacacatatc

SEQ ID NO: 448718 - DNA, 75 bp, synthetic construct
  source 1..75: mol_type = other DNA
gccacggcgctggagtcgtttctggctgagcacgggggctggaaggcctttctgtggacgccgccttatggttac

SEQ ID NO: 448719 - DNA, 75 bp, synthetic construct
  source 1..75: mol_type = other DNA
gatttaagtcttttgtcgggggtccaaattcacccaaatacggcacaaggtatacttcacattaacatgccacaa

SEQ ID NO: 448720 - DNA, 75 bp, synthetic construct
  source 1..75: mol_type = other DNA
agccatccgccgtttggtgccagcgtgacaaacgcgaaaggccgtgagctggggatggtggcagacagcggtctg

SEQ ID NO: 448721 - DNA, 75 bp, synthetic construct
  source 1..75: mol_type = other DNA
tacaccggtgccagtctggaaagtgatgaccgcatgctgccgccaaaactgcgcggttatgcaccgcaggtctca

SEQ ID NO: 448722 - DNA, 75 bp, synthetic construct
  source 1..75: mol_type = other DNA
tgtatgcagtcgattttaatacggatgttctggatgccgaagacagacagaatattgatatttcccggttctccc

SEQ ID NO: 448723 - DNA, 75 bp, synthetic construct
  source 1..75: mol_type = other DNA
gcggttatgcaccgcaggtctcagggattgcggatacgaatgcgcgcgtcgtgatttcgcagcagggacgcattc

SEQ ID NO: 448724 - DNA, 75 bp, synthetic construct
  source 1..75: mol_type = other DNA
gcagacttcagtcagttagctggagtagagattcgcccaaatccggcagaagggatgttgaacatcaatatgcca

SEQ ID NO: 448725 - DNA, 75 bp, synthetic construct
  source 1..75: mol_type = other DNA
tttccggtcaggacggaaagaagccgttaccgcaggcctgcctgacgccggagatggtcagccggatggggctga

SEQ ID NO: 448726 - DNA, 75 bp, synthetic construct
  source 1..75: mol_type = other DNA
agctggcggcattttacagctcggcgtttcggtcatgtcagagttttccccaaaagcaaagccaaagtcaccagt

SEQ ID NO: 448727 - DNA, 75 bp, synthetic construct
  source 1..75: mol_type = other DNA
cgttagtctggctggaaggtgtttcatcggtactgttcggtgtagccgcattctcgaccttttatgtgattgtgg

SEQ ID NO: 448728 - DNA, 75 bp, synthetic construct
  source 1..75: mol_type = other DNA
ttatcggtttctcagcagctggcggcattttacagctcggcgtttcggtcatgtcagagtttttcccaaaaagca

SEQ ID NO: 448729 - DNA, 75 bp, synthetic construct
  source 1..75: mol_type = other DNA
gatgaccgcatgctgccgccaaaactgcgcggttatgcaccgcaggtctcagggattgcggatacgaatgcgcgt

SEQ ID NO: 448730 - DNA, 75 bp, synthetic construct
  source 1..75: mol_type = other DNA
gtcccagtcgctgaactataacggaactgcgggggctaacttcggtgcctggcgtatgcgtgcggactatcaggg

SEQ ID NO: 448731 - DNA, 75 bp, synthetic construct
  source 1..75: mol_type = other DNA
cgccatttatcctggctgttctttgtatttacttcagttatttcctacatggtattagtgttattacacttgcac

SEQ ID NO: 448732 - DNA, 75 bp, synthetic construct
  source 1..75: mol_type = other DNA
gtccggatatgaatgtcgtatcagagccaaaggtagtgacagtgaagcttggcgatggttatgaacaacgtcgtg

SEQ ID NO: 448733 - DNA, 75 bp, synthetic construct
  source 1..75: mol_type = other DNA
taaaaaaatggcatgaagcaaatttgacaccgtatttactcacgcttttacgaggggaaactaaatatggctctc

SEQ ID NO: 448734 - DNA, 75 bp, synthetic construct
  source 1..75: mol_type = other DNA
tgagatggacctgactgatactacctcaatgcgcaatctacttggttttacgtcaaaactatcaacaaccttgat

SEQ ID NO: 448735 - DNA, 69 bp, synthetic construct
  source 1..69: mol_type = other DNA
atggtgttgtgtccgttaggtgcggttaatcaaatttttgccggatgcggcgtgaacgccttatccggc

SEQ ID NO: 448736 - DNA, 75 bp, synthetic construct
  source 1..75: mol_type = other DNA
tgaagcgagccgtccgttggtgttctcgtcaacctactatcagactcgtcaaaacctgctggatatcgaaagctt

SEQ ID NO: 448737 - DNA, 75 bp, synthetic construct
  source 1..75: mol_type = other DNA
cagtaccgaaagtctccgacattcaggcttcacttatcggacgttacagcactgcattctcagcattagcggaaa

SEQ ID NO: 448738 - DNA, 75 bp, synthetic construct
  source 1..75: mol_type = other DNA
taaaccatggcatagctgggctggatatccgtctgcatcatactttaatatcgcgcgtgaacaatctccctggaa

SEQ ID NO: 448739 - DNA, 75 bp, synthetic construct
  source 1..75: mol_type = other DNA
gtgggtcaacgctgtacatgcggaaattgctctcagcggttgtgggatttattactcgacgccacacagcaagga

SEQ ID NO: 448740 - DNA, 75 bp, synthetic construct
  source 1..75: mol_type = other DNA
tattggaactgggttgtaaatccaattgattacaaaaaatatagagctttcacgtatttatcaggaaatatcttg

SEQ ID NO: 448741 - DNA, 75 bp, synthetic construct
  source 1..75: mol_type = other DNA
ttactttgccgttaacccgaagggacaggttcctgcgttgctgctggatgacggtactctgttgacagaaggtgt

SEQ ID NO: 448742 - DNA, 75 bp, synthetic construct
  source 1..75: mol_type = other DNA
gcatttaatatgaataatatctaccttgcgaaggattttgatactatttataccctgaaaaacgaacttcatgat

SEQ ID NO: 448743 - DNA, 75 bp, synthetic construct
  source 1..75: mol_type = other DNA
gtgaagaaatttattcgggaactaccggaaataactttcagcggaaaaatcgctctcgagcgagggctggatgtt

SEQ ID NO: 448744 - DNA, 75 bp, synthetic construct
  source 1..75: mol_type = other DNA
acttattcagtgccaaaagatctaaaatgtaaaattaatgatatggtaagcgccataaagccacaatatgccgca

SEQ ID NO: 448745 - DNA, 75 bp, synthetic construct
  source 1..75: mol_type = other DNA
cacatccggcatattaaccatgacgtcgaatcggttgttcagagtgcccacgttgcatcacccgctgcaacactt

SEQ ID NO: 448746 - DNA, 75 bp, synthetic construct
  source 1..75: mol_type = other DNA
tctatcgaaacttgaaaatcacctcagctttagacgaaatatatggtggtatatgtaaaaaggcgcatgctgcca

SEQ ID NO: 448747 - DNA, 75 bp, synthetic construct
  source 1..75: mol_type = other DNA
acgccggaaccacgataggatatatttcaacacttccagtttctcaggcaaaaagatggacaaatgagcagccaa

SEQ ID NO: 448748 - DNA, 75 bp, synthetic construct
  source 1..75: mol_type = other DNA
gttggcgtaatggttggcgcgccgctgatgacgcttctactttctcatcgtgcccgccgcagtgcgttgattttc

SEQ ID NO: 448749 - DNA, 75 bp, synthetic construct
  source 1..75: mol_type = other DNA
atgattacgctatcaggtaacagccggaaattaaaagcctgccgaatatctgccagatacctttttgcccgcgcc

SEQ ID NO: 448750 - DNA, 75 bp, synthetic construct
  source 1..75: mol_type = other DNA
atgcgtgatctgatccttcaactcagcaaaagttcgatttattcaacaaagcctagtaaagagtcctggccattt

SEQ ID NO: 448751 - DNA, 75 bp, synthetic construct
  source 1..75: mol_type = other DNA
aaaatcacctcagctttagacgaaatatatggtggcatatgtaaaaaggcgcatgctaccacagagttagcagaa

SEQ ID NO: 448752 - DNA, 75 bp, synthetic construct
  source 1..75: mol_type = other DNA
caacaactgaaacagccctcaaaccatgccagcgccgatatgctgccagccatattagtctcaccgccctggctt

SEQ ID NO: 448753 - DNA, 75 bp, synthetic construct
  source 1..75: mol_type = other DNA
atgatgatggggatggctatgcgtaaacatattgccttcgccagtatgtgtattgggttatttattgctcagctt

SEQ ID NO: 448754 - DNA, 75 bp, synthetic construct
  source 1..75: mol_type = other DNA
tattgctcagcttgatattcaaattgtatcgtcatccctaaatgaaataggtggtggtctgtccgcaggtaaaga

SEQ ID NO: 448755 - DNA, 75 bp, synthetic construct
  source 1..75: mol_type = other DNA
attggcctgccgcatactgcggtgcgctgtatctcttataaagacagcaaagccgtacatcgggggatcatcatc

SEQ ID NO: 448756 - DNA, 75 bp, synthetic construct
  source 1..75: mol_type = other DNA
attggtctgccgcataccgctgtgcgctgcatctcttataaagacagcaaagcggtacatcggggaatcatcatc

SEQ ID NO: 448757 - DNA, 75 bp, synthetic construct
  source 1..75: mol_type = other DNA
ctcaccgtgccggatctggtgatcccaacgttgatggtaaaagtgttgccgccgtttgctgccgggatcttcctt

SEQ ID NO: 448758 - DNA, 75 bp, synthetic construct
  source 1..75: mol_type = other DNA
atccaacgtttcacaaagctatttcagccagcaactggcgtacgaacaacttcgtattgcgcgggaaacgctgaa

SEQ ID NO: 448759 - DNA, 75 bp, synthetic construct
  source 1..75: mol_type = other DNA
atgttagagcttgaaaatcagagaatgcaactggaaaatacgcgctatcttatggagcaaaaagaacgaattgaa

SEQ ID NO: 448760 - DNA, 75 bp, synthetic construct
  source 1..75: mol_type = other DNA
cgcttgaaaagcagtatgatgcttcaaataaacgtatcaaaacggctgaggggttgcgtagccgcctgaactcag

SEQ ID NO: 448761 - DNA, 75 bp, synthetic construct
  source 1..75: mol_type = other DNA
agccagcaactggcgtacgaacaactccgtattgcgcgggaaacgctgaaaaattatgaacagtcctatgctttc

SEQ ID NO: 448762 - DNA, 75 bp, synthetic construct
  source 1..75: mol_type = other DNA
agctgcatttagtgtgaagttgatgattgcatcacttttgaacacgttttttgataatatttatcaattggtaat

SEQ ID NO: 448763 - DNA, 75 bp, synthetic construct
  source 1..75: mol_type = other DNA
aaactttacttgacctgaattatgcccgtcaggtcaacgaaatttctttatataccgcacttggtggcggttggc

SEQ ID NO: 448764 - DNA, 75 bp, synthetic construct
  source 1..75: mol_type = other DNA
agccggatatggaggtgaactcgcagccgtcggtgcgtaaagtgcgttttggtgacgggtattcgcagcgtatgg

SEQ ID NO: 448765 - DNA, 75 bp, synthetic construct
  source 1..75: mol_type = other DNA
cctagaggttcgccagcgcggcgctggccttgtcatcggcgagccagatttaggcatttgggcgaaggccagcaa

SEQ ID NO: 448766 - DNA, 75 bp, synthetic construct
  source 1..75: mol_type = other DNA
gcccaatgatgaaaccggagactgccagctgtttacccagaatctggcgcggatggcggagcaggcgggggttaa

SEQ ID NO: 448767 - DNA, 75 bp, synthetic construct
  source 1..75: mol_type = other DNA
cgcacgccagcgatcccgtatgaagatctaagcgtagcgcgctacagccgtggatttacgccatcacgcccgggc

SEQ ID NO: 448768 - DNA, 75 bp, synthetic construct
  source 1..75: mol_type = other DNA
ggacaggcggcgctggggaaagccatttccggcggcatgtctgaaaccaccgactggatcaaacagcgttacggg

SEQ ID NO: 448769 - DNA, 75 bp, synthetic construct
  source 1..75: mol_type = other DNA
atttggaagagtacttttcgatgtggatgtaaaatattatgaagagctgctggaacgtttccttcgtaagtgcca

SEQ ID NO: 448770 - DNA, 75 bp, synthetic construct
  source 1..75: mol_type = other DNA
gctcttgtggtggatcacatcattcccatcaatggcggcggtgatgttctcttctggcctgagtggaatcaccag

SEQ ID NO: 448771 - DNA, 75 bp, synthetic construct
  source 1..75: mol_type = other DNA
cgtgaagtccggcaagtgtgaagagcacaggcgggctgcatggcgtgcagaggatgccagacggggacaccgccg

SEQ ID NO: 448772 - DNA, 75 bp, synthetic construct
  source 1..75: mol_type = other DNA
tcgaccggaagacgcacgttcaggcgcagaaagccacgaccggcgcggcactggttgcgcttgaactggcctcca

SEQ ID NO: 448773 - DNA, 75 bp, synthetic construct
  source 1..75: mol_type = other DNA
cctcagcatatcggagcctcccgaagccaaaaccctgaacgggttgcgcaagctgtccgatacccgtctacagaa

SEQ ID NO: 448774 - DNA, 75 bp, synthetic construct
  source 1..75: mol_type = other DNA
tgtctattccttcccgcccggcgagcagccagaccttgagacgctgcacgccatcgaagacgaactatgcgctgc

SEQ ID NO: 448775 - DNA, 75 bp, synthetic construct
  source 1..75: mol_type = other DNA
gatattgtgccgccgctgcgcaatgtcggggcactgtcatcagagctgttcagtgcgctggggcgcggaggtctt

SEQ ID NO: 448776 - DNA, 75 bp, synthetic construct
  source 1..75: mol_type = other DNA
aggccgacgcctcgcgccagaagaaccggcagagcgcagacgctcgccgtcaggcactgttcaaacagacgacga

SEQ ID NO: 448777 - DNA, 75 bp, synthetic construct
  source 1..75: mol_type = other DNA
cgacgagctggcaggagctgcacgacgcagcggccgagcacggcctagaggttcgccagcgcggcgctggccttg

SEQ ID NO: 448778 - DNA, 75 bp, synthetic construct
  source 1..75: mol_type = other DNA
tgacctgtgccgcctggtcatcacgggttcgcatgctgggggttgaattcagcgctgagtttaagcaggtggtga

SEQ ID NO: 448779 - DNA, 75 bp, synthetic construct
  source 1..75: mol_type = other DNA
ccttgccttgcgtaaatccttaaatgaggacgacgacgcgctgatgctggaagtggctgcagaagccacacgcaa

SEQ ID NO: 448780 - DNA, 75 bp, synthetic construct
  source 1..75: mol_type = other DNA
tgtcgcaaattgccagcgaagctcagcttagcgtgggtcagatatatcgttacttcgccaacaaagacgccatta

SEQ ID NO: 448781 - DNA, 75 bp, synthetic construct
  source 1..75: mol_type = other DNA
cggtggtggagtcggtcctgacggaaggggccattggttatcgtgagttcgaagttctgaaaggtagccgtctgt

SEQ ID NO: 448782 - DNA, 75 bp, synthetic construct
  source 1..75: mol_type = other DNA
atgccttcgtcctcgcatcccgtagaacgcttttctttcagcaccgcgcttttcgggatgctggttctgacccta

SEQ ID NO: 448783 - DNA, 75 bp, synthetic construct
  source 1..75: mol_type = other DNA
atcgaggtgggacaatgccatcgtatgactggtaaacatttatctcttaatgccccgccttttatgctgattgaa

SEQ ID NO: 448784 - DNA, 75 bp, synthetic construct
  source 1..75: mol_type = other DNA
acaaacagcgtcaggatgaaatcattaacgccgcccgtcggtgttttcgtcgctgcggatttcatgccgccagta

SEQ ID NO: 448785 - DNA, 75 bp, synthetic construct
  source 1..75: mol_type = other DNA
ctctgccgtggagaacggatacagctcattcgggatgagtgcatcggggggggcgacggtcacgatgaaaggagc

SEQ ID NO: 448786 - DNA, 75 bp, synthetic construct
  source 1..75: mol_type = other DNA
agtatcagatggaaataagggtgaatggtcaggatatttcaccatcggcatttcagattgcgtttcttgaaccac

SEQ ID NO: 448787 - DNA, 75 bp, synthetic construct
  source 1..75: mol_type = other DNA
atggcgtcggaggcgtgcctgtcgacggcggccgggtctccaccaaccggtggggaattggtgtggtgacggatg

SEQ ID NO: 448788 - DNA, 75 bp, synthetic construct
  source 1..75: mol_type = other DNA
tcattcgggatgagtgcatcggggggggcgacggtcacgatgaaaggagccgcgttacatgccggagggatgaac

SEQ ID NO: 448789 - DNA, 75 bp, synthetic construct
  source 1..75: mol_type = other DNA
ccgggacctgagtgagttcggcactgtttccgctgatgtaacccagtccgtggcccgtataccgggttatgacac

SEQ ID NO: 448790 - DNA, 75 bp, synthetic construct
  source 1..75: mol_type = other DNA
ttccggtcgttcgcgtaactatgagcacaccacggaaggcccggtctttgctgccggtgaggcatcctggggtat

SEQ ID NO: 448791 - DNA, 75 bp, synthetic construct
  source 1..75: mol_type = other DNA
tctgctattttcgtttggcgcatttcaccagcgtcgcgcctacgcccatttctgttggtttctgccctggcgagc

SEQ ID NO: 448792 - DNA, 75 bp, synthetic construct
  source 1..75: mol_type = other DNA
gtgtttgctgacgggcgggttcgcacgctgccggcaccggatgtgaacggcaccaccaacagcaatcagcagacg

SEQ ID NO: 448793 - DNA, 75 bp, synthetic construct
  source 1..75: mol_type = other DNA
gctgacagaaggtgccattggttaccggaaattcagcgtgcttaaagggaaacgtctgtttgcaatactgcgtct

SEQ ID NO: 448794 - DNA, 75 bp, synthetic construct
  source 1..75: mol_type = other DNA
tgacctgtgccgcctggtcatcacgggttcgcatgctgcgggttgaattcagtgcggagtttaagcaggtggtga

SEQ ID NO: 448795 - DNA, 75 bp, synthetic construct
  source 1..75: mol_type = other DNA
tgacctgtgccgcctggtcatcacgggttcgcatgctgtgggttgaattcagcgcagagtttaagcaggtggtga

SEQ ID NO: 448796 - DNA, 75 bp, synthetic construct
  source 1..75: mol_type = other DNA
tgacctgtgccgcctggtcatcacgggttcgcatgctgtgggttgaattcagagccgagtttaagcaggtggtga

SEQ ID NO: 448797 - DNA, 75 bp, synthetic construct
  source 1..75: mol_type = other DNA
caggttctggatcggctgcaacaggccgggcctgcgtggattcagggcaaaccggcgggaagctgggcgacgtta

SEQ ID NO: 448798 - DNA, 75 bp, synthetic construct
  source 1..75: mol_type = other DNA
aacgtacagcgtgacgctttctgttcctcgtaaggaggccacggcgctggagtcgtttctggcagagcacggagg

SEQ ID NO: 448799 - DNA, 75 bp, synthetic construct
  source 1..75: mol_type = other DNA
cgccggtttcacctctccgccggagactgaaaacgcagccactgcactggtctttgtcgacgggcaaatcagcga

SEQ ID NO: 448800 - DNA, 75 bp, synthetic construct
  source 1..75: mol_type = other DNA
gctacggctggcgtttttatcctccggcattctcgaattttttacctcgctgtcgattgctctggtggcggtcta

SEQ ID NO: 448801 - DNA, 75 bp, synthetic construct
  source 1..75: mol_type = other DNA
aacgggtgggttatcacgccgggcagcatatccgctttgccatccgccgtcaggttctcgaccgtctgcaacagg

SEQ ID NO: 448802 - DNA, 75 bp, synthetic construct
  source 1..75: mol_type = other DNA
ctgcatccctgttcgctattactgttggatgaacccgctgccagcctggatgcacacagtgaacagcgagtgatg

SEQ ID NO: 448803 - DNA, 75 bp, synthetic construct
  source 1..75: mol_type = other DNA
caaaatggaaaaaatcctcgcccgcgccagcaaagctgccggagataacgcgatggcaaaccagtacgaaacgct

SEQ ID NO: 448804 - DNA, 75 bp, synthetic construct
  source 1..75: mol_type = other DNA
cttgcagattatcgaatgcagcaaaaccagagcggctttgatctgcgccatttcgttaacgtcaatttcactctg

SEQ ID NO: 448805 - DNA, 75 bp, synthetic construct
  source 1..75: mol_type = other DNA
aaatcgccctgccactgaaatttaccgtgacctgcgttccgccgccgcatctggctgggatttcagctcgcgctg

SEQ ID NO: 448806 - DNA, 75 bp, synthetic construct
  source 1..75: mol_type = other DNA
gtagccgtattgcccgtcgtgaatatggttccctgctgtcggcactggtagaccagccacaaaatccggcattac

SEQ ID NO: 448807 - DNA, 75 bp, synthetic construct
  source 1..75: mol_type = other DNA
gtagccgcattgcccgtcgggaatatggttccctgctgtcggcgctgatagaccaggcacaaaatccggcattgc

SEQ ID NO: 448808 - DNA, 75 bp, synthetic construct
  source 1..75: mol_type = other DNA
atgacgctttatatcgggatgaacaataccagcggtaaagccattactgatattgaccatctgcgtcagtcggtg

SEQ ID NO: 448809 - DNA, 75 bp, synthetic construct
  source 1..75: mol_type = other DNA
ccgtgcgcgcccggaaagccaggaattgaatatcctgcgcgggattctggcttctatagagcagcagaataaagg

SEQ ID NO: 448810 - DNA, 75 bp, synthetic construct
  source 1..75: mol_type = other DNA
gcgtgcgcgtccggaaagtcaggagttaaatatcctgcgtgggattctggcttctattgagcagcagaataaagg

SEQ ID NO: 448811 - DNA, 75 bp, synthetic construct
  source 1..75: mol_type = other DNA
ctgcgtgacagcgggcaacagtgcggagtcaacagagtctggagactgatgaaacgtgtcggaataaaggctcag

SEQ ID NO: 448812 - DNA, 75 bp, synthetic construct
  source 1..75: mol_type = other DNA
aaagtggccgatatggtggcgaatttcggttatgaaattgatacgtatgggcacattccaaacggcaaccgtagc

SEQ ID NO: 448813 - DNA, 75 bp, synthetic construct
  source 1..75: mol_type = other DNA
tttttcggaggttattgaacattctattcgccgcttcttacgcaatcatggtagcattgtcagcacggttaaggc

SEQ ID NO: 448814 - DNA, 75 bp, synthetic construct
  source 1..75: mol_type = other DNA
gttattgcctatgaagtgcgcatggcctggctggcaactcaggaaaatggcgagcaggtcgagcatgaagagacg

SEQ ID NO: 448815 - DNA, 75 bp, synthetic construct
  source 1..75: mol_type = other DNA
tggttccctgctgtcggcactggtagaccagccacaaaatccggcattacgtctgcaggtcatgtcggcagtgta

SEQ ID NO: 448816 - DNA, 75 bp, synthetic construct
  source 1..75: mol_type = other DNA
cgggagataaagttccggtcgcttcgctactgcctgagattcccggttctcaaacgacgaagtttaataaagacc

SEQ ID NO: 448817 - DNA, 75 bp, synthetic construct
  source 1..75: mol_type = other DNA
gcaggacgagctgcgcacggaatctgtccgcgctcaggcccgtgaacagtttaccggtgcggtggaccggatatt

SEQ ID NO: 448818 - DNA, 75 bp, synthetic construct
  source 1..75: mol_type = other DNA
tcccatgtctatgggataaaccctcagggagaattgagctgggtcaataccgcccctgaaggaacccgttgtggg

SEQ ID NO: 448819 - DNA, 75 bp, synthetic construct
  source 1..75: mol_type = other DNA
ttaggccttatcgaaacgggtaagtcagaaaacaatacggaacttcccgcgctggtggtgaaactctttaatgcc

SEQ ID NO: 448820 - DNA, 75 bp, synthetic construct
  source 1..75: mol_type = other DNA
tccactctgctgactggtgcacagggcgacacctcaaccgcaaacaccagcggtaaaacgctgctcggtcagtaa

SEQ ID NO: 448821 - DNA, 75 bp, synthetic construct
  source 1..75: mol_type = other DNA
gctggtggtgaaactctttaatgccagcagtctgaaacaggcaaaagtgggcctgtggggatttggttatgattt

SEQ ID NO: 448822 - DNA, 75 bp, synthetic construct
  source 1..75: mol_type = other DNA
tattggccatctgcgccagtcggtgcgggacattttgctgacgccgcagggtagccgcattgcccgtcgggatta

SEQ ID NO: 448823 - DNA, 75 bp, synthetic construct
  source 1..75: mol_type = other DNA
tggttccctgctgtcggcactgatagatcagccacaaaatccggcgttacgcctgcaggtcatgtcggcagtgta

SEQ ID NO: 448824 - DNA, 75 bp, synthetic construct
  source 1..75: mol_type = other DNA
tcaacagccattttgacggttcaatggtggtggcgctgagcgggcggcgtaataacggtgtgcctgtttcccttt

SEQ ID NO: 448825 - DNA, 75 bp, synthetic construct
  source 1..75: mol_type = other DNA
tgagcaacgtgacggaaaagagcagtcccatgtctatgggataaaccctcagggagaattgagctgggtcaatac

SEQ ID NO: 448826 - DNA, 75 bp, synthetic construct
  source 1..75: mol_type = other DNA
cgatcgaaccacggccagaggggatgtctgtaataaaattggtacctatcttaaggcgctggcggcccatgataa

SEQ ID NO: 448827 - DNA, 75 bp, synthetic construct
  source 1..75: mol_type = other DNA
gcaggccagtatcaactcgaggctaaaaaatacgttcgccgcatcagagataaagtcctgtactctgactgggat

SEQ ID NO: 448828 - DNA, 75 bp, synthetic construct
  source 1..75: mol_type = other DNA
ccagcgacagttcaatccggatgctccggatgagcgttgggtaacggacataacctacatcaggacccacgaagg

SEQ ID NO: 448829 - DNA, 75 bp, synthetic construct
  source 1..75: mol_type = other DNA
gcgcaatacatgtttgtccttcagccgtggtgtatggctgactatagcagtgattatcgccgtcatgctgcgcgg

SEQ ID NO: 448830 - DNA, 75 bp, synthetic construct
  source 1..75: mol_type = other DNA
atgaaaatcagggtaagttatttccgggcgaaagataaggcaacaggaaagcagatggcgatcctggttaacgag

SEQ ID NO: 448831 - DNA, 75 bp, synthetic construct
  source 1..75: mol_type = other DNA
tgctattggcatggaaaggcaaatgcgcggcaaaggagccgggttacgcacacatgtcttgattggtatgggcag

SEQ ID NO: 448832 - DNA, 75 bp, synthetic construct
  source 1..75: mol_type = other DNA
agtgctgtaggcatgaaaggctggcagccgcgcgacatggaaaactatagcgagtggaaattggtggtaaaatac

SEQ ID NO: 448833 - DNA, 75 bp, synthetic construct
  source 1..75: mol_type = other DNA
taattatcgtcgccacggcgtgcgtggtgctgtaggcatgagaggctggcaaccgcgcgacatggaaaactattg

SEQ ID NO: 448834 - DNA, 75 bp, synthetic construct
  source 1..75: mol_type = other DNA
gggcgaaagataaggcaacaggaaagcagatggcgatcctggtcaacgaggccaattacatgtttgtgcttcagc

SEQ ID NO: 448835 - DNA, 75 bp, synthetic construct
  source 1..75: mol_type = other DNA
cagccacgttaagttatgaaggtgaagcggcttgtgctctggaggcgctcgcagcttcgtgccacggagtgacgc

SEQ ID NO: 448836 - DNA, 75 bp, synthetic construct
  source 1..75: mol_type = other DNA
ttccacagagtttaccggcgggtgatggcggtttgtctctggggcagggggttattgctgcggcgcgttggttag

SEQ ID NO: 448837 - DNA, 75 bp, synthetic construct
  source 1..75: mol_type = other DNA
tatctcgctgatttcacattgctctttccacagagtttaccggcgggtgatggcggtttgtctctggggcagggg

SEQ ID NO: 448838 - DNA, 75 bp, synthetic construct
  source 1..75: mol_type = other DNA
taaaaccatcgaatggctgaattacatcgccaccgagctgcataaaggcttcacacctctgtttcgccctgatac

SEQ ID NO: 448839 - DNA, 75 bp, synthetic construct
  source 1..75: mol_type = other DNA
ttaataacctgaccaaaagtctgagtttttgtatttacgacatctgctacgccaaaacagccgaagaacgcgacg

SEQ ID NO: 448840 - DNA, 75 bp, synthetic construct
  source 1..75: mol_type = other DNA
ctggatgtggtaggagatactgcaacgttgggaaaacgccagggtgccgaccagcaacttggtaaaagtacctac

SEQ ID NO: 448841 - DNA, 75 bp, synthetic construct
  source 1..75: mol_type = other DNA
tgcaactctaatgtgcttctgaacgcagcatataaatcattttatgaatggttgtatgaatataaccacgaagta

SEQ ID NO: 448842 - DNA, 75 bp, synthetic construct
  source 1..75: mol_type = other DNA
gcagtcgttcctgaaatcacacggcctggagggtagcatgagccgtcgcggtaactgccatgataatgcggttgc

SEQ ID NO: 448843 - DNA, 75 bp, synthetic construct
  source 1..75: mol_type = other DNA
acccaacagactccagcgacagttcaatccggatgctcctgatgagcgttgggtaacggacataacctacatcag

SEQ ID NO: 448844 - DNA, 75 bp, synthetic construct
  source 1..75: mol_type = other DNA
aacgtgaacggataaagaaaaagatctacggaacgcgggaagaagcccgcagtgatatttttgattacatcgaaa

SEQ ID NO: 448845 - DNA, 75 bp, synthetic construct
  source 1..75: mol_type = other DNA
ctgtagattcaattggttatcgcaaaatccatctggatctgcgggacagcgggcaacagtgcggagtgaaccggg

SEQ ID NO: 448846 - DNA, 75 bp, synthetic construct
  source 1..75: mol_type = other DNA
cgaaaaacaggtgctggttcattcggatcagggcagtcagtacacaagccatgagtggcagtcgttcctgaaatc

SEQ ID NO: 448847 - DNA, 75 bp, synthetic construct
  source 1..75: mol_type = other DNA
caatcccggatgacaaaggacattgtcctgaacgcactgctgatggctgtatggcggcgtaatcccgaaaaacag

SEQ ID NO: 448848 - DNA, 75 bp, synthetic construct
  source 1..75: mol_type = other DNA
cgcgatttggctttataccgggaaattgtgccgcataacatcaccttcgatggtagcaacaagatctatcgcatc

SEQ ID NO: 448849 - DNA, 75 bp, synthetic construct
  source 1..75: mol_type = other DNA
aaagatcatctcgcgatttacggcgtgaaaaacgccttactggcaccaggctatagcgccgctacaaaggctgac

SEQ ID NO: 448850 - DNA, 75 bp, synthetic construct
  source 1..75: mol_type = other DNA
gtgaacaacgacaagcccagccagggcaaggataaacccgcgcagacactgaccgacgccgaactggcgatgtgc

SEQ ID NO: 448851 - DNA, 75 bp, synthetic construct
  source 1..75: mol_type = other DNA
tgaaaatgcacatgtcaaacgtatgactctgcaaccgtcatctctcccagaactgtttgaattaaaaaatggtga

SEQ ID NO: 448852 - DNA, 75 bp, synthetic construct
  source 1..75: mol_type = other DNA
ctaacaacaaaatttttacagataatcatttcgctcatcatccaaatgccgataaagaattagcagacagtatgc

SEQ ID NO: 448853 - DNA, 75 bp, synthetic construct
  source 1..75: mol_type = other DNA
ttatttccctaggcaaaatcaatagatatgaaccaaacaaaaaacgattaaaaccaataagtaatgtgaatgaat

SEQ ID NO: 448854 - DNA, 75 bp, synthetic construct
  source 1..75: mol_type = other DNA
ttatcctcgggccaggtaatccaccgacgctggcggtaataagctggcagtggttaacccagggcgacaccgatc

SEQ ID NO: 448855 - DNA, 75 bp, synthetic construct
  source 1..75: mol_type = other DNA
ctggcggcgcactattccccgcgtagatggcgttcgcaagcctgccacgcctttattgccgggcaatacgctggc

SEQ ID NO: 448856 - DNA, 75 bp, synthetic construct
  source 1..75: mol_type = other DNA
ccgccaatggacaaattgggtattgggctgggcttcacgctggcggtgaaagaaagcgcatttctgctgtggatc

SEQ ID NO: 448857 - DNA, 75 bp, synthetic construct
  source 1..75: mol_type = other DNA
tcgttgtcggtcgtggatgtggcaattattctcgggccgggtaatccaccgacgctggcggtaattagctggcag

SEQ ID NO: 448858 - DNA, 75 bp, synthetic construct
  source 1..75: mol_type = other DNA
tgctgtttgctgaaggtggcctggtttatcaggtttttccttttctcactccgccgatggataaattgggtattg

SEQ ID NO: 448859 - DNA, 75 bp, synthetic construct
  source 1..75: mol_type = other DNA
gcctgtgttttgctgggctatctgttatggcgcacctggcggcacaccattccccgtgaagatggcgttcgcaag

SEQ ID NO: 448860 - DNA, 75 bp, synthetic construct
  source 1..75: mol_type = other DNA
tacagaaaacgattaccagcattgagtcagcacgggatgaaataccgttcggacttgatgaagatcaaaacaaca

SEQ ID NO: 448861 - DNA, 75 bp, synthetic construct
  source 1..75: mol_type = other DNA
ggtgagcctcgcttgcacattaaagaacccggcaactctccggtaactccggatggttggataagctgtagtgat

SEQ ID NO: 448862 - DNA, 75 bp, synthetic construct
  source 1..75: mol_type = other DNA
ccattggtccgctgaaacatctctcaaaagaggcactggaagccgcagccgaaccagacgatcttagcgagtggg

SEQ ID NO: 448863 - DNA, 75 bp, synthetic construct
  source 1..75: mol_type = other DNA
ctgctttgtcgttgacacactggcaggcgttatttgccgatccacagttaccgcaggcattactggcaacgctgg

SEQ ID NO: 448864 - DNA, 75 bp, synthetic construct
  source 1..75: mol_type = other DNA
agttactgacaatggggaagaaccggcatcgaaagtaacccactggatgccgctgccagaaccgccgcaggaggt

SEQ ID NO: 448865 - DNA, 75 bp, synthetic construct
  source 1..75: mol_type = other DNA
gacaatggggaagaaccggcatcgaaagtaacccactggatgccgctgccagaaccgccgcaggaggtgaatcaa

SEQ ID NO: 448866 - DNA, 75 bp, synthetic construct
  source 1..75: mol_type = other DNA
ggcaactgctattaccacttattatttttgcccttaccgccctgcttgcaaaatgggtaggttttgccagacaag

SEQ ID NO: 448867 - DNA, 75 bp, synthetic construct
  source 1..75: mol_type = other DNA
ggtgacatatttcaagacacacagagattgttacgcagatggctggaacgcctgccgcgccgccatgcttcagtc

SEQ ID NO: 448868 - DNA, 75 bp, synthetic construct
  source 1..75: mol_type = other DNA
acatcccgggtcatcctgacgctaatgatgggtggataattcctggtgcgtcgtggaaaccgtcacactggatgc

SEQ ID NO: 448869 - DNA, 75 bp, synthetic construct
  source 1..75: mol_type = other DNA
ctggataacctgtcacagcaaaaacttgttcacagagatgtgctgccgttctcgcttccggtgactccggatggt

SEQ ID NO: 448870 - DNA, 75 bp, synthetic construct
  source 1..75: mol_type = other DNA
ttactttgccattaaccctaagggacaggttcctgcgttgctactggacgatggtactttgctgacggaaggcgt

SEQ ID NO: 448871 - DNA, 75 bp, synthetic construct
  source 1..75: mol_type = other DNA
cgaacgataaacagtatgtttggtgttggggtaagtcttacggctggactgagtgcgataccttcgaagggtatt

SEQ ID NO: 448872 - DNA, 75 bp, synthetic construct
  source 1..75: mol_type = other DNA
acgtatttatcaggaaatatcttggatgacgtaactcactggatgccgctaccagaaccgccgaaggaggtacgc

SEQ ID NO: 448873 - DNA, 75 bp, synthetic construct
  source 1..75: mol_type = other DNA
cggcggcagcaacggtattctcgccgcccaggctttatggcaactgctattaccgcttattatttttgccctgac

SEQ ID NO: 448874 - DNA, 75 bp, synthetic construct
  source 1..75: mol_type = other DNA
ggccaaaatcttcttttacgtaaaatgcccactcatgttgcgccctgcgctgattgccttcgcggtgggattttc

SEQ ID NO: 448875 - DNA, 75 bp, synthetic construct
  source 1..75: mol_type = other DNA
cgatcaatagtgaagcgctcatcaacagcctgacaatggggctggtggcgacgtttatcgctttggtcctgttac

SEQ ID NO: 448876 - DNA, 75 bp, synthetic construct
  source 1..75: mol_type = other DNA
gataacctgtcacagcaaaaacttgttcacagagatgtgctgccgttctcgcttccggtaactccggatagttgg

SEQ ID NO: 448877 - DNA, 75 bp, synthetic construct
  source 1..75: mol_type = other DNA
tatggcgcgcctggcgacgcacgatcccccaggaagatggcgttcgtaagcacgccacgcctttattacccggta

SEQ ID NO: 448878 - DNA, 75 bp, synthetic construct
  source 1..75: mol_type = other DNA
tgctgtgggtgatgccgtggatactgtttatcctgcaacccgcctggcggcgcatcgactcgcgattaattttga

SEQ ID NO: 448879 - DNA, 75 bp, synthetic construct
  source 1..75: mol_type = other DNA
ttgacgcggcagccagcggttttgcttctaacggttatggcgagcattcaccaggcggttattccatgctttccg

SEQ ID NO: 448880 - DNA, 75 bp, synthetic construct
  source 1..75: mol_type = other DNA
aaaatcaaactggttctcgagttgacggaacgtaacccaattccggtaacgccagaagccagagcgatttttgac

SEQ ID NO: 448881 - DNA, 75 bp, synthetic construct
  source 1..75: mol_type = other DNA
gtgttcactttttgcagggctatttgtactctccgccggttccgggtaataaatttgtctctgactgggtaatga

SEQ ID NO: 448882 - DNA, 75 bp, synthetic construct
  source 1..75: mol_type = other DNA
gagtgtcgacgaaatctccggtcatattgtggacaatattgtcgaactggcgcgtaagcctggtggatttgcccc

SEQ ID NO: 448883 - DNA, 75 bp, synthetic construct
  source 1..75: mol_type = other DNA
gaagtggttcatatcgcttttgagcgtagcgcactggaacagtggctgaacaaaggcggtgaaattcgcggcaaa

SEQ ID NO: 448884 - DNA, 75 bp, synthetic construct
  source 1..75: mol_type = other DNA
ttaccggatgcgccttatgtctcggatcgtcgctggaaaaaagcgatccgattattgcaggccagcgcctttttt

SEQ ID NO: 448885 - DNA, 75 bp, synthetic construct
  source 1..75: mol_type = other DNA
attcaacccgttttctgtgcacaaacaggtgaattaaccggctgcgaaattctggttcgttgggaacatccgcaa

SEQ ID NO: 448886 - DNA, 75 bp, synthetic construct
  source 1..75: mol_type = other DNA
ctatcctgggctacgtggcggagggcctctgacgacacttatagaattgctggagtatcagggcaatcaacaaac

SEQ ID NO: 448887 - DNA, 75 bp, synthetic construct
  source 1..75: mol_type = other DNA
cgcatcatgaccgcgcgcaagaaatattttacaacatcggcggagaagcaaagtgctaaagccgccagggagaaa

SEQ ID NO: 448888 - DNA, 75 bp, synthetic construct
  source 1..75: mol_type = other DNA
tttttactggggctactacaaaccagtttcgcgcccaaaaatcatggtcgttgggatgatatctggcaagacgga

SEQ ID NO: 448889 - DNA, 75 bp, synthetic construct
  source 1..75: mol_type = other DNA
tcgataagtcatttgtgcaaatggcgagtgtcgacgaaatatccggtcatattgtggacaatattgtcgaactgg

SEQ ID NO: 448890 - DNA, 75 bp, synthetic construct
  source 1..75: mol_type = other DNA
ttttggaagagttcggggcaacggtgaatttgacgttgcctggtatcgtgtccgaaaaagaacggcttttactca

SEQ ID NO: 448891 - DNA, 75 bp, synthetic construct
  source 1..75: mol_type = other DNA
aatcatttaaatcaggaaatggaagatttctggtgataagaacagaacagttaaaaaattatgaatttaatatgg

SEQ ID NO: 448892 - DNA, 75 bp, synthetic construct
  source 1..75: mol_type = other DNA
atgcgaaaaaaaagctcgcactttcgtacgagctcttctttaaatatggcggtgagggggggattgactcgcttc

SEQ ID NO: 448893 - DNA, 75 bp, synthetic construct
  source 1..75: mol_type = other DNA
tacggactggatcgcattgtcagcgccgcagaaagtctgcgcgagtttcgccagggagaactgtctattgcctgc

SEQ ID NO: 448894 - DNA, 75 bp, synthetic construct
  source 1..75: mol_type = other DNA
taaattgaagatcaacatggagcgccagtggcctgaaccaaaagatggtgagcctcgcttgcacattaaagaacc

SEQ ID NO: 448895 - DNA, 75 bp, synthetic construct
  source 1..75: mol_type = other DNA
atactgtccattgtggtcggtgcctgtcttgccgtcgtaccggaaatgatgagcagcggacagaaaacgctcggt

SEQ ID NO: 448896 - DNA, 75 bp, synthetic construct
  source 1..75: mol_type = other DNA
gcttttgctgtcggtcacatttccggcgggcattttaaccctgcggtcactattggcttatgggctggcggccgt

SEQ ID NO: 448897 - DNA, 75 bp, synthetic construct
  source 1..75: mol_type = other DNA
gaaaccagaataaagctggctgatgcagaagcgtgtgccgggcttattgaggattatacaaatcttggtatttct

SEQ ID NO: 448898 - DNA, 75 bp, synthetic construct
  source 1..75: mol_type = other DNA
ggtgagcctcgcttgcacattaaagaacgcggcaactctccggtaactccgggtagttggataagctgtagtgat

SEQ ID NO: 448899 - DNA, 75 bp, synthetic construct
  source 1..75: mol_type = other DNA
acgtccgagacgaacgctaagtcttctgaaacagcagcgggacagagcgcctcagctgcggcaggttcaaaaaca

SEQ ID NO: 448900 - DNA, 75 bp, synthetic construct
  source 1..75: mol_type = other DNA
aacccatgcgactgatgctgcaggctcagcacgtgcagccagcacgtcagccggacagtccgcgacgtcggctca

SEQ ID NO: 448901 - DNA, 75 bp, synthetic construct
  source 1..75: mol_type = other DNA
ccatgactagcgcgcttgcgggtaagcaaccgaaagatgccaccctgacggcgctggccgggcttgctactgcgg

SEQ ID NO: 448902 - DNA, 75 bp, synthetic construct
  source 1..75: mol_type = other DNA
tgcttggcctcaaacaaatcggtaaaaaacccggtgcagggctggcctgcctgctgtcaattctggtcggcgtct

SEQ ID NO: 448903 - DNA, 75 bp, synthetic construct
  source 1..75: mol_type = other DNA
ttggacaactatcaaaactatttgggctaaagggtgtgagtacttttcaatagtagcaccgcagcaagatgggtg

SEQ ID NO: 448904 - DNA, 75 bp, synthetic construct
  source 1..75: mol_type = other DNA
ggcagtaactgacattggagaagaacctgcatcaaaagtaacccactggatgccgctgccagaaccgccgcagga

SEQ ID NO: 448905 - DNA, 75 bp, synthetic construct
  source 1..75: mol_type = other DNA
gtactacgagagctgcattgaagcattccatgaggctgaaaccagcctgaatcacactgcttttcgccgtaatca

SEQ ID NO: 448906 - DNA, 75 bp, synthetic construct
  source 1..75: mol_type = other DNA
cttttgctcacatttcaaatggttataaatatatttatatagcgattaattcaccagagatatttctgctggttt

SEQ ID NO: 448907 - DNA, 75 bp, synthetic construct
  source 1..75: mol_type = other DNA
agaagttctcgctgctttacgtaaaggcggctatatcgaaatgaataaaggcaaactggtcgctatcaaccgttt

SEQ ID NO: 448908 - DNA, 75 bp, synthetic construct
  source 1..75: mol_type = other DNA
agaagttaattgatgaagccatcgacgaagcggcacgttgtactgaaatgtggtttacagatggcttgaccaaag

SEQ ID NO: 448909 - DNA, 75 bp, synthetic construct
  source 1..75: mol_type = other DNA
gcggtcatggtggtcacaatggactgaaagacatcatcagtaaattgggtaataaccctaactttcaccgtttac

SEQ ID NO: 448910 - DNA, 75 bp, synthetic construct
  source 1..75: mol_type = other DNA
gaaagacatcatcagtaaattgggtaataaccctaactttcaccgtttacgcatcggaatcggtcatccgggcga

SEQ ID NO: 448911 - DNA, 75 bp, synthetic construct
  source 1..75: mol_type = other DNA
attctaaaagaatataataataaaaacaactgcataataatgataactcatgatattgagcttgttaatgataat

SEQ ID NO: 448912 - DNA, 75 bp, synthetic construct
  source 1..75: mol_type = other DNA
aaacgttttcaggtcgtaatattatttccaaccttaacattaacataccaaagaatcagtttactattataactg

SEQ ID NO: 448913 - DNA, 75 bp, synthetic construct
  source 1..75: mol_type = other DNA
aatgcggtggaacagttgttatgataacgcatgatacaaatataattacaacagatatgaaagtgatatcgcttt

SEQ ID NO: 448914 - DNA, 75 bp, synthetic construct
  source 1..75: mol_type = other DNA
gactggaatgaagaattgggtaatgactccaacttattgatagtgttttatgttcagatgatgcccgatgacttt

SEQ ID NO: 448915 - DNA, 75 bp, synthetic construct
  source 1..75: mol_type = other DNA
gcattatctgaacataaaacactatcaataagttggagtcattaccaagaaaacgtacttatcggtattacccag

SEQ ID NO: 448916 - DNA, 75 bp, synthetic construct
  source 1..75: mol_type = other DNA
tacgggatatcatctaccagccaaacaaaccattacccttattgaacaaaatcaactctggcgagatgcttttta

SEQ ID NO: 448917 - DNA, 75 bp, synthetic construct
  source 1..75: mol_type = other DNA
cgttgtactgaaatgtggtttacagatggcttgaccaaagcaacgaaccgattgcacgcctttaaagcgcaataa

SEQ ID NO: 448918 - DNA, 75 bp, synthetic construct
  source 1..75: mol_type = other DNA
acaatatattgattctgcaatttcgggacgttacactgtctctgcaccttataaagcgggggccgggattggcgt

SEQ ID NO: 448919 - DNA, 75 bp, synthetic construct
  source 1..75: mol_type = other DNA
cttgatcgccggtagttccaaccctgttcagtccgccaccagcgagcttggaacctccggtggtggaagtttttc

SEQ ID NO: 448920 - DNA, 75 bp, synthetic construct
  source 1..75: mol_type = other DNA
atgattgttctccaagatattgattctgcaatttcgggacgttacactgtctctgccccttataaagcgggggcc

SEQ ID NO: 448921 - DNA, 75 bp, synthetic construct
  source 1..75: mol_type = other DNA
ggaatacgcgtggcaacaggtactaaaagagcttagccagcaatatcaacagattgatgatgactatttgcaggc

SEQ ID NO: 448922 - DNA, 75 bp, synthetic construct
  source 1..75: mol_type = other DNA
aagcattttattatcagccagtgttatgcacagtgcaggtgaaatcggccctgacgctgaaagaagaacaggaac

SEQ ID NO: 448923 - DNA, 75 bp, synthetic construct
  source 1..75: mol_type = other DNA
caaattatggtggggcgtgcaggggcatcgaaagatgcgccggggtcatgtgcgaccggttacgccaaccctgta

SEQ ID NO: 448924 - DNA, 75 bp, synthetic construct
  source 1..75: mol_type = other DNA
cccgttcagttcaccaccagcgaaattggcgtttccggtggtgaaggtaattcactgttatcggaggctgccatc

SEQ ID NO: 448925 - DNA, 75 bp, synthetic construct
  source 1..75: mol_type = other DNA
gaggctgccatcatggctacagtcccaacccactcattcctcaaaattgagagcgtcaacggcaaggccgttatt

SEQ ID NO: 448926 - DNA, 75 bp, synthetic construct
  source 1..75: mol_type = other DNA
tggcgaaccccggcgctgaatatgcagcaacgcgacataatgctggtgcctggttcgttgacttactggcggagc

SEQ ID NO: 448927 - DNA, 75 bp, synthetic construct
  source 1..75: mol_type = other DNA
gtctgcgcaccatgcggtactacgagagctgtattgacgcactccatgaggttgaaaccgtccagggtcactccg

SEQ ID NO: 448928 - DNA, 75 bp, synthetic construct
  source 1..75: mol_type = other DNA
cgggggcatcgaaagatgcgccggtttccttgatcaccggttacgccaaccccgttcagttcaccaccagcgaaa

SEQ ID NO: 448929 - DNA, 75 bp, synthetic construct
  source 1..75: mol_type = other DNA
cacttttgggacgttacactgtctctgcaccttataaagcgggtgccgggattggcgtcctgaaattcaatatag

SEQ ID NO: 448930 - DNA, 75 bp, synthetic construct
  source 1..75: mol_type = other DNA
atgaatataatactcgattattataaatgcggtggaacagttgttatgataacgcatgatacaaatataattaca

SEQ ID NO: 448931 - DNA, 75 bp, synthetic construct
  source 1..75: mol_type = other DNA
gtctgtctgatgactttgtccgcatgtacaacgacgccgtcaccagtaccgaacgtacgttatcaggaaaacctg

SEQ ID NO: 448932 - DNA, 75 bp, synthetic construct
  source 1..75: mol_type = other DNA
acccgcgccgcaaaattagcaatggactatggctttaccgtacttaatctttataagctttatctgatcgtcgat

SEQ ID NO: 448933 - DNA, 75 bp, synthetic construct
  source 1..75: mol_type = other DNA
tgaactctctgatctgtacgataaacatattcacgatcagagtgaacgtcgtttcgtcgtggaatgtgatggcga

SEQ ID NO: 448934 - DNA, 75 bp, synthetic construct
  source 1..75: mol_type = other DNA
cgagcagttcggcacgcttaatacgctctatccggggcgaatcgatttagggctgggacgtgctccaggtagcga

SEQ ID NO: 448935 - DNA, 75 bp, synthetic construct
  source 1..75: mol_type = other DNA
cttcgcgccggatatgttgttccaggcgctgcatctttatcgcagcaacttcaaaccgtcggcacggctggaaaa

SEQ ID NO: 448936 - DNA, 75 bp, synthetic construct
  source 1..75: mol_type = other DNA
gcagcaagcctttgtgaagctgcgccgtggcgaaaccgggcaactgccgccaccgattcaaaatatggatcagtt

SEQ ID NO: 448937 - DNA, 75 bp, synthetic construct
  source 1..75: mol_type = other DNA
cagggacctgaaaccggagaccagtgtaaccgaagagatcggtattatttataataatgaccgtggtttctcagc

SEQ ID NO: 448938 - DNA, 75 bp, synthetic construct
  source 1..75: mol_type = other DNA
taaagcatgagccagattcatcaaatgagatatgcattgcttcaatgctggcccgtttacgcccgacgcaaaaag

SEQ ID NO: 448939 - DNA, 75 bp, synthetic construct
  source 1..75: mol_type = other DNA
atggtgatgtttatacagggctcagagatgaccccggtggaaacaaagctgcaatattaccctccgtttcagcag

SEQ ID NO: 448940 - DNA, 75 bp, synthetic construct
  source 1..75: mol_type = other DNA
cgggcattgccgtgatatgttctacagtcatatcatcaggttatgccagttctgataaaaaagaagatacgcttg

SEQ ID NO: 448941 - DNA, 75 bp, synthetic construct
  source 1..75: mol_type = other DNA
aataagaatataacggcaacgctccagtttactccgactgaaagccagaagtttgtttttgaatatggaaaaaat

SEQ ID NO: 448942 - DNA, 75 bp, synthetic construct
  source 1..75: mol_type = other DNA
gtcaggcccattggttaaggataaacttggtcttcagctatatggaggaatgaactatcgcaaggaagatagtat

SEQ ID NO: 448943 - DNA, 75 bp, synthetic construct
  source 1..75: mol_type = other DNA
attatcgccgccgacagcaaccgcgacgctgaatttctgtttacctcgatgcagcaagcctttgtgaagctgcgc

SEQ ID NO: 448944 - DNA, 75 bp, synthetic construct
  source 1..75: mol_type = other DNA
ggatatatccttaccgagcaggattactgtgtggttgtgggtgcaatcaatatggatattcgcggaatggcggat

SEQ ID NO: 448945 - DNA, 75 bp, synthetic construct
  source 1..75: mol_type = other DNA
ttgcaattttacggcgtaacccgctgattcagcagaatgaaattgctgacatgctgcaaattagccgttcgcgcg

SEQ ID NO: 448946 - DNA, 75 bp, synthetic construct
  source 1..75: mol_type = other DNA
ttgcgctggagccggatctcatcatgtttgatgaaccttttgttgggcaagatcccatcaccatgggcgtactgg

SEQ ID NO: 448947 - DNA, 75 bp, synthetic construct
  source 1..75: mol_type = other DNA
aacctatagaacatcgtactattttggataataaaaacattgaaatagaagagggatcattcaatattattacgg

SEQ ID NO: 448948 - DNA, 75 bp, synthetic construct
  source 1..75: mol_type = other DNA
atcttatcggattataatgatgggggaggaactgtaatcatggtaactcatgatcttgagttggttaacgataag

SEQ ID NO: 448949 - DNA, 75 bp, synthetic construct
  source 1..75: mol_type = other DNA
gtgatcaaattagatatttatgataaacaattcaaggataaaaaaatccttaattctgtatctttgtatgttgaa

SEQ ID NO: 448950 - DNA, 75 bp, synthetic construct
  source 1..75: mol_type = other DNA
gttttttagggtgtatgatgaaatttgggtagcagggcaggcacatattgatagatttaaaaatgcaggattcaa

SEQ ID NO: 448951 - DNA, 75 bp, synthetic construct
  source 1..75: mol_type = other DNA
gcgctgcatctttatcgcagcaacttcaaaccgtcggcacggctggaaaaaccatacgcgatggtgtgcatcaat

SEQ ID NO: 448952 - DNA, 75 bp, synthetic construct
  source 1..75: mol_type = other DNA
attgataatttcccccgcgatgtcgcggagctggtggactggtttgacgcccgcgatcccaatccgcatgtgcgc

SEQ ID NO: 448953 - DNA, 75 bp, synthetic construct
  source 1..75: mol_type = other DNA
aagtcgatagcattaagaaaaaaataaaccataacgatttggaagaattactgtcatcattaagtaaaaaacact

SEQ ID NO: 448954 - DNA, 75 bp, synthetic construct
  source 1..75: mol_type = other DNA
tgtttggcgatcccattgaaaatccgaagggatggaatgtcaaacctctggcagatcagattgttcatgccaata

SEQ ID NO: 448955 - DNA, 75 bp, synthetic construct
  source 1..75: mol_type = other DNA
tttcaaatatagaacagctaatgcaattaatagaaaaaataatagttaacggtaatgattatctggctgaagcta

SEQ ID NO: 448956 - DNA, 75 bp, synthetic construct
  source 1..75: mol_type = other DNA
gagcagaacgggccagacgataaaggagacaccccgatgtcggattcctgcatttcccgtcgggtacaaccactg

SEQ ID NO: 448957 - DNA, 75 bp, synthetic construct
  source 1..75: mol_type = other DNA
ttcatcagtgcggcctgtcccgttccacgctctacgatttaattgcccgcaatgctttcccggcgcaggtttccc

SEQ ID NO: 448958 - DNA, 75 bp, synthetic construct
  source 1..75: mol_type = other DNA
gattcgagaaatcgagctggaggcagagagcgtattgcatcagtccgcacccatccacgcggtctatttcggtgg

SEQ ID NO: 448959 - DNA, 75 bp, synthetic construct
  source 1..75: mol_type = other DNA
cgaatcctccgtatatgggtagcaaaggcatgaatgcagaccttaaagattttgctaaggaaaactatccaaata

SEQ ID NO: 448960 - DNA, 75 bp, synthetic construct
  source 1..75: mol_type = other DNA
acgcaccaaaagcgcgccgcgaatttatggatgcggttgctaaacgattaaacacctttggtatcaccgcgaata

SEQ ID NO: 448961 - DNA, 75 bp, synthetic construct
  source 1..75: mol_type = other DNA
gcagcatatttgctcaagaataaagcaagtaacgccggaactcaggacagtcactgggccactgttcttctaccg

SEQ ID NO: 448962 - DNA, 75 bp, synthetic construct
  source 1..75: mol_type = other DNA
atgcaagctgttttttcttccccgtctcccgctcctgtaacgccactgattccgctgccggacatcacgcaggag

SEQ ID NO: 448963 - DNA, 75 bp, synthetic construct
  source 1..75: mol_type = other DNA
atgcaattattacgttatctgcatttgatacgcagttttttgtcaagcggggccgcaaccagtaaactacgcgcc

SEQ ID NO: 448964 - DNA, 75 bp, synthetic construct
  source 1..75: mol_type = other DNA
ggggaatttccgccgcaggtgagccttggcggtaaaaatgtggcctggctgcactctgaagtcaccgcatggatg

SEQ ID NO: 448965 - DNA, 75 bp, synthetic construct
  source 1..75: mol_type = other DNA
tcgtttctgggcaagcaacattttgcagtctcttaatgagctaattcagatacttaatgcgccagcgattgcgct

SEQ ID NO: 448966 - DNA, 75 bp, synthetic construct
  source 1..75: mol_type = other DNA
ccatccacgcggtctatttcggtggcggtacgccttccgcgctttcggcacacgatttggccagaatcatcacca

SEQ ID NO: 448967 - DNA, 75 bp, synthetic construct
  source 1..75: mol_type = other DNA
gacacactgcacgttttgtggcttttatcagaaccgttttaatgaagatgcgtgtgctcattataccgacgccct

SEQ ID NO: 448968 - DNA, 75 bp, synthetic construct
  source 1..75: mol_type = other DNA
gatcacttcgaaacaaagagcaatactttaaagtatgtatatcatgggctgatgttggttctggtaattataatt

SEQ ID NO: 448969 - DNA, 75 bp, synthetic construct
  source 1..75: mol_type = other DNA
tggaaagcactcaacctatcgggaagttggcaaagcggcacgtcccagggcttgttctcagatgaagagcaagat

SEQ ID NO: 448970 - DNA, 75 bp, synthetic construct
  source 1..75: mol_type = other DNA
ccagttctacatttctgaaaagaaagatcaggtaatgggtaaggtggtcaagagtgaagacatccctgccgccac

SEQ ID NO: 448971 - DNA, 75 bp, synthetic construct
  source 1..75: mol_type = other DNA
agattgaaacggcagactcgactagtgaagcgaaccgcttcaagaaagagttggatgccttaaccaagaaacagg

SEQ ID NO: 448972 - DNA, 75 bp, synthetic construct
  source 1..75: mol_type = other DNA
ggctgaatattgtctccctacaggaaagtaagctggatattgctgaggtttggaccaagctgaacttccatcagc

SEQ ID NO: 448973 - DNA, 75 bp, synthetic construct
  source 1..75: mol_type = other DNA
aagcttctggcggtgaagccacacgcctgaaacgcgaacgcgacagcctgatcaaaaaatttagcgaactgcgta

SEQ ID NO: 448974 - DNA, 75 bp, synthetic construct
  source 1..75: mol_type = other DNA
tgattattatccaaaacaaatttcagatattttctgcgaacttgttagctattcaattggttgcatgatggggcg

SEQ ID NO: 448975 - DNA, 75 bp, synthetic construct
  source 1..75: mol_type = other DNA
gtatcagttctatatttcggaaaagaaagatgctgtgattggcaaagtggtgaagagcgaagatattcctgccgc

SEQ ID NO: 448976 - DNA, 75 bp, synthetic construct
  source 1..75: mol_type = other DNA
gcttaatggcgccgccctgctcacagggatcaacgacgacgcgttaaaacaacaaatcaaggctctgttaactca

SEQ ID NO: 448977 - DNA, 75 bp, synthetic construct
  source 1..75: mol_type = other DNA
agtttgttcaagtcgtatggggtaaggaacacttacaagaaaacttggatttcgttgccgaatcactatgcctaa

SEQ ID NO: 448978 - DNA, 75 bp, synthetic construct
  source 1..75: mol_type = other DNA
caacgctatgacgcggtagtggcgaatccgccgtatatgggcgggaaagggatgaatggcgaactgaaggagttt

SEQ ID NO: 448979 - DNA, 75 bp, synthetic construct
  source 1..75: mol_type = other DNA
ttgacgacgacgtcacctctcgcgtcaaagagtttgtccgcaccgtctggggtgaagaacacctgcaggaaaacc

SEQ ID NO: 448980 - DNA, 75 bp, synthetic construct
  source 1..75: mol_type = other DNA
gaaaatgggtttaatgcacaaataaatatgcaatcttggatgtttttatccagttttgaggtgctacgtgaatgg

SEQ ID NO: 448981 - DNA, 75 bp, synthetic construct
  source 1..75: mol_type = other DNA
gccggtctctgatgccgttcacgagcgctttatccgtctgcccgaagtgatgcatttatgcggcctttcccgctc

SEQ ID NO: 448982 - DNA, 75 bp, synthetic construct
  source 1..75: mol_type = other DNA
aataatcgagatgatctgtctgcactggcgggggaagagtcggaatcgggaaaggagaaatcggctgtcaatgac

SEQ ID NO: 448983 - DNA, 75 bp, synthetic construct
  source 1..75: mol_type = other DNA
accaaacgcaacctggccggtacatgctgtaattaccaactctacctatgatggtctgctgtacaacaccgactt

SEQ ID NO: 448984 - DNA, 75 bp, synthetic construct
  source 1..75: mol_type = other DNA
tcacagtggtccacacaaagaagcagaacagtatatcgctcgcgtatttaacgcagaccgcagctacatggtgac

SEQ ID NO: 448985 - DNA, 75 bp, synthetic construct
  source 1..75: mol_type = other DNA
tggggcggagaagaagcacgcccgacacttgctgacgtacaggaacagtacttgccaagcgttttagcgcaagag

SEQ ID NO: 448986 - DNA, 75 bp, synthetic construct
  source 1..75: mol_type = other DNA
tttgtctcattggtgaattgcttgatttcatacaaaaaagcactgcgcgcaataataaaaatataacatatggtg

SEQ ID NO: 448987 - DNA, 75 bp, synthetic construct
  source 1..75: mol_type = other DNA
ggctcgtgaaaatatgcaacagcaacagcgagcaacgaaagcagtttcgtcaaacggtattgtgagacaactctg

SEQ ID NO: 448988 - DNA, 75 bp, synthetic construct
  source 1..75: mol_type = other DNA
aaatcccattggtaccgatgccgtcaaagtgatggaggccatcgaatctgttgccgatgccgaccatgtgctggt

SEQ ID NO: 448989 - DNA, 75 bp, synthetic construct
  source 1..75: mol_type = other DNA
cgacaaagttatctttgacgccatgcatgcgctggaagccaaacgtgaacaactgggtttaccctcctccgacac

SEQ ID NO: 448990 - DNA, 75 bp, synthetic construct
  source 1..75: mol_type = other DNA
ttttcgcggcgaaggtgaagagttgcattacaatgcgcgcgttcatctcggtgaactgggcaaccattttccacc

SEQ ID NO: 448991 - DNA, 75 bp, synthetic construct
  source 1..75: mol_type = other DNA
agataaaatcaatctcgtttttataggtaatatgtattccttgcagaatcttgatggggtgatatggtttattga

SEQ ID NO: 448992 - DNA, 75 bp, synthetic construct
  source 1..75: mol_type = other DNA
gaattaatgccaaatcatgatgcagtattctctcatttaatcagaactggagattatgttaaaaatattaatata

SEQ ID NO: 448993 - DNA, 75 bp, synthetic construct
  source 1..75: mol_type = other DNA
acaaaattctcgaatatatggcacttggtttaccatgtataacatcatcagtggggtttgaagggatcggcgcta

SEQ ID NO: 448994 - DNA, 75 bp, synthetic construct
  source 1..75: mol_type = other DNA
ccagtcgtacgttgctcttggaagcggggacggatggtgggaagaagaaaccgatccaggagtacgcggaataga

SEQ ID NO: 448995 - DNA, 75 bp, synthetic construct
  source 1..75: mol_type = other DNA
caaacggcaaattagagagcgtggaaaacctgaacgtaccggtaacgcaacccatggcggtgctgaaaggcgatc

SEQ ID NO: 448996 - DNA, 75 bp, synthetic construct
  source 1..75: mol_type = other DNA
aagaaactttcgattctctttgcgagttataccgtgaaggaaaaatcacaatggaaggaggttattacttcgatc

SEQ ID NO: 448997 - DNA, 75 bp, synthetic construct
  source 1..75: mol_type = other DNA
gattgtctcctgccagccggttcctgacagcccgctcgataaacccgaaatcgtcgccgccatggcattagctgc

SEQ ID NO: 448998 - DNA, 75 bp, synthetic construct
  source 1..75: mol_type = other DNA
cgcgtgacattattaccagccaggcggggcttaacggtattgaaaaacagcagcatttgctggcggctattactg

SEQ ID NO: 448999 - DNA, 75 bp, synthetic construct
  source 1..75: mol_type = other DNA
gcgcgagcgtgtgttagccagccaacagcgtgaaaccctcagcgaactcagcgtcgaagaggtgttcaatcgccg

SEQ ID NO: 449000 - DNA, 75 bp, synthetic construct
  source 1..75: mol_type = other DNA
tcgccgtctggcactggaagaactggatgaatcgcagcagcaacgtctgcagcatcttttcaccacgacgttgca

SEQ ID NO: 449001 - DNA, 75 bp, synthetic construct
  source 1..75: mol_type = other DNA
tatagttttgttcttgctaaaaaacaaaaaaacagatgagcgcctccatgaggaaacaaaaacattaattaaaac

SEQ ID NO: 449002 - DNA, 75 bp, synthetic construct
  source 1..75: mol_type = other DNA
tttattatctagttctaaagatatatcattcaataatcagttgtggaaagaacatgcggttttgttattttctac

SEQ ID NO: 449003 - DNA, 75 bp, synthetic construct
  source 1..75: mol_type = other DNA
tgatacaccatacataaaaatcctctttgatggagaaaaaatacacagggattttattattaaattttcaaatca

SEQ ID NO: 449004 - DNA, 75 bp, synthetic construct
  source 1..75: mol_type = other DNA
atacgtctgaaggttgttttgaaattggtgtcagtatcagtaaccctgcatttactgaagatgccattaataaga

SEQ ID NO: 449005 - DNA, 75 bp, synthetic construct
  source 1..75: mol_type = other DNA
caaaataatcttaaacttagaatagatgtgcgtatcgtttatatatatgttctctcgttactgagagataggcaa

SEQ ID NO: 449006 - DNA, 75 bp, synthetic construct
  source 1..75: mol_type = other DNA
agatatactacaaaagaagtcgtacttactggttttcctcggtttgataatttatcaaatgttgatacaagaaat

SEQ ID NO: 449007 - DNA, 75 bp, synthetic construct
  source 1..75: mol_type = other DNA
attcatttctcaagtgggggctgaatcgtaatgtgacacctttctttggcgctcgtctggtacaggagggaaacc

SEQ ID NO: 449008 - DNA, 75 bp, synthetic construct
  source 1..75: mol_type = other DNA
ttatggaataatgtacatactgcaactctagaagactttaaaattaaagatactgacttatttcatccggatgca

SEQ ID NO: 449009 - DNA, 75 bp, synthetic construct
  source 1..75: mol_type = other DNA
gacaagttggggggagatgcacctgctggttacgatcaatttatggataacaaagggttactcatcgtgcttcaa

SEQ ID NO: 449010 - DNA, 75 bp, synthetic construct
  source 1..75: mol_type = other DNA
atggtcgacagggaaagactatttgaagtgcttgattacgaggtgcaaattagtctcgaggctggttgccctggc

SEQ ID NO: 449011 - DNA, 75 bp, synthetic construct
  source 1..75: mol_type = other DNA
agttgataatattgcagaatcagtacttaggttccgtagtcatttaaatttaaatgttgacagtaatattaccaa

SEQ ID NO: 449012 - DNA, 75 bp, synthetic construct
  source 1..75: mol_type = other DNA
tcacaacggactcacctgcgaagccgatacgcttggtagttgtggctacgtatatatcgccatttatcccactca

SEQ ID NO: 449013 - DNA, 75 bp, synthetic construct
  source 1..75: mol_type = other DNA
gatgctgtagtggaagtagcaaaacagggaagacctatcaataccagaacattgcttgattacattgaaggaaac

SEQ ID NO: 449014 - DNA, 75 bp, synthetic construct
  source 1..75: mol_type = other DNA
ttacattgaaggaaacataaagaaaaaatcatggctggataacaaagaattattacaaacagcgatatcagttct

SEQ ID NO: 449015 - DNA, 75 bp, synthetic construct
  source 1..75: mol_type = other DNA
agcagatgaataacgtcagcaacgctattacggcacttaacgccatgaatgccacagtgcagagcgtcatgattg

SEQ ID NO: 449016 - DNA, 75 bp, synthetic construct
  source 1..75: mol_type = other DNA
ccataccggagaatcccccctgccagcagtgggggctaaagagtacgatcacaccctgttttggagctcggctgg

SEQ ID NO: 449017 - DNA, 75 bp, synthetic construct
  source 1..75: mol_type = other DNA
gctgggcagtcatgggtatgtatatatcgcaattttgaatcgccacgggtttaacagacacctccgagtcattta

SEQ ID NO: 449018 - DNA, 75 bp, synthetic construct
  source 1..75: mol_type = other DNA
actctcagcaagctcagtttgaagcatcaatggcaaacgatgaagttaatcatctacaattgcgccttaaccaaa

SEQ ID NO: 449019 - DNA, 75 bp, synthetic construct
  source 1..75: mol_type = other DNA
ctggcatcagtcaggcacattgttctggatttctattggcatcctttcctttgtggcattgatcctctggcgcta

SEQ ID NO: 449020 - DNA, 75 bp, synthetic construct
  source 1..75: mol_type = other DNA
tcaggatcctgcgtcataatccgctactacagcagaatgaaatcgctgatattttacaaatcagtcggtcgcgtg

SEQ ID NO: 449021 - DNA, 75 bp, synthetic construct
  source 1..75: mol_type = other DNA
tacagtgtcgaaatttaaggctgttaatgtaaaaaactggcttccgcatatccataccctgaaacccacacaaaa

SEQ ID NO: 449022 - DNA, 75 bp, synthetic construct
  source 1..75: mol_type = other DNA
cgggaaagtgctcaatttgcgatggcatgtgcagcactgtcacgtgccagtgtaagcataaataacccaactctt

SEQ ID NO: 449023 - DNA, 75 bp, synthetic construct
  source 1..75: mol_type = other DNA
acctaatcaagccagacatgatgcaattatcaggttgatagggggttctacgccggaaccgccgaaatttccggc

SEQ ID NO: 449024 - DNA, 75 bp, synthetic construct
  source 1..75: mol_type = other DNA
ggttcgcggctcgaccgaccggaattattcagactgctgaacgactgccgacagaacgatattctccttattgaa

SEQ ID NO: 449025 - DNA, 75 bp, synthetic construct
  source 1..75: mol_type = other DNA
cagcttctgaacggttcgcgcaatttgatccatcactccggcgtggtgctggccgactgtaacctgacacctgag

SEQ ID NO: 449026 - DNA, 75 bp, synthetic construct
  source 1..75: mol_type = other DNA
gggagctgttgccgcagtcagttaaagacgaaattgggtttgatcttagtcttggtgaagtaccaggggatacca

SEQ ID NO: 449027 - DNA, 75 bp, synthetic construct
  source 1..75: mol_type = other DNA
aaacgccacgaaccatgtaggggatgttcagaccgtcactcctggccagcccgcaggcacgacaccggaagccga

SEQ ID NO: 449028 - DNA, 75 bp, synthetic construct
  source 1..75: mol_type = other DNA
ggattgccgaccctggccttcagccggaacgcacatcgctggcatggtttcgcaccatgctgggctatggcgcgt

SEQ ID NO: 449029 - DNA, 75 bp, synthetic construct
  source 1..75: mol_type = other DNA
cacgactgaacaggatgcaacacgcgccctggacacgataaataccttcgctatcgagcacggcctgagcatctg

SEQ ID NO: 449030 - DNA, 75 bp, synthetic construct
  source 1..75: mol_type = other DNA
cagtggcaacttccgcagctgtatcttgttctgctatggcatggactactaacggtactggcggtacggttgatt

SEQ ID NO: 449031 - DNA, 75 bp, synthetic construct
  source 1..75: mol_type = other DNA
gaaggggcttttaaggggcttcgaagccaagaacaggaacaggagcaggagaaagaacaggaacaggacaaaaac

SEQ ID NO: 449032 - DNA, 75 bp, synthetic construct
  source 1..75: mol_type = other DNA
cgtggggcattctcaaaacgccgtcaggttggcgcaagtgagtatgcatatattagttttttaacagtcagtcag

SEQ ID NO: 449033 - DNA, 75 bp, synthetic construct
  source 1..75: mol_type = other DNA
cccgatttacgcgcggcgatggcctggctaccaccacgagaacgcgggacgctggcgcatcaggtgcttgagcat

SEQ ID NO: 449034 - DNA, 75 bp, synthetic construct
  source 1..75: mol_type = other DNA
cggcgtttctctttctgcggcggtagccttactggagcgacgcagtcaggcgattcatgccccggcgctggatcg

SEQ ID NO: 449035 - DNA, 75 bp, synthetic construct
  source 1..75: mol_type = other DNA
tggctaccgccacgagaacgcgggacgctggcgcatcaggtgcttgagcattaccagcttgcgcagcttcctgtt

SEQ ID NO: 449036 - DNA, 75 bp, synthetic construct
  source 1..75: mol_type = other DNA
tgggccaggcgctggaagtgctatatgccttatggcggttggatgaaattagcggtatgcaaggcgcgcagatat

SEQ ID NO: 449037 - DNA, 75 bp, synthetic construct
  source 1..75: mol_type = other DNA
agttgcctgcttcgaccgcggatatggctgccgctcatctgcatgcgatggcgctggcacagttgcgcggtcata

SEQ ID NO: 449038 - DNA, 75 bp, synthetic construct
  source 1..75: mol_type = other DNA
cactccaggaagccgcacgcaataaattagaagccgatatgctggacgcgggtggaatcggcagcattaccgcat

SEQ ID NO: 449039 - DNA, 75 bp, synthetic construct
  source 1..75: mol_type = other DNA
ggtgctgatgttcgactggataaaaagtggaaagaagataactttgtttcaaaagttgttatttgtgttaataat

SEQ ID NO: 449040 - DNA, 75 bp, synthetic construct
  source 1..75: mol_type = other DNA
gtattatttgccacgttatctggtgttgtgtatggattgtcatggatgtggagtgggtgcttgtgggtggcaacc

SEQ ID NO: 449041 - DNA, 75 bp, synthetic construct
  source 1..75: mol_type = other DNA
aacaaaaagcaagcgtgccgcaggtggatttcgtgaagatgaagaacgggccgctaaccgcaataactggatgta

SEQ ID NO: 449042 - DNA, 75 bp, synthetic construct
  source 1..75: mol_type = other DNA
cgaacggctaacggtttgctttcatgcgcagttaaaacagcgtcatgcaacgatgcgttttgaagaaatgaacga

SEQ ID NO: 449043 - DNA, 75 bp, synthetic construct
  source 1..75: mol_type = other DNA
attccgctttaatacgcccgttgaccaactgctttgcgacggcgagcaaatctacggcgtgaagtgtggcgatga

SEQ ID NO: 449044 - DNA, 75 bp, synthetic construct
  source 1..75: mol_type = other DNA
ggaatccagccgcctggcggaagtggagcccgcgctggcagaagtagcgcacaaactgacgggtggtctgcaact

SEQ ID NO: 449045 - DNA, 75 bp, synthetic construct
  source 1..75: mol_type = other DNA
aatggactagcgcaaagtcaggtgttacatcggctggcaatactggagatcccagggattgtacgccagcaggga

SEQ ID NO: 449046 - DNA, 75 bp, synthetic construct
  source 1..75: mol_type = other DNA
aaagataacgaagaagatcgcgcgcgtcttcgccttacttcgaacagcgtgtcgccacacataaagaagctcact

SEQ ID NO: 449047 - DNA, 75 bp, synthetic construct
  source 1..75: mol_type = other DNA
atgccgttacaggttgttatctcacccccctacagtgaaaagcgccttgatgtgctggcaggatacctttctggt

SEQ ID NO: 449048 - DNA, 75 bp, synthetic construct
  source 1..75: mol_type = other DNA
ggcattgattgaggccgcctgctttggtgccacactccaggaagccgcacgccataaattagaagccgatatgct

SEQ ID NO: 449049 - DNA, 75 bp, synthetic construct
  source 1..75: mol_type = other DNA
ttaacagtcagtcagcgtcgcactttatttatgcatgccggattgactgaaaaagaattcaaccagccatactgg

SEQ ID NO: 449050 - DNA, 75 bp, synthetic construct
  source 1..75: mol_type = other DNA
tggacaaacagccagaaggattgcgtagcctgattggtaaatatcttgcagcgccccgctggcaggatagctgtg

SEQ ID NO: 449051 - DNA, 75 bp, synthetic construct
  source 1..75: mol_type = other DNA
agaacgcgggacgctggcgcatcaggtgcttgagcattatcaactggcgcaacttcccgtttcggcactgcaaat

SEQ ID NO: 449052 - DNA, 75 bp, synthetic construct
  source 1..75: mol_type = other DNA
gaggcgctgcacggtttgctggcattagcccgccatcaactggccagtcagcctgcatttatcgccggtttcagc

SEQ ID NO: 449053 - DNA, 75 bp, synthetic construct
  source 1..75: mol_type = other DNA
attgaagccgcctgctttggtgccaccctccaggaggccgcacgcaataaattagaagccgatatgctggacgcg

SEQ ID NO: 449054 - DNA, 75 bp, synthetic construct
  source 1..75: mol_type = other DNA
ccaccacgagaacgcgggacgctggcgcatcaggtgcttgagcattatcaactggcgcaacttcccgtttcggcg

SEQ ID NO: 449055 - DNA, 75 bp, synthetic construct
  source 1..75: mol_type = other DNA
ccgaagcggcgctgacgatgctggcgcagttatccccggcacaatccggcgaggcgctgcacggtttgctggcgc

SEQ ID NO: 449056 - DNA, 75 bp, synthetic construct
  source 1..75: mol_type = other DNA
acagttgcgcggtcatacactaccgttacgcactgactggctggatgccatagcaggctcgctgattaaagaagc

SEQ ID NO: 449057 - DNA, 75 bp, synthetic construct
  source 1..75: mol_type = other DNA
gtacctcaatttcccttccggcagagctcgccttaaatcgctttacccccgatgggctggcgcaaagccaggtgt

SEQ ID NO: 449058 - DNA, 75 bp, synthetic construct
  source 1..75: mol_type = other DNA
acttgttagtgcagatcataaacgtagcgagttggcgttcaatgctaaaaaatatgcttgtaaaattgtaggtgt

SEQ ID NO: 449059 - DNA, 75 bp, synthetic construct
  source 1..75: mol_type = other DNA
gctggttaattccgggcaaaagcgtaaaacgctggcgaataatgcgaaggaatatacgtattcgttaatgtatta

SEQ ID NO: 449060 - DNA, 75 bp, synthetic construct
  source 1..75: mol_type = other DNA
agtggatcgataccctggcgctgctggtgaattctgggcaaaaacgtcagacgctggcgaaaaatgcgaaggaat

SEQ ID NO: 449061 - DNA, 75 bp, synthetic construct
  source 1..75: mol_type = other DNA
cagatggcacgccggttgtggggcgtacacgcttcaaaaatttgtggctgaataccggtcacggtacgcttggct

SEQ ID NO: 449062 - DNA, 75 bp, synthetic construct
  source 1..75: mol_type = other DNA
aagacggtgcgccggtgtccaccattcttgatgaaacctacaaaatcgccattacccgtttcgataaccgtatcc

SEQ ID NO: 449063 - DNA, 75 bp, synthetic construct
  source 1..75: mol_type = other DNA
tacgttcctcactttaaaccaggtaaagaactgcgcgatcgcgctaatatttacggggctttgttgaataaataa

SEQ ID NO: 449064 - DNA, 75 bp, synthetic construct
  source 1..75: mol_type = other DNA
gaaattaacaagacatgggatgacctgcttcccgtatgttccaaaacattccgtcgcacgattgcatcacatgaa

SEQ ID NO: 449065 - DNA, 75 bp, synthetic construct
  source 1..75: mol_type = other DNA
gcatggaagaagtacaaatctgacaacagcaagaagtgtccatgggtcaccgatgaagagcagatgatcctaaag

SEQ ID NO: 449066 - DNA, 75 bp, synthetic construct
  source 1..75: mol_type = other DNA
ttgatactgaagagcagcgcggggacattgtaggggcgtatgtaacggtaaaaactgacgatggtgattacctta

SEQ ID NO: 449067 - DNA, 75 bp, synthetic construct
  source 1..75: mol_type = other DNA
cccagcatcgctggatcacctcgcactgcgacagtatttgggtgtcgacgccctacctggccagtaaatatgccc

SEQ ID NO: 449068 - DNA, 75 bp, synthetic construct
  source 1..75: mol_type = other DNA
ccattgcgataccatctgggtctcgacgccctatctggccaataaatatgcgcatcttaaccctgatgtggtgcc

SEQ ID NO: 449069 - DNA, 75 bp, synthetic construct
  source 1..75: mol_type = other DNA
ttcagcaattccagaaaaatgcctttctggctgacacagcacgggcaaatctgcccagcgcacagaacgctatca

SEQ ID NO: 449070 - DNA, 75 bp, synthetic construct
  source 1..75: mol_type = other DNA
ccgcgccgtgaaacgctggagatggtggttcgcgatctctatccgcgtggtggtcatatcgaacaggccgtcttc

SEQ ID NO: 449071 - DNA, 75 bp, synthetic construct
  source 1..75: mol_type = other DNA
acttcagtcctcagggaatgtatatcggcgacgatgtgaaaggaacctctccggaacgtcttacaggcaccgatg

SEQ ID NO: 449072 - DNA, 75 bp, synthetic construct
  source 1..75: mol_type = other DNA
acggcgataagcccgatcacgatgatgaccatcatcctgacgatgaaccgccacagcctccacgcggtggacgcc

SEQ ID NO: 449073 - DNA, 75 bp, synthetic construct
  source 1..75: mol_type = other DNA
gcagctatcattattcattaagtgacagggagaaagagatggttacctcattattgcaacaccccgaaacgcggt

SEQ ID NO: 449074 - DNA, 75 bp, synthetic construct
  source 1..75: mol_type = other DNA
ttggaaaccattctatgaaaaattggttgatatcctgcatcaaggtgagcggcatgcggctagagaatttgagaa

SEQ ID NO: 449075 - DNA, 75 bp, synthetic construct
  source 1..75: mol_type = other DNA
agtctgtgatgtctgcgaaggcaggggagcaataagcgcacgttgccgttgtggtggaaaagggaaaattctaga

SEQ ID NO: 449076 - DNA, 75 bp, synthetic construct
  source 1..75: mol_type = other DNA
gcctttgctgagtactctcgctcagctgctaccagcagcgtctgcactatatgcaaaggaaccggtagaaccaca

SEQ ID NO: 449077 - DNA, 75 bp, synthetic construct
  source 1..75: mol_type = other DNA
tactgaagagttacagcgtcttctcgtatccatagcggagggcgtctcgctaaaaaaacttactcaaacacatca

SEQ ID NO: 449078 - DNA, 75 bp, synthetic construct
  source 1..75: mol_type = other DNA
gctttaaaaatctgtggctgaataccggtcacggcacgctcggctggacgatggcttgcggttccggtcagttgt

SEQ ID NO: 449079 - DNA, 75 bp, synthetic construct
  source 1..75: mol_type = other DNA
tacacgctttaaaaatttatggctgaatacgggtcatggcacgctcggctggaccatggcctgtggttctgggca

SEQ ID NO: 449080 - DNA, 75 bp, synthetic construct
  source 1..75: mol_type = other DNA
gcctgggctgttactgttggttcagcaattacccgtctggaacatatctgccagtggtactgtgaagctatgcag

SEQ ID NO: 449081 - DNA, 75 bp, synthetic construct
  source 1..75: mol_type = other DNA
acaatagcattatcaataaactaacatcattgagcacaacaaaaacaatttctcatgataaatgggaaacacaac

SEQ ID NO: 449082 - DNA, 75 bp, synthetic construct
  source 1..75: mol_type = other DNA
agtttcttgagttcaacgatataaacacggtgaatgatctcagcaattacttcaacaagattcctcgccaagaac

SEQ ID NO: 449083 - DNA, 75 bp, synthetic construct
  source 1..75: mol_type = other DNA
attgctccatattgcaatggagtctggtgttatctcatggggtcaggcaaaacttgttcatgctaacgataccta

SEQ ID NO: 449084 - DNA, 75 bp, synthetic construct
  source 1..75: mol_type = other DNA
ctggttggtggcacagagtccgagcagagcaaagctgctcagacgcatggcgcagatgtactttcctgtaacgat

SEQ ID NO: 449085 - DNA, 75 bp, synthetic construct
  source 1..75: mol_type = other DNA
gcggatgcgacggaagaacagcggcaggcatatctggcaaaactgcgtgatacgccggaatacaaaaaggaacag

SEQ ID NO: 449086 - DNA, 75 bp, synthetic construct
  source 1..75: mol_type = other DNA
gcgaaaagcctctacccgggcgtagatccgtcgaaactgacagaagatcagaagcaaactgtaagcacgctggca

SEQ ID NO: 449087 - DNA, 75 bp, synthetic construct
  source 1..75: mol_type = other DNA
tggtagtgaaattcagcggggtatccaggtcgcgatggcagcgcttcagggcctggcgggcggcaatatggcagg

SEQ ID NO: 449088 - DNA, 75 bp, synthetic construct
  source 1..75: mol_type = other DNA
cttcggggataaatttcagggtaacatgccgggtggcatgatatccgccggaggtcacagcggacatgcggaagg

SEQ ID NO: 449089 - DNA, 75 bp, synthetic construct
  source 1..75: mol_type = other DNA
ggatgtgtcggcttcttttgcttctgagtatgaaggtaaaaagattgagtcttacattccggaggtgaaaaaatg

SEQ ID NO: 449090 - DNA, 75 bp, synthetic construct
  source 1..75: mol_type = other DNA
atgggaaataaagagacttgtcgatatctacaagaaatattatcaaagaatgaaaatccttatttagtaaaggaa

SEQ ID NO: 449091 - DNA, 75 bp, synthetic construct
  source 1..75: mol_type = other DNA
ggagaacaatttttgctgaccgcgccagcgcatacgacagtagacagttttggtgctgacgatggttttatggcg

SEQ ID NO: 449092 - DNA, 75 bp, synthetic construct
  source 1..75: mol_type = other DNA
ctattacgctctctcgaccgtttattattaagggcgagagctgcgatacaattactattcgcgaaccaaaattac

SEQ ID NO: 449093 - DNA, 75 bp, synthetic construct
  source 1..75: mol_type = other DNA
ttttttgtgccttggtaaagcgttacgctatgttgcagttgcagcagcgaccgttcagggcatgatgtggtggca

SEQ ID NO: 449094 - DNA, 75 bp, synthetic construct
  source 1..75: mol_type = other DNA
atcaaaccggcaaagagctggctcgctacaagctgactgagcagggctcacataccgggatcgttatttcttcgc

SEQ ID NO: 449095 - DNA, 75 bp, synthetic construct
  source 1..75: mol_type = other DNA
atggtttcattaagtaagaaccagacggtatcactcagcaaagaatcttcagcattaagccagcttcaattcggt

SEQ ID NO: 449096 - DNA, 75 bp, synthetic construct
  source 1..75: mol_type = other DNA
aagaacagcggcaggcatatctggcaaaactgcgtgatacgccggaatacaaaaaggaacaggaaaagtatggta

SEQ ID NO: 449097 - DNA, 75 bp, synthetic construct
  source 1..75: mol_type = other DNA
atcccgtcgggctggtggaaggcatggcgcaccccgatccagagcacagtaccgaaggttttctcgaagcctggt

SEQ ID NO: 449098 - DNA, 75 bp, synthetic construct
  source 1..75: mol_type = other DNA
gcgacggacaacgggccgttgcaggtcacgcttgcgccgcaagagtccgtggcgtttattcccgctgatcacgtt

SEQ ID NO: 449099 - DNA, 75 bp, synthetic construct
  source 1..75: mol_type = other DNA
aacggctgaccagcgcattagaactggagtatgaaacccatttctgccgttttctgatgccaaccattcgcggag

SEQ ID NO: 449100 - DNA, 75 bp, synthetic construct
  source 1..75: mol_type = other DNA
tgtgccttgatatcagttatatgggattgctccatattgcaatggagtctggtgttatctcatggggtcaggcaa

SEQ ID NO: 449101 - DNA, 75 bp, synthetic construct
  source 1..75: mol_type = other DNA
cgatgtgatcatcggctggaacgtggtgcagttcgatctgcgaatgctgcaaaaacatgccgagcgttaccgtat

SEQ ID NO: 449102 - DNA, 75 bp, synthetic construct
  source 1..75: mol_type = other DNA
gccactggctcagcagtttcagcaggagctgtatttgcgcatctttcgcaacgagccatatcaggattatatccg

SEQ ID NO: 449103 - DNA, 75 bp, synthetic construct
  source 1..75: mol_type = other DNA
tgatgtgatcatcggctggaacgtggtgcagttcgatctgcgaatgctgcaaaaacatgccgagcgttatcgtat

SEQ ID NO: 449104 - DNA, 75 bp, synthetic construct
  source 1..75: mol_type = other DNA
tttttactcgaacgagcaacggtgaacggcctgccggtggatcggcacggcggttcggtggcagcgtttggtcat

SEQ ID NO: 449105 - DNA, 75 bp, synthetic construct
  source 1..75: mol_type = other DNA
tggagcacgcgccccggcgtatcgacaaatcatcaacgcgatagataatatgacagacattgagcaggaaaaagt

SEQ ID NO: 449106 - DNA, 75 bp, synthetic construct
  source 1..75: mol_type = other DNA
cccgacactggcgggacaccccgcaagggaccgaagtttccttctggctggcaacggacaacgggccgttgcagg

SEQ ID NO: 449107 - DNA, 75 bp, synthetic construct
  source 1..75: mol_type = other DNA
aaaaacatgccgagcgttatcgtattccactgcgtctggggcgcgataacagtgagctggagtggcgcgagcacg

SEQ ID NO: 449108 - DNA, 75 bp, synthetic construct
  source 1..75: mol_type = other DNA
cagggctttatgattcggtgctggtgctggactacaaaagcctgtacccgtcgatcatccgcacctttctgattg

SEQ ID NO: 449109 - DNA, 75 bp, synthetic construct
  source 1..75: mol_type = other DNA
gggttatacccttcacagcggggtgaaccttcctgggttatttgctgcctttaagctcggtctgatgtctgaaga

SEQ ID NO: 449110 - DNA, 75 bp, synthetic construct
  source 1..75: mol_type = other DNA
tattcagggggtaaaatcatttgcacaaaaaaataattttgccattaccgtttttgcctcccaccgtaacgaaag

SEQ ID NO: 449111 - DNA, 75 bp, synthetic construct
  source 1..75: mol_type = other DNA
aaacggcgcaggatctcccggtgctgggtgcggatactatcgttatcctgaacggagaagtgctggagaaaccgc

SEQ ID NO: 449112 - DNA, 75 bp, synthetic construct
  source 1..75: mol_type = other DNA
ataacaaacccctcgggctatggaatgtcgtttccatcggcattggggcgatggtgggggcggggatctttgccc

SEQ ID NO: 449113 - DNA, 75 bp, synthetic construct
  source 1..75: mol_type = other DNA
gtaacaaacccctcggtctatggaacgtcgtttccatcggtattggggcaatggtgggggcggggatcttcgcgc

SEQ ID NO: 449114 - DNA, 75 bp, synthetic construct
  source 1..75: mol_type = other DNA
acacaagcagccatttctgaagtaatgagtgcaacttcggcaattaatggtctatatattgggcaaaatagttat

SEQ ID NO: 449115 - DNA, 75 bp, synthetic construct
  source 1..75: mol_type = other DNA
tgacatggtgaaaactatcgccccttcagccagaaaaccaaactttgcagggtgggccaacgacatccgcctgat

SEQ ID NO: 449116 - DNA, 75 bp, synthetic construct
  source 1..75: mol_type = other DNA
agcaacaggctggcgtgacagccggaaaatcaaaactcgacctgacaaacactgactggatttatggggtggatt

SEQ ID NO: 449117 - DNA, 75 bp, synthetic construct
  source 1..75: mol_type = other DNA
tcaagggactgaaagagaaagtcagtaagcagcgaaatgtctcctccattgataacccggttgagcaggtagaag

SEQ ID NO: 449118 - DNA, 75 bp, synthetic construct
  source 1..75: mol_type = other DNA
tttcccacgcagaaaagtacctgcagaaaatcatgatacatcttctgaacacttaccggaaaacacgattaaacc

SEQ ID NO: 449119 - DNA, 75 bp, synthetic construct
  source 1..75: mol_type = other DNA
aaggttgaaatcccatgaagacatcaatcctgtcactggcgctgagcttgctgaaggagaaccacaaacaaagat

SEQ ID NO: 449120 - DNA, 75 bp, synthetic construct
  source 1..75: mol_type = other DNA
tggtcgctacaaccggcgcacatttcactctctccggcacccagctccggcgcgttcttctcctgtatcggcatt

SEQ ID NO: 449121 - DNA, 75 bp, synthetic construct
  source 1..75: mol_type = other DNA
gcggaccgtatgcgtgaagagaacatgaccgacgaagagtggcagaaagagctacagcgtcgcgagcaggtcaaa

SEQ ID NO: 449122 - DNA, 75 bp, synthetic construct
  source 1..75: mol_type = other DNA
gacatggcgattgtttcgctgaataccccggaaaatctcgatgtgctttccggcgtgtttgccccggaactacaa

SEQ ID NO: 449123 - DNA, 75 bp, synthetic construct
  source 1..75: mol_type = other DNA
taatctcacctgggtgcgcggttcgctggaagatactcattcacttagcaagctggttgccggagccagcgcagt

SEQ ID NO: 449124 - DNA, 75 bp, synthetic construct
  source 1..75: mol_type = other DNA
atgaaaaagtgcctcacactactgattgccaccgtcctgagcggaatctctctcacggcttatgccgcgcaaccg

SEQ ID NO: 449125 - DNA, 75 bp, synthetic construct
  source 1..75: mol_type = other DNA
tggtaacttcttcagtaatgacctgatgaccgcctaccaacgccgccagatgaacaaacgagctgaagctgagcg

SEQ ID NO: 449126 - DNA, 75 bp, synthetic construct
  source 1..75: mol_type = other DNA
gctgaacgccggacctatggtgagaacctccgcagcgctactcattccgctggtcgctcacgtgccgctatcgtc

SEQ ID NO: 449127 - DNA, 75 bp, synthetic construct
  source 1..75: mol_type = other DNA
tacagaaagagcttggcgtcgccacattcaaagtggatcaggaggtcagaaagctggtggaggctggccgtaaat

SEQ ID NO: 449128 - DNA, 75 bp, synthetic construct
  source 1..75: mol_type = other DNA
atgcatcaacgattgttctttgattacgcgcttggagtcggcgctatcacaagtcattcgtcgagtgttagataa

SEQ ID NO: 449129 - DNA, 75 bp, synthetic construct
  source 1..75: mol_type = other DNA
ttggcatgatggcgaacgcggcggataaagtgaaagatccggcggtcattatgccacgggcgtttctggtggcga

SEQ ID NO: 449130 - DNA, 75 bp, synthetic construct
  source 1..75: mol_type = other DNA
gcgaatggttggtattcctctgccggtactcacctgccttgcggatatcagtaccgcgttgagtcgcctggcagg

SEQ ID NO: 449131 - DNA, 75 bp, synthetic construct
  source 1..75: mol_type = other DNA
gtgctggtgggctttcatgcgcaacatgatgcacctgatgccggaagaagtctgccgcatatcaataataaataa

SEQ ID NO: 449132 - DNA, 75 bp, synthetic construct
  source 1..75: mol_type = other DNA
atgcatcaacgattgttctttgattacgcgcttggagtcggcgctatcacaagtcactcgtcgagcgttagataa

SEQ ID NO: 449133 - DNA, 75 bp, synthetic construct
  source 1..75: mol_type = other DNA
ggcaaaagtcgatgccaacttcaaaaaggtcgataccattctggcgaaataccgtactaaagacggttttgaaaa

SEQ ID NO: 449134 - DNA, 75 bp, synthetic construct
  source 1..75: mol_type = other DNA
ttatgccttatccggttgtttgttggattgatatttaccatgtcaatgagatggtggttatgctgccagtgatcc

SEQ ID NO: 449135 - DNA, 75 bp, synthetic construct
  source 1..75: mol_type = other DNA
ttatcgcccacttgaaacatgctggacgccgtgcgtcgatggttatcaccgcattttttatcgtctggaagggga

SEQ ID NO: 449136 - DNA, 75 bp, synthetic construct
  source 1..75: mol_type = other DNA
acattacttttcggagcagggggccggacaatcgcgatatcgcttaatgcgtcggcaggctaataatgagcagcg

SEQ ID NO: 449137 - DNA, 75 bp, synthetic construct
  source 1..75: mol_type = other DNA
acccaaatcaggtaaagacgtttacccgaatcaggtaaacacaaaagacaaactaacaaaagacaatataaaacc

SEQ ID NO: 449138 - DNA, 75 bp, synthetic construct
  source 1..75: mol_type = other DNA
ctgatccaaaattcaccggtttccaccgtctggaaaaagcattgtttggcgacaacaccaccaaaggaatggatc

SEQ ID NO: 449139 - DNA, 75 bp, synthetic construct
  source 1..75: mol_type = other DNA
tatcactgaagagtgcaatcgacttgatttaagtcctgagcaattattgaagctgaatatattcttgatctctca

SEQ ID NO: 449140 - DNA, 75 bp, synthetic construct
  source 1..75: mol_type = other DNA
aatgccgaaggcaaaccactattgctggaaattaacatgcggccatcaggtggtatcggttatacgcagcacagt

SEQ ID NO: 449141 - DNA, 75 bp, synthetic construct
  source 1..75: mol_type = other DNA
atggcgaaagccggtctgcgcgaacagaaccgactttcaggtgcaaatcgtaacacactcattgcgggaggaatt

SEQ ID NO: 449142 - DNA, 75 bp, synthetic construct
  source 1..75: mol_type = other DNA
ccggtctgcgcgaacagaaccgactttcaggtgcaacactcattgcgggaggaattatggcaaacactgctgaga

SEQ ID NO: 449143 - DNA, 75 bp, synthetic construct
  source 1..75: mol_type = other DNA
ctccgcgacaagtggacccagctcgaaatcaaccgaaacaagcaacaggctggcgtgacagccggcaaaccaaaa

SEQ ID NO: 449144 - DNA, 75 bp, synthetic construct
  source 1..75: mol_type = other DNA
ttaagcccagagcaactactgaagctgaatgtattcatgacgcatcagcaggaactaaacccatatgaaaatgta

SEQ ID NO: 449145 - DNA, 75 bp, synthetic construct
  source 1..75: mol_type = other DNA
cgacaaattgaccgatgccgaccggaatgcactgaaaggaccgattactgcgctggcggaagatctggcgcaact

SEQ ID NO: 449146 - DNA, 75 bp, synthetic construct
  source 1..75: mol_type = other DNA
ggcgaaagttgacgccaacttcaaaaaagtcgataccattctggcgaaatatcgaactaaagacggttttgaaac

SEQ ID NO: 449147 - DNA, 75 bp, synthetic construct
  source 1..75: mol_type = other DNA
ccgtctggaaaaagccttgtttggcgacaacaccaccaaaggaatggataagtacgccgaccagctttataccga

SEQ ID NO: 449148 - DNA, 75 bp, synthetic construct
  source 1..75: mol_type = other DNA
ggccaacgttgaaggctcgcagaaaattgtcgatctgctgcgtccacaattgaaaaaagctaacccggaactgtt

SEQ ID NO: 449149 - DNA, 75 bp, synthetic construct
  source 1..75: mol_type = other DNA
accgtactaaagacggttttgaaacctacgacaaattgaccgatgccgatcgtaatgcgctgaaagggccgatta

SEQ ID NO: 449150 - DNA, 75 bp, synthetic construct
  source 1..75: mol_type = other DNA
aaaaataattgaagcagaaagtctaaaggcggaaattaaacaacagcagcggaaaataaatatattacagtctag

SEQ ID NO: 449151 - DNA, 75 bp, synthetic construct
  source 1..75: mol_type = other DNA
gtgaaaacttacccttgaattggctatttattgattgcctacccgcaccagaaattcttgagcatgcgggggata

SEQ ID NO: 449152 - DNA, 75 bp, synthetic construct
  source 1..75: mol_type = other DNA
gtatgatgccctgggtgcgggggcggagatggttctgtcgctgagcggtatgggggccattgagaatgccgggga

SEQ ID NO: 449153 - DNA, 75 bp, synthetic construct
  source 1..75: mol_type = other DNA
aaaccatgtcgtttcgtgaaatgctgttacgccagcgggttaacgagggcgcacgcgcctgcatgttaagccacg

SEQ ID NO: 449154 - DNA, 75 bp, synthetic construct
  source 1..75: mol_type = other DNA
gcgtaccgcgctgaacgtggtgggtaacgctctggcggtgctggtgattgccaagtgggagcacaaatttgaccg

SEQ ID NO: 449155 - DNA, 75 bp, synthetic construct
  source 1..75: mol_type = other DNA
gcagttcccacggcattatgggcacgattttgtcgctggtgccgacgaatattgtggcgtcgatggcgaaaggcg

SEQ ID NO: 449156 - DNA, 75 bp, synthetic construct
  source 1..75: mol_type = other DNA
atggaaagcccaattcctcagcctgtttctgattcggcgaccttcatggaaggatgcaaagacagtttaccgatt

SEQ ID NO: 449157 - DNA, 75 bp, synthetic construct
  source 1..75: mol_type = other DNA
gcgcatccgttattacaacatggtcgtatgatgccctgggagcgggggcggagatggttctgtcgctgagcggta

SEQ ID NO: 449158 - DNA, 75 bp, synthetic construct
  source 1..75: mol_type = other DNA
accgagctactgactgcgaatctggcgaacgtcgatacgccaaatttcaaggctaaagatattgattttgccagg

SEQ ID NO: 449159 - DNA, 75 bp, synthetic construct
  source 1..75: mol_type = other DNA
accgcaaaactggtacgcaataatcgccgctggagcgaaaactggatgatcggcattgccttcagttcatggtca

SEQ ID NO: 449160 - DNA, 75 bp, synthetic construct
  source 1..75: mol_type = other DNA
tttccaacgcaaacaatccctttgcgttaccgcagcgttaattggcgccctcgcaggcgtaacgttgttttcaat

SEQ ID NO: 449161 - DNA, 75 bp, synthetic construct
  source 1..75: mol_type = other DNA
aggatgcaaagacagtttaccgattgttattagttatattccggtggcctttgcgttcggtctgaatgcgacccg

SEQ ID NO: 449162 - DNA, 75 bp, synthetic construct
  source 1..75: mol_type = other DNA
tgacggtttccattctgtccactgaaggcgacggcacagcaacggaggcgttgcttaataccgttcgcgccgttc

SEQ ID NO: 449163 - DNA, 75 bp, synthetic construct
  source 1..75: mol_type = other DNA
tcatctggtccagccggttttagatgcccaggcgcggcgcgaaatcagccgctcagcagctgaatcaacgttgat

SEQ ID NO: 449164 - DNA, 75 bp, synthetic construct
  source 1..75: mol_type = other DNA
gttttgattcgtttgtttttggtaaagagcaaatagaatcaagaaaaggcctggttattctagacctgactaaat

SEQ ID NO: 449165 - DNA, 75 bp, synthetic construct
  source 1..75: mol_type = other DNA
ataaataactttagaaaacatcttcaggtcatgattgattgtatggggaatgattatgagcgccattttaaaaac

SEQ ID NO: 449166 - DNA, 75 bp, synthetic construct
  source 1..75: mol_type = other DNA
cctcgataaactggttgctcgtatgccgccggtggtcagcgaagccaccgcctatgcagccgtgtttaagttcga

SEQ ID NO: 449167 - DNA, 75 bp, synthetic construct
  source 1..75: mol_type = other DNA
ggttcaggttcaccctataaaaatcgccatacccgaggattattttatgggcttagtgatacgttaaatatcgat

SEQ ID NO: 449168 - DNA, 75 bp, synthetic construct
  source 1..75: mol_type = other DNA
atcgacgccctctggcaggaggtccgccaggcgatagcgcaactgaacgccgcttcgccgctgccagtcaggcgg

SEQ ID NO: 449169 - DNA, 75 bp, synthetic construct
  source 1..75: mol_type = other DNA
tttcttgaggcacttaaagccagcggtaagcagcgaattttgctcaccaacgcacatccgcacaacctggcggta

SEQ ID NO: 449170 - DNA, 75 bp, synthetic construct
  source 1..75: mol_type = other DNA
ccgaagctacgggtctgaaagctgaaagaacgctgtttattgatgacagcgaagcgattctcgatgctgccgcgc

SEQ ID NO: 449171 - DNA, 75 bp, synthetic construct
  source 1..75: mol_type = other DNA
cacctcgcttagactgcgggcgcagcgggcgtacgacggcctgagtgttgctggcccgtcaggtgcatacgagta

SEQ ID NO: 449172 - DNA, 75 bp, synthetic construct
  source 1..75: mol_type = other DNA
ggatacccgcccggtggccgaccgccttactgtacagagcgccagaatcgtgacatggcggctgaatgcaaaact

SEQ ID NO: 449173 - DNA, 75 bp, synthetic construct
  source 1..75: mol_type = other DNA
catcctgtccactgactgtccactgaaggcgacggcacagcaacggaggcgttgcttaataccgttcgcgccgtt

SEQ ID NO: 449174 - DNA, 75 bp, synthetic construct
  source 1..75: mol_type = other DNA
gtgtgcaacgcgtggagataatcgaacccacacagaatatggccatcagcgacatacaggcggcgcgctgtgagt

SEQ ID NO: 449175 - DNA, 75 bp, synthetic construct
  source 1..75: mol_type = other DNA
caagttgaagcggtaatggatgcagcgttacgtccgaaacgcagcctgtggcgtaaaatggtgatgggcggcttg

SEQ ID NO: 449176 - DNA, 75 bp, synthetic construct
  source 1..75: mol_type = other DNA
cagcgtattggcatgcccgattcaaccgggaaaaagacgataaaagaggccaggattggcagtatcgtaccggcg

SEQ ID NO: 449177 - DNA, 75 bp, synthetic construct
  source 1..75: mol_type = other DNA
ataacgatatgattgcccatagccagccactaatggaagcgcttggaaaagcaattgaggctggcgatcaggagg

SEQ ID NO: 449178 - DNA, 75 bp, synthetic construct
  source 1..75: mol_type = other DNA
tagcggcggatgcgatcaagaatggccgtgatgctcaggctgaggtggatgaattttatgctgcgaatggtttac

SEQ ID NO: 449179 - DNA, 75 bp, synthetic construct
  source 1..75: mol_type = other DNA
ttgatttcgacggtccgctggaagtcgatcagaaccctaaatttaaggcgcagcagacctttgatgaaaatcagg

SEQ ID NO: 449180 - DNA, 75 bp, synthetic construct
  source 1..75: mol_type = other DNA
gattcaaccggggaaaaaacgataaaagaggccaggattggcagtatcgtaccggcgcagcaggaagggtacgta

SEQ ID NO: 449181 - DNA, 75 bp, synthetic construct
  source 1..75: mol_type = other DNA
cggcctctcgtctgttcggaaaattatcggatgccaaccccattaaaataatatcaacggaaggctatgctgcga

SEQ ID NO: 449182 - DNA, 75 bp, synthetic construct
  source 1..75: mol_type = other DNA
cagcaaaaaattcaacaagtgattaccagttgggcgggtgatgatccggataagcaggcattcgccagagaagtg

SEQ ID NO: 449183 - DNA, 75 bp, synthetic construct
  source 1..75: mol_type = other DNA
tacggcccgccggtaccgtttcggcaactggcgcatcaaacctaagcgatctggaggataaactggcagaaaaag

SEQ ID NO: 449184 - DNA, 75 bp, synthetic construct
  source 1..75: mol_type = other DNA
tctcacggcttatgccgcgcaaccgatgagtaacctggacagcggtcagctacggcccgccggtaccgtttcggc

SEQ ID NO: 449185 - DNA, 75 bp, synthetic construct
  source 1..75: mol_type = other DNA
gcctgtgatggcggcgctgggaaaagcgattgatgcgggtgaccatgatgcggcttctcatctgttcggtaaatt

SEQ ID NO: 449186 - DNA, 75 bp, synthetic construct
  source 1..75: mol_type = other DNA
ggagcagcagcgactccagttgcagaaatacaaccagcgacggcttgagtataacgatatgctggcgcgcgatca

SEQ ID NO: 449187 - DNA, 75 bp, synthetic construct
  source 1..75: mol_type = other DNA
ctctacagcacataaacccgttacggaatacggcagtgcacatcctgatgatcaaaccgtgctggcggtgcctgt

SEQ ID NO: 449188 - DNA, 75 bp, synthetic construct
  source 1..75: mol_type = other DNA
gcgctgtttggtgtgagcgttgttggtcagggtgtgcagtggacgatgaatgcctggcaaactcaggactgggtg

SEQ ID NO: 449189 - DNA, 75 bp, synthetic construct
  source 1..75: mol_type = other DNA
atgaccgaaccgttaaaaccacgtattgatttcgacggtccactggaggtcgatcagaatccaaaattcagggcg

SEQ ID NO: 449190 - DNA, 75 bp, synthetic construct
  source 1..75: mol_type = other DNA
ttgatttcgacggtccactggaggttgatcagaattcaaaattcagggcgcaacagacctttgacgaaaatcagg

SEQ ID NO: 449191 - DNA, 75 bp, synthetic construct
  source 1..75: mol_type = other DNA
gtgtttatacccgatcagaaacgacaaattgtggcgcagttccgtcagaactccttgctgcgactggcccctggc

SEQ ID NO: 449192 - DNA, 75 bp, synthetic construct
  source 1..75: mol_type = other DNA
ctattgccaacaagccatatgacggcccaagcgagatagctgatcgtgacggtctgtcagccaggataagtccaa

SEQ ID NO: 449193 - DNA, 75 bp, synthetic construct
  source 1..75: mol_type = other DNA
gctatccggcgcgggctaatgaccagtacagcgataaacaatatcagggttgttgacgtaggcgaaaattatgcg

SEQ ID NO: 449194 - DNA, 75 bp, synthetic construct
  source 1..75: mol_type = other DNA
ggggatttccgtcgtcagcttatcggtcaggtgaaagagacgctgcaaaaaggcaaaacgcccagcgaaaaataa

SEQ ID NO: 449195 - DNA, 75 bp, synthetic construct
  source 1..75: mol_type = other DNA
tggtggcggacgatcgccagtatctgaacttttccagtaacgattacttaggcttaagccatcatccgcacatca

SEQ ID NO: 449196 - DNA, 75 bp, synthetic construct
  source 1..75: mol_type = other DNA
aaaccccgtctgggtgatttccgtcgtcagcttatcggtcaggtaaaagagacgctgcaaaagggcaaaacgccc

SEQ ID NO: 449197 - DNA, 75 bp, synthetic construct
  source 1..75: mol_type = other DNA
gcaatctgcggttgattaatcgtatcgccacgctctatggcattgaactgggttattacagccgtttgcgcctgt

SEQ ID NO: 449198 - DNA, 75 bp, synthetic construct
  source 1..75: mol_type = other DNA
atggttgtttttattaatttcatttattcttttgtgcttattattttcaggaggctgctacctttcctcagaaat

SEQ ID NO: 449199 - DNA, 75 bp, synthetic construct
  source 1..75: mol_type = other DNA
cgcgatgatggcgaaagaggatcgtatcgttgccgaccgactgagtcacgcttcattgctggaggcagccagctt

SEQ ID NO: 449200 - DNA, 75 bp, synthetic construct
  source 1..75: mol_type = other DNA
cagcgccatccagccattgatcgtcggtgataacagccgtgcgttacaactggcagaaaaactgcgccagcaagg

SEQ ID NO: 449201 - DNA, 75 bp, synthetic construct
  source 1..75: mol_type = other DNA
tagtgatgtggatgccggaaacattgacggcagcatccatcgctgggcaaaaaaagaagttatcgacaacgaccg

SEQ ID NO: 449202 - DNA, 75 bp, synthetic construct
  source 1..75: mol_type = other DNA
aacgtatcactaccattttattcgattttatgaggggtaaattaagattgtctaaaaaagataaatctaaagttg

SEQ ID NO: 449203 - DNA, 75 bp, synthetic construct
  source 1..75: mol_type = other DNA
aggcattgaagagcgttacggcattaaacaagcgattgttgtcgataccgaagatgatgccactgaccataccat

SEQ ID NO: 449204 - DNA, 75 bp, synthetic construct
  source 1..75: mol_type = other DNA
agcaacggaaacaaaccgcccggcaatgcagcgtgttcatcgtgctaaatggaatgataccgagtctcaggaaca

SEQ ID NO: 449205 - DNA, 75 bp, synthetic construct
  source 1..75: mol_type = other DNA
ttctgattctggtacaaatactattctgaaaacatccacctctcaaaacccaaacagggcatccagaaacgcccc

SEQ ID NO: 449206 - DNA, 75 bp, synthetic construct
  source 1..75: mol_type = other DNA
aatgaagaacaaagacctttactggtagcaccagctcctgatactcgtttgcgtggagtcaaatcttaccgtgat

SEQ ID NO: 449207 - DNA, 75 bp, synthetic construct
  source 1..75: mol_type = other DNA
ggaataacaaagagtctcaggaacagcgagctgctgaacaagctcaacgcgatcatcaaattgaggaagcaaaga

SEQ ID NO: 449208 - DNA, 75 bp, synthetic construct
  source 1..75: mol_type = other DNA
tatccccgtagaactcagtaatgatgacaagaaaaaattggttgctgaatactgccagaagaactttgttgataa

SEQ ID NO: 449209 - DNA, 75 bp, synthetic construct
  source 1..75: mol_type = other DNA
ctcagcactctggaatgaagttgaaagagtggaacgccagaacaacggtcaaacagcccgttattttgatgtcgc

SEQ ID NO: 449210 - DNA, 75 bp, synthetic construct
  source 1..75: mol_type = other DNA
cggaagtaaatagaagcttagatctcacaccttcaatgccaccagaacacatgaggcaaggaagcgcgccaaaac

SEQ ID NO: 449211 - DNA, 75 bp, synthetic construct
  source 1..75: mol_type = other DNA
ccgaatgtggtggcgctggcgggcggcaaagacaaagttgccgccatcaaaggtgccatgcagggtgggtatatc

SEQ ID NO: 449212 - DNA, 75 bp, synthetic construct
  source 1..75: mol_type = other DNA
ttaccgtgatcccagtaaggtcagtaaagtaaatgtttcagggaagaaatcccctgttctggttgcgcctgaacc

SEQ ID NO: 449213 - DNA, 75 bp, synthetic construct
  source 1..75: mol_type = other DNA
tgatagtaggatatataagagagaaatttatatgggccagaatgaaacccgataccactgatgctgaccatgata

SEQ ID NO: 449214 - DNA, 75 bp, synthetic construct
  source 1..75: mol_type = other DNA
cagcgatttagacctctatctcggtgttcaggcgatcaactggacagagatgtttaatcctggcgcgaccttcgc

SEQ ID NO: 449215 - DNA, 75 bp, synthetic construct
  source 1..75: mol_type = other DNA
tccggtgatggttttcatccccgagcaaaaacggcaaattgtcgcccaatttcggcaaaactcgctgttacgtct

SEQ ID NO: 449216 - DNA, 75 bp, synthetic construct
  source 1..75: mol_type = other DNA
atccagaagcgcccctgaacgtgttaagagaaaacaggctattccacgtcaggataatatttttaaacgcttcac

SEQ ID NO: 449217 - DNA, 75 bp, synthetic construct
  source 1..75: mol_type = other DNA
atgttgttgtatcgaagtctatatcaaagttcacaattacacaggatgttaaggataaaaatactgatgtcataa

SEQ ID NO: 449218 - DNA, 75 bp, synthetic construct
  source 1..75: mol_type = other DNA
gcaatctgggggggtttgtagcgccgaatcttcgcgtctgggcggaacatacttttaattccgcacaggcaggac

SEQ ID NO: 449219 - DNA, 75 bp, synthetic construct
  source 1..75: mol_type = other DNA
tattgtcgcgctgtgcgttgccgctgcaggacatctggcgatgcagccactgtactggacatttccatcgtctta

SEQ ID NO: 449220 - DNA, 75 bp, synthetic construct
  source 1..75: mol_type = other DNA
ccacgctcggagtttgaaagacgcgccatatttaacaatggtgactataaattaaaacctgatgaaatcaagcgt

SEQ ID NO: 449221 - DNA, 75 bp, synthetic construct
  source 1..75: mol_type = other DNA
gacttctgttgcgaaagctgcctaccatgcccgtacacgtattacggatgatcgcattggagaaacatttgattt

SEQ ID NO: 449222 - DNA, 75 bp, synthetic construct
  source 1..75: mol_type = other DNA
ccacgctcagagtttgaaaaacgtaccaaatttaacgatagtaactataaattaacacctaatgagatcaagcgt

SEQ ID NO: 449223 - DNA, 75 bp, synthetic construct
  source 1..75: mol_type = other DNA
gctaaagcaaacaaatcccaaaatgatcttatcagtgaagaacatgataaacgtattgctgaaaactatgtcttt

SEQ ID NO: 449224 - DNA, 75 bp, synthetic construct
  source 1..75: mol_type = other DNA
ttccggatcgtcatctcaaccctatacctcctgtaaatgattttgaatgcacaccaacaagcccggaagatagga

SEQ ID NO: 449225 - DNA, 75 bp, synthetic construct
  source 1..75: mol_type = other DNA
agaagctttacgattacacatcttgctgaacccgaagagatcattatccctgactacccagcaacagtagaaccg

SEQ ID NO: 449226 - DNA, 75 bp, synthetic construct
  source 1..75: mol_type = other DNA
ggcggaccccggtctgttaggtgttaatgcaggtgctacgctggcgattgtgctgtcgattgtctttttaaatgt

SEQ ID NO: 449227 - DNA, 75 bp, synthetic construct
  source 1..75: mol_type = other DNA
atgggcaaaaccgaccgcagcgccaacccttcgccgggcaacaaaaatggcggcctcgctaacgtggtaaagaaa

SEQ ID NO: 449228 - DNA, 75 bp, synthetic construct
  source 1..75: mol_type = other DNA
atgggcaaaaccgaccgcagcgccaacccttcgccgggcaacaaaaaaggcggcctcgcgaacgtggtaaagaaa

SEQ ID NO: 449229 - DNA, 75 bp, synthetic construct
  source 1..75: mol_type = other DNA
ggcacgcaacaggtggcttcgggtatcaccgtgcaagtgtttacgaccggtcgtggtacgccgtacggcctgatg

SEQ ID NO: 449230 - DNA, 75 bp, synthetic construct
  source 1..75: mol_type = other DNA
gaagaagaaaaccatctcggatcaatggggattgcataaccagctggcagtgtttaacccggcaccggtggcctg

SEQ ID NO: 449231 - DNA, 75 bp, synthetic construct
  source 1..75: mol_type = other DNA
atgggcaaaaccgaccgcagcgccaacccttcgccgggcaacaaaaagggcggcctcgcaaacgtggtaaagaaa

SEQ ID NO: 449232 - DNA, 75 bp, synthetic construct
  source 1..75: mol_type = other DNA
atgggcaaaaccgaccgcagcgccaacccttcgccgggcaacaaaaacggcggactcgccaacgtggtaaagaaa

SEQ ID NO: 449233 - DNA, 75 bp, synthetic construct
  source 1..75: mol_type = other DNA
agacgctgtagagcttcaaatgagccataaggaaagcaacagcgtccgtgctgcttatacccacaaggcaaaaca

SEQ ID NO: 449234 - DNA, 75 bp, synthetic construct
  source 1..75: mol_type = other DNA
gctcagggtattgaccctaatgcaaagaaacaggcagaggctaaagagcttaaagccaaacgtgataatacacgc

SEQ ID NO: 449235 - DNA, 75 bp, synthetic construct
  source 1..75: mol_type = other DNA
gttcgaaatactggcaaatggcctaccgtttcgaagggaagcaaaaacttttctctatcggtgtttaccctgctg

SEQ ID NO: 449236 - DNA, 75 bp, synthetic construct
  source 1..75: mol_type = other DNA
acgctgctgaaccgctccgctcgcggcgtggcgctgactgaaagtggccaacgttgttacgaacatgcgctggaa

SEQ ID NO: 449237 - DNA, 75 bp, synthetic construct
  source 1..75: mol_type = other DNA
ttatgcgtcataatccggcctatgatatggaaggcgctgtccagaaaccagagacggaacaccgccctgcactgg

SEQ ID NO: 449238 - DNA, 75 bp, synthetic construct
  source 1..75: mol_type = other DNA
caatggtgggctgactaccttgatgcaagcagaaacggtatggtaaggccgtttgagtttgcttcaaataaataa

SEQ ID NO: 449239 - DNA, 75 bp, synthetic construct
  source 1..75: mol_type = other DNA
tggctttatctacagcctgtggtcccagggcagccgtgcgttgatatggattattggtgcaatcttactcagcct

SEQ ID NO: 449240 - DNA, 75 bp, synthetic construct
  source 1..75: mol_type = other DNA
aaagaatataaaaaaaaggtggatagcaatgctaatatatatgatattttggacagttggggggcttgggctgca

SEQ ID NO: 449241 - DNA, 75 bp, synthetic construct
  source 1..75: mol_type = other DNA
tttcccggcgctgatgctggttgaacccaaaagccgcatctttcgcgcgctctcgtatggcttcatgactcagga

SEQ ID NO: 449242 - DNA, 75 bp, synthetic construct
  source 1..75: mol_type = other DNA
gtacggtgccgctgcagctgcaggctgaccaggcgcgtcaggtgaccgccattcggcaactggccagtcagtacg

SEQ ID NO: 449243 - DNA, 75 bp, synthetic construct
  source 1..75: mol_type = other DNA
accgctggggtgcatgggctgcagcagataacagtggtgtgaactggcagcctgttgctgcagggtttaaaggtt

SEQ ID NO: 449244 - DNA, 75 bp, synthetic construct
  source 1..75: mol_type = other DNA
gactatgagttaattatcgctcattttgttatgggagtttcattgcgttgtttagctaagataaacgaatgttca

SEQ ID NO: 449245 - DNA, 75 bp, synthetic construct
  source 1..75: mol_type = other DNA
tgtagtacctcatggtaagaaattacgccgtcagtgtggcaacgatgaaggtcgtatgattgatacctgcatgtt

SEQ ID NO: 449246 - DNA, 75 bp, synthetic construct
  source 1..75: mol_type = other DNA
cactaagatcattttactcagagataattgaggattttaagggtgaaattttaaaaagtaactgtcatatagacg

SEQ ID NO: 449247 - DNA, 75 bp, synthetic construct
  source 1..75: mol_type = other DNA
tgaaatcaggtaaacttagatggaaagtccggtttgataactcacagaaagcagacataacaattgttatacgaa

SEQ ID NO: 449248 - DNA, 75 bp, synthetic construct
  source 1..75: mol_type = other DNA
atcatggacaacatgggcagcgaacgcgaactgccgaagctaatgaataaatccctgtggcggcagagtacctag

SEQ ID NO: 449249 - DNA, 75 bp, synthetic construct
  source 1..75: mol_type = other DNA
gcagttcccacggcattatgggcacgattttgtcgctggtgccgacgaacatcgtggcgtcgatggcgaaaggcg

SEQ ID NO: 449250 - DNA, 75 bp, synthetic construct
  source 1..75: mol_type = other DNA
agatgaaaccgtcagatgctgtcagcacctttggcagtacactgaaagaacttgccctgcccgtctattccatcg

SEQ ID NO: 449251 - DNA, 75 bp, synthetic construct
  source 1..75: mol_type = other DNA
aagagcatatactttgattggttataagccagaacatgattacagctatctcaaaataaatgaagcactaagatc

SEQ ID NO: 449252 - DNA, 75 bp, synthetic construct
  source 1..75: mol_type = other DNA
tgtggagttgcaaaacctctgataccccatggactttcagctctctgctgaaaaaagctgtttgcgcggttttgt

SEQ ID NO: 449253 - DNA, 75 bp, synthetic construct
  source 1..75: mol_type = other DNA
aataacactcgctttggcctctcttgtgggctggtttcccccgagcgggaaaaattcgaacaactgttgctggag

SEQ ID NO: 449254 - DNA, 75 bp, synthetic construct
  source 1..75: mol_type = other DNA
tacgtaaacgatcatctgctcaagcgggtaaccgtgaacatactgagtttgaaggtgatagcttatctggcagta

SEQ ID NO: 449255 - DNA, 75 bp, synthetic construct
  source 1..75: mol_type = other DNA
gtggtggtctgctgaaaggcaccggaacgacccgcagtttttactgccgccagtttggtgtggagtacccactgg

SEQ ID NO: 449256 - DNA, 75 bp, synthetic construct
  source 1..75: mol_type = other DNA
accgctgctggaagaccaagacccagtacgatgaagcgaagtatttgctggcactggaagcgcgaaagtcgccct

SEQ ID NO: 449257 - DNA, 75 bp, synthetic construct
  source 1..75: mol_type = other DNA
agcttgctattgtgtgaactgattatgcgatggcccagtctgcaacaactaaaacgagccaggcgagacacgatc

SEQ ID NO: 449258 - DNA, 75 bp, synthetic construct
  source 1..75: mol_type = other DNA
catcgttctcacgagctggccgcatggcttctcacatggcgagtagtctggctgacggtatggctgcacgcaatg

SEQ ID NO: 449259 - DNA, 75 bp, synthetic construct
  source 1..75: mol_type = other DNA
gccggatacagacactggatcggcagagtcacagacgccacaaggcagtgatgaatatgaacagttcaaaaacaa

SEQ ID NO: 449260 - DNA, 75 bp, synthetic construct
  source 1..75: mol_type = other DNA
ctatggattatcagactatgaagcgaagtgctaattctacccgggtacaacagaccgttggcggggagctggcga

SEQ ID NO: 449261 - DNA, 75 bp, synthetic construct
  source 1..75: mol_type = other DNA
atatgtaaacaaacagctactcgtcgggataaccgagagcatgatgattttgcaggagatagcttatccggcaat

SEQ ID NO: 449262 - DNA, 75 bp, synthetic construct
  source 1..75: mol_type = other DNA
gtggatttggggcgggtatgattaccggcgctgccgctactgccatcagcggtgctggagcaatggcaatggggg

SEQ ID NO: 449263 - DNA, 75 bp, synthetic construct
  source 1..75: mol_type = other DNA
ttattctatgcgtattagcacttgtcggtgtgaatatgcttcttctgctgattaccggttggattttaagttacg

SEQ ID NO: 449264 - DNA, 75 bp, synthetic construct
  source 1..75: mol_type = other DNA
tggtggcgaacatatggacagtaaaatggaagctgaatggccggagtctgaccacgcagaggagaacgaacagac

SEQ ID NO: 449265 - DNA, 75 bp, synthetic construct
  source 1..75: mol_type = other DNA
aaaatagttatgtatactcttgatggtatagagttagaactatccacgaataaagtaaggcccgtagtcgcagca

SEQ ID NO: 449266 - DNA, 75 bp, synthetic construct
  source 1..75: mol_type = other DNA
attattcaatatatgaaaattacggggtatggtggctatgtatcagcgatagaccatgcgaatttcgtgtcagat

SEQ ID NO: 449267 - DNA, 75 bp, synthetic construct
  source 1..75: mol_type = other DNA
tttaaggataatgttagtgaatttgattttggtaattatagagttgtttcttcccaagacatgtttatatacaaa

SEQ ID NO: 449268 - DNA, 75 bp, synthetic construct
  source 1..75: mol_type = other DNA
tgctgcgcttgcgtgatgcccgttttatgcgccgtattcgtaacggcacggtgccaaatgtccccaatgtggaag

SEQ ID NO: 449269 - DNA, 75 bp, synthetic construct
  source 1..75: mol_type = other DNA
atgattcttgagcgcgttgaaattgtgggttttcgcggcattaaccgattgtcattgatgctggaacaaaacaat

SEQ ID NO: 449270 - DNA, 75 bp, synthetic construct
  source 1..75: mol_type = other DNA
atattatcagcagcatgggaataataaattattacagtccagggagcttgagagaatacggttaactgattttaa

SEQ ID NO: 449271 - DNA, 75 bp, synthetic construct
  source 1..75: mol_type = other DNA
aagaacaaaaaaattgtaaggtggttcttttacttaataacgggacaagtggtatggatgactactccacttata

SEQ ID NO: 449272 - DNA, 75 bp, synthetic construct
  source 1..75: mol_type = other DNA
tgaaaaagaggatggaaaagaaaaaaaatggcttaatactttgcttatatatgattataaaaaaacaaacgaact

SEQ ID NO: 449273 - DNA, 75 bp, synthetic construct
  source 1..75: mol_type = other DNA
aaacacttccacagccccgcctgtatctggtggaggagcgcgctgaagaacagacagaagccgcgcctttacctg

SEQ ID NO: 449274 - DNA, 75 bp, synthetic construct
  source 1..75: mol_type = other DNA
attttagataaattatataataaattattcggtatcgaagagattgtcagagattccagtaagcaaagcaaaatt

SEQ ID NO: 449275 - DNA, 75 bp, synthetic construct
  source 1..75: mol_type = other DNA
ttaaattcggaaattttagtaatggttctgatagaatgaatcgtatagggaaaaaggcaagggatgccttgataa

SEQ ID NO: 449276 - DNA, 75 bp, synthetic construct
  source 1..75: mol_type = other DNA
ggatgaaatatgtgactccaagtgatttagataatgttgtcggactatatagggatttcggagagaatgctaagg

SEQ ID NO: 449277 - DNA, 75 bp, synthetic construct
  source 1..75: mol_type = other DNA
gtaatgtgttacgcaggaataatattgctggggttcggtggttcaaaatggacttctgatataactataaattat

SEQ ID NO: 449278 - DNA, 75 bp, synthetic construct
  source 1..75: mol_type = other DNA
gctgacaaaatgcctgcgtgcgcaaggcgtcgaggaagtggtcatcggtatggcacatcgaggaagactcaatgt

SEQ ID NO: 449279 - DNA, 75 bp, synthetic construct
  source 1..75: mol_type = other DNA
cgctgcttagcggagataacgcgacctggcttgaagataactaccagacctggttgcgtacgccagaccaactcc

SEQ ID NO: 449280 - DNA, 75 bp, synthetic construct
  source 1..75: mol_type = other DNA
atacgctggacgacgatcgcgccaatggctgtatccgctcgctggaacacgcctacagcaaagacggtggcctgg

SEQ ID NO: 449281 - DNA, 75 bp, synthetic construct
  source 1..75: mol_type = other DNA
aaattactgactaccagaaccaaagatatccgggtggcaacctggtatatctgggcccgtctgcggcaggatggt

SEQ ID NO: 449282 - DNA, 75 bp, synthetic construct
  source 1..75: mol_type = other DNA
acgctggtgacactagatccggtacgggcagcgcgcaacataaggactgatggcaatgggaacaggctactttct

SEQ ID NO: 449283 - DNA, 75 bp, synthetic construct
  source 1..75: mol_type = other DNA
aaagccgctgtgccgacagacgacgccacaaatgacgtactggcgctggagccggaagcactggagatggcagac

SEQ ID NO: 449284 - DNA, 75 bp, synthetic construct
  source 1..75: mol_type = other DNA
cgcagttatgcaaagttgcgccgagcacccaaaaataccatatggaagatgttcaccgtgctggtggtgttatcg

SEQ ID NO: 449285 - DNA, 75 bp, synthetic construct
  source 1..75: mol_type = other DNA
gtttctgactcccagagcgatcaggttgaacgttccgcctgcccaacctgcggttcctgctccgggatgtttacc

SEQ ID NO: 449286 - DNA, 75 bp, synthetic construct
  source 1..75: mol_type = other DNA
aaaaaaatttaaagcttgcataaataacataccccctgaagaaactcatccaaccagaaacaatcccgcccccaa

SEQ ID NO: 449287 - DNA, 75 bp, synthetic construct
  source 1..75: mol_type = other DNA
caacggctcgctactggcaacccacgccgaccgtaagcagctgttcctcaacgctggtaaatgcattgttgagct

SEQ ID NO: 449288 - DNA, 75 bp, synthetic construct
  source 1..75: mol_type = other DNA
atgcctaagtaccgttccgccaccaccacccatggtcgtaatatggcgggggctcgtgcgctgtggcgcgccacc

SEQ ID NO: 449289 - DNA, 75 bp, synthetic construct
  source 1..75: mol_type = other DNA
gatgaaagcgcactgccgcgtaatattgccagcaaagcggcatttgaaaacgccatgacgctggatatcgcgatg

SEQ ID NO: 449290 - DNA, 75 bp, synthetic construct
  source 1..75: mol_type = other DNA
gaagtccgcaaaaactgaaagtgacagagtgcgtctgcagcctgatatggaacatcttcttgccgggctcatcgc

SEQ ID NO: 449291 - DNA, 75 bp, synthetic construct
  source 1..75: mol_type = other DNA
caggcattgctgaaagaaaccagggcgcgaatgcatggtcgtactcgcgtccagcaagccgcacgcgatgccgtt

SEQ ID NO: 449292 - DNA, 75 bp, synthetic construct
  source 1..75: mol_type = other DNA
tcgaagaaaatattcgtttaaccaaagaggctgttgatttcttccatccgctgggtattccggtagaggcggaat

SEQ ID NO: 449293 - DNA, 75 bp, synthetic construct
  source 1..75: mol_type = other DNA
ccctgagctagcaaacgataaagcagctctgcaagaagtgaatgctgcattgttcaaagagtatttaccgttatt

SEQ ID NO: 449294 - DNA, 75 bp, synthetic construct
  source 1..75: mol_type = other DNA
ggaatcagtatagtaggtataaaaaggacggctattcttcatataatttttttgaaaataacgttatttttcgcc

SEQ ID NO: 449295 - DNA, 75 bp, synthetic construct
  source 1..75: mol_type = other DNA
ccagaatgatgtcaatcaattagctgatagcctcgaatctgtattgaagtcctggggcagcgacgccaaagggga

SEQ ID NO: 449296 - DNA, 75 bp, synthetic construct
  source 1..75: mol_type = other DNA
aaagaccctggtgtagtgtgggaactgctgctgcggtaggtatttttatcggtgcgttgttgagcatgcgtaaat

SEQ ID NO: 449297 - DNA, 75 bp, synthetic construct
  source 1..75: mol_type = other DNA
agctattgaaataaccgcgccaaagtttatcgacagcagagaagcattagccaaagggtttactgttgattattc

SEQ ID NO: 449298 - DNA, 75 bp, synthetic construct
  source 1..75: mol_type = other DNA
atggacgattcaagaaagcagtttgaagagtggtttaaaaacaaatatcacgtttcaagtgacgtgatgaagatt

SEQ ID NO: 449299 - DNA, 75 bp, synthetic construct
  source 1..75: mol_type = other DNA
cgagcggatggagcaatgacacatcatctgccccgctaatagccagtaacgatgacattcttgcgttggagcctg

SEQ ID NO: 449300 - DNA, 75 bp, synthetic construct
  source 1..75: mol_type = other DNA
ttaccattaattctctgacgcgattagaagaaaagaaatttccggtgggtgaaagcgagtcgaaatttaatcaga

SEQ ID NO: 449301 - DNA, 75 bp, synthetic construct
  source 1..75: mol_type = other DNA
ggtaaagttgtttttaacggacaggagatgagcgaagaagaatttatgtctcgtgccggacgttttgttcattaa

SEQ ID NO: 449302 - DNA, 75 bp, synthetic construct
  source 1..75: mol_type = other DNA
atgatacgtaagtcagctacaggtgccattgttgcgttagccgtaatctggggtggtggcacatggtacacaggt

SEQ ID NO: 449303 - DNA, 75 bp, synthetic construct
  source 1..75: mol_type = other DNA
tagttggagttttggctctgtgggggatttttattattagtgcagtaaccaatatgacatggttaaaaattttgc

SEQ ID NO: 449304 - DNA, 75 bp, synthetic construct
  source 1..75: mol_type = other DNA
tatctgcaatggctacccgcgatgggctacggcggctggcagcacatcattttgcctgcggtttccattgccttt

SEQ ID NO: 449305 - DNA, 75 bp, synthetic construct
  source 1..75: mol_type = other DNA
gtggtttttgtggtctgtaatttgattgtcgatttgctcaacgccgcgctggacccgcgcattcgtcgtcatgaa

SEQ ID NO: 449306 - DNA, 75 bp, synthetic construct
  source 1..75: mol_type = other DNA
tgggtgttttaattattgccttcaatttcgaatggttgaagatttggcttgcacctaagttattcctaattgaat

SEQ ID NO: 449307 - DNA, 75 bp, synthetic construct
  source 1..75: mol_type = other DNA
ccagcggcgcgatggtcgggtttaacgttcattttcactctctggcgagagcctcgattactgcgatgtttagtt

SEQ ID NO: 449308 - DNA, 75 bp, synthetic construct
  source 1..75: mol_type = other DNA
agttacaaagaaagttaccgaaaaagttacaccggaacgggcatcaattaacaccattgagatgatggataacgg

SEQ ID NO: 449309 - DNA, 75 bp, synthetic construct
  source 1..75: mol_type = other DNA
acgctatcagatgcgctctggaatggacaccaacgcaggaaacttgtaaatgcagcagccggtaaaggctttgga

SEQ ID NO: 449310 - DNA, 75 bp, synthetic construct
  source 1..75: mol_type = other DNA
atgagtaacgtcggccagcgtgaacgcatgacccaacagcgcattgttgagctgtttcaaacggatttaggctat

SEQ ID NO: 449311 - DNA, 75 bp, synthetic construct
  source 1..75: mol_type = other DNA
tggagatcgttttaaagaacgggaaattgccaatgccattcgagaggaaacagctgattatgaattggatattca

SEQ ID NO: 449312 - DNA, 75 bp, synthetic construct
  source 1..75: mol_type = other DNA
gcgcaatgcctcgctgccgatgatcaccgccgtggggatgcacattggcgaactgattggcgggacgatgattat

SEQ ID NO: 449313 - DNA, 75 bp, synthetic construct
  source 1..75: mol_type = other DNA
attgcaacaggcaaaaatcgatctggatggtgctctggatgccgttcgcaccctttgcgagccagttaaaatgcc

SEQ ID NO: 449314 - DNA, 75 bp, synthetic construct
  source 1..75: mol_type = other DNA
caacatgctcgatcgccatctggcccagatatgtaataaacagcgcctgctggaattgatccatgactttatcgt

SEQ ID NO: 449315 - DNA, 75 bp, synthetic construct
  source 1..75: mol_type = other DNA
tttttgcctctccttcagaaggcgattttcaatctcaattgcagttatttgaagatctcagtaataaaaattaca

SEQ ID NO: 449316 - DNA, 75 bp, synthetic construct
  source 1..75: mol_type = other DNA
cactgttaatcctccaaaacaaccgagacagccacgaattagcggaaacagagcaatcacagcagcttattcagc

SEQ ID NO: 449317 - DNA, 75 bp, synthetic construct
  source 1..75: mol_type = other DNA
ctttagggcaacttgaaaggaagtttaataagacctttgacaagattgaacagagagcaagaaatactaaagctt

SEQ ID NO: 449318 - DNA, 75 bp, synthetic construct
  source 1..75: mol_type = other DNA
tttacgggctatctgctaaagccggttcaatggattcttcaaaatttaatgagaagttagctcagttaaatgctt

SEQ ID NO: 449319 - DNA, 75 bp, synthetic construct
  source 1..75: mol_type = other DNA
ttgcagcaggtgctcagggttctatgtcacaggaacagacacaggaactatttggtaatgcaacggctatgagtc

SEQ ID NO: 449320 - DNA, 75 bp, synthetic construct
  source 1..75: mol_type = other DNA
agacaagacaggtcttaatatctctgaagggctatcaagctacgctaagtttgcagcaggtgctcagggttctat

SEQ ID NO: 449321 - DNA, 75 bp, synthetic construct
  source 1..75: mol_type = other DNA
aatctcagttttacgggctatctgctaaagctgggtcaatggataattcaaaattcaatgaagcccttgctaaac

SEQ ID NO: 449322 - DNA, 75 bp, synthetic construct
  source 1..75: mol_type = other DNA
gcgatggcgataagctgccgcatcgtcatgtctttaacggcatgggttacgatggcgataatatttcaccgcatc

SEQ ID NO: 449323 - DNA, 75 bp, synthetic construct
  source 1..75: mol_type = other DNA
gcgatggcgataagttaccgcatcgtcatgtctttaatggcatgggctacgatggcgataatatttcgccgcacc

SEQ ID NO: 449324 - DNA, 75 bp, synthetic construct
  source 1..75: mol_type = other DNA
ccaccgataacgttgccgtcggggcgaaaggcgcgtcattcattattgacaagctgggtgccgaagggggtgaag

SEQ ID NO: 449325 - DNA, 75 bp, synthetic construct
  source 1..75: mol_type = other DNA
tggtgtaggtagtgctcttgcaattggttatgctgatgacggttatgaaacagcgttagcattagcttcaatgat

SEQ ID NO: 449326 - DNA, 75 bp, synthetic construct
  source 1..75: mol_type = other DNA
aatgcaacttatctatgcctggaaacaggcctggtatatgatcccaattgccatcttcggtggaatactcacagc

SEQ ID NO: 449327 - DNA, 75 bp, synthetic construct
  source 1..75: mol_type = other DNA
atcaaactcgataaaggttttgtacaaatgcttggcgaggatgaaatctccgggcatatagtagaaaatattatt

SEQ ID NO: 449328 - DNA, 75 bp, synthetic construct
  source 1..75: mol_type = other DNA
tacggcagcggcactgggcgaaggcaaaaagctctattacgccaacaaagaggtttatcgcctgctgcgttacgg

SEQ ID NO: 449329 - DNA, 75 bp, synthetic construct
  source 1..75: mol_type = other DNA
ttggctgtccactcttggattaacggccatcgcctggctaacggctccctttgccgggggttatggcatcgtttt

SEQ ID NO: 449330 - DNA, 75 bp, synthetic construct
  source 1..75: mol_type = other DNA
tacagaagtgggttgcacagaagaaagggcttaacagcagcagtgctaacactgccagggtagttttcctggcta

SEQ ID NO: 449331 - DNA, 75 bp, synthetic construct
  source 1..75: mol_type = other DNA
accttcaacaaaatgtacccggattcaccgtacgaatacgtcacgttctgccatacctgccgtcgtttgatttat

SEQ ID NO: 449332 - DNA, 75 bp, synthetic construct
  source 1..75: mol_type = other DNA
catgagcgaaaacgaactggatattttgacgcggtacttccagtacaacgctaaagatattaccgagaaacagtg

SEQ ID NO: 449333 - DNA, 75 bp, synthetic construct
  source 1..75: mol_type = other DNA
agctggaaagtcaggccgctacctcagttaccaatggcgcacatatttatcctttcaaaccttctcgtataggcg

SEQ ID NO: 449334 - DNA, 75 bp, synthetic construct
  source 1..75: mol_type = other DNA
gcgcaaaaagccttacataaaacgtcggatacagcattttgcctttcctgccactcgatgagtaaaccttttgag

SEQ ID NO: 449335 - DNA, 75 bp, synthetic construct
  source 1..75: mol_type = other DNA
atgtggatattatcgttggcaccttcagtaaaagtctggcctcgattggcggttttgctgtcggttcggaagcga

SEQ ID NO: 449336 - DNA, 75 bp, synthetic construct
  source 1..75: mol_type = other DNA
attaggcgcaacgggccgcggactggttgaagccgttggcgttgaagacgatgtggatattatcgtcggcacctt

SEQ ID NO: 449337 - DNA, 75 bp, synthetic construct
  source 1..75: mol_type = other DNA
ctgcaggcatcacgctgctgcgctgtagcgtaaacgctgcccacagtcgtgagcaaattgatgccatcattcagg

SEQ ID NO: 449338 - DNA, 75 bp, synthetic construct
  source 1..75: mol_type = other DNA
atggggctttatgataaatatgcgcgccttgctggtgagcggctgcaatttagtgataacggtttaacgccgttt

SEQ ID NO: 449339 - DNA, 75 bp, synthetic construct
  source 1..75: mol_type = other DNA
aataattatctcggtttaacctttaatcatgatgccatcgccgaaggtcaggcagcgttagcggcccaaggcacc

SEQ ID NO: 449340 - DNA, 75 bp, synthetic construct
  source 1..75: mol_type = other DNA
tcggtgacgttgcgccgctggcggaaattgttgatatcaaacgtcgtctcggtggttatttgattgtcgatgaag

SEQ ID NO: 449341 - DNA, 75 bp, synthetic construct
  source 1..75: mol_type = other DNA
cgcccggaacccgcggatgagattgccgaagtgttgcttaataatacgtatgcggtgtttagcgttagtgggtag

SEQ ID NO: 449342 - DNA, 75 bp, synthetic construct
  source 1..75: mol_type = other DNA
gttttgctgggctatctgctatggcgtggctggcgacgtactattccccgcgtagatggcgttcgtaagcctgcc

SEQ ID NO: 449343 - DNA, 75 bp, synthetic construct
  source 1..75: mol_type = other DNA
atagtgaagcgctcatcaacagcctgacaatggggctggtggcggcattcatctctttgctcctgttactgctgt

SEQ ID NO: 449344 - DNA, 75 bp, synthetic construct
  source 1..75: mol_type = other DNA
gacttatccacggtagagaaagcaacggatgctggattaaaagggccagcccgtaactatgcagttagttctgga

SEQ ID NO: 449345 - DNA, 75 bp, synthetic construct
  source 1..75: mol_type = other DNA
cgctatttaggcgattggcaggatcgcgctaataataaaaatattgaagtggatatcctcgttaattggctaaaa

SEQ ID NO: 449346 - DNA, 75 bp, synthetic construct
  source 1..75: mol_type = other DNA
gatgaggactatttcacatcccatataaccagaacgctatatcgcgcaaactctaaacgtcgagaagatgtttaa

SEQ ID NO: 449347 - DNA, 75 bp, synthetic construct
  source 1..75: mol_type = other DNA
atcggtgaattagaaaaaataaaaatgccgcaaataagaaaagatgtaaaaagattattgcattttttagatgag

SEQ ID NO: 449348 - DNA, 75 bp, synthetic construct
  source 1..75: mol_type = other DNA
ttacagactttatcgccggtcatccctcctgcacggtctgtttctgggaaaccttccacaaaatgtacccggatt

SEQ ID NO: 449349 - DNA, 75 bp, synthetic construct
  source 1..75: mol_type = other DNA
gcgagttgcgccgggaaccggtgaatgagattgccgaagtgttgcttaataacacgtatgcggtgtttaacgttc

SEQ ID NO: 449350 - DNA, 75 bp, synthetic construct
  source 1..75: mol_type = other DNA
tgcatccggggatgttggaaaaacatagcgatgtgtctcttgatcagctacagcaggcgctggaaaggcgtccgg

SEQ ID NO: 449351 - DNA, 75 bp, synthetic construct
  source 1..75: mol_type = other DNA
caaggtatttcgaaatattcgtgcggatgaatctattagtgagggactatctgcaaagaacccagggcgaggaat

SEQ ID NO: 449352 - DNA, 75 bp, synthetic construct
  source 1..75: mol_type = other DNA
cgggctaccaggcgggatttggcgaaaaccggggcgacatcagcaacagcggggcgtactttgagcaggggctgc

SEQ ID NO: 449353 - DNA, 75 bp, synthetic construct
  source 1..75: mol_type = other DNA
acggtctgccctggctcgacgcgctgaacggttatctgcaaggcaacgcccggtatctggcggatgccctccaga

SEQ ID NO: 449354 - DNA, 75 bp, synthetic construct
  source 1..75: mol_type = other DNA
aatgatcccatgcaatgatagctgttccgtagtagggaaagttatcgccagccagtggcctgaagagacatttag

SEQ ID NO: 449355 - DNA, 75 bp, synthetic construct
  source 1..75: mol_type = other DNA
tggttactggacgttggctatggaaatcccctcgacccgagccgcaaaagtgtgaaaaaaagccagttgtgtcgg

SEQ ID NO: 449356 - DNA, 75 bp, synthetic construct
  source 1..75: mol_type = other DNA
gtgcgtgctgcgttgttttactggcggatggtgaccgggcgctggctatggaaatatcctcgccctgaacatgaa

SEQ ID NO: 449357 - DNA, 75 bp, synthetic construct
  source 1..75: mol_type = other DNA
agcacaaccaaaaaagccagtgattgtgcgttttggcttgaagttgaaggtaattccatgaccgcgccaacagga

SEQ ID NO: 449358 - DNA, 75 bp, synthetic construct
  source 1..75: mol_type = other DNA
ttctgttgggctattaaccttacgtttctggctacgttatcagaagcatccacaggcatttgctcgctggacgcg

SEQ ID NO: 449359 - DNA, 75 bp, synthetic construct
  source 1..75: mol_type = other DNA
cggcgtatcggcccaccgttatcacaatcgtctggatatctttacccaaagcctggaaaacggcgcggcccagca

SEQ ID NO: 449360 - DNA, 75 bp, synthetic construct
  source 1..75: mol_type = other DNA
gatggattgcaaaacttctcgcctgttacgctggaagggcaattattgttgagcggcaaaccaccgctgaacatc

SEQ ID NO: 449361 - DNA, 75 bp, synthetic construct
  source 1..75: mol_type = other DNA
tcttgttgaccctgagcaggctgttgagcccggcgatttctgcatagccagacttggtggtgatgaatttacctt

SEQ ID NO: 449362 - DNA, 75 bp, synthetic construct
  source 1..75: mol_type = other DNA
gtgttattgcttagcggcatcgcgctgatggctaaagcgcacatcctgccattttccgggcaggctgaatggctg

SEQ ID NO: 449363 - DNA, 75 bp, synthetic construct
  source 1..75: mol_type = other DNA
gcgttcatctcattagcatcgcgctttctgttgggctcttaaccctacgattctggctacgttaccaggagcatc

SEQ ID NO: 449364 - DNA, 75 bp, synthetic construct
  source 1..75: mol_type = other DNA
actggacgttggctatggaaataccctcgatccgagccgcaaaagtgtgaaaaaaagccagctgtgtcggaataa

SEQ ID NO: 449365 - DNA, 75 bp, synthetic construct
  source 1..75: mol_type = other DNA
tatccgtttatcaactgtacccactgcggcccgcgtttcaccattattcgcgccatgccttacgaccgcccgttt

SEQ ID NO: 449366 - DNA, 75 bp, synthetic construct
  source 1..75: mol_type = other DNA
atcttcacggcgatgtctgtaatgacggcgatggcgtagaagtccggctgctggaagacccggaaacgtttcttg

SEQ ID NO: 449367 - DNA, 75 bp, synthetic construct
  source 1..75: mol_type = other DNA
ggtgcagcacttgagcgagcggacagaacgcttgagccagttatacagcgagaacaggagataagggatgaacgg

SEQ ID NO: 449368 - DNA, 75 bp, synthetic construct
  source 1..75: mol_type = other DNA
gctggcgcgtattgatagcgtcgagcgtgagccgtttatctggtcacaactgcccaccgagttcactatccgcca

SEQ ID NO: 449369 - DNA, 75 bp, synthetic construct
  source 1..75: mol_type = other DNA
tctgccgacacaaacggtgctgcatcatcatgcccacgcggcggcgtgtctggcagaacaccactggcctttgga

SEQ ID NO: 449370 - DNA, 75 bp, synthetic construct
  source 1..75: mol_type = other DNA
caaattgttcccgatgccgcgacttgccctgcttgccttgccgaaatgaataccccaggcgaacgacgctggcgt

SEQ ID NO: 449371 - DNA, 75 bp, synthetic construct
  source 1..75: mol_type = other DNA
gtccatggggcatgaagtggtcgggcactggtttaatgaagaggtgaaagaaaacctggccttgcttgatgaagt

SEQ ID NO: 449372 - DNA, 75 bp, synthetic construct
  source 1..75: mol_type = other DNA
ttttcgatagcagctcttatcaatctaccggggaatgcgcttggttctgcctctacaatcattacggggcgaaga

SEQ ID NO: 449373 - DNA, 75 bp, synthetic construct
  source 1..75: mol_type = other DNA
ttaattttgttgcaggagatgcaacgtcagaagtgaaagctctggcgctaacttacctcgaactaagtgtcatta

SEQ ID NO: 449374 - DNA, 75 bp, synthetic construct
  source 1..75: mol_type = other DNA
ggtagcgaacgttcctggcagcgggcagggcacgaatacaccctgtggatggatggcgaggaggtgatgatccgc

SEQ ID NO: 449375 - DNA, 75 bp, synthetic construct
  source 1..75: mol_type = other DNA
cactggtttaatgaagaggtgaaagaaaacctggccttgcttgatgaagtggaagacgccgcgcgcacgctcaaa

SEQ ID NO: 449376 - DNA, 75 bp, synthetic construct
  source 1..75: mol_type = other DNA
atgaaatggaagaggggatgaactactacgacgaagaaagcctgtcgctatgcggcgttgaggattttctgcagg

SEQ ID NO: 449377 - DNA, 75 bp, synthetic construct
  source 1..75: mol_type = other DNA
gtcagacaacgctactcgatttaaaacttccggcgctggacttagcggaatttaacattgctggcgcgccgggct

SEQ ID NO: 449378 - DNA, 75 bp, synthetic construct
  source 1..75: mol_type = other DNA
tttgattttggatttagtgctacaattagtagatatgttagttatgttttaagtggtgcgaccttacagcaatta

SEQ ID NO: 449379 - DNA, 75 bp, synthetic construct
  source 1..75: mol_type = other DNA
ccatattcccctggcgtcgaaagccccgaggattatgttgaagctgtgttgactgctgcgaccgcatgttctgcg

SEQ ID NO: 449380 - DNA, 75 bp, synthetic construct
  source 1..75: mol_type = other DNA
tccagccatggctgccagaagagtttcgccaggcaatagagcacatcaaagcgcatgtaacggcagaaacgccaa

SEQ ID NO: 449381 - DNA, 75 bp, synthetic construct
  source 1..75: mol_type = other DNA
aaagatgaggtgaaattctccgtggtgggttactacctgtacggtgcgcctgctaacggtaatactttgcagggg

SEQ ID NO: 449382 - DNA, 75 bp, synthetic construct
  source 1..75: mol_type = other DNA
aactggtgagtaattcccccgcacctgttgaattagcgccaggggtgcgtactacgctgtttatcccggtgcgtg

SEQ ID NO: 449383 - DNA, 75 bp, synthetic construct
  source 1..75: mol_type = other DNA
ggaaatggccatttgtgatcctttgtgaatataataaagttagacaccttattaggaaaaaaaatgatgttgctg

SEQ ID NO: 449384 - DNA, 75 bp, synthetic construct
  source 1..75: mol_type = other DNA
attcatcattttggcgaacaaattattgatttcgtcgcgggtgatgccacgacagaagttaaagcactggcgttg

SEQ ID NO: 449385 - DNA, 75 bp, synthetic construct
  source 1..75: mol_type = other DNA
ataccctcgatccgagccgcaaaagtgtgaaaaaagccagttgtatcggaataaacgacaaaatgcagattattt

SEQ ID NO: 449386 - DNA, 75 bp, synthetic construct
  source 1..75: mol_type = other DNA
ctttccgctgatactctccctaaagtcgctaaacagatgggcttgatgattgataaagcgggtggctgggctgaa

SEQ ID NO: 449387 - DNA, 75 bp, synthetic construct
  source 1..75: mol_type = other DNA
ttcagccgtggctaccccaggagttacgccaggcgattgagcatatcaaagcacacgttacggcagaaacgccaa

SEQ ID NO: 449388 - DNA, 75 bp, synthetic construct
  source 1..75: mol_type = other DNA
ggtcagaaagaagtaaaaatcccggcgctcgataaaaatggtgttcagcatggctggaaaacggttcacagaaat

SEQ ID NO: 449389 - DNA, 75 bp, synthetic construct
  source 1..75: mol_type = other DNA
tgcttggctatcataacgacaaaaaagaacatccacacgtgcatgtcgtttttcgtattcgtgataatgacggta

SEQ ID NO: 449390 - DNA, 75 bp, synthetic construct
  source 1..75: mol_type = other DNA
ctggcaggacaacagcgacggtagcggtgcggtacgtccggatcgcgtcacgatgaaactggataaagccagtta

SEQ ID NO: 449391 - DNA, 75 bp, synthetic construct
  source 1..75: mol_type = other DNA
taacggtgaattgcgcgtcatggcgcaagcctggacggcagatgacttcggtagcaacgaaagcaaagtgatagt

SEQ ID NO: 449392 - DNA, 75 bp, synthetic construct
  source 1..75: mol_type = other DNA
cgcgttattcatgtcgtcgataaaaaaagcggcaaagtggatggtgcctgggagctgtcagataatcttaaagag

SEQ ID NO: 449393 - DNA, 75 bp, synthetic construct
  source 1..75: mol_type = other DNA
cctacgtgatggatttcctggttcgtgcgggtgagcaggggtacagcgtatcggttgacgccattaaccggggaa

SEQ ID NO: 449394 - DNA, 75 bp, synthetic construct
  source 1..75: mol_type = other DNA
cgatcaacttgcaactttgcaggtaaccaacagtggcgaccaaccgctatggctgcgtgtggatgccagcggtta

SEQ ID NO: 449395 - DNA, 75 bp, synthetic construct
  source 1..75: mol_type = other DNA
atttcctggtccgcgcaggtgagcagggttacagcgtgccgacagacgccattaaccggggaaatgagcgtctgc

SEQ ID NO: 449396 - DNA, 75 bp, synthetic construct
  source 1..75: mol_type = other DNA
tatatcaaagagttaaaagcgtatccttacggctgtctcgagcaaaccaccagcggcctgttcccgtcactttat

SEQ ID NO: 449397 - DNA, 75 bp, synthetic construct
  source 1..75: mol_type = other DNA
aacgtgataacggcggctttgcgctgtgggataaaaacggtgacgaagagtactggctgacggcttacgtgatgg

SEQ ID NO: 449398 - DNA, 75 bp, synthetic construct
  source 1..75: mol_type = other DNA
tttaacattgctggtgcaccgggttatagcaaacagttctttatgtttggtccgcgcgatctttatcgcccgggt

SEQ ID NO: 449399 - DNA, 75 bp, synthetic construct
  source 1..75: mol_type = other DNA
ggtgatgagctgaaacgcgggggtaaaccgccagtgaaccacgtcaatattgttgcgcaacaggcacagccggta

SEQ ID NO: 449400 - DNA, 75 bp, synthetic construct
  source 1..75: mol_type = other DNA
gccagatgcgctggtggttgatttgctgccagcgggtctggagctggaaaaccagaacctggctaacggcaacgc

SEQ ID NO: 449401 - DNA, 75 bp, synthetic construct
  source 1..75: mol_type = other DNA
gagaaaccgttgccgatcagcataagcagtggaaaattggcgtccgtccggcattcccggcacaaacagtcaatt

SEQ ID NO: 449402 - DNA, 75 bp, synthetic construct
  source 1..75: mol_type = other DNA
gcagtggaaaatcggcgtccgtccggcattcccggcacaaacggtcaattacggtacggcgttgcagcctggtga

SEQ ID NO: 449403 - DNA, 75 bp, synthetic construct
  source 1..75: mol_type = other DNA
gagtggcagcctgacgaaattatcgtcggtttgccgctgaatatggacggtaccgagcaaccgttgactgcccgg

SEQ ID NO: 449404 - DNA, 75 bp, synthetic construct
  source 1..75: mol_type = other DNA
acttcggcaccaaaagcattggcgtagcggttggtcaacgcattactggcaccgctcgccctttgcctgcgatta

SEQ ID NO: 449405 - DNA, 75 bp, synthetic construct
  source 1..75: mol_type = other DNA
catacaagcttcagcgatgcctgttatagcctgccgttagcaccactatttggctacaaaagccaaacgttacaa

SEQ ID NO: 449406 - DNA, 75 bp, synthetic construct
  source 1..75: mol_type = other DNA
gagggcgcgacggttgaagaagctattcgcgccagtggcttgctggaattgcgtaccgatatcgatttaactaaa

SEQ ID NO: 449407 - DNA, 75 bp, synthetic construct
  source 1..75: mol_type = other DNA
atggtcgtttcggcgttgatgtaaagctgcatgacgaacgtcttagcaccgtagaagcgcgttccggcctgttcg

SEQ ID NO: 449408 - DNA, 75 bp, synthetic construct
  source 1..75: mol_type = other DNA
aacaaggtggttaccgggcactcaacaaaggtaaagtcgactctgcctctgcggttatcattctcgaaagttatt

SEQ ID NO: 449409 - DNA, 75 bp, synthetic construct
  source 1..75: mol_type = other DNA
tggcttatgcgctacctgagaagcagtacctgcagcgcgtgacgttgcaggagggcgcgacggttgaagaagcta

SEQ ID NO: 449410 - DNA, 75 bp, synthetic construct
  source 1..75: mol_type = other DNA
acccttcatacgccgatgccgagaaggatgatcgcaccttgagccgctgcatatcgtttgccaaaagctggggct

SEQ ID NO: 449411 - DNA, 75 bp, synthetic construct
  source 1..75: mol_type = other DNA
cttattgcagcttatcgacggagcaggccttatcgttgctgcatggggaaacgaaggtagacaccttaagcgctc

SEQ ID NO: 449412 - DNA, 75 bp, synthetic construct
  source 1..75: mol_type = other DNA
agcaccgatcagggtctttaccgaagatgagatatacatgaagccgtggagaaatatttatgaaacggattatac

SEQ ID NO: 449413 - DNA, 75 bp, synthetic construct
  source 1..75: mol_type = other DNA
aggcgctcgtactcaggcaggaaatatcgctcaaaaatacctccaggttgtgccaacaacaacgttacatgcggg

SEQ ID NO: 449414 - DNA, 75 bp, synthetic construct
  source 1..75: mol_type = other DNA
aaggagaatgcgaaacaggaaactgccagcactgcgccaaatacaacggaaaagtttaatgcgctactgaaaaac

SEQ ID NO: 449415 - DNA, 75 bp, synthetic construct
  source 1..75: mol_type = other DNA
aggtctggggagtaggacgcagactgacggaaaagctgaatgcgctgggtattaacacagcactgcaactggcgc

SEQ ID NO: 449416 - DNA, 75 bp, synthetic construct
  source 1..75: mol_type = other DNA
ctgaccatcgatcgcggcggcagtgacaactgtgatgttgaaagtattcctgaacaggaactctgttttgcgtga

SEQ ID NO: 449417 - DNA, 75 bp, synthetic construct
  source 1..75: mol_type = other DNA
ttaccatcgtaacgtctggcatcacccacttttcgcctggcagcgcgtcaccgattttctgaccatcgatcgcgg

SEQ ID NO: 449418 - DNA, 75 bp, synthetic construct
  source 1..75: mol_type = other DNA
cgggaaaagggaaagtgtggtttgcggggcgaggaaccgcccctgaatggcaaatgaaacgggaaatgttgagtc

SEQ ID NO: 449419 - DNA, 75 bp, synthetic construct
  source 1..75: mol_type = other DNA
ccaggatgcttcttttcatctcaatcagcggggggccacgcagcaggatgcgcagggacgctggcaatttgagta

SEQ ID NO: 449420 - DNA, 75 bp, synthetic construct
  source 1..75: mol_type = other DNA
ggacttgcgacgaatattactgcgctaaacgcactggaaaaagcactccgccaggatacttcttttcagctcaat

SEQ ID NO: 449421 - DNA, 75 bp, synthetic construct
  source 1..75: mol_type = other DNA
cattcatgaacttgagcgtcatccgctgggcactcaggcgtttatcccgatgaaaggcgaagcgtttgtggtggt

SEQ ID NO: 449422 - DNA, 75 bp, synthetic construct
  source 1..75: mol_type = other DNA
gctggccagtcacttactcaagcggatatggaaggatggttttcgttatgccaaagcgggcgtcatgctgtctga

SEQ ID NO: 449423 - DNA, 75 bp, synthetic construct
  source 1..75: mol_type = other DNA
atgccttctggaaatcaggaaccccgccgcgatcctgaattaaaacgtaaagcctggctggcggtttttcttggt

SEQ ID NO: 449424 - DNA, 75 bp, synthetic construct
  source 1..75: mol_type = other DNA
tgaactggatgcgatattttttggtcgcggcgtcagctacgacaaaccaattatcgtcagctgggctctggtgta

SEQ ID NO: 449425 - DNA, 75 bp, synthetic construct
  source 1..75: mol_type = other DNA
agctgaatgcgctgggtattaacacagcactgcagctggcgcaggctaacacggcattcatccggaaaaacttca

SEQ ID NO: 449426 - DNA, 75 bp, synthetic construct
  source 1..75: mol_type = other DNA
agccgatcaccgccgagcagagctggtttctggcgggcgtttgtttgacctcgggcaggttccgaaatcggtctg

SEQ ID NO: 449427 - DNA, 75 bp, synthetic construct
  source 1..75: mol_type = other DNA
atgttgcgatttttgaaccaatgttcgcagggccggggtgcgtggctgttgatggcgtttactgctctggcgctg

SEQ ID NO: 449428 - DNA, 75 bp, synthetic construct
  source 1..75: mol_type = other DNA
attttttctgtccccaatgttcgaattaatattcgggaatatcatgatattcctgctgaaacgccgtatgcgccg

SEQ ID NO: 449429 - DNA, 75 bp, synthetic construct
  source 1..75: mol_type = other DNA
gccgatgtccgctgtggttccgtgcggatggtcggtattcctctgccgctactcacctgccttgcggatatcagt

SEQ ID NO: 449430 - DNA, 75 bp, synthetic construct
  source 1..75: mol_type = other DNA
acgtcaccgatttcgcacaagccgtgggtcagtggttaagcgccgactccgtacagacgcaaacgtatgaattat

SEQ ID NO: 449431 - DNA, 75 bp, synthetic construct
  source 1..75: mol_type = other DNA
gccgaagcccgttgtggttctgtgcggatggttggcattcctctgccggtactcacctgccttgcggatatcagt

SEQ ID NO: 449432 - DNA, 75 bp, synthetic construct
  source 1..75: mol_type = other DNA
gtgaacttgaggcttactgttatgatggaaaaggttcagagcaaacagggaaaggagaagactttaacagggagt

SEQ ID NO: 449433 - DNA, 75 bp, synthetic construct
  source 1..75: mol_type = other DNA
gaaaacatcgatcatgtgaaaaacatggtcttttcaccaccaccagaagctggagtaagcagggaagacgctctg

SEQ ID NO: 449434 - DNA, 75 bp, synthetic construct
  source 1..75: mol_type = other DNA
ggaattaacatcggagaactattgaaacactatgaaatccaggtgagtcacgaattgcattctattattcctaaa

SEQ ID NO: 449435 - DNA, 75 bp, synthetic construct
  source 1..75: mol_type = other DNA
caggcgatagcgatagattgcggagagatcattttgccggtgacaccaccggtggtgttggcagcaaccagcaac

SEQ ID NO: 449436 - DNA, 75 bp, synthetic construct
  source 1..75: mol_type = other DNA
cggatacacagcgggtcaggtattgcgtgcctggacgccgttcctgttcctgaccgccaccgtaacactgtggag

SEQ ID NO: 449437 - DNA, 75 bp, synthetic construct
  source 1..75: mol_type = other DNA
ggcgctttccttgaaggagccgcaggctttggcgcaccggtagcaattaccgccgcattgctggtcggtctgggt

SEQ ID NO: 449438 - DNA, 75 bp, synthetic construct
  source 1..75: mol_type = other DNA
tggtcggcaagtaataaacgtatttctgaagatattaattggtttcccggggttagcctggaacacgcattacgc

SEQ ID NO: 449439 - DNA, 75 bp, synthetic construct
  source 1..75: mol_type = other DNA
tggactctcctggtatgcaaaatccaaacacgtcgccgaacaacggcttatcgcaatggctgacgaaataatgct

SEQ ID NO: 449440 - DNA, 75 bp, synthetic construct
  source 1..75: mol_type = other DNA
aggtcagaaacgccaatttgttgtgcggcggtagcctgcaaagcggcaaacaaagcattagatgacgtatccgac

SEQ ID NO: 449441 - DNA, 75 bp, synthetic construct
  source 1..75: mol_type = other DNA
cacaatatcgggtttgctcttgaacacgggtttacaaaggattcagaagaacataaaaaactaagaatacagcaa

SEQ ID NO: 449442 - DNA, 75 bp, synthetic construct
  source 1..75: mol_type = other DNA
ctgtatgacatatcgggggaatttaccaagcgattttatcgccccggaaaagatgtaatcctaaatgtattcgat

SEQ ID NO: 449443 - DNA, 75 bp, synthetic construct
  source 1..75: mol_type = other DNA
atgccagaaatgcattggaatcaagacatgagtggcttaaaactactccggaatgggaatttaagcatttaaaaa

SEQ ID NO: 449444 - DNA, 75 bp, synthetic construct
  source 1..75: mol_type = other DNA
cggcgctcgatgcgcggcgtgctgccgatgccctgcgtcgccgttatccggtggcacaaggcgccggacgctggc

SEQ ID NO: 449445 - DNA, 75 bp, synthetic construct
  source 1..75: mol_type = other DNA
gtgataaatctgaaacgaaacctgacagcgcgccccgcttctgacaaaataggcgcatccccttcgacctacgta

SEQ ID NO: 449446 - DNA, 75 bp, synthetic construct
  source 1..75: mol_type = other DNA
cccgcgtggtatcgtcacactgcttgagcgatacaacattgataccttcggtcttaacgccgtggtgattggcgc

SEQ ID NO: 449447 - DNA, 75 bp, synthetic construct
  source 1..75: mol_type = other DNA
aattcaaaatcagaaaaattaaacgggatattgagcgcagttgtgataatgccgaaaaatacttctggctttttg

SEQ ID NO: 449448 - DNA, 75 bp, synthetic construct
  source 1..75: mol_type = other DNA
gccctgcctgtcttgccgaaatgaataccccgggcgagcggcgttatcgttatccgtttatcaactgtacccact

SEQ ID NO: 449449 - DNA, 75 bp, synthetic construct
  source 1..75: mol_type = other DNA
cggtacacatggcaaaaccaccaccgcgggaatggcaacctggattctggaacagtgcggttacaaaccgggatt

SEQ ID NO: 449450 - DNA, 75 bp, synthetic construct
  source 1..75: mol_type = other DNA
gtggcacgtttatgggcggtctggcgatgctggcgcgccagttaggccatgaagtaacgggttcggacgccaatg

SEQ ID NO: 449451 - DNA, 75 bp, synthetic construct
  source 1..75: mol_type = other DNA
cgcgatgatggcaaaagaagatcgcatcgttgccgaccggcttagccatgcttccttgctggaagctgccagttt

SEQ ID NO: 449452 - DNA, 75 bp, synthetic construct
  source 1..75: mol_type = other DNA
tctgcgggtgaactatcgcgaatgccagcacctgggcggcttgccagcggtggcgcttgctgggggcgatttggc

SEQ ID NO: 449453 - DNA, 75 bp, synthetic construct
  source 1..75: mol_type = other DNA
tggcggagatgtcattgcgttgacgctcgacggtattggtatgggggagaacggcgctttgtggggcggcgagtg

SEQ ID NO: 449454 - DNA, 75 bp, synthetic construct
  source 1..75: mol_type = other DNA
cctcaagtgatcttgatgaagaattcaccttcaatttcatcgttacggacctggcaggaaatacgcttaacattc

SEQ ID NO: 449455 - DNA, 75 bp, synthetic construct
  source 1..75: mol_type = other DNA
cagcggcctggtgcttaacccgcaactccttgggcgcgtctggtttgccagccagcccgcctcattgccagtggg

SEQ ID NO: 449456 - DNA, 75 bp, synthetic construct
  source 1..75: mol_type = other DNA
tttattgtgtttatcaccgcgtggaaagaacatgcggtagaagcgtttgaactggaggcgtttgactacattctc

SEQ ID NO: 449457 - DNA, 75 bp, synthetic construct
  source 1..75: mol_type = other DNA
gctggaggcgtttgactacattctcaaaccgtatcaggaatcacgcattacaggaatgctgcaaaagctggaagc

SEQ ID NO: 449458 - DNA, 75 bp, synthetic construct
  source 1..75: mol_type = other DNA
aagcaaccttctttgcccctatatgggagaatatagcctggcatacactgggtccctccgtcactggatttgatt

SEQ ID NO: 449459 - DNA, 75 bp, synthetic construct
  source 1..75: mol_type = other DNA
ggattatatctgcattaggtcgcagtgggctgaatctcgaaggcctggaaaactttattcaaactgatgcttcca

SEQ ID NO: 449460 - DNA, 75 bp, synthetic construct
  source 1..75: mol_type = other DNA
aaaggttatgtgctgaccaataatcacgtaattaatcaggcacagaaaatcagtattcagctcaatgatgggcga

SEQ ID NO: 449461 - DNA, 75 bp, synthetic construct
  source 1..75: mol_type = other DNA
aactctctcggcgccatttcaggccgtcgcgtcgattcccggtcaagttgccggccagcctccactgcccagcct

SEQ ID NO: 449462 - DNA, 75 bp, synthetic construct
  source 1..75: mol_type = other DNA
cccagtctgcaacgcggtgaaggtgaagcaatgctcaccgccctcacccatctcagccgttcgccgctggagcag

SEQ ID NO: 449463 - DNA, 75 bp, synthetic construct
  source 1..75: mol_type = other DNA
acggcaacctgctggaagcaaagcagcagcgaatggtggaaggagaaatgctgtttattccggcgcgcgcggcta

SEQ ID NO: 449464 - DNA, 75 bp, synthetic construct
  source 1..75: mol_type = other DNA
atgagtgtttctgtaacacgcccccctgaacgcagcgaagtcatcaatgccggacggcagttgttgatgatttgt

SEQ ID NO: 449465 - DNA, 75 bp, synthetic construct
  source 1..75: mol_type = other DNA
tttccgctgccatcgctcattttgtgtcaatctgaacaaaatccgcgaaatcgaaccgtggtttaataacaccta

SEQ ID NO: 449466 - DNA, 75 bp, synthetic construct
  source 1..75: mol_type = other DNA
gatctcttcggcgacgatccgcaatttgagaggcagcagtggttactcgacgaacagctgaaactggcgaaacgc

SEQ ID NO: 449467 - DNA, 75 bp, synthetic construct
  source 1..75: mol_type = other DNA
tacgatctgccggtgatcctgcattcacggcgcacgcacgacaaactggcgatgcatcttaaacgccacgatttg

SEQ ID NO: 449468 - DNA, 75 bp, synthetic construct
  source 1..75: mol_type = other DNA
ctccattggtggctatgtcggcgaccacctacttgggactaaacgcaccattgttcttggggctattgtgctggc

SEQ ID NO: 449469 - DNA, 75 bp, synthetic construct
  source 1..75: mol_type = other DNA
aggcgtcatcagcgcacttgccgaccataacgccgtggtgttactggatgccgacagccacgccagtatttatga

SEQ ID NO: 449470 - DNA, 75 bp, synthetic construct
  source 1..75: mol_type = other DNA
gcgagttgcgcccggaaccagaagatgagattgccgaagtgttgcttaataatacgtatgcggtgtttagcgttc

SEQ ID NO: 449471 - DNA, 75 bp, synthetic construct
  source 1..75: mol_type = other DNA
actgtcattttgattttccgccgtttcgtggcgatgaagagtccagcctgcaacgcgcggcacaagcgggcgtag

SEQ ID NO: 449472 - DNA, 75 bp, synthetic construct
  source 1..75: mol_type = other DNA
taaacagcttggattctcgcaagagcaggcttttgtcacttttggtgcgtttgctgcgctggtctatggcctcat

SEQ ID NO: 449473 - DNA, 75 bp, synthetic construct
  source 1..75: mol_type = other DNA
tcgaaccgtggtttaataacacctatattctgcggctgaaagatctggattttgaagtgccagtcagccgcagca

SEQ ID NO: 449474 - DNA, 75 bp, synthetic construct
  source 1..75: mol_type = other DNA
ctgaaagatctggattttgaagtgccggtcagccgcagcaaagtgaaagaatttcgccagttaatgcatctttaa

SEQ ID NO: 449475 - DNA, 75 bp, synthetic construct
  source 1..75: mol_type = other DNA
gtaagattggcctggttacgctgggcgttgcagtagtgatgctattgatggtgccgtggctgaaacgcatgattg

SEQ ID NO: 449476 - DNA, 75 bp, synthetic construct
  source 1..75: mol_type = other DNA
gaacttctttgccatcaacaacgtgcatcatgaaattctcggtttttccatcaacccggtcagcttccaggcgct

SEQ ID NO: 449477 - DNA, 75 bp, synthetic construct
  source 1..75: mol_type = other DNA
gcaaaattggtctggtcacgctgggcgttgcggtggtaatgctgctgatggtgccgtggctgaaacggatgattg

SEQ ID NO: 449478 - DNA, 75 bp, synthetic construct
  source 1..75: mol_type = other DNA
cggtctgaaaacgtacagacagttaccgggattttattcccgacaactgtacgtccggcaccctttttccttttt

SEQ ID NO: 449479 - DNA, 75 bp, synthetic construct
  source 1..75: mol_type = other DNA
ctactgggactgcagccagttggtgaggtctggggagtaggacgcagactgacggaaaagctgaatgcgctgggt

SEQ ID NO: 449480 - DNA, 75 bp, synthetic construct
  source 1..75: mol_type = other DNA
atggggcagccctggtttcaggtgagacagatgcgcctggagaagaaaatacatgtattttccagcaattatgcg

SEQ ID NO: 449481 - DNA, 75 bp, synthetic construct
  source 1..75: mol_type = other DNA
ctactggggctgcagccagttggtgaggtctggggagtaggacacagactgacggaaaagctgaatgcgctgggt

SEQ ID NO: 449482 - DNA, 75 bp, synthetic construct
  source 1..75: mol_type = other DNA
atggtgggggatggactgaaggagtgtctgcgccccaaccgtagggttgaaataactggacagattgttcgttaa

SEQ ID NO: 449483 - DNA, 75 bp, synthetic construct
  source 1..75: mol_type = other DNA
aaaggttcgtggccactaccagaaaagttacgtcagataaaggcgggtatgaataaggaccagatttatcagctg

SEQ ID NO: 449484 - DNA, 75 bp, synthetic construct
  source 1..75: mol_type = other DNA
ccggactcgggaaagtctggtttgccggacggggtattgcgccggactggcagatgaaacgggagatgctgtcac

SEQ ID NO: 449485 - DNA, 75 bp, synthetic construct
  source 1..75: mol_type = other DNA
ttgtgataacgcaaatgctgcgtctgacaagcaacgccgaagctcgcgtagatgctgttttacttcaggcagaac

SEQ ID NO: 449486 - DNA, 75 bp, synthetic construct
  source 1..75: mol_type = other DNA
aaaggcagcgccagcgacaatttacccgcgactggcaatctgcgctggaagcactggcggcgcttttacccgaac

SEQ ID NO: 449487 - DNA, 75 bp, synthetic construct
  source 1..75: mol_type = other DNA
cagcaggatgcgcagggacgctggcaatttgagtatcagttaacaaggaaggttagcgatgaacatgttctttga

SEQ ID NO: 449488 - DNA, 75 bp, synthetic construct
  source 1..75: mol_type = other DNA
aacaacaactcgcccgcagcttacagataacgaagccacgtttgctggagcaacagcagttacgcgaacagcgtt

SEQ ID NO: 449489 - DNA, 75 bp, synthetic construct
  source 1..75: mol_type = other DNA
aatactgcgtctgacaggcagcgccgaagcgcgcatagacgcagttttgcttcaggcggaacaacaactcgcccg

SEQ ID NO: 449490 - DNA, 75 bp, synthetic construct
  source 1..75: mol_type = other DNA
aacaactcgcccacagcttacaaataacgaaaccacgtttgctggagcgccaacaaattcgtgagcagcgtttgc

SEQ ID NO: 449491 - DNA, 75 bp, synthetic construct
  source 1..75: mol_type = other DNA
tcatgcccattgttaagtggaaaaggctattttcttggcgtgttaatgacggcaacttttggcaactatgcatat

SEQ ID NO: 449492 - DNA, 75 bp, synthetic construct
  source 1..75: mol_type = other DNA
aattttgagctataccaacaccgaaatgaaagaagcgattgcgcagcgtaaaccactggtgactaccgctggccc

SEQ ID NO: 449493 - DNA, 75 bp, synthetic construct
  source 1..75: mol_type = other DNA
ccggtattgcgctgggttgatccaaattttgatcaaagcaaatatgacagcattgtctggaatccgatcacctat

SEQ ID NO: 449494 - DNA, 75 bp, synthetic construct
  source 1..75: mol_type = other DNA
aattttgagttataccaataccgaaatgaaagaagcgattgcgcagcgcaaaccactggttaccactgctggccc

SEQ ID NO: 449495 - DNA, 75 bp, synthetic construct
  source 1..75: mol_type = other DNA
cagaaaaaaaatcgcaattattcaacagactatggagcctggcatgacggtgtcccacgtggcacgtttgcatgg

SEQ ID NO: 449496 - DNA, 75 bp, synthetic construct
  source 1..75: mol_type = other DNA
tatataagcgaagtggaccctatgtgggaaagtgatctgcttacactcgtcctgaatccagaggcagtagttttt

SEQ ID NO: 449497 - DNA, 75 bp, synthetic construct
  source 1..75: mol_type = other DNA
gcaaatgatggtgatggaagagctatcgggcgatatgtggatttttgtctatgagatgcttgcaaaaggatggtt

SEQ ID NO: 449498 - DNA, 75 bp, synthetic construct
  source 1..75: mol_type = other DNA
acgcacccattaacgcttatgaaatggtgatctacccgattgccttttttgtttgcttgtttggtcaaatgcgct

SEQ ID NO: 449499 - DNA, 75 bp, synthetic construct
  source 1..75: mol_type = other DNA
gctattttcttggcgtgttaatgacggcaacttttggcaactatgcatatcttcgtgctgaaagactcgggcaac

SEQ ID NO: 449500 - DNA, 75 bp, synthetic construct
  source 1..75: mol_type = other DNA
gctattttcttggcgtgttaatgacggggacttttggcaactatgcctatctgcgcgcagaaaaacttgggcaac

SEQ ID NO: 449501 - DNA, 75 bp, synthetic construct
  source 1..75: mol_type = other DNA
atgaaagatgcgattgcacagcgtaaaccactggttaccaccgctggacctcgcagtctgattttccgtggtgca

SEQ ID NO: 449502 - DNA, 75 bp, synthetic construct
  source 1..75: mol_type = other DNA
ccatggatactcgcctgtattttgaaggtgagctgattgatgcagcgactaataaaccggttatcaaagtcgttc

SEQ ID NO: 449503 - DNA, 75 bp, synthetic construct
  source 1..75: mol_type = other DNA
tcctgttgcattagtggttgcggggacgcaaatggcgacgggccaccgtaccatggatactcgcctgtattttga

SEQ ID NO: 449504 - DNA, 75 bp, synthetic construct
  source 1..75: mol_type = other DNA
actcacataaacccataaatttgtataccagaagtattctagctactatctggtatacacacttgaaccactggt

SEQ ID NO: 449505 - DNA, 75 bp, synthetic construct
  source 1..75: mol_type = other DNA
aagactaaaatgggttttccctgcccgttccaaaagaagcaaagctggacactattcagatagtaaaagtttgag

SEQ ID NO: 449506 - DNA, 75 bp, synthetic construct
  source 1..75: mol_type = other DNA
cgttctacaagaagcaaggttggtcattactcagatagtaaaagcttaagggaatacctctgtcaggaagctggc

SEQ ID NO: 449507 - DNA, 75 bp, synthetic construct
  source 1..75: mol_type = other DNA
agtggtgaaaagattgctcaaccatcgcaataccaccgaccccactgaaaggtatgcaatgcctgataatgaacg

SEQ ID NO: 449508 - DNA, 75 bp, synthetic construct
  source 1..75: mol_type = other DNA
caagcccgtgaggcagctcggcagttggttcagacaatgattgcaacaaagagaaatcccaacaagattaaaagg

SEQ ID NO: 449509 - DNA, 75 bp, synthetic construct
  source 1..75: mol_type = other DNA
ttattatcaataagttaagcattggtgtgaagcccacccttaaccatgcgggaaaagtcgttttcgaagcaaacc

SEQ ID NO: 449510 - DNA, 75 bp, synthetic construct
  source 1..75: mol_type = other DNA
cttttagagtctctttatgttcttgttgtggttcattttgagttcttattggtttctcattttgcgccacgaact

SEQ ID NO: 449511 - DNA, 75 bp, synthetic construct
  source 1..75: mol_type = other DNA
tccctttttctggcttgcctttttccggcatttgcggatatagtctttccgttgccgcaaaatcggcagccgggc

SEQ ID NO: 449512 - DNA, 75 bp, synthetic construct
  source 1..75: mol_type = other DNA
ctttggtcgagcggctgaatcgctctatctgacccagtcagccgtgagctttcgaatcagacaactggaaaatca

SEQ ID NO: 449513 - DNA, 75 bp, synthetic construct
  source 1..75: mol_type = other DNA
acacgactgaccctacagagcgatacgcaaacccagatcaagatcgtgtttatgaagcactacaacgtatagagt

SEQ ID NO: 449514 - DNA, 75 bp, synthetic construct
  source 1..75: mol_type = other DNA
gggatagtgaagttaggtatgcatgatctccgaaggacctttggccgcgttgcagaagagctaacatcgtatgcg

SEQ ID NO: 449515 - DNA, 75 bp, synthetic construct
  source 1..75: mol_type = other DNA
ctcaacaaagacaaccatcactgtcatacaatccattttcaatcctaaaagtgcagaaaaaatttaggactcgat

SEQ ID NO: 449516 - DNA, 75 bp, synthetic construct
  source 1..75: mol_type = other DNA
ccataaaccggggcagatgattgtggatgagtgcttcggcgcaggcaccgatgcccgttcactgaccggtgcgca

SEQ ID NO: 449517 - DNA, 75 bp, synthetic construct
  source 1..75: mol_type = other DNA
aaccgctaccgggcgtattgtgtgtcacgaacggtgcaatagtgatccacacccaacgcctgaaatcagatccag

SEQ ID NO: 449518 - DNA, 75 bp, synthetic construct
  source 1..75: mol_type = other DNA
ttttacgccagaaaaagccgttcatctggaatgcaacgaacattacccgccagctgcgtagccagctcatcagtc

SEQ ID NO: 449519 - DNA, 75 bp, synthetic construct
  source 1..75: mol_type = other DNA
gctgctcacggctgcaatgcgcatcgacacgcgtctgctcgctttgcttgctcgtgccgatctgcttggtcgcca

SEQ ID NO: 449520 - DNA, 75 bp, synthetic construct
  source 1..75: mol_type = other DNA
gacggtaatatggtgatggatgcgagcggggcgatgtcccggttaccggttggtatcaatgcaacgcgtcagatt

SEQ ID NO: 449521 - DNA, 75 bp, synthetic construct
  source 1..75: mol_type = other DNA
tttaagggaagtcttgatcgaacggatgatgattcacattctgcaagtagtggcagcagggctacccatgatgct

SEQ ID NO: 449522 - DNA, 75 bp, synthetic construct
  source 1..75: mol_type = other DNA
cagcctgctggttaatgtccgtacatcggtgcagattattgataacagtgacctggtccaagtccatcgggtgga

SEQ ID NO: 449523 - DNA, 75 bp, synthetic construct
  source 1..75: mol_type = other DNA
tgtgaagggaaaacacgcagacatttcccacaccaggctgagatatcgcaggaggagaaactgcaacctgttctt

SEQ ID NO: 449524 - DNA, 75 bp, synthetic construct
  source 1..75: mol_type = other DNA
aatgtctcggtatatatatgaaaattagaccacagcagcacctaattaacatcctgacttcaaccaaacaacatc

SEQ ID NO: 449525 - DNA, 75 bp, synthetic construct
  source 1..75: mol_type = other DNA
ttgatggtgtatttcaacctttgagatatgagcgtgactgtgaaaaagcggttgtggccgctggcggtgtagtta

SEQ ID NO: 449526 - DNA, 75 bp, synthetic construct
  source 1..75: mol_type = other DNA
ctggaatgcgacgaacattacccgccagctgcgtagccagctcatcagtctgtttacggcttatggtgcacgggt

SEQ ID NO: 449527 - DNA, 75 bp, synthetic construct
  source 1..75: mol_type = other DNA
aaactgacactgtccgtcctgaaaggctatgtgtttgccctgatgtggctgcagacctggccgttgttgtatgcc

SEQ ID NO: 449528 - DNA, 75 bp, synthetic construct
  source 1..75: mol_type = other DNA
gtatcattctcatttcaaacttttgttatgcttctgattgctttgaaactactgggaaagcatataatatagatc

SEQ ID NO: 449529 - DNA, 75 bp, synthetic construct
  source 1..75: mol_type = other DNA
tggctgcaaaatagcgataaaaatgcgttgattcgcgatctattgaaaattaacgtgctggatgaagtgtattaa

SEQ ID NO: 449530 - DNA, 75 bp, synthetic construct
  source 1..75: mol_type = other DNA
tgtaataccgtcacccgcgacgatattccgtttgccatctggtcagggcttcgccccgacaccccgtatcagtgc

SEQ ID NO: 449531 - DNA, 75 bp, synthetic construct
  source 1..75: mol_type = other DNA
atgattacaagtatacgttaccgcggcttctcattttattacaaaaataatgataataaatataaagaaatcttt

SEQ ID NO: 449532 - DNA, 75 bp, synthetic construct
  source 1..75: mol_type = other DNA
tgatgataccaaagtatcgttgattgatacgaaatatggtcgctatgtttttaaagtctttgccccgaaaacgaa

SEQ ID NO: 449533 - DNA, 75 bp, synthetic construct
  source 1..75: mol_type = other DNA
ctaaaacgcctcagaaatcgggacaggatgtgcaaatgtaataccgtcacccgcgacgatattccgtttgccatc

SEQ ID NO: 449534 - DNA, 75 bp, synthetic construct
  source 1..75: mol_type = other DNA
gtagtggctgcagcaattgagcagaactatgacgaacgcggcatcgtgtggcctgacgctatcgctccgttccag

SEQ ID NO: 449535 - DNA, 75 bp, synthetic construct
  source 1..75: mol_type = other DNA
aattccaggtgctggcgcagagtggtgaagatgatgtggtcttctccgacacctctgactacgcggcaaacattg

SEQ ID NO: 449536 - DNA, 75 bp, synthetic construct
  source 1..75: mol_type = other DNA
gatcgcgatgtcgcaaccccggaagttgcggatatccgtaacgtagtggctggcgatccaagcccggatggtcag

SEQ ID NO: 449537 - DNA, 75 bp, synthetic construct
  source 1..75: mol_type = other DNA
aagcggttgaaggcagtagcttcccgctggttgcgctgctggtgcgcggtgatcacgagctgaacgaagttaaag

SEQ ID NO: 449538 - DNA, 75 bp, synthetic construct
  source 1..75: mol_type = other DNA
gtggcgattctgccgatgaacatgcacaaatccttccgcgtacaggagcttgctgagaaactgtacagcgaactg

SEQ ID NO: 449539 - DNA, 75 bp, synthetic construct
  source 1..75: mol_type = other DNA
aattatccctactcgagaaattcagtaaagaagttcgacattatctccatacgatccctgaagcctccggagaag

SEQ ID NO: 449540 - DNA, 75 bp, synthetic construct
  source 1..75: mol_type = other DNA
gcacgccgcacgcctttctcttgttcgcgattacgtcctctcgttcgctggccgcctgccggttgcggaggtgcg

SEQ ID NO: 449541 - DNA, 75 bp, synthetic construct
  source 1..75: mol_type = other DNA
ggaacccgagttacttattggcgacaccagacgcgccgtgcgtctttttttacgtcgttgctcaggcacacccat

SEQ ID NO: 449542 - DNA, 75 bp, synthetic construct
  source 1..75: mol_type = other DNA
aacaacataaacacgttttagctaagattgacacactcgactgctctcccgaatttacatcagccaacttttcgg

SEQ ID NO: 449543 - DNA, 75 bp, synthetic construct
  source 1..75: mol_type = other DNA
ccgctttatgccatatggctgcaaaatagcgataaaaatgcgttgattcgcgatctattgaaaattaacgtgctg

SEQ ID NO: 449544 - DNA, 75 bp, synthetic construct
  source 1..75: mol_type = other DNA
ccatacaggcttacagttcgaagcgcgaattgcccaacggcagtctctggtaaaacagctgcatgaacgccagct

SEQ ID NO: 449545 - DNA, 75 bp, synthetic construct
  source 1..75: mol_type = other DNA
gtttccaataaggccggtattcctacccccgttcgggtcaccacccatgagcgtaggaactccggtggtggcatt

SEQ ID NO: 449546 - DNA, 75 bp, synthetic construct
  source 1..75: mol_type = other DNA
gcagggacaatcttttgataaggcggcatatcctttactggctattgcttatccatcgggcgtaattcctgatgc

SEQ ID NO: 449547 - DNA, 75 bp, synthetic construct
  source 1..75: mol_type = other DNA
ggcgagccgccaccagttcggcgggaaaccacgcgcacaccgtagccattggtgcacataatcacaccgtaggta

SEQ ID NO: 449548 - DNA, 75 bp, synthetic construct
  source 1..75: mol_type = other DNA
atgtcacagacagccatcacactggcgtttgaaaactggaaagcacagcagggtgcaacgggtgaaccggtacta

SEQ ID NO: 449549 - DNA, 75 bp, synthetic construct
  source 1..75: mol_type = other DNA
ggtgatgaacaggtaggcggtagtcgtcaaaacttgatccatgtttcagctgggcttcgtgaagcaaaaagctgg

SEQ ID NO: 449550 - DNA, 75 bp, synthetic construct
  source 1..75: mol_type = other DNA
ttcgaagggttaaacaattacctgacccgtaagcagaaagtgatcagcacaccggtggatgttgagccaggtgta

SEQ ID NO: 449551 - DNA, 75 bp, synthetic construct
  source 1..75: mol_type = other DNA
atccatcgggcgtaattcctgatgcgcgtgggcggacgatcaaagggaaaccagacggccgcgcagttctctcct

SEQ ID NO: 449552 - DNA, 75 bp, synthetic construct
  source 1..75: mol_type = other DNA
cgtcatgttccatagcgacagtaataatgccgatgtcagtctttaccaccacttagtttgccgtttaaccagatt

SEQ ID NO: 449553 - DNA, 75 bp, synthetic construct
  source 1..75: mol_type = other DNA
gcgaactggaaaagcaggttcgccgcctggaggaacacaatacgatattaaaaaaggctacaaccgcgctcttga

SEQ ID NO: 449554 - DNA, 75 bp, synthetic construct
  source 1..75: mol_type = other DNA
gttaccgtgccggacgtctgatgaaatatctgaacctgagcagttgtcagcccggaaaacatcagcataaaaatg

SEQ ID NO: 449555 - DNA, 75 bp, synthetic construct
  source 1..75: mol_type = other DNA
tcggctggagcctgtcagcgaatgccgatactgccctgataagcagtgccctgcggatggcgtatgaggtgcgtg

SEQ ID NO: 449556 - DNA, 75 bp, synthetic construct
  source 1..75: mol_type = other DNA
atgctgacccaaaacggcgtcccgatgagccgttatcgtgccgggcggctgatgaaatacctgaacctgagcagt

SEQ ID NO: 449557 - DNA, 75 bp, synthetic construct
  source 1..75: mol_type = other DNA
gccgtgtggaaatccgcccaccttgccgggcgccggtgctgtgtggaaatccgcccaccttgccgggcgccggtg

SEQ ID NO: 449558 - DNA, 75 bp, synthetic construct
  source 1..75: mol_type = other DNA
actcagttttctaaccagggcacgatggcaggggctgcgctggtaaaagacgcgatgtataacggttctttgttg

SEQ ID NO: 449559 - DNA, 75 bp, synthetic construct
  source 1..75: mol_type = other DNA
tcacaacgtgggggcgggcgtcattaccgatggtcatctgctacacgcaggcagcagtagcctcgtggaaatagg

SEQ ID NO: 449560 - DNA, 75 bp, synthetic construct
  source 1..75: mol_type = other DNA
cttgccatcatggtgaatttatttaacccacaaaaaatactgattggttcaccgttaagtaaagcggcagatatc

SEQ ID NO: 449561 - DNA, 75 bp, synthetic construct
  source 1..75: mol_type = other DNA
ccaccttgccgggcgccggtgccgtgtggaaatccgcccaccttgccgggcgccggtgctgtgtgggaatccgcc

SEQ ID NO: 449562 - DNA, 75 bp, synthetic construct
  source 1..75: mol_type = other DNA
cagaaattttcctgaatcatcaatactatacttagcaagtaaaggtgttttctcatttatctgcttgagtgcagg

SEQ ID NO: 449563 - DNA, 75 bp, synthetic construct
  source 1..75: mol_type = other DNA
ctggtgttttttacgtcagacatatgatatccgtaacatggaaaactcatggttccggtaattatgtggatgaga

SEQ ID NO: 449564 - DNA, 75 bp, synthetic construct
  source 1..75: mol_type = other DNA
ctgaaaaaagttgcgccgaagccaggttggctggaaaccggggcttctgtttttccggtgctggctattgtattg

SEQ ID NO: 449565 - DNA, 75 bp, synthetic construct
  source 1..75: mol_type = other DNA
aaaatgcctgtcaggagcatacgtgtttgccgaatctactcgagcgtcagttcgctgtaccggagccagacaggg

SEQ ID NO: 449566 - DNA, 75 bp, synthetic construct
  source 1..75: mol_type = other DNA
tgagtcgttaccgtgccgggcggctgatgaaacatctgaatctgagcagttgtcagcccggaaaacatcagtaca

SEQ ID NO: 449567 - DNA, 75 bp, synthetic construct
  source 1..75: mol_type = other DNA
aacggttcacgatagccgccagactaagtgacagccacacggttgtcagcctgtgttctgctctggaaatacacc

SEQ ID NO: 449568 - DNA, 75 bp, synthetic construct
  source 1..75: mol_type = other DNA
tgctgaaatggcatcccgtactgagagtatgagtgggcagatgagtgaagatctgtcgcaacagtttgcacagta

SEQ ID NO: 449569 - DNA, 75 bp, synthetic construct
  source 1..75: mol_type = other DNA
caggcagtgtggttgacggtaattactcctacggcaacatgcagacggaaaacgtgaacggcttcagctggagca

SEQ ID NO: 449570 - DNA, 75 bp, synthetic construct
  source 1..75: mol_type = other DNA
tgtcagcccggaaaacatccatacaaaaatgcccgtcaggagcatacgtgtttgccgaatctgctcgagcgccaa

SEQ ID NO: 449571 - DNA, 75 bp, synthetic construct
  source 1..75: mol_type = other DNA
tcgctgtaccggagccagacagggtatggtgcggagatattacgtatatctgggcaggaaatcgctggtgctatc

SEQ ID NO: 449572 - DNA, 75 bp, synthetic construct
  source 1..75: mol_type = other DNA
cctggtgggtcgggcgacggctatctggatgagtttcgataaacaggaaggcgaatggccaactggcgttcgttt

SEQ ID NO: 449573 - DNA, 75 bp, synthetic construct
  source 1..75: mol_type = other DNA
tgattacatcaagcgtgcggtgggcttgcctggcgataaagttacttacgatccggtcacgaaggaactaacgat

SEQ ID NO: 449574 - DNA, 75 bp, synthetic construct
  source 1..75: mol_type = other DNA
gaaatatcaacagcttctctggcgttacaggataaagcaaagtgtcagccgacggggaaactgctgggataacag

SEQ ID NO: 449575 - DNA, 75 bp, synthetic construct
  source 1..75: mol_type = other DNA
ctacaacagcgtcaggcctcaccattacaacggtgggttgactccggaagaatcagagaatagatatcgttttta

SEQ ID NO: 449576 - DNA, 75 bp, synthetic construct
  source 1..75: mol_type = other DNA
ggctctgcaggcgcgcgcacgctggctgaaatgctgacccaaaacggcgtcccgatgagccgttatcgtgccgga

SEQ ID NO: 449577 - DNA, 75 bp, synthetic construct
  source 1..75: mol_type = other DNA
acgatggcaggggctgcactggtaaaagacgcgatgtataacggttctttgttgattcgtctgttgcagggttaa

SEQ ID NO: 449578 - DNA, 75 bp, synthetic construct
  source 1..75: mol_type = other DNA
agccagccagatcatccgccagaatgtcaccatcaatgcgctgaaggaggggatcaccagttatgccgcacgtaa

SEQ ID NO: 449579 - DNA, 75 bp, synthetic construct
  source 1..75: mol_type = other DNA
aagcaccgactttttgtcccgcaatccggaaatcgccaatctttttcaggattatgtgcagaactgtgtgatggg

SEQ ID NO: 449580 - DNA, 75 bp, synthetic construct
  source 1..75: mol_type = other DNA
gtgatctcctttcatgaaaatacgcagccgttgctgtatgccattctgaacagtgccatgacattctatgcaaag

SEQ ID NO: 449581 - DNA, 75 bp, synthetic construct
  source 1..75: mol_type = other DNA
gctattctgacaaacaccagttcaccggagattgcagaacgtcgtcgggcgatggcctggtcttttgtgcaggaa

SEQ ID NO: 449582 - DNA, 75 bp, synthetic construct
  source 1..75: mol_type = other DNA
aagtaaaaaagaatactatggttttacgataattagaactggagaacgtattttaagacttgatgataatcatat

SEQ ID NO: 449583 - DNA, 75 bp, synthetic construct
  source 1..75: mol_type = other DNA
ttttgtcgggatgcactgttggtgattatgttcgcccattgttgcccggtaatatatctttacaagacggacggg

SEQ ID NO: 449584 - DNA, 75 bp, synthetic construct
  source 1..75: mol_type = other DNA
gcggtaaatcacgcaccattcgtcgcattcaatccatccactatctggatcgtaaagacccggaaatgcaggtgc

SEQ ID NO: 449585 - DNA, 75 bp, synthetic construct
  source 1..75: mol_type = other DNA
ctgcaaagcgatgggcatcgaagccggtaaagtattgcgtctgggcgatatggcgcgcagcgataacgtcatctt

SEQ ID NO: 449586 - DNA, 75 bp, synthetic construct
  source 1..75: mol_type = other DNA
aaggacgatcaggaagcaatctctgtaattgatgcttataatcagatcaatgagataagagaaaaaaataagctc

SEQ ID NO: 449587 - DNA, 75 bp, synthetic construct
  source 1..75: mol_type = other DNA
caactcggcgtgcgcgtatttgccattcctgatggcgatgtcgcagcctcgattcttacctgtatgccagacagc

SEQ ID NO: 449588 - DNA, 75 bp, synthetic construct
  source 1..75: mol_type = other DNA
caactcggcgtacgcgtatttgctattccggatggcgacgttgcggcctcaattctcacctgtatgccggacagt

SEQ ID NO: 449589 - DNA, 75 bp, synthetic construct
  source 1..75: mol_type = other DNA
gccacgatgccgttatcgcagaaatgcagcaactcggcgtgcgcgtatttgctattccggatggtgacgttgcgg

SEQ ID NO: 449590 - DNA, 75 bp, synthetic construct
  source 1..75: mol_type = other DNA
tgacccgcagccatgaatatgctgaaatggcatcccgtactgaaagcatgagtgggcagatgagtgaagacttgt

SEQ ID NO: 449591 - DNA, 75 bp, synthetic construct
  source 1..75: mol_type = other DNA
ggcattacaactggctgtgcagattacttgtggtgtagatcttttaaactttggtgaatatccaacggggttagt

SEQ ID NO: 449592 - DNA, 75 bp, synthetic construct
  source 1..75: mol_type = other DNA
ccgtgctggagaggcagcgtaaggccaaaggagtattaccgttcaagaaatctaaagttgctatggaaggcgttg

SEQ ID NO: 449593 - DNA, 75 bp, synthetic construct
  source 1..75: mol_type = other DNA
atgcaaagcagaatggtgcaccggtcgtgctctctgaactctctcagatacagctgaaatactccgatctggcgt

SEQ ID NO: 449594 - DNA, 75 bp, synthetic construct
  source 1..75: mol_type = other DNA
atggccatcccgtcgtctctgagtctcgtacagctgcattctgggcagatgcaagtcttccagtcgccacatcgt

SEQ ID NO: 449595 - DNA, 75 bp, synthetic construct
  source 1..75: mol_type = other DNA
agcctgacactctgcgcggcgtagcgttgcattttgtagtgcttgatgaatttcaggatatgaaggctgacacct

SEQ ID NO: 449596 - DNA, 75 bp, synthetic construct
  source 1..75: mol_type = other DNA
acaacgtattcatcaggtggtttttatgacgaagaaacagaggcatatgtaaactccgggcaggagtcttactgt

SEQ ID NO: 449597 - DNA, 75 bp, synthetic construct
  source 1..75: mol_type = other DNA
agacaactggtcagtgacagttacagttatttctacggctccagtcagtctgccagccagattatgcgccagaac

SEQ ID NO: 449598 - DNA, 75 bp, synthetic construct
  source 1..75: mol_type = other DNA
ggtgctctcggaaatttcacagatacagctgaaatactccgatctggcttccactgccgggtatctttccatgat

SEQ ID NO: 449599 - DNA, 75 bp, synthetic construct
  source 1..75: mol_type = other DNA
ccggaggcaagacctggcattattatgtgcagcagttatttggcggcagaccggaccctgacctgttattcaggg

SEQ ID NO: 449600 - DNA, 75 bp, synthetic construct
  source 1..75: mol_type = other DNA
gaaacacgcgccgcaggatgccgaagctattctgacaaacaccagttcaccggagattgcagaacgccgtcgggc

SEQ ID NO: 449601 - DNA, 75 bp, synthetic construct
  source 1..75: mol_type = other DNA
tggcgcaggtgttagaggtggtggtcgggcaagtattgactggagtgatgaggatgcgcatcaggccagcagtgg

SEQ ID NO: 449602 - DNA, 75 bp, synthetic construct
  source 1..75: mol_type = other DNA
cgatggtggccacgggaaattatgacgaagcggttatcgggcatattaacgacaacatgaatgaatgccacccgg

SEQ ID NO: 449603 - DNA, 75 bp, synthetic construct
  source 1..75: mol_type = other DNA
cgctctcgactggcgaccgcgccagctgcgacagaaatatcatcagatgaaagacctgattcgcgaaacgcgtaa

SEQ ID NO: 449604 - DNA, 75 bp, synthetic construct
  source 1..75: mol_type = other DNA
taaaaaactggggcacgaaccggagtggtcagaactggccgtggaagggatctcgcatgaagattatctcgaata

SEQ ID NO: 449605 - DNA, 75 bp, synthetic construct
  source 1..75: mol_type = other DNA
aatctcaaagagattgcgctggtattagggctaaccgaggcccgaatttgtcaactgaataaacagatcgcgcag

SEQ ID NO: 449606 - DNA, 75 bp, synthetic construct
  source 1..75: mol_type = other DNA
atgctgacattcattgaactccttattggggttatggttattgtgggtgtagctcgctacatcattaaagggtat

SEQ ID NO: 449607 - DNA, 75 bp, synthetic construct
  source 1..75: mol_type = other DNA
atctgtatgctgattgcctccattctggagtttattcgtagctttaatacgcaaaaagtcttttccggccttgaa

SEQ ID NO: 449608 - DNA, 75 bp, synthetic construct
  source 1..75: mol_type = other DNA
ccgacatcaggtgacgtagtactggcggcgcaggcttccgaaatgtcgctgattgacttcgccttcaaaacgaca

SEQ ID NO: 449609 - DNA, 75 bp, synthetic construct
  source 1..75: mol_type = other DNA
ggcaggactttggtaaagctctgggcatgttgttgcgcccacagctacaacaactcccgttggcagtcattgacg

SEQ ID NO: 449610 - DNA, 75 bp, synthetic construct
  source 1..75: mol_type = other DNA
ggcggtcgcctgctggaaaccgacagccaggggcgcgtggtttacgctcataaaccggggcagatgattgtggat

SEQ ID NO: 449611 - DNA, 75 bp, synthetic construct
  source 1..75: mol_type = other DNA
cccggcgcgactactacaccgatgcctggtggatggtggcggtggcaacaacccccgatgcgccttacagcctcg

SEQ ID NO: 449612 - DNA, 75 bp, synthetic construct
  source 1..75: mol_type = other DNA
gcaactggaaggggcggaaacgctcgccagccttgacgaactgctgaacggcgaagggccaggcattccgcttgc

SEQ ID NO: 449613 - DNA, 75 bp, synthetic construct
  source 1..75: mol_type = other DNA
ctttcagtccggctcaaattaccatcgaaacagcattttttgaagcatcacataaactgaccgaacatctgctgg

SEQ ID NO: 449614 - DNA, 75 bp, synthetic construct
  source 1..75: mol_type = other DNA
acaatctggctggagggcgtacaactgccgctgcgcaatttgccagtggcgatcccgattgatgaaacggatctg

SEQ ID NO: 449615 - DNA, 75 bp, synthetic construct
  source 1..75: mol_type = other DNA
gtggcttatcgcgggatggcagatgcgtttgctaacgtggtgatgctgctggttgccgctggggtattcgctcag

SEQ ID NO: 449616 - DNA, 75 bp, synthetic construct
  source 1..75: mol_type = other DNA
tatgaagccaaccgcggcaatgcgatgaaaacggttcagggctggcccgtcgcctcaagttacctttccagcacg

SEQ ID NO: 449617 - DNA, 75 bp, synthetic construct
  source 1..75: mol_type = other DNA
atgtcagaggtaaaaacagatcatccagaaattgcggagttaagcaagccacagctacgcatggtcgatctaaac

SEQ ID NO: 449618 - DNA, 75 bp, synthetic construct
  source 1..75: mol_type = other DNA
ctgttatctctcctggcatgaagctgccgggcgcgataaaggccatcagtggatggaagagcaattagtctcaat

SEQ ID NO: 449619 - DNA, 75 bp, synthetic construct
  source 1..75: mol_type = other DNA
gagctggtcactgttctcgccggaccagtcgaacaacacatctgtaaatggttgcggtgcaggatatgtcccggt

SEQ ID NO: 449620 - DNA, 75 bp, synthetic construct
  source 1..75: mol_type = other DNA
ccactgacggttactctggctaattacgcttccgcgacagacacgctggacgctatttttacggtgccaaccagc

SEQ ID NO: 449621 - DNA, 75 bp, synthetic construct
  source 1..75: mol_type = other DNA
agcaaggcagccactattcaatgatttaagttcgttgtctgcgcgttatccgaataacacgtttgtcactgaaac

SEQ ID NO: 449622 - DNA, 75 bp, synthetic construct
  source 1..75: mol_type = other DNA
tagaggcggtcacaaccgcaaggattaccacctcaccctcgacacagccaaagagcttgcgatggttgacgactg

SEQ ID NO: 449623 - DNA, 75 bp, synthetic construct
  source 1..75: mol_type = other DNA
gaagtgcccattctgacaaccagttctgctgaactggcacagcaacagattgcgatgcttaatggttgcacctgg

SEQ ID NO: 449624 - DNA, 75 bp, synthetic construct
  source 1..75: mol_type = other DNA
atgctgacattcattgagctccttattggagttatggttattgtgggtgtagctcgctacatcattaaagggtat

SEQ ID NO: 449625 - DNA, 75 bp, synthetic construct
  source 1..75: mol_type = other DNA
acgtgtatttcatctttgtgtttgcagcccgttagacagcattctgacctcgcagatttataatcacattgagca

SEQ ID NO: 449626 - DNA, 75 bp, synthetic construct
  source 1..75: mol_type = other DNA
tgatgtttataacgaacaacatgcggcggtttcgctcgatcgtttcgcgtcatttagtcaaccttggtatgacac

SEQ ID NO: 449627 - DNA, 75 bp, synthetic construct
  source 1..75: mol_type = other DNA
tagaggcggtcacaaccgcaaggattaccacctcaccctcgacacagccaaagaaacggcgatggttgacgactg

SEQ ID NO: 449628 - DNA, 75 bp, synthetic construct
  source 1..75: mol_type = other DNA
ttcatgggccgatggcatcctggggcgtcgatgcccccggcgaagtgcgtcatacccatgaactgccttcgcgct

SEQ ID NO: 449629 - DNA, 75 bp, synthetic construct
  source 1..75: mol_type = other DNA
gtcatgggggtagtgacaaaatgtcacccgtattagagttattattagataaaacattagatgataatattatag

SEQ ID NO: 449630 - DNA, 75 bp, synthetic construct
  source 1..75: mol_type = other DNA
tgatgatgaagaagaccctgaagaggaattgaaacgtgaacagcgtaaagcagaaattaaagaaagattcagaaa

SEQ ID NO: 449631 - DNA, 75 bp, synthetic construct
  source 1..75: mol_type = other DNA
tagtgaccataaaaacacacagtgccccgccactgatgatgagatggaccccttcgatgattaccttgatgaaga

SEQ ID NO: 449632 - DNA, 75 bp, synthetic construct
  source 1..75: mol_type = other DNA
gcgaatggtgttgccacggttacggtcacccaggccaacggccctggtgtaaaaacgccgttggtcgcgagcctc

SEQ ID NO: 449633 - DNA, 75 bp, synthetic construct
  source 1..75: mol_type = other DNA
agtcgggttcgtgatttgggacgtcgcgaatacagtaaacatatgttacgtcttcgcagggaagggcatattaac

SEQ ID NO: 449634 - DNA, 75 bp, synthetic construct
  source 1..75: mol_type = other DNA
aatacagcgcaagctgattctacaggagaaaagagaagagcttgaaatgcttttagacaaagaaagttttgatat

SEQ ID NO: 449635 - DNA, 75 bp, synthetic construct
  source 1..75: mol_type = other DNA
acacctttaccagttcggcgggcgtcaccttcaaacgacccctgctgaaaaccgaaaccagctcaggcttatcga

SEQ ID NO: 449636 - DNA, 75 bp, synthetic construct
  source 1..75: mol_type = other DNA
actgctgcagggaactggtgggattatgacatgatggcggtagcgggcggtagctggagtaaccaggcgtttgtt

SEQ ID NO: 449637 - DNA, 75 bp, synthetic construct
  source 1..75: mol_type = other DNA
gggccatatggcggaaacctttaccagcagcgaaggcgtcaccttcaaacggcctttcctcaaagccgaactctc

SEQ ID NO: 449638 - DNA, 75 bp, synthetic construct
  source 1..75: mol_type = other DNA
atgtctaaatataacccaaatcagttttataaatttgatgtgcgaatctctcaactttcagaagaaattaacgca

SEQ ID NO: 449639 - DNA, 75 bp, synthetic construct
  source 1..75: mol_type = other DNA
cagagaaatcactgatgtgagtgttgatagtgaccataaaaacacacagtgccccgccactgatgatgagttgga

SEQ ID NO: 449640 - DNA, 75 bp, synthetic construct
  source 1..75: mol_type = other DNA
tggcggcccaacgttgcctactttgaaggcgacaacgaaatgaaacgtaccgcaaaagcgattccagttcaggtg

SEQ ID NO: 449641 - DNA, 75 bp, synthetic construct
  source 1..75: mol_type = other DNA
tgaaggcccgtgattacacttttagtcgaccaaaactggcggcggaagtcgataatgaaggcggtacggttaacg

SEQ ID NO: 449642 - DNA, 75 bp, synthetic construct
  source 1..75: mol_type = other DNA
cgcggtctgtatgcccatatgctcaatggtgaagtccctgaccttgagttgggcggcgtattgattgcgctacgt

SEQ ID NO: 449643 - DNA, 75 bp, synthetic construct
  source 1..75: mol_type = other DNA
ttggcgattctgctgcacaaactcggttttcccgtggtggttcacggggttagcgaagatccaacccgcgtgctg

SEQ ID NO: 449644 - DNA, 75 bp, synthetic construct
  source 1..75: mol_type = other DNA
gccgatgtcgtgttattagggccgcagattgcttatatgttgcccgaaatcggtgatgctgccaacttactgatt

SEQ ID NO: 449645 - DNA, 75 bp, synthetic construct
  source 1..75: mol_type = other DNA
gcataccaacagtatcaggatcatttccataaactgaaagtctcactcccaaaacttcaggatgaatgctggtgg

SEQ ID NO: 449646 - DNA, 75 bp, synthetic construct
  source 1..75: mol_type = other DNA
acgcagccggtattctcgaaaacgaagccattgatatctggaatgtcaccaacggcaagcgtttctccacttatg

SEQ ID NO: 449647 - DNA, 75 bp, synthetic construct
  source 1..75: mol_type = other DNA
tggcggccaaacgtcgcctattttgaaggcgacaacgaaatgaaacgtaccgcgaaagccattccggtacaggtt

SEQ ID NO: 449648 - DNA, 75 bp, synthetic construct
  source 1..75: mol_type = other DNA
cgacaggaagtgatggtaaagcgacttttgatgtgacgcaaaacgagacttatgggctggcaactccgctcactg

SEQ ID NO: 449649 - DNA, 75 bp, synthetic construct
  source 1..75: mol_type = other DNA
atttcaagagttatacagtgaacatcctaatggtgcgatagggaccgatttaggccttccgctgactaacacctg

SEQ ID NO: 449650 - DNA, 75 bp, synthetic construct
  source 1..75: mol_type = other DNA
gccgagcatccagcggggcagtcaaccatggctaataatgaatcatggctttctttgaatacggcagcaaaaaat

SEQ ID NO: 449651 - DNA, 75 bp, synthetic construct
  source 1..75: mol_type = other DNA
ataacaataatgaagactggccgtactttaccccaacacagaaatcagatgcgagtgtgagcccttgtgaagtag

SEQ ID NO: 449652 - DNA, 75 bp, synthetic construct
  source 1..75: mol_type = other DNA
caatcgacgacgactattaatggatacgctttaatgctctgtctgacgcagccacattcggcaccagcaagcctt

SEQ ID NO: 449653 - DNA, 75 bp, synthetic construct
  source 1..75: mol_type = other DNA
gcgggacaatactgacagatttggggttgcctataactgccggaagtggaaattggtggacttatgaaatgagca

SEQ ID NO: 449654 - DNA, 75 bp, synthetic construct
  source 1..75: mol_type = other DNA
ttggcgtggttaaaattcaggtctggttaaacgactggaataatgattttttcaatgcgctaagccagaaagaaa

SEQ ID NO: 449655 - DNA, 75 bp, synthetic construct
  source 1..75: mol_type = other DNA
tctttgtattaatatccgtaaacaaaacatggttaattaaactgctgactattcgctggcgcgaatggttaacag

SEQ ID NO: 449656 - DNA, 75 bp, synthetic construct
  source 1..75: mol_type = other DNA
ttcgcatcagtgatttgcctgaacatctgtttaccgaacaggcgacagatgatgtcagcgccacacgtctttcaa

SEQ ID NO: 449657 - DNA, 75 bp, synthetic construct
  source 1..75: mol_type = other DNA
tatttcttgacgaaactacctctcatcttgaggaacaagaggcaatccgcttactgcgtttagtgcgagaaaaac

SEQ ID NO: 449658 - DNA, 75 bp, synthetic construct
  source 1..75: mol_type = other DNA
cctcaagcggcgtcattatggtcacacatcaacctggtgtctggagcctggctgatgatatttgcgacattagcg

SEQ ID NO: 449659 - DNA, 75 bp, synthetic construct
  source 1..75: mol_type = other DNA
cttgcagagctggcagcggttatcgaccggttgtatgaatttcatcaacttactgaacagcgcccgacaaataaa

SEQ ID NO: 449660 - DNA, 75 bp, synthetic construct
  source 1..75: mol_type = other DNA
ccacccttatgtgtctggtgaaaaggttgcacctgatccagaacatctcatgcgttcgcgttactgcgcttttgt

SEQ ID NO: 449661 - DNA, 75 bp, synthetic construct
  source 1..75: mol_type = other DNA
gagtgaagatccgactcgcgtgctgaccgaaaccatttttcaactgatggggattgcgccaacgctacatgccgg

SEQ ID NO: 449662 - DNA, 75 bp, synthetic construct
  source 1..75: mol_type = other DNA
aatcgctgaaaatccagatggcttgctgcctggtggctacgggtgaagcggcaactatcagcgacggcctggcgc

SEQ ID NO: 449663 - DNA, 75 bp, synthetic construct
  source 1..75: mol_type = other DNA
gacgttgcgccagctcagtctgctgggattcagcgacggtacatattgtgctgaagggatcattggcacttgtgc

SEQ ID NO: 449664 - DNA, 75 bp, synthetic construct
  source 1..75: mol_type = other DNA
aacctcctgggagcgatgcattaagctgatgaaacgggagacatggaacgtaccacaccaggcccagggcgtgac

SEQ ID NO: 449665 - DNA, 75 bp, synthetic construct
  source 1..75: mol_type = other DNA
caggttacgggcggacgtattcaggaaatgtctgcattactggggattggtcgcactacgctgtggcgaaaaatg

SEQ ID NO: 449666 - DNA, 75 bp, synthetic construct
  source 1..75: mol_type = other DNA
atgagtcttttaaatgacgttcagaaattcattgaagcccatccggggtgtacttccggagacattgcggatgct

SEQ ID NO: 449667 - DNA, 75 bp, synthetic construct
  source 1..75: mol_type = other DNA
agatgattctcaagggccggaaaaaataaaattattttcaatgctaaatcatgaaaaaggtctatactatttgac

SEQ ID NO: 449668 - DNA, 75 bp, synthetic construct
  source 1..75: mol_type = other DNA
cttgatggggattcacgacaaaacttagctactttctgtcaaacatggattgatgatgaaatccgtgagttgctt

SEQ ID NO: 449669 - DNA, 75 bp, synthetic construct
  source 1..75: mol_type = other DNA
gcagttatccgctgaatgaatccgtcgccattgctcgcgcgcgtgacaaattgcgctcaatgcagttactggcgc

SEQ ID NO: 449670 - DNA, 75 bp, synthetic construct
  source 1..75: mol_type = other DNA
cagaaaaactgccgcaggttgcaagcccgctgactttcgcgactgaagaagaaattcgtgccgtggttaaagccg

SEQ ID NO: 449671 - DNA, 75 bp, synthetic construct
  source 1..75: mol_type = other DNA
gcccgggttcactgggtccggtaaacatgccgattccggttgtaattgaccgtaccgttgcggcgatgagtgatt

SEQ ID NO: 449672 - DNA, 75 bp, synthetic construct
  source 1..75: mol_type = other DNA
tgaagacgatgtggtcttctccgacacctctgactatgcagcgaacattgaactggcagaagctatcgcgccgaa

SEQ ID NO: 449673 - DNA, 75 bp, synthetic construct
  source 1..75: mol_type = other DNA
atgagtctgtttaatgacgttcagaaattcattgaagcccatccggggtgtacttccggcgacattgcggatgct

SEQ ID NO: 449674 - DNA, 75 bp, synthetic construct
  source 1..75: mol_type = other DNA
atgagtctcttgaatgacgttcagaaattcattgaagcccatccggggtgtacttccggtgacattgcggatgct

SEQ ID NO: 449675 - DNA, 75 bp, synthetic construct
  source 1..75: mol_type = other DNA
atgagtctctttaatgacgttcagaaattcattgaagcccatccggggtgtacttccggggacattgcggatgct

SEQ ID NO: 449676 - DNA, 75 bp, synthetic construct
  source 1..75: mol_type = other DNA
atcgacatcgcgagtaaaatgatccgctggatcgaacgccacgctacgacagaatattgcctgaaaacgggtggt

SEQ ID NO: 449677 - DNA, 75 bp, synthetic construct
  source 1..75: mol_type = other DNA
gtcgtgctggcggagacgcgtcaggcggcggaaagcgtgattgacgctttccgcggtctgaacgcgcatattctg

SEQ ID NO: 449678 - DNA, 75 bp, synthetic construct
  source 1..75: mol_type = other DNA
atgagtctgttcaatgacgttcagaaattcattgaagcccatccggggtgtacttccggtgacattgcggatgct

SEQ ID NO: 449679 - DNA, 75 bp, synthetic construct
  source 1..75: mol_type = other DNA
gtgcgttttgcccgccgctggaaaaacaactggcgatgcgctggcggatgggcgtgcgtaacagtgcacataccc

SEQ ID NO: 449680 - DNA, 75 bp, synthetic construct
  source 1..75: mol_type = other DNA
aagtttttgcagaagtattgaaaagtggatcaaccacccaggcgtcggtgatgctggcgttgtcgcaatcagcag

SEQ ID NO: 449681 - DNA, 75 bp, synthetic construct
  source 1..75: mol_type = other DNA
ggtttaagacagaaagtgaagtacgcaacgataaaaatcgtctggcatttgcaggtattcgccacaatatactcg

SEQ ID NO: 449682 - DNA, 75 bp, synthetic construct
  source 1..75: mol_type = other DNA
gttctttctcggttaatagagttggcgatagaacctcatgaaaactctgtaattgcagacaggctaattgatgct

SEQ ID NO: 449683 - DNA, 75 bp, synthetic construct
  source 1..75: mol_type = other DNA
tgttgaacattatcttaaccacggctgctacctgacgtttaccagcagaactctgggttatctctgcaccgatgc

SEQ ID NO: 449684 - DNA, 75 bp, synthetic construct
  source 1..75: mol_type = other DNA
gaatccattcgtcataagccccgttacacagatgagcaaaaacaggttgctgttgaacattatcttaaccacggc

SEQ ID NO: 449685 - DNA, 75 bp, synthetic construct
  source 1..75: mol_type = other DNA
aactgacattaaagtattatgaaggggtaaagcctgagcttatcagtgctaataaaacattataccagcattaca

SEQ ID NO: 449686 - DNA, 75 bp, synthetic construct
  source 1..75: mol_type = other DNA
cctttacgacggaaactggctggtcagtttattatggctggtgggcgcaggataagactacagatggcaaaaatc

SEQ ID NO: 449687 - DNA, 75 bp, synthetic construct
  source 1..75: mol_type = other DNA
ccttcggcatcggcgaaaaagggcgagacaatcccgttagtcgtgacagtaaaagaccaaaatggcaacctgctg

SEQ ID NO: 449688 - DNA, 75 bp, synthetic construct
  source 1..75: mol_type = other DNA
ggcctggtaaccaatgtgtacgctcaggcctatcagtcgagcctggaatccaacaaattacccgtgatgtttacc

SEQ ID NO: 449689 - DNA, 75 bp, synthetic construct
  source 1..75: mol_type = other DNA
tgcgttcgcgttactgcgcttttgtgatgcaagacgcagattatttaataaagacctggcatccatcttgtggag

SEQ ID NO: 449690 - DNA, 75 bp, synthetic construct
  source 1..75: mol_type = other DNA
ctgcagcgttgcgtaccgaattgatggccggatttgcgcataccgaatggttggggctgaccgtatttgaacgct

SEQ ID NO: 449691 - DNA, 75 bp, synthetic construct
  source 1..75: mol_type = other DNA
ggtgctgatggcatcaccactttcacattgaagcaagaccagactaccgggctaaaaacagaactcacggcagcg

SEQ ID NO: 449692 - DNA, 75 bp, synthetic construct
  source 1..75: mol_type = other DNA
gatattctgaaaaaggcggaggaaatcataaaaaaatctatggtcgcccccgtttttgcaacactgatttttgat

SEQ ID NO: 449693 - DNA, 75 bp, synthetic construct
  source 1..75: mol_type = other DNA
cttcgactccatctgtcggcgtaaaaccgcgctgctgaccatcggccaggcggcgctggaagacgcctgggagtt

SEQ ID NO: 449694 - DNA, 75 bp, synthetic construct
  source 1..75: mol_type = other DNA
ctcagttcggccatgaagagcctctctgtgaagcttaccaaggtttgtaatgacattcgactgcttgcttcaggc

SEQ ID NO: 449695 - DNA, 75 bp, synthetic construct
  source 1..75: mol_type = other DNA
agccgattttgataccttcggcaaaggtgcctggacttttgaattgcgcgttaatgccgtggcggcgctggaagc

SEQ ID NO: 449696 - DNA, 75 bp, synthetic construct
  source 1..75: mol_type = other DNA
atgtcggcactaacgacccccgggtgattttgtgcctgacccgccaggctgaagaactggagtccaggggcttat

SEQ ID NO: 449697 - DNA, 75 bp, synthetic construct
  source 1..75: mol_type = other DNA
agaaacgcagggaaccagctttattttattgctccatcctgtggaacagatgcggcagttaatgaccagtcaatt

SEQ ID NO: 449698 - DNA, 75 bp, synthetic construct
  source 1..75: mol_type = other DNA
cgagcaccagtccagcgccgacctctccctgacgctggccatcgcccgcgaggtgggtaactccctgcttaccga

SEQ ID NO: 449699 - DNA, 75 bp, synthetic construct
  source 1..75: mol_type = other DNA
gaatattttagtcgtcagccatcagggtgtactgagtctgttaatcgcccgtttaattggtatgcctgccgaagc

SEQ ID NO: 449700 - DNA, 75 bp, synthetic construct
  source 1..75: mol_type = other DNA
agatgatgtttcctttgacctggttttatgcagtgaactggaacgggcacagcataccgcgcgacgggttctcag

SEQ ID NO: 449701 - DNA, 75 bp, synthetic construct
  source 1..75: mol_type = other DNA
tgtggcaaggggctgaacagttcacgttatggactggcaaagatttccctctggaatatgttaaacaggtcatgg

SEQ ID NO: 449702 - DNA, 75 bp, synthetic construct
  source 1..75: mol_type = other DNA
tgttggggccaggcaagcaacgcgagactattaccgtcctcggttatctgttttatatcggtgatcggaccaaaa

SEQ ID NO: 449703 - DNA, 75 bp, synthetic construct
  source 1..75: mol_type = other DNA
agtatctatcagaaactgattcgtatagctcgttcttcttctggggatgacgaaaaagctaaggccatgtttgta

SEQ ID NO: 449704 - DNA, 75 bp, synthetic construct
  source 1..75: mol_type = other DNA
atgattaactggccctggtgtttttttttctcagagcaaggctcttttcagaaaaagcgtgatgattggttctgg

SEQ ID NO: 449705 - DNA, 75 bp, synthetic construct
  source 1..75: mol_type = other DNA
cacttttaccgcaaccaaaatctttgcttccgatgcgttaactaacggttctctggctaaaaacctgatgtttgc

SEQ ID NO: 449706 - DNA, 75 bp, synthetic construct
  source 1..75: mol_type = other DNA
atcagtcgcaactgtggtggattaaatccgtcaccgggcaaagcgaaaacattgtgccgtggcagacgtggcttc

SEQ ID NO: 449707 - DNA, 75 bp, synthetic construct
  source 1..75: mol_type = other DNA
cgtgcagacgaagcggtcagcgtgcgtttcaaagcgccaggattgctgcatattgtcgggcgcaatggtgggcgt

SEQ ID NO: 449708 - DNA, 75 bp, synthetic construct
  source 1..75: mol_type = other DNA
gaacaacatgaaatcattaaccacggaaaccgcactggatattctgattgcgtggctgcaggacaatatcgactg

SEQ ID NO: 449709 - DNA, 75 bp, synthetic construct
  source 1..75: mol_type = other DNA
gaagcttctcatccttccccgcatgggcagaatatttaattgcggattcgtttgagagttcacggacttttgaaa

SEQ ID NO: 449710 - DNA, 75 bp, synthetic construct
  source 1..75: mol_type = other DNA
aagaaaagttacgcaagcaatgttataaaatttttgataacaatggaaggaggcggtgatattctttctgaatca

SEQ ID NO: 449711 - DNA, 75 bp, synthetic construct
  source 1..75: mol_type = other DNA
aaagcacctatagctcccgacattgctgatttttttaaaagtacgttatcgaatcaaatcatttcccatgcatca

SEQ ID NO: 449712 - DNA, 75 bp, synthetic construct
  source 1..75: mol_type = other DNA
agtatgctgagcaacttaaggatgatgatgcggcgaaaatatcgttgtatttcattactagacatcttaaagcgg

SEQ ID NO: 449713 - DNA, 75 bp, synthetic construct
  source 1..75: mol_type = other DNA
tattggtcaggcggatggtccagcccaattcggcacggttgttacgcaactccgccgtcagattcagcgtctgaa

SEQ ID NO: 449714 - DNA, 75 bp, synthetic construct
  source 1..75: mol_type = other DNA
cttatccgcccgttgcttgcccgcacgcggggggaactggagcagtgggcattggcgcatggtttacgctggatt

SEQ ID NO: 449715 - DNA, 75 bp, synthetic construct
  source 1..75: mol_type = other DNA
gaaacgctgattgcggcggcaggggtatttgtgacgcaagaaggtgtggctgaaggtgagaatggcgtaagtttt

SEQ ID NO: 449716 - DNA, 75 bp, synthetic construct
  source 1..75: mol_type = other DNA
tggctacaaccgctggaattaccggcggggctgggaagcgtacagcttactgcgggaggcgatattcgccctccg

SEQ ID NO: 449717 - DNA, 75 bp, synthetic construct
  source 1..75: mol_type = other DNA
atgatcgattacgattacacgagcaaccgtccgtctcctgttgtacctgccaatgccaaggcagaaattcaagct

SEQ ID NO: 449718 - DNA, 75 bp, synthetic construct
  source 1..75: mol_type = other DNA
gttgccaaagaaaaatggacttctactgctatcatcactcaacccgatgtggggcaaatcgctggctataccgat

SEQ ID NO: 449719 - DNA, 75 bp, synthetic construct
  source 1..75: mol_type = other DNA
acgacattttctgcattagcagaaacgctggataatcaggaagaagcagagaagctgaccattgagcctaccgtt

SEQ ID NO: 449720 - DNA, 75 bp, synthetic construct
  source 1..75: mol_type = other DNA
tttcttatgttgggcaaactgcagagggcgcacaaatgaagttggcccaatacattcagcaagttgacgataaag

SEQ ID NO: 449721 - DNA, 75 bp, synthetic construct
  source 1..75: mol_type = other DNA
gcttaccgctatgtgatgaaacctacgttacccattcgtcgtgatagcccgaagaaggcaatcaccttgattctg

SEQ ID NO: 449722 - DNA, 75 bp, synthetic construct
  source 1..75: mol_type = other DNA
tatatccagcaagttgacgaccaggtaaacgaagaactggaaaaagacctgaaagacaacatcgcgctgcgtatg

SEQ ID NO: 449723 - DNA, 75 bp, synthetic construct
  source 1..75: mol_type = other DNA
cgtgttggctattggatacctagcagtagcgaaagagcaatggacatcaacagccattgtcactcaacctgatgt

SEQ ID NO: 449724 - DNA, 75 bp, synthetic construct
  source 1..75: mol_type = other DNA
gaagtgaagtggtcaacaaaaactggccaccgagttagagttttttccagtatcgattttccgattcgtttggtg

SEQ ID NO: 449725 - DNA, 75 bp, synthetic construct
  source 1..75: mol_type = other DNA
ggagctactgactgaagccgatatgattattattccaggctggcgcggtatagatgcaacagtaccagaaatgct

SEQ ID NO: 449726 - DNA, 75 bp, synthetic construct
  source 1..75: mol_type = other DNA
ttcacaacgccccctggtcgttgtcttggcctatgatgggctatgtacttttgaatttggcgtcgcagttgaaat

SEQ ID NO: 449727 - DNA, 75 bp, synthetic construct
  source 1..75: mol_type = other DNA
cgctggataatcaggaagagccagaaaagcttaccatcgaaccttctgttaagaaccagcaattaccattgactg

SEQ ID NO: 449728 - DNA, 75 bp, synthetic construct
  source 1..75: mol_type = other DNA
gtgtcttatgttggtgaaacacctgaaggtgcgcagaagcagctggcgaagtatatccagcaagttgacgaccag

SEQ ID NO: 449729 - DNA, 75 bp, synthetic construct
  source 1..75: mol_type = other DNA
aagtaccccaatatgaaagaattgcgggtacagtttgcaggtgagccgattagggcgtttttcgcttttgatcca

SEQ ID NO: 449730 - DNA, 75 bp, synthetic construct
  source 1..75: mol_type = other DNA
acggcaactttatgccgtttgatatgcagccgagccagcttgcggtcaactttaacggtatgcgctcgacgcttg

SEQ ID NO: 449731 - DNA, 75 bp, synthetic construct
  source 1..75: mol_type = other DNA
accagccatctgtgaatgagattggcctgttctatgtgttttttttcggggcgttggcgctacttgaattaggta

SEQ ID NO: 449732 - DNA, 75 bp, synthetic construct
  source 1..75: mol_type = other DNA
ggcgaatacccgcagtttggtaacaatgatccgcgtgtagatgacctggctgttgacctggtagaacgtttcatg

SEQ ID NO: 449733 - DNA, 75 bp, synthetic construct
  source 1..75: mol_type = other DNA
tgagtttgtgttctgaactgatcgccaacgataaaccgttgctggtgcgttatgacggcagctggtatttcccgt

SEQ ID NO: 449734 - DNA, 75 bp, synthetic construct
  source 1..75: mol_type = other DNA
gtggtggttgtattccactggttactcaggtgctgaatgctgaactggcgaaacagggtatcgaagttaacaaca

SEQ ID NO: 449735 - DNA, 75 bp, synthetic construct
  source 1..75: mol_type = other DNA
acacccttgagattgtgcaggaaggtgtcgaagcgcgtaaaaccatgcgttttgccgacggcagcgaactggaag

SEQ ID NO: 449736 - DNA, 75 bp, synthetic construct
  source 1..75: mol_type = other DNA
ccatcaaccgtcaggagaaggtgattcactccagcgccgggcgcaccgttttttatgacaagctgatcatggcga

SEQ ID NO: 449737 - DNA, 75 bp, synthetic construct
  source 1..75: mol_type = other DNA
actctctgttccagcgtgatgggcgtgctggcgggggcgctacaaggctattacggcggtaaagtcgatctctgg

SEQ ID NO: 449738 - DNA, 75 bp, synthetic construct
  source 1..75: mol_type = other DNA
ctatatttatttttgtgagctattcagaagccactggattgcggtatggtttatcatatggtcttcagtaatcaa

SEQ ID NO: 449739 - DNA, 75 bp, synthetic construct
  source 1..75: mol_type = other DNA
cctttatgtacgcacgcgcaatgggctggaataacgtctccgtttacgacggcggctggtacgaatggagcagcg

SEQ ID NO: 449740 - DNA, 75 bp, synthetic construct
  source 1..75: mol_type = other DNA
ctgacctcactcgatttcctcggcttcggtctgccgctcggttcaccgtcactcggcgaactgctgttacaaggg

SEQ ID NO: 449741 - DNA, 75 bp, synthetic construct
  source 1..75: mol_type = other DNA
gctgattatcaggacccgtggctgaaacaacgactggaagataaaggctgggttctgtgggcgccgattcgcttt

SEQ ID NO: 449742 - DNA, 75 bp, synthetic construct
  source 1..75: mol_type = other DNA
ctcaccacaaaactggctggggacggatgccaacggcggcgatgtgctggcgcgtattctgtatggcacacggat

SEQ ID NO: 449743 - DNA, 75 bp, synthetic construct
  source 1..75: mol_type = other DNA
cgcgttgaaggcattaaaaccttcgaagaactgctggcgaaacacggcaaaggctacggttgtgaagtttgtaaa

SEQ ID NO: 449744 - DNA, 75 bp, synthetic construct
  source 1..75: mol_type = other DNA
aatgcgctaccaggactgggcggtacagcgaaagggttggtgaaagtacgcggtactgtggaagcgccacaacta

SEQ ID NO: 449745 - DNA, 75 bp, synthetic construct
  source 1..75: mol_type = other DNA
tgtatgcagaaagtggagcatgacgaaagacggcccggtatgcactcttaatgcaacgtttgaacaagtcgtcaa

SEQ ID NO: 449746 - DNA, 75 bp, synthetic construct
  source 1..75: mol_type = other DNA
cgcagcgtagctacagcgtaaccagggagccgaacgtgtcggtcgtcaagctgggtgatggctatgagcaacgcc

SEQ ID NO: 449747 - DNA, 75 bp, synthetic construct
  source 1..75: mol_type = other DNA
aatgcggaactgtgcgtgccgcaaactatcgatgcgggggccgaagggcgtgcggtggtgaatctcaaccgcttc

SEQ ID NO: 449748 - DNA, 75 bp, synthetic construct
  source 1..75: mol_type = other DNA
acactgaacgtggagccgctgaaaggcgaaaaggtgaagctgaaagtgggtggtgcgctgcgcgaacagctggag

SEQ ID NO: 449749 - DNA, 75 bp, synthetic construct
  source 1..75: mol_type = other DNA
gcctgatgcctaagctatatctggaagccgtgtctggtgtagaccaggcactggatttgctctatcagttcgagt

SEQ ID NO: 449750 - DNA, 75 bp, synthetic construct
  source 1..75: mol_type = other DNA
tccagaaagacggcacctactcggtgatcccgcgttctccgggcggtgaaatcaccccggaaggactgatggcag

SEQ ID NO: 449751 - DNA, 75 bp, synthetic construct
  source 1..75: mol_type = other DNA
gctgaaaccaaagcgggtactggctgcggtggctgtatcccgctggtcactcaggtactgaacgcggaactggcg

SEQ ID NO: 449752 - DNA, 75 bp, synthetic construct
  source 1..75: mol_type = other DNA
cgcacgtagctacgtttacctcgacgaaagcaaagagatctacaaacgcctgattgtcagcgaagacaacaaaac

SEQ ID NO: 449753 - DNA, 75 bp, synthetic construct
  source 1..75: mol_type = other DNA
tgtttgccgccgatggagcatgactaaagacgggtctttgtacacgctaaacgcaacgtttgagcaggtcgtcag

SEQ ID NO: 449754 - DNA, 75 bp, synthetic construct
  source 1..75: mol_type = other DNA
atgtaaaaaaattacgtttaaaagcaggattaacacagaaggaatgcagtcatatttatggtgttgggctaagaa

SEQ ID NO: 449755 - DNA, 75 bp, synthetic construct
  source 1..75: mol_type = other DNA
ctgggcgtggacgttggcggtattggcgatgcgcatggtcgtacaccaggcgcgcgtagctatgtttacctcgac

SEQ ID NO: 449756 - DNA, 75 bp, synthetic construct
  source 1..75: mol_type = other DNA
ggcaaaatccggcggtttcccgctgattgctctgagccagctctcccgaggcgtggaatccagacccaataaacg

SEQ ID NO: 449757 - DNA, 75 bp, synthetic construct
  source 1..75: mol_type = other DNA
aacgtaacggttctctgggaacgatttaccggcgtttttataacggacattttctgcctgtggaccaggaaagtg

SEQ ID NO: 449758 - DNA, 75 bp, synthetic construct
  source 1..75: mol_type = other DNA
cgcgttctttctgcgtggggcagatcctgaagtgatggatattctggccacactgccagcggacgttttttctgt

SEQ ID NO: 449759 - DNA, 75 bp, synthetic construct
  source 1..75: mol_type = other DNA
tgttaattacctatgccgatcaatttcacagtaatgatttaaaaccactacccacatttaatcagttttaccatc

SEQ ID NO: 449760 - DNA, 75 bp, synthetic construct
  source 1..75: mol_type = other DNA
gtaacgcgtcttgagagtgcgaaacgattaattacacagcgacgtaaaaaacactgggatgaaagtgatgtcgtg

SEQ ID NO: 449761 - DNA, 75 bp, synthetic construct
  source 1..75: mol_type = other DNA
atgggaccgctaccatggaaaggcaacatgaagcagaaaattacggattacctggacaaaatctacggtggaaca

SEQ ID NO: 449762 - DNA, 75 bp, synthetic construct
  source 1..75: mol_type = other DNA
aaaaaccgcgattacctgctctccactgctcacaatgcaatggattatattcgcaagaatggcggtaacggctgg

SEQ ID NO: 449763 - DNA, 75 bp, synthetic construct
  source 1..75: mol_type = other DNA
atgacctggaaggcgctgtcattggcgcgttctttctgcgtggggcagatcctgaagtgatggatattctggtca

SEQ ID NO: 449764 - DNA, 75 bp, synthetic construct
  source 1..75: mol_type = other DNA
gtgtgggaatccgcccaccttgccgggcgccggtgctgtgtggaaattcgcccatcttcatgacaaaaatttgtc

SEQ ID NO: 449765 - DNA, 75 bp, synthetic construct
  source 1..75: mol_type = other DNA
caccatctgattaaacacccggaaacggcgctggtggtggttgattatctcgggttgataaaaacccgaaccaca

SEQ ID NO: 449766 - DNA, 75 bp, synthetic construct
  source 1..75: mol_type = other DNA
tcaggggaaatagaggcggatgcagacatcattctgatgctttacagggatgaggtgtacaacccggagacacag

SEQ ID NO: 449767 - DNA, 75 bp, synthetic construct
  source 1..75: mol_type = other DNA
ccgccgatggtatttttttccccgcccttgaacaaaatatgatgggcgcggtgttaatcaatgaaaacgacgaag

SEQ ID NO: 449768 - DNA, 75 bp, synthetic construct
  source 1..75: mol_type = other DNA
ggtgtaccagttctcgctgccgccgctggtgttacatgcggtgcaaaaacagaacgtcgaggcgctgtgccagtg

SEQ ID NO: 449769 - DNA, 75 bp, synthetic construct
  source 1..75: mol_type = other DNA
acctatgaactcagacctgaaaaattccggagaaatagaggcggatgctgacattattctgatgctttacaggga

SEQ ID NO: 449770 - DNA, 75 bp, synthetic construct
  source 1..75: mol_type = other DNA
ccagacccaataaacgccccatgaactcggacctgaaaaactccggggaaatcgaggcggatgccgacatcattc

SEQ ID NO: 449771 - DNA, 75 bp, synthetic construct
  source 1..75: mol_type = other DNA
tcgcctctcacgatggcatcgggttgaacccactgcgtggcttgttaccagaaagcgaaatattagcgctggtcg

SEQ ID NO: 449772 - DNA, 75 bp, synthetic construct
  source 1..75: mol_type = other DNA
ctgcgttcgcgagcggatctgattgtcgatacctcagaaatgtccgttcacgagctggcagaaatgctgcgtacc

SEQ ID NO: 449773 - DNA, 75 bp, synthetic construct
  source 1..75: mol_type = other DNA
gcaaaaccgaactggcgctggatatcatcgacaaagtgactgaacaggggcgcggtgttcttctgttcacaatgg

SEQ ID NO: 449774 - DNA, 75 bp, synthetic construct
  source 1..75: mol_type = other DNA
atgatcagccagaaaagcccggtctggcgtaacgatgatctggaaggtgctgttattggcgcattctttttgcgt

SEQ ID NO: 449775 - DNA, 75 bp, synthetic construct
  source 1..75: mol_type = other DNA
aaaacctgacactaccttccagcaacaccacctggtttaacttcctcgcctctcacgatggcatcgggctaaacc

SEQ ID NO: 449776 - DNA, 75 bp, synthetic construct
  source 1..75: mol_type = other DNA
ctgatggtaattgtctgactggattgtttaatgtcagtaaaaatattcagcatgtaggtgatgctgccaacttac

SEQ ID NO: 449777 - DNA, 75 bp, synthetic construct
  source 1..75: mol_type = other DNA
atgtgacctatatggatgcgttaagccgccgtgtgagagtagcgatgaagaacgttgcgccaggtttatccttgc

SEQ ID NO: 449778 - DNA, 75 bp, synthetic construct
  source 1..75: mol_type = other DNA
gcacggtcgggatctgattagtgaagttgatatattgggtaatgaaataacactgcatccctggcaggttatgtg

SEQ ID NO: 449779 - DNA, 75 bp, synthetic construct
  source 1..75: mol_type = other DNA
tctagtaaagagataacgacagaactgaacaataaagcgacattaaggtattcggtatattataagttgtcgcat

SEQ ID NO: 449780 - DNA, 75 bp, synthetic construct
  source 1..75: mol_type = other DNA
ctggtgttacatgcggtgcaaaaacagaacgtccaggcgctgtgccagtgggcgcaaagtctgacgttgccttcc

SEQ ID NO: 449781 - DNA, 75 bp, synthetic construct
  source 1..75: mol_type = other DNA
gcgaagtttttacgtgcttcaaatgtaccaactggattgcttaatgaaatgattgcttatctcaactcggaagaa

SEQ ID NO: 449782 - DNA, 75 bp, synthetic construct
  source 1..75: mol_type = other DNA
gctgatggatgcagcggtaagaaacggagaatggaagatcacaccagaattattacgtcacacaccgggatatat

SEQ ID NO: 449783 - DNA, 75 bp, synthetic construct
  source 1..75: mol_type = other DNA
gaggagtttttaccttttgtctgcactacgctagacaaaggtgattgtgatgaattttggagcgcaatagaatga

SEQ ID NO: 449784 - DNA, 75 bp, synthetic construct
  source 1..75: mol_type = other DNA
ctactgtcacaacagattcaggtgaactattccctaccttccacccgtggtatacagatgatttatcagggcgtt

SEQ ID NO: 449785 - DNA, 75 bp, synthetic construct
  source 1..75: mol_type = other DNA
gaacgcggaagacctgtgggggggggatttcaagcataccgacttcggcaagatcattttgccgtttaccctgct

SEQ ID NO: 449786 - DNA, 75 bp, synthetic construct
  source 1..75: mol_type = other DNA
ttcaaggcaggcatgattgtaatgcgtttttttaccggcttggagacggaagagacctcaggaagcgattctaca

SEQ ID NO: 449787 - DNA, 75 bp, synthetic construct
  source 1..75: mol_type = other DNA
tcctgcgtttttttacccagtcggagacgggaagcacctccggaaacgactctacaatgttgcctggttctggaa

SEQ ID NO: 449788 - DNA, 75 bp, synthetic construct
  source 1..75: mol_type = other DNA
aattccagccgggtcagcgttatgtgattcaggccaacctgcaactccccgaccgcccggactgccccggctact

SEQ ID NO: 449789 - DNA, 75 bp, synthetic construct
  source 1..75: mol_type = other DNA
ttcagaaagaggctattttgcctaaccgcttccgtgcggatgttcgtgagtgcttcctgattgtttcaggctatg

SEQ ID NO: 449790 - DNA, 75 bp, synthetic construct
  source 1..75: mol_type = other DNA
tttcttatgtcgggcaaacgcctgaaggtgcgcagaaacagctagctcaatatattcagcaagttgatgaacagg

SEQ ID NO: 449791 - DNA, 75 bp, synthetic construct
  source 1..75: mol_type = other DNA
gctcgtcattaccgataccgacaacgacaaattgagttatgcgcgcaagcactatccatcagaaccgcaaacact

SEQ ID NO: 449792 - DNA, 75 bp, synthetic construct
  source 1..75: mol_type = other DNA
gattgattatgcgctgcatggacccgttaacccgtcgctgctcgtcattaccgataccgacaacgacaaattgag

SEQ ID NO: 449793 - DNA, 75 bp, synthetic construct
  source 1..75: mol_type = other DNA
gaccgcaggataagcacttcagcgcgccaattaatttctacgatgtgcattatgcctttactcattacgttggca

SEQ ID NO: 449794 - DNA, 75 bp, synthetic construct
  source 1..75: mol_type = other DNA
agagcgggaaaaaaattaaagagcaggtggtcgaacttgtgcgccagagcggtcgcgagacattacgacagttgg

SEQ ID NO: 449795 - DNA, 75 bp, synthetic construct
  source 1..75: mol_type = other DNA
cataaaaaaagccggcatcatgccggcccaaaaatataaacaagacgataaaaggctaataacggaagcatcatg

SEQ ID NO: 449796 - DNA, 75 bp, synthetic construct
  source 1..75: mol_type = other DNA
gtgatctcgcgcacattaatgaaggcataaaaaaagccggcatcatgccggcccaaaaatataaacaagacgata

SEQ ID NO: 449797 - DNA, 75 bp, synthetic construct
  source 1..75: mol_type = other DNA
aaaccagcgaaagttgggagctggggctttactacatgggtgaagaaggctggctggaaggggttgaatccagcg

SEQ ID NO: 449798 - DNA, 75 bp, synthetic construct
  source 1..75: mol_type = other DNA
cacgagcttgaggctgcgggacgtctcactcagcctttgaaatatgatgacgtcagcgactgttacaagccatta

SEQ ID NO: 449799 - DNA, 75 bp, synthetic construct
  source 1..75: mol_type = other DNA
tcgcgtgcgtacccacggtgtggatactgactatccgctggatcacgagtttatcaccggcggcgaatatcgtcg

SEQ ID NO: 449800 - DNA, 75 bp, synthetic construct
  source 1..75: mol_type = other DNA
tcctgctgatcgacgatcacccgatgctgcgaactggcgtaaaacagcttatcagcatggcccccgatatcactg

SEQ ID NO: 449801 - DNA, 75 bp, synthetic construct
  source 1..75: mol_type = other DNA
caatgggattgataaacaatctggcgcacctcaatgaatacaggaaagtgattatttctgggggttcatttccta

SEQ ID NO: 449802 - DNA, 75 bp, synthetic construct
  source 1..75: mol_type = other DNA
agaatattatgcaaacgagtatcaagcctacaaagccaatccctctggtaactataaatttggtagcccagaggt

SEQ ID NO: 449803 - DNA, 75 bp, synthetic construct
  source 1..75: mol_type = other DNA
gtggaaatcatggcggcaaacggattcatctttgaccagttcctcagtagcgaactgaacacccgcaccgacgaa

SEQ ID NO: 449804 - DNA, 75 bp, synthetic construct
  source 1..75: mol_type = other DNA
ttcactcgcgatatcgccgaacaggcacttgaagccgatgagctggatttagtggcgtttggcgtcccttacatc

SEQ ID NO: 449805 - DNA, 75 bp, synthetic construct
  source 1..75: mol_type = other DNA
tcaataaagcacttgagcgctttcattttcgcttaaacacgtcaggcccccacgctgaacacgcagcccatgatt

SEQ ID NO: 449806 - DNA, 75 bp, synthetic construct
  source 1..75: mol_type = other DNA
gaaatccgcccaccttgccgggcgccggtgctgtgtggaaatccgcccaccttgccgggcgccggtgccgtgtgg

SEQ ID NO: 449807 - DNA, 75 bp, synthetic construct
  source 1..75: mol_type = other DNA
gcgctatatggaaattagccgttcatcgacaaaaattaatctggataatctcggtgtgttaaccatgcaggcaac

SEQ ID NO: 449808 - DNA, 75 bp, synthetic construct
  source 1..75: mol_type = other DNA
ttgaacgtaccgttgccggggctgggaatatgtccacgtcgcgtctgcgtaatccaaaagaaatggacgatgagg

SEQ ID NO: 449809 - DNA, 75 bp, synthetic construct
  source 1..75: mol_type = other DNA
tcgttctcgctggtctgattaacggtggcgcgacgcctgacgcgtttgatgtgattgccactactccggaggaag

SEQ ID NO: 449810 - DNA, 75 bp, synthetic construct
  source 1..75: mol_type = other DNA
attaacgttaatggtccgggggctcggcgctggtatggcactagcttccaacacaattaccgctggcggtgctgc

SEQ ID NO: 449811 - DNA, 75 bp, synthetic construct
  source 1..75: mol_type = other DNA
gtgaagcgaaacaggcggatctcattttatatgcccgcttacctgcgcagctaagcggaagtctgactgacccaa

SEQ ID NO: 449812 - DNA, 75 bp, synthetic construct
  source 1..75: mol_type = other DNA
taacgcctggtggcctaaacaatcactgactgtattccagccgctggtgccacccgactggaagatgaacttacg

SEQ ID NO: 449813 - DNA, 75 bp, synthetic construct
  source 1..75: mol_type = other DNA
tgaaggcgaattgtatgcccaggttgcattttcagctgcgcccgatcaaggcttccgtgcgggagggcatggcgt

SEQ ID NO: 449814 - DNA, 75 bp, synthetic construct
  source 1..75: mol_type = other DNA
atgacagcacgattacgcttaccgatctttcgaccggtttcgaccagttgcaatatggcacgatgacggtagaaa

SEQ ID NO: 449815 - DNA, 75 bp, synthetic construct
  source 1..75: mol_type = other DNA
tgactgtcagtgatggtcgctggagctggccatatgaaggttttccccttagtgggcgattgggtgtcaaagtcg

SEQ ID NO: 449816 - DNA, 75 bp, synthetic construct
  source 1..75: mol_type = other DNA
tgcactgccgttatggctgaacaatgaaaaatggattgtgaaagatggctggctggcgaatagcgggccgatgac

SEQ ID NO: 449817 - DNA, 75 bp, synthetic construct
  source 1..75: mol_type = other DNA
aaaaacttgcaggattctctgaagacgcaggaagtggtcgctcaagaacagaaagatctgcgtatccgtcagatt

SEQ ID NO: 449818 - DNA, 75 bp, synthetic construct
  source 1..75: mol_type = other DNA
taccgcacggtgaagggcgtattgtgatgacctcatcggtgatgggattaatctccacgccgggtcgcggcgctt

SEQ ID NO: 449819 - DNA, 75 bp, synthetic construct
  source 1..75: mol_type = other DNA
ccgacaacgtcaaccagacacaaagcgataaaccggtcgaaaatcccggcatcgccgcccgctttacgttggggc

SEQ ID NO: 449820 - DNA, 75 bp, synthetic construct
  source 1..75: mol_type = other DNA
tctgaatgccgactatgccggacaagcgaaacagatttctcaggaagcggcagaagcaggcgtgatggtgctgat

SEQ ID NO: 449821 - DNA, 75 bp, synthetic construct
  source 1..75: mol_type = other DNA
tcggaacaaacctaaacccactatcgagtagattcattccaggaacagaggctgctgatacagaaactctggttg

SEQ ID NO: 449822 - DNA, 75 bp, synthetic construct
  source 1..75: mol_type = other DNA
cagcaaagaattaacgaaacaatccgtaataatgacatgacaaatgccagagggtgggcaagcaacaatattgcg

SEQ ID NO: 449823 - DNA, 75 bp, synthetic construct
  source 1..75: mol_type = other DNA
ctccagaagcaatgcaatcatggctgcaaaataacgccaaggaactggcgcgcgtcggtgttgatcctaataacg

SEQ ID NO: 449824 - DNA, 75 bp, synthetic construct
  source 1..75: mol_type = other DNA
ttctggagaacggggagcaaaaacacgcaaaggattttgaggcggcaaaagagcaatggagcaatgcaggataga

SEQ ID NO: 449825 - DNA, 75 bp, synthetic construct
  source 1..75: mol_type = other DNA
gaaagatctgcgtatccgtcagattcaggaagcgttgcagtatgcgaatcaggcgcaggtgacaaagccacaggt

SEQ ID NO: 449826 - DNA, 75 bp, synthetic construct
  source 1..75: mol_type = other DNA
gcggtgctgctgggcggcatggttggcgcgggtattgtactggggcgtaacgcgctgcgtaattacaacgcgaag

SEQ ID NO: 449827 - DNA, 75 bp, synthetic construct
  source 1..75: mol_type = other DNA
acgccggaaatgcgtaatggcgtcaaacagcgccacgacgggtttgttgagcggcttaacgctattaatcatcgc

SEQ ID NO: 449828 - DNA, 75 bp, synthetic construct
  source 1..75: mol_type = other DNA
gaagaagaggtgacaaccgggctggatcgttttgctgcggcctgtgaacgctttgtgagcggaggttcatcatga

SEQ ID NO: 449829 - DNA, 75 bp, synthetic construct
  source 1..75: mol_type = other DNA
gcgccagcgctcaatgtcagcgaagaagaggtgacgaccgggctggatcgttttgcggcggcttgtgaacacttt

SEQ ID NO: 449830 - DNA, 75 bp, synthetic construct
  source 1..75: mol_type = other DNA
tttgtatgcacggttgcccgcacagttaagtggaagtctgaccgatcccttgctggcctttgaaccgggcgcgct

SEQ ID NO: 449831 - DNA, 75 bp, synthetic construct
  source 1..75: mol_type = other DNA
atatctgaacctgagcagttgtcagcccggaaaacatcagtataaaaatgcccgtcaggagcataccagcctgcc

SEQ ID NO: 449832 - DNA, 75 bp, synthetic construct
  source 1..75: mol_type = other DNA
ctggcggtcgtcatggatctttttgcccgcagggttatcggctggagcctgtcagcgaatgccgatactgcactg

SEQ ID NO: 449833 - DNA, 75 bp, synthetic construct
  source 1..75: mol_type = other DNA
ggcggttgtgatggatctttttgcccgcagggttatcggctggagtctgtccgcacatgccgatactgcactgat

SEQ ID NO: 449834 - DNA, 75 bp, synthetic construct
  source 1..75: mol_type = other DNA
ttaatgatcccggtgctggccggtgcaatagtgaaagggcttgccgacgggttttccagcgtatacagccattta

SEQ ID NO: 449835 - DNA, 75 bp, synthetic construct
  source 1..75: mol_type = other DNA
gaaagtgccctgcatggtttcagcagcagtattgccagtgcctggaactcgctcagtcagtttggttctaaccgg

SEQ ID NO: 449836 - DNA, 75 bp, synthetic construct
  source 1..75: mol_type = other DNA
agcgatcagggcagtcattatacgagcaggcagttccggcagttattgtggcgataccagatcagacagagtatg

SEQ ID NO: 449837 - DNA, 75 bp, synthetic construct
  source 1..75: mol_type = other DNA
aggtggtggtcgggcaagtattgactggagtgatgaggatgcgcatcaggccagcagtggttcacgggccagcca

SEQ ID NO: 449838 - DNA, 75 bp, synthetic construct
  source 1..75: mol_type = other DNA
ttggtgttggtggtggggtaggcatcagaggtggatttaaggggagcctggatgcaacggatgatgactcacatt

SEQ ID NO: 449839 - DNA, 75 bp, synthetic construct
  source 1..75: mol_type = other DNA
tgtgtttgcccttatgtggctgcagacatggcctctgctgtacgccattctgaacagtgccatgacattctatgc

SEQ ID NO: 449840 - DNA, 75 bp, synthetic construct
  source 1..75: mol_type = other DNA
aatgcccgtcaggagcatacctgcttgccgaatctgctagggcgccagttcgctgtccccgagccagaccaggta

SEQ ID NO: 449841 - DNA, 75 bp, synthetic construct
  source 1..75: mol_type = other DNA
ggtaagcccggcggggtgatgttccacagcgatcagggcagtcattatacgagcaggcagttccggcagttattg

SEQ ID NO: 449842 - DNA, 75 bp, synthetic construct
  source 1..75: mol_type = other DNA
gcccgcagggttatcggctggagcctgtcagcgaatgccgatactgccctgataagcagtgccctgcggatggcg

SEQ ID NO: 449843 - DNA, 75 bp, synthetic construct
  source 1..75: mol_type = other DNA
cgggcgatggcctggtcttttgtgcaggaacaggtgcagccgggagtggataacgcctggaatgacgcgcgcaat

SEQ ID NO: 449844 - DNA, 75 bp, synthetic construct
  source 1..75: mol_type = other DNA
gcgaaaaagttaaatttcaaggccagcttaaagggcaacaacttacagtcagcgagctggatgttgccgcgttcg

SEQ ID NO: 449845 - DNA, 75 bp, synthetic construct
  source 1..75: mol_type = other DNA
gctggttattgaatgtcggtgccgtagaacttgactctaattgcctggcgaaattaccacaggaagaaccctctc

SEQ ID NO: 449846 - DNA, 75 bp, synthetic construct
  source 1..75: mol_type = other DNA
atggacaaagaatataaaacactcatcaacaaagcacttgagcgtttttattttcgcttaagtgcatcaggcgtt

SEQ ID NO: 449847 - DNA, 75 bp, synthetic construct
  source 1..75: mol_type = other DNA
atgctgggtaaatataaagccgttctcgcgctgttattactgattattcttgtgccgttgacgctgctgatgacg

SEQ ID NO: 449848 - DNA, 75 bp, synthetic construct
  source 1..75: mol_type = other DNA
agtggcgctactggggaaaaggcagttttacaccgatgaatgccacctgggatgtcgcaggaaaaggtgagtggc

SEQ ID NO: 449849 - DNA, 75 bp, synthetic construct
  source 1..75: mol_type = other DNA
aagggaagagtcatcgattcgctggacatcgatgaaatccgctggcctttagcgggtgtaaaagtcacccaacgt

SEQ ID NO: 449850 - DNA, 75 bp, synthetic construct
  source 1..75: mol_type = other DNA
gctcctggtactggcagctgtcttcaacaaactgacgctgtccgtcctgaaaggctatgtgtttgccctgatgtg

SEQ ID NO: 449851 - DNA, 75 bp, synthetic construct
  source 1..75: mol_type = other DNA
catgtaactatgcgaaacctgccgatggtccagactatcctgacggggattgccattggtatattcccgctcctg

SEQ ID NO: 449852 - DNA, 75 bp, synthetic construct
  source 1..75: mol_type = other DNA
cggagattgcagaacgccgtcgggctatggcgtggtcttttgttcaggaacaggtgcagcctggtgttgataata

SEQ ID NO: 449853 - DNA, 75 bp, synthetic construct
  source 1..75: mol_type = other DNA
ataaatcaaagcgtcagtcggcggggaaactgctgggataacagccccatggaacgcttcttccgcagtctgaaa

SEQ ID NO: 449854 - DNA, 75 bp, synthetic construct
  source 1..75: mol_type = other DNA
ccggaaatcatcaatctgtttcaggactacgtccagaactgcgtgctgggtgatatttacctgaatcacaaatac

SEQ ID NO: 449855 - DNA, 75 bp, synthetic construct
  source 1..75: mol_type = other DNA
tgaaatactccgacctggctgccactgccgggtatatctctgtcatgatacctccgttgtcatgggtgatgataa

SEQ ID NO: 449856 - DNA, 75 bp, synthetic construct
  source 1..75: mol_type = other DNA
gtgaagaaatttttggcccggttctcggaattgtgcgcgtcccggattatgccaccgccattagcacggtaaact

SEQ ID NO: 449857 - DNA, 75 bp, synthetic construct
  source 1..75: mol_type = other DNA
atgtattctgttcattggcatatgcatttatattctaatgagctgaattttataaaggttgtggctattctggag

SEQ ID NO: 449858 - DNA, 75 bp, synthetic construct
  source 1..75: mol_type = other DNA
cggcaccaaagcgccgccataccggtattgcatcggcacgacgagcagcaaagaaacgcaggagagcaaaacgat

SEQ ID NO: 449859 - DNA, 75 bp, synthetic construct
  source 1..75: mol_type = other DNA
ccgatctcgataacgccgtcagcgcgctgatgggagcggcctacggctcttgcggcgaacgctgcatggccatct

SEQ ID NO: 449860 - DNA, 75 bp, synthetic construct
  source 1..75: mol_type = other DNA
gtgaggaaatttttggtcccgtgctcggcatcgtacgcgtaacagattatgccaccgccattcgtacggtaaact

SEQ ID NO: 449861 - DNA, 75 bp, synthetic construct
  source 1..75: mol_type = other DNA
cgcctaaaaccacttattgcagcgctgcgtattggccccggtgagttacgagaaaaagacgaaaatgaaatgggg

SEQ ID NO: 449862 - DNA, 75 bp, synthetic construct
  source 1..75: mol_type = other DNA
ttagatggtcatttggaagaagaatggatgatggaagatcagggaaaggagcttttagttggtcagattgccgag

SEQ ID NO: 449863 - DNA, 75 bp, synthetic construct
  source 1..75: mol_type = other DNA
gcccatcgggtgctttccgtcgcgcatcctgagtattatcaggatatcaatattccaagaggctacagatttagt

SEQ ID NO: 449864 - DNA, 75 bp, synthetic construct
  source 1..75: mol_type = other DNA
tacggtttcacttgctctgacagcaggaatgtttcatcagttcgacaaggaacttcgagagaagtgtatcagaga

SEQ ID NO: 449865 - DNA, 75 bp, synthetic construct
  source 1..75: mol_type = other DNA
atacgcgcgttctgcgaggaccggggcatctctctgatggctgtcagtgtggacggcaaaatcagcgaccagttg

SEQ ID NO: 449866 - DNA, 75 bp, synthetic construct
  source 1..75: mol_type = other DNA
atatccggagcttgactacaacgtgaagcgcagccattacaacggttcggtggaagcgcgtcttaccgaagaaag

SEQ ID NO: 449867 - DNA, 75 bp, synthetic construct
  source 1..75: mol_type = other DNA
tgcggctcccgacgatgtactggtccccaactatgcccgggaagaaggctggcagtggtacaacccgaatgcgga

SEQ ID NO: 449868 - DNA, 75 bp, synthetic construct
  source 1..75: mol_type = other DNA
tcgtcttgatgtggaagtctaccctgcgggaaaaaatgcacagcaggtgctaaaagtcagtatgcagagcaatgc

SEQ ID NO: 449869 - DNA, 75 bp, synthetic construct
  source 1..75: mol_type = other DNA
ctgtgtgggaatcagcccaccttaccgggcgccggtgccgtgtgggaatcagcccaccttgccgggcgccggtgc

SEQ ID NO: 449870 - DNA, 75 bp, synthetic construct
  source 1..75: mol_type = other DNA
ccggcgcggtgactgaaagtggcatcaccggtggcgcagacatcgaatccatcgcagagctgctggaccgtctgc

SEQ ID NO: 449871 - DNA, 75 bp, synthetic construct
  source 1..75: mol_type = other DNA
atgccgtatgaaatccccacgctgggcaagctgattgccgacggcgagaaagatattgcgtatgaactcggtctg

SEQ ID NO: 449872 - DNA, 75 bp, synthetic construct
  source 1..75: mol_type = other DNA
acttgccagccatcataggcatgatgttgatttgtgccggtgtgttagtcattaacttgttgtcacgaagcgcac

SEQ ID NO: 449873 - DNA, 75 bp, synthetic construct
  source 1..75: mol_type = other DNA
acctgccagccgttataggcatgatgttgatttgtgccggtgtgttggttattaatttattgtcacgaagcacac

SEQ ID NO: 449874 - DNA, 75 bp, synthetic construct
  source 1..75: mol_type = other DNA
acctgccagccatcataggcatgatgttgatttgtgccggtgtgttagtcattaacttgttgtcacgaagtgcac

SEQ ID NO: 449875 - DNA, 75 bp, synthetic construct
  source 1..75: mol_type = other DNA
acaggcgcgtctacaggctaacccggcaatgtcgagcgtggttgataccatgaccggcatcggcgcaacatttgg

SEQ ID NO: 449876 - DNA, 75 bp, synthetic construct
  source 1..75: mol_type = other DNA
agtgaactcggcgaactggcgagcggtgcggtatcaaatgaacgtatgacctctgaccgcaaacacagcatggtt

SEQ ID NO: 449877 - DNA, 75 bp, synthetic construct
  source 1..75: mol_type = other DNA
tattccgcaatgattgacgctttgaccgggaatctggatgccccgctgcgctccggaaactacgtcgcctcggtc

SEQ ID NO: 449878 - DNA, 75 bp, synthetic construct
  source 1..75: mol_type = other DNA
cccgcatcgtccgtcaatatggccgatgatcaaaatatctcagcgcagatccgtggcaaaatcaaaaattatgcg

SEQ ID NO: 449879 - DNA, 75 bp, synthetic construct
  source 1..75: mol_type = other DNA
atgaaaaacaggaaacttttgttgtcccgatgcgtaatgctggtgaactgacgctggtgaaaagttttgactggt

SEQ ID NO: 449880 - DNA, 75 bp, synthetic construct
  source 1..75: mol_type = other DNA
gagattgatgcaccgctctctggctggcatccggcagagggcgaagatgccagtttttcacaatcgatcaattac

SEQ ID NO: 449881 - DNA, 75 bp, synthetic construct
  source 1..75: mol_type = other DNA
gcaggtccttatatcgccgtcaattgtgagttatatggtgatgcggcgctggcggaagaatttattggcggcgat

SEQ ID NO: 449882 - DNA, 75 bp, synthetic construct
  source 1..75: mol_type = other DNA
gcagcaatcaggctggcgaggcgctaacagcacgaggccagaacatcacgatgcgcggtcaggacttatctgctt

SEQ ID NO: 449883 - DNA, 75 bp, synthetic construct
  source 1..75: mol_type = other DNA
ggttcgcgtccctgccagttcaatcgctgcgcctgcaacatcgtctgcatcagcacaaaactatgccatgaagaa

SEQ ID NO: 449884 - DNA, 75 bp, synthetic construct
  source 1..75: mol_type = other DNA
gaaatcatcaatgcaacagccgcctactcagcaatcagcaggaggtagctacacgtcaaaatcaggcattcaatt

SEQ ID NO: 449885 - DNA, 75 bp, synthetic construct
  source 1..75: mol_type = other DNA
cacgcatgcaggttccggttaacatcgaaaaccttcggatacgatggcaaaaatttaaggctaaggatcgtcagc

SEQ ID NO: 449886 - DNA, 75 bp, synthetic construct
  source 1..75: mol_type = other DNA
ggccgcgcacttaacgccacgtcatgaagaaggcattcccgacgtaacgaacggaattttacttcgccgtgatat

SEQ ID NO: 449887 - DNA, 75 bp, synthetic construct
  source 1..75: mol_type = other DNA
gaccagattgaatccgttcgtaaaggcatgggattcattgatgaagaccagcgcaattctatcggaaccttagcg

SEQ ID NO: 449888 - DNA, 75 bp, synthetic construct
  source 1..75: mol_type = other DNA
tatttgtgacgcaagaaggtgtggctgaaggtgagaatggcgtcagttttgtctggcagaaaacgcttagtcaag

SEQ ID NO: 449889 - DNA, 75 bp, synthetic construct
  source 1..75: mol_type = other DNA
cggttttgaagtacaacaggcacaaaaaaaggccgaggaacttattaatgctgcgccaaaattatcagtgaacat

SEQ ID NO: 449890 - DNA, 75 bp, synthetic construct
  source 1..75: mol_type = other DNA
agacagcaggaattctataaagctatgaatgaaacgcctcctgaacaaatagcttctctgcgtcgaaaattccct

SEQ ID NO: 449891 - DNA, 75 bp, synthetic construct
  source 1..75: mol_type = other DNA
tgttcaggataagatggctggtcgtgaaattgaccgaggcaggctggcagagacaatccgcagcaatcaggctgg

SEQ ID NO: 449892 - DNA, 75 bp, synthetic construct
  source 1..75: mol_type = other DNA
cgttggccgcattttgccgaagcgacggcccgcagcgccgcactttgcgccgaacaagagagcctgctggatgaa

SEQ ID NO: 449893 - DNA, 75 bp, synthetic construct
  source 1..75: mol_type = other DNA
cgtgcagacgaagcggtcagcgtgcgtttcaaagcgccaggattgctgcatattatcgggcgcaacggcggacgt

SEQ ID NO: 449894 - DNA, 75 bp, synthetic construct
  source 1..75: mol_type = other DNA
atgagaaacaggaaacatttattgtaccgatgcgtaatgctggcgagctgacgctggtgaaaagttttgactggt

SEQ ID NO: 449895 - DNA, 75 bp, synthetic construct
  source 1..75: mol_type = other DNA
attctgctgaaacgcacactgacggctaccatgtgggcattcactgtagttgcccgaacggtcagggcgctgtat

SEQ ID NO: 449896 - DNA, 63 bp, synthetic construct
  source 1..63: mol_type = other DNA
gtgccgattgccggacgcggcgtaaacgccttatccggcccaccgctccaacaccgactgtag

SEQ ID NO: 449897 - DNA, 75 bp, synthetic construct
  source 1..75: mol_type = other DNA
ttcactgacctgattgtggctgttgtttcccccagtggtagtaaggagggtgagatcgcctcccgcgagagagtc

SEQ ID NO: 449898 - DNA, 75 bp, synthetic construct
  source 1..75: mol_type = other DNA
ccttgccgggcgccggtgctgtgtggaaatccgcccaccttaccgggcgccggtgccgtgtggaaatccgcccac

SEQ ID NO: 449899 - DNA, 75 bp, synthetic construct
  source 1..75: mol_type = other DNA
accagtgtcataaaaaatatagctgtatggttcggcaatacctggaaaggcattaaaagcggctgggatgccgtt

SEQ ID NO: 449900 - DNA, 75 bp, synthetic construct
  source 1..75: mol_type = other DNA
ccacacaattgctgtttagcccgattacgttaatcatcctggcactggctgcgctgggtgtgggcatttatttcc

SEQ ID NO: 449901 - DNA, 75 bp, synthetic construct
  source 1..75: mol_type = other DNA
tccctgacaatatgttaagtggtacaggcaatgcggctaaaccgattaatgctttcaaaggtaatgtgacgctgg

SEQ ID NO: 449902 - DNA, 75 bp, synthetic construct
  source 1..75: mol_type = other DNA
tttgaaaatcaatgagttagcagagttgctgcatgttcatcgtaataacgtcagtgcactgatcaataacaatcg

SEQ ID NO: 449903 - DNA, 75 bp, synthetic construct
  source 1..75: mol_type = other DNA
atgattcagtatgttcttgcatcgctattcacagggaagcaacagttaaaaaccatgaaacaggcaacaagaaaa

SEQ ID NO: 449904 - DNA, 75 bp, synthetic construct
  source 1..75: mol_type = other DNA
ctgcgacagctacagggccatcatcagcggctggctcttcttttactatcacatatgacaatgtgccagcagcgg

SEQ ID NO: 449905 - DNA, 75 bp, synthetic construct
  source 1..75: mol_type = other DNA
ggcaggcaacttttataccgctaaagtgggttcaaaggttgtgaaggcttcggatggaacactcgatgtggcagc

SEQ ID NO: 449906 - DNA, 75 bp, synthetic construct
  source 1..75: mol_type = other DNA
atggttttattaaataacaaaagaaagagcaagaaaggtttctcactactcgaactattacttgttttaggcatc

SEQ ID NO: 449907 - DNA, 75 bp, synthetic construct
  source 1..75: mol_type = other DNA
gctcaaactgaagttgagctttccccagaagatttagaaatctttgaagggcttgttgatgcccttgaagatgac

SEQ ID NO: 449908 - DNA, 75 bp, synthetic construct
  source 1..75: mol_type = other DNA
ttgctaaaaaaacggctaaagacggtgcgacgtctaaaatttatgcaaaattcggtgtagaaatctatgctgctg

SEQ ID NO: 449909 - DNA, 75 bp, synthetic construct
  source 1..75: mol_type = other DNA
gaatgaagaggacattgccaatggcaaagggaaaagcggccagaacagagtgcgttgcccagagtatcggtgggc

SEQ ID NO: 449910 - DNA, 75 bp, synthetic construct
  source 1..75: mol_type = other DNA
gttaatgctggcgagacatttagtttaattggcgaatctggctgcggaaaatccaccatcttacgcgtactggct

SEQ ID NO: 449911 - DNA, 75 bp, synthetic construct
  source 1..75: mol_type = other DNA
gtggtgaacgtgaaatagaaaaacacgtccataccgcactggaacaagttggtttacctgccgacgccgctcgcc

SEQ ID NO: 449912 - DNA, 75 bp, synthetic construct
  source 1..75: mol_type = other DNA
cggcaatgatgaccggggggaaaattcaacgatttttcgatcgcaacgccctggaaaaaggtgagcatcggatgg

SEQ ID NO: 449913 - DNA, 75 bp, synthetic construct
  source 1..75: mol_type = other DNA
gcgttgaaagtgactcaagccttattccggatgtgaaacctaacgtcccctgggttcgactcgcccaacgcgttc

SEQ ID NO: 449914 - DNA, 75 bp, synthetic construct
  source 1..75: mol_type = other DNA
acctaacgtgccctgggttcgtcttgcccagcgagtaccagtacgctttcgtttagatagcgttcccaacaattt

SEQ ID NO: 449915 - DNA, 75 bp, synthetic construct
  source 1..75: mol_type = other DNA
atgcaggccagtgttgatgccgcacaggcgacgctgaaacaggcacaatggcaactggcgcaaacggaaattcgc

SEQ ID NO: 449916 - DNA, 75 bp, synthetic construct
  source 1..75: mol_type = other DNA
aactgtcttcgttcttaccggcaatccgcgacggtcgactggattttgcgattggtacgttaagtgcagaaatga

SEQ ID NO: 449917 - DNA, 75 bp, synthetic construct
  source 1..75: mol_type = other DNA
ctcaatgttaaagcgatgcaggccagtgttgatgccgcacaggcgacgctgaaacaggcacaatggcaactggcg

SEQ ID NO: 449918 - DNA, 75 bp, synthetic construct
  source 1..75: mol_type = other DNA
gccaataatgaagctaaccgtcgccgccatctctcacaaaactttatctctgccgaagagctggataccgctaac

SEQ ID NO: 449919 - DNA, 75 bp, synthetic construct
  source 1..75: mol_type = other DNA
ggctaatctccccttacccatagtaatggtgtgtgcagaagatgtaatgacgggaaaaccaagtcccgaacgcat

SEQ ID NO: 449920 - DNA, 75 bp, synthetic construct
  source 1..75: mol_type = other DNA
aaaaaaggtgatattttgatatgctccaggaatggaagtcgagacctaattggcaagtgtgcatttgtatctgac

SEQ ID NO: 449921 - DNA, 75 bp, synthetic construct
  source 1..75: mol_type = other DNA
tcccaatgtgccaatgaaagactccggtgtggattggattggtaagattccagcgcattgggacgttaagaggtt

SEQ ID NO: 449922 - DNA, 75 bp, synthetic construct
  source 1..75: mol_type = other DNA
ctagacatcattgaaaaagcggtaaaaacagcaatggatcatatcgccactcgtttggtcgagatcccgctaccg

SEQ ID NO: 449923 - DNA, 75 bp, synthetic construct
  source 1..75: mol_type = other DNA
gtgacttctttggcaacggaaatttactgaagctggacaggttgctagaaaacgttgaaaacgcctaccctgcgg

SEQ ID NO: 449924 - DNA, 75 bp, synthetic construct
  source 1..75: mol_type = other DNA
gttgattaatcaagcaaaacaggctgattacttcatcttttcggcaggcagcgccactcatcaggctttttacgc

SEQ ID NO: 449925 - DNA, 75 bp, synthetic construct
  source 1..75: mol_type = other DNA
gtgaaaactggcccgctgactcgttccatgaagcgacgctgctccagttactatcaagtcagattccaccagacg

SEQ ID NO: 449926 - DNA, 75 bp, synthetic construct
  source 1..75: mol_type = other DNA
aagaacaaaacaatgaattaaaggtgccgcctttttttgcgattaatacagatggtgaacttgccgataactatt

SEQ ID NO: 449927 - DNA, 75 bp, synthetic construct
  source 1..75: mol_type = other DNA
taacgatattgaagattattttggtgtggagttagtggtgcggaaaaataccggtgtaacattaacacctgccgg

SEQ ID NO: 449928 - DNA, 75 bp, synthetic construct
  source 1..75: mol_type = other DNA
agttattagaagtggttctatcggctcggctgcaaaagagttagggttaactcaaccggccgtcagtaaaatcat

SEQ ID NO: 449929 - DNA, 75 bp, synthetic construct
  source 1..75: mol_type = other DNA
caagaggctaaatcatacgccaccaatcatgtcacagagcttcttgccccttatcgcttagaaagcgatcagcgc

SEQ ID NO: 449930 - DNA, 75 bp, synthetic construct
  source 1..75: mol_type = other DNA
caggattgctaacgaattaccgatgatagagcaagaggctaaatcatacgccaccaatcatgtcacagagcttct

SEQ ID NO: 449931 - DNA, 75 bp, synthetic construct
  source 1..75: mol_type = other DNA
acagtattattgaagaggctattcaagaatcacttctaactatgcatagcttagttttgctggaagacaagcaaa

SEQ ID NO: 449932 - DNA, 75 bp, synthetic construct
  source 1..75: mol_type = other DNA
atgaaagtctgggcgatgcagggcgacacccttgacgcactttgcgcccggtattacgggcgcactgagggcgtg

SEQ ID NO: 449933 - DNA, 75 bp, synthetic construct
  source 1..75: mol_type = other DNA
agccgcaacaaggggtaaaactggaaggcgcatccagcaatttcatttcgccgcagccgggcaacatctatattc

SEQ ID NO: 449934 - DNA, 75 bp, synthetic construct
  source 1..75: mol_type = other DNA
ggcgattattttcctggttctgctgctggtgagcggcgtgattatctggcgtccttattttgcgcctgctttctc

SEQ ID NO: 449935 - DNA, 75 bp, synthetic construct
  source 1..75: mol_type = other DNA
tatctacgctgccctttgggtaaaaggcacgattaccgccatggtggaaggatgggttaccaacgcatgggcgaa

SEQ ID NO: 449936 - DNA, 75 bp, synthetic construct
  source 1..75: mol_type = other DNA
ttacaatggagatatgataaagacgcaggagtgggaacattaagtcaagagggagttgtgtgggacatgcatgga

SEQ ID NO: 449937 - DNA, 75 bp, synthetic construct
  source 1..75: mol_type = other DNA
agcatgagctgaacggtataaatttattcaccggtgcattactgacctatacagacagcaatgccagcagccagg

SEQ ID NO: 449938 - DNA, 75 bp, synthetic construct
  source 1..75: mol_type = other DNA
catgctcaggcgtttgaattggctcgccaggagtttgattatctttctgcagaagagattgcagatgaaatacgc

SEQ ID NO: 449939 - DNA, 75 bp, synthetic construct
  source 1..75: mol_type = other DNA
gtgcagaactgcaacaaaatgggcaagtgcaggacagcattagcacaaaactgtcttttgtggacaacagctggc

SEQ ID NO: 449940 - DNA, 75 bp, synthetic construct
  source 1..75: mol_type = other DNA
ggcaagtgcaggacagcattagcacaaaactgtcttttgtggacaacagctggcccgttgaacagcagaaaaatg

SEQ ID NO: 449941 - DNA, 75 bp, synthetic construct
  source 1..75: mol_type = other DNA
acaccggaatctccactgggagatgcggtggcaaacgtcttaaccatgacgttgctgaaaaaagcgcagttgaag

SEQ ID NO: 449942 - DNA, 75 bp, synthetic construct
  source 1..75: mol_type = other DNA
gctacaccgcgccggaacgtatcaaccactggatcaccgccttctgcttcatcctggcggcagtgagcgggctgg

SEQ ID NO: 449943 - DNA, 75 bp, synthetic construct
  source 1..75: mol_type = other DNA
tgctcgacagctacgcggagcaggcagataacatgccgttattgcatcgggcgctggtgctggcatgggcgcagg

SEQ ID NO: 449944 - DNA, 75 bp, synthetic construct
  source 1..75: mol_type = other DNA
aattcgttctgcctcctgctcgttatgtgcgttcctatgcacctgcgcagcaaagtgttgcggcagggagtgaat

SEQ ID NO: 449945 - DNA, 75 bp, synthetic construct
  source 1..75: mol_type = other DNA
accggaggtggtatcattactgaaaaaggtgtaaatgtgctttggcaggttaatggtgttaataatgataactta

SEQ ID NO: 449946 - DNA, 75 bp, synthetic construct
  source 1..75: mol_type = other DNA
gacgagaatatccgtcgcgcggatgttgtgttgttgattacagatatcgagctttctggtgccgagcgttttgaa

SEQ ID NO: 449947 - DNA, 75 bp, synthetic construct
  source 1..75: mol_type = other DNA
tccgtggtagcgaaggtccgcgcaatgcggtagctactgggctcctcatcgcctggcacaaggagtcgattcatg

SEQ ID NO: 449948 - DNA, 75 bp, synthetic construct
  source 1..75: mol_type = other DNA
ttatgaaagcagtcggcgagtgctcaaaactggaaaacgtgacaggcgaatccggtaccaatatcggcggtatgc

SEQ ID NO: 449949 - DNA, 75 bp, synthetic construct
  source 1..75: mol_type = other DNA
atgcagggtgacaccctcgatgcgatttgcgcccggtattacgggcgcactgagggcgtcgttgaaacggtgctg

SEQ ID NO: 449950 - DNA, 75 bp, synthetic construct
  source 1..75: mol_type = other DNA
caccgaaagatgatcatacagcatacggtatcaccgttccggtttttgattgctttgattttggatgtgtttctg

SEQ ID NO: 449951 - DNA, 75 bp, synthetic construct
  source 1..75: mol_type = other DNA
ctacagaaggaattcatctcggtgagcgggccagcctttcagtgaaaaatatgggctatctgagttcaaatatta

SEQ ID NO: 449952 - DNA, 75 bp, synthetic construct
  source 1..75: mol_type = other DNA
gaagagactaaaaatatcgttcctgtcgcacgggcgctaatcggcaaccgttcagctgtggtcgtgaaaacgcct

SEQ ID NO: 449953 - DNA, 75 bp, synthetic construct
  source 1..75: mol_type = other DNA
ttggtgtcacctcctcaaagacagactccggaaataactgggtcgtcaccactcaggatttccttggtcagcaac

SEQ ID NO: 449954 - DNA, 75 bp, synthetic construct
  source 1..75: mol_type = other DNA
actgcggttggtacaaataataatagcggtcttgatattaaaacccgccgcctgagtaaactggtgacagaggtg

SEQ ID NO: 449955 - DNA, 75 bp, synthetic construct
  source 1..75: mol_type = other DNA
gatgtagctgctggtgccgatgccattatgaaagcggtcggtgagtgcccaaaactggaaaacgtgacgggagaa

SEQ ID NO: 449956 - DNA, 75 bp, synthetic construct
  source 1..75: mol_type = other DNA
gaaattcctctacctattgttgatgaagtcctctacatcgatcgtattccgctcggcatgctggctgcaattgaa

SEQ ID NO: 449957 - DNA, 75 bp, synthetic construct
  source 1..75: mol_type = other DNA
tggtggaaatattcgcaacattccgttcgtcgttctggtgggcggctcttcactggatttcgaagtcccgcagtt

SEQ ID NO: 449958 - DNA, 75 bp, synthetic construct
  source 1..75: mol_type = other DNA
gtattactgccatgtcgataacagctgctatatgaacttcgacttcagtgctccggaataccatgaactggcatt

SEQ ID NO: 449959 - DNA, 75 bp, synthetic construct
  source 1..75: mol_type = other DNA
cctgaaaccttacctcaaagacgccgtcgcacagaacgcgaagtccggcctgccggttatgcgcccgctgttcct

SEQ ID NO: 449960 - DNA, 75 bp, synthetic construct
  source 1..75: mol_type = other DNA
ccggtagccagaaatattccaccatgatgtgggcgggcgaccagaacgttgactggagtctggacgatggactgg

SEQ ID NO: 449961 - DNA, 75 bp, synthetic construct
  source 1..75: mol_type = other DNA
cttcttggcattgaagaggaaggtattccctttcgcattcaacacattccgtcaggtgaagttatcgatagcgcc

SEQ ID NO: 449962 - DNA, 75 bp, synthetic construct
  source 1..75: mol_type = other DNA
tggcaagcggcgcgtcagtcgcctcttctggtcggtattgcctgcgatcgggaaacactggtggtgcattacaaa

SEQ ID NO: 449963 - DNA, 75 bp, synthetic construct
  source 1..75: mol_type = other DNA
aataccatgaactggcgctgtgggaagacaaagcaacactgcgttttgaatgtgctgatacatacatctccctgc

SEQ ID NO: 449964 - DNA, 75 bp, synthetic construct
  source 1..75: mol_type = other DNA
aaacgcattgtcgacaccctgaccgcctcggcgctgaacgaaccttcagcgatggcagcggcgcttgagctttaa

SEQ ID NO: 449965 - DNA, 75 bp, synthetic construct
  source 1..75: mol_type = other DNA
tgacctgtgggcgttgacccagcaggggccagccgaagaactgaataaaacctggcaaacccagccagcattgtt

SEQ ID NO: 449966 - DNA, 75 bp, synthetic construct
  source 1..75: mol_type = other DNA
caccggcaatgatggccggtcacagcctgggggaatactccgcgctggtttgcgctggcgtgattgatttcgctg

SEQ ID NO: 449967 - DNA, 75 bp, synthetic construct
  source 1..75: mol_type = other DNA
acgacaaccttaaccacaaccgcatctggctgcgccttgccgcacagccggaagatcatatctacggctgcggcg

SEQ ID NO: 449968 - DNA, 75 bp, synthetic construct
  source 1..75: mol_type = other DNA
ctcaggtatagcggatatcgatatgttccgcggtaatttcagcattaaagataaactacaggagaaaattgcgct

SEQ ID NO: 449969 - DNA, 75 bp, synthetic construct
  source 1..75: mol_type = other DNA
tcggtctggatgatgcgtctattgcgaaagcgtgtgaagaagctgcagaaggtcaggtcgtttctccggtaaact

SEQ ID NO: 449970 - DNA, 75 bp, synthetic construct
  source 1..75: mol_type = other DNA
tggcggtcaacgcctccgatggcccgtccgggcctgtcaccgttaactcgcgccgccgtcgttcgtcggtgcgtc

SEQ ID NO: 449971 - DNA, 75 bp, synthetic construct
  source 1..75: mol_type = other DNA
tggtggtctgggacggacagaaagccggtagtgcggttggcatactggtactgccgcttgaaggcacagagacgg

SEQ ID NO: 449972 - DNA, 75 bp, synthetic construct
  source 1..75: mol_type = other DNA
cgctgcaatgggggccacgctcggagcatgggctggtcccgtcgggatagctgctggtgctgtgattggcggcat

SEQ ID NO: 449973 - DNA, 75 bp, synthetic construct
  source 1..75: mol_type = other DNA
tcggggcgactgttggttcagcagtaccggtagtggggacagccgtcggcgctgttgctggtgcagtaattggcg

SEQ ID NO: 449974 - DNA, 75 bp, synthetic construct
  source 1..75: mol_type = other DNA
atttcattctaattttctcactcaaattgaacgattaaaacctgtccatgtaattattttctccccctttaatat

SEQ ID NO: 449975 - DNA, 75 bp, synthetic construct
  source 1..75: mol_type = other DNA
aatgtctttcattcttcaatactcaacaaaattgaacatctgaagcctgttcatgtcattgttttctcaccgttt

SEQ ID NO: 449976 - DNA, 75 bp, synthetic construct
  source 1..75: mol_type = other DNA
cgatgttcttcaccgcgatgaaaaacattctgagtaaaggtaatgtcgttcatatacagaacgaagaagagatcg

SEQ ID NO: 449977 - DNA, 75 bp, synthetic construct
  source 1..75: mol_type = other DNA
cgttttggcatggtctatccaacgggctggttgcgtaacgggcaacccacaccacgttccgataaaatgagtggt

SEQ ID NO: 449978 - DNA, 75 bp, synthetic construct
  source 1..75: mol_type = other DNA
aatgacattgagtttggtctggatttccacggccgcgtcagcgcaccgatggcaaaagtgttaatcaaagagctg

SEQ ID NO: 449979 - DNA, 75 bp, synthetic construct
  source 1..75: mol_type = other DNA
ataaggaaagcagcatttaaactccagtttgatgtttctactttcattttctacaacaaaatacacgacacagaa

SEQ ID NO: 449980 - DNA, 75 bp, synthetic construct
  source 1..75: mol_type = other DNA
atgggatacggtttactggatattgcaaatcagtcgcggcgtgaggcattacagggaataagtgacgcagacaga

SEQ ID NO: 449981 - DNA, 75 bp, synthetic construct
  source 1..75: mol_type = other DNA
gagttgcccgcctaacgcctttaattcaggtatcgacttattattactggaaccaggaaaaccgcaccgcctgtt

SEQ ID NO: 449982 - DNA, 75 bp, synthetic construct
  source 1..75: mol_type = other DNA
tacggtgtgggtattcacccttatttaacctgcaacttaacatctgttgatgaatatctgttccagcttccggca

SEQ ID NO: 449983 - DNA, 75 bp, synthetic construct
  source 1..75: mol_type = other DNA
ctgaagcttctgcggcgctgggctacgacctgtgggcgctgacccagcaggggccagctgaagaactgaataaaa

SEQ ID NO: 449984 - DNA, 75 bp, synthetic construct
  source 1..75: mol_type = other DNA
acatcccgttccctgtagaagtcctgccgacccgtaacagcttaccgaccccaatcattgcccacactctggctg

SEQ ID NO: 449985 - DNA, 75 bp, synthetic construct
  source 1..75: mol_type = other DNA
taaagtgttcgttgtcgctgaagctgctacgaccatcaagatgggcactggctcagctactgccgtcctgcctgt

SEQ ID NO: 449986 - DNA, 75 bp, synthetic construct
  source 1..75: mol_type = other DNA
agtctcacgaccttgagattctcggtaaggtcttcgtggtcgctgaggctgcaacgactgttaagatggggactg

SEQ ID NO: 449987 - DNA, 75 bp, synthetic construct
  source 1..75: mol_type = other DNA
agttcggcattgagcctgttcgtatcaccgacaccgacaaccttcagattaacgaaggtctttcgactaccgccg

SEQ ID NO: 449988 - DNA, 75 bp, synthetic construct
  source 1..75: mol_type = other DNA
gtgattcgtaccattaactctaagatggttgacgtgctggagtcctcaaagctgctgaagaccgtagaacttccg

SEQ ID NO: 449989 - DNA, 75 bp, synthetic construct
  source 1..75: mol_type = other DNA
gctacgaccatcaagatgggcactggcttggctactgctgtactgcctgtagtcaaacgcctgagcttcactaaa

SEQ ID NO: 449990 - DNA, 75 bp, synthetic construct
  source 1..75: mol_type = other DNA
cgaacgcaataacccccgagagagcgctggaatctgttttatctcacgttggcgatctgcctggcgatattcgaa

SEQ ID NO: 449991 - DNA, 75 bp, synthetic construct
  source 1..75: mol_type = other DNA
catatcgtcacgctgcagcatatgctcgagcccggccggaacataacgaccgcaacagaagcctgccgccactac

SEQ ID NO: 449992 - DNA, 75 bp, synthetic construct
  source 1..75: mol_type = other DNA
catatcgtcacgctgcaacatatgctcgagcccggcaggaatacagcgggggcaacagaagcctgccgacactac

SEQ ID NO: 449993 - DNA, 75 bp, synthetic construct
  source 1..75: mol_type = other DNA
tggtggtaagcgacctgaagtcgtgaccgctccgtctggtactgaaatcactgttgagcctattgaacaggctat

SEQ ID NO: 449994 - DNA, 75 bp, synthetic construct
  source 1..75: mol_type = other DNA
atcaagatgggtactggtagtgctactgctgtcctgcctgtagtcaaacgcctgagctttactgagaccaactaa

SEQ ID NO: 449995 - DNA, 75 bp, synthetic construct
  source 1..75: mol_type = other DNA
accctcaggtctacgcccttgagctggctaagctggttaagacgatgctcaatggtgtgcttaaagacgctcaag

SEQ ID NO: 449996 - DNA, 75 bp, synthetic construct
  source 1..75: mol_type = other DNA
aatggtgtgcttaaagacgctcaggataacattccgttccctgtagaagtcctgccgacccgtaacagcttacca

SEQ ID NO: 449997 - DNA, 75 bp, synthetic construct
  source 1..75: mol_type = other DNA
aagccgaagccgaagccgaagccggacaggatgctccccggaaaaagaccggtaacaaagcggaacaggcccgtg

SEQ ID NO: 449998 - DNA, 75 bp, synthetic construct
  source 1..75: mol_type = other DNA
agccgaagccgaagccgaagccgaagccgaagccggacaggatgctccccggaaaaataccggtagcaaagcgaa

SEQ ID NO: 449999 - DNA, 75 bp, synthetic construct
  source 1..75: mol_type = other DNA
tgatgtaggcgaacagctattgcttgcctcgtgcatagagaacccagaagccattttcatgacgggtgatcgccg

SEQ ID NO: 450000 - DNA, 75 bp, synthetic construct
  source 1..75: mol_type = other DNA
gactggaggcggagccatgcctcactgtgcgaatactacagacgtctgctgatgatgcggggagcgtggcgggtg

SEQ ID NO: 450001 - DNA, 75 bp, synthetic construct
  source 1..75: mol_type = other DNA
gatgatgcggggagcgtggcgggtgtggttcatgcagtggcctgtacagatttagccgaagccgaagccgaagcc

SEQ ID NO: 450002 - DNA, 75 bp, synthetic construct
  source 1..75: mol_type = other DNA
tgtgcgaatactacagacgtctgctgatgatgcggggagcgtggcgggtgtggttcatgcagtggcctgtacaga

SEQ ID NO: 450003 - DNA, 75 bp, synthetic construct
  source 1..75: mol_type = other DNA
atgaagaaaataagtttaaccacgatgattcttttggcgctggtacttggaatgattatcggcgtagtgctcaat

SEQ ID NO: 450004 - DNA, 75 bp, synthetic construct
  source 1..75: mol_type = other DNA
ctcagtcccatgaccttgagattctcggtaaggtattcgtggtcgctgaggctgctacgactgtgaagatgaaga

SEQ ID NO: 450005 - DNA, 75 bp, synthetic construct
  source 1..75: mol_type = other DNA
accctcaggtctatgccttccagttagctaagctggtgaagaccatgctcaattctgtacttaaagacgctcagg

SEQ ID NO: 450006 - DNA, 75 bp, synthetic construct
  source 1..75: mol_type = other DNA
atgctaacgcgactatcgaaagtctccgtgatgatgtttctgctggtcgtaagcgcctgcaagtcgctgccacct

SEQ ID NO: 450007 - DNA, 75 bp, synthetic construct
  source 1..75: mol_type = other DNA
gcctcaatggtggttatcgccgccacgctcaaccagttcaatattccggaagcggggctgatcttgctgatgggc

SEQ ID NO: 450008 - DNA, 75 bp, synthetic construct
  source 1..75: mol_type = other DNA
tcaacgagtcagcttgggaagaaatgacctgcttattcgcaccttccctaaaagtatttatttcgcatgctttcc

SEQ ID NO: 450009 - DNA, 75 bp, synthetic construct
  source 1..75: mol_type = other DNA
gataaaccgtaccttcccggataataccggcagaagtgcccgccgtgccagagccagtggcgatgtcgcgctgtg

SEQ ID NO: 450010 - DNA, 75 bp, synthetic construct
  source 1..75: mol_type = other DNA
aatgcagcgttatgaacaactgagtcagcacagggctgacagctggaaaatcctgccgggagcaccgttgtatga

SEQ ID NO: 450011 - DNA, 75 bp, synthetic construct
  source 1..75: mol_type = other DNA
accgccagtgatataacctctcatcagtccctcagcagaaaaatcagtgcccgtcatttcacaggtatttttcag

SEQ ID NO: 450012 - DNA, 75 bp, synthetic construct
  source 1..75: mol_type = other DNA
cggacacaccatcgcgaccaccgtaactggctggctctacggctattcgtattatgctctgtaaaccgttggcca

SEQ ID NO: 450013 - DNA, 75 bp, synthetic construct
  source 1..75: mol_type = other DNA
agacgaagataatgaacccgttatggtttttaacggagagaggaatgtaccggcagacagtctgaaaccgcagcc

SEQ ID NO: 450014 - DNA, 75 bp, synthetic construct
  source 1..75: mol_type = other DNA
tgacgtacagggcggtaaaaatcgccgttttgttgtgcagatcaccggatacggagagcagggggaacgctggat

SEQ ID NO: 450015 - DNA, 75 bp, synthetic construct
  source 1..75: mol_type = other DNA
cggtattgtcagctaccgcgaagtgacggcggcgatggcaaaaatcttccaggccagaggcggtgagattattta

SEQ ID NO: 450016 - DNA, 75 bp, synthetic construct
  source 1..75: mol_type = other DNA
ttttgcgatcaaaacggcattcgctacgacaactgcggcaagatgctggtcgccacgtccgctctcgaaatggaa

SEQ ID NO: 450017 - DNA, 75 bp, synthetic construct
  source 1..75: mol_type = other DNA
tggactggaaaattcaaaatacccccattattaaaatggggctaacctgggatgcaatctcatggctgacgctta

SEQ ID NO: 450018 - DNA, 75 bp, synthetic construct
  source 1..75: mol_type = other DNA
aaacggatgacatgttgttgttacaggaaacagaacgtgcgctggcggataaatcctcgccgaaggtgattttcc

SEQ ID NO: 450019 - DNA, 75 bp, synthetic construct
  source 1..75: mol_type = other DNA
acgataatgatttttttgtttgttttagtatatttaatccaaggattatatctctgaataataaatgtaatgtgg

SEQ ID NO: 450020 - DNA, 75 bp, synthetic construct
  source 1..75: mol_type = other DNA
ttttcaatatgaaaggaataatgagtatttctgcttttactctaaagttgttccgccgaaatttcatcatttctt

SEQ ID NO: 450021 - DNA, 75 bp, synthetic construct
  source 1..75: mol_type = other DNA
gattacgccaggcaattgattttacgttgttagacctgatgacgttaacggcaaaggcagaagcaagcgggctta

SEQ ID NO: 450022 - DNA, 75 bp, synthetic construct
  source 1..75: mol_type = other DNA
gcggcatcatcggcatgtcgatcgccatgcaactgattgatgtttatccggatgcccgcattgcgttgctggaaa

SEQ ID NO: 450023 - DNA, 75 bp, synthetic construct
  source 1..75: mol_type = other DNA
ggaattctttatccagagaaagttgccgttggtgaatcaataaattctgacgccatatccggaaaagtactttcc

SEQ ID NO: 450024 - DNA, 75 bp, synthetic construct
  source 1..75: mol_type = other DNA
cgctggcagatacatccactccgaaggtgattttcctgcacatgatggggtctcatccgaacccgtgtgatcggc

SEQ ID NO: 450025 - DNA, 75 bp, synthetic construct
  source 1..75: mol_type = other DNA
tttaagcaagttgctattgccattgataatcggccgagtagccctgctatcgcgcaggcttgtattgcggcactg

SEQ ID NO: 450026 - DNA, 75 bp, synthetic construct
  source 1..75: mol_type = other DNA
gtgcaaaagcggctatctgcgcctggtgcaaaagtattgtccccggctttcgttaagcgatctccagccctggcc

SEQ ID NO: 450027 - DNA, 75 bp, synthetic construct
  source 1..75: mol_type = other DNA
catgcaactgattgatgtttatccggatgcccgcatagcgttgctggaaaaagagcccggcccggcctgtcacca

SEQ ID NO: 450028 - DNA, 75 bp, synthetic construct
  source 1..75: mol_type = other DNA
atacacgcatctctgttattgcttctgatgcggagcataccgttttcctcaagaaaggcagctttgcttcccgta

SEQ ID NO: 450029 - DNA, 75 bp, synthetic construct
  source 1..75: mol_type = other DNA
atagcgcccggctgggtgaaggtatcggtgaattagcccgtcagatgttaatgagcgatagttgtaaaatcgcca

SEQ ID NO: 450030 - DNA, 75 bp, synthetic construct
  source 1..75: mol_type = other DNA
aaagtgatggaagccatcgaatctgttgccgatgccgaccatgtgctggtcatgatggatatggggagcgcgtta

SEQ ID NO: 450031 - DNA, 75 bp, synthetic construct
  source 1..75: mol_type = other DNA
gacgggccacaacagcggcgtgatccatgccggggtctattacacgcccggtagcctgaaggcgcagttttgcct

SEQ ID NO: 450032 - DNA, 75 bp, synthetic construct
  source 1..75: mol_type = other DNA
aaatgctcggcctcgaaccgggctttatcatctgcccgttccgcggcgagtatttccgcctggcgccggagtata

SEQ ID NO: 450033 - DNA, 75 bp, synthetic construct
  source 1..75: mol_type = other DNA
cggcggcgaacgggatcgagcgcgagtggttaaacgctgaggagctgcgcgagcgcgaaccgaatatcaccgggc

SEQ ID NO: 450034 - DNA, 75 bp, synthetic construct
  source 1..75: mol_type = other DNA
ccggataaccgcgttgtggtctatatgggcgatgaccagaaattcgaatacatatataaatttgtctcggaagga

SEQ ID NO: 450035 - DNA, 75 bp, synthetic construct
  source 1..75: mol_type = other DNA
tggactatatcgtctggctgtcgagggtgatatcccgcagaaagaagcggcagcagagctgattccgtatattca

SEQ ID NO: 450036 - DNA, 75 bp, synthetic construct
  source 1..75: mol_type = other DNA
gaaatatcgatcttgttaacgatcagcttaaaaatgcagaatcgggcgctgccaccacacgcctgaaaaaagagc

SEQ ID NO: 450037 - DNA, 75 bp, synthetic construct
  source 1..75: mol_type = other DNA
aaaaggaataatatcagcctcttctgttccatatgtcaaaatatcacctgaggactacggtgcaatagcagttga

SEQ ID NO: 450038 - DNA, 75 bp, synthetic construct
  source 1..75: mol_type = other DNA
cctcgagagactattactttaaaccatgtttaaattggacaaggatttctagtccttcaggttcgtttagatatt

SEQ ID NO: 450039 - DNA, 75 bp, synthetic construct
  source 1..75: mol_type = other DNA
atcactattgatctggatgacggcgttaaggttaactacggcaaatttggcgatctgctggcggatgtcaaggcg

SEQ ID NO: 450040 - DNA, 75 bp, synthetic construct
  source 1..75: mol_type = other DNA
actgattctggaaaacaatattttcggcctggacatcgacgaccgcgccgcgcagctgtctggttttgcaatgct

SEQ ID NO: 450041 - DNA, 75 bp, synthetic construct
  source 1..75: mol_type = other DNA
ttaccgcaaggctttctgtttgatggtagaggatcctctggcttttgtgaagataaccttcgcccaacaatttta

SEQ ID NO: 450042 - DNA, 75 bp, synthetic construct
  source 1..75: mol_type = other DNA
cgcgagctagataaacgcggtcagtatgagacctttaaagccgcgtttgccgatatcaatggctcacgctgggaa

SEQ ID NO: 450043 - DNA, 75 bp, synthetic construct
  source 1..75: mol_type = other DNA
tggttgcaaagatagagaagaagcatcgaactcattaaaaaaatggttcccttatgccaaaggtggtagctatag

SEQ ID NO: 450044 - DNA, 75 bp, synthetic construct
  source 1..75: mol_type = other DNA
acccaagatttactaagtgcacaatctatgctccaaagtagtttgtttgagtatcttttagagttgcaaggggac

SEQ ID NO: 450045 - DNA, 75 bp, synthetic construct
  source 1..75: mol_type = other DNA
ttaagctcgttcaatgcagacaaccgctaccaactgctgaagcgaacattggcaagatttactcaatccaagacc

SEQ ID NO: 450046 - DNA, 75 bp, synthetic construct
  source 1..75: mol_type = other DNA
cgaccgagcggcacagctttccggctttgcattattaatgatggcacgtcaggatgaccgcagaatatttacccg

SEQ ID NO: 450047 - DNA, 75 bp, synthetic construct
  source 1..75: mol_type = other DNA
acaactgattctggaaaataatatttttggtcttgatatcgacgaccgcgcggcacagctttccggctttgcatt

SEQ ID NO: 450048 - DNA, 75 bp, synthetic construct
  source 1..75: mol_type = other DNA
ggctcactgattcaggtaccgcaggaagaagaagcggaactgaaggtattcctggacgcgctgtatcgcctggaa

SEQ ID NO: 450049 - DNA, 75 bp, synthetic construct
  source 1..75: mol_type = other DNA
attaacttttctcaactaacaaaaaaaatatggtgcccttacaacaaaggtggtgaatatcgaaaatggtatgga

SEQ ID NO: 450050 - DNA, 75 bp, synthetic construct
  source 1..75: mol_type = other DNA
attggcttgatgacaatacgagggcttgttttaatacaaaaaaaaacattggaaccagttcaaaactaagagaag

SEQ ID NO: 450051 - DNA, 75 bp, synthetic construct
  source 1..75: mol_type = other DNA
cttcaatagaccttttaaacgaactatcttgcagagtggatgattataataataacaatttatcatctggaaaag

SEQ ID NO: 450052 - DNA, 75 bp, synthetic construct
  source 1..75: mol_type = other DNA
gcagctggcggcgattaccccagccagcattgaacccgaaagcattaaagtgctcgacccggcctgcggttccgg

SEQ ID NO: 450053 - DNA, 75 bp, synthetic construct
  source 1..75: mol_type = other DNA
ttatatagatatggatcatctttaaaaccggaacaatatcaagccagattctgttcagatagtattgttgaactt

SEQ ID NO: 450054 - DNA, 75 bp, synthetic construct
  source 1..75: mol_type = other DNA
gttggcgcgttatcaggccaatatcgatcgcctgaacgatcaactcgatgaagcttctggcggtgaagccacacg

SEQ ID NO: 450055 - DNA, 75 bp, synthetic construct
  source 1..75: mol_type = other DNA
ccttgatcgcgaaggtctggtatacgctcatgaaggcaataatggcttcgccgatcttgtcgccgaaggtgctta

SEQ ID NO: 450056 - DNA, 75 bp, synthetic construct
  source 1..75: mol_type = other DNA
agtatgcaattaaaaatgacaataaatgtcattggaaatataacagaatcaccacggactttctatgtactcccg

SEQ ID NO: 450057 - DNA, 75 bp, synthetic construct
  source 1..75: mol_type = other DNA
gtcttggaattttaaaagaaactctattttaaaatatcataaaaatataaggtcgggattcagctctttgctaga

SEQ ID NO: 450058 - DNA, 75 bp, synthetic construct
  source 1..75: mol_type = other DNA
agctccggtaaagagaaagccttcgagtgcctggtgtatctgcatcgctataacgacgccacgctgtcgaggatg

SEQ ID NO: 450059 - DNA, 75 bp, synthetic construct
  source 1..75: mol_type = other DNA
tatgggaatagctttccaaacatctgcatttattatttgcaatcaaaaattagagctatattcatgtagctacaa

SEQ ID NO: 450060 - DNA, 75 bp, synthetic construct
  source 1..75: mol_type = other DNA
catctggacacaggatgtcagcaaagtgttacgcctggcgcgtggcattgaagcaggcatggtgttcgtcaacac

SEQ ID NO: 450061 - DNA, 75 bp, synthetic construct
  source 1..75: mol_type = other DNA
tggagaaacaggtaaaggatcttcactacacgccagttcaggtaacacgggtagggattaatgacggtgaagaag

SEQ ID NO: 450062 - DNA, 75 bp, synthetic construct
  source 1..75: mol_type = other DNA
ctgttgtaactttttccgggaatattattcaggacagtactattaatatgctgcgcctcagcgatcccgacgctg

SEQ ID NO: 450063 - DNA, 75 bp, synthetic construct
  source 1..75: mol_type = other DNA
taacgcccctggcgatatttgatgatttggacgatgccgtctttaaatttgatggatgcagcgtcgatgatatca

SEQ ID NO: 450064 - DNA, 75 bp, synthetic construct
  source 1..75: mol_type = other DNA
ggatgtcagcaaagtgctgcgtctggcgcgcggcattgaagcaggcatggtgttcgtcaacacccagaacgtgcg

SEQ ID NO: 450065 - DNA, 75 bp, synthetic construct
  source 1..75: mol_type = other DNA
acggcaaaaatgttgcaggtaacgactacttccagactaccaatccggcaacgggtgaagtgctggcggatgtgg

SEQ ID NO: 450066 - DNA, 75 bp, synthetic construct
  source 1..75: mol_type = other DNA
tgccacacattctccagaagtagcttcaaaatacaggagtgcaatttttaacatggagaaacttgtcaatgtcca

SEQ ID NO: 450067 - DNA, 75 bp, synthetic construct
  source 1..75: mol_type = other DNA
gttttgataatgtaacaataaaaataaaagaaggaagcaaaactaaaacaataaaagttgtgagtaaatttgaca

SEQ ID NO: 450068 - DNA, 75 bp, synthetic construct
  source 1..75: mol_type = other DNA
ccgaaagtttgcgcaggtttacaagccagtgctgaaatgtgcggtaacacgcgtcagcaggcgatgacctggctt

SEQ ID NO: 450069 - DNA, 75 bp, synthetic construct
  source 1..75: mol_type = other DNA
gacgacggcaaccggcgcggatggtggggtgaccttgagcaggattaccgggtcggctcccggttgtggctgctg

SEQ ID NO: 450070 - DNA, 75 bp, synthetic construct
  source 1..75: mol_type = other DNA
ggaccggctgtacatgaccattgcataccagcgtccggatgcggacacgacggaataccagaaattttaccgggt

SEQ ID NO: 450071 - DNA, 75 bp, synthetic construct
  source 1..75: mol_type = other DNA
gaaggaactgaccgccgcggctggtggggggatctggacaacgatcggaatattggctcaaggctgtggctactg

SEQ ID NO: 450072 - DNA, 75 bp, synthetic construct
  source 1..75: mol_type = other DNA
gagttcatgttgtatgcgcccggaggatttgactcaaggaaaaactttaaacggttgattgaggcctatgccggg

SEQ ID NO: 450073 - DNA, 75 bp, synthetic construct
  source 1..75: mol_type = other DNA
gccggagaatcgtctggcgcgacattttcgtgatatcgccgggcgagtgaatcagcaactggccgctgcggcaga

SEQ ID NO: 450074 - DNA, 75 bp, synthetic construct
  source 1..75: mol_type = other DNA
ccaataccggtggttgatgaagtcactctactggagaaggtgccggaaggcgtgctggcggcggtggaagtggcg

SEQ ID NO: 450075 - DNA, 75 bp, synthetic construct
  source 1..75: mol_type = other DNA
gcatgcttgagcgggtgcgcaaggtaatggcgtccctgaccggccatgagatgagcgcgatatacatccaggatc

SEQ ID NO: 450076 - DNA, 75 bp, synthetic construct
  source 1..75: mol_type = other DNA
aactgaccttgatgaacacagtcttatgcttatggctgatggaaaacctgtaaaaagtctccctcctggatatgt

SEQ ID NO: 450077 - DNA, 75 bp, synthetic construct
  source 1..75: mol_type = other DNA
gagaatttctgttgtgctttcggaacaacaggctttccaggtacgcaaatggagtgaagccacccggcataaact

SEQ ID NO: 450078 - DNA, 75 bp, synthetic construct
  source 1..75: mol_type = other DNA
ggagcgggaaaagccggcacgctgaggcgcttattgggaattctccacaggttctgtatatcgccacttcgcaaa

SEQ ID NO: 450079 - DNA, 75 bp, synthetic construct
  source 1..75: mol_type = other DNA
tgccgatctggtgatgctcgccagcgaacgccgcgattttgaggttgacgaaggttccgtgtggccatgcctcga

SEQ ID NO: 450080 - DNA, 75 bp, synthetic construct
  source 1..75: mol_type = other DNA
attatcaacccagttcgtcctggccagtcatacggcatgttcatcaatcgctttaacgagttgatggagcagcgc

SEQ ID NO: 450081 - DNA, 75 bp, synthetic construct
  source 1..75: mol_type = other DNA
cgctgaactggcgtgtggaaggcccattcgatagctcatatagtctggcgttggtcaaccgcgaatttgcccggg

SEQ ID NO: 450082 - DNA, 75 bp, synthetic construct
  source 1..75: mol_type = other DNA
cgcctgcgtaaaaccctgccggtggtagatgaagtgacgctcctggagcaggtccccgagggggtgatggcggcg

SEQ ID NO: 450083 - DNA, 75 bp, synthetic construct
  source 1..75: mol_type = other DNA
tcgtactgattgacgacgccgtcgatttccttgacgccgtgtggtggctcaatgaggcgctcgaccgggggatca

SEQ ID NO: 450084 - DNA, 75 bp, synthetic construct
  source 1..75: mol_type = other DNA
ccggcgatctccctttggagaaagttcgtactattcgccgcagcgccaaagaacgagtcttcgtcactaatgctc

SEQ ID NO: 450085 - DNA, 75 bp, synthetic construct
  source 1..75: mol_type = other DNA
ccgaaagtctgtgcaggcttacaagccagtgctgaaatgtgcggtaactcgcgtcagcaggccatgacctggctt

SEQ ID NO: 450086 - DNA, 75 bp, synthetic construct
  source 1..75: mol_type = other DNA
tcgccggacggcaagctgattgacgattttctgtttgtcaccaccccgcgcacgatccacacctgcaatgcgccc

SEQ ID NO: 450087 - DNA, 75 bp, synthetic construct
  source 1..75: mol_type = other DNA
agatactgaagcagtaagtgattctgatcggggaaaagcaaagaattggtgccaggaattcaaacttgatgctat

SEQ ID NO: 450088 - DNA, 75 bp, synthetic construct
  source 1..75: mol_type = other DNA
ttgtcagggaagttgattggtatttatgagcactctagtgctggaagagatttatactcaattgtatttgaaaat

SEQ ID NO: 450089 - DNA, 75 bp, synthetic construct
  source 1..75: mol_type = other DNA
acgaagtaattaactggaagaatttcgcatatacccttaaagaactggaggaagccaaaaatgaagcgataaaag

SEQ ID NO: 450090 - DNA, 75 bp, synthetic construct
  source 1..75: mol_type = other DNA
atggcaatagttcgcaaagtaactttaaaaggcgatatctttaaaggcgagactattacattcgattaccccgca

SEQ ID NO: 450091 - DNA, 75 bp, synthetic construct
  source 1..75: mol_type = other DNA
tccctcaaaaacaggcatttgtcattgaacgaatcacaaatggcaagcttaagtacgacgccagcctttaccaaa

SEQ ID NO: 450092 - DNA, 75 bp, synthetic construct
  source 1..75: mol_type = other DNA
ttgatatggtcgctggaatcgcaaccagttccagtcgcttttgcagccaagcggcggcggattgtgcgtcagcgg

SEQ ID NO: 450093 - DNA, 75 bp, synthetic construct
  source 1..75: mol_type = other DNA
aagtgttacccgacggtttatttgctaaagagcgggtggcgctgtttttgcgcgcggacaacaacctctatcaac

SEQ ID NO: 450094 - DNA, 75 bp, synthetic construct
  source 1..75: mol_type = other DNA
ggattaaggctgaccttatctaatcgaacaattttccatttgcgtccttccggaaatgcgccagagctacggtgt

SEQ ID NO: 450095 - DNA, 75 bp, synthetic construct
  source 1..75: mol_type = other DNA
aaaatcgcattagctattgataatcgtcctagtagttattgcatagcaaaatattgtgctgctgcgttatcagat

SEQ ID NO: 450096 - DNA, 75 bp, synthetic construct
  source 1..75: mol_type = other DNA
atgaataattaccttttaaaatctaaagcgttaatcgtgaattgcaatgttgtatttggcacaagtggtgctcgc

SEQ ID NO: 450097 - DNA, 75 bp, synthetic construct
  source 1..75: mol_type = other DNA
tcttaccgttgtagaacaaaaattttcttttactagtgttgcattagcaattgacaatcgccctagtagttatga

SEQ ID NO: 450098 - DNA, 75 bp, synthetic construct
  source 1..75: mol_type = other DNA
atgagcaaagaattttacgcaagactggcagccattcaggagaatctgaatgcgcccaaaaatcagtacaactca

SEQ ID NO: 450099 - DNA, 75 bp, synthetic construct
  source 1..75: mol_type = other DNA
ttgtttttaatattggccacggtatggttgggtattatgacaatgcaccagactattttcagtctctttttgata

SEQ ID NO: 450100 - DNA, 75 bp, synthetic construct
  source 1..75: mol_type = other DNA
accgtagcagttatgacggtttcgattacagagcaacaggagtatttgccgaaccgagtattttctctatacata

SEQ ID NO: 450101 - DNA, 75 bp, synthetic construct
  source 1..75: mol_type = other DNA
aacatcatcaaagagcaggctattaacaccggtaatgaaatggagaacgctggtgaggctctggtgtggctggtc

SEQ ID NO: 450102 - DNA, 75 bp, synthetic construct
  source 1..75: mol_type = other DNA
gatatgagagagcggtttcagtctgcttctgcgggcgaactgctgaacgcgcttaaagacaaaatgcctgtggct

SEQ ID NO: 450103 - DNA, 75 bp, synthetic construct
  source 1..75: mol_type = other DNA
tattggcgcaggtgacgatcagatcacgctgtccggtctgttgtacccggaaattaccggtggtgaggtgtcact

SEQ ID NO: 450104 - DNA, 75 bp, synthetic construct
  source 1..75: mol_type = other DNA
atgatgatgatctacggcatgtttgtttttgagctgcgcacgctgccgcatcagcagatccagcagagcaaaaca

SEQ ID NO: 450105 - DNA, 75 bp, synthetic construct
  source 1..75: mol_type = other DNA
atgctcgaaggcacaccggagcagcacaaagcgcaggacgtttacaacatcagacgagacgaattagaaggagcg

SEQ ID NO: 450106 - DNA, 75 bp, synthetic construct
  source 1..75: mol_type = other DNA
atggtatccttcgccggcattcccgtcatttcgccatgctttacttttctgaccatggactgtcggtcagcgaca

SEQ ID NO: 450107 - DNA, 75 bp, synthetic construct
  source 1..75: mol_type = other DNA
gcgaacgctggctggtggaccgttataacatccgacagtcattgcgctgtgatgaaaatggcgaagcattacctg

SEQ ID NO: 450108 - DNA, 75 bp, synthetic construct
  source 1..75: mol_type = other DNA
gcattcactgacgcagcattgcagaaaaacaccgtagaagagcttaaacaggcgttcgccaaagcgtggaagatg

SEQ ID NO: 450109 - DNA, 75 bp, synthetic construct
  source 1..75: mol_type = other DNA
agcattttgccgatgacgttatcgcccagcgcggcgtgcggcacgggcatttgcagtgcctgccgaaggaagatt

SEQ ID NO: 450110 - DNA, 75 bp, synthetic construct
  source 1..75: mol_type = other DNA
aacagtcatacggcaaccgctcttgcacgagaggaagaaagcaagaaaggaatggattctgcacaagttactgga

SEQ ID NO: 450111 - DNA, 75 bp, synthetic construct
  source 1..75: mol_type = other DNA
ggcgacggcgcaggcgctggtcacgctgccggtttctctcatcggctatctcgtcgcctgttactggctgaatat

SEQ ID NO: 450112 - DNA, 75 bp, synthetic construct
  source 1..75: mol_type = other DNA
ctggggcgcgtgcgtctgcgccagttggtgcgtcgcgactggcttaccgcgctaatgctcaccatgatgggcaac

SEQ ID NO: 450113 - DNA, 75 bp, synthetic construct
  source 1..75: mol_type = other DNA
gccccggcgctggtttgtattggcatcggcctggcatgtgtaaatattgctgagttagaccacggactccccgat

SEQ ID NO: 450114 - DNA, 75 bp, synthetic construct
  source 1..75: mol_type = other DNA
gatagtgttgatggaattgatgaaatcaatttcagaactggtgggaatcgtatgagtataactttatttgagtca

SEQ ID NO: 450115 - DNA, 75 bp, synthetic construct
  source 1..75: mol_type = other DNA
acaaaaccgattattacacgggcctcaccgaatctgaccttgcagctcttaacgcaaggtaccatcagctcatgg

SEQ ID NO: 450116 - DNA, 75 bp, synthetic construct
  source 1..75: mol_type = other DNA
gtatgtgttcatgaagaaacaacagctggtttatgggcccctctccctgattcgcatgtcgtgcttttcttagat

SEQ ID NO: 450117 - DNA, 75 bp, synthetic construct
  source 1..75: mol_type = other DNA
gcccactaatgcctcaacgtttatcgcaatacgctatcaacgttccggtgagctggaacagaatgcacagcgttt

SEQ ID NO: 450118 - DNA, 75 bp, synthetic construct
  source 1..75: mol_type = other DNA
aatccggtttcgcagtggcttgcccgcccgccggaggtcgaacacaatgcccgattcggggaggaaaggatgacg

SEQ ID NO: 450119 - DNA, 75 bp, synthetic construct
  source 1..75: mol_type = other DNA
gcgacgagattttgatcaactgggacgtgcgggccgacgcctttaagccagggctgcctgaacgcctgtttacgc

SEQ ID NO: 450120 - DNA, 75 bp, synthetic construct
  source 1..75: mol_type = other DNA
ggcggacaaattcataaaaactataatcgctgggtccgcaatctcgacaaagatattcaactgaatttgtcggct

SEQ ID NO: 450121 - DNA, 75 bp, synthetic construct
  source 1..75: mol_type = other DNA
ggggctgttgtagtaaaaccgattgagaacaaaggcatttatgcaggaaacccggcaagactgatcagaatatta

SEQ ID NO: 450122 - DNA, 75 bp, synthetic construct
  source 1..75: mol_type = other DNA
tataaacaaagactggaaaatagatgaaagtctttatttgagatccaaagtagagccttttttcattcttgaaaa

SEQ ID NO: 450123 - DNA, 75 bp, synthetic construct
  source 1..75: mol_type = other DNA
tctccccttccgttgtatccagatatgctaatcgggcggctcaacttggcataaagcagtggcccttacctacag

SEQ ID NO: 450124 - DNA, 75 bp, synthetic construct
  source 1..75: mol_type = other DNA
ttaaccaagacagatatgtctcgagatgcaagtgccacagcgataagccaaaaattttcttcagaagtgatgtca

SEQ ID NO: 450125 - DNA, 75 bp, synthetic construct
  source 1..75: mol_type = other DNA
ttcgcttatttgaaacattaaccacagagcaaaagattgatatcgcaagacacttgctacaaaacaaagatataa

SEQ ID NO: 450126 - DNA, 75 bp, synthetic construct
  source 1..75: mol_type = other DNA
cacggatatcagtcgtcattatctggagcgtgcgcttcagggacatttttcagaaccgatttgccagttactcgc

SEQ ID NO: 450127 - DNA, 75 bp, synthetic construct
  source 1..75: mol_type = other DNA
tggagtttaccgacgcagcagccaacaaagttaagagtctgatcgctgatgaagataacccgaatctgaagttac

SEQ ID NO: 450128 - DNA, 75 bp, synthetic construct
  source 1..75: mol_type = other DNA
gctaacctggacggtcaccttaacgtgctggaaggttgttgccataacaaggtacagcacctgctgtatgcgtca

SEQ ID NO: 450129 - DNA, 75 bp, synthetic construct
  source 1..75: mol_type = other DNA
gcgttgtatgacgttattggttttaaaccgcagatttcagtcaaagacggggtgaaaaactttgtcgactggtat

SEQ ID NO: 450130 - DNA, 75 bp, synthetic construct
  source 1..75: mol_type = other DNA
caggctgtgacaactatcgttgatggtattgaaacagcggatagcctcgataaaaaggcgctggcggcattgaaa

SEQ ID NO: 450131 - DNA, 75 bp, synthetic construct
  source 1..75: mol_type = other DNA
tgttcgaatgcctgttgccgacgtgaaaaatggtgccgattattcggtatcagcaattcgttacttcgcggcttg

SEQ ID NO: 450132 - DNA, 75 bp, synthetic construct
  source 1..75: mol_type = other DNA
gtttcgccgggcatggttgatgcgcacacccatatttctgaaccgggtcgtagccactgggaaggttatgaaacc

SEQ ID NO: 450133 - DNA, 75 bp, synthetic construct
  source 1..75: mol_type = other DNA
cgtcgttggggtatctttttccgcggaatgaaacgcaaaatttacgtctgcatagtgcttttaagcatgcggtaa

SEQ ID NO: 450134 - DNA, 75 bp, synthetic construct
  source 1..75: mol_type = other DNA
tacgcgccattcgatgtaagccctgagtacgttaacaaacatcaaccggtcgctggcgggtattacgttgtgtat

SEQ ID NO: 450135 - DNA, 75 bp, synthetic construct
  source 1..75: mol_type = other DNA
ccaggaacttcagccgcgcgaccggacccgcgcatccagccttcttcaggttaaccagatatccaaggatttgcg

SEQ ID NO: 450136 - DNA, 75 bp, synthetic construct
  source 1..75: mol_type = other DNA
tacgcatatcccgggacgatttattacccgccacgccttcccgctgacggccaacggcaagatcgatcgccatgc

SEQ ID NO: 450137 - DNA, 75 bp, synthetic construct
  source 1..75: mol_type = other DNA
ggcctgggatatacaggcgacctggtgcggggctgtgaggcgtcattcctgtctcagctggcggggatcgagtac

SEQ ID NO: 450138 - DNA, 75 bp, synthetic construct
  source 1..75: mol_type = other DNA
atataaagagaagatggctcaggctgctttcagaaaacaacaactggaggctgaagaaccttcatttaaggatgc

SEQ ID NO: 450139 - DNA, 75 bp, synthetic construct
  source 1..75: mol_type = other DNA
gacgttcctttctcaactggcaagcgtggaatacggtaacaagctggagagcaagcttcgtcaggacaaccagac

SEQ ID NO: 450140 - DNA, 75 bp, synthetic construct
  source 1..75: mol_type = other DNA
agcggcagttcacgagctgggtgactatttgattggtcaggatccatcgcgcatcaatgacttatggcaagtgat

SEQ ID NO: 450141 - DNA, 75 bp, synthetic construct
  source 1..75: mol_type = other DNA
ttgaaggccgcgcccgtacgggtggaagcggcagttcacgagctgggtgactatttgattggtcaggatccttcg

SEQ ID NO: 450142 - DNA, 75 bp, synthetic construct
  source 1..75: mol_type = other DNA
catcaacaagaagtgaattaagcctcattaatttattaaattcattaaatgaggtggaattgatgaaaaaacgtc

SEQ ID NO: 450143 - DNA, 75 bp, synthetic construct
  source 1..75: mol_type = other DNA
ataaaaaagaaaaaatatacgtgaaaaatattcatttacatgaatatgtaatgattcttacaactaattgctctg

SEQ ID NO: 450144 - DNA, 75 bp, synthetic construct
  source 1..75: mol_type = other DNA
ttttgtacgcttgtttatctgccctactttttttctgggatgcaaagcatggcttgttacctgacagatttacct

SEQ ID NO: 450145 - DNA, 75 bp, synthetic construct
  source 1..75: mol_type = other DNA
ccttcttgccacgactggttttccttgctgcctcattcgcttgcggagccgtagttattggtctgctcatgagag

SEQ ID NO: 450146 - DNA, 75 bp, synthetic construct
  source 1..75: mol_type = other DNA
atgaaaaagcaaattatggcggcattcgtcgcttcactgattgttatttccggcgctcaggcagggatacctgtt

SEQ ID NO: 450147 - DNA, 75 bp, synthetic construct
  source 1..75: mol_type = other DNA
ttcggcatttaaaatgttagtttatgatggattacatgttaattgcgtctctaaccgtctcggattttccagtac

SEQ ID NO: 450148 - DNA, 75 bp, synthetic construct
  source 1..75: mol_type = other DNA
atgttgtttttgctgtggcttttcttttttcgagagtattaaatagagagagtatattaaattcccttattgtta

SEQ ID NO: 450149 - DNA, 75 bp, synthetic construct
  source 1..75: mol_type = other DNA
attcagtggctgacgcccgcgttagaaaatttccataagaactggccgcaggtagagatggattttaaatcgggc

SEQ ID NO: 450150 - DNA, 75 bp, synthetic construct
  source 1..75: mol_type = other DNA
aacgccagcctttcacatcccagccgctggttattgagcgtcggcacggtagaacttgattctgcttgtctggcg

SEQ ID NO: 450151 - DNA, 75 bp, synthetic construct
  source 1..75: mol_type = other DNA
ctgactgtattccagccgctggtgccacccgactggaagatgaacttacgcgatggtgaactgtatgctcaggtc

SEQ ID NO: 450152 - DNA, 75 bp, synthetic construct
  source 1..75: mol_type = other DNA
taatcctcaagaaagattttatttgcttaaaaaatttttaccaaaggaagtaattaatgtgctcaagataattta

SEQ ID NO: 450153 - DNA, 75 bp, synthetic construct
  source 1..75: mol_type = other DNA
ggctggcgtcaatctcgcctgcggctatctggaaaacggtgaacgagtcgaccatgattttgtgaatcttctcac

SEQ ID NO: 450154 - DNA, 75 bp, synthetic construct
  source 1..75: mol_type = other DNA
catgacatcacccccgatgatgttgaacgtgttccctatggtctaccgcttgcaggtaatcagtattacatctgc

SEQ ID NO: 450155 - DNA, 75 bp, synthetic construct
  source 1..75: mol_type = other DNA
tcgttacacagcaagagttacaaaaaagcaaaattgaggcgcttgaaaaacaacaagaactcgacaagcgcaaga

SEQ ID NO: 450156 - DNA, 75 bp, synthetic construct
  source 1..75: mol_type = other DNA
gtggcaggccgggtgaggaagttaaacagcggctacgtactggcactgtggtaactactgatgacaggaactggg

SEQ ID NO: 450157 - DNA, 75 bp, synthetic construct
  source 1..75: mol_type = other DNA
agatgccagcatggcatttaattactgcagacggacaaggaattacgctggtaaatattggtgttggtccgtcaa

SEQ ID NO: 450158 - DNA, 75 bp, synthetic construct
  source 1..75: mol_type = other DNA
agtggcctgcattattcgccgatgttcgattatgaagtacgcctggtgttagcacctgaccatccactggcggca

SEQ ID NO: 450159 - DNA, 75 bp, synthetic construct
  source 1..75: mol_type = other DNA
atggtgggatagacctgcgcaaggaacttgctgatatttatcgcctgaccggcggtaaaatttcgaccttatcaa

SEQ ID NO: 450160 - DNA, 75 bp, synthetic construct
  source 1..75: mol_type = other DNA
gcggcaggcccggtgaggaagtcaaacagcggctgcgtacaggtactgtggtaaccacagatgacaggaactggg

SEQ ID NO: 450161 - DNA, 75 bp, synthetic construct
  source 1..75: mol_type = other DNA
gtatctgataagcccttacatggcgagataaaactacccggtcaagctaaccgcttttatgaaggcgccatctcc

SEQ ID NO: 450162 - DNA, 75 bp, synthetic construct
  source 1..75: mol_type = other DNA
tgacaggaaagtgaagatctcacctacactggatgtacctttaccccagaatattccaacaaaatattccaagta

SEQ ID NO: 450163 - DNA, 75 bp, synthetic construct
  source 1..75: mol_type = other DNA
ttcatgatctgaaggcgaaaggaatttcagactatgaaggaagcagccgggataagcaacttttctctgtcacaa

SEQ ID NO: 450164 - DNA, 75 bp, synthetic construct
  source 1..75: mol_type = other DNA
agtgactttgccagaatgattccggcagcactggataacgtgaagacttcattaccgacagattttccggagaac

SEQ ID NO: 450165 - DNA, 75 bp, synthetic construct
  source 1..75: mol_type = other DNA
actggctgggaggcagtaatccgcaggtagtcggtctgaataatggttcagcgtgggggacggtgaataccgcgt

SEQ ID NO: 450166 - DNA, 75 bp, synthetic construct
  source 1..75: mol_type = other DNA
tgatgaatttaggactgatgtaagttatggggaaaaacaaccagttcataagtttgtatatgctcgtagaataaa

SEQ ID NO: 450167 - DNA, 75 bp, synthetic construct
  source 1..75: mol_type = other DNA
tcccaagcgacctagaaaaaaaacgcgagtggatcaagtacatgctcaagatccagggtctttctctggccgcac

SEQ ID NO: 450168 - DNA, 75 bp, synthetic construct
  source 1..75: mol_type = other DNA
tcgctgaaatgggaacagattggaaacgacgggatattcatccagcaagggaaaaccggaaaaaaacagataaaa

SEQ ID NO: 450169 - DNA, 75 bp, synthetic construct
  source 1..75: mol_type = other DNA
aagataatgcactaccgccacgtgttagatcgaatggttacagttacgtatggaaacccgaaggaagcacaaaaa

SEQ ID NO: 450170 - DNA, 75 bp, synthetic construct
  source 1..75: mol_type = other DNA
gatatatgcggaagcaattccacagttacgcattgcaatggagatttcctatctctgtgcggcaagactcggtga

SEQ ID NO: 450171 - DNA, 75 bp, synthetic construct
  source 1..75: mol_type = other DNA
gcaagggaaaacaggaaaaaaacagataaaagcatggagtccacgattacaggcggcgatcgaaaaagcaaaaca

SEQ ID NO: 450172 - DNA, 75 bp, synthetic construct
  source 1..75: mol_type = other DNA
aaatgcggcggctgaaaaaattggcagaccattagactgcacgttccatgatctgaaggcgaaaggcatttctga

SEQ ID NO: 450173 - DNA, 75 bp, synthetic construct
  source 1..75: mol_type = other DNA
tgcagaagcaaaggccattaaaccagaacacgtccgacgctacatggatgcacgtggtaaaagaagccgtgttca

SEQ ID NO: 450174 - DNA, 75 bp, synthetic construct
  source 1..75: mol_type = other DNA
cccaaacccaggcgaactcaaccagtagcggctgcggcgctagctatgttcccactcaggctgggttgttgtcgt

SEQ ID NO: 450175 - DNA, 75 bp, synthetic construct
  source 1..75: mol_type = other DNA
tgtggccgttgtttaaggcaacgcaaagggaagatagcaacctcagtccttgtgaagcggcacgtcggccattga

SEQ ID NO: 450176 - DNA, 75 bp, synthetic construct
  source 1..75: mol_type = other DNA
acgtcgtggacttatcaactcatcagcctgaaagacggaaccattacgcagaaggggacaaccagtgcgttgatg

SEQ ID NO: 450177 - DNA, 75 bp, synthetic construct
  source 1..75: mol_type = other DNA
cctttaccagctcgacgggcgtcaccttcaaacgaccgctgctgaaagcagaaaccagctcaggctcatcgatta

SEQ ID NO: 450178 - DNA, 75 bp, synthetic construct
  source 1..75: mol_type = other DNA
catttatcctgacgcgagccaacagtgtaagtcgggctaattcatcggcgacgatgagtgtgggcgcgctgacgg

SEQ ID NO: 450179 - DNA, 75 bp, synthetic construct
  source 1..75: mol_type = other DNA
aagactgggcgctgtacgatcaaaacaccagtatgcaggcggaatgcggcgtcggtcatataccgcgccagagct

SEQ ID NO: 450180 - DNA, 75 bp, synthetic construct
  source 1..75: mol_type = other DNA
agcgttatttttactaccccaaccagcccggacgttaccggcgcgcagatgtggggccatatggatgaaacgatc

SEQ ID NO: 450181 - DNA, 75 bp, synthetic construct
  source 1..75: mol_type = other DNA
gatggcgcacaagctatcggcggcaatacgccggtttacgtcagttgcctgacgacggcgaacaagcctgccagc

SEQ ID NO: 450182 - DNA, 75 bp, synthetic construct
  source 1..75: mol_type = other DNA
cgttgtatagcgccaacagtggtaatgcagtgcaaacgacgcacggctggccaacgcagcgtcagccctactgga

SEQ ID NO: 450183 - DNA, 75 bp, synthetic construct
  source 1..75: mol_type = other DNA
gtctggcgacaccgataaccgtcacgctggcgcgcgatacaaccaaaaccgccacgctggatgttatctacacgg

SEQ ID NO: 450184 - DNA, 75 bp, synthetic construct
  source 1..75: mol_type = other DNA
tgtatggcgtaaccgggccagacggaaccaccacgatgacgctccgacaggatgcgtccaccgggttaagaaccg

SEQ ID NO: 450185 - DNA, 75 bp, synthetic construct
  source 1..75: mol_type = other DNA
gtgaagccatgcccattgtcgttaccgtaaaagacagcaccgggaagccggcaccgaatgtcgcgttcaccttaa

SEQ ID NO: 450186 - DNA, 75 bp, synthetic construct
  source 1..75: mol_type = other DNA
gtaacccactgccaattgtggtgacggtcaaagatcgtgatggtaacccgctggcgggagaggccgtgacgctca

SEQ ID NO: 450187 - DNA, 75 bp, synthetic construct
  source 1..75: mol_type = other DNA
ctggtggaatcaggctaaacgtgcagccgagcaaaaagccggtgttccgtttgggtgcaacttccatgacataaa

SEQ ID NO: 450188 - DNA, 75 bp, synthetic construct
  source 1..75: mol_type = other DNA
ctttttatgttctgcttgtattgctgctcaccgcaatgctgccgggatggtcatgggcgggctcgtcatggcaag

SEQ ID NO: 450189 - DNA, 75 bp, synthetic construct
  source 1..75: mol_type = other DNA
gttccgggcggacaatgctaatgatacttcgataagtggttgtggcgcggagtatgttccaactgacagtgaact

SEQ ID NO: 450190 - DNA, 75 bp, synthetic construct
  source 1..75: mol_type = other DNA
ggtctgctgggcatggtatgccctgcgcaacgcccgctggctgcgggagaatcccgacaaacatccgatgatgtg

SEQ ID NO: 450191 - DNA, 75 bp, synthetic construct
  source 1..75: mol_type = other DNA
ttgctggcagtggggacgcgctggttgcgccagtcatcattaacggtggcctggtggatgaaacatcactgaatg

SEQ ID NO: 450192 - DNA, 75 bp, synthetic construct
  source 1..75: mol_type = other DNA
ccgacggcgcaaaaagattaccttagtgcggtacaacaagagccacattcatctgttaacctgggcacaggtaac

SEQ ID NO: 450193 - DNA, 75 bp, synthetic construct
  source 1..75: mol_type = other DNA
agcgccagtatgccggtttatcagggcagtatttggcttgatcctgcaaagacccatgatgtttcgttttccgct

SEQ ID NO: 450194 - DNA, 75 bp, synthetic construct
  source 1..75: mol_type = other DNA
gccccggcgctggtttgtattggcacaggtcttacgtgtgtaaacattgctgagttaaaccacggactccccgat

SEQ ID NO: 450195 - DNA, 75 bp, synthetic construct
  source 1..75: mol_type = other DNA
atgattaagtcggttattgccggtgcggtagctatggcagtggtgtcttttggtgtaaatgctgctccaactact

SEQ ID NO: 450196 - DNA, 75 bp, synthetic construct
  source 1..75: mol_type = other DNA
atgattaagtcggttattgccggtgcggtagctatggcagtggtgtcttttggtgcaaatgctgctgataccgtt

SEQ ID NO: 450197 - DNA, 75 bp, synthetic construct
  source 1..75: mol_type = other DNA
gctttgctcatgggttggcgcactctgctggaacgtcgccagccagcgattaccgacagtgattctcgggccgct

SEQ ID NO: 450198 - DNA, 75 bp, synthetic construct
  source 1..75: mol_type = other DNA
ccaatctgctttatagccagcgcgacggcaaactcgcgtggggaaaactcgccccggcactggtttgtattggca

SEQ ID NO: 450199 - DNA, 75 bp, synthetic construct
  source 1..75: mol_type = other DNA
tgtttccacgatgattatcggcaccctgccggtggtcattcctgtctttgccaatctgctttatagccagcgcga

SEQ ID NO: 450200 - DNA, 75 bp, synthetic construct
  source 1..75: mol_type = other DNA
agcgccagcgtacccgtttatcagggaagcgttcagcttgatccgagcaaaacctacgacattcaggcatctgta

SEQ ID NO: 450201 - DNA, 75 bp, synthetic construct
  source 1..75: mol_type = other DNA
aagataataagctgccaccccgcgtttataagaacaaatacagctattatttcaaaccaacgccccgagagtgta

SEQ ID NO: 450202 - DNA, 75 bp, synthetic construct
  source 1..75: mol_type = other DNA
atatgagcgtgggtatgtgaaaaataatccatgcaaaggagtcagaaaattcacacttaaagcccgtaccgttta

SEQ ID NO: 450203 - DNA, 75 bp, synthetic construct
  source 1..75: mol_type = other DNA
gtacggcgatccagttagcccgaaatgtatcttccggcacatgcgagtatgtgatcaacacaaccaaaggcggga

SEQ ID NO: 450204 - DNA, 75 bp, synthetic construct
  source 1..75: mol_type = other DNA
gaggaaactgtaaataaccgcgatcgtgcaatgacatttggtcgcttgtgggaaaaattcctcgccagcgcctgt

SEQ ID NO: 450205 - DNA, 75 bp, synthetic construct
  source 1..75: mol_type = other DNA
cgatcgaaaaagcaaaacagttaccagcatccgtctatgtaatcagcaatcaatatggcaaccgatatatgtaca

SEQ ID NO: 450206 - DNA, 75 bp, synthetic construct
  source 1..75: mol_type = other DNA
aagctgggctacccgattacgggaacgtttcacgatttaaaagcgaaggggatctcagactacgacgggagcagt

SEQ ID NO: 450207 - DNA, 75 bp, synthetic construct
  source 1..75: mol_type = other DNA
ggtgtgggatggacgagagcactggcacagaggattgttgtatcacgttagccaataaacctggtctggttactt

SEQ ID NO: 450208 - DNA, 75 bp, synthetic construct
  source 1..75: mol_type = other DNA
gccccaaactggcggtggaggtaagcggttccgggcgtccctttgatgaaaataatgaaacctggttacgcgtcg

SEQ ID NO: 450209 - DNA, 75 bp, synthetic construct
  source 1..75: mol_type = other DNA
aagcccggatacgccaaaagccaacttctggggacatatgccagaaacggtaagctcagcagacggaacgcagtt

SEQ ID NO: 450210 - DNA, 75 bp, synthetic construct
  source 1..75: mol_type = other DNA
gcatggagtccacgattacaggcggcgatcgaaaaagcaaaacagttaccagcatccgtctatgtaatcagcaat

SEQ ID NO: 450211 - DNA, 75 bp, synthetic construct
  source 1..75: mol_type = other DNA
ccggcaaaagggtaccgaattgcacgtaaacacgtttcctggtatctccaggaacacgctccaaatgaccagttt

SEQ ID NO: 450212 - DNA, 75 bp, synthetic construct
  source 1..75: mol_type = other DNA
tgagtttttcaaaccggagaaagggcgatatttacatccggaagaggatcggccaataactcatcgtgaggcagc

SEQ ID NO: 450213 - DNA, 75 bp, synthetic construct
  source 1..75: mol_type = other DNA
agagtgctaaaacggaatggaaaaaatatcgcgccggtgaatcactgatctattcattattttcctggctcccag

SEQ ID NO: 450214 - DNA, 75 bp, synthetic construct
  source 1..75: mol_type = other DNA
gcattacggcaaatcgcttcatgaagttgtcggtatcgtgacgccttttagcgcgcaggtatccactatcaaaca

SEQ ID NO: 450215 - DNA, 75 bp, synthetic construct
  source 1..75: mol_type = other DNA
accaactccctgtcgaaaacgccgatgctgaaagcgcaacacccggaatatgaaacctggactgcgggcattcat

SEQ ID NO: 450216 - DNA, 75 bp, synthetic construct
  source 1..75: mol_type = other DNA
ccgttgtggttattgacgaaaatgacaatgtgattttcagccaactggtggatgaaatcaccaccgagccggatt

SEQ ID NO: 450217 - DNA, 75 bp, synthetic construct
  source 1..75: mol_type = other DNA
caatgtgattttcagccagctggtggatgaaatcaccaccgagccggattacgaagcagctctggcggtactgaa

SEQ ID NO: 450218 - DNA, 75 bp, synthetic construct
  source 1..75: mol_type = other DNA
cgaatgaaaagtcgctcacagtgggcaccgtgcactctcttcagggagcggaaagagcgattgtgatattctcgc

SEQ ID NO: 450219 - DNA, 75 bp, synthetic construct
  source 1..75: mol_type = other DNA
agatccgcgaaattttaatcagcgagtcagcttgggaagaaatgacctgcttattcgcaccttccttaactcaac

SEQ ID NO: 450220 - DNA, 75 bp, synthetic construct
  source 1..75: mol_type = other DNA
ggtggaagtctcatttggttttccttcattgattggttttacttttatgtcagggatgatcaacaagttcaaaga

SEQ ID NO: 450221 - DNA, 75 bp, synthetic construct
  source 1..75: mol_type = other DNA
gcgcaggtttctatgtatgaagcgcaactgtcttcgttcttaccggcaatccgcgacggtcgactggattttgcg

SEQ ID NO: 450222 - DNA, 75 bp, synthetic construct
  source 1..75: mol_type = other DNA
gttcgcgaaactctgcgtactggcgcgccaaaaaacgccgaagacggcacgatgcctatggcctgctggagttgt

SEQ ID NO: 450223 - DNA, 75 bp, synthetic construct
  source 1..75: mol_type = other DNA
actggtgcaatggccggacgatggttgccagagctgaaaagcttcggcgcttattttccctcaagcactcgtaaa

SEQ ID NO: 450224 - DNA, 75 bp, synthetic construct
  source 1..75: mol_type = other DNA
tcgataatttaaataaattactttccggacaagaacaaaaagtcactctactgaagagtgctaaaacggaatgga

SEQ ID NO: 450225 - DNA, 75 bp, synthetic construct
  source 1..75: mol_type = other DNA
acggctggaagcggcccgcgaaatggggctggtgctgcgctacgtggcgcgtttcgatgccaatggcaaagcgcg

SEQ ID NO: 450226 - DNA, 75 bp, synthetic construct
  source 1..75: mol_type = other DNA
gcgtcggtaatgttgtgcattatgaaccctccaacgttcttattctgaccggtcgtgcctccaccattaataaac

SEQ ID NO: 450227 - DNA, 75 bp, synthetic construct
  source 1..75: mol_type = other DNA
accgacgttaatggcgatggcaagcctgatacgcgtattcgtgatttaacggttgaacaggccggacagatttac

SEQ ID NO: 450228 - DNA, 75 bp, synthetic construct
  source 1..75: mol_type = other DNA
cctttgaacatgcgctgaatttcattctgcgtcctgatatcgaaggcgtctatgtcaatgaccccactgaccgtg

SEQ ID NO: 450229 - DNA, 75 bp, synthetic construct
  source 1..75: mol_type = other DNA
tgatccgcggaccaggcgcagggcgcgatgtcaccgccggggcgattcagtcggatattaaccgcctggcgcagt

SEQ ID NO: 450230 - DNA, 75 bp, synthetic construct
  source 1..75: mol_type = other DNA
acaagggtgtggtggagtttcgcccccgctccggctgcctgacctgcgacacctcagaaatcgtcttctaccgat

SEQ ID NO: 450231 - DNA, 75 bp, synthetic construct
  source 1..75: mol_type = other DNA
tccgatgacggcatcagcctggtggcagtactgcgcaccggaccaaccgaaagcctgattcaggggctgcatcag

SEQ ID NO: 450232 - DNA, 75 bp, synthetic construct
  source 1..75: mol_type = other DNA
cctttgaacatgcgctgaattttattctgcgtcccgatatcgaaggcgtctatgtcaatgaccccactgaccgtg

SEQ ID NO: 450233 - DNA, 75 bp, synthetic construct
  source 1..75: mol_type = other DNA
cgaatggtctggcagttctaacaacattgattggtacgatgacgatttatacgatgcagtaatttcttctgaaaa

SEQ ID NO: 450234 - DNA, 75 bp, synthetic construct
  source 1..75: mol_type = other DNA
tagccttcttcaacgatgaagcggttgagcaggatgaagagtcgttgttcctgtggatgcgcgcccatccgtatg

SEQ ID NO: 450235 - DNA, 75 bp, synthetic construct
  source 1..75: mol_type = other DNA
gaaaaactgaccgacgcctgtctggaaattatcgacaacgcgccgtccaccacgcggggggggatatgggcaaag

SEQ ID NO: 450236 - DNA, 75 bp, synthetic construct
  source 1..75: mol_type = other DNA
aagccatcaaaattttgcaggaagccactgatatcaatgccgatggcatcatcggcccgcgcacccgcagggccg

SEQ ID NO: 450237 - DNA, 75 bp, synthetic construct
  source 1..75: mol_type = other DNA
aggctatcaaacttttgcaggaagccgctgatgtggatgctgacggcatcatcgggccgcgtacccgcaaggccg

SEQ ID NO: 450238 - DNA, 75 bp, synthetic construct
  source 1..75: mol_type = other DNA
ctgccgatctgccgtttgcgcaatctcgcttctgtggcgcagaaggtctgaataacgttatcacgctctccactt

SEQ ID NO: 450239 - DNA, 75 bp, synthetic construct
  source 1..75: mol_type = other DNA
gcgcgtgtttgcgaggtgatagtcggtattttgtgcggcggcatgatgatgatgatcctgccgagcagttccgat

SEQ ID NO: 450240 - DNA, 75 bp, synthetic construct
  source 1..75: mol_type = other DNA
ttcttgccgggcatacgctcaatgagccgtggttttttctattgagcatgtcggcgtggcttggcttttgtacct

SEQ ID NO: 450241 - DNA, 75 bp, synthetic construct
  source 1..75: mol_type = other DNA
tcattctgcatggatacgaaaagatccgctggccggatgcaccggagtgggcgagccgggaaacctggctggagt

SEQ ID NO: 450242 - DNA, 75 bp, synthetic construct
  source 1..75: mol_type = other DNA
ttagcgatctgtggcaatttttgctgtttctcttcccgctactggcgacgatgcaacttctcaaattacagatgc

SEQ ID NO: 450243 - DNA, 75 bp, synthetic construct
  source 1..75: mol_type = other DNA
caggcgttctggagtcactatcgtttccgccagcaaaatgcacgcctgaatgcgctactccaccagcaattacgc

SEQ ID NO: 450244 - DNA, 75 bp, synthetic construct
  source 1..75: mol_type = other DNA
ccgtgagctggcggcaattgtctggcggctgtactgctcgctttcgcaacttgagcaagcaccaccgcaaggtac

SEQ ID NO: 450245 - DNA, 75 bp, synthetic construct
  source 1..75: mol_type = other DNA
agagctccggagaatatttacagaacaaagaagaatacaagaaccaactcttgctcttagcgcatctacattgcc

SEQ ID NO: 450246 - DNA, 75 bp, synthetic construct
  source 1..75: mol_type = other DNA
actggcaaagtttgtaggagatgatttatttaatattctgactgaatgtaaagcctggagttcaccaattccagc

SEQ ID NO: 450247 - DNA, 75 bp, synthetic construct
  source 1..75: mol_type = other DNA
agcgaacaggaagcacgccagcaatccccggctggctgcgtgatggtattcgctgcccgtattcgtcaggaggtg

SEQ ID NO: 450248 - DNA, 75 bp, synthetic construct
  source 1..75: mol_type = other DNA
ccctatgtcgtggagccgatgaactgcctggcatcacgtgagtatgatgctgttatttttgttggtccggcccga

SEQ ID NO: 450249 - DNA, 75 bp, synthetic construct
  source 1..75: mol_type = other DNA
tccgctcgttcatctccggttgccgtcaccgaacaggccagcccactgtctggcggctggctgggggtcagtggt

SEQ ID NO: 450250 - DNA, 75 bp, synthetic construct
  source 1..75: mol_type = other DNA
cctggaaattcacaacaattatttccgatgaaagtgacacgattgaaaacaccaccgcatgggaaaaagactatt

SEQ ID NO: 450251 - DNA, 75 bp, synthetic construct
  source 1..75: mol_type = other DNA
tcgccttctggcagcgactacgttatttttgccgcctttatctgcaaagtagtcaggaattacatcgtctgcaaa

SEQ ID NO: 450252 - DNA, 75 bp, synthetic construct
  source 1..75: mol_type = other DNA
catgggaaaaggattattgccagataactatacaacgtgatgaacttctgagattgattcacacgaatacccttc

SEQ ID NO: 450253 - DNA, 75 bp, synthetic construct
  source 1..75: mol_type = other DNA
gaaattgatgaatcagcaatacttgccagagttattggtatgacggttaacggattctacaagaaaaataataca

SEQ ID NO: 450254 - DNA, 75 bp, synthetic construct
  source 1..75: mol_type = other DNA
aacaactgttgaaaacaggacgtacagaattcgtgaataatttgtgtcgggtcgccaactggtatgaaattgagt

SEQ ID NO: 450255 - DNA, 75 bp, synthetic construct
  source 1..75: mol_type = other DNA
gcggttcaggagtggcagaggttggcacttgatttagggtatgagggcgacgaggaactgagcttctcacaggcc

SEQ ID NO: 450256 - DNA, 75 bp, synthetic construct
  source 1..75: mol_type = other DNA
gattaaaaatcctgagcaatatgaactcgctgagcacggttatattgttaaaacggcgcaatctggcggtgccag

SEQ ID NO: 450257 - DNA, 75 bp, synthetic construct
  source 1..75: mol_type = other DNA
tgggttatctccatattgatggtaaaggagagctggcaagtagtggaagtagatataatttgcttgaggctgaaa

SEQ ID NO: 450258 - DNA, 75 bp, synthetic construct
  source 1..75: mol_type = other DNA
atgtcgaagagagcgaggaaggaaatacccgggtttattacctgaaatatgctaaagccacgaatctggtggaag

SEQ ID NO: 450259 - DNA, 75 bp, synthetic construct
  source 1..75: mol_type = other DNA
cctgaccaactccaagatccagggcaaatatcgccactctttctggagtgaaatctacgaaacggtgctggcgtg

SEQ ID NO: 450260 - DNA, 75 bp, synthetic construct
  source 1..75: mol_type = other DNA
atggtccttgcgcaatttgccctggttcagggccacgctggcgcaatggcgttatgcgttacgcaataccattgc

SEQ ID NO: 450261 - DNA, 75 bp, synthetic construct
  source 1..75: mol_type = other DNA
atgtggcaagcagaaacttctgacatcatggtaactcggacaatgcaacaaaagtatcagtatgatcgtgtttta

SEQ ID NO: 450262 - DNA, 75 bp, synthetic construct
  source 1..75: mol_type = other DNA
ttagaaagtcataaacaaaaacgaacagagaagattgacgttgccgtacgacttgtagggctgaaagcctatgat

SEQ ID NO: 450263 - DNA, 75 bp, synthetic construct
  source 1..75: mol_type = other DNA
aaaacaagcatggcgtattttaaaccaacagatttcatccagtacacatggaaattcgcaacagttactccggat

SEQ ID NO: 450264 - DNA, 75 bp, synthetic construct
  source 1..75: mol_type = other DNA
cagtactgcgcaccggcccgaccgaaagcctgatccaggggctgcatcagtccgtcttccgcgcagaaaaacgca

SEQ ID NO: 450265 - DNA, 75 bp, synthetic construct
  source 1..75: mol_type = other DNA
ttgctgcgtcttgatgaggccagcgagctggctcgtctggcggcacctgtcctccacgcccgtactttacagcca

SEQ ID NO: 450266 - DNA, 75 bp, synthetic construct
  source 1..75: mol_type = other DNA
taacgacgcggtgtatgcggaagtggtgggtcacggtgaagtgtggtcggcgcgcctgatgtctgcggtgcttaa

SEQ ID NO: 450267 - DNA, 75 bp, synthetic construct
  source 1..75: mol_type = other DNA
aagtctgatccaggggctacatcagtccgtcttccgcgcggaaaaacgcatcggtctggtgctgttcggcaaagg

SEQ ID NO: 450268 - DNA, 75 bp, synthetic construct
  source 1..75: mol_type = other DNA
gtttctggcagcgaaatcgatctgcaactgcgctgtagctacacgccggatcaaggctccacgcgcattgaacgt

SEQ ID NO: 450269 - DNA, 75 bp, synthetic construct
  source 1..75: mol_type = other DNA
aactggcgcgtctggcggctcccgttcttcacgctcgtactttacagccagtatccggtagcgaaatcgacctgc

SEQ ID NO: 450270 - DNA, 75 bp, synthetic construct
  source 1..75: mol_type = other DNA
tgttcaggaggagtttctgagacgtaaaataaacattgagaataaaattaatgccattaacgatggcattaaaag

SEQ ID NO: 450271 - DNA, 75 bp, synthetic construct
  source 1..75: mol_type = other DNA
tatttcaactttatcattaactctcaagaaatcaaaaagaaaagcttgtgaaaacactatttcattaaatggcta

SEQ ID NO: 450272 - DNA, 75 bp, synthetic construct
  source 1..75: mol_type = other DNA
atgggcgaacttattgattttgcggaaaggcaaaaaagcagaaggaagaaaaaggcatcttccattccgcccatt

SEQ ID NO: 450273 - DNA, 75 bp, synthetic construct
  source 1..75: mol_type = other DNA
gctcattgcgaaggcggcagcatcgaccatttctttgaaaatggcgatgaacttaacgagcagatggtgcaacgg

SEQ ID NO: 450274 - DNA, 75 bp, synthetic construct
  source 1..75: mol_type = other DNA
actggttgaaactaagccagaccgatcgtctctctgcgcatcaggttcaacaaacgctacgtcgttatcagtgcg

SEQ ID NO: 450275 - DNA, 75 bp, synthetic construct
  source 1..75: mol_type = other DNA
ctgaacaaccagtggcaaaatttgatcattataagatagatttgattattaaaaatggtagcgtcgttagatcta

SEQ ID NO: 450276 - DNA, 75 bp, synthetic construct
  source 1..75: mol_type = other DNA
gaagacgtgccaaaaatggccgatcacggtttaccactgccacatatgggctggaaccgcgtttatgcgaaagcg

SEQ ID NO: 450277 - DNA, 75 bp, synthetic construct
  source 1..75: mol_type = other DNA
tggtgctgcgctacgtggcgcgtttcgatgccaacggtaaagcgcgtgtaggcgtggaagcggtgcgtgaagatc

SEQ ID NO: 450278 - DNA, 75 bp, synthetic construct
  source 1..75: mol_type = other DNA
agctgcgctgtagctacacgccggatcaaggctccacgcgcattgaacgcgtgctggcctccggtactggtgcgc

SEQ ID NO: 450279 - DNA, 75 bp, synthetic construct
  source 1..75: mol_type = other DNA
gcggtcgatcaccggctggcagaactgaccatgaacaaactttacgatcgtgttcccgcttcagtctggaaatat

SEQ ID NO: 450280 - DNA, 75 bp, synthetic construct
  source 1..75: mol_type = other DNA
cctcggagcctggcatacatgggcatttctgccacggctggtttttcttgctgcgtcattcgcctgcggagcagt

SEQ ID NO: 450281 - DNA, 75 bp, synthetic construct
  source 1..75: mol_type = other DNA
tgtatcagttacggcaatgttcatcagtcaatatgctggaaaaaatcattcataaaaacagagacagcttatcgg

SEQ ID NO: 450282 - DNA, 75 bp, synthetic construct
  source 1..75: mol_type = other DNA
accgcttctggcagcaactgaaaggccagccggtcgagtttacctggcagtccgatgacggcatcagcctggtgg

SEQ ID NO: 450283 - DNA, 75 bp, synthetic construct
  source 1..75: mol_type = other DNA
acggcgaaccgttcaccgcggcggtacaaaaagataacttctacggcgtgcagttccacccggagcgttctggtg

SEQ ID NO: 450284 - DNA, 75 bp, synthetic construct
  source 1..75: mol_type = other DNA
acaaaaagataacttctacggcgtgcagtttcacccggagcgttctggtgccgctggtgctaagttgctgaaaaa

SEQ ID NO: 450285 - DNA, 75 bp, synthetic construct
  source 1..75: mol_type = other DNA
gctgcgccaacctgaactcggtgaagtctgccattgcgcgtcacggttatgaacccaaagtcagccgtgacccgg

SEQ ID NO: 450286 - DNA, 75 bp, synthetic construct
  source 1..75: mol_type = other DNA
tcaaacaacacaatgcaaggaagtaggaggaaaaacgagttcatcataaactcaataatatggaaaaaaaatgaa

SEQ ID NO: 450287 - DNA, 75 bp, synthetic construct
  source 1..75: mol_type = other DNA
atgaacgtcgttatcctcgataccggctgcgccaacctgaattcggtgaagtctgccatcagccgccacggttat

SEQ ID NO: 450288 - DNA, 75 bp, synthetic construct
  source 1..75: mol_type = other DNA
gaacccaaagtcagccgtgacccggacgtcgtgttgctggccgataaactgtttttacccggcgttggcaccgcg

SEQ ID NO: 450289 - DNA, 75 bp, synthetic construct
  source 1..75: mol_type = other DNA
ccatttataacgcatcgttattattgatgatgcttgccattatcaacattctggcgggtgtatatctgaacaaac

SEQ ID NO: 450290 - DNA, 75 bp, synthetic construct
  source 1..75: mol_type = other DNA
gagcatgccgcacaggagtatacgcgcacagtttacagcgtcaatgtgccggtggccgatcggtaccggcttgaa

SEQ ID NO: 450291 - DNA, 75 bp, synthetic construct
  source 1..75: mol_type = other DNA
tgctcccatgatggaggaatacggtcaggatatacaccatgttttgcagcaggatcctgataattttccctatga

SEQ ID NO: 450292 - DNA, 75 bp, synthetic construct
  source 1..75: mol_type = other DNA
ttgcatctaattgaagtaagttctggtgattaccttgaatcagatgatatagtgcgttttactgacagatataac

SEQ ID NO: 450293 - DNA, 75 bp, synthetic construct
  source 1..75: mol_type = other DNA
ctgaatttaaatttcacgcgggcgacaaaaatagccgcgacaaaaatagaccatacctttaaaaccgctaatgat

SEQ ID NO: 450294 - DNA, 75 bp, synthetic construct
  source 1..75: mol_type = other DNA
gtggacagaccgtttcactcaccgctggggattatcacgcaactatcgtgacggttggcgcaggtctggctgaat

SEQ ID NO: 450295 - DNA, 75 bp, synthetic construct
  source 1..75: mol_type = other DNA
ttaatgcacaaagcggccttgctgtggaaattgccagccagaatatcggcagccagtcagcgccttacggtgtgg

SEQ ID NO: 450296 - DNA, 75 bp, synthetic construct
  source 1..75: mol_type = other DNA
taagatgacatgggatagtgggtgtgttggttcatgggctcaaaagggctacataatggattggggagagtctac

SEQ ID NO: 450297 - DNA, 75 bp, synthetic construct
  source 1..75: mol_type = other DNA
cgtcatcagtgccaacaaactggcgggagcgagcgacagcaataaatatcgccagatccacgacgcgttcgaaaa

SEQ ID NO: 450298 - DNA, 75 bp, synthetic construct
  source 1..75: mol_type = other DNA
tcgatttcgccagccacggtttccacgtcatcagtgccaacaaactggcgggagccagcgacagcaataaatatc

SEQ ID NO: 450299 - DNA, 75 bp, synthetic construct
  source 1..75: mol_type = other DNA
ctaccagtttcaaagataagtttcttgaagcagaatcatatttcatcgataagtcaatatggaatatccatatta

SEQ ID NO: 450300 - DNA, 75 bp, synthetic construct
  source 1..75: mol_type = other DNA
ccgttacccacgcctgtgtgattaaccaggcggcagccactggtggtgatgcgcgtcagttggtgggctatctgg

SEQ ID NO: 450301 - DNA, 75 bp, synthetic construct
  source 1..75: mol_type = other DNA
cctgctgacgactgctcatagcgtaccgtttgatggtaaagcgacgctgtttgttgctgaacgcacgcttcagga

SEQ ID NO: 450302 - DNA, 75 bp, synthetic construct
  source 1..75: mol_type = other DNA
ctgttccgatcaaccctgggtgcaggtttatagcggtgaaaaattacaacgtcagggactggcagttgaaccaat

SEQ ID NO: 450303 - DNA, 75 bp, synthetic construct
  source 1..75: mol_type = other DNA
agctatgcaggctgccggtctgaaatttggcgagccgaaaaccttaagccgttccggtcgtgacccgattagcca

SEQ ID NO: 450304 - DNA, 75 bp, synthetic construct
  source 1..75: mol_type = other DNA
tggtgattttgctgcgttagcaaaagaaaaatctgccgatattatctctgcccgtaacggcggcgatatgggttg

SEQ ID NO: 450305 - DNA, 75 bp, synthetic construct
  source 1..75: mol_type = other DNA
caaatcttcggtcggtttcctgattgtacgtctggacgacattcagccagcgaaagtgaaatcgttagacgaagt

SEQ ID NO: 450306 - DNA, 75 bp, synthetic construct
  source 1..75: mol_type = other DNA
ttcgcaggcgatatagtctacaaaaccatttataacgcatcgttattattgatgatgcttgccattatcaacatt

SEQ ID NO: 450307 - DNA, 75 bp, synthetic construct
  source 1..75: mol_type = other DNA
gctggggctggtagccctggcattctatctgttgcttggttccacgattgattggtcaagctggaaaacttatgc

SEQ ID NO: 450308 - DNA, 75 bp, synthetic construct
  source 1..75: mol_type = other DNA
atcgatgctgaaaaactgctggttgatctgaaagcgggcaagggtgcggaagctatgcaagctgccggtttgaaa

SEQ ID NO: 450309 - DNA, 75 bp, synthetic construct
  source 1..75: mol_type = other DNA
gcccattgtgaaggcggcagcatcgaccatttctttgaaaatggcgatgaacttaacgagcagatggtgcaacga

SEQ ID NO: 450310 - DNA, 75 bp, synthetic construct
  source 1..75: mol_type = other DNA
tgatcaaagcacttgaagataagaattactctgaagcgattaaacagtgtaaagatagtttatggtatcgccaga

SEQ ID NO: 450311 - DNA, 75 bp, synthetic construct
  source 1..75: mol_type = other DNA
atgacattagaacaaaaattaaaagattatgaaggtagtttaaagtatcaatcccatattggcacatatcgctat

SEQ ID NO: 450312 - DNA, 75 bp, synthetic construct
  source 1..75: mol_type = other DNA
accaaaactgaagatgaagcgaaagcggtacttgatgagctgaataaaggcggtgattttgctgcattagccaaa

SEQ ID NO: 450313 - DNA, 75 bp, synthetic construct
  source 1..75: mol_type = other DNA
gaatcgtctgatcgacgaggcgctgctggatcagtacgctcgtgaactgaaactgggtatcagcgatgagcaggt

SEQ ID NO: 450314 - DNA, 75 bp, synthetic construct
  source 1..75: mol_type = other DNA
gggtatacagtgccgacccgcgtaaagtgaaagatgcctgtctgctgccattgctgcgtctggatgaggccagcg

SEQ ID NO: 450315 - DNA, 75 bp, synthetic construct
  source 1..75: mol_type = other DNA
ctacagccaagaaacaggcagatgagcgcgtcgcacaatacatttccttccttgaactcaatcagatcgcgaaaa

SEQ ID NO: 450316 - DNA, 75 bp, synthetic construct
  source 1..75: mol_type = other DNA
tcctgctcccccttaagcgcattattttacaaaaaacacactaaactcttcctgtctccgataaaagatgattaa

SEQ ID NO: 450317 - DNA, 75 bp, synthetic construct
  source 1..75: mol_type = other DNA
atcttctcaattattacgatatgcaactcattggcggcgataccacgcgtgggccattatcaatgacgttgggta

SEQ ID NO: 450318 - DNA, 75 bp, synthetic construct
  source 1..75: mol_type = other DNA
ctgggacaagcagcatattgatattctctgtgcgcgctttgtgatgcaaccggaacgctttgatgtggtggtagc

SEQ ID NO: 450319 - DNA, 75 bp, synthetic construct
  source 1..75: mol_type = other DNA
atagtgctttcagcggctatcagttgctgctggaatactttaccttccgggacaagtttatgttcgtccatctca

SEQ ID NO: 450320 - DNA, 75 bp, synthetic construct
  source 1..75: mol_type = other DNA
gtaccggaaggcgaaactggtgaattggtgatttatggcgcgtcagtgacgcagggctatatcgatgcgccgcaa

SEQ ID NO: 450321 - DNA, 75 bp, synthetic construct
  source 1..75: mol_type = other DNA
agcacgctggtactctgtgcccatcacttgtgcgtcgatatgcactcttggtatttaatcctcagcacgctggac

SEQ ID NO: 450322 - DNA, 75 bp, synthetic construct
  source 1..75: mol_type = other DNA
aaaaacctcttaatttatttatgtctctgcttagcaattattggagtggtcgcgtattcctttatatcaaagttt

SEQ ID NO: 450323 - DNA, 75 bp, synthetic construct
  source 1..75: mol_type = other DNA
ttcattttctgcgattctgaaggaaacgaatgccagatatctgcttggcctgacggcaacaccaatccgacggga

SEQ ID NO: 450324 - DNA, 75 bp, synthetic construct
  source 1..75: mol_type = other DNA
ccggggcgcagcatatggtgattgggcgcgccttgttctcttcatctgactatcgcgcgaccttagcccaattcg

SEQ ID NO: 450325 - DNA, 75 bp, synthetic construct
  source 1..75: mol_type = other DNA
caatccccggagatgggatcggtaaagaagtccttcctgaagggattcgtgttttacaggctgccgctaaacgct

SEQ ID NO: 450326 - DNA, 75 bp, synthetic construct
  source 1..75: mol_type = other DNA
cgatccctggagacgggattggcaaagaagtccttcctgaagggattcgtgtgttacaggctgctgctgaacgct

SEQ ID NO: 450327 - DNA, 75 bp, synthetic construct
  source 1..75: mol_type = other DNA
gatcttggcccggcctgcaccggcaccattggcattgccccatccgccaacctgaatccggaacgcactttcccg

SEQ ID NO: 450328 - DNA, 75 bp, synthetic construct
  source 1..75: mol_type = other DNA
gcagtgctgtcattctgggtaaagccgacaacccaccagcttccggcaatcaggttagcgaattaacaatgtggg

SEQ ID NO: 450329 - DNA, 75 bp, synthetic construct
  source 1..75: mol_type = other DNA
cagtttttgagcctcgatttaaaaaatcttgcaggcatgattctggagaaaactgggcgcacctcgcataccctg

SEQ ID NO: 450330 - DNA, 75 bp, synthetic construct
  source 1..75: mol_type = other DNA
ggtgcttcctggttgggaagggactttttcactgaaagcgctgctgggcgtaacctgtattgcgagcggattaat

SEQ ID NO: 450331 - DNA, 75 bp, synthetic construct
  source 1..75: mol_type = other DNA
atgggcctgatgtggggattattcagcgtcattattgcctcagttgcgcaattaagcctgggttttgcggcgagt

SEQ ID NO: 450332 - DNA, 75 bp, synthetic construct
  source 1..75: mol_type = other DNA
ccaaatggatcgcactggtgccgactttgcggtgatgagcggaggcggaattcgtgattctatcgaagcaggcga

SEQ ID NO: 450333 - DNA, 75 bp, synthetic construct
  source 1..75: mol_type = other DNA
gaatctggtgggctatgacgcgatggcgatcggtaatcatgaatttgataacccgctcaccgtattacgccagca

SEQ ID NO: 450334 - DNA, 75 bp, synthetic construct
  source 1..75: mol_type = other DNA
attctggcccgtgcctcggcgatcccggtactgagtggcttgccgctggatgcgatcgcgcgctatgccgggcaa

SEQ ID NO: 450335 - DNA, 75 bp, synthetic construct
  source 1..75: mol_type = other DNA
caggttagcgaattagcaatgtgggttaaacggctggtcagccaactgaaaaaagcgaagccggactgcaaatta

SEQ ID NO: 450336 - DNA, 75 bp, synthetic construct
  source 1..75: mol_type = other DNA
tgcaaattaccggagatggcgatggactacctgaagcgaaacggactgataagcgtggaggatgttttacggtga

SEQ ID NO: 450337 - DNA, 75 bp, synthetic construct
  source 1..75: mol_type = other DNA
tgaaaccggagcatggaaagacgctgttgactgggtactcaaagaggcttgccaggttgtaaacacgggcatcaa

SEQ ID NO: 450338 - DNA, 75 bp, synthetic construct
  source 1..75: mol_type = other DNA
tggctgacaatttatttaggcttggggctatattctcttggtctatcacaattggtaggaatattatttttttta

SEQ ID NO: 450339 - DNA, 75 bp, synthetic construct
  source 1..75: mol_type = other DNA
atggatcgcatgagtgtattccttgccgcagataacgaatccgggcatgtacaggccgttatcgcagaaaaagac

SEQ ID NO: 450340 - DNA, 75 bp, synthetic construct
  source 1..75: mol_type = other DNA
caggttagcgaattaacaatgtgggttaaacgactggtcagccaactgaaaaaagccaagccggactgcaaatta

SEQ ID NO: 450341 - DNA, 75 bp, synthetic construct
  source 1..75: mol_type = other DNA
aaagacacagtttctgaaatgtggccagagagaacgctggaaatgacgtggggcgagttctggaaagcagttaag

SEQ ID NO: 450342 - DNA, 75 bp, synthetic construct
  source 1..75: mol_type = other DNA
taaaattctatcgttatggaaacaactattattgcggcttgggtgaaattgaagggcttaccaaagagctcataa

SEQ ID NO: 450343 - DNA, 75 bp, synthetic construct
  source 1..75: mol_type = other DNA
gtttaaaaaacaaatcagagaaaatgctgtccgaagccgatccagccatacaccagatcgttagccggaaaattc

SEQ ID NO: 450344 - DNA, 75 bp, synthetic construct
  source 1..75: mol_type = other DNA
agcgcgaatcaatcagaaaacagagcaatatgcggtgcgtccgcagcaaattaaatttgaagtgactgagcatgc

SEQ ID NO: 450345 - DNA, 75 bp, synthetic construct
  source 1..75: mol_type = other DNA
gaagaacaaaagcaaaaccaggaaaagctgaagctactggaacggcagcagaagcgccaacgtatggaaattttt

SEQ ID NO: 450346 - DNA, 75 bp, synthetic construct
  source 1..75: mol_type = other DNA
tgaaaaaatcagtaccaaggcaatacacaatcataaattaaatcaggttggcggaatttcagaaaacagagccgc

SEQ ID NO: 450347 - DNA, 75 bp, synthetic construct
  source 1..75: mol_type = other DNA
gaagagtgtgagtttgacatgacccgtgaaatgaaaaacaacggagatctgctgagactactttttgagtacaac

SEQ ID NO: 450348 - DNA, 75 bp, synthetic construct
  source 1..75: mol_type = other DNA
ctgctgaaagatatcagtgaaaaacgtctgaacgtaaaactttccacaactcctggaaccctgatcacggaaggt

SEQ ID NO: 450349 - DNA, 75 bp, synthetic construct
  source 1..75: mol_type = other DNA
aatctgctgtttatgattttaaagcgtcttacgttcgtgccgtcgcagaccaaacagcaactgctggttatgtaa

SEQ ID NO: 450350 - DNA, 75 bp, synthetic construct
  source 1..75: mol_type = other DNA
aacaaaggttggtactgaaaacgggcaatggatttgcccctatatttccagacatctgttatcacttaacccatt

SEQ ID NO: 450351 - DNA, 75 bp, synthetic construct
  source 1..75: mol_type = other DNA
ccggtgctggtgggtactatttccattgaaaaatcggagctggtgtcaaacgagctgactaaagccggtatcaaa

SEQ ID NO: 450352 - DNA, 75 bp, synthetic construct
  source 1..75: mol_type = other DNA
cgggcatgcctgcgccagcgaaacgtgaagcctatgcggccgacattacttacggtactaacaacgagtacggtt

SEQ ID NO: 450353 - DNA, 75 bp, synthetic construct
  source 1..75: mol_type = other DNA
acgccaacgaagcggcgattgttgctcaggcaggttatccggctgcggtgactatcgcgaccaacatggcgggtc

SEQ ID NO: 450354 - DNA, 75 bp, synthetic construct
  source 1..75: mol_type = other DNA
aaaaattgcttgaacgtgaggatagctatgccttaccaaaacgacaccggcatctgacggggcttatactcagaa

SEQ ID NO: 450355 - DNA, 75 bp, synthetic construct
  source 1..75: mol_type = other DNA
ctgatctgaaacccaatacacagacgctttacagatccgtcgtgtacaacactatgtacacacagtttgaaggct

SEQ ID NO: 450356 - DNA, 75 bp, synthetic construct
  source 1..75: mol_type = other DNA
caggttaaaccttatatcgagagattgcttaatgcgggttttgatgtgctattccccgggcaggaaatagataaa

SEQ ID NO: 450357 - DNA, 75 bp, synthetic construct
  source 1..75: mol_type = other DNA
tcgaaaaaaaagcgtactatgctgatttccgggctgaatgctcttcctcctgattctccccgtattttgttgtca

SEQ ID NO: 450358 - DNA, 75 bp, synthetic construct
  source 1..75: mol_type = other DNA
cccgatgaactggaatcatggagtgaagccgggctaaacgccctggctgaatgggaaaaatcagaccatcaatga

SEQ ID NO: 450359 - DNA, 75 bp, synthetic construct
  source 1..75: mol_type = other DNA
cgagctgactctcaaagaatgcctggatcagtggtggagcaagtatgttgaaacgctgaagccgaacactcagac

SEQ ID NO: 450360 - DNA, 75 bp, synthetic construct
  source 1..75: mol_type = other DNA
tgggaaaaaaccagatgtagggagtcgtgtacttacctatacggaactggcaaaaatttggctggcgctggagaa

SEQ ID NO: 450361 - DNA, 75 bp, synthetic construct
  source 1..75: mol_type = other DNA
tggtaatgagccaggcggcgcgccagaccttatcccttgaaacggatttctccctgcgtgatgtgcaggcattag

SEQ ID NO: 450362 - DNA, 75 bp, synthetic construct
  source 1..75: mol_type = other DNA
agaacggtggcgatagctgaagaagccatgaaagcttttgggcaggggcgtaaagttctggtactgactgaacgt

SEQ ID NO: 450363 - DNA, 75 bp, synthetic construct
  source 1..75: mol_type = other DNA
gaataagccccgtgttataggttgtgcggagaattacccgcaacatattgcgttgccccggggatgtctggacag

SEQ ID NO: 450364 - DNA, 75 bp, synthetic construct
  source 1..75: mol_type = other DNA
agctgcaattgagttcttatgaccgattatttcctaatcaggatacgatgccaaaaggaggatttggtaatctta

SEQ ID NO: 450365 - DNA, 75 bp, synthetic construct
  source 1..75: mol_type = other DNA
gccgggacggaatgtaatgccgtttttatgggaaacctcagagcggagcaggaagaggccgtttcgggattactc

SEQ ID NO: 450366 - DNA, 75 bp, synthetic construct
  source 1..75: mol_type = other DNA
aattcactgaaattgtccccctttattctccatggacgactatcgaaaaaaaagcgtgcgatgctgatatccggg

SEQ ID NO: 450367 - DNA, 75 bp, synthetic construct
  source 1..75: mol_type = other DNA
tctggatgctgcatgagcgattccataatatccgcctgccggatgcgctggcattcttcggcggtacgcgcttcg

SEQ ID NO: 450368 - DNA, 75 bp, synthetic construct
  source 1..75: mol_type = other DNA
ccatcccgctgggtctggcacgcgaaaacaaaggcgtagcggcattcgctggcttcgtcggttatgcggtaatga

SEQ ID NO: 450369 - DNA, 75 bp, synthetic construct
  source 1..75: mol_type = other DNA
ggcacgagaagggcgggtgcgcggggtatgcaaaccgttgcatctcggttcgcgtcaccaggtctggcagattga

SEQ ID NO: 450370 - DNA, 75 bp, synthetic construct
  source 1..75: mol_type = other DNA
taaatcaggttacaacgttccggcaatcctcgaagccttaggcggtgccgacaatattgtcagcctcgataactg

SEQ ID NO: 450371 - DNA, 75 bp, synthetic construct
  source 1..75: mol_type = other DNA
caatcgaaaaagccgttgccggtgcgccgggtaaatcaggttacaacgttccggcaatcctcgaagccttaggcg

SEQ ID NO: 450372 - DNA, 75 bp, synthetic construct
  source 1..75: mol_type = other DNA
ccattatctcctcactgatgatgggacttgtcggtctggtaattccgttagtctggccgatatttgctatgggca

SEQ ID NO: 450373 - DNA, 75 bp, synthetic construct
  source 1..75: mol_type = other DNA
gtgcactacaccgactacacgttgccggatacgccaaactcctatactacttcacctttcagtgaaacgactgat

SEQ ID NO: 450374 - DNA, 75 bp, synthetic construct
  source 1..75: mol_type = other DNA
aatgatgaaacatcgctgcgtaataacatcgcaaatagcacggcgaaagatttcggtgtgggaatggcttcggga

SEQ ID NO: 450375 - DNA, 75 bp, synthetic construct
  source 1..75: mol_type = other DNA
ctattggcatgctgcttgatggtgatggcgtcagcgtgatcaacatgggcgacctcaatgttggtcaggccgctg

SEQ ID NO: 450376 - DNA, 75 bp, synthetic construct
  source 1..75: mol_type = other DNA
cccgaaccacaccgctgaccccggcagatatgacgcgctgggctgaaattaaaaagaatctgcgcttcaggatgc

SEQ ID NO: 450377 - DNA, 75 bp, synthetic construct
  source 1..75: mol_type = other DNA
gaaatacagagccagtttctccggggtaacgagcaggtgtaccagtgtcaggtggcatttgtattgccgggtgag

SEQ ID NO: 450378 - DNA, 75 bp, synthetic construct
  source 1..75: mol_type = other DNA
taagctctgcgggtgagactgtatcattatcatctggtgcgattattaatggggatgttaccagcgcgggtaccg

SEQ ID NO: 450379 - DNA, 75 bp, synthetic construct
  source 1..75: mol_type = other DNA
aaagcgctacacgtttcctctcgcagggcaaaatgcctgcattcctcggcggtctgccaggtgccgcgttagcca

SEQ ID NO: 450380 - DNA, 75 bp, synthetic construct
  source 1..75: mol_type = other DNA
gcacgttacctcggttatgtccgctttatggttaatgtggaagggcgctatacccattttgacgccggaactcac

SEQ ID NO: 450381 - DNA, 75 bp, synthetic construct
  source 1..75: mol_type = other DNA
actgcttaccggccctggcggtctggcggggcatatcgggcatacgcttgccgatccgcatggtccagtctgcgg

SEQ ID NO: 450382 - DNA, 75 bp, synthetic construct
  source 1..75: mol_type = other DNA
aaacctggctgatggaccttttctatcaaagcctgccgggagagcggaaacagcgcctgcactttcaccgtttta

SEQ ID NO: 450383 - DNA, 75 bp, synthetic construct
  source 1..75: mol_type = other DNA
catcgtcagaactgacacatggcgaagcagtgaaagctcttggattcctgaaacaaaaagccactgaacagaagg

SEQ ID NO: 450384 - DNA, 75 bp, synthetic construct
  source 1..75: mol_type = other DNA
gaacaaggtcaggcagcgacgacagcattgaatgccgcaaacgaaatcaccgttgctgcttttcttgcgcaacaa

SEQ ID NO: 450385 - DNA, 75 bp, synthetic construct
  source 1..75: mol_type = other DNA
tgtttatggacgccgtaaagcagagcaaagcgcaattgttaccggtcgatagcgaacataacgccatttttcaga

SEQ ID NO: 450386 - DNA, 75 bp, synthetic construct
  source 1..75: mol_type = other DNA
ccgttgcaagctcatgcgcagcgggttgccatcgcttcaaccggaattattcgcgacggcagtttgctggcgctg

SEQ ID NO: 450387 - DNA, 75 bp, synthetic construct
  source 1..75: mol_type = other DNA
ggatatgcgcgaaccacaatgcgtggacgatgtgttgtctgttgatgtcaatgcgcgcgaggtcgccagaaaaga

SEQ ID NO: 450388 - DNA, 75 bp, synthetic construct
  source 1..75: mol_type = other DNA
atgcgtacgccaattgcccacaccatggcatggccgaatcgcgtgaactctggtgtgaagccgctcgatttttgc

SEQ ID NO: 450389 - DNA, 75 bp, synthetic construct
  source 1..75: mol_type = other DNA
gtggttatagccagttctttggcctgaaacatcagatgtccttcgacaacggcatgaactggaataacgcattgc

SEQ ID NO: 450390 - DNA, 75 bp, synthetic construct
  source 1..75: mol_type = other DNA
aagaaagttcgctgaatctggatgcctaccactggaaagaggacgggatcagcgataaaggcgtgatgctgaact

SEQ ID NO: 450391 - DNA, 75 bp, synthetic construct
  source 1..75: mol_type = other DNA
caagacgatcgtggatggcggtacggcggttattgtcgacggcgatagcgccactatcaataatacgggtgatgc

SEQ ID NO: 450392 - DNA, 75 bp, synthetic construct
  source 1..75: mol_type = other DNA
aacaatgccggaaccgttcacggcggttcggttgataaaaacggcacctttaacaacctggaaggcggtacggtc

SEQ ID NO: 450393 - DNA, 75 bp, synthetic construct
  source 1..75: mol_type = other DNA
ccagctggacgccgacgatcagctgctttcgacctataaaaaagattccgcgctgatgcgctttaacgactcgca

SEQ ID NO: 450394 - DNA, 75 bp, synthetic construct
  source 1..75: mol_type = other DNA
ccgaacttaaagaaaagattcagacccagctggacgccgacgatcagctgctttcgacctataaaaaagattccg

SEQ ID NO: 450395 - DNA, 75 bp, synthetic construct
  source 1..75: mol_type = other DNA
ggtgagacaaataccgtcatcaatcagggcacaatcaatctggaaaaagatgagctgtacaatcccaacgcgccg

SEQ ID NO: 450396 - DNA, 75 bp, synthetic construct
  source 1..75: mol_type = other DNA
tagtgaccgtcttgaaggcgaccgcagcaaagttcgtttcgtacagaccaatatgggacggttgattctggcagc

SEQ ID NO: 450397 - DNA, 75 bp, synthetic construct
  source 1..75: mol_type = other DNA
tggagatggcgcgtagcttgcccgccggatcgctggcaatgattgttggcggacattcgcaagatcccgtctgta

SEQ ID NO: 450398 - DNA, 75 bp, synthetic construct
  source 1..75: mol_type = other DNA
tgtacacccctgaaatcgccgagaaccagcaaatgatctcgctgttatcgccgttccagaataaaggcaaagcgc

SEQ ID NO: 450399 - DNA, 75 bp, synthetic construct
  source 1..75: mol_type = other DNA
aaaatggtaattatgacgatagtctggcagcaaatactctggtagggatggctgtttatgagcatggtactgcta

SEQ ID NO: 450400 - DNA, 75 bp, synthetic construct
  source 1..75: mol_type = other DNA
tgacacaagtgcatctcagcctgtatctgaaaacaacgcatttatctcagttcgtccctgactacgttgagtctc

SEQ ID NO: 450401 - DNA, 75 bp, synthetic construct
  source 1..75: mol_type = other DNA
agtggacgtggggcgttcttaccaggggattgcggaacaatatacaaacagtcaatttattgatttcggtaaaac

SEQ ID NO: 450402 - DNA, 75 bp, synthetic construct
  source 1..75: mol_type = other DNA
agcacctgacggtcattaatcagtcgcatcagcaatatctgcaaaaagacctgccggatttatatgtcgatctct

SEQ ID NO: 450403 - DNA, 75 bp, synthetic construct
  source 1..75: mol_type = other DNA
gtgatggtaatactatcgaaatagcgggcagtattctggttgataaagatcagaaagctgataatgcgcagcctt

SEQ ID NO: 450404 - DNA, 75 bp, synthetic construct
  source 1..75: mol_type = other DNA
ggagactttaacctgagcatgaacagcggcagcgaaacggcggtggacagcatcgtcgggctgaaactggactat

SEQ ID NO: 450405 - DNA, 75 bp, synthetic construct
  source 1..75: mol_type = other DNA
aaaaccgttgacctgagcgaaagccagagcatgagcctggaatacggtatcgcgcgtctggatggcgacggtgcg

SEQ ID NO: 450406 - DNA, 75 bp, synthetic construct
  source 1..75: mol_type = other DNA
acagcgtgaacgtggaaggggtgaacggcaacaacggtaataataccgaagtgcattacaccgactacacgttgc

SEQ ID NO: 450407 - DNA, 75 bp, synthetic construct
  source 1..75: mol_type = other DNA
gaaaatggtcaggcattctataacgatggcactgggcttattatcaactatggcaccatttgtacctttggcgtt

SEQ ID NO: 450408 - DNA, 75 bp, synthetic construct
  source 1..75: mol_type = other DNA
attaacgttgatgggcattcctcggtctacctgaatggtgagtcaaccatcagcggcgagttcccgctggggttc

SEQ ID NO: 450409 - DNA, 75 bp, synthetic construct
  source 1..75: mol_type = other DNA
gaataccggtgcgaatttggcggcttctttcctgtccagatccgttttaccccctctcatggtcactttgatgtg

SEQ ID NO: 450410 - DNA, 75 bp, synthetic construct
  source 1..75: mol_type = other DNA
ccagctggacgctgacgatcagctgctttcgacctataaaaaagattccgcgctgatgcgctttaacgattcgca

SEQ ID NO: 450411 - DNA, 75 bp, synthetic construct
  source 1..75: mol_type = other DNA
cgaccgataaagagaacgcggttcaggccgtggttgacatcaatggtcacggtatcagcacttctggcagctatc

SEQ ID NO: 450412 - DNA, 75 bp, synthetic construct
  source 1..75: mol_type = other DNA
aagtattaaaatcccgcgttcccggcgcgcaaattgtcgctaatcaggaagggactgttttagataaagcgattt

SEQ ID NO: 450413 - DNA, 75 bp, synthetic construct
  source 1..75: mol_type = other DNA
ggccccagcgatctggccgcggcattaggccatctcggcaatgcctcgcacccggatgtacaaaaagcaattcag

SEQ ID NO: 450414 - DNA, 75 bp, synthetic construct
  source 1..75: mol_type = other DNA
aatggggcgcgacgtttgtggctgtcggcagcgatctcggcgtcttccgctctgccactcagaaactggctgata

SEQ ID NO: 450415 - DNA, 75 bp, synthetic construct
  source 1..75: mol_type = other DNA
atgttagaagatctcaaacgccaggtattagaagccaatttggcgctgccaaaacataacctggtcacgctcacc

SEQ ID NO: 450416 - DNA, 75 bp, synthetic construct
  source 1..75: mol_type = other DNA
gccatattctgagcgtactgccggaatggccctccaactgtgttgacgaactcctgccatggaacgtagtactca

SEQ ID NO: 450417 - DNA, 75 bp, synthetic construct
  source 1..75: mol_type = other DNA
gttcccgtctctggtatcttaaataccgtattaatggcaaagaatcccgtattgcactgggtgcctaccctgccg

SEQ ID NO: 450418 - DNA, 75 bp, synthetic construct
  source 1..75: mol_type = other DNA
tcaatacgaaggatttgcaccaccttctaaccataggatgagatgccataggtgtaacgcctcctatctgttccc

SEQ ID NO: 450419 - DNA, 75 bp, synthetic construct
  source 1..75: mol_type = other DNA
agcttgaagaaaagataaatcgagcctctaagtgggaagaggaaaagaaaaactatgagatgtatacacctactg

SEQ ID NO: 450420 - DNA, 75 bp, synthetic construct
  source 1..75: mol_type = other DNA
tggggcaaaaatgccgaagatgcggtgcacaacgccatcgtgctggaagaggtcgcttatatggggatattctgc

SEQ ID NO: 450421 - DNA, 75 bp, synthetic construct
  source 1..75: mol_type = other DNA
ctgcggaatgtataggctgccatgcttgtgaaattgcctgtgcggtggcacataatcaagaaaactggccgctga

SEQ ID NO: 450422 - DNA, 75 bp, synthetic construct
  source 1..75: mol_type = other DNA
gcgcgggtgaatttttttaccaaacacatgaatgtgtgggtaacagcagagtctgcctggatggacatgattaag

SEQ ID NO: 450423 - DNA, 75 bp, synthetic construct
  source 1..75: mol_type = other DNA
taaacgctgggatgatctgcgtcgcctggcgaaaaaggcgaaggagcaggtctcggcgcgggtgaattttttcac

SEQ ID NO: 450424 - DNA, 75 bp, synthetic construct
  source 1..75: mol_type = other DNA
tagctatactggtaggccgctaacccgatgggcgatagaactcactttgctgatctttattcggtccagtgagct

SEQ ID NO: 450425 - DNA, 75 bp, synthetic construct
  source 1..75: mol_type = other DNA
actcagcaacatcatgcgctatgccgttcagcaggggcttaccgaaagcaatccggcgcagcatctggatggcgt

SEQ ID NO: 450426 - DNA, 75 bp, synthetic construct
  source 1..75: mol_type = other DNA
agtttgttgcagaggtacggagcaaactggatcacgccttagcggttcttgctgtcgaggcgcagcaggaagcgg

SEQ ID NO: 450427 - DNA, 75 bp, synthetic construct
  source 1..75: mol_type = other DNA
gccaatttgccagggcttcgaccagtacgccaacgtgcgtccaaccaaaatcctgccgggtgtcacctcaccgct

SEQ ID NO: 450428 - DNA, 75 bp, synthetic construct
  source 1..75: mol_type = other DNA
tcggcgatatcaaatcaaccctgcgtgcattgctgccattgatagaagaaaaaaccgatcgcaagtttctcgata

SEQ ID NO: 450429 - DNA, 75 bp, synthetic construct
  source 1..75: mol_type = other DNA
aagatcggccaggacgtaggcgcagaatgcatcaaaaacaaagttgcaccaccgtatggcaaatgcacctggaaa

SEQ ID NO: 450430 - DNA, 75 bp, synthetic construct
  source 1..75: mol_type = other DNA
aagatcggacaggacgttggcgccgagtgcattaaaaacaaagtcgcgcctccgtttggcaaatgctcatggaaa

SEQ ID NO: 450431 - DNA, 75 bp, synthetic construct
  source 1..75: mol_type = other DNA
gatggagatgaaagccggaggctacctgacagacggtactgagctgcacgacaccaactttgcccgcattgccga

SEQ ID NO: 450432 - DNA, 75 bp, synthetic construct
  source 1..75: mol_type = other DNA
aatgaacggcaagcgtcgcctgttaggttcgtttaaccacggttcgatggctaacgccatgccgcaggcgctggg

SEQ ID NO: 450433 - DNA, 75 bp, synthetic construct
  source 1..75: mol_type = other DNA
ccgcaaagggctggacgatttagctaaaccgagcgagaaagccattcacccgcaatatctggcgcagcaaattag

SEQ ID NO: 450434 - DNA, 75 bp, synthetic construct
  source 1..75: mol_type = other DNA
taaacgcatgatgggcacatcaaagacgttaaaactgggcggacgggaatttcgtgcggaagaactctcatcgtt

SEQ ID NO: 450435 - DNA, 75 bp, synthetic construct
  source 1..75: mol_type = other DNA
atgctcactttgatgcggcttgccgagcatttgcaattgaacacaatctggaagatgtggccgctgccgttggca

SEQ ID NO: 450436 - DNA, 75 bp, synthetic construct
  source 1..75: mol_type = other DNA
ccggatatgcagcaaacgctgctggataaacactatctgcgtaagcatggcgcgaaggcatattacgggcagtaa

SEQ ID NO: 450437 - DNA, 75 bp, synthetic construct
  source 1..75: mol_type = other DNA
ctgctatttaaagaatatggtctggagtatgagaaagctgctggcaagcaggttccattgagtgttcgtcgtgcc

SEQ ID NO: 450438 - DNA, 75 bp, synthetic construct
  source 1..75: mol_type = other DNA
ttccgccaaaaccggccggtgatgtgcgtattgatgttcgttttacgtacgatattaacggtattcttgatgtcg

SEQ ID NO: 450439 - DNA, 75 bp, synthetic construct
  source 1..75: mol_type = other DNA
aggctgagcgtgtcaaacgcgtgctgagtgtgcgagatgaagccactttcagtgtggagattgaaggaaggcgat

SEQ ID NO: 450440 - DNA, 75 bp, synthetic construct
  source 1..75: mol_type = other DNA
tcctgtcaccccacaggcagacatgcagcagcttgcccgtgacctgaaagcagagctggacaggcgggatgagga

SEQ ID NO: 450441 - DNA, 75 bp, synthetic construct
  source 1..75: mol_type = other DNA
cgccagctaaaactgactgcgggcaatgatgcgctcggttccatgcagaaagaatccgacatcaacaaagactca

SEQ ID NO: 450442 - DNA, 75 bp, synthetic construct
  source 1..75: mol_type = other DNA
tgaaatccggcgtttcctggttgctggataaactcggcattgtcagtaaagaggccgcaaaggcaaaactgccgg

SEQ ID NO: 450443 - DNA, 75 bp, synthetic construct
  source 1..75: mol_type = other DNA
atgatgcgctcggctccatgcagaaagaatccgacatcaacaaggactcactttctgctcagtggttgctggtca

SEQ ID NO: 450444 - DNA, 75 bp, synthetic construct
  source 1..75: mol_type = other DNA
tgatctgctgacgcccgttaagtcaacctctgccgaactgcagagtgcagcggcaatggggcggcgattcgggga

SEQ ID NO: 450445 - DNA, 75 bp, synthetic construct
  source 1..75: mol_type = other DNA
tcaaagcagcggctggtcccatcagtgccgcattcgaaccacttaagcctgtgttccagtggattggagacaaag

SEQ ID NO: 450446 - DNA, 75 bp, synthetic construct
  source 1..75: mol_type = other DNA
tgcgcgatcgtattgcaggagccggagccactaccacggctgcagggttggcaatggggacgccagtgatggcgg

SEQ ID NO: 450447 - DNA, 75 bp, synthetic construct
  source 1..75: mol_type = other DNA
gataagcgcctgtctgccatgaccatgttgtttggtaaagagtttggcgatgatgcggcgaaactggcaaacaac

SEQ ID NO: 450448 - DNA, 75 bp, synthetic construct
  source 1..75: mol_type = other DNA
cagtgctgccaacgcgatggtgcgtgaattgtccattgcgaccatgcaaagcaagagtttctttgaaggaatgaa

SEQ ID NO: 450449 - DNA, 75 bp, synthetic construct
  source 1..75: mol_type = other DNA
aggtgcgccggttgcactgttgcggtctggattatccggtttacgtgcggttgctgtgatgtttatgaatccact

SEQ ID NO: 450450 - DNA, 75 bp, synthetic construct
  source 1..75: mol_type = other DNA
tgccacaggcacggtgctgcgagtactgtcatctggtccactggcgatgttgcgcgttgccctgtatgccgtatc

SEQ ID NO: 450451 - DNA, 75 bp, synthetic construct
  source 1..75: mol_type = other DNA
tggctgccgttgttgccggaatgatgggcgttgctgccgcgcctgcagagcttccaccgttgcatcctttggcac

SEQ ID NO: 450452 - DNA, 75 bp, synthetic construct
  source 1..75: mol_type = other DNA
ggctgctgttactgtgggcctcggcaccctggctgtggtgttggctgctgtgctggggccgctggcagtcatccg

SEQ ID NO: 450453 - DNA, 75 bp, synthetic construct
  source 1..75: mol_type = other DNA
aaccaggaactgtcgaaacaggaggcgcggctgaagagactgggggaagctcagcgcaggatgaatgcagcgcgt

SEQ ID NO: 450454 - DNA, 75 bp, synthetic construct
  source 1..75: mol_type = other DNA
ggcagagctctatcgtaagtgggccgggatggacaagctgatccttaccgacggtgatgtaatcgaccatgctca

SEQ ID NO: 450455 - DNA, 75 bp, synthetic construct
  source 1..75: mol_type = other DNA
acctcgacggcctgaacatccactgtgccatcgtcgacgagctgcatgctcacaaaacccgtgacgtttgggacg

SEQ ID NO: 450456 - DNA, 75 bp, synthetic construct
  source 1..75: mol_type = other DNA
atggactggcacgttttcatcctgattaatatttttggtttcgtgatcccgctggttaacgaagaaacgggagaa

SEQ ID NO: 450457 - DNA, 75 bp, synthetic construct
  source 1..75: mol_type = other DNA
gaaaatttatgagcttcatatcgagcaagaaaaattacagtaccctgattttattcttgaacgactttttgatgc

SEQ ID NO: 450458 - DNA, 75 bp, synthetic construct
  source 1..75: mol_type = other DNA
agtttgatgtgttgactgttgctggttacgctaaccctaaagctaaaacacatttcgcaccttctgcttctggat

SEQ ID NO: 450459 - DNA, 75 bp, synthetic construct
  source 1..75: mol_type = other DNA
cgccatcaaggtattgcgaggctataacagcgacgtggagggcgcggtaaaagacgactcctactttgcgattat

SEQ ID NO: 450460 - DNA, 75 bp, synthetic construct
  source 1..75: mol_type = other DNA
gttgctgccgcgccagcagagcttccaccgttgcaccctttggcacttccgcgaaaggtggagaagcaattgtga

SEQ ID NO: 450461 - DNA, 75 bp, synthetic construct
  source 1..75: mol_type = other DNA
tggcagcactacgcggtggactgaccgccgcaggcgcggtgctgcgagtactggcatctggtccactggcgatgt

SEQ ID NO: 450462 - DNA, 75 bp, synthetic construct
  source 1..75: mol_type = other DNA
tttcttggtggcgtggtggaaggattcaaagctgcggcaggtcccgtcagtgcagcattcgaaccgcttaagccc

SEQ ID NO: 450463 - DNA, 75 bp, synthetic construct
  source 1..75: mol_type = other DNA
cgcaccactggcagtgctgcgacacgggcttgcttcagcgggtaatgcagcgggtttacttactgcgccgttgtc

SEQ ID NO: 450464 - DNA, 75 bp, synthetic construct
  source 1..75: mol_type = other DNA
cgcgttgtcctggctggctggcgctccactggcactgctgcgacgcgggtttgcttcatcgggcaaggccgcagg

SEQ ID NO: 450465 - DNA, 75 bp, synthetic construct
  source 1..75: mol_type = other DNA
tgcgtgatcgtattgcaggtgccggagccactaccacggcggcagggctggcaatgggcgcgccagtgatggcgg

SEQ ID NO: 450466 - DNA, 75 bp, synthetic construct
  source 1..75: mol_type = other DNA
ttttattattatttatatccagtttttcgctctatgctgccaacaatacaatatttgtcgttggagcaggaaacg

SEQ ID NO: 450467 - DNA, 75 bp, synthetic construct
  source 1..75: mol_type = other DNA
tacaggaggtagggcgacatttcgttattcggcgggtacgaacaatcttgtattttataaaccaactcaacttgg

SEQ ID NO: 450468 - DNA, 75 bp, synthetic construct
  source 1..75: mol_type = other DNA
cagaaaacctggcgcagtggatagacgcaggttgtgcaggggcgggcttaggcagcgatctctatcgcgccgggc

SEQ ID NO: 450469 - DNA, 75 bp, synthetic construct
  source 1..75: mol_type = other DNA
cgagcaaaccggcagcggcgatcagtatggcatataacaacaatgatccggtcaaccagctggcaatgcatctgg

SEQ ID NO: 450470 - DNA, 75 bp, synthetic construct
  source 1..75: mol_type = other DNA
ggtgacggcgaaccgcagttcagagcgtcggtgctggcttcccgtgaggggctaagccgctatctggccggggct

SEQ ID NO: 450471 - DNA, 75 bp, synthetic construct
  source 1..75: mol_type = other DNA
tttataaaccaaccggaccaggcatagttaaaacaaatgtgaaactctactggtcagagctcgacacagcaagcg

SEQ ID NO: 450472 - DNA, 75 bp, synthetic construct
  source 1..75: mol_type = other DNA
actcaggatgccgaagtggatgatgcgaaatacggcttcgtcgcctctggcacgctgaacccgcaaaaagcgcgc

SEQ ID NO: 450473 - DNA, 75 bp, synthetic construct
  source 1..75: mol_type = other DNA
ctgtataacgcggtagtaactgcggcagataaagcctccgccaaccgtggcgtgctggtggtgatgaacgacacc

SEQ ID NO: 450474 - DNA, 75 bp, synthetic construct
  source 1..75: mol_type = other DNA
aaaacggcactgcagtagtgcgttcttcccgcgtaccgacgggcgctaccactcaggatgccgaagtggatgatg

SEQ ID NO: 450475 - DNA, 75 bp, synthetic construct
  source 1..75: mol_type = other DNA
agcggtattaccaccggacatcgcggtctttgccgttggcggcgtgacgccagaaaacctggcgcagtggataga

SEQ ID NO: 450476 - DNA, 75 bp, synthetic construct
  source 1..75: mol_type = other DNA
aaaactgtattcgtgtgcaaaatattgaaaccaaaatgtcctctggaaacattggggtgcaaaacaaaaaattaa

SEQ ID NO: 450477 - DNA, 75 bp, synthetic construct
  source 1..75: mol_type = other DNA
tccgacctgtttttcctcagtgattacaggaaaaacagtcaatggaacgactgttgaacttggcagctatacaac

SEQ ID NO: 450478 - DNA, 75 bp, synthetic construct
  source 1..75: mol_type = other DNA
cccggtccttacctacaagaaaaacaaggtgttgacggggattaacgataacaccgcactggcgtataccactgg

SEQ ID NO: 450479 - DNA, 75 bp, synthetic construct
  source 1..75: mol_type = other DNA
ctcaccgggtctcgatcgcccactgttcacggctgaacactacgcccgttttgtcggagaagaggtgactctggt

SEQ ID NO: 450480 - DNA, 75 bp, synthetic construct
  source 1..75: mol_type = other DNA
ttttatcggtagtgatgatatgacgcaaaaccgggaattatttcaggtctggttacaaaaattagcacagtggca

SEQ ID NO: 450481 - DNA, 75 bp, synthetic construct
  source 1..75: mol_type = other DNA
atgcagcacgtccacacagtgaagctattcgcgacgctcaacgaaaaaaacctaaagttccggtacatgctgtac

SEQ ID NO: 450482 - DNA, 75 bp, synthetic construct
  source 1..75: mol_type = other DNA
ggagtcagttagataccgcttctggtggtggttttctttattgcaacagaagtgatagcacaagtggtagcgcaa

SEQ ID NO: 450483 - DNA, 75 bp, synthetic construct
  source 1..75: mol_type = other DNA
ttataccgcgagtgctggcactgatgataacgtaggatatattgttgggaatagttacggcgttggtccgtcaga

SEQ ID NO: 450484 - DNA, 75 bp, synthetic construct
  source 1..75: mol_type = other DNA
acctgtttggccaacaaaaactgatgttcaactgaatcgatttgtggctgagtgggaaatgaaagaacgccttta

SEQ ID NO: 450485 - DNA, 75 bp, synthetic construct
  source 1..75: mol_type = other DNA
cttcgagttaaaaaacagcaccgcgctcggctcggagctgatcgactatgccctgccgctcgccaaggtgagtca

SEQ ID NO: 450486 - DNA, 75 bp, synthetic construct
  source 1..75: mol_type = other DNA
tgagtgccattctgctgctggcctgcgcctcttgcgctgccattgccgccccttctaaggaagatgctcaggcct

SEQ ID NO: 450487 - DNA, 75 bp, synthetic construct
  source 1..75: mol_type = other DNA
ttctgtcaaatcgtgggtttataaatttcccgagatgaaaataagctccaaacttaaatacgacatggcaccgac

SEQ ID NO: 450488 - DNA, 75 bp, synthetic construct
  source 1..75: mol_type = other DNA
ctgatggtgaggcgaatatacgtgctaaagaagcagagttagtgatgcagtttgttgaaaaggctcgtaaagttc

SEQ ID NO: 450489 - DNA, 75 bp, synthetic construct
  source 1..75: mol_type = other DNA
gctaatttatttgccggaggctatgaaacagaaaggagtgacggcttaagcgataattatttgattgctcctggg

SEQ ID NO: 450490 - DNA, 75 bp, synthetic construct
  source 1..75: mol_type = other DNA
gatatttttttgggaagtcaatggtttgtttttagtaaaagacatttggatttgatttataatcttgtagatgac

SEQ ID NO: 450491 - DNA, 75 bp, synthetic construct
  source 1..75: mol_type = other DNA
acggtaccgacacgatggaagaaacggcttacttcctagacctgacggtgaaatgtgacaaaccggtggtgatgg

SEQ ID NO: 450492 - DNA, 75 bp, synthetic construct
  source 1..75: mol_type = other DNA
accccccctgttttactgcggcagtaaccggcacatctgtcagtgggtcgacagttaaaatgggggaatatagct

SEQ ID NO: 450493 - DNA, 75 bp, synthetic construct
  source 1..75: mol_type = other DNA
attagcaaacagtaaaagtgccctaatgatactgaagccgaatgattcagcttctgtttataaagataatacggg

SEQ ID NO: 450494 - DNA, 75 bp, synthetic construct
  source 1..75: mol_type = other DNA
gggccattatcaatgacgttgggtatccacggctttgttccgatgggacgagccttaacgcgctctggggcgaaa

SEQ ID NO: 450495 - DNA, 75 bp, synthetic construct
  source 1..75: mol_type = other DNA
tgcacaaatggtactgaaaccaaatgatgcaacgtctatttataaagattatgaaacagaaaatgacactactgg

SEQ ID NO: 450496 - DNA, 75 bp, synthetic construct
  source 1..75: mol_type = other DNA
gcagcaaaaggcgttggtgtactgattgaaggtttaaaaaacactaaaagtgcacaaatggtactgaaaccaaat

SEQ ID NO: 450497 - DNA, 75 bp, synthetic construct
  source 1..75: mol_type = other DNA
attccggaaaaagttatggcggacataaactctttaagacatctgttccaggcctgtattacacgttagcaatat

SEQ ID NO: 450498 - DNA, 75 bp, synthetic construct
  source 1..75: mol_type = other DNA
gcctgttcgattgtcatcgtaatcacgttccggtactggcgattgccgcccacatcccttccagcgaaattggca

SEQ ID NO: 450499 - DNA, 75 bp, synthetic construct
  source 1..75: mol_type = other DNA
acaccaactttgcccgcattgccgaagcgtgcggaattacgggtattcgcgtggaaaaagcctctgaagtcgatg

SEQ ID NO: 450500 - DNA, 75 bp, synthetic construct
  source 1..75: mol_type = other DNA
ttccaccgcagatcaaactcgaacaggccaaggtttcagcctgtatatgctgcgcgcaatcatcagcgggcgcgg

SEQ ID NO: 450501 - DNA, 75 bp, synthetic construct
  source 1..75: mol_type = other DNA
tcaggtaatggaaaagcaactttcagatacaacactatcgcaaacaatttagttttttataaacctacaggttca

SEQ ID NO: 450502 - DNA, 75 bp, synthetic construct
  source 1..75: mol_type = other DNA
catatcccttccagcgaaattggcagcggctatttccaggaaacccacccgcaagagttattccgcgaatgtagc

SEQ ID NO: 450503 - DNA, 75 bp, synthetic construct
  source 1..75: mol_type = other DNA
gccattccaccgcagatcaaactcgaacaggccaaaggatttagcttgtatatgttgcgcgcaatcatcagcgga

SEQ ID NO: 450504 - DNA, 75 bp, synthetic construct
  source 1..75: mol_type = other DNA
aaaagtgcacaaatggtactgaaaccaaatgatgcaacgtctgtttataaagattacgaaacagaagatgacact

SEQ ID NO: 450505 - DNA, 75 bp, synthetic construct
  source 1..75: mol_type = other DNA
cgaaagttggtatcgtttataactatgctaacgcatccgatcttccggcaaaagcactggtagatgcgggctatg

SEQ ID NO: 450506 - DNA, 75 bp, synthetic construct
  source 1..75: mol_type = other DNA
ctgggttacattcacaacggtaagattgactaccagcgtaccccggcacgtaagcataccagcgacacaccattc

SEQ ID NO: 450507 - DNA, 75 bp, synthetic construct
  source 1..75: mol_type = other DNA
tttgacttgacagatatcgtattaacaaaccctacctgttttactgcggcgcttagtggcccatcggtaagtggt

SEQ ID NO: 450508 - DNA, 75 bp, synthetic construct
  source 1..75: mol_type = other DNA
acggtaccgacacgatggaagaaactgcttacttccttgacctgacggtgaaatgtgacaaaccggtggtgatgg

SEQ ID NO: 450509 - DNA, 75 bp, synthetic construct
  source 1..75: mol_type = other DNA
acggtaccgacacgatggaagaaacagcttacttcctggacctgacggtgaaatgtgacaaaccggtggtgatgg

SEQ ID NO: 450510 - DNA, 75 bp, synthetic construct
  source 1..75: mol_type = other DNA
cacgctgaacccgcaaaaagcgcgcgttctgctgcaactggcgctgacgcaaactaaagatccacagcagatcca

SEQ ID NO: 450511 - DNA, 75 bp, synthetic construct
  source 1..75: mol_type = other DNA
cacactgaataatgtcaaattaaccttaccaacatgttttacctccatacttaccgggccatcagtcaatggttc

SEQ ID NO: 450512 - DNA, 75 bp, synthetic construct
  source 1..75: mol_type = other DNA
gtagtctcaagcccactgataaaccctttaaagtctccgattcccacggtctgtatctgctggtcaagccgggtg

SEQ ID NO: 450513 - DNA, 75 bp, synthetic construct
  source 1..75: mol_type = other DNA
tattggggcatatcatcagggccgtgaactgacccggcatgccgttctgctgatgctgcatgtgttcattcgctc

SEQ ID NO: 450514 - DNA, 75 bp, synthetic construct
  source 1..75: mol_type = other DNA
agtagtaactcaagtggcgaaccaatgtatattgaacataaaatggttgattccggtaaaagttatggcggacat

SEQ ID NO: 450515 - DNA, 75 bp, synthetic construct
  source 1..75: mol_type = other DNA
ttccggaaaaagttatggcggacataaactctttaagacatctgttccaggcctgtattacacgttagcaatatc

SEQ ID NO: 450516 - DNA, 75 bp, synthetic construct
  source 1..75: mol_type = other DNA
ctttgatatctcgcttcagaattgtattcgtgtgcgtaatattgaaacaaaactcgtcactggaaaagtaggtac

SEQ ID NO: 450517 - DNA, 75 bp, synthetic construct
  source 1..75: mol_type = other DNA
gaccacgctcgactatgaaaactatcatatctttgttggcacctaccccaacgaccccgatactcaccaaacgtg

SEQ ID NO: 450518 - DNA, 75 bp, synthetic construct
  source 1..75: mol_type = other DNA
tgatggtgatgatacacttcttgctttaggctatgagggatttggtaatgctattgttaataccgatattgactt

SEQ ID NO: 450519 - DNA, 75 bp, synthetic construct
  source 1..75: mol_type = other DNA
tatgatcatggtagtggcggtattatatcgtctaccaccataactatgggtgatggtgatgatacacttcttgct

SEQ ID NO: 450520 - DNA, 75 bp, synthetic construct
  source 1..75: mol_type = other DNA
cgaccgtatgatggaaaaaggctacacccgtaaacaggtgcgtttactgtgcgaatggtatttgcgcgtacgtaa

SEQ ID NO: 450521 - DNA, 75 bp, synthetic construct
  source 1..75: mol_type = other DNA
ctttaaagaagataaaaatggaggttatgacttaataaaaataaaattcaaagagccagagacaggattcacaag

SEQ ID NO: 450522 - DNA, 75 bp, synthetic construct
  source 1..75: mol_type = other DNA
ctggaatgatccacggccgagaatcgcagtcgctgacaataaaatttacgtcaccgatccgttgaaaagtaaaat

SEQ ID NO: 450523 - DNA, 75 bp, synthetic construct
  source 1..75: mol_type = other DNA
tagttatgccactaccctgtgtcaggaaaaggagcaaaatatccttaaggagatcagctatgctgaaaaacacca

SEQ ID NO: 450524 - DNA, 75 bp, synthetic construct
  source 1..75: mol_type = other DNA
ttgtttggtcttaccgttcacgggaaaccccagctaccgacgctctcctggctgaagtacgtgcgcagggggtgg

SEQ ID NO: 450525 - DNA, 75 bp, synthetic construct
  source 1..75: mol_type = other DNA
gtcgcatcggttcaacaccatcagttgaggttcagtcagttcgggcgggttttgattgggatgccgggaaagtga

SEQ ID NO: 450526 - DNA, 75 bp, synthetic construct
  source 1..75: mol_type = other DNA
catctgaaagatgatgcaagtttacgtattagtgatagagatgatgtgattagtgatggagaactgttattacca

SEQ ID NO: 450527 - DNA, 75 bp, synthetic construct
  source 1..75: mol_type = other DNA
ggcagacacagtcgagcaggcagtggccgatgcaaaagcccatttagaaaaggcactaaatactgtctatcagcc

SEQ ID NO: 450528 - DNA, 75 bp, synthetic construct
  source 1..75: mol_type = other DNA
gaaaaccctgctcggtggcgacaacctgattgaagtaaataatcttgctgccgatccgctgaccaaacccgcaca

SEQ ID NO: 450529 - DNA, 75 bp, synthetic construct
  source 1..75: mol_type = other DNA
gtgttcaacttcgatcatgtagaagtggcggcaaacccggtccatctgttctacgtcctggaacagcagatcgag

SEQ ID NO: 450530 - DNA, 75 bp, synthetic construct
  source 1..75: mol_type = other DNA
aagcagatgacctgattctaccatcgctgcatgtggctaaccgcgagctgcgccgggcaaaaggtcaggttcaga

SEQ ID NO: 450531 - DNA, 75 bp, synthetic construct
  source 1..75: mol_type = other DNA
ggcgctgatttaccggcagagccgaaagccgcatccataacggaaacggatggtaaagcctttcctcagccagca

SEQ ID NO: 450532 - DNA, 75 bp, synthetic construct
  source 1..75: mol_type = other DNA
cgccgggcaaaaggtcaggttcagaagtgggagcgtgtctgcgccgcgctgcgggagctgaacaagcaccaggat

SEQ ID NO: 450533 - DNA, 75 bp, synthetic construct
  source 1..75: mol_type = other DNA
agttcaatgtatcagaaataaccatcagaaaaagactcgaaattgagaatatatcgttcaatcaaatactggttc

SEQ ID NO: 450534 - DNA, 75 bp, synthetic construct
  source 1..75: mol_type = other DNA
atcaggttcaaccgcaggagatggaaatcgttctataccttgacccgatgctctactggtttaatggtcattttg

SEQ ID NO: 450535 - DNA, 75 bp, synthetic construct
  source 1..75: mol_type = other DNA
cggcaacacaggaagatattaaaacaggaactgtggcgggcattgtgcagtcgctaccatcgtttaccgaaacgc

SEQ ID NO: 450536 - DNA, 75 bp, synthetic construct
  source 1..75: mol_type = other DNA
atgtcgccgtgggccgcgaagcgcctgcatgaatttggtggcgatatcactaaatttcgggttgtgaaggtctgg

SEQ ID NO: 450537 - DNA, 75 bp, synthetic construct
  source 1..75: mol_type = other DNA
tggagttcgtcgagatgtttaaagcaccaattaaagtgctgcatccactactgaccgcgacccaggaaggcaact

SEQ ID NO: 450538 - DNA, 75 bp, synthetic construct
  source 1..75: mol_type = other DNA
ggacgcctatggttattccggtgcgctgtgccgtgcaaaccaggggatcatggaatttgtcgagatgtttaaagc

SEQ ID NO: 450539 - DNA, 75 bp, synthetic construct
  source 1..75: mol_type = other DNA
cgagattgcagcccgtcttgaaatcagccgtgacgatgctgttaccgaactctggaagctgaagcgtcgtggcga

SEQ ID NO: 450540 - DNA, 75 bp, synthetic construct
  source 1..75: mol_type = other DNA
cgtcgggcgaaaagtgatgttcagaagtgggagcgagtttgtgccgcgctgcgggagctgaacaagtgccgggat

SEQ ID NO: 450541 - DNA, 75 bp, synthetic construct
  source 1..75: mol_type = other DNA
attcgttggccgggaggcggcggttctgcgttagcattttatgatggcggtgggttcacttatgtccaggattca

SEQ ID NO: 450542 - DNA, 75 bp, synthetic construct
  source 1..75: mol_type = other DNA
tcggttgtatggttaacggcgcaggtctggcgatgggtacgatggacatcgttaaactgcacggcggcgaaccgg

SEQ ID NO: 450543 - DNA, 75 bp, synthetic construct
  source 1..75: mol_type = other DNA
cactggaaatttacccgccgcgcattccgaaagcccctgatttctggcatccgacaatgtggcgcaggccacggc

SEQ ID NO: 450544 - DNA, 75 bp, synthetic construct
  source 1..75: mol_type = other DNA
tagcctggaatttaataagcgtcttcttaatggacagttggatgcctttgatgctcagcaactgcaagaatacac

SEQ ID NO: 450545 - DNA, 75 bp, synthetic construct
  source 1..75: mol_type = other DNA
accgtgacaataaatctgtcacttttgccgaacttgatgtgtttgatttgagtgaagcgttaagcgcacccgacg

SEQ ID NO: 450546 - DNA, 75 bp, synthetic construct
  source 1..75: mol_type = other DNA
cattaccaccagggcagagtcgaggaaatcaacaatggctggcattctccggaagcaaaatcagcagaacaggcg

SEQ ID NO: 450547 - DNA, 75 bp, synthetic construct
  source 1..75: mol_type = other DNA
cccggaagcacaattagcagaacaggcgctccgcagcggtcacatagaagcgttaattaacatatgggaaaatga

SEQ ID NO: 450548 - DNA, 75 bp, synthetic construct
  source 1..75: mol_type = other DNA
atgacagcagaaatgtgcagtgaatttgtacagctttttgtcgattacgaaattatgccgcctttttgccagttg

SEQ ID NO: 450549 - DNA, 75 bp, synthetic construct
  source 1..75: mol_type = other DNA
ccggcaaatgaaccgcgtcgtttactcaacgcctttcgtgtggccgcagagggggagttctgcaatgcgcaagat

SEQ ID NO: 450550 - DNA, 75 bp, synthetic construct
  source 1..75: mol_type = other DNA
gaataatgatatggcgctgatacaactgcaccatatttcgcaacgagcgaaatcgcgctctttacgtgaaaatgc

SEQ ID NO: 450551 - DNA, 75 bp, synthetic construct
  source 1..75: mol_type = other DNA
acaaactcattgccgcactgccaggaataaccaaagttcgccgcccttttattgcgctgatcctcccggaaaaac

SEQ ID NO: 450552 - DNA, 75 bp, synthetic construct
  source 1..75: mol_type = other DNA
gcacagcaaaaagctcgagatgaatactggcgtacgctgttacaaacgctgatggcatcgcagccacaactggca

SEQ ID NO: 450553 - DNA, 75 bp, synthetic construct
  source 1..75: mol_type = other DNA
tcgacgaaatcgtccaacacgaggggctggaatatgcaactgaggtggtgattgcacgccagtttattgtacggt

SEQ ID NO: 450554 - DNA, 75 bp, synthetic construct
  source 1..75: mol_type = other DNA
acgaaagcacggcacgggatctgacgacacagatcctcgcctggccacaagaaggcaaatctgcccgtgctgtca

SEQ ID NO: 450555 - DNA, 75 bp, synthetic construct
  source 1..75: mol_type = other DNA
aaatcaacaatggctggcattctccggaagcaaaatcagcagaacaggcgcttcgcagcggcgacgttgaaacgt

SEQ ID NO: 450556 - DNA, 75 bp, synthetic construct
  source 1..75: mol_type = other DNA
gaaaaattatcgattgaacttgatgccgcaaaacagcgcattgcagagctggagggtaatttcacggcgctggca

SEQ ID NO: 450557 - DNA, 75 bp, synthetic construct
  source 1..75: mol_type = other DNA
agggcgtggatgctgctatagaagctgcaaaaaatctggtggcccaagaatatgagtataaggatttcaaagcgg

SEQ ID NO: 450558 - DNA, 75 bp, synthetic construct
  source 1..75: mol_type = other DNA
aaatttatcgtacagagttgctacgtgtttgacggcgagcagggtgaactatctgatgcgtatatctgcgcaata

SEQ ID NO: 450559 - DNA, 75 bp, synthetic construct
  source 1..75: mol_type = other DNA
accgacgctttcctggctgaagtacgtgcggaggcacgcaacgaggggattaactacaccgcaagccgtcttgct

SEQ ID NO: 450560 - DNA, 75 bp, synthetic construct
  source 1..75: mol_type = other DNA
tttgattgggatgccgggcaagtgatgatttttccagcacagccactgaccacgctaacaccagaacagattact

SEQ ID NO: 450561 - DNA, 75 bp, synthetic construct
  source 1..75: mol_type = other DNA
ccaaattgctctcatgaagaacccagtgaaacagacgacattgtttggtcttaccgttcacgggaaacgccagcc

SEQ ID NO: 450562 - DNA, 75 bp, synthetic construct
  source 1..75: mol_type = other DNA
ataaactcattgccgcactgccaggaatacccaaaattcgccgtccttttattgcgctgatcctcccggaaaaac

SEQ ID NO: 450563 - DNA, 75 bp, synthetic construct
  source 1..75: mol_type = other DNA
gatgaaaacctcaacccggttatctacgatcaacaaaacgttcgccagaaaagcgttccccggttgcgcgccgat

SEQ ID NO: 450564 - DNA, 75 bp, synthetic construct
  source 1..75: mol_type = other DNA
accactacaatgttgatagcaaagcgctaatgagcttccgttctcttcatgtataccgtgacaataaatctgtca

SEQ ID NO: 450565 - DNA, 75 bp, synthetic construct
  source 1..75: mol_type = other DNA
catttccgttaattttaaatttcggcgctaccgaactggcgctacccgttgctcgcgtctggcaccgttttacca

SEQ ID NO: 450566 - DNA, 75 bp, synthetic construct
  source 1..75: mol_type = other DNA
ttgctactgataatacggcggtaaaaaaactcgaacgatactggggcctggacgtatttagcgatcgcgaagcca

SEQ ID NO: 450567 - DNA, 75 bp, synthetic construct
  source 1..75: mol_type = other DNA
tgatagccctgatagcagtgctctgcctgaaattttggtttcacctccgtggcgtagtaagaaaaaatcgccgca

SEQ ID NO: 450568 - DNA, 75 bp, synthetic construct
  source 1..75: mol_type = other DNA
cggtcgctatatccgctcacatgaggaagtgcagcacatcagtatccgcaaccggctccatgaatttatgcagca

SEQ ID NO: 450569 - DNA, 75 bp, synthetic construct
  source 1..75: mol_type = other DNA
tcgttatattcgttcgcatgaagccgttcagcacatcagcatccgcgagcggctgaatgattttatgcagcagca

SEQ ID NO: 450570 - DNA, 75 bp, synthetic construct
  source 1..75: mol_type = other DNA
gaaaccgacctccagcattaccgtgccagggcgcacaatcaaccgctttggcgaagaagttgagatgatcaccaa

SEQ ID NO: 450571 - DNA, 75 bp, synthetic construct
  source 1..75: mol_type = other DNA
tcttccgcccgcgaaaccgccatgcgcgtggcggcaggggcgattgccaaaaaatatctcgctgagaaatttggc

SEQ ID NO: 450572 - DNA, 75 bp, synthetic construct
  source 1..75: mol_type = other DNA
gtcgtgagccggatcaggtcaaaattctctccggtgtttttgaaggtgttactaccggcaccagcattggtttgt

SEQ ID NO: 450573 - DNA, 75 bp, synthetic construct
  source 1..75: mol_type = other DNA
acgcgccttcgcgggatgataatcgtgaaaaattcacccctgtacagagcatgatttatacccgccgacgtgcag

SEQ ID NO: 450574 - DNA, 75 bp, synthetic construct
  source 1..75: mol_type = other DNA
caatatggcgacgcgtattgtcgacctcgatcgcggtaagctggtgacctatcctgggaattacgaccagtattt

SEQ ID NO: 450575 - DNA, 75 bp, synthetic construct
  source 1..75: mol_type = other DNA
aactggaaaaccgcatcaacgaagtactggcacaattgggattagatcccaatgctgcgctgtcgtcgctttctg

SEQ ID NO: 450576 - DNA, 75 bp, synthetic construct
  source 1..75: mol_type = other DNA
tggaagccctacagacgcaggtggcggatgcttccttcttcagtcagccgcatgagcagacgcaaaaagtgctcg

SEQ ID NO: 450577 - DNA, 75 bp, synthetic construct
  source 1..75: mol_type = other DNA
ctgatatggctgccgcagaacaggaactggagcaagcctttgaacgctgggagtatcttgaagcgttaaaaaatg

SEQ ID NO: 450578 - DNA, 75 bp, synthetic construct
  source 1..75: mol_type = other DNA
tggcttatttcgatcagcaccgcgcggaactggatcccgataaaacggtgatggataacctggccgaaggcaaac

SEQ ID NO: 450579 - DNA, 75 bp, synthetic construct
  source 1..75: mol_type = other DNA
tggtggggagcgtaaccgtctgctgctggcgcgtctgttcctcaaaccaagtaacttactgatccttgatgaacc

SEQ ID NO: 450580 - DNA, 75 bp, synthetic construct
  source 1..75: mol_type = other DNA
acttggcgagccggtctttgatcgcctggatgccgacatcgcccatgcgctaatgagcattaacgcggtgaaagg

SEQ ID NO: 450581 - DNA, 75 bp, synthetic construct
  source 1..75: mol_type = other DNA
cctttgacacgtgtcagaataacaaagcagcatggctgcaacgcaaaaatgagctggctgcggccgaacaggaat

SEQ ID NO: 450582 - DNA, 75 bp, synthetic construct
  source 1..75: mol_type = other DNA
gccatacagcgtgccacagatgccctgcgtgaagcccttctgtcctggcttgcgaagggtgaaaaaattaattat

SEQ ID NO: 450583 - DNA, 75 bp, synthetic construct
  source 1..75: mol_type = other DNA
agatgggcgacattccgctggaaatcaaagactggtcgctggttgaacaaaatccgttcttctgcccggaccccg

SEQ ID NO: 450584 - DNA, 75 bp, synthetic construct
  source 1..75: mol_type = other DNA
gttgccaacttcttctccaaacgtcatgacgatgtactgaaaaagatccgcacgcttgaatgctccgcatcattc

SEQ ID NO: 450585 - DNA, 75 bp, synthetic construct
  source 1..75: mol_type = other DNA
aaacacctggctgaaacgtaaagccgaactggcagaccttgaacgggaataccgtgaacagctccttgccggtga

SEQ ID NO: 450586 - DNA, 75 bp, synthetic construct
  source 1..75: mol_type = other DNA
tccgcactggttggcgaccgttcgctggcgctacgggcggaatatcgcgtcaaacaactgaccaaacggcagaaa

SEQ ID NO: 450587 - DNA, 75 bp, synthetic construct
  source 1..75: mol_type = other DNA
gcttggtgagccagtttttgatcgcctggatgccgacatcgcccatgcgctaatgagcattaacgcggtgaaagg

SEQ ID NO: 450588 - DNA, 75 bp, synthetic construct
  source 1..75: mol_type = other DNA
tcttccgcccgtgaaaccgctatgcgcgttgcagcaggggcgattgccaaaaaatatctcgccgagaaatttggc

SEQ ID NO: 450589 - DNA, 75 bp, synthetic construct
  source 1..75: mol_type = other DNA
gggacatcgcgctataccacccagcgccgcgagccggatcaggtcaaaattctctccggtgtttttgaaggtgtt

SEQ ID NO: 450590 - DNA, 75 bp, synthetic construct
  source 1..75: mol_type = other DNA
gaaaccgacctccagcattaccgtgccggggcgtaccattaaccgctttggcgaagaagttgagatgatcaccaa

SEQ ID NO: 450591 - DNA, 75 bp, synthetic construct
  source 1..75: mol_type = other DNA
tcgttgccagtggcgtacccgccggacttggcgagccggtttttgaccgcctggatgccgacatcgcccatgcgc

SEQ ID NO: 450592 - DNA, 75 bp, synthetic construct
  source 1..75: mol_type = other DNA
tcttccgcccgtgaaaccgccatgcgcgtggcggcaggggcgattgcaaaaaaatatctcgccgagaaatttggc

SEQ ID NO: 450593 - DNA, 75 bp, synthetic construct
  source 1..75: mol_type = other DNA
tgctaccaggttgacggtaagcaactggtgaaagatttttctgcccaggttctacgtggcgacaaaattgccctg

SEQ ID NO: 450594 - DNA, 75 bp, synthetic construct
  source 1..75: mol_type = other DNA
tcaggaaggcggcaaaatagccctgcaaattttgcataccgggcgctacagctaccaaccgcatctggtcgctcc

SEQ ID NO: 450595 - DNA, 75 bp, synthetic construct
  source 1..75: mol_type = other DNA
gtctcgatcagatcttcgttggcaaagtcacctcgtgcctggtgaatcctcgcgcctgccatgaaaccaaaatgc

SEQ ID NO: 450596 - DNA, 75 bp, synthetic construct
  source 1..75: mol_type = other DNA
atgttaagtaaccttcccggattgctgaatgtggtgttatgcacagttatcgtgctgacgctctttttttatcgt

SEQ ID NO: 450597 - DNA, 75 bp, synthetic construct
  source 1..75: mol_type = other DNA
ctctccgttgcaggcgccaattaaccgtttcattccccatgaactcacccatgaagagatcctgcaactgatcga

SEQ ID NO: 450598 - DNA, 75 bp, synthetic construct
  source 1..75: mol_type = other DNA
accagggcaagggttaggcaaaacgacgggctggatccatcgcaccactctgctctcgcgcggcgtgaaaatgat

SEQ ID NO: 450599 - DNA, 75 bp, synthetic construct
  source 1..75: mol_type = other DNA
acctcgatgtactgcgcgacaaagcgccggtaggcaacaaaatcgccatcatcggttgtggcggtattggttttg

SEQ ID NO: 450600 - DNA, 75 bp, synthetic construct
  source 1..75: mol_type = other DNA
tgacggtcagaggaggtattgagcgtatcgtggtggaggttgccgctgatatctctctcaaagggaaaaaactcg

SEQ ID NO: 450601 - DNA, 75 bp, synthetic construct
  source 1..75: mol_type = other DNA
ggatatctagtacttcatattttattagattgtttaataaacattttggtgttactccaaaacaattcgtttctt

SEQ ID NO: 450602 - DNA, 75 bp, synthetic construct
  source 1..75: mol_type = other DNA
aattgctttattttatttcaaaacagcaacgcaggagaaaaatcgtcgagtcgatttatatttcatctgttactt

SEQ ID NO: 450603 - DNA, 75 bp, synthetic construct
  source 1..75: mol_type = other DNA
atggtgaattaccgtcttatatcactggcgctgacagctggcagttgtatgagcgcggagagcttgttgatgtgc

SEQ ID NO: 450604 - DNA, 75 bp, synthetic construct
  source 1..75: mol_type = other DNA
aagtcgataaatcttcgttaatggcatgcaccagcgataccttcaacagctatgacctggtggtttcatcgacca

SEQ ID NO: 450605 - DNA, 75 bp, synthetic construct
  source 1..75: mol_type = other DNA
gtactgtcagtgccgtggatgccgataaggttcaggcccgtgttcgtctgccggaatgcgataatctgcgcacgc

SEQ ID NO: 450606 - DNA, 75 bp, synthetic construct
  source 1..75: mol_type = other DNA
tggtatcgatggcgcgaccgtttcttgctgatgcggagctgctgtcaaaagcgcaatcgggacgagccgatgaga

SEQ ID NO: 450607 - DNA, 75 bp, synthetic construct
  source 1..75: mol_type = other DNA
aacgtcgcgctgtcgtcactttccggcggctggttgcgtaaagccgcattaggacgtgcgctggtgagtaatccg

SEQ ID NO: 450608 - DNA, 75 bp, synthetic construct
  source 1..75: mol_type = other DNA
tctacgtggcgacaaaattgccctgattggtccgaatgggtgcggcaaaaccacgctgctgaaactgatgctcgg

SEQ ID NO: 450609 - DNA, 75 bp, synthetic construct
  source 1..75: mol_type = other DNA
ccacgctgctgaaactaatgctcggtcagcttcaagcagacagcgggcgtattcacgttggcaccaaactggaag

SEQ ID NO: 450610 - DNA, 75 bp, synthetic construct
  source 1..75: mol_type = other DNA
ccgatatggctgctgcagagcaggagctggagcaagcctttgaacgctgggagtatcttgaagcgttaaaaaatg

SEQ ID NO: 450611 - DNA, 75 bp, synthetic construct
  source 1..75: mol_type = other DNA
tgctatcaggttgatggtaagcaactggtgaaagacttttcggcgcaggtgcaacgtggcgacaaaattgccctg

SEQ ID NO: 450612 - DNA, 75 bp, synthetic construct
  source 1..75: mol_type = other DNA
gcgtgcgcgcgctgaaagcgatgcgtcgcgaacgcggtgaacgtcgcgaggtcatggggactgcaaagatgcagg

SEQ ID NO: 450613 - DNA, 75 bp, synthetic construct
  source 1..75: mol_type = other DNA
tcaatcacaccgtgacggcggatcagttacaggcgttcgatgaaacgatcctcgccagtgggatcgtgccgcgcg

SEQ ID NO: 450614 - DNA, 75 bp, synthetic construct
  source 1..75: mol_type = other DNA
atgaagagatcctgcaactgatcgacgatttcgcccactgcgcgcaactggcgcgggaggcaggatacgacggtg

SEQ ID NO: 450615 - DNA, 75 bp, synthetic construct
  source 1..75: mol_type = other DNA
gacgatgaagggctgcatgtggagatcaacggcgaaacgcagatattagccgtggacaatgtggtgatctgcgcg

SEQ ID NO: 450616 - DNA, 75 bp, synthetic construct
  source 1..75: mol_type = other DNA
ctcgatcgcggcaagctggtgacctatccagggaattacgaccagtacctgctggaaaaagaagaagccctgcgc

SEQ ID NO: 450617 - DNA, 75 bp, synthetic construct
  source 1..75: mol_type = other DNA
tggcttaagttcgcaaggtatacagatcccccgtagcccacgacaaatcgtaatgctccaacgtaaagccagcaa

SEQ ID NO: 450618 - DNA, 75 bp, synthetic construct
  source 1..75: mol_type = other DNA
cgcttgatttaggcttcaccacgttaaaaaaccgcgtactgatggggtcaatgcacaccgggctggaggaatacc

SEQ ID NO: 450619 - DNA, 75 bp, synthetic construct
  source 1..75: mol_type = other DNA
gacaacgagcgtaaggttccggtaatgattcaccgcgcaattctggggtcaatggaacgtttcattggtatcctg

SEQ ID NO: 450620 - DNA, 75 bp, synthetic construct
  source 1..75: mol_type = other DNA
agttaaaggtccgttcatgatggaccgtgtcctgtgggaaaaaaccggtcactgggacaactacaaagatgcgat

SEQ ID NO: 450621 - DNA, 75 bp, synthetic construct
  source 1..75: mol_type = other DNA
tgcgaaagcagcaccaggctattacctggcgaaaaacattatctttgcgatcaataaagtggctgatgtgatcaa

SEQ ID NO: 450622 - DNA, 75 bp, synthetic construct
  source 1..75: mol_type = other DNA
gcggcgtgcttcctcgactcaatggcaactgtcggtcagtctgcgacgggttacggtctgaactatcaatatggt

SEQ ID NO: 450623 - DNA, 75 bp, synthetic construct
  source 1..75: mol_type = other DNA
accgaagagtttgctggtttcttcccgacctggcttgcgccagtgcaggttgttatcatgaacattaccgattct

SEQ ID NO: 450624 - DNA, 75 bp, synthetic construct
  source 1..75: mol_type = other DNA
tgggcaccgatgaagacggtggctatgccgtgccggaagcgctggatcgcaacattctcaccctgctgaaagatg

SEQ ID NO: 450625 - DNA, 75 bp, synthetic construct
  source 1..75: mol_type = other DNA
catccagctacgctggaaggcgctggtgaactccgcccggaacatggtcacaaacccctgctgatgttggtttac

SEQ ID NO: 450626 - DNA, 75 bp, synthetic construct
  source 1..75: mol_type = other DNA
cataaacctcttcaaaggttttgttactggggtttttgccaaaggagccagtttaatcggctttgaggttgctcg

SEQ ID NO: 450627 - DNA, 75 bp, synthetic construct
  source 1..75: mol_type = other DNA
aatgaatcttgtacatgccggatttaccgcaaagaccggaatcatccgatctgcgttaccgactggatggatgaa

SEQ ID NO: 450628 - DNA, 75 bp, synthetic construct
  source 1..75: mol_type = other DNA
aatgaatcatgtacatgccggatttaccgcaatgaccggaatcatccgatctgcgttaccgactggatggatgaa

SEQ ID NO: 450629 - DNA, 75 bp, synthetic construct
  source 1..75: mol_type = other DNA
ggtgtgggcaaagctggcagttgtgtatgacaaacaggttcgcatggccaatatgtgtgtggtaagcggctttgc

SEQ ID NO: 450630 - DNA, 75 bp, synthetic construct
  source 1..75: mol_type = other DNA
ggaaaaaatacaggcagcagagcgcgtggcagacgacggagaaaaaagtgagcctgactgttcccggtcctgtcc

SEQ ID NO: 450631 - DNA, 75 bp, synthetic construct
  source 1..75: mol_type = other DNA
tgggcagtggtatcggtacagctttcgctgcctttattatggacagctttggttatatccccaaccaacaacaga

SEQ ID NO: 450632 - DNA, 75 bp, synthetic construct
  source 1..75: mol_type = other DNA
agcgcaacacaaccattgtttactatttaacctacaacctggatcgcaaagatttagttcccttgatcaacagcc

SEQ ID NO: 450633 - DNA, 75 bp, synthetic construct
  source 1..75: mol_type = other DNA
atgaatacgactgaattagaaatgattatccgcaatatcctgcacgaaaaactgatgcccagtgccttacaaata

SEQ ID NO: 450634 - DNA, 75 bp, synthetic construct
  source 1..75: mol_type = other DNA
gtgattgatttgggtaaatttaacttactggatattcgccgccacacaatgtcgaaaacattcagtatcaagaca

SEQ ID NO: 450635 - DNA, 75 bp, synthetic construct
  source 1..75: mol_type = other DNA
tggtaatggtctgaagctacgtttactggatgaaaacgcctcgccttataccttcaataaatatgctgaatacgc

SEQ ID NO: 450636 - DNA, 75 bp, synthetic construct
  source 1..75: mol_type = other DNA
cccggtgatattgccagactgcgccaggtcgttatcaatgacaaaggagaagcaaacaagaaactggtaggcaaa

SEQ ID NO: 450637 - DNA, 75 bp, synthetic construct
  source 1..75: mol_type = other DNA
tgatccgcactattcttgctgataatctgacagggatcgctactgcccctggaaatattcagcacactatcttcg

SEQ ID NO: 450638 - DNA, 75 bp, synthetic construct
  source 1..75: mol_type = other DNA
gcgccgggctactacctggcgaagaatattatctttgcgatcaataaagtggctgatgtgatcaacaacgatccg

SEQ ID NO: 450639 - DNA, 75 bp, synthetic construct
  source 1..75: mol_type = other DNA
ccggtttaaacacgccgctaagcgcaatattacctttgatgacgttatcaccaaaagaacggttggtattaaact

SEQ ID NO: 450640 - DNA, 75 bp, synthetic construct
  source 1..75: mol_type = other DNA
ggcataagccttgccgtagctggcatcatcctgctactggcgcgtattgtagacggtatcgatgctccggtatgg

SEQ ID NO: 450641 - DNA, 75 bp, synthetic construct
  source 1..75: mol_type = other DNA
aacgccaggtatcgaagatctgaccaccagcgcggtttccggagacgggggtttaacgttgatcgaatactctgc

SEQ ID NO: 450642 - DNA, 75 bp, synthetic construct
  source 1..75: mol_type = other DNA
gaggtgctggtaaacgcagagacacagactgtgctagaaggggggggtgtttcagccggacaagcagccagcttg

SEQ ID NO: 450643 - DNA, 75 bp, synthetic construct
  source 1..75: mol_type = other DNA
ggcaaaatcagagctgggaaatcgtcgttttcgatgagcaggggcggcgttgctgtacttgtcggctgggtacgg

SEQ ID NO: 450644 - DNA, 75 bp, synthetic construct
  source 1..75: mol_type = other DNA
cattggcgaagtacgcttaactgctcgcgacagttcaatcagccattttatctggttttcgctcgctgtcctgac

SEQ ID NO: 450645 - DNA, 75 bp, synthetic construct
  source 1..75: mol_type = other DNA
ttctgtctggcgtactgtcagaatatgaagtgcagcgtatctgtgcagatctcacacaaacctttcatcgcccat

SEQ ID NO: 450646 - DNA, 75 bp, synthetic construct
  source 1..75: mol_type = other DNA
aatacctgaaggcgcttaatgaaggcagccatcaacccgacgacgttcaaaaagaggccgtcagccgcctggaaa

SEQ ID NO: 450647 - DNA, 75 bp, synthetic construct
  source 1..75: mol_type = other DNA
ttatctaccaggaattaatcagcagcacgccgccagttgcgagggcgggtggattaatggcgcgagtcggtaaat

SEQ ID NO: 450648 - DNA, 75 bp, synthetic construct
  source 1..75: mol_type = other DNA
caacgcgccggtgcgtggcttatatatgtggggcggtgtagggcgcggaaaaacctggttgatggatcttttcta

SEQ ID NO: 450649 - DNA, 75 bp, synthetic construct
  source 1..75: mol_type = other DNA
tgacaatggggaagaaccggcatcgaaagtaacccactggatgccgctaccggagccgccgcaggaggtgaatca

SEQ ID NO: 450650 - DNA, 75 bp, synthetic construct
  source 1..75: mol_type = other DNA
catggatactgtcgacccgcaggaactgatcgccactcttcgccagacagcatttaaaggcaatgccagcgatgc

SEQ ID NO: 450651 - DNA, 75 bp, synthetic construct
  source 1..75: mol_type = other DNA
tcaccgcttcgctctcgacttcaacagtctgctggatgaaatggaagagtggcagcttcgcttacaggctaaaaa

SEQ ID NO: 450652 - DNA, 75 bp, synthetic construct
  source 1..75: mol_type = other DNA
tgtttcagccggacaaacagccagcttgggatctctcaactggctgttatctccgccctctgagttacctccagg

SEQ ID NO: 450653 - DNA, 75 bp, synthetic construct
  source 1..75: mol_type = other DNA
caggattctgtttctgtaaaagaaaccttccttgtacaaaaggaacatgcctgctttggtgtgaagaggctttgt

SEQ ID NO: 450654 - DNA, 75 bp, synthetic construct
  source 1..75: mol_type = other DNA
catcgtcagaactgacacaggacgaagcagtgaaagctcttggattcctgaaacaaaaagctactgaacagaagg

SEQ ID NO: 450655 - DNA, 75 bp, synthetic construct
  source 1..75: mol_type = other DNA
aaaggtcatctggatttggttgtgctgatgatgcaactgggcaagcaacaaattaatagtgtgtgggtagaggcg

SEQ ID NO: 450656 - DNA, 75 bp, synthetic construct
  source 1..75: mol_type = other DNA
cagtagcgccacggtgctggcggacgatccggccttaacggtgcgttggtctgaactggatgaacaaactcaggc

SEQ ID NO: 450657 - DNA, 75 bp, synthetic construct
  source 1..75: mol_type = other DNA
gggcgctaaagctggcgcaacgaggacgtttcactactcacccaaacccaaatgttgggtgtgtcattgtgaaag

SEQ ID NO: 450658 - DNA, 75 bp, synthetic construct
  source 1..75: mol_type = other DNA
agctgatgcgccccattttaaattcaatgagatacgccatgtaggcccggatgtttgcctgcatttagtgggtgc

SEQ ID NO: 450659 - DNA, 75 bp, synthetic construct
  source 1..75: mol_type = other DNA
ccagcagcgccacggtgctggcggatgatccagccttaacagtgcgttggtctgaactggatgaacaaactcagg

SEQ ID NO: 450660 - DNA, 75 bp, synthetic construct
  source 1..75: mol_type = other DNA
tacaggctggtttagtcgatgagctgattgtctatatcgcacctaaacttttaggtagcgacgcccgtggattat

SEQ ID NO: 450661 - DNA, 75 bp, synthetic construct
  source 1..75: mol_type = other DNA
aaaatagcggatatgattcgcgggcaagaagcgctgtcgaggagtacggcgggatattttgtggcaaatgggatg

SEQ ID NO: 450662 - DNA, 75 bp, synthetic construct
  source 1..75: mol_type = other DNA
cgcatggagtgcggacgcggtaaaggcctgggtggatcgtcgctgatcaacggcatgtgctacatccgtggcaac

SEQ ID NO: 450663 - DNA, 75 bp, synthetic construct
  source 1..75: mol_type = other DNA
gccgcagggtcgtcgcgccagcaccgcgcgcggctatctcgatcaggccaaatcgcgcccgaacctgaccattcg

SEQ ID NO: 450664 - DNA, 75 bp, synthetic construct
  source 1..75: mol_type = other DNA
ttaaaacttggcgcatcgcttgatggccgcacggcgatggcgagcggcgaaagccagtggatcacttcgcctcag

SEQ ID NO: 450665 - DNA, 75 bp, synthetic construct
  source 1..75: mol_type = other DNA
ggctggcattgacgtcagccacgggctgatgatgagtgaagccgagcaattgaataaaggctttctcaagcggat

SEQ ID NO: 450666 - DNA, 75 bp, synthetic construct
  source 1..75: mol_type = other DNA
ctggcgttcccgctacagggtaaacgctataactgggcctatgagacagaacccgaaccatttatgaacaaccgc

SEQ ID NO: 450667 - DNA, 75 bp, synthetic construct
  source 1..75: mol_type = other DNA
tgcaaagtgcatacatcagtgaaaatgcccctgaatcattcgttgcattgatggcaaaacactaccatcgcctga

SEQ ID NO: 450668 - DNA, 75 bp, synthetic construct
  source 1..75: mol_type = other DNA
tcgcgatctgaaagcgatttatcaggctcccacgggaaagaggccagcaggcactggaaacgttcgctgcggcct

SEQ ID NO: 450669 - DNA, 75 bp, synthetic construct
  source 1..75: mol_type = other DNA
gcaaaagcggcgggtatgcacgttattgcgctaccggcagagcaccagcaggacgacccgcgctttacgcttgct

SEQ ID NO: 450670 - DNA, 75 bp, synthetic construct
  source 1..75: mol_type = other DNA
gacgcaattcgcatcacccgcgagatcatgcatcaaccggcgctggatcagtatcgtggccgcgaaatcagcccc

SEQ ID NO: 450671 - DNA, 75 bp, synthetic construct
  source 1..75: mol_type = other DNA
tggatggatttctgaaaggtaaatgcatcccaaatgatttaaaggttaacgaaacaaacgctgaatatctggtgc

SEQ ID NO: 450672 - DNA, 75 bp, synthetic construct
  source 1..75: mol_type = other DNA
gcattcttccggcagaaatgattattcgccagcgcgtaaagccaatgccatcgagagaggaattgcttaagagaa

SEQ ID NO: 450673 - DNA, 75 bp, synthetic construct
  source 1..75: mol_type = other DNA
ctcagcttcatagagcgcaatgaaaacatagttttacaggggacatctgacatcacaaatccccgggtggggatt

SEQ ID NO: 450674 - DNA, 75 bp, synthetic construct
  source 1..75: mol_type = other DNA
ccttgccgaaggcgaagaagctctcagcttcagtgagtttaaacaggcgctttccagttcgataaaatctaacgg

SEQ ID NO: 450675 - DNA, 75 bp, synthetic construct
  source 1..75: mol_type = other DNA
atgagcgtaaaagttatcgtcacagacatggacggtacttttcttaacgacgccaaaacgtacaatcatgagcgt

SEQ ID NO: 450676 - DNA, 75 bp, synthetic construct
  source 1..75: mol_type = other DNA
atgagcgtaaaagttatcgtcacagacatggacggtacttttctgagcgacgccaaaacgtacaacaatgagcgt

SEQ ID NO: 450677 - DNA, 75 bp, synthetic construct
  source 1..75: mol_type = other DNA
caggcggcccggactatcgctttgacttccgcacccagatgcccgcagcgctggcgttcccactacagggcaaac

SEQ ID NO: 450678 - DNA, 75 bp, synthetic construct
  source 1..75: mol_type = other DNA
ttggtccgatggatcgcaccgtcacgccgcagggccgtcgcgccagcaccgcgcgtggctatctcgatcaggcca

SEQ ID NO: 450679 - DNA, 75 bp, synthetic construct
  source 1..75: mol_type = other DNA
tactcacgccatgaccgatcacatcatttttgacggcaaacgcgcggtgggcgtcgagtggctggaaggcgacag

SEQ ID NO: 450680 - DNA, 75 bp, synthetic construct
  source 1..75: mol_type = other DNA
cttccgcacccagatgcccgccgcgctggcgttcccgttacagggcaaacgctacaactgggcctatgagacgga

SEQ ID NO: 450681 - DNA, 75 bp, synthetic construct
  source 1..75: mol_type = other DNA
agcgtaagggatggtggggaccacgtgacacgactgacccggtaacgggtgagccggtcaccattcagcagggca

SEQ ID NO: 450682 - DNA, 75 bp, synthetic construct
  source 1..75: mol_type = other DNA
agctgcagcgtaagggatggtgggggccacgtgacaccaccgacccggtaacgggcgagccggtcaccatccagc

SEQ ID NO: 450683 - DNA, 75 bp, synthetic construct
  source 1..75: mol_type = other DNA
cgctggtacgggaactcaccgcgaaatgtgccgaaggttcactggcggaggccctgatcgggctgcgctgcctgt

SEQ ID NO: 450684 - DNA, 75 bp, synthetic construct
  source 1..75: mol_type = other DNA
atgaaagcgggtttacccaatgaagatgcgccgggcgtttatgacgcgctgccgttcctcatcgccaacactaaa

SEQ ID NO: 450685 - DNA, 75 bp, synthetic construct
  source 1..75: mol_type = other DNA
gaccaacaccctgccggaaattaccggacgcgtttgtccgcaagaccgtttgtgtgaaggtgcctgtactattcg

SEQ ID NO: 450686 - DNA, 75 bp, synthetic construct
  source 1..75: mol_type = other DNA
aggttcctggtttttcgtggcgaattggtcggatacggtgatttgttcagaatgcgttttagcgaaatgaaactg

SEQ ID NO: 450687 - DNA, 75 bp, synthetic construct
  source 1..75: mol_type = other DNA
tgtccgcttaaaacccgtagcgccattatcagcgccattcgcgaagaattaatgccccgccttaccgaactggca

SEQ ID NO: 450688 - DNA, 75 bp, synthetic construct
  source 1..75: mol_type = other DNA
ttcgttaaaactgattaccacaatcgaagacatcgcgtttcgctgtagtggcattcacaacctgatcgttaccgt

SEQ ID NO: 450689 - DNA, 75 bp, synthetic construct
  source 1..75: mol_type = other DNA
tgcaccacacggcaattatgcactcgcagaacgtctcacggctcaaccttgccgcgcgcgttatgcaaacctcaa

SEQ ID NO: 450690 - DNA, 75 bp, synthetic construct
  source 1..75: mol_type = other DNA
cctgcgtccgctggaaagcgactgttttggcctggcggacgtgccggacgcggtcctggcggaaatcttcaccct

SEQ ID NO: 450691 - DNA, 75 bp, synthetic construct
  source 1..75: mol_type = other DNA
tggatctgcgtgacagcgggcaacagtgcggagtaaacagagtctggagactgatgaaacgtgtcggaataaagg

SEQ ID NO: 450692 - DNA, 75 bp, synthetic construct
  source 1..75: mol_type = other DNA
tgaactttcgtccattccaggcacccccatcgaggctggccccttcgatacagtggtgctttttaagattaacta

SEQ ID NO: 450693 - DNA, 75 bp, synthetic construct
  source 1..75: mol_type = other DNA
tcgcggcaggaaaagtaaaagccacggcgcataaatgcgacctttgtgcagggcgcgaaaacggtcctgcctgtg

SEQ ID NO: 450694 - DNA, 75 bp, synthetic construct
  source 1..75: mol_type = other DNA
tggctgggcaagcgtctggtaacgtatcaaacagatgccaatggccaaccggttaaccagattctggttgaagca

SEQ ID NO: 450695 - DNA, 75 bp, synthetic construct
  source 1..75: mol_type = other DNA
ttctggaacccggagaaacgcttttcaaaattccccgttacgtgccccatttgcggttttacatcagaagaactt

SEQ ID NO: 450696 - DNA, 75 bp, synthetic construct
  source 1..75: mol_type = other DNA
cagcctgatctgcgcgaaatgcgcgaccagtcgcaggaagatccgcgtgaagcacaagctgcacagtgggaactg

SEQ ID NO: 450697 - DNA, 75 bp, synthetic construct
  source 1..75: mol_type = other DNA
agccgtgaggaatttgcgtggccgaatattcagtaccatttcctgccagtggcgattaactataacggctcgaat

SEQ ID NO: 450698 - DNA, 75 bp, synthetic construct
  source 1..75: mol_type = other DNA
gccgcatggccgtcgcgccagcaccgcgcgtggctatctcgatcaggccaaatcgcgccctaacctgaccattcg

SEQ ID NO: 450699 - DNA, 75 bp, synthetic construct
  source 1..75: mol_type = other DNA
tggcgaccattttcctggagcgcgaccttgcgcttatcgaaatcaacccgctggttattaccaaacagggcgatc

SEQ ID NO: 450700 - DNA, 75 bp, synthetic construct
  source 1..75: mol_type = other DNA
tatccgcaaaaaccttgatctgatctgcgctaacgatgtttccagaaaaaatcagggatttaatagcgacaaaaa

SEQ ID NO: 450701 - DNA, 75 bp, synthetic construct
  source 1..75: mol_type = other DNA
ggctggaaagaaactcaggtgagtgatatggatttcgacacaatcatggaaaaggcttacgaagaatacttcgaa

SEQ ID NO: 450702 - DNA, 75 bp, synthetic construct
  source 1..75: mol_type = other DNA
ggtcgcgaaagcggtcctgcctgtgtcgagaattgtccggcggacgctctgcaattggtcactgacgccgcactc

SEQ ID NO: 450703 - DNA, 75 bp, synthetic construct
  source 1..75: mol_type = other DNA
gattaccgccggtccgacgcgtgaaccgctcgatccggtgcgttatatctctaatcacagctccggcaagatggg

SEQ ID NO: 450704 - DNA, 75 bp, synthetic construct
  source 1..75: mol_type = other DNA
tcaccattcaacctggcgaacgcatcgcccagatgatttttgttccggtagtacaggctgaatttaatctggtgg

SEQ ID NO: 450705 - DNA, 75 bp, synthetic construct
  source 1..75: mol_type = other DNA
gagcgaaaagagctccttggccaattattactcgacgagattgtgacccgttatgatgaagaaaatcgacgttaa

SEQ ID NO: 450706 - DNA, 75 bp, synthetic construct
  source 1..75: mol_type = other DNA
cagtagttaacgctgatggacaatcaaagcaggatttgttgattgaaagcggtattgttcgccagttgggcaacg

SEQ ID NO: 450707 - DNA, 75 bp, synthetic construct
  source 1..75: mol_type = other DNA
ttgtcactggagtaagcgtttttgtcctaggtcgactcatcatcaagggggttgagtcttacatttcattcaagg

SEQ ID NO: 450708 - DNA, 75 bp, synthetic construct
  source 1..75: mol_type = other DNA
acccgccgtgctctcagtatctataagcagcagcttgcttcttttgtctgggatgcagcaaagcttgaaaacaac

SEQ ID NO: 450709 - DNA, 75 bp, synthetic construct
  source 1..75: mol_type = other DNA
gcaacggtcgcgggagtgactgtaagctacacatacaaccatctggatcagcgtgtaaccaagaccctaaacggg

SEQ ID NO: 450710 - DNA, 75 bp, synthetic construct
  source 1..75: mol_type = other DNA
ccgcatgcaactgctgttctccagtggcgtgatgacgggacgtatctcaccggagcgttttgttgagttaaccag

SEQ ID NO: 450711 - DNA, 75 bp, synthetic construct
  source 1..75: mol_type = other DNA
ccatatgggatttggtccgaacggatgtcggttacgccatcaactggaagtttatcgcggttatgccgcccataa

SEQ ID NO: 450712 - DNA, 75 bp, synthetic construct
  source 1..75: mol_type = other DNA
gcttttatttaccgagatctacctggactggtacttcaatcgtaaacagcaattactcgatgggctaaataacga

SEQ ID NO: 450713 - DNA, 75 bp, synthetic construct
  source 1..75: mol_type = other DNA
ggttggcatatgccagtcggctggaacaattacaacaattggtcatcgacggcgaaatcggtaaagcaaaatcct

SEQ ID NO: 450714 - DNA, 75 bp, synthetic construct
  source 1..75: mol_type = other DNA
cagccgcatattaagctggacctatacccgaaacttgagtcgattgataccagcagaaaaggggacaatactccg

SEQ ID NO: 450715 - DNA, 75 bp, synthetic construct
  source 1..75: mol_type = other DNA
gcaccagtgccgcagcaggacatcagaagttacagacggtatcaagcatcatttccaaatgggcgccgccaaatg

SEQ ID NO: 450716 - DNA, 75 bp, synthetic construct
  source 1..75: mol_type = other DNA
caggcaggaaccgcagtaattcctgccgttggcgataacctttcacgacttgttggggggattgatagtacaggg

SEQ ID NO: 450717 - DNA, 75 bp, synthetic construct
  source 1..75: mol_type = other DNA
acaatatttattcaataagaataaagaaaaattaagtgaatttaatatcgaaaaaccgctgtgggtttttgtcgg

SEQ ID NO: 450718 - DNA, 75 bp, synthetic construct
  source 1..75: mol_type = other DNA
ccgacgtcagcggccaagtcgtttggaaggcgagctacagcccgttcggtaaggccagcatcatcatccaggggc

SEQ ID NO: 450719 - DNA, 75 bp, synthetic construct
  source 1..75: mol_type = other DNA
tttggcccgaccggcgccgggaaatccgccacgctgtgctcctcgctgtcgcagatcatggccgtacatcgcccc

SEQ ID NO: 450720 - DNA, 75 bp, synthetic construct
  source 1..75: mol_type = other DNA
tctgcaggtgcatggctggctgctcagactgttcaacccccgaccagagtgggtggacagggacacactgtaccg

SEQ ID NO: 450721 - DNA, 75 bp, synthetic construct
  source 1..75: mol_type = other DNA
gtgtaccgccgtatcgggaaaaacagccatgacccgatgccgccggtggcgatgctgaaccaggtgtgtgaacgc

SEQ ID NO: 450722 - DNA, 75 bp, synthetic construct
  source 1..75: mol_type = other DNA
ggatgtgctggaagagcgcttcaaccatctggcgaaaaatgcgattggcgagaatactgagtccgaacgcgtccg

SEQ ID NO: 450723 - DNA, 75 bp, synthetic construct
  source 1..75: mol_type = other DNA
ggattttgcggaaacgctgtggtttaccccgccccggtcggatgtggaaaacggcgtgtggtggtttgataacct

SEQ ID NO: 450724 - DNA, 75 bp, synthetic construct
  source 1..75: mol_type = other DNA
ggcattttacctttccgccccggataacagcgaactgacccgacgcgtgcgcagcctgaacagcctgctgctgaa

SEQ ID NO: 450725 - DNA, 75 bp, synthetic construct
  source 1..75: mol_type = other DNA
catgccgggccgtcagttattgattttcttccctgggtggagtacctggatgaggctcagtgtctgctgctggat

SEQ ID NO: 450726 - DNA, 75 bp, synthetic construct
  source 1..75: mol_type = other DNA
gattggaaaccacccagatagaccaggatgggggcaaggttacgaccgactggcttccttccaagtcgctccctg

SEQ ID NO: 450727 - DNA, 75 bp, synthetic construct
  source 1..75: mol_type = other DNA
tggcttccttccaagtcgctcccggcaaaaatcacagaaccaaccaggatcactgagctcacctacgacactcat

SEQ ID NO: 450728 - DNA, 75 bp, synthetic construct
  source 1..75: mol_type = other DNA
ggacagtcagcgaaatgaactccggcggacgaaagcggcagagatggcggaagcgctggggatgttcacccagcc

SEQ ID NO: 450729 - DNA, 75 bp, synthetic construct
  source 1..75: mol_type = other DNA
gggaattgcccgcccggaaggcctttttacagacacgctggttaccggtcagccgtggcggggacagcagcggag

SEQ ID NO: 450730 - DNA, 75 bp, synthetic construct
  source 1..75: mol_type = other DNA
agggcgtacggatgaacgtcttgaacagatcagggacatggtggaggacgcactgcaggacagctttgatgagta

SEQ ID NO: 450731 - DNA, 75 bp, synthetic construct
  source 1..75: mol_type = other DNA
ttattgtggttagtcgatgataaaagtggtaaacaatggctaagtcctgatgaatcccctaatgatttttatcaa

SEQ ID NO: 450732 - DNA, 75 bp, synthetic construct
  source 1..75: mol_type = other DNA
tcaagctctaccacttcgaaattgatgacagtgatgatggtcatgaatatttgaagaaactggaagtgctgaaag

SEQ ID NO: 450733 - DNA, 75 bp, synthetic construct
  source 1..75: mol_type = other DNA
ttgcatgtgaatatcaaacagtatttgcattatttccaggccggcaatagcaacctgtacccagacaaaattatt

SEQ ID NO: 450734 - DNA, 75 bp, synthetic construct
  source 1..75: mol_type = other DNA
taatccaccgcatggatatttcacttctcaccaccacccgtgacccggaacagcttcgcacactggcgattgcca

SEQ ID NO: 450735 - DNA, 75 bp, synthetic construct
  source 1..75: mol_type = other DNA
ttgtgaccctggaaggaatggaaaaagcggtgcaggtgatcgtgcgtattgccgagttaacggcgcaatggaagt

SEQ ID NO: 450736 - DNA, 75 bp, synthetic construct
  source 1..75: mol_type = other DNA
aggcagtcaaaaagccacaaaaaacaggtaaccaaccacaaccgattaatccagagaacgctgatgttaataccg

SEQ ID NO: 450737 - DNA, 75 bp, synthetic construct
  source 1..75: mol_type = other DNA
caaagactatcccgtagactcatagcaagcgaaccctatgtctctgatgatgccaagaatacccaagctaaccca

SEQ ID NO: 450738 - DNA, 75 bp, synthetic construct
  source 1..75: mol_type = other DNA
cagcatgaacagtgtgctgcgggcagatgagctggtcatgcgggataacttttttgtggcagatgagacccgtca

SEQ ID NO: 450739 - DNA, 75 bp, synthetic construct
  source 1..75: mol_type = other DNA
ccggcattggtcgcgagaacggcgtgatgacgctccagagttacacccaggtgaagtccatccaggttgagatgg

SEQ ID NO: 450740 - DNA, 75 bp, synthetic construct
  source 1..75: mol_type = other DNA
aagagtgcccaacaagggcaaaaaatctgggcggcgatgaccgctatggagcgctcgcgtattctgcgtcgggcc

SEQ ID NO: 450741 - DNA, 75 bp, synthetic construct
  source 1..75: mol_type = other DNA
gaatctgctggggtgtggagagggaggttccctgacttattctgactcaccgggcggacgtgagagcatgatggt

SEQ ID NO: 450742 - DNA, 75 bp, synthetic construct
  source 1..75: mol_type = other DNA
atgaacaggacaacaacaggactctgtctggctgcgctgctggtgagctgcagcatgaccagttcgttgcgggct

SEQ ID NO: 450743 - DNA, 75 bp, synthetic construct
  source 1..75: mol_type = other DNA
cagttcacttactggctgagtgatgcacagcagcagtcgctggcaggtcagcagacgacagaccgtgcgcagggg

SEQ ID NO: 450744 - DNA, 75 bp, synthetic construct
  source 1..75: mol_type = other DNA
ggtgaactggagtttgaaaactttaatgccgcatcggtgaatatcaaaatagtcggcaacaacgttcaccctggc

SEQ ID NO: 450745 - DNA, 75 bp, synthetic construct
  source 1..75: mol_type = other DNA
tttgacaccggagatattgctcgtgacataaatagttctatagacacgacaaaaaccgtattcagcagcctaaaa

SEQ ID NO: 450746 - DNA, 75 bp, synthetic construct
  source 1..75: mol_type = other DNA
cagaggaatcccaattatcggaaatatcgctatggcaggatacgatgctatagacggttacactgatgcagaggc

SEQ ID NO: 450747 - DNA, 75 bp, synthetic construct
  source 1..75: mol_type = other DNA
aacacgcctgaagaagggatcagggcactggcaaaccaggtttccagctattacaacggcaccagtgccgcagcg

SEQ ID NO: 450748 - DNA, 75 bp, synthetic construct
  source 1..75: mol_type = other DNA
aagaaaaattaaatgaatttaatatcgaaaaaccgctatgggtttttgtcggtaacaccgtaagtggtgaagatt

SEQ ID NO: 450749 - DNA, 75 bp, synthetic construct
  source 1..75: mol_type = other DNA
atagttgggggagatcccaatatggggctaaatctcggccctgccagttctccggaagagatgtcctcgttagca

SEQ ID NO: 450750 - DNA, 75 bp, synthetic construct
  source 1..75: mol_type = other DNA
cttaaccaggtaggctccgccgtcctccccgccgttggagataacctctcgcgacttgtgggcggtattgatagc

SEQ ID NO: 450751 - DNA, 75 bp, synthetic construct
  source 1..75: mol_type = other DNA
ctggggcaagcaccataactcaacaggacgaaaggcaaggcagagttagcaacagactatcacgcaggcgtaaag

SEQ ID NO: 450752 - DNA, 75 bp, synthetic construct
  source 1..75: mol_type = other DNA
ttgaaagagaataaagaccgtatcgcaataattgacgctattcaggaagcgagcacaaacgaacttaaagctctt

SEQ ID NO: 450753 - DNA, 75 bp, synthetic construct
  source 1..75: mol_type = other DNA
gcagattgttgaaaactatcgcggcggtgatattgcgctggggattggcgacgaagtcttgtctccggtgatgtt

SEQ ID NO: 450754 - DNA, 75 bp, synthetic construct
  source 1..75: mol_type = other DNA
aagggatagaagagttgataaaagccctgaagcaaaaaagaacaagattaaaacaactgcaacggaaaaaggcga

SEQ ID NO: 450755 - DNA, 75 bp, synthetic construct
  source 1..75: mol_type = other DNA
caagctggctttctcagaaagctaggttccattatgggggtagatggcaatcagtcttccagtgaagagtcttta

SEQ ID NO: 450756 - DNA, 75 bp, synthetic construct
  source 1..75: mol_type = other DNA
aacacaccagaaagtgttcgctccgtgcaatcacgtcagaccatccgaaaatcggacggttttataccggtagct

SEQ ID NO: 450757 - DNA, 75 bp, synthetic construct
  source 1..75: mol_type = other DNA
cggagagttacggcgagcaggtccaccgcgtgggtgaacgtttcgccatactggaggccgcgcttgtgctttccg

SEQ ID NO: 450758 - DNA, 75 bp, synthetic construct
  source 1..75: mol_type = other DNA
gtgcggtgatacgctggagaatcgcggccctgagcacgggagaggaggatttcgaaaccttcctgattaagggcg

SEQ ID NO: 450759 - DNA, 75 bp, synthetic construct
  source 1..75: mol_type = other DNA
attcagcgccatgccctgagccgttttcagccttatacctacgggaaaagcaatggaaatatggataaccactat

SEQ ID NO: 450760 - DNA, 75 bp, synthetic construct
  source 1..75: mol_type = other DNA
acatacctacagcctacgtccgcttggagaaatacgcggaaatgacaggtacaccaatcggcacatgtaggggaa

SEQ ID NO: 450761 - DNA, 75 bp, synthetic construct
  source 1..75: mol_type = other DNA
cgccgcattattcgtcattttattgattgtggtggccatttttgcacgctggatcgccccctatgacgccgaaaa

SEQ ID NO: 450762 - DNA, 75 bp, synthetic construct
  source 1..75: mol_type = other DNA
tcgccattttttccatccccgcgtttgcccgcctggtgcgcggcaacacgctggtgttgaaacagcaaaccttta

SEQ ID NO: 450763 - DNA, 75 bp, synthetic construct
  source 1..75: mol_type = other DNA
acgaggcggcgttgaaagccaataataaggtttatgaggcgtatatctatccgggggttgatcacggaggtgatg

SEQ ID NO: 450764 - DNA, 75 bp, synthetic construct
  source 1..75: mol_type = other DNA
atgattccacgccccgttatgacaaatctgccgccgatcttgcctggcaaaggacactgaaatggttcgataaat

SEQ ID NO: 450765 - DNA, 75 bp, synthetic construct
  source 1..75: mol_type = other DNA
gaaaatatcgacattgttccgctgtatctcgctgcggaacgaccggttctggaacgcgacggtatgttgatgatg

SEQ ID NO: 450766 - DNA, 75 bp, synthetic construct
  source 1..75: mol_type = other DNA
aagggaagcgtatctgatcattgaaatgatcccggaagggacacaaaaaattatttacgaagcgatgccgcgcaa

SEQ ID NO: 450767 - DNA, 75 bp, synthetic construct
  source 1..75: mol_type = other DNA
cagaaaaaacagcagagaattttttcagtcttattaaatcacaaccaattaaaaccttggtggatgtacgtttaa

SEQ ID NO: 450768 - DNA, 75 bp, synthetic construct
  source 1..75: mol_type = other DNA
gcacaaaccccatcactgtcatcgtcgtcttgtgatagaatatctgaacaagcactgggatgcagattttgaggt

SEQ ID NO: 450769 - DNA, 75 bp, synthetic construct
  source 1..75: mol_type = other DNA
gcccgtagcgttgagcaggttaaccgctacagaacggctttggctttagccagagcaaatgttcagcaagtgaaa

SEQ ID NO: 450770 - DNA, 75 bp, synthetic construct
  source 1..75: mol_type = other DNA
caaagtgcattgtcgttacacggcgatctggagcaacgcgatcgcgatcagaccctggtacgttttgctaacggt

SEQ ID NO: 450771 - DNA, 75 bp, synthetic construct
  source 1..75: mol_type = other DNA
tagcgattgaaattgactcaacagatgctctgccacctattgaacaacaattttatgagacatccagcaaaggca

SEQ ID NO: 450772 - DNA, 75 bp, synthetic construct
  source 1..75: mol_type = other DNA
atcttgtgtggtgttctgtaatacaaaaaaagattgccaggctgtgtgtgatgctctgaatgaagtagggcaaag

SEQ ID NO: 450773 - DNA, 75 bp, synthetic construct
  source 1..75: mol_type = other DNA
ttcagcacatcgataaatatgtattcgacaacggtcagggcgggagcggacaacgtttcgactggtcactattaa

SEQ ID NO: 450774 - DNA, 75 bp, synthetic construct
  source 1..75: mol_type = other DNA
cgacagatgctttaccgcctattgaacaacaattttatgaaacatccagcaaggctaaaattccgttattacaac

SEQ ID NO: 450775 - DNA, 75 bp, synthetic construct
  source 1..75: mol_type = other DNA
cagtttttgtgcgccggaagaggcgcagcgggccaatatcctctcagatatgttgcagataaaacttaactggca

SEQ ID NO: 450776 - DNA, 75 bp, synthetic construct
  source 1..75: mol_type = other DNA
atggcaaaccgcaaacaacagcgcgcatacgctgcgcgtcgtcacatccagactgaaatcaaccgcagacttttc

SEQ ID NO: 450777 - DNA, 75 bp, synthetic construct
  source 1..75: mol_type = other DNA
gacttctggacctcgccagaacgttaacgctgtgactggtggaataacctattcacctgtaatcaatcttccggc

SEQ ID NO: 450778 - DNA, 75 bp, synthetic construct
  source 1..75: mol_type = other DNA
gctgaagcacggaaaaatgttcttgcagtaaaacgtgctcaggaggagttaaaccgcgcgttggaaaggcagcgt

SEQ ID NO: 450779 - DNA, 75 bp, synthetic construct
  source 1..75: mol_type = other DNA
acaaccgcgatctgcgcgatttgtcgattgatctcaaccgtacccgcgagcttgcgccgaaactggggcacaacg

SEQ ID NO: 450780 - DNA, 75 bp, synthetic construct
  source 1..75: mol_type = other DNA
atggtaatgaagatcagctgtatatcgatacgctgcgtgaagctctgccagcacacgttgccatctggaaagcat

SEQ ID NO: 450781 - DNA, 75 bp, synthetic construct
  source 1..75: mol_type = other DNA
tttcgatccggcacgcattgccgccatttataaacattacgcttcggcaatttcagtgctgactgatgagaaata

SEQ ID NO: 450782 - DNA, 75 bp, synthetic construct
  source 1..75: mol_type = other DNA
tcccgctctctaactggaccgagcaggatatctggcaatatatctggctggaaaatatcgacattgtgccgctgt

SEQ ID NO: 450783 - DNA, 75 bp, synthetic construct
  source 1..75: mol_type = other DNA
gctcgacctggcgcagttaccgacggaagtctggccgaacggcgaattgcctgccgatctcgcttcccgcgtaca

SEQ ID NO: 450784 - DNA, 75 bp, synthetic construct
  source 1..75: mol_type = other DNA
gttcggtggcattgtgccgcgtaaagcgagcactcacttacgtgatttgctgactcaatgcgaagcgaccatcgc

SEQ ID NO: 450785 - DNA, 75 bp, synthetic construct
  source 1..75: mol_type = other DNA
aattgcgtgcgttgctgatgggcgaaaaacagagtgaacagcttaagtttgacaacgaaatgttgacgctggata

SEQ ID NO: 450786 - DNA, 75 bp, synthetic construct
  source 1..75: mol_type = other DNA
caacattggctctaatctgagaaatgcagtagcacacgggttattagatgacgatactgccagtgggggggatgt

SEQ ID NO: 450787 - DNA, 75 bp, synthetic construct
  source 1..75: mol_type = other DNA
gctggatgttgcgtcggaggttttctgggagactggcttggaacccgtaaagcctatgtatttagtctgctggct

SEQ ID NO: 450788 - DNA, 75 bp, synthetic construct
  source 1..75: mol_type = other DNA
tcctgtttgcgtttctttattcctggccaattcaggctctgttacccacatatctgaaaacagagttgtcatatg

SEQ ID NO: 450789 - DNA, 75 bp, synthetic construct
  source 1..75: mol_type = other DNA
gtcgccccgaaacgctgttacgaaccgcaggcgttgctgaataaacaaaagctgtggggtgcctgcgttcagctt

SEQ ID NO: 450790 - DNA, 75 bp, synthetic construct
  source 1..75: mol_type = other DNA
tcaatatgatcgaatggtggctgtgtctggtgatgccgcctgaagaggtggaagagatcgcccgctttaaaaagc

SEQ ID NO: 450791 - DNA, 75 bp, synthetic construct
  source 1..75: mol_type = other DNA
cgcccggaagttcgccgtgcccgggcgcagaatatgggtgaatcgctgggcgtatttatgcagggcttcctgggc

SEQ ID NO: 450792 - DNA, 75 bp, synthetic construct
  source 1..75: mol_type = other DNA
ccgtggccgatattatgtcggcgatgaaagataccttcagaaataacagcaccagtgaagagcagctactgaacg

SEQ ID NO: 450793 - DNA, 75 bp, synthetic construct
  source 1..75: mol_type = other DNA
gaatctaaatacgaaaaagtgatcatcaatcagatcgtcgatcgtcgttcttcttccaagcgcccaaccggaatg

SEQ ID NO: 450794 - DNA, 75 bp, synthetic construct
  source 1..75: mol_type = other DNA
ctggacgtggtgcgcaacggtcagtcattgatggaagcgtgttctcccgccgttagcaggctggcggcggcaatc

SEQ ID NO: 450795 - DNA, 75 bp, synthetic construct
  source 1..75: mol_type = other DNA
accattagacatttcagttgaagtaaatcgagctatagaacttgtttcagaacaaaaggatataattcattctct

SEQ ID NO: 450796 - DNA, 75 bp, synthetic construct
  source 1..75: mol_type = other DNA
tcggcgcgttgatcgctcaacgtctggatctgggaacggcacttggctcgctctcgtttagtttaacgtttgtgg

SEQ ID NO: 450797 - DNA, 75 bp, synthetic construct
  source 1..75: mol_type = other DNA
gctgatggtggtcgtgttgtttgctttcctctactcatggccgattcaggcgctgctgccaacgtatctgaaaac

SEQ ID NO: 450798 - DNA, 75 bp, synthetic construct
  source 1..75: mol_type = other DNA
cgctggcatcgctctcgttcagtctgacatttgtggtgatcctgttgattggcctggatatgccatcccgtgttc

SEQ ID NO: 450799 - DNA, 75 bp, synthetic construct
  source 1..75: mol_type = other DNA
gtgcgcgccgcgacgaagagaagtcgcgagccaaagaacgtatctattccttccgcgatcgttttcatcgctggg

SEQ ID NO: 450800 - DNA, 75 bp, synthetic construct
  source 1..75: mol_type = other DNA
gacgtttgtggtgatcctgctgattggtctggatatgccctcccgggttcagcgctggttgcgcccggaagcatt

SEQ ID NO: 450801 - DNA, 75 bp, synthetic construct
  source 1..75: mol_type = other DNA
ggttccggtctggggctggagagcgctgttctttatcggcattttgccaatcatctttgctctctggctgcgtaa

SEQ ID NO: 450802 - DNA, 75 bp, synthetic construct
  source 1..75: mol_type = other DNA
ttttattgaccgtatcagaatctatagcttgcatccatgtcttaacaaacatctttcaattcaatcaaatagaga

SEQ ID NO: 450803 - DNA, 75 bp, synthetic construct
  source 1..75: mol_type = other DNA
acggggattactggcaaaatacctcttttgagtcagagaagaatgcgctctcttttgattataaagagcgtaagg

SEQ ID NO: 450804 - DNA, 75 bp, synthetic construct
  source 1..75: mol_type = other DNA
aaatggcccttttctcgcaagccctgcattttggctttgagtacaatttttctgcatcagtgcacctattggccc

SEQ ID NO: 450805 - DNA, 75 bp, synthetic construct
  source 1..75: mol_type = other DNA
atggcgggaacctggctgttaaccattttactcagcggttattcgtcgctgggagcgattgtcagcgcactgatt

SEQ ID NO: 450806 - DNA, 75 bp, synthetic construct
  source 1..75: mol_type = other DNA
cagcgtctgtggcgtcgtcaagagacaaaaatctggacgaaattcaaaagaaagcgcgaaaaggatcctgagtga

SEQ ID NO: 450807 - DNA, 75 bp, synthetic construct
  source 1..75: mol_type = other DNA
actggctgccaaacttatgtcgggaaaattcacaatagaaacgggtactgcacaaggactcagcaactttgtccg

SEQ ID NO: 450808 - DNA, 75 bp, synthetic construct
  source 1..75: mol_type = other DNA
accggtacaattactcgtgattacattcctggtggggcgcaggcaaataaagtttggttccagcgtgaaaatatg

SEQ ID NO: 450809 - DNA, 75 bp, synthetic construct
  source 1..75: mol_type = other DNA
ttccccgttagagcagggattgttgaccggtaccatcactcgtgattacgttccgggcggcgctcgggcaaataa

SEQ ID NO: 450810 - DNA, 75 bp, synthetic construct
  source 1..75: mol_type = other DNA
aaattggcggcaagatttttatgctgtcgtcagaactgcgcggcgtccccttcataaatctgaagtccgatccac

SEQ ID NO: 450811 - DNA, 75 bp, synthetic construct
  source 1..75: mol_type = other DNA
ggtgttgacgctgaccactcagcgcccttttgatgagcactccgaccagctatggactgcctggttgaccagttt

SEQ ID NO: 450812 - DNA, 75 bp, synthetic construct
  source 1..75: mol_type = other DNA
ttttcttgatcgcaccgtcaatatcttcgtcccgtcgggcaatgagagggcaactcccagtctgaatatttcccg

SEQ ID NO: 450813 - DNA, 75 bp, synthetic construct
  source 1..75: mol_type = other DNA
aatgtcgcggcactgaatatcaacttatcggatgcagacgcaacattgatgagggaaatggcagaggccctggag

SEQ ID NO: 450814 - DNA, 75 bp, synthetic construct
  source 1..75: mol_type = other DNA
cgccgactggtcggcaaataataaccgtatttctgaagatattaattggtttcccgggattagcctggaacacgc

SEQ ID NO: 450815 - DNA, 75 bp, synthetic construct
  source 1..75: mol_type = other DNA
aaaaatcattttgcagatccagtgtcggatcagcgacgaagaacgtcgcgggcagcttatccacgcgctggcagc

SEQ ID NO: 450816 - DNA, 75 bp, synthetic construct
  source 1..75: mol_type = other DNA
cgacgggctggttagacaccggcgacctcggttatctgctggacggttatctgtatgtcaccggacgcattaaag

SEQ ID NO: 450817 - DNA, 75 bp, synthetic construct
  source 1..75: mol_type = other DNA
aacgactcatggaatttagtggtcgatggcttatctaaacgcgatcaaaaacgactgcgccctgattcaaccgta

SEQ ID NO: 450818 - DNA, 75 bp, synthetic construct
  source 1..75: mol_type = other DNA
acgcgccgtatcgactttcgtcaactgcggcaaagcgttgccggaacatggcattgaaatccgcaatgaagcagg

SEQ ID NO: 450819 - DNA, 75 bp, synthetic construct
  source 1..75: mol_type = other DNA
atgcgctatgccgattttccaacgctggttgatgctttggactatgccgctctgagtagcgccggaatgaatttt

SEQ ID NO: 450820 - DNA, 75 bp, synthetic construct
  source 1..75: mol_type = other DNA
tatccttaatgaatcaatttcagagctggcaggctatagctcgctgaaaagcgaagtaaaatacggcgccgaacg

SEQ ID NO: 450821 - DNA, 75 bp, synthetic construct
  source 1..75: mol_type = other DNA
ccccgcatcatcgccgtggacagcccattcacactcaaacagttcacagactgtctcgaagggaaagcagactgg

SEQ ID NO: 450822 - DNA, 75 bp, synthetic construct
  source 1..75: mol_type = other DNA
accgctaagctacgagcagttctcccacggctggcaggcggtgtttgtcgcgctgcgcccggaagtgatcgatat

SEQ ID NO: 450823 - DNA, 75 bp, synthetic construct
  source 1..75: mol_type = other DNA
ttaagaagagttttcatatgggggaggcgtttcatcagcatgagcgtggggaaattagcgacgaagcgttcgcag

SEQ ID NO: 450824 - DNA, 75 bp, synthetic construct
  source 1..75: mol_type = other DNA
caccccgacccctgacgataaaatcgactgccataaacatccttcctcactgacgcagtttctcgcacaaaaaaa

SEQ ID NO: 450825 - DNA, 75 bp, synthetic construct
  source 1..75: mol_type = other DNA
ttgcaggcggaaggtttttcacccagcgatacggtctttttcgacgataacgccgataatatagaaggagctaat

SEQ ID NO: 450826 - DNA, 75 bp, synthetic construct
  source 1..75: mol_type = other DNA
atgagtatgccggggagatgaacacctctccggtactgcgcgaaagcgaccttgctcccctgaaacccgcctgtg

SEQ ID NO: 450827 - DNA, 75 bp, synthetic construct
  source 1..75: mol_type = other DNA
actgcccgaatacgggtgcaatgaccggttgtgcaacgcctggcgataccgtctggtattcaacttcagacaaca

SEQ ID NO: 450828 - DNA, 75 bp, synthetic construct
  source 1..75: mol_type = other DNA
tagctcgctgaaaagcgaagtaaaatacggcgccgaacgcagccgtattgactttatgttgcaggcggattcgcg

SEQ ID NO: 450829 - DNA, 75 bp, synthetic construct
  source 1..75: mol_type = other DNA
gcgccacgctggttcagcgttataaacgctttttagctgatgtgatcacacccgatggtcgcgaattaacgctac

SEQ ID NO: 450830 - DNA, 75 bp, synthetic construct
  source 1..75: mol_type = other DNA
cattctgaccgaccgtgaaaatggtgaaaaagacgacaactctcaagatacctcttatgctcgtttcggcgtgaa

SEQ ID NO: 450831 - DNA, 75 bp, synthetic construct
  source 1..75: mol_type = other DNA
gttggtacctggtactacttcaataagaacatgaacgtttatactgcatacaaattcaacatgctggataaagat

SEQ ID NO: 450832 - DNA, 75 bp, synthetic construct
  source 1..75: mol_type = other DNA
attaggagcagtatcaaaattaaataatcacagcagaattaaagttatcatcaaagataatttaggagagagcga

SEQ ID NO: 450833 - DNA, 75 bp, synthetic construct
  source 1..75: mol_type = other DNA
cgtcgcgggcagcttatccacgcgctggcagctcggatccaaagcgaatttggcgttaccgcggatatcgatctg

SEQ ID NO: 450834 - DNA, 75 bp, synthetic construct
  source 1..75: mol_type = other DNA
actgaccggtctgaaagcgggtacgcccgttgtcggcggcctgtttgatgtggtttccaccgcactctgcgccgg

SEQ ID NO: 450835 - DNA, 75 bp, synthetic construct
  source 1..75: mol_type = other DNA
agccccacctcttccggcaacctcgaatggtttaccgcacagtggggagaaatctcgtttgatgagatcaaccag

SEQ ID NO: 450836 - DNA, 75 bp, synthetic construct
  source 1..75: mol_type = other DNA
tgcgcaccctgctgccggatatgaccgcccatcagctttaccaacaaaaataccaacgctatcagcatctcattg

SEQ ID NO: 450837 - DNA, 75 bp, synthetic construct
  source 1..75: mol_type = other DNA
aatggtttaccgcgcagtggggaggaatctcatttgatgaaatcaaccaggccgttgccagcttgccaaaagccg

SEQ ID NO: 450838 - DNA, 75 bp, synthetic construct
  source 1..75: mol_type = other DNA
agccccacctcttccggcaatctcgaatggtttaccgcgcagtggggagaaatctcttttgctgagattaatcag

SEQ ID NO: 450839 - DNA, 75 bp, synthetic construct
  source 1..75: mol_type = other DNA
cccgtgcctcaccgactggctggggatcgctgaaatcaatcacgccctgccgcctgttgtcggatctgccgaaat

SEQ ID NO: 450840 - DNA, 75 bp, synthetic construct
  source 1..75: mol_type = other DNA
aaatggcagtacgttaaccgttcagtcgaatggtgcgtcgtttactgccacaaccatcaaaatcattgcggagca

SEQ ID NO: 450841 - DNA, 75 bp, synthetic construct
  source 1..75: mol_type = other DNA
acttgataccaggctcacagcggcagagggaagtatttcgacgctacaaagcacagttggtgatcactcaacaag

SEQ ID NO: 450842 - DNA, 75 bp, synthetic construct
  source 1..75: mol_type = other DNA
atttgttgagctggatgaaactgagcttgttgattttggtaaagatatcagaatcgttttggcttcatcggattt

SEQ ID NO: 450843 - DNA, 75 bp, synthetic construct
  source 1..75: mol_type = other DNA
atgagcaatatcggctataagcgtgtgagcactgtagatcaaaatactgatcgccagcttgcaggactaactctc

SEQ ID NO: 450844 - DNA, 75 bp, synthetic construct
  source 1..75: mol_type = other DNA
caggctggtcagggcgcttacgatgcccaggtaaaaaacgatgaacaggacgtcgaactggcagatcacgattca

SEQ ID NO: 450845 - DNA, 75 bp, synthetic construct
  source 1..75: mol_type = other DNA
atggctgattcgaatctcaatgtgccggtaatcatccaagctacgcgactcgacacatcagtgcttccacgcaat

SEQ ID NO: 450846 - DNA, 75 bp, synthetic construct
  source 1..75: mol_type = other DNA
ggcggctatgatgagccatccatagattacctgaagaaactcatagccgacgcagacagaacaccggaagaacgc

SEQ ID NO: 450847 - DNA, 75 bp, synthetic construct
  source 1..75: mol_type = other DNA
aaaactatatggaagtcgaaaaaacggcgtttttaacgtgtatataacgccctggcagcagcaaatcttgtcaga

SEQ ID NO: 450848 - DNA, 75 bp, synthetic construct
  source 1..75: mol_type = other DNA
tatgcgtttatgaaaataatgcatctactattggatcaattaactcatttaatagcattgagagagagatctttt

SEQ ID NO: 450849 - DNA, 75 bp, synthetic construct
  source 1..75: mol_type = other DNA
aagctctcgatattcattgaaaagaccactggcatatcaaaagaaaaattacggccagatatttttcaaaagatt

SEQ ID NO: 450850 - DNA, 75 bp, synthetic construct
  source 1..75: mol_type = other DNA
ggcttaaattgatcagtaaaaatcgcggcaccgtttccgttgcgccgccgtttggctatgaattgtgccagcgcc

SEQ ID NO: 450851 - DNA, 75 bp, synthetic construct
  source 1..75: mol_type = other DNA
tggtggtacgggcacagctatcgtagttcagggggcaggtaaaaacgttgtcttcgatggctccgaaggtgatgc

SEQ ID NO: 450852 - DNA, 75 bp, synthetic construct
  source 1..75: mol_type = other DNA
catttccgtatacatcaaaatactttataagagatgtgctttcccatcataatatatatgcacacccatcagtaa

SEQ ID NO: 450853 - DNA, 75 bp, synthetic construct
  source 1..75: mol_type = other DNA
acaggtagcccaatgcgtgaggttttaaattattataatggagagataaataaatctaaagcactcgaaaagttg

SEQ ID NO: 450854 - DNA, 75 bp, synthetic construct
  source 1..75: mol_type = other DNA
gacgaattgttgatcatacggctgacatcaatatgacctacagcgatattgcgcgtgaatatctcctggctgaag

SEQ ID NO: 450855 - DNA, 75 bp, synthetic construct
  source 1..75: mol_type = other DNA
gttgggctgatccattagggttgactgctaaagctgatattactactttctaccatgcgggggatatacagggcc

SEQ ID NO: 450856 - DNA, 75 bp, synthetic construct
  source 1..75: mol_type = other DNA
agttaatgaagcctcttggatttagtgattacgttaaactacaacaacatgccaaagttgtcttgagtgatagtg

SEQ ID NO: 450857 - DNA, 75 bp, synthetic construct
  source 1..75: mol_type = other DNA
ctattacggaggaatcatcaatattaaacttccctgcagtaaatattcgtgaggcacatgaacgaccagagggat

SEQ ID NO: 450858 - DNA, 75 bp, synthetic construct
  source 1..75: mol_type = other DNA
cgatacatcaatccttccacgcaatatcttctcgcagtcatatctgctgtacgttattgcacagggtgctgatgt

SEQ ID NO: 450859 - DNA, 75 bp, synthetic construct
  source 1..75: mol_type = other DNA
ccaactccgatcgcaccaacgagcagaacctgcaaagccgtggcacaggcaagcgtgcagaagcatgggcaacag

SEQ ID NO: 450860 - DNA, 75 bp, synthetic construct
  source 1..75: mol_type = other DNA
aagcgtgcagaagcatgggcaacaggtctgaaatacgatgccaataatatttatctggcaactttctattctgaa

SEQ ID NO: 450861 - DNA, 75 bp, synthetic construct
  source 1..75: mol_type = other DNA
gctcaactgatgccctcagtaatgagtgatgctggttatcgtggaactgatccgcgctcactgccatttgaaaag

SEQ ID NO: 450862 - DNA, 75 bp, synthetic construct
  source 1..75: mol_type = other DNA
agtttggtaaagcggtgctgaataagctcggtaaaatcaacaagctgcataaaaatcaggttgaacaggccgggt

SEQ ID NO: 450863 - DNA, 75 bp, synthetic construct
  source 1..75: mol_type = other DNA
cgcggatgacccgttcatcaagtcagcgcgcgtcgggcaatttgatccgcaaacggtgcggatggtttttgaact

SEQ ID NO: 450864 - DNA, 75 bp, synthetic construct
  source 1..75: mol_type = other DNA
ctttgaagcggtcgctcaataccagtttgactttggtctgcgtccgtcgctgggttatgtcttatcgaaagggaa

SEQ ID NO: 450865 - DNA, 75 bp, synthetic construct
  source 1..75: mol_type = other DNA
ttcgtgaaccttgaggacgatgtagatgacgatcagattcgcggcaactacgtgcgcttccgtgccgttgttgag

SEQ ID NO: 450866 - DNA, 75 bp, synthetic construct
  source 1..75: mol_type = other DNA
tcactacgaaaccagtgcgcctaaattcattaacctggaagattatgttgccgatgaccaaattcgcggcaacta

SEQ ID NO: 450867 - DNA, 75 bp, synthetic construct
  source 1..75: mol_type = other DNA
aagtacatgttggttgccggtgatacatttcacgtccgaggaactgtgtccccttctgttttgcattacgtaact

SEQ ID NO: 450868 - DNA, 75 bp, synthetic construct
  source 1..75: mol_type = other DNA
aggaactggtctctgatgttgtcgcttgccagttggttatcaaacaaattctcgacgtactcgatgttatcgcgc

SEQ ID NO: 450869 - DNA, 75 bp, synthetic construct
  source 1..75: mol_type = other DNA
cggtcaccatgcgggcaatccaaaaagccatcgcgcttattgaactcaagtttaccccacagggtgaatcccatt

SEQ ID NO: 450870 - DNA, 75 bp, synthetic construct
  source 1..75: mol_type = other DNA
aggaactggtttctgatgtggttgcttgccagttggttatcaaacaaattctggatgttctcgatgtaatcgcgc

SEQ ID NO: 450871 - DNA, 75 bp, synthetic construct
  source 1..75: mol_type = other DNA
cttcattccgttgcaagtgcgcgtagcaaaagcccagaaacagcgtgctgacttgtttgtctctatccatgccga

SEQ ID NO: 450872 - DNA, 75 bp, synthetic construct
  source 1..75: mol_type = other DNA
tttgatcgcaacagtacagaacggggttacgcttatctgtggttgcggctggccaggccctatgccggggatacc

SEQ ID NO: 450873 - DNA, 75 bp, synthetic construct
  source 1..75: mol_type = other DNA
gatgatgtgcgtggtatggatacgtgcatttttgccgacagccagcttaactaccagtttgatgtgcgcctgccc

SEQ ID NO: 450874 - DNA, 75 bp, synthetic construct
  source 1..75: mol_type = other DNA
aagtgatatctcctttgccggaaaaaaacgtatcacgcttatcggtggtggaagctatctgcggctggaggcggg

SEQ ID NO: 450875 - DNA, 75 bp, synthetic construct
  source 1..75: mol_type = other DNA
aagaagtcccatctttaactgattgctgctcgttatctccggagcaagtattgcgattcgacggtggagaaatct

SEQ ID NO: 450876 - DNA, 75 bp, synthetic construct
  source 1..75: mol_type = other DNA
gagtgacatctcctttgccgggaaaaaacgcatcacgctgattggcgggggaagttatctgcgacttgaggccgg

SEQ ID NO: 450877 - DNA, 75 bp, synthetic construct
  source 1..75: mol_type = other DNA
ggggatttactggcgcacggagatggatgatgtgcgcggactggatacgtacatttttgccgacagccagcttca

SEQ ID NO: 450878 - DNA, 75 bp, synthetic construct
  source 1..75: mol_type = other DNA
gcaaaagcccagaaacagcgtgctgacctgtttgtctctatccatgccgacgcctttaccagtcgtcagccgagc

SEQ ID NO: 450879 - DNA, 75 bp, synthetic construct
  source 1..75: mol_type = other DNA
agtttggtagggcagtcctgaataaacttggcaaaatcaacaagctgcataagaatcaggttgagcaggccgggt

SEQ ID NO: 450880 - DNA, 75 bp, synthetic construct
  source 1..75: mol_type = other DNA
cagggccaaggggatcaaccccttcgagcatggttccctgcacaccgacctgtggaagaccgaaggcctgaagca

SEQ ID NO: 450881 - DNA, 75 bp, synthetic construct
  source 1..75: mol_type = other DNA
ccacatcgaaagaccagtcccactaccggcttacactcagctcccgtctggcactgctggagcacacccggcagt

SEQ ID NO: 450882 - DNA, 75 bp, synthetic construct
  source 1..75: mol_type = other DNA
tgatgaaatatgcgtcgttgcggatgcgtaacggcaaaaatgtccatggcattgtgacccgtctggaatggctgt

SEQ ID NO: 450883 - DNA, 75 bp, synthetic construct
  source 1..75: mol_type = other DNA
ttggtggtctgcttcttctgccagtagtgagcaatgcagcggatgcgcaaaaagcagctgataacaaaaaaccgg

SEQ ID NO: 450884 - DNA, 75 bp, synthetic construct
  source 1..75: mol_type = other DNA
agtacatcgacatcaccactgccggtatcgataaggaaaaacttagcgaaattgttggtaaaccggtagagacta

SEQ ID NO: 450885 - DNA, 75 bp, synthetic construct
  source 1..75: mol_type = other DNA
gcggggggaaacggattacttctacgaccccacggggcgcatcacggcgtgccgctcggaggatgaggggtatct

SEQ ID NO: 450886 - DNA, 75 bp, synthetic construct
  source 1..75: mol_type = other DNA
gaagacgggcagctcatgcggcacacggactgttccggctcgcagacggcctggttctacgacgaacgcacgcgg

SEQ ID NO: 450887 - DNA, 75 bp, synthetic construct
  source 1..75: mol_type = other DNA
cctaatccggtaagttggatcgatcctctgggtttagcatgtgggccagcagtaaaacaaaattcaagaggtcaa

SEQ ID NO: 450888 - DNA, 75 bp, synthetic construct
  source 1..75: mol_type = other DNA
attcacgaggtagatctcattatagaaactatcgtgcagcagctagagaaattggtataaaacctaccaagagta

SEQ ID NO: 450889 - DNA, 75 bp, synthetic construct
  source 1..75: mol_type = other DNA
cgcttggattaagtgccgcctctgatttgcctcaattaaaaggaagatccccaggggcaataggttctattctta

SEQ ID NO: 450890 - DNA, 75 bp, synthetic construct
  source 1..75: mol_type = other DNA
tgtactgggaccaaatggcagagcacatataattgaaaaagatggttctgaaattgtcacatctatgagggatat

SEQ ID NO: 450891 - DNA, 75 bp, synthetic construct
  source 1..75: mol_type = other DNA
tccctccattctggtcgaaacggcgtttatcagtaacgttgaggaagagcgtaaactgaaaacggcgactttcca

SEQ ID NO: 450892 - DNA, 75 bp, synthetic construct
  source 1..75: mol_type = other DNA
tgtgtacgatgaacgcggcaaccttcttgccgtgaccgacccgctgcagcagaacacccggtatcagtatgaccg

SEQ ID NO: 450893 - DNA, 75 bp, synthetic construct
  source 1..75: mol_type = other DNA
cgggcgactgaagcgcagggagacatacagcgggatgcgcggggtggtcccggagacgttcacggaccggcagta

SEQ ID NO: 450894 - DNA, 75 bp, synthetic construct
  source 1..75: mol_type = other DNA
atatcacaaagaaaaatgttgaattaaaaggaaaaacgaaaggtggtgtaatggactggaaaattaaagataatg

SEQ ID NO: 450895 - DNA, 75 bp, synthetic construct
  source 1..75: mol_type = other DNA
gatatagatgtttgggctagtcaaggagggattccaaatacatgggggcatgatccgttaaaattccccagtggt

SEQ ID NO: 450896 - DNA, 75 bp, synthetic construct
  source 1..75: mol_type = other DNA
actgtctgaatctgtactacgacgagctggggcgcatcacgcaaatcagcggtgaacagcagcgtccgtgcatcc

SEQ ID NO: 450897 - DNA, 75 bp, synthetic construct
  source 1..75: mol_type = other DNA
gagcacgcggcagctttacgaccccggcgggcggctgaagcgcagggagacatacagcgggatgcgcggggtggt

SEQ ID NO: 450898 - DNA, 75 bp, synthetic construct
  source 1..75: mol_type = other DNA
tggcgaacgggatgtgggcggtggatttaggcgcttgccctggcggctggacctaccaactggtgaagcgcaaca

SEQ ID NO: 450899 - DNA, 75 bp, synthetic construct
  source 1..75: mol_type = other DNA
ctggcgtactggcgaactatgaaacgccgaaacgtccggtggtgcacgtcttctttattgcacctggctgctgct

SEQ ID NO: 450900 - DNA, 75 bp, synthetic construct
  source 1..75: mol_type = other DNA
cttgaaatttctctcgatggttcactatacggacctgctgtgactatgggcatagaccaggttccaaccattcag

SEQ ID NO: 450901 - DNA, 75 bp, synthetic construct
  source 1..75: mol_type = other DNA
gtaaataatactagccctggagtcgttggtgttgatgttgaatcacggatcgcctttgaaactcgccggagacaa

SEQ ID NO: 450902 - DNA, 75 bp, synthetic construct
  source 1..75: mol_type = other DNA
acaccaacgaaagcaaagagttactgaaattctgccgtaaattcacggttccgctacgggctgccttgcgcgatg

SEQ ID NO: 450903 - DNA, 75 bp, synthetic construct
  source 1..75: mol_type = other DNA
ggaagaggcatttcatgtgtttatcctgcggatgagtgggatgaacgcctggcgaacgggatgtgggcggtggat

SEQ ID NO: 450904 - DNA, 75 bp, synthetic construct
  source 1..75: mol_type = other DNA
cacaacgaattgacgttgccgaagaactggaccgcctcgaagcgcatgtcaaagagacctacaacattctgaaga

SEQ ID NO: 450905 - DNA, 75 bp, synthetic construct
  source 1..75: mol_type = other DNA
cgtcgcgcgcgaaaccgaaggtcaggcgctgaaagcgttgatcgagcagcgtctggaaggcgtcaccgccgaagt

SEQ ID NO: 450906 - DNA, 75 bp, synthetic construct
  source 1..75: mol_type = other DNA
caaaatgctttctaaaatcgcctgttttgctgccggtatcgggatgagcatgatgacgcagaaggccatcagcgc

SEQ ID NO: 450907 - DNA, 75 bp, synthetic construct
  source 1..75: mol_type = other DNA
tcaggtgcagttggaaaacaaccgtctggagcaggagttggttctgctggcacaacgaattgacgttgccgaaga

SEQ ID NO: 450908 - DNA, 75 bp, synthetic construct
  source 1..75: mol_type = other DNA
tcctgcgctggccgggtgtgatggcagctcaggagcaggatctcgacgccattgccgctgaaattctcgctgcgc

SEQ ID NO: 450909 - DNA, 75 bp, synthetic construct
  source 1..75: mol_type = other DNA
tggctaaacagctcgtaactgctgctaactgggtaaaaatgcagagcgacgaaggggaaatcaacccggttgata

SEQ ID NO: 450910 - DNA, 75 bp, synthetic construct
  source 1..75: mol_type = other DNA
agattgttacccgctttaatgatttgggtaataagggcggtcagcgcaaacagcgtcaggtgcagtccaaatccg

SEQ ID NO: 450911 - DNA, 75 bp, synthetic construct
  source 1..75: mol_type = other DNA
cgatctgggtaataagaatacccgctcaccggggcgtaaaatttcagaaaaagccgggaaatataattttctgta

SEQ ID NO: 450912 - DNA, 75 bp, synthetic construct
  source 1..75: mol_type = other DNA
gattgcggtaattttggggaggtactggaagccacctggcatgatggtgaggacggactagcgcggctttacgtc

SEQ ID NO: 450913 - DNA, 75 bp, synthetic construct
  source 1..75: mol_type = other DNA
gcccgttattcagcgccgatgtaatgagcgaaatgattaaagatattgcagatgctgcagaccaagctaaggcaa

SEQ ID NO: 450914 - DNA, 75 bp, synthetic construct
  source 1..75: mol_type = other DNA
cgccaacaatgctaggtacgccgtcggatattcctcaggcggttcatgacttcgctggaaaaatttataacaagc

SEQ ID NO: 450915 - DNA, 75 bp, synthetic construct
  source 1..75: mol_type = other DNA
gtataaaggagcgccgcaaagccttaggcataacccaaacttcattggcggaaagggttggtatgcgccagcagt

SEQ ID NO: 450916 - DNA, 75 bp, synthetic construct
  source 1..75: mol_type = other DNA
actgctggtggcgtggttgctgtggcggaaagcggtacgcccgcagctaacacgtcgcgccgaggcggtgaagac

SEQ ID NO: 450917 - DNA, 75 bp, synthetic construct
  source 1..75: mol_type = other DNA
atcaagcctgcaatcgacgctctcaggagtcagatgacactaacgaggctgagcaaagaacatattattgacgtt

SEQ ID NO: 450918 - DNA, 75 bp, synthetic construct
  source 1..75: mol_type = other DNA
ctcaacacataccgtgccgtcatcaaaaatattctgagcataatcggtgaaaaaaatcttgcctcatcgattaat

SEQ ID NO: 450919 - DNA, 75 bp, synthetic construct
  source 1..75: mol_type = other DNA
tttgttcttctccattgagccggaagaaaactggcgcggtagcgggcgtacttacctgaaagggctggcggtaac

SEQ ID NO: 450920 - DNA, 75 bp, synthetic construct
  source 1..75: mol_type = other DNA
cagcaagcgtttatcgatcagttgctggctgccggtcgctggttgctggtactgctggtggcgtggctgctgtgg

SEQ ID NO: 450921 - DNA, 75 bp, synthetic construct
  source 1..75: mol_type = other DNA
cgatatcgtcaataatccggcactggcaaaatcacccgacgccgtactgaccgatgctgcggtcgattttttgaa

SEQ ID NO: 450922 - DNA, 75 bp, synthetic construct
  source 1..75: mol_type = other DNA
tgaatatccagcgaagacacaggaacaggaaatagctgaagcggagggaatgaaaagtatacttattgaacaggc

SEQ ID NO: 450923 - DNA, 75 bp, synthetic construct
  source 1..75: mol_type = other DNA
attcttgatggcgacagcgtgtttgaatccagtgatggcgctgcaaaaggtgaaatagaaatccttacaaaagag

SEQ ID NO: 450924 - DNA, 75 bp, synthetic construct
  source 1..75: mol_type = other DNA
gtgcgaagcggttgttatcgctgaacctgaaaaaaggcgaacgcgtggcgctgattgccgaaacgagtagcgggt

SEQ ID NO: 450925 - DNA, 75 bp, synthetic construct
  source 1..75: mol_type = other DNA
tgtcagtacgcgagctgatgaacctggtgaacatggcatcgggttgtatctgattgccagctatgtagcgcgctg

SEQ ID NO: 450926 - DNA, 75 bp, synthetic construct
  source 1..75: mol_type = other DNA
aaaggcttcccgaaacgcgagctacacactattaaactgccgctgccgacgcagtatcagacggctattaaagtg

SEQ ID NO: 450927 - DNA, 75 bp, synthetic construct
  source 1..75: mol_type = other DNA
atctttatcatctgaatgctgatcggcttgagcagcttgccagaacggagcgggataaggtcgctgaactgaaac

SEQ ID NO: 450928 - DNA, 75 bp, synthetic construct
  source 1..75: mol_type = other DNA
gcagctcccggaggtgggcggggcaaaagcctcccgatctcgggattcagtgagcaggactacggctcaacgaac

SEQ ID NO: 450929 - DNA, 75 bp, synthetic construct
  source 1..75: mol_type = other DNA
aaaatgtctccgtagtggtgggtgttccggttccggacaatattcacccgatgacaaagatgaagcgggagtctg

SEQ ID NO: 450930 - DNA, 75 bp, synthetic construct
  source 1..75: mol_type = other DNA
aatgttgatggtgtacgcagcattgatacaggcaccgcaatgactaagcctcagcgggtaatgactccaacttat

SEQ ID NO: 450931 - DNA, 75 bp, synthetic construct
  source 1..75: mol_type = other DNA
gcgggcttctttggtgcactgatcgccgggattatcggcggcatcgtggtgcattacctgaagaaaattccggtg

SEQ ID NO: 450932 - DNA, 75 bp, synthetic construct
  source 1..75: mol_type = other DNA
cgtgctggcgatggttcagggagagtctcaggcccagcaacagcttattgacagcctgcgcgaggcatttgtcga

SEQ ID NO: 450933 - DNA, 75 bp, synthetic construct
  source 1..75: mol_type = other DNA
gctaaccgggaagctattcgttctggtgatgatttactcggcgcaattattagttttcgcagtaaagacgaaatt

SEQ ID NO: 450934 - DNA, 75 bp, synthetic construct
  source 1..75: mol_type = other DNA
gccaatcgggaagctattcgttcaggtgatgatttgctgggggccattatcagctttcgtagtaaagacgaaatt

SEQ ID NO: 450935 - DNA, 75 bp, synthetic construct
  source 1..75: mol_type = other DNA
aaaatatcctgagcataatcggtgaaaaaaatcttgcctcatcgattaataaagaaaaattactggaggttcgta

SEQ ID NO: 450936 - DNA, 75 bp, synthetic construct
  source 1..75: mol_type = other DNA
atgagtgattcgcgactgctgccgaccggctcatcaccgcttgaagtcgccgctgcaaaagcctgtgcggaaatt

SEQ ID NO: 450937 - DNA, 75 bp, synthetic construct
  source 1..75: mol_type = other DNA
acgcgccgttatccgcgatgcgtatttcattcattgtcataaaggcactgtcggcgcaatccggcgtgtggtgga

SEQ ID NO: 450938 - DNA, 75 bp, synthetic construct
  source 1..75: mol_type = other DNA
aacgaaacaattatttccggcggcaccgcgcatgaaggtggggcggtccatgttattgacacaatgagagtgaat

SEQ ID NO: 450939 - DNA, 75 bp, synthetic construct
  source 1..75: mol_type = other DNA
gatgcggtagatgttctgtgcctatgcattgatattgctgaccaggatggcattggggcagaagagcaggagcaa

SEQ ID NO: 450940 - DNA, 75 bp, synthetic construct
  source 1..75: mol_type = other DNA
agttgctagccttacaaacttacatgtatcttctttacgctcgcgataatcgtaatgactacacattggctagaa

SEQ ID NO: 450941 - DNA, 75 bp, synthetic construct
  source 1..75: mol_type = other DNA
tcctgctgccgtctttgatggacgacaagttcagcctgaccagatgatcaacattagcgggagtctggataagaa

SEQ ID NO: 450942 - DNA, 75 bp, synthetic construct
  source 1..75: mol_type = other DNA
agcgcgtactggagaaggtgaacgcactgccgcaggataaacgtctgtctgctatgaccatgttgtttggtaaag

SEQ ID NO: 450943 - DNA, 75 bp, synthetic construct
  source 1..75: mol_type = other DNA
gtgtttcagtggattggcgacaaagtacaggcgctgtggggctggtttactaatctgctgacgcctgttaagtcg

SEQ ID NO: 450944 - DNA, 75 bp, synthetic construct
  source 1..75: mol_type = other DNA
agcaacctgcgacggtgaatgcagacggcaaagtgatgattccatcgggtggttttccgtcatggggatatggct

SEQ ID NO: 450945 - DNA, 75 bp, synthetic construct
  source 1..75: mol_type = other DNA
ttagtatcatccaggaaatacacggtgccatttacgccgctgccgcaggttacgacggcgacatcatcaccattt

SEQ ID NO: 450946 - DNA, 75 bp, synthetic construct
  source 1..75: mol_type = other DNA
gggatcgcaactggccggaagagacaaagcgacaggtgattcgtgatgcatggctgatacaccgacacaaaggga

SEQ ID NO: 450947 - DNA, 75 bp, synthetic construct
  source 1..75: mol_type = other DNA
tgatctgctgacgcctgttaagtcgacctctgccggactgcagagcgcagcggcaatggggcgacgattcgggga

SEQ ID NO: 450948 - DNA, 75 bp, synthetic construct
  source 1..75: mol_type = other DNA
agcaaggcgcaccaaatttctcctggagtgccgcgcatttgtatatgttgtataacgattttttccgtaagcagt

SEQ ID NO: 450949 - DNA, 75 bp, synthetic construct
  source 1..75: mol_type = other DNA
gaaaaaaccattgcagcacttcctgcctttgcgccgttctccggtgagattgcacaaatgagtgcaaatatccgc

SEQ ID NO: 450950 - DNA, 75 bp, synthetic construct
  source 1..75: mol_type = other DNA
cgtggcggcgatggcggcaactggaacgaacgtaataccaaacccagccttgccgcctggtcggtgatggaagtg

SEQ ID NO: 450951 - DNA, 75 bp, synthetic construct
  source 1..75: mol_type = other DNA
aataaaccgctggatctggtgtgggacggcgagctgctggaaaaactggaagcgaaagaagggaaaccgctttcc

SEQ ID NO: 450952 - DNA, 75 bp, synthetic construct
  source 1..75: mol_type = other DNA
gctggctgatgtcgccggtactgatgacgcagtgaatgtgctgtgcctgtgtctggatattgcagaccaggatgg

SEQ ID NO: 450953 - DNA, 75 bp, synthetic construct
  source 1..75: mol_type = other DNA
cattggcccggatgaagaagcgcagctcaagaaaattgctcaggcgctgcagttgccgctggagcagtacctgtg

SEQ ID NO: 450954 - DNA, 75 bp, synthetic construct
  source 1..75: mol_type = other DNA
gctcgttacgaagcgtcccctcgttctgctaatgcacaggctattcgtgagctgtctgatattgcgggtactcca

SEQ ID NO: 450955 - DNA, 75 bp, synthetic construct
  source 1..75: mol_type = other DNA
aaccgccgatggcccgattcaggagaattacaacccgctcactggcgcgcagcaaggcgcaccaaatttctcctg

SEQ ID NO: 450956 - DNA, 75 bp, synthetic construct
  source 1..75: mol_type = other DNA
cgtaaccgcgatcacaacggcaacggcgtgccggaatatggcgcgacccgcgacaaagcccacaacactgagagc

SEQ ID NO: 450957 - DNA, 75 bp, synthetic construct
  source 1..75: mol_type = other DNA
agaaagggttaaccaatccggatgcgacgccggaacagacgcgcgtcgcggtgaaagcgatcgaaacgctcaacg

SEQ ID NO: 450958 - DNA, 75 bp, synthetic construct
  source 1..75: mol_type = other DNA
cgctggaggcatacagtatacccggcgcgctggtgcaaaagttgatatcgaaagatgtacaggtcgaaatgattc

SEQ ID NO: 450959 - DNA, 75 bp, synthetic construct
  source 1..75: mol_type = other DNA
cagtagcctgtgctctgctgatgagcttttccgcccatgccgctaacgctgacaattataaaaacgtgattaacc

SEQ ID NO: 450960 - DNA, 75 bp, synthetic construct
  source 1..75: mol_type = other DNA
aaaactggaagcgaaagaagggaaaccgctttccgataaaaccattgctggcgaataccctgactatcagcgcaa

SEQ ID NO: 450961 - DNA, 75 bp, synthetic construct
  source 1..75: mol_type = other DNA
gggcaaaaaggtaagccgtcagcagacttaattaagggattaaattctgacattaccaattttggcaaaaattat

SEQ ID NO: 450962 - DNA, 75 bp, synthetic construct
  source 1..75: mol_type = other DNA
tgccacgcgaaccacagacgcatttctggaaacggagtgcgtggaaaatatcgccacaaccgaaatcattaaagc

SEQ ID NO: 450963 - DNA, 75 bp, synthetic construct
  source 1..75: mol_type = other DNA
gctaactggcatgcgttttatggtggtgaagagagtgacgacctgaaagcaggcgcggtattccattggcattgc

SEQ ID NO: 450964 - DNA, 75 bp, synthetic construct
  source 1..75: mol_type = other DNA
ggtattaacgctgagatcaacacagccggagaaaaacattcccctgttattcgcttttggaggcgtaatcatttt

SEQ ID NO: 450965 - DNA, 75 bp, synthetic construct
  source 1..75: mol_type = other DNA
gaacacactgaaagatatccataaattcctgaaactgaacacgaattataaacaggatggtgatattatttccct

SEQ ID NO: 450966 - DNA, 75 bp, synthetic construct
  source 1..75: mol_type = other DNA
gcagaacgtattcgcctgaagctaaatgaaaaagagatgttgatcgccaagagtacgacgatacgcatcagtgcc

SEQ ID NO: 450967 - DNA, 75 bp, synthetic construct
  source 1..75: mol_type = other DNA
aaagaaatctttaatgttattcctgactttaaccttaaagatggtgcacgcctggcttctgtaacccggctactg

SEQ ID NO: 450968 - DNA, 75 bp, synthetic construct
  source 1..75: mol_type = other DNA
tattgaaggctttctggcaagaagcaaagaaatctttaatgttattcctgactttaaccttaaagatggtgcacg

SEQ ID NO: 450969 - DNA, 75 bp, synthetic construct
  source 1..75: mol_type = other DNA
agccagagcctgatgtcggaccgaccgccgaggagatagctgcacgggcaagattacagtttaaaaagcccgaac

SEQ ID NO: 450970 - DNA, 75 bp, synthetic construct
  source 1..75: mol_type = other DNA
agcttttattccttgcctccattaatggccagcctgccgttatggctgatctgtcaggaaatgatgctgatgttg

SEQ ID NO: 450971 - DNA, 75 bp, synthetic construct
  source 1..75: mol_type = other DNA
ttgtacttctcgcagatcctaaagtaaatcatcgcgtgtgggcagcctgtcttaaatggagtcctgtcgtaaaaa

SEQ ID NO: 450972 - DNA, 75 bp, synthetic construct
  source 1..75: mol_type = other DNA
actttaaccttaaagatggtgcacgcctggcttctgtaacccggctactgccttccctgccccgcagggatgagg

SEQ ID NO: 450973 - DNA, 75 bp, synthetic construct
  source 1..75: mol_type = other DNA
tgctgcgcgttgccctgtatgccatatctggtctgttaggtgctctgcttagtccgataggtcttgtggttactg

SEQ ID NO: 450974 - DNA, 75 bp, synthetic construct
  source 1..75: mol_type = other DNA
gggcttgcttcatcgggcaacgcagcgggtttacttactgctccgttgtcgtctttgcgtcgcacggcatcactg

SEQ ID NO: 450975 - DNA, 75 bp, synthetic construct
  source 1..75: mol_type = other DNA
gctgggtatcaaaacgttaccttctgttacggcagcagtaacacgaaccagcagcgcgttgtcctggttagctgg

SEQ ID NO: 450976 - DNA, 75 bp, synthetic construct
  source 1..75: mol_type = other DNA
gctgcgccagccgctgatgaatattctgtacacggtgaaaagcatcacgggggcgttgcgccgctgggtggaagc

SEQ ID NO: 450977 - DNA, 75 bp, synthetic construct
  source 1..75: mol_type = other DNA
gttacggcagcagtaactcgaaccagcaacgcgttgtcctggctggctggtgcaccactggcactgctgcgacgc

SEQ ID NO: 450978 - DNA, 75 bp, synthetic construct
  source 1..75: mol_type = other DNA
tgacagcggcggctatatcccgcgcgggcagttcggcattgtcggtgaaaacgggccggaaattgtcaacggtcc

SEQ ID NO: 450979 - DNA, 75 bp, synthetic construct
  source 1..75: mol_type = other DNA
cagtgatccgtctgggattctctgtgctgggtatcaaaatgttaccttccgttacggcagcagtaacacgaacca

SEQ ID NO: 450980 - DNA, 75 bp, synthetic construct
  source 1..75: mol_type = other DNA
ctgacgggcacactgatgaaagcagcggctgttgtggctgcggttaccgtgggactcggcaccttagcgatggtg

SEQ ID NO: 450981 - DNA, 75 bp, synthetic construct
  source 1..75: mol_type = other DNA
agaatccgacatcaacaaggactcactttctgctcagtggttgctggttaaaaccggagcgcagaacaccttcag

SEQ ID NO: 450982 - DNA, 75 bp, synthetic construct
  source 1..75: mol_type = other DNA
tcgttgggtggaagctaacccggaactgacgggcacactgatgaaagtagcggctgtggtggctgcggttaccgt

SEQ ID NO: 450983 - DNA, 75 bp, synthetic construct
  source 1..75: mol_type = other DNA
gggcttgcttcatcgggccacgctgcggatttacttactgcgccgttgtcgtctttacgacactcggcatcactg

SEQ ID NO: 450984 - DNA, 75 bp, synthetic construct
  source 1..75: mol_type = other DNA
gatgctgcgcgttgctctgtatgccgtatctggtctgttaggtgctctgcttagtccgataggtcttgtggttac

SEQ ID NO: 450985 - DNA, 75 bp, synthetic construct
  source 1..75: mol_type = other DNA
tcaaagcagcggctggtcccatcagtgctgcattcgaaccgcttatgcccgtgtttcagtggattggcgacaaag

SEQ ID NO: 450986 - DNA, 75 bp, synthetic construct
  source 1..75: mol_type = other DNA
atgattcacctgttcaaaacctgcatgattaccaccttcattctggggttaatgtggtctgccccactccgggca

SEQ ID NO: 450987 - DNA, 75 bp, synthetic construct
  source 1..75: mol_type = other DNA
gttccgtaacacccgtaacggcgtaaaaggcttcccgaaacgcgaactgcacaccattaagctgccgctgccgac
